United States Patent Application Publication US 2026/0327608 A1, published October 22, 2026 (application 19/420,587).

The application's sequence listing, which the Patent Office published only in electronic form, follows.

SEQUENCE LISTING (19041 sequences)

SEQ ID NO: 1 - protein, 1368 aa, Streptococcus pyogenes [sequence omitted]

SEQ ID NO: 2 - DNA, 4107 bp, Streptococcus pyogenes
  source 1..4107: mol_type = other DNA
atggataagaaatactcaataggcttagatatcggcacaaatagcgtcggatgggcggtgatcactgatgaatataaggttccgtctaaaaagttcaaggttctgggaaatacagaccgccacagtatcaaaaaaaatcttataggggctcttttatttgacagtggagagacagcggaagcgactcgtctcaaacggacagctcgtagaaggtatacacgtcggaagaatcgtatttgttatctacaggagattttttcaaatgagatggcgaaagtagatgatagtttctttcatcgacttgaagagtcttttttggtggaagaagacaagaagcatgaacgtcatcctatttttggaaatatagtagatgaagttgcttatcatgagaaatatccaactatctatcatctgcgaaaaaaattggtagattctactgataaagcggatttgcgcttaatctatttggccttagcgcatatgattaagtttcgtggtcattttttgattgagggagatttaaatcctgataatagtgatgtggacaaactatttatccagttggtacaaacctacaatcaattatttgaagaaaaccctattaacgcaagtggagtagatgctaaagcgattctttctgcacgattgagtaaatcaagacgattagaaaatctcattgctcagctccccggtgagaagaaaaatggcttatttgggaatctcattgctttgtcattgggtttgacccctaattttaaatcaaattttgatttggcagaagatgctaaattacagctttcaaaagatacttacgatgatgatttagataatttattggcgcaaattggagatcaatatgctgatttgtttttggcagctaagaatttatcagatgctattttactttcagatatcctaagagtaaatactgaaataactaaggctcccctatcagcttcaatgattaaacgctacgatgaacatcatcaagacttgactcttttaaaagctttagttcgacaacaacttccagaaaagtataaagaaatcttttttgatcaatcaaaaaacggatatgcaggttatattgatgggggagctagccaagaagaattttataaatttatcaaaccaattttagaaaaaatggatggtactgaggaattattggtgaaactaaatcgtgaagatttgctgcgcaagcaacggacctttgacaacggctctattccccatcaaattcacttgggtgagctgcatgctattttgagaagacaagaagacttttatccatttttaaaagacaatcgtgagaagattgaaaaaatcttgacttttcgaattccttattatgttggtccattggcgcgtggcaatagtcgttttgcatggatgactcggaagtctgaagaaacaattaccccatggaattttgaagaagttgtcgataaaggtgcttcagctcaatcatttattgaacgcatgacaaactttgataaaaatcttccaaatgaaaaagtactaccaaaacatagtttgctttatgagtattttacggtttataacgaattgacaaaggtcaaatatgttactgaaggaatgcgaaaaccagcatttctttcaggtgaacagaagaaagccattgttgatttactcttcaaaacaaatcgaaaagtaaccgttaagcaattaaaagaagattatttcaaaaaaatagaatgttttgatagtgttgaaatttcaggagttgaagatagatttaatgcttcattaggtacctaccatgatttgctaaaaattattaaagataaagattttttggataatgaagaaaatgaagatatcttagaggatattgttttaacattgaccttatttgaagatagggagatgattgaggaaagacttaaaacatatgctcacctctttgatgataaggtgatgaaacagcttaaacgtcgccgttatactggttggggacgtttgtctcgaaaattgattaatggtattagggataagcaatctggcaaaacaatattagattttttgaaatcagatggttttgccaatcgcaattttatgcagctgatccatgatgatagtttgacatttaaagaagacattcaaaaagcacaagtgtctggacaaggcgatagtttacatgaacatattgcaaatttagctggtagccctgctattaaaaaaggtattttacagactgtaaaagttgttgatgaattggtcaaagtaatggggcggcataagccagaaaatatcgttattgaaatggcacgtgaaaatcagacaactcaaaagggccagaaaaattcgcgagagcgtatgaaacgaatcgaagaaggtatcaaagaattaggaagtcagattcttaaagagcatcctgttgaaaatactcaattgcaaaatgaaaagctctatctctattatctccaaaatggaagagacatgtatgtggaccaagaattagatattaatcgtttaagtgattatgatgtcgatcacattgttccacaaagtttccttaaagacgattcaatagacaataaggtcttaacgcgttctgataaaaatcgtggtaaatcggataacgttccaagtgaagaagtagtcaaaaagatgaaaaactattggagacaacttctaaacgccaagttaatcactcaacgtaagtttgataatttaacgaaagctgaacgtggaggtttgagtgaacttgataaagctggttttatcaaacgccaattggttgaaactcgccaaatcactaagcatgtggcacaaattttggatagtcgcatgaatactaaatacgatgaaaatgataaacttattcgagaggttaaagtgattaccttaaaatctaaattagtttctgacttccgaaaagatttccaattctataaagtacgtgagattaacaattaccatcatgcccatgatgcgtatctaaatgccgtcgttggaactgctttgattaagaaatatccaaaacttgaatcggagtttgtctatggtgattataaagtttatgatgttcgtaaaatgattgctaagtctgagcaagaaataggcaaagcaaccgcaaaatatttcttttactctaatatcatgaacttcttcaaaacagaaattacacttgcaaatggagagattcgcaaacgccctctaatcgaaactaatggggaaactggagaaattgtctgggataaagggcgagattttgccacagtgcgcaaagtattgtccatgccccaagtcaatattgtcaagaaaacagaagtacagacaggcggattctccaaggagtcaattttaccaaaaagaaattcggacaagcttattgctcgtaaaaaagactgggatccaaaaaaatatggtggttttgatagtccaacggtagcttattcagtcctagtggttgctaaggtggaaaaagggaaatcgaagaagttaaaatccgttaaagagttactagggatcacaattatggaaagaagttcctttgaaaaaaatccgattgactttttagaagctaaaggatataaggaagttaaaaaagacttaatcattaaactacctaaatatagtctttttgagttagaaaacggtcgtaaacggatgctggctagtgccggagaattacaaaaaggaaatgagctggctctgccaagcaaatatgtgaattttttatatttagctagtcattatgaaaagttgaagggtagtccagaagataacgaacaaaaacaattgtttgtggagcagcataagcattatttagatgagattattgagcaaatcagtgaattttctaagcgtgttattttagcagatgccaatttagataaagttcttagtgcatataacaaacatagagacaaaccaatacgtgaacaagcagaaaatattattcatttatttacgttgacgaatcttggagctcccgctgcttttaaatattttgatacaacaattgatcgtaaacgatatacgtctacaaaagaagttttagatgccactcttatccatcaatccatcactggtctttatgaaacacgcattgatttgagtcagctaggaggtgactga

SEQ ID NO: 3 - DNA, 4107 bp, Streptococcus pyogenes
  source 1..4107: mol_type = other DNA
atggacaagaagtactccattgggctcgctatcggcacaaacagcgtcggctgggccgtcattacggacgagtacaaggtgccgagcaaaaaattcaaagttctgggcaataccgatcgccacagcataaagaagaacctcattggcgccctcctgttcgactccggggagacggccgaagccacgcggctcaaaagaacagcacggcgcagatatacccgcagaaagaatcggatctgctacctgcaggagatctttagtaatgagatggctaaggtggatgactctttcttccataggctggaggagtcctttttggtggaggaggataaaaagcacgagcgccacccaatctttggcaatatcgtggacgaggtggcgtaccatgaaaagtacccaaccatatatcatctgaggaagaagcttgtagacagtactgataaggctgacttgcggttgatctatctcgcgctggcgcatatgatcaaatttcggggacacttcctcatcgagggggacctgaacccagacaacagcgatgtcgacaaactctttatccaactggttcagacttacaatcagcttttcgaagagaacccgatcaacgcatccggagttgacgccaaagcaatcctgagcgctaggctgtccaaatcccggcggctcgaaaacctcatcgcacagctccctggggagaagaagaacggcctgtttggtaatcttatcgccctgtcactcgggctgacccccaactttaaatctaacttcgacctggccgaagatgccaagcttcaactgagcaaagacacctacgatgatgatctcgacaatctgctggcccagatcggcgaccagtacgcagacctttttttggcggcaaagaacctgtcagacgccattctgctgagtgatattctgcgagtgaacacggagatcaccaaagctccgctgagcgctagtatgatcaagcgctatgatgagcaccaccaagacttgactttgctgaaggcccttgtcagacagcaactgcctgagaagtacaaggaaattttcttcgatcagtctaaaaatggctacgccggatacattgacggcggagcaagccaggaggaattttacaaatttattaagcccatcttggaaaaaatggacggcaccgaggagctgctggtaaagcttaacagagaagatctgttgcgcaaacagcgcactttcgacaatggaagcatcccccaccagattcacctgggcgaactgcacgctatcctcaggcggcaagaggatttctacccctttttgaaagataacagggaaaagattgagaaaatcctcacatttcggataccctactatgtaggccccctcgcccggggaaattccagattcgcgtggatgactcgcaaatcagaagagaccatcactccctggaacttcgaggaagtcgtggataagggggcctctgcccagtccttcatcgaaaggatgactaactttgataaaaatctgcctaacgaaaaggtgcttcctaaacactctctgctgtacgagtacttcacagtttataacgagctcaccaaggtcaaatacgtcacagaagggatgagaaagccagcattcctgtctggagagcagaagaaagctatcgtggacctcctcttcaagacgaaccggaaagttaccgtgaaacagctcaaagaagactatttcaaaaagattgaatgtttcgactctgttgaaatcagcggagtggaggatcgcttcaacgcatccctgggaacgtatcacgatctcctgaaaatcattaaagacaaggacttcctggacaatgaggagaacgaggacattcttgaggacattgtcctcacccttacgttgtttgaagatagggagatgattgaagaacgcttgaaaacttacgctcatctcttcgacgacaaagtcatgaaacagctcaagaggcgccgatatacaggatgggggcggctgtcaagaaaactgatcaatgggatccgagacaagcagagtggaaagacaatcctggattttcttaagtccgatggatttgccaaccggaacttcatgcagttgatccatgatgactctctcacctttaaggaggacatccagaaagcacaagtttctggccagggggacagtcttcacgagcacatcgctaatcttgcaggtagcccagctatcaaaaagggaatactgcagaccgttaaggtcgtggatgaactcgtcaaagtaatgggaaggcataagcccgagaatatcgttatcgagatggcccgagagaaccaaactacccagaagggacagaagaacagtagggaaaggatgaagaggattgaagagggtataaaagaactggggtcccaaatccttaaggaacacccagttgaaaacacccagcttcagaatgagaagctctacctgtactacctgcagaacggcagggacatgtacgtggatcaggaactggacatcaatcggctctccgactacgacgtggctgctatcgtgccccagtcttttctcaaagatgattctattgataataaagtgttgacaagatccgataaagctagagggaagagtgataacgtcccctcagaagaagttgtcaagaaaatgaaaaattattggcggcagctgctgaacgccaaactgatcacacaacggaagttcgataatctgactaaggctgaacgaggtggcctgtctgagttggataaagccggcttcatcaaaaggcagcttgttgagacacgccagatcaccaagcacgtggcccaaattctcgattcacgcatgaacaccaagtacgatgaaaatgacaaactgattcgagaggtgaaagttattactctgaagtctaagctggtctcagatttcagaaaggactttcagttttataaggtgagagagatcaacaattaccaccatgcgcatgatgcctacctgaatgcagtggtaggcactgcacttatcaaaaaatatcccaagcttgaatctgaatttgtttacggagactataaagtgtacgatgttaggaaaatgatcgcaaagtctgagcaggaaataggcaaggccaccgctaagtacttcttttacagcaatattatgaattttttcaagaccgagattacactggccaatggagagattcggaagcgaccacttatcgaaacaaacggagaaacaggagaaatcgtgtgggacaagggtagggatttcgcgacagtccggaaggtcctgtccatgccgcaggtgaacatcgttaaaaagaccgaagtacagaccggaggcttctccaaggaaagtatcctcccgaaaaggaacagcgacaagctgatcgcacgcaaaaaagattgggaccccaagaaatacggcggattcgattctcctacagtcgcttacagtgtactggttgtggccaaagtggagaaagggaagtctaaaaaactcaaaagcgtcaaggaactgctgggcatcacaatcatggagcgatcaagcttcgaaaaaaaccccatcgactttctcgaggcgaaaggatataaagaggtcaaaaaagacctcatcattaagcttcccaagtactctctctttgagcttgaaaacggccggaaacgaatgctcgctagtgcgggcgagctgcagaaaggtaacgagctggcactgccctctaaatacgttaatttcttgtatctggccagccactatgaaaagctcaaagggtctcccgaagataatgagcagaagcagctgttcgtggaacaacacaaacactaccttgatgagatcatcgagcaaataagcgaattctccaaaagagtgatcctcgccgacgctaacctcgataaggtgctttctgcttacaataagcacagggataagcccatcagggagcaggcagaaaacattatccacttgtttactctgaccaacttgggcgcgcctgcagccttcaagtacttcgacaccaccatagacagaaagcggtacacctctacaaaggaggtcctggacgccacactgattcatcagtcaattacggggctctatgaaacaagaatcgacctctctcagctcggtggagactaa

SEQ ID NO: 4 - DNA, 4140 bp, Streptococcus pyogenes
  source 1..4140: mol_type = other DNA
atggacaagaagtactccattgggctcgatatcggcacaaacagcgtcggctgggccgtcattacggacgagtacaaggtgccgagcaaaaaattcaaagttctgggcaataccgatcgccacagcataaagaagaacctcattggcgccctcctgttcgactccggggagacggccgaagccacgcggctcaaaagaacagcacggcgcagatatacccgcagaaagaatcggatctgctacctgcaggagatctttagtaatgagatggctaaggtggatgactctttcttccataggctggaggagtcctttttggtggaggaggataaaaagcacgagcgccacccaatctttggcaatatcgtggacgaggtggcgtaccatgaaaagtacccaaccatatatcatctgaggaagaagcttgtagacagtactgataaggctgacttgcggttgatctatctcgcgctggcgcatatgatcaaatttcggggacacttcctcatcgagggggacctgaacccagacaacagcgatgtcgacaaactctttatccaactggttcagacttacaatcagcttttcgaagagaacccgatcaacgcatccggagttgacgccaaagcaatcctgagcgctaggctgtccaaatcccggcggctcgaaaacctcatcgcacagctccctggggagaagaagaacggcctgtttggtaatcttatcgccctgtcactcgggctgacccccaactttaaatctaacttcgacctggccgaagatgccaagcttcaactgagcaaagacacctacgatgatgatctcgacaatctgctggcccagatcggcgaccagtacgcagacctttttttggcggcaaagaacctgtcagacgccattctgctgagtgatattctgcgagtgaacacggagatcaccaaagctccgctgagcgctagtatgatcaagcgctatgatgagcaccaccaagacttgactttgctgaaggcccttgtcagacagcaactgcctgagaagtacaaggaaattttcttcgatcagtctaaaaatggctacgccggatacattgacggcggagcaagccaggaggaattttacaaatttattaagcccatcttggaaaaaatggacggcaccgaggagctgctggtaaagcttaacagagaagatctgttgcgcaaacagcgcactttcgacaatggaagcatcccccaccagattcacctgggcgaactgcacgctatcctcaggcggcaagaggatttctacccctttttgaaagataacagggaaaagattgagaaaatcctcacatttcggataccctactatgtaggccccctcgcccggggaaattccagattcgcgtggatgactcgcaaatcagaagagaccatcactccctggaacttcgaggaagtcgtggataagggggcctctgcccagtccttcatcgaaaggatgactaactttgataaaaatctgcctaacgaaaaggtgcttcctaaacactctctgctgtacgagtacttcacagtttataacgagctcaccaaggtcaaatacgtcacagaagggatgagaaagccagcattcctgtctggagagcagaagaaagctatcgtggacctcctcttcaagacgaaccggaaagttaccgtgaaacagctcaaagaagactatttcaaaaagattgaatgtttcgactctgttgaaatcagcggagtggaggatcgcttcaacgcatccctgggaacgtatcacgatctcctgaaaatcattaaagacaaggacttcctggacaatgaggagaacgaggacattcttgaggacattgtcctcacccttacgttgtttgaagatagggagatgattgaagaacgcttgaaaacttacgctcatctcttcgacgacaaagtcatgaaacagctcaagaggcgccgatatacaggatgggggcggctgtcaagaaaactgatcaatgggatccgagacaagcagagtggaaagacaatcctggattttcttaagtccgatggatttgccaaccggaacttcatgcagttgatccatgatgactctctcacctttaaggaggacatccagaaagcacaagtttctggccagggggacagtcttcacgagcacatcgctaatcttgcaggtagcccagctatcaaaaagggaatactgcagaccgttaaggtcgtggatgaactcgtcaaagtaatgggaaggcataagcccgagaatatcgttatcgagatggcccgagagaaccaaactacccagaagggacagaagaacagtagggaaaggatgaagaggattgaagagggtataaaagaactggggtcccaaatccttaaggaacacccagttgaaaacacccagcttcagaatgagaagctctacctgtactacctgcagaacggcagggacatgtacgtggatcaggaactggacatcaatcggctctccgactacgacgtggatcatatcgtgccccagtcttttctcaaagatgattctattgataataaagtgttgacaagatccgataaaaatagagggaagagtgataacgtcccctcagaagaagttgtcaagaaaatgaaaaattattggcggcagctgctgaacgccaaactgatcacacaacggaagttcgataatctgactaaggctgaacgaggtggcctgtctgagttggataaagccggcttcatcaaaaggcagcttgttgagacacgccagatcaccaagcacgtggcccaaattctcgattcacgcatgaacaccaagtacgatgaaaatgacaaactgattcgagaggtgaaagttattactctgaagtctaagctggtctcagatttcagaaaggactttcagttttataaggtgagagagatcaacaattaccaccatgcgcatgatgcctacctgaatgcagtggtaggcactgcacttatcaaaaaatatcccaagcttgaatctgaatttgtttacggagactataaagtgtacgatgttaggaaaatgatcgcaaagtctgagcaggaaataggcaaggccaccgctaagtacttcttttacagcaatattatgaattttttcaagaccgagattacactggccaatggagagattcggaagcgaccacttatcgaaacaaacggagaaacaggagaaatcgtgtgggacaagggtagggatttcgcgacagtccggaaggtcctgtccatgccgcaggtgaacatcgttaaaaagaccgaagtacagaccggaggcttctccaaggaaagtatcctcccgaaaaggaacagcgacaagctgatcgcacgcaaaaaagattgggaccccaagaaatacggcggattcgattctcctacagtcgcttacagtgtactggttgtggccaaagtggagaaagggaagtctaaaaaactcaaaagcgtcaaggaactgctgggcatcacaatcatggagcgatcaagcttcgaaaaaaaccccatcgactttctcgaggcgaaaggatataaagaggtcaaaaaagacctcatcattaagcttcccaagtactctctctttgagcttgaaaacggccggaaacgaatgctcgctagtgcgggcgagctgcagaaaggtaacgagctggcactgccctctaaatacgttaatttcttgtatctggccagccactatgaaaagctcaaagggtctcccgaagataatgagcagaagcagctgttcgtggaacaacacaaacactaccttgatgagatcatcgagcaaataagcgaattctccaaaagagtgatcctcgccgacgctaacctcgataaggtgctttctgcttacaataagcacagggataagcccatcagggagcaggcagaaaacattatccacttgtttactctgaccaacttgggcgcgcctgcagccttcaagtacttcgacaccaccatagacagaaagcggtacacctctacaaaggaggtcctggacgccacactgattcatcagtcaattacggggctctatgaaacaagaatcgacctctctcagctcggtggagacagcagggctgaccccaagaagaagaggaaggtgtga

SEQ ID NO: 5 - DNA, 4200 bp, Streptococcus pyogenes
  source 1..4200: mol_type = other DNA
atggacaagaagtactccattgggctcgatatcggcacaaacagcgtcggctgggccgtcattacggacgagtacaaggtgccgagcaaaaaattcaaagttctgggcaataccgatcgccacagcataaagaagaacctcattggcgccctcctgttcgactccggggagacggccgaagccacgcggctcaaaagaacagcacggcgcagatatacccgcagaaagaatcggatctgctacctgcaggagatctttagtaatgagatggctaaggtggatgactctttcttccataggctggaggagtcctttttggtggaggaggataaaaagcacgagcgccacccaatctttggcaatatcgtggacgaggtggcgtaccatgaaaagtacccaaccatatatcatctgaggaagaagcttgtagacagtactgataaggctgacttgcggttgatctatctcgcgctggcgcatatgatcaaatttcggggacacttcctcatcgagggggacctgaacccagacaacagcgatgtcgacaaactctttatccaactggttcagacttacaatcagcttttcgaagagaacccgatcaacgcatccggagttgacgccaaagcaatcctgagcgctaggctgtccaaatcccggcggctcgaaaacctcatcgcacagctccctggggagaagaagaacggcctgtttggtaatcttatcgccctgtcactcgggctgacccccaactttaaatctaacttcgacctggccgaagatgccaagcttcaactgagcaaagacacctacgatgatgatctcgacaatctgctggcccagatcggcgaccagtacgcagacctttttttggcggcaaagaacctgtcagacgccattctgctgagtgatattctgcgagtgaacacggagatcaccaaagctccgctgagcgctagtatgatcaagcgctatgatgagcaccaccaagacttgactttgctgaaggcccttgtcagacagcaactgcctgagaagtacaaggaaattttcttcgatcagtctaaaaatggctacgccggatacattgacggcggagcaagccaggaggaattttacaaatttattaagcccatcttggaaaaaatggacggcaccgaggagctgctggtaaagcttaacagagaagatctgttgcgcaaacagcgcactttcgacaatggaagcatcccccaccagattcacctgggcgaactgcacgctatcctcaggcggcaagaggatttctacccctttttgaaagataacagggaaaagattgagaaaatcctcacatttcggataccctactatgtaggccccctcgcccggggaaattccagattcgcgtggatgactcgcaaatcagaagagaccatcactccctggaacttcgaggaagtcgtggataagggggcctctgcccagtccttcatcgaaaggatgactaactttgataaaaatctgcctaacgaaaaggtgcttcctaaacactctctgctgtacgagtacttcacagtttataacgagctcaccaaggtcaaatacgtcacagaagggatgagaaagccagcattcctgtctggagagcagaagaaagctatcgtggacctcctcttcaagacgaaccggaaagttaccgtgaaacagctcaaagaagactatttcaaaaagattgaatgtttcgactctgttgaaatcagcggagtggaggatcgcttcaacgcatccctgggaacgtatcacgatctcctgaaaatcattaaagacaaggacttcctggacaatgaggagaacgaggacattcttgaggacattgtcctcacccttacgttgtttgaagatagggagatgattgaagaacgcttgaaaacttacgctcatctcttcgacgacaaagtcatgaaacagctcaagaggcgccgatatacaggatgggggcggctgtcaagaaaactgatcaatgggatccgagacaagcagagtggaaagacaatcctggattttcttaagtccgatggatttgccaaccggaacttcatgcagttgatccatgatgactctctcacctttaaggaggacatccagaaagcacaagtttctggccagggggacagtcttcacgagcacatcgctaatcttgcaggtagcccagctatcaaaaagggaatactgcagaccgttaaggtcgtggatgaactcgtcaaagtaatgggaaggcataagcccgagaatatcgttatcgagatggcccgagagaaccaaactacccagaagggacagaagaacagtagggaaaggatgaagaggattgaagagggtataaaagaactggggtcccaaatccttaaggaacacccagttgaaaacacccagcttcagaatgagaagctctacctgtactacctgcagaacggcagggacatgtacgtggatcaggaactggacatcaatcggctctccgactacgacgtggatcatatcgtgccccagtcttttctcaaagatgattctattgataataaagtgttgacaagatccgataaaaatagagggaagagtgataacgtcccctcagaagaagttgtcaagaaaatgaaaaattattggcggcagctgctgaacgccaaactgatcacacaacggaagttcgataatctgactaaggctgaacgaggtggcctgtctgagttggataaagccggcttcatcaaaaggcagcttgttgagacacgccagatcaccaagcacgtggcccaaattctcgattcacgcatgaacaccaagtacgatgaaaatgacaaactgattcgagaggtgaaagttattactctgaagtctaagctggtctcagatttcagaaaggactttcagttttataaggtgagagagatcaacaattaccaccatgcgcatgatgcctacctgaatgcagtggtaggcactgcacttatcaaaaaatatcccaagcttgaatctgaatttgtttacggagactataaagtgtacgatgttaggaaaatgatcgcaaagtctgagcaggaaataggcaaggccaccgctaagtacttcttttacagcaatattatgaattttttcaagaccgagattacactggccaatggagagattcggaagcgaccacttatcgaaacaaacggagaaacaggagaaatcgtgtgggacaagggtagggatttcgcgacagtccggaaggtcctgtccatgccgcaggtgaacatcgttaaaaagaccgaagtacagaccggaggcttctccaaggaaagtatcctcccgaaaaggaacagcgacaagctgatcgcacgcaaaaaagattgggaccccaagaaatacggcggattcgattctcctacagtcgcttacagtgtactggttgtggccaaagtggagaaagggaagtctaaaaaactcaaaagcgtcaaggaactgctgggcatcacaatcatggagcgatcaagcttcgaaaaaaaccccatcgactttctcgaggcgaaaggatataaagaggtcaaaaaagacctcatcattaagcttcccaagtactctctctttgagcttgaaaacggccggaaacgaatgctcgctagtgcgggcgagctgcagaaaggtaacgagctggcactgccctctaaatacgttaatttcttgtatctggccagccactatgaaaagctcaaagggtctcccgaagataatgagcagaagcagctgttcgtggaacaacacaaacactaccttgatgagatcatcgagcaaataagcgaattctccaaaagagtgatcctcgccgacgctaacctcgataaggtgctttctgcttacaataagcacagggataagcccatcagggagcaggcagaaaacattatccacttgtttactctgaccaacttgggcgcgcctgcagccttcaagtacttcgacaccaccatagacagaaagcggtacacctctacaaaggaggtcctggacgccacactgattcatcagtcaattacggggctctatgaaacaagaatcgacctctctcagctcggtggagacgcggccgcagatccaaaaaagaagagaaaggtagatccaaaaaagaagagaaaggtagatccaaaaaagaagagaaaggtagatacggccgcatag

SEQ ID NO: 6 - DNA, 4326 bp, Streptococcus pyogenes
  source 1..4326: mol_type = other DNA
atggacaagaagtactccattgggctcgctatcggcacaaacagcgtcggctgggccgtcattacggacgagtacaaggtgccgagcaaaaaattcaaagttctgggcaataccgatcgccacagcataaagaagaacctcattggcgccctcctgttcgactccggggagacggccgaagccacgcggctcaaaagaacagcacggcgcagatatacccgcagaaagaatcggatctgctacctgcaggagatctttagtaatgagatggctaaggtggatgactctttcttccataggctggaggagtcctttttggtggaggaggataaaaagcacgagcgccacccaatctttggcaatatcgtggacgaggtggcgtaccatgaaaagtacccaaccatatatcatctgaggaagaagcttgtagacagtactgataaggctgacttgcggttgatctatctcgcgctggcgcatatgatcaaatttcggggacacttcctcatcgagggggacctgaacccagacaacagcgatgtcgacaaactctttatccaactggttcagacttacaatcagcttttcgaagagaacccgatcaacgcatccggagttgacgccaaagcaatcctgagcgctaggctgtccaaatcccggcggctcgaaaacctcatcgcacagctccctggggagaagaagaacggcctgtttggtaatcttatcgccctgtcactcgggctgacccccaactttaaatctaacttcgacctggccgaagatgccaagcttcaactgagcaaagacacctacgatgatgatctcgacaatctgctggcccagatcggcgaccagtacgcagacctttttttggcggcaaagaacctgtcagacgccattctgctgagtgatattctgcgagtgaacacggagatcaccaaagctccgctgagcgctagtatgatcaagcgctatgatgagcaccaccaagacttgactttgctgaaggcccttgtcagacagcaactgcctgagaagtacaaggaaattttcttcgatcagtctaaaaatggctacgccggatacattgacggcggagcaagccaggaggaattttacaaatttattaagcccatcttggaaaaaatggacggcaccgaggagctgctggtaaagcttaacagagaagatctgttgcgcaaacagcgcactttcgacaatggaagcatcccccaccagattcacctgggcgaactgcacgctatcctcaggcggcaagaggatttctacccctttttgaaagataacagggaaaagattgagaaaatcctcacatttcggataccctactatgtaggccccctcgcccggggaaattccagattcgcgtggatgactcgcaaatcagaagagaccatcactccctggaacttcgaggaagtcgtggataagggggcctctgcccagtccttcatcgaaaggatgactaactttgataaaaatctgcctaacgaaaaggtgcttcctaaacactctctgctgtacgagtacttcacagtttataacgagctcaccaaggtcaaatacgtcacagaagggatgagaaagccagcattcctgtctggagagcagaagaaagctatcgtggacctcctcttcaagacgaaccggaaagttaccgtgaaacagctcaaagaagactatttcaaaaagattgaatgtttcgactctgttgaaatcagcggagtggaggatcgcttcaacgcatccctgggaacgtatcacgatctcctgaaaatcattaaagacaaggacttcctggacaatgaggagaacgaggacattcttgaggacattgtcctcacccttacgttgtttgaagatagggagatgattgaagaacgcttgaaaacttacgctcatctcttcgacgacaaagtcatgaaacagctcaagaggcgccgatatacaggatgggggcggctgtcaagaaaactgatcaatgggatccgagacaagcagagtggaaagacaatcctggattttcttaagtccgatggatttgccaaccggaacttcatgcagttgatccatgatgactctctcacctttaaggaggacatccagaaagcacaagtttctggccagggggacagtcttcacgagcacatcgctaatcttgcaggtagcccagctatcaaaaagggaatactgcagaccgttaaggtcgtggatgaactcgtcaaagtaatgggaaggcataagcccgagaatatcgttatcgagatggcccgagagaaccaaactacccagaagggacagaagaacagtagggaaaggatgaagaggattgaagagggtataaaagaactggggtcccaaatccttaaggaacacccagttgaaaacacccagcttcagaatgagaagctctacctgtactacctgcagaacggcagggacatgtacgtggatcaggaactggacatcaatcggctctccgactacgacgtggctgctatcgtgccccagtcttttctcaaagatgattctattgataataaagtgttgacaagatccgataaagctagagggaagagtgataacgtcccctcagaagaagttgtcaagaaaatgaaaaattattggcggcagctgctgaacgccaaactgatcacacaacggaagttcgataatctgactaaggctgaacgaggtggcctgtctgagttggataaagccggcttcatcaaaaggcagcttgttgagacacgccagatcaccaagcacgtggcccaaattctcgattcacgcatgaacaccaagtacgatgaaaatgacaaactgattcgagaggtgaaagttattactctgaagtctaagctggtctcagatttcagaaaggactttcagttttataaggtgagagagatcaacaattaccaccatgcgcatgatgcctacctgaatgcagtggtaggcactgcacttatcaaaaaatatcccaagcttgaatctgaatttgtttacggagactataaagtgtacgatgttaggaaaatgatcgcaaagtctgagcaggaaataggcaaggccaccgctaagtacttcttttacagcaatattatgaattttttcaagaccgagattacactggccaatggagagattcggaagcgaccacttatcgaaacaaacggagaaacaggagaaatcgtgtgggacaagggtagggatttcgcgacagtccggaaggtcctgtccatgccgcaggtgaacatcgttaaaaagaccgaagtacagaccggaggcttctccaaggaaagtatcctcccgaaaaggaacagcgacaagctgatcgcacgcaaaaaagattgggaccccaagaaatacggcggattcgattctcctacagtcgcttacagtgtactggttgtggccaaagtggagaaagggaagtctaaaaaactcaaaagcgtcaaggaactgctgggcatcacaatcatggagcgatcaagcttcgaaaaaaaccccatcgactttctcgaggcgaaaggatataaagaggtcaaaaaagacctcatcattaagcttcccaagtactctctctttgagcttgaaaacggccggaaacgaatgctcgctagtgcgggcgagctgcagaaaggtaacgagctggcactgccctctaaatacgttaatttcttgtatctggccagccactatgaaaagctcaaagggtctcccgaagataatgagcagaagcagctgttcgtggaacaacacaaacactaccttgatgagatcatcgagcaaataagcgaattctccaaaagagtgatcctcgccgacgctaacctcgataaggtgctttctgcttacaataagcacagggataagcccatcagggagcaggcagaaaacattatccacttgtttactctgaccaacttgggcgcgcctgcagccttcaagtacttcgacaccaccatagacagaaagcggtacacctctacaaaggaggtcctggacgccacactgattcatcagtcaattacggggctctatgaaacaagaatcgacctctctcagctcggtggagacagcagggctgaccccaagaagaagaggaaggtggaggccagcggttccggacgggctgacgcattggacgattttgatctggatatgctgggaagtgacgccctcgatgattttgaccttgacatgcttggttcggatgcccttgatgactttgacctcgacatgctcggcagtgacgcccttgatgatttcgacctggacatgctgattaactctagatga

SEQ ID NO: 7 - DNA, 4359 bp, Streptococcus pyogenes
  source 1..4359: mol_type = other DNA
atgcccaagaagaagaggaaggtgggaagggggatggacaagaagtactccattgggctcgctatcggcacaaacagcgtcggctgggccgtcattacggacgagtacaaggtgccgagcaaaaaattcaaagttctgggcaataccgatcgccacagcataaagaagaacctcattggcgccctcctgttcgactccggggagacggccgaagccacgcggctcaaaagaacagcacggcgcagatatacccgcagaaagaatcggatctgctacctgcaggagatctttagtaatgagatggctaaggtggatgactctttcttccataggctggaggagtcctttttggtggaggaggataaaaagcacgagcgccacccaatctttggcaatatcgtggacgaggtggcgtaccatgaaaagtacccaaccatatatcatctgaggaagaagcttgtagacagtactgataaggctgacttgcggttgatctatctcgcgctggcgcatatgatcaaatttcggggacacttcctcatcgagggggacctgaacccagacaacagcgatgtcgacaaactctttatccaactggttcagacttacaatcagcttttcgaagagaacccgatcaacgcatccggagttgacgccaaagcaatcctgagcgctaggctgtccaaatcccggcggctcgaaaacctcatcgcacagctccctggggagaagaagaacggcctgtttggtaatcttatcgccctgtcactcgggctgacccccaactttaaatctaacttcgacctggccgaagatgccaagcttcaactgagcaaagacacctacgatgatgatctcgacaatctgctggcccagatcggcgaccagtacgcagacctttttttggcggcaaagaacctgtcagacgccattctgctgagtgatattctgcgagtgaacacggagatcaccaaagctccgctgagcgctagtatgatcaagcgctatgatgagcaccaccaagacttgactttgctgaaggcccttgtcagacagcaactgcctgagaagtacaaggaaattttcttcgatcagtctaaaaatggctacgccggatacattgacggcggagcaagccaggaggaattttacaaatttattaagcccatcttggaaaaaatggacggcaccgaggagctgctggtaaagcttaacagagaagatctgttgcgcaaacagcgcactttcgacaatggaagcatcccccaccagattcacctgggcgaactgcacgctatcctcaggcggcaagaggatttctacccctttttgaaagataacagggaaaagattgagaaaatcctcacatttcggataccctactatgtaggccccctcgcccggggaaattccagattcgcgtggatgactcgcaaatcagaagagaccatcactccctggaacttcgaggaagtcgtggataagggggcctctgcccagtccttcatcgaaaggatgactaactttgataaaaatctgcctaacgaaaaggtgcttcctaaacactctctgctgtacgagtacttcacagtttataacgagctcaccaaggtcaaatacgtcacagaagggatgagaaagccagcattcctgtctggagagcagaagaaagctatcgtggacctcctcttcaagacgaaccggaaagttaccgtgaaacagctcaaagaagactatttcaaaaagattgaatgtttcgactctgttgaaatcagcggagtggaggatcgcttcaacgcatccctgggaacgtatcacgatctcctgaaaatcattaaagacaaggacttcctggacaatgaggagaacgaggacattcttgaggacattgtcctcacccttacgttgtttgaagatagggagatgattgaagaacgcttgaaaacttacgctcatctcttcgacgacaaagtcatgaaacagctcaagaggcgccgatatacaggatgggggcggctgtcaagaaaactgatcaatgggatccgagacaagcagagtggaaagacaatcctggattttcttaagtccgatggatttgccaaccggaacttcatgcagttgatccatgatgactctctcacctttaaggaggacatccagaaagcacaagtttctggccagggggacagtcttcacgagcacatcgctaatcttgcaggtagcccagctatcaaaaagggaatactgcagaccgttaaggtcgtggatgaactcgtcaaagtaatgggaaggcataagcccgagaatatcgttatcgagatggcccgagagaaccaaactacccagaagggacagaagaacagtagggaaaggatgaagaggattgaagagggtataaaagaactggggtcccaaatccttaaggaacacccagttgaaaacacccagcttcagaatgagaagctctacctgtactacctgcagaacggcagggacatgtacgtggatcaggaactggacatcaatcggctctccgactacgacgtggctgctatcgtgccccagtcttttctcaaagatgattctattgataataaagtgttgacaagatccgataaagctagagggaagagtgataacgtcccctcagaagaagttgtcaagaaaatgaaaaattattggcggcagctgctgaacgccaaactgatcacacaacggaagttcgataatctgactaaggctgaacgaggtggcctgtctgagttggataaagccggcttcatcaaaaggcagcttgttgagacacgccagatcaccaagcacgtggcccaaattctcgattcacgcatgaacaccaagtacgatgaaaatgacaaactgattcgagaggtgaaagttattactctgaagtctaagctggtctcagatttcagaaaggactttcagttttataaggtgagagagatcaacaattaccaccatgcgcatgatgcctacctgaatgcagtggtaggcactgcacttatcaaaaaatatcccaagcttgaatctgaatttgtttacggagactataaagtgtacgatgttaggaaaatgatcgcaaagtctgagcaggaaataggcaaggccaccgctaagtacttcttttacagcaatattatgaattttttcaagaccgagattacactggccaatggagagattcggaagcgaccacttatcgaaacaaacggagaaacaggagaaatcgtgtgggacaagggtagggatttcgcgacagtccggaaggtcctgtccatgccgcaggtgaacatcgttaaaaagaccgaagtacagaccggaggcttctccaaggaaagtatcctcccgaaaaggaacagcgacaagctgatcgcacgcaaaaaagattgggaccccaagaaatacggcggattcgattctcctacagtcgcttacagtgtactggttgtggccaaagtggagaaagggaagtctaaaaaactcaaaagcgtcaaggaactgctgggcatcacaatcatggagcgatcaagcttcgaaaaaaaccccatcgactttctcgaggcgaaaggatataaagaggtcaaaaaagacctcatcattaagcttcccaagtactctctctttgagcttgaaaacggccggaaacgaatgctcgctagtgcgggcgagctgcagaaaggtaacgagctggcactgccctctaaatacgttaatttcttgtatctggccagccactatgaaaagctcaaagggtctcccgaagataatgagcagaagcagctgttcgtggaacaacacaaacactaccttgatgagatcatcgagcaaataagcgaattctccaaaagagtgatcctcgccgacgctaacctcgataaggtgctttctgcttacaataagcacagggataagcccatcagggagcaggcagaaaacattatccacttgtttactctgaccaacttgggcgcgcctgcagccttcaagtacttcgacaccaccatagacagaaagcggtacacctctacaaaggaggtcctggacgccacactgattcatcagtcaattacggggctctatgaaacaagaatcgacctctctcagctcggtggagacagcagggctgaccccaagaagaagaggaaggtggaggccagcggttccggacgggctgacgcattggacgattttgatctggatatgctgggaagtgacgccctcgatgattttgaccttgacatgcttggttcggatgcccttgatgactttgacctcgacatgctcggcagtgacgcccttgatgatttcgacctggacatgctgattaactctagatga

SEQ ID NO: 8 - protein, 1409 aa, Streptococcus thermophilus
MLFNKCIIISINLDFSNKEKCMTKPYSIGLDIGTNSVGWAVITDNYKVPSKKMKVLGNTSKKYIKKNLLGVLLFDSGITAEGRRLKRTARRRYTRRRNRILYLQEIFSTEMATLDDAFFQRLDDSFLVPDDKRDSKYPIFGNLVEEKVYHDEFPTIYHLRKYLADSTKKADLRLVYLALAHMIKYRGHFLIEGEFNSKNNDIQKNFQDFLDTYNAIFESDLSLENSKQLEEIVKDKISKLEKKDRILKLFPGEKNSGIFSEFLKLIVGNQADFRKCFNLDEKASLHFSKESYDEDLETLLGYIGDDYSDVFLKAKKLYDAILLSGFLTVTDNETEAPLSSAMIKRYNEHKEDLALLKEYIRNISLKTYNEVFKDDTKNGYAGYIDGKTNQEDFYVYLKNLLAEFEGADYFLEKIDREDFLRKQRTFDNGSIPYQIHLQEMRAILDKQAKFYPFLAKNKERIEKILTFRIPYYVGPLARGNSDFAWSIRKRNEKITPWNFEDVIDKESSAEAFINRMTSFDLYLPEEKVLPKHSLLYETFNVYNELTKVRFIAESMRDYQFLDSKQKKDIVRLYFKDKRKVTDKDIIEYLHAIYGYDGIELKGIEKQFNSSLSTYHDLLNIINDKEFLDDSSNEAIIEEIIHTLTIFEDREMIKQRLSKFENIFDKSVLKKLSRRHYTGWGKLSAKLINGIRDEKSGNTILDYLIDDGISNRNFMQLIHDDALSFKKKIQKAQIIGDEDKGNIKEVVKSLPGSPAIKKGILQSIKIVDELVKVMGGRKPESIVVEMARENQYTNQGKSNSQQRLKRLEKSLKELGSKILKENIPAKLSKIDNNALQNDRLYLYYLQNGKDMYTGDDLDIDRLSNYDIDHIIPQAFLKDNSIDNKVLVSSASNRGKSDDFPSLEVVKKRKTFWYQLLKSKLISQRKFDNLTKAERGGLLPEDKAGFIQRQLVETRQITKHVARLLDEKFNNKKDENNRAVRTVKIITLKSTLVSQFRKDFELYKVREINDFHHAHDAYLNAVIASALLKKYPKLEPEFVYGDYPKYNSFRERKSATEKVYFYSNIMNIFKKSISLADGRVIERPLIEVNEETGESVWNKESDLATVRRVLSYPQVNVVKKVEEQNHGLDRGKPKGLFNANLSSKPKPNSNENLVGAKEYLDPKKYGGYAGISNSFAVLVKGTIEKGAKKKITNVLEFQGISILDRINYRKDKLNFLLEKGYKDIELIIELPKYSLFELSDGSRRMLASILSTNNKRGEIHKGNQIFLSQKFVKLLYHAKRISNTINENHRKYVENHKKEFEELFYYILEFNENYVGAKKNGKLLNSAFQSWQNHSIDELCSSFIGPTGSERKGLFELTSRGSAADFEFLGVKIPRYRDYTPSSLLKDATLIHQSVTGLYETRIDLAKLGEG

SEQ ID NO: 9 - DNA, 4167 bp, Streptococcus thermophilus
  source 1..4167: mol_type = other DNA
atgactaagccatactcaattggacttgatattggaacgaatagtgttggatgggctgtaataactgataattacaaggttccgtctaaaaaaatgaaagtcttaggaaatacgagtaaaaagtatatcaaaaagaacctgttaggtgtattactctttgactctggaatcacagcagaaggaagaagattgaagcgtactgcaagaagacgttatactagacgccgtaatcgtatcctttatttgcaggaaatttttagcacggagatggctacattagatgatgctttctttcaaagacttgacgattcgtttttagttcctgatgataaacgtgatagtaagtatccgatatttggaaacttagtagaagaaaaagtctatcatgatgaatttccaactatctatcatttaaggaaatatttagcagatagtactaaaaaagcagatttgcgtctagtttatcttgcattggctcatatgattaaatatagaggtcacttcttaattgaaggagagtttaattcaaaaaataatgatattcagaagaattttcaagactttttggacacttataatgctatttttgaatcggatttatcacttgagaatagtaaacaacttgaggaaattgttaaagataagattagtaaattagaaaagaaagatcgtattttaaaactcttccctggggagaagaattcggggattttttcagagtttctaaagttgattgtaggaaatcaagctgattttaggaaatgttttaatttagacgaaaaagcctccttacatttttccaaagaaagctatgatgaagatttagagactttgttaggttatattggagatgattacagtgatgtctttctcaaagcaaagaaactttatgatgctattcttttatcgggttttctgactgtaactgataatgagacagaagcacctctctcttctgctatgataaagcgatataatgaacacaaagaagatttagcgttactaaaggaatatataagaaatatttcactaaaaacgtataatgaagtatttaaagatgacaccaaaaatggttatgctggttatattgatggaaaaacaaatcaggaagatttctacgtatatctaaaaaacctattggctgaatttgaaggtgcggattattttcttgaaaaaattgatcgagaagattttttgagaaagcaacgtacatttgacaatggttcgataccatatcagattcatcttcaagaaatgagagcaattcttgataagcaagctaaattttatcctttcttggctaaaaataaagaaagaatcgagaagattttaaccttccgaattccttattatgtaggtccacttgcgagagggaatagtgattttgcctggtcaataagaaaacgaaatgaaaaaattacaccttggaattttgaggacgttattgacaaagaatcttcggcagaggctttcattaatcgaatgactagttttgatttgtatttgccagaagagaaggtacttccaaagcatagtctcttatacgaaacttttaatgtatataatgaattaacaaaagttagatttattgccgaaagtatgagagattatcaatttttagatagtaagcagaagaaagatattgttagactttattttaaagataaaaggaaagttactgataaggatattattgaatatttacatgcaatttatgggtatgatggaattgaattaaaaggcatagagaaacagtttaattctagtttatctacttatcacgatcttttaaatattattaatgataaagagtttttggatgatagttcaaatgaagcgattatcgaagaaattatccatactttgacaatttttgaagatagagagatgataaaacaacgtctttcaaaatttgagaatatattcgataaatccgttttgaaaaagttatctcgtagacattacactggctggggtaagttatctgctaagcttattaatggtattcgagatgaaaaatctggtaatactattcttgattacttaattgatgatggtatttctaaccgtaatttcatgcaacttattcacgatgatgctctttcttttaaaaagaagatacagaaagcacaaattattggtgacgaagataaaggtaatattaaagaggtcgttaagtctttgccaggtagtcctgcgattaaaaaaggtattttacaaagcataaaaattgtagatgaattggtcaaagtaatgggaggaagaaaacccgagtcaattgttgttgagatggctcgtgaaaatcaatataccaatcaaggtaagtctaattcccaacaacgcttgaaacgtttagaaaaatctctcaaagagttaggtagtaagatacttaaggaaaatattcctgcaaaactttctaaaatagacaataacgcacttcaaaatgatcgactttacttatactatcttcaaaatggaaaagatatgtataccggagatgatttagatattgatagattaagtaattatgatattgatcatattattcctcaagcttttttgaaagataattctattgacaataaagtacttgtttcatctgctagtaaccgtggtaaatcagatgattttccaagtttagaggttgtcaaaaaaagaaagacattttggtatcaattattgaaatcaaaattaatttctcaacgaaaatttgataatctgacaaaagctgaacggggaggattgttacctgaggacaaagctggttttattcaacgccagttggttgaaacacgtcaaataacaaaacatgtagctcgtttacttgatgagaaatttaataataaaaaagatgaaaataatagagcggtacgaacagtaaaaattattaccttgaaatctaccttagtttctcaatttcgtaaggattttgaactttataaagttcgtgaaatcaatgattttcatcatgctcatgatgcttacttgaatgccgttatagcaagtgctttacttaagaaataccctaaactagagccagaatttgtgtacggtgattatccaaaatacaatagttttagagaaagaaagtccgctacagaaaaggtatatttctattcaaatatcatgaatatctttaaaaaatctatttctttagctgatggtagagttattgaaagaccacttattgaggtaaatgaggagaccggcgaatccgtttggaataaagaatctgatttagcaactgtaaggagagtactctcttatccgcaagtaaatgttgtgaaaaaagttgaggaacagaatcacggattggatagaggaaaaccaaagggattgtttaatgcaaatctttcctcaaagccaaaaccaaatagtaatgaaaatttagtaggtgctaaagagtatcttgaccccaaaaagtatggggggtatgctggaatttctaattcttttgctgttcttgttaaagggacaattgaaaaaggtgctaagaaaaaaataacaaatgtactagaatttcaaggtatttctattttagataggattaattatagaaaagataaacttaattttttacttgaaaaaggttataaagatattgagttaattattgaactacctaaatatagtttatttgaactttcagatggttcacgtcgtatgttggctagtattttgtcaacgaataataagaggggagagattcacaaaggaaatcagatttttctttcacagaagtttgtgaaattactttatcatgctaagagaataagtaacacaattaatgagaatcatagaaaatatgttgagaaccataaaaaagagtttgaagaattattttactacattcttgagtttaatgagaattatgttggagctaaaaagaatggtaaacttttaaactctgcctttcaatcttggcaaaatcatagtatagatgaactctgtagtagttttataggacctaccggaagtgaaagaaaggggctatttgaattaacctctcgtggaagtgctgctgattttgaatttttaggtgttaaaattccaaggtatagagactataccccatcatccctattaaaagatgccacacttattcatcaatctgttacaggcctctatgaaacacgaatagaccttgccaaactaggagagggttaa

SEQ ID NO: 10 - DNA, 3366 bp, Streptococcus thermophilus
  source 1..3366: mol_type = other DNA
atgagcgacctggtgctgggcctggacatcggcatcggcagcgtgggcgtgggcatcctgaacaaggtgaccggcgagatcatccacaagaacagtcgcatcttccctgctgctcaggctgagaacaacctggtgcgccgcaccaaccgccagggtcgccggcttgctcgccgcaagaagcaccggcgcgtgcgcctgaaccgcctgttcgaggagagcggcctgatcaccgacttcaccaagatcagcatcaacctgaacccctaccagctgcgcgtgaagggcctgaccgacgagctgagcaacgaggagctgttcatcgccctgaagaacatggtgaagcaccgcggcatcagctacctggacgacgccagcgacgacggcaacagcagcgtgggcgactacgcccagatcgtgaaggagaacagcaagcagctggagaccaagacccccggccagatccagctggagcgctaccagacctacggccagctgcgcggcgacttcaccgtggagaaggacggcaagaagcaccgcctgatcaacgtgttccccaccagcgcctaccgcagcgaggccctgcgcatcctgcagacccagcaggagttcaacccccagatcaccgacgagttcatcaaccgctacctggagatcctgaccggcaagcgcaagtactaccacggccccggcaacgagaagagccgcaccgactacggccgctaccgcaccagcggcgagaccctggacaacatcttcggcatcctgatcggcaagtgcaccttctaccccgacgagttccgcgccgccaaggccagctacaccgcccaggagttcaacctgctgaacgacctgaacaacctgaccgtgcccaccgagaccaagaagctgagcaaggagcagaagaaccagatcatcaactacgtgaagaacgagaaggccatgggccccgccaagctgttcaagtacatcgccaagctgctgagctgcgacgtggccgacatcaagggctaccgcatcgacaagagcggcaaggccgagatccacaccttcgaggcctaccgcaagatgaagaccctggagaccctggacatcgagcagatggaccgcgagaccctggacaagctggcctacgtgctgaccctgaacaccgagcgcgagggcatccaggaggccctggagcacgagttcgccgacggcagcttcagccagaagcaggtggacgagctggtgcagttccgcaaggccaacagcagcatcttcggcaagggctggcacaacttcagcgtgaagctgatgatggagctgatccccgagctgtacgagaccagcgaggagcagatgaccatcctgacccgcctgggcaagcagaagaccaccagcagcagcaacaagaccaagtacatcgacgagaagctgctgaccgaggagatctacaaccccgtggtggccaagagcgtgcgccaggccatcaagatcgtgaacgccgccatcaaggagtacggcgacttcgacaacatcgtgatcgagatggcccgcgagaccaacgaggacgacgagaagaaggccatccagaagatccagaaggccaacaaggacgagaaggacgccgccatgctgaaggccgccaaccagtacaacggcaaggccgagctgccccacagcgtgttccacggccacaagcagctggccaccaagatccgcctgtggcaccagcagggcgagcgctgcctgtacaccggcaagaccatcagcatccacgacctgatcaacaacagcaaccagttcgaggtggaccacatcctgcccctgagcatcaccttcgacgacagcctggccaacaaggtgctggtgtacgccaccgccaaccaggagaagggccagcgcaccccctaccaggccctggacagcatggacgacgcctggagcttccgcgagctgaaggccttcgtgcgcgagagcaagaccctgagcaacaagaagaaggagtacctgctgaccgaggaggacatcagcaagttcgacgtgcgcaagaagttcatcgagcgcaacctggtggacacccgctacgccagccgcgtggtgctgaacgccctgcaggagcacttccgcgcccacaagatcgacaccaaggtgagcgtggtgcgcggccagttcaccagccagctgcgccgccactggggcatcgagaagacccgcgacacctaccaccaccacgccgtggacgccctgatcattgcggcttctagccagctgaacctgtggaagaagcagaagaacaccctggtgagctacagcgaggaccagctgctggacatcgagaccggcgagctgatcagcgacgacgagtacaaggagagcgtgttcaaggccccctaccagcacttcgtggacaccctgaagagcaaggagttcgaggacagcatcctgttcagctaccaggtggacagcaagttcaaccgcaagatcagcgacgccaccatctacgccacccgccaggccaaggtgggcaaggacaaggccgacgagacctacgtgctgggcaagatcaaggacatctacacccaggacggctacgacgccttcatgaagatctacaagaaggacaagagcaagttcctgatgtaccgccacgacccccagaccttcgagaaggtgatcgagcccatcctggagaactaccccaacaagcagatcaacgataaaggcaaggaggtgccctgcaaccccttcctgaagtacaaggaggagcacggctacatccgcaagtacagcaagaagggcaacggccccgagatcaagagcctgaagtactacgacagcaagctgggcaaccacatcgacatcacccccaaggacagcaacaacaaggtggtgctgcagagcgtgagcccctggcgcgccgacgtgtacttcaacaagaccaccggcaagtacgagatcctgggcctgaagtacgccgacctgcagtttgataagggcaccggcacctacaagatcagccaggagaagtacaacgacatcaagaagaaggagggcgtggacagcgacagcgagttcaagttcaccctgtacaagaacgaccttctgctggtgaaggacaccgagaccaaggagcaacagctgttccgcttcctgagccgcaccatgcccaagcagaagcactacgtggagctgaagccctacgacaagcagaagttcgagggcggcgaggccctgatcaaggtgctgggcaacgtggccaacagcggccagtgcaagaagggcctgggcaagagcaacatcagcatctacaaggtgcgcaccgacgtgctgggcaaccagcacatcatcaagaacgagggcgacaagcccaagctggacttctaa

SEQ ID NO: 11 - DNA, 3366 bp, Streptococcus thermophilus
  source 1..3366: mol_type = other DNA
atgagcgacctggtgctgggcctggccatcggcatcggcagcgtgggcgtgggcatcctgaacaaggtgaccggcgagatcatccacaagaacagtcgcatcttccctgctgctcaggctgagaacaacctggtgcgccgcaccaaccgccagggtcgccggcttgctcgccgcaagaagcaccggcgcgtgcgcctgaaccgcctgttcgaggagagcggcctgatcaccgacttcaccaagatcagcatcaacctgaacccctaccagctgcgcgtgaagggcctgaccgacgagctgagcaacgaggagctgttcatcgccctgaagaacatggtgaagcaccgcggcatcagctacctggacgacgccagcgacgacggcaacagcagcgtgggcgactacgcccagatcgtgaaggagaacagcaagcagctggagaccaagacccccggccagatccagctggagcgctaccagacctacggccagctgcgcggcgacttcaccgtggagaaggacggcaagaagcaccgcctgatcaacgtgttccccaccagcgcctaccgcagcgaggccctgcgcatcctgcagacccagcaggagttcaacccccagatcaccgacgagttcatcaaccgctacctggagatcctgaccggcaagcgcaagtactaccacggccccggcaacgagaagagccgcaccgactacggccgctaccgcaccagcggcgagaccctggacaacatcttcggcatcctgatcggcaagtgcaccttctaccccgacgagttccgcgccgccaaggccagctacaccgcccaggagttcaacctgctgaacgacctgaacaacctgaccgtgcccaccgagaccaagaagctgagcaaggagcagaagaaccagatcatcaactacgtgaagaacgagaaggccatgggccccgccaagctgttcaagtacatcgccaagctgctgagctgcgacgtggccgacatcaagggctaccgcatcgacaagagcggcaaggccgagatccacaccttcgaggcctaccgcaagatgaagaccctggagaccctggacatcgagcagatggaccgcgagaccctggacaagctggcctacgtgctgaccctgaacaccgagcgcgagggcatccaggaggccctggagcacgagttcgccgacggcagcttcagccagaagcaggtggacgagctggtgcagttccgcaaggccaacagcagcatcttcggcaagggctggcacaacttcagcgtgaagctgatgatggagctgatccccgagctgtacgagaccagcgaggagcagatgaccatcctgacccgcctgggcaagcagaagaccaccagcagcagcaacaagaccaagtacatcgacgagaagctgctgaccgaggagatctacaaccccgtggtggccaagagcgtgcgccaggccatcaagatcgtgaacgccgccatcaaggagtacggcgacttcgacaacatcgtgatcgagatggcccgcgagaccaacgaggacgacgagaagaaggccatccagaagatccagaaggccaacaaggacgagaaggacgccgccatgctgaaggccgccaaccagtacaacggcaaggccgagctgccccacagcgtgttccacggccacaagcagctggccaccaagatccgcctgtggcaccagcagggcgagcgctgcctgtacaccggcaagaccatcagcatccacgacctgatcaacaacagcaaccagttcgaggtggctgccatcctgcccctgagcatcaccttcgacgacagcctggccaacaaggtgctggtgtacgccaccgccgctcaggagaagggccagcgcaccccctaccaggccctggacagcatggacgacgcctggagcttccgcgagctgaaggccttcgtgcgcgagagcaagaccctgagcaacaagaagaaggagtacctgctgaccgaggaggacatcagcaagttcgacgtgcgcaagaagttcatcgagcgcaacctggtggacacccgctacgccagccgcgtggtgctgaacgccctgcaggagcacttccgcgcccacaagatcgacaccaaggtgagcgtggtgcgcggccagttcaccagccagctgcgccgccactggggcatcgagaagacccgcgacacctaccaccaccacgccgtggacgccctgatcattgcggcttctagccagctgaacctgtggaagaagcagaagaacaccctggtgagctacagcgaggaccagctgctggacatcgagaccggcgagctgatcagcgacgacgagtacaaggagagcgtgttcaaggccccctaccagcacttcgtggacaccctgaagagcaaggagttcgaggacagcatcctgttcagctaccaggtggacagcaagttcaaccgcaagatcagcgacgccaccatctacgccacccgccaggccaaggtgggcaaggacaaggccgacgagacctacgtgctgggcaagatcaaggacatctacacccaggacggctacgacgccttcatgaagatctacaagaaggacaagagcaagttcctgatgtaccgccacgacccccagaccttcgagaaggtgatcgagcccatcctggagaactaccccaacaagcagatcaacgataaaggcaaggaggtgccctgcaaccccttcctgaagtacaaggaggagcacggctacatccgcaagtacagcaagaagggcaacggccccgagatcaagagcctgaagtactacgacagcaagctgggcaaccacatcgacatcacccccaaggacagcaacaacaaggtggtgctgcagagcgtgagcccctggcgcgccgacgtgtacttcaacaagaccaccggcaagtacgagatcctgggcctgaagtacgccgacctgcagtttgataagggcaccggcacctacaagatcagccaggagaagtacaacgacatcaagaagaaggagggcgtggacagcgacagcgagttcaagttcaccctgtacaagaacgaccttctgctggtgaaggacaccgagaccaaggagcaacagctgttccgcttcctgagccgcaccatgcccaagcagaagcactacgtggagctgaagccctacgacaagcagaagttcgagggcggcgaggccctgatcaaggtgctgggcaacgtggccaacagcggccagtgcaagaagggcctgggcaagagcaacatcagcatctacaaggtgcgcaccgacgtgctgggcaaccagcacatcatcaagaacgagggcgacaagcccaagctggacttctaa

SEQ ID NO: 12 - DNA, 3399 bp, Streptococcus thermophilus
  source 1..3399: mol_type = other DNA
atgagcgacctggtgctgggcctggacatcggcatcggcagcgtgggcgtgggcatcctgaacaaggtgaccggcgagatcatccacaagaacagtcgcatcttccctgctgctcaggctgagaacaacctggtgcgccgcaccaaccgccagggtcgccggcttgctcgccgcaagaagcaccggcgcgtgcgcctgaaccgcctgttcgaggagagcggcctgatcaccgacttcaccaagatcagcatcaacctgaacccctaccagctgcgcgtgaagggcctgaccgacgagctgagcaacgaggagctgttcatcgccctgaagaacatggtgaagcaccgcggcatcagctacctggacgacgccagcgacgacggcaacagcagcgtgggcgactacgcccagatcgtgaaggagaacagcaagcagctggagaccaagacccccggccagatccagctggagcgctaccagacctacggccagctgcgcggcgacttcaccgtggagaaggacggcaagaagcaccgcctgatcaacgtgttccccaccagcgcctaccgcagcgaggccctgcgcatcctgcagacccagcaggagttcaacccccagatcaccgacgagttcatcaaccgctacctggagatcctgaccggcaagcgcaagtactaccacggccccggcaacgagaagagccgcaccgactacggccgctaccgcaccagcggcgagaccctggacaacatcttcggcatcctgatcggcaagtgcaccttctaccccgacgagttccgcgccgccaaggccagctacaccgcccaggagttcaacctgctgaacgacctgaacaacctgaccgtgcccaccgagaccaagaagctgagcaaggagcagaagaaccagatcatcaactacgtgaagaacgagaaggccatgggccccgccaagctgttcaagtacatcgccaagctgctgagctgcgacgtggccgacatcaagggctaccgcatcgacaagagcggcaaggccgagatccacaccttcgaggcctaccgcaagatgaagaccctggagaccctggacatcgagcagatggaccgcgagaccctggacaagctggcctacgtgctgaccctgaacaccgagcgcgagggcatccaggaggccctggagcacgagttcgccgacggcagcttcagccagaagcaggtggacgagctggtgcagttccgcaaggccaacagcagcatcttcggcaagggctggcacaacttcagcgtgaagctgatgatggagctgatccccgagctgtacgagaccagcgaggagcagatgaccatcctgacccgcctgggcaagcagaagaccaccagcagcagcaacaagaccaagtacatcgacgagaagctgctgaccgaggagatctacaaccccgtggtggccaagagcgtgcgccaggccatcaagatcgtgaacgccgccatcaaggagtacggcgacttcgacaacatcgtgatcgagatggcccgcgagaccaacgaggacgacgagaagaaggccatccagaagatccagaaggccaacaaggacgagaaggacgccgccatgctgaaggccgccaaccagtacaacggcaaggccgagctgccccacagcgtgttccacggccacaagcagctggccaccaagatccgcctgtggcaccagcagggcgagcgctgcctgtacaccggcaagaccatcagcatccacgacctgatcaacaacagcaaccagttcgaggtggaccacatcctgcccctgagcatcaccttcgacgacagcctggccaacaaggtgctggtgtacgccaccgccaaccaggagaagggccagcgcaccccctaccaggccctggacagcatggacgacgcctggagcttccgcgagctgaaggccttcgtgcgcgagagcaagaccctgagcaacaagaagaaggagtacctgctgaccgaggaggacatcagcaagttcgacgtgcgcaagaagttcatcgagcgcaacctggtggacacccgctacgccagccgcgtggtgctgaacgccctgcaggagcacttccgcgcccacaagatcgacaccaaggtgagcgtggtgcgcggccagttcaccagccagctgcgccgccactggggcatcgagaagacccgcgacacctaccaccaccacgccgtggacgccctgatcattgcggcttctagccagctgaacctgtggaagaagcagaagaacaccctggtgagctacagcgaggaccagctgctggacatcgagaccggcgagctgatcagcgacgacgagtacaaggagagcgtgttcaaggccccctaccagcacttcgtggacaccctgaagagcaaggagttcgaggacagcatcctgttcagctaccaggtggacagcaagttcaaccgcaagatcagcgacgccaccatctacgccacccgccaggccaaggtgggcaaggacaaggccgacgagacctacgtgctgggcaagatcaaggacatctacacccaggacggctacgacgccttcatgaagatctacaagaaggacaagagcaagttcctgatgtaccgccacgacccccagaccttcgagaaggtgatcgagcccatcctggagaactaccccaacaagcagatcaacgataaaggcaaggaggtgccctgcaaccccttcctgaagtacaaggaggagcacggctacatccgcaagtacagcaagaagggcaacggccccgagatcaagagcctgaagtactacgacagcaagctgggcaaccacatcgacatcacccccaaggacagcaacaacaaggtggtgctgcagagcgtgagcccctggcgcgccgacgtgtacttcaacaagaccaccggcaagtacgagatcctgggcctgaagtacgccgacctgcagtttgataagggcaccggcacctacaagatcagccaggagaagtacaacgacatcaagaagaaggagggcgtggacagcgacagcgagttcaagttcaccctgtacaagaacgaccttctgctggtgaaggacaccgagaccaaggagcaacagctgttccgcttcctgagccgcaccatgcccaagcagaagcactacgtggagctgaagccctacgacaagcagaagttcgagggcggcgaggccctgatcaaggtgctgggcaacgtggccaacagcggccagtgcaagaagggcctgggcaagagcaacatcagcatctacaaggtgcgcaccgacgtgctgggcaaccagcacatcatcaagaacgagggcgacaagcccaagctggacttcagcagggctgaccccaagaagaagaggaaggtgtga

SEQ ID NO: 13 - DNA, 3459 bp, Streptococcus thermophilus
  source 1..3459: mol_type = other DNA
atgagcgacctggtgctgggcctggacatcggcatcggcagcgtgggcgtgggcatcctgaacaaggtgaccggcgagatcatccacaagaacagtcgcatcttccctgctgctcaggctgagaacaacctggtgcgccgcaccaaccgccagggtcgccggcttgctcgccgcaagaagcaccggcgcgtgcgcctgaaccgcctgttcgaggagagcggcctgatcaccgacttcaccaagatcagcatcaacctgaacccctaccagctgcgcgtgaagggcctgaccgacgagctgagcaacgaggagctgttcatcgccctgaagaacatggtgaagcaccgcggcatcagctacctggacgacgccagcgacgacggcaacagcagcgtgggcgactacgcccagatcgtgaaggagaacagcaagcagctggagaccaagacccccggccagatccagctggagcgctaccagacctacggccagctgcgcggcgacttcaccgtggagaaggacggcaagaagcaccgcctgatcaacgtgttccccaccagcgcctaccgcagcgaggccctgcgcatcctgcagacccagcaggagttcaacccccagatcaccgacgagttcatcaaccgctacctggagatcctgaccggcaagcgcaagtactaccacggccccggcaacgagaagagccgcaccgactacggccgctaccgcaccagcggcgagaccctggacaacatcttcggcatcctgatcggcaagtgcaccttctaccccgacgagttccgcgccgccaaggccagctacaccgcccaggagttcaacctgctgaacgacctgaacaacctgaccgtgcccaccgagaccaagaagctgagcaaggagcagaagaaccagatcatcaactacgtgaagaacgagaaggccatgggccccgccaagctgttcaagtacatcgccaagctgctgagctgcgacgtggccgacatcaagggctaccgcatcgacaagagcggcaaggccgagatccacaccttcgaggcctaccgcaagatgaagaccctggagaccctggacatcgagcagatggaccgcgagaccctggacaagctggcctacgtgctgaccctgaacaccgagcgcgagggcatccaggaggccctggagcacgagttcgccgacggcagcttcagccagaagcaggtggacgagctggtgcagttccgcaaggccaacagcagcatcttcggcaagggctggcacaacttcagcgtgaagctgatgatggagctgatccccgagctgtacgagaccagcgaggagcagatgaccatcctgacccgcctgggcaagcagaagaccaccagcagcagcaacaagaccaagtacatcgacgagaagctgctgaccgaggagatctacaaccccgtggtggccaagagcgtgcgccaggccatcaagatcgtgaacgccgccatcaaggagtacggcgacttcgacaacatcgtgatcgagatggcccgcgagaccaacgaggacgacgagaagaaggccatccagaagatccagaaggccaacaaggacgagaaggacgccgccatgctgaaggccgccaaccagtacaacggcaaggccgagctgccccacagcgtgttccacggccacaagcagctggccaccaagatccgcctgtggcaccagcagggcgagcgctgcctgtacaccggcaagaccatcagcatccacgacctgatcaacaacagcaaccagttcgaggtggaccacatcctgcccctgagcatcaccttcgacgacagcctggccaacaaggtgctggtgtacgccaccgccaaccaggagaagggccagcgcaccccctaccaggccctggacagcatggacgacgcctggagcttccgcgagctgaaggccttcgtgcgcgagagcaagaccctgagcaacaagaagaaggagtacctgctgaccgaggaggacatcagcaagttcgacgtgcgcaagaagttcatcgagcgcaacctggtggacacccgctacgccagccgcgtggtgctgaacgccctgcaggagcacttccgcgcccacaagatcgacaccaaggtgagcgtggtgcgcggccagttcaccagccagctgcgccgccactggggcatcgagaagacccgcgacacctaccaccaccacgccgtggacgccctgatcattgcggcttctagccagctgaacctgtggaagaagcagaagaacaccctggtgagctacagcgaggaccagctgctggacatcgagaccggcgagctgatcagcgacgacgagtacaaggagagcgtgttcaaggccccctaccagcacttcgtggacaccctgaagagcaaggagttcgaggacagcatcctgttcagctaccaggtggacagcaagttcaaccgcaagatcagcgacgccaccatctacgccacccgccaggccaaggtgggcaaggacaaggccgacgagacctacgtgctgggcaagatcaaggacatctacacccaggacggctacgacgccttcatgaagatctacaagaaggacaagagcaagttcctgatgtaccgccacgacccccagaccttcgagaaggtgatcgagcccatcctggagaactaccccaacaagcagatcaacgataaaggcaaggaggtgccctgcaaccccttcctgaagtacaaggaggagcacggctacatccgcaagtacagcaagaagggcaacggccccgagatcaagagcctgaagtactacgacagcaagctgggcaaccacatcgacatcacccccaaggacagcaacaacaaggtggtgctgcagagcgtgagcccctggcgcgccgacgtgtacttcaacaagaccaccggcaagtacgagatcctgggcctgaagtacgccgacctgcagtttgataagggcaccggcacctacaagatcagccaggagaagtacaacgacatcaagaagaaggagggcgtggacagcgacagcgagttcaagttcaccctgtacaagaacgaccttctgctggtgaaggacaccgagaccaaggagcaacagctgttccgcttcctgagccgcaccatgcccaagcagaagcactacgtggagctgaagccctacgacaagcagaagttcgagggcggcgaggccctgatcaaggtgctgggcaacgtggccaacagcggccagtgcaagaagggcctgggcaagagcaacatcagcatctacaaggtgcgcaccgacgtgctgggcaaccagcacatcatcaagaacgagggcgacaagcccaagctggacttcgcggccgcagatccaaaaaagaagagaaaggtagatccaaaaaagaagagaaaggtagatccaaaaaagaagagaaaggtagatacggccgcatag

SEQ ID NO: 14 - DNA, 3585 bp, Streptococcus thermophilus
  source 1..3585: mol_type = other DNA
atgagcgacctggtgctgggcctggccatcggcatcggcagcgtgggcgtgggcatcctgaacaaggtgaccggcgagatcatccacaagaacagtcgcatcttccctgctgctcaggctgagaacaacctggtgcgccgcaccaaccgccagggtcgccggcttgctcgccgcaagaagcaccggcgcgtgcgcctgaaccgcctgttcgaggagagcggcctgatcaccgacttcaccaagatcagcatcaacctgaacccctaccagctgcgcgtgaagggcctgaccgacgagctgagcaacgaggagctgttcatcgccctgaagaacatggtgaagcaccgcggcatcagctacctggacgacgccagcgacgacggcaacagcagcgtgggcgactacgcccagatcgtgaaggagaacagcaagcagctggagaccaagacccccggccagatccagctggagcgctaccagacctacggccagctgcgcggcgacttcaccgtggagaaggacggcaagaagcaccgcctgatcaacgtgttccccaccagcgcctaccgcagcgaggccctgcgcatcctgcagacccagcaggagttcaacccccagatcaccgacgagttcatcaaccgctacctggagatcctgaccggcaagcgcaagtactaccacggccccggcaacgagaagagccgcaccgactacggccgctaccgcaccagcggcgagaccctggacaacatcttcggcatcctgatcggcaagtgcaccttctaccccgacgagttccgcgccgccaaggccagctacaccgcccaggagttcaacctgctgaacgacctgaacaacctgaccgtgcccaccgagaccaagaagctgagcaaggagcagaagaaccagatcatcaactacgtgaagaacgagaaggccatgggccccgccaagctgttcaagtacatcgccaagctgctgagctgcgacgtggccgacatcaagggctaccgcatcgacaagagcggcaaggccgagatccacaccttcgaggcctaccgcaagatgaagaccctggagaccctggacatcgagcagatggaccgcgagaccctggacaagctggcctacgtgctgaccctgaacaccgagcgcgagggcatccaggaggccctggagcacgagttcgccgacggcagcttcagccagaagcaggtggacgagctggtgcagttccgcaaggccaacagcagcatcttcggcaagggctggcacaacttcagcgtgaagctgatgatggagctgatccccgagctgtacgagaccagcgaggagcagatgaccatcctgacccgcctgggcaagcagaagaccaccagcagcagcaacaagaccaagtacatcgacgagaagctgctgaccgaggagatctacaaccccgtggtggccaagagcgtgcgccaggccatcaagatcgtgaacgccgccatcaaggagtacggcgacttcgacaacatcgtgatcgagatggcccgcgagaccaacgaggacgacgagaagaaggccatccagaagatccagaaggccaacaaggacgagaaggacgccgccatgctgaaggccgccaaccagtacaacggcaaggccgagctgccccacagcgtgttccacggccacaagcagctggccaccaagatccgcctgtggcaccagcagggcgagcgctgcctgtacaccggcaagaccatcagcatccacgacctgatcaacaacagcaaccagttcgaggtggctgccatcctgcccctgagcatcaccttcgacgacagcctggccaacaaggtgctggtgtacgccaccgccgctcaggagaagggccagcgcaccccctaccaggccctggacagcatggacgacgcctggagcttccgcgagctgaaggccttcgtgcgcgagagcaagaccctgagcaacaagaagaaggagtacctgctgaccgaggaggacatcagcaagttcgacgtgcgcaagaagttcatcgagcgcaacctggtggacacccgctacgccagccgcgtggtgctgaacgccctgcaggagcacttccgcgcccacaagatcgacaccaaggtgagcgtggtgcgcggccagttcaccagccagctgcgccgccactggggcatcgagaagacccgcgacacctaccaccaccacgccgtggacgccctgatcattgcggcttctagccagctgaacctgtggaagaagcagaagaacaccctggtgagctacagcgaggaccagctgctggacatcgagaccggcgagctgatcagcgacgacgagtacaaggagagcgtgttcaaggccccctaccagcacttcgtggacaccctgaagagcaaggagttcgaggacagcatcctgttcagctaccaggtggacagcaagttcaaccgcaagatcagcgacgccaccatctacgccacccgccaggccaaggtgggcaaggacaaggccgacgagacctacgtgctgggcaagatcaaggacatctacacccaggacggctacgacgccttcatgaagatctacaagaaggacaagagcaagttcctgatgtaccgccacgacccccagaccttcgagaaggtgatcgagcccatcctggagaactaccccaacaagcagatcaacgataaaggcaaggaggtgccctgcaaccccttcctgaagtacaaggaggagcacggctacatccgcaagtacagcaagaagggcaacggccccgagatcaagagcctgaagtactacgacagcaagctgggcaaccacatcgacatcacccccaaggacagcaacaacaaggtggtgctgcagagcgtgagcccctggcgcgccgacgtgtacttcaacaagaccaccggcaagtacgagatcctgggcctgaagtacgccgacctgcagtttgataagggcaccggcacctacaagatcagccaggagaagtacaacgacatcaagaagaaggagggcgtggacagcgacagcgagttcaagttcaccctgtacaagaacgaccttctgctggtgaaggacaccgagaccaaggagcaacagctgttccgcttcctgagccgcaccatgcccaagcagaagcactacgtggagctgaagccctacgacaagcagaagttcgagggcggcgaggccctgatcaaggtgctgggcaacgtggccaacagcggccagtgcaagaagggcctgggcaagagcaacatcagcatctacaaggtgcgcaccgacgtgctgggcaaccagcacatcatcaagaacgagggcgacaagcccaagctggacttcagcagggctgaccccaagaagaagaggaaggtggaggccagcggttccggacgggctgacgcattggacgattttgatctggatatgctgggaagtgacgccctcgatgattttgaccttgacatgcttggttcggatgcccttgatgactttgacctcgacatgctcggcagtgacgcccttgatgatttcgacctggacatgctgattaactctagatga

SEQ ID NO: 15 - DNA, 3606 bp, Streptococcus thermophilus
  source 1..3606: mol_type = other DNA
atgcccaagaagaagaggaaggtgagcgacctggtgctgggcctggccatcggcatcggcagcgtgggcgtgggcatcctgaacaaggtgaccggcgagatcatccacaagaacagtcgcatcttccctgctgctcaggctgagaacaacctggtgcgccgcaccaaccgccagggtcgccggcttgctcgccgcaagaagcaccggcgcgtgcgcctgaaccgcctgttcgaggagagcggcctgatcaccgacttcaccaagatcagcatcaacctgaacccctaccagctgcgcgtgaagggcctgaccgacgagctgagcaacgaggagctgttcatcgccctgaagaacatggtgaagcaccgcggcatcagctacctggacgacgccagcgacgacggcaacagcagcgtgggcgactacgcccagatcgtgaaggagaacagcaagcagctggagaccaagacccccggccagatccagctggagcgctaccagacctacggccagctgcgcggcgacttcaccgtggagaaggacggcaagaagcaccgcctgatcaacgtgttccccaccagcgcctaccgcagcgaggccctgcgcatcctgcagacccagcaggagttcaacccccagatcaccgacgagttcatcaaccgctacctggagatcctgaccggcaagcgcaagtactaccacggccccggcaacgagaagagccgcaccgactacggccgctaccgcaccagcggcgagaccctggacaacatcttcggcatcctgatcggcaagtgcaccttctaccccgacgagttccgcgccgccaaggccagctacaccgcccaggagttcaacctgctgaacgacctgaacaacctgaccgtgcccaccgagaccaagaagctgagcaaggagcagaagaaccagatcatcaactacgtgaagaacgagaaggccatgggccccgccaagctgttcaagtacatcgccaagctgctgagctgcgacgtggccgacatcaagggctaccgcatcgacaagagcggcaaggccgagatccacaccttcgaggcctaccgcaagatgaagaccctggagaccctggacatcgagcagatggaccgcgagaccctggacaagctggcctacgtgctgaccctgaacaccgagcgcgagggcatccaggaggccctggagcacgagttcgccgacggcagcttcagccagaagcaggtggacgagctggtgcagttccgcaaggccaacagcagcatcttcggcaagggctggcacaacttcagcgtgaagctgatgatggagctgatccccgagctgtacgagaccagcgaggagcagatgaccatcctgacccgcctgggcaagcagaagaccaccagcagcagcaacaagaccaagtacatcgacgagaagctgctgaccgaggagatctacaaccccgtggtggccaagagcgtgcgccaggccatcaagatcgtgaacgccgccatcaaggagtacggcgacttcgacaacatcgtgatcgagatggcccgcgagaccaacgaggacgacgagaagaaggccatccagaagatccagaaggccaacaaggacgagaaggacgccgccatgctgaaggccgccaaccagtacaacggcaaggccgagctgccccacagcgtgttccacggccacaagcagctggccaccaagatccgcctgtggcaccagcagggcgagcgctgcctgtacaccggcaagaccatcagcatccacgacctgatcaacaacagcaaccagttcgaggtggctgccatcctgcccctgagcatcaccttcgacgacagcctggccaacaaggtgctggtgtacgccaccgccgctcaggagaagggccagcgcaccccctaccaggccctggacagcatggacgacgcctggagcttccgcgagctgaaggccttcgtgcgcgagagcaagaccctgagcaacaagaagaaggagtacctgctgaccgaggaggacatcagcaagttcgacgtgcgcaagaagttcatcgagcgcaacctggtggacacccgctacgccagccgcgtggtgctgaacgccctgcaggagcacttccgcgcccacaagatcgacaccaaggtgagcgtggtgcgcggccagttcaccagccagctgcgccgccactggggcatcgagaagacccgcgacacctaccaccaccacgccgtggacgccctgatcattgcggcttctagccagctgaacctgtggaagaagcagaagaacaccctggtgagctacagcgaggaccagctgctggacatcgagaccggcgagctgatcagcgacgacgagtacaaggagagcgtgttcaaggccccctaccagcacttcgtggacaccctgaagagcaaggagttcgaggacagcatcctgttcagctaccaggtggacagcaagttcaaccgcaagatcagcgacgccaccatctacgccacccgccaggccaaggtgggcaaggacaaggccgacgagacctacgtgctgggcaagatcaaggacatctacacccaggacggctacgacgccttcatgaagatctacaagaaggacaagagcaagttcctgatgtaccgccacgacccccagaccttcgagaaggtgatcgagcccatcctggagaactaccccaacaagcagatcaacgataaaggcaaggaggtgccctgcaaccccttcctgaagtacaaggaggagcacggctacatccgcaagtacagcaagaagggcaacggccccgagatcaagagcctgaagtactacgacagcaagctgggcaaccacatcgacatcacccccaaggacagcaacaacaaggtggtgctgcagagcgtgagcccctggcgcgccgacgtgtacttcaacaagaccaccggcaagtacgagatcctgggcctgaagtacgccgacctgcagtttgataagggcaccggcacctacaagatcagccaggagaagtacaacgacatcaagaagaaggagggcgtggacagcgacagcgagttcaagttcaccctgtacaagaacgaccttctgctggtgaaggacaccgagaccaaggagcaacagctgttccgcttcctgagccgcaccatgcccaagcagaagcactacgtggagctgaagccctacgacaagcagaagttcgagggcggcgaggccctgatcaaggtgctgggcaacgtggccaacagcggccagtgcaagaagggcctgggcaagagcaacatcagcatctacaaggtgcgcaccgacgtgctgggcaaccagcacatcatcaagaacgagggcgacaagcccaagctggacttcagcagggctgaccccaagaagaagaggaaggtggaggccagcggttccggacgggctgacgcattggacgattttgatctggatatgctgggaagtgacgccctcgatgattttgaccttgacatgcttggttcggatgcccttgatgactttgacctcgacatgctcggcagtgacgcccttgatgatttcgacctggacatgctgattaactctagatga

SEQ ID NO: 16 - DNA, 3366 bp, Streptococcus thermophilus
  source 1..3366: mol_type = other DNA
atgagtgacttagttttaggacttgatatcggtataggttctgttggtgtaggtatccttaacaaagtgacaggagaaattatccataaaaactcacgcatcttcccagcagctcaagcggaaaataacctagtacgtagaacgaatcgtcaaggaagacgcttgacacgacgtaaaaaacatcgtagagttcgtttaaatcgtctatttgaggaaagtggattaatcaccgattttacgaagatttcaattaatcttaacccatatcaattacgagttaagggcttgaccgatgaattgtctaatgaagaactgtttatcgctcttaaaaatatggtgaaacaccgtgggattagttacctcgatgatgctagtgatgacggaaattcatcaataggagactatgcacaaattgttaaggaaaatagtaaacaattagaaactaagacaccgggacagatacagttggaacgctaccaaacatatggtcaattacgtggtgattttactgttgagaaagatggcaaaaaacatcgcttgattaatgtctttccaacatcagcttatcgttcagaagccttaaggatactgcaaactcaacaagaatttaatccacagattacagatgaatttattaatcgttatctcgaaattttaactggaaaacggaaatattatcatggacccggaaatgaaaagtcacggactgattatggtcgttacagaacgagtggagaaactttagacaatatttttggaattctaattgggaaatgtacattttatccagacgagtttagagcagcaaaagcttcctacacggctcaagaattcaatttgctaaatgatttgaacaatctaacagttcctactgaaaccaaaaagttgagcaaagaacagaagaatcaaatcattaattatgtcaaaaatgaaaaggcaatggggccagcgaaactttttaaatatatcgctaagttactttcttgtgatgttgcagatatcaagggataccgtatcgacaaatcaggtaaggctgagattcatactttcgaagcctatcgaaaaatgaaaacgcttgaaaccttagatattgagcaaatggatagagaaacgcttgataaattagcctatgtcttaacattaaacactgagagggaaggtattcaagaagccttagaacatgaatttgctgatggtagctttagccagaagcaagttgacgaattggttcaattccgcaaagcaaatagttccatttttggaaaaggatggcataatttttctgtcaaactgatgatggagttaattccagaattgtatgagacgtcagaagagcaaatgactatcctaacacgacttggaaaacaaaaaacgacttcgtcttcaaataaaacaaaatatatagatgaaaaactattaactgaagaaatctataatcctgttgttgctaagtctgttcgccaggctataaaaatcgtaaatgcggcgattaaagaatacggagactttgacaatattgtcatcgaaatggctcgtgaaacaaatgaagatgatgaaaagaaagctattcaaaagattcaaaaagccaacaaagatgaaaaagatgcagcaatgcttaaggctgctaaccaatataatggaaaggctgaattaccacatagtgttttccacggtcataagcaattagcgactaaaatccgcctttggcatcagcaaggagaacgttgcctttatactggtaagacaatctcaatccatgatttgataaataattctaatcagtttgaagtagatcatattttacctctttctatcacattcgatgatagccttgcaaataaggttttggtttatgcaactgctaaccaagaaaaaggacaacgaacaccttatcaggctttagatagtatggatgatgcgtggtctttccgtgaattaaaagcttttgtacgtgagtcaaaaacactttcgaacaagaaaaaagaatacctccttacagaagaagatatttcaaagtttgatgttcgaaagaaatttattgaacgaaatcttgtagatacaagatacgcttcaagagttgtcctcaatgcccttcaagaacactttagagctcacaagattgatacaaaagtttccgtggttcgtggccaatttacatctcaattgagacgccattggggaattgagaagactcgtgatacttatcatcaccatgctgtcgatgcattgattattgccgcctcaagtcagttgaatttgtggaaaaaacaaaagaatacccttgtaagttattcagaagaccaactccttgatattgaaacaggtgaacttattagtgatgatgagtacaaggaatctgtgttcaaagccccttatcaacattttgttgatacattgaagagtaaagaatttgaagacagtatcttattctcttatcaagtggattctaagtttaatcgtaaaatatcagatgccactatttatgcgacaagacaggctaaagtaggaaaagataaggcggatgaaacttatgtcttagggaaaatcaaagatatttatactcaggatggttatgatgcctttatgaagatttataagaaggataagtcaaaattcctcatgtatcgtcacgacccacaaacctttgagaaagttatcgagccaattttagagaactatcctaataagcaaataaatgaaaaagggaaagaggtaccatgtaatcctttcctaaaatataaagaagaacatggctatattcgtaaatatagtaaaaaaggcaatggtcctgaaatcaagagtcttaaatactatgatagtaagctaggcaatcatattgatattactccgaaggatagtaacaataaagttgtcttacagtcagtttctccatggagagcggatgtctatttcaataagactactggaaaatacgaaatcctcggattgaaatatgctgatttacaatttgaaaaagggacaggaacatataagatttcccaggaaaaatacaatgacattaagaaaaaagagggtgtagattctgattcagaattcaagtttacactttataaaaatgatttgttactcgttaaagatacagaaacaaaagaacaacagcttttccgttttctttctcgaactatgcctaaacaaaagcattatgttgaattaaaaccttatgataaacagaaatttgaaggaggtgaggcgttaattaaagtgttgggtaacgttgctaatagtggtcaatgcaaaaaagggctaggaaaatcaaatatttctatttataaggtaagaacagatgtcctaggaaatcagcatatcatcaaaaatgagggtgataagcctaagctagatttttaa

SEQ ID NO: 17 - DNA, 4167 bp, Streptococcus thermophilus; identical to SEQ ID NO: 9
  source 1..4167: mol_type = other DNA

SEQ ID NO: 18 - DNA, 3249 bp, Neisseria meningitidis
  source 1..3249: mol_type = other DNA
atggccgccttcaagcccaaccccatcaactacatcctgggcctggacatcggcatcgccagcgtgggctgggccatggtggagatcgacgaggacgagaaccccatctgcctgatcgacctgggtgtgcgcgtgttcgagcgcgctgaggtgcccaagactggtgacagtctggctatggctcgccggcttgctcgctctgttcggcgccttactcgccggcgcgctcaccgccttctgcgcgctcgccgcctgctgaagcgcgagggtgtgctgcaggctgccgacttcgacgagaacggcctgatcaagagcctgcccaacactccttggcagctgcgcgctgccgctctggaccgcaagctgactcctctggagtggagcgccgtgctgctgcacctgatcaagcaccgcggctacctgagccagcgcaagaacgagggcgagaccgccgacaaggagctgggtgctctgctgaagggcgtggccgacaacgcccacgccctgcagactggtgacttccgcactcctgctgagctggccctgaacaagttcgagaaggagagcggccacatccgcaaccagcgcggcgactacagccacaccttcagccgcaaggacctgcaggccgagctgatcctgctgttcgagaagcagaaggagttcggcaacccccacgtgagcggcggcctgaaggagggcatcgagaccctgctgatgacccagcgccccgccctgagcggcgacgccgtgcagaagatgctgggccactgcaccttcgagccagccgagcccaaggccgccaagaacacctacaccgccgagcgcttcatctggctgaccaagctgaacaacctgcgcatcctggagcagggcagcgagcgccccctgaccgacaccgagcgcgccaccctgatggacgagccctaccgcaagagcaagctgacctacgcccaggcccgcaagctgctgggtctggaggacaccgccttcttcaagggcctgcgctacggcaaggacaacgccgaggccagcaccctgatggagatgaaggcctaccacgccatcagccgcgccctggagaaggagggcctgaaggacaagaagagtcctctgaacctgagccccgagctgcaggacgagatcggcaccgccttcagcctgttcaagaccgacgaggacatcaccggccgcctgaaggaccgcatccagcccgagatcctggaggccctgctgaagcacatcagcttcgacaagttcgtgcagatcagcctgaaggccctgcgccgcatcgtgcccctgatggagcagggcaagcgctacgacgaggcctgcgccgagatctacggcgaccactacggcaagaagaacaccgaggagaagatctacctgcctcctatccccgccgacgagatccgcaaccccgtggtgctgcgcgccctgagccaggcccgcaaggtgatcaacggcgtggtgcgccgctacggcagccccgcccgcatccacatcgagaccgcccgcgaggtgggcaagagcttcaaggaccgcaaggagatcgagaagcgccaggaggagaaccgcaaggaccgcgagaaggccgccgccaagttccgcgagtacttccccaacttcgtgggcgagcccaagagcaaggacatcctgaagctgcgcctgtacgagcagcagcacggcaagtgcctgtacagcggcaaggagatcaacctgggccgcctgaacgagaagggctacgtggagatcgaccacgccctgcccttcagccgcacctgggacgacagcttcaacaacaaggtgctggtgctgggcagcgagaaccagaacaagggcaaccagaccccctacgagtacttcaacggcaaggacaacagccgcgagtggcaggagttcaaggcccgcgtggagaccagccgcttcccccgcagcaagaagcagcgcatcctgctgcagaagttcgacgaggacggcttcaaggagcgcaacctgaacgacacccgctacgtgaaccgcttcctgtgccagttcgtggccgaccgcatgcgcctgaccggcaagggcaagaagcgcgtgttcgccagcaacggccagatcaccaacctgctgcgcggcttctggggcctgcgcaaggtgcgcgccgagaacgaccgccaccacgccctggacgccgtggtggtggcctgcagcaccgtggccatgcagcagaagatcacccgcttcgtgcgctacaaggagatgaacgccttcgacggtaaaaccatcgacaaggagaccggcgaggtgctgcaccagaagacccacttcccccagccctgggagttcttcgcccaggaggtgatgatccgcgtgttcggcaagcccgacggcaagcccgagttcgaggaggccgacacccccgagaagctgcgcaccctgctggccgagaagctgagcagccgccctgaggccgtgcacgagtacgtgactcctctgttcgtgagccgcgcccccaaccgcaagatgagcggtcagggtcacatggagaccgtgaagagcgccaagcgcctggacgagggcgtgagcgtgctgcgcgtgcccctgacccagctgaagctgaaggacctggagaagatggtgaaccgcgagcgcgagcccaagctgtacgaggccctgaaggcccgcctggaggcccacaaggacgaccccgccaaggccttcgccgagcccttctacaagtacgacaaggccggcaaccgcacccagcaggtgaaggccgtgcgcgtggagcaggtgcagaagaccggcgtgtgggtgcgcaaccacaacggcatcgccgacaacgccaccatggtgcgcgtggacgtgttcgagaagggcgacaagtactacctggtgcccatctacagctggcaggtggccaagggcatcctgcccgaccgcgccgtggtgcagggcaaggacgaggaggactggcagctgatcgacgacagcttcaacttcaagttcagcctgcaccccaacgacctggtggaggtgatcaccaagaaggcccgcatgttcggctacttcgccagctgccaccgcggcaccggcaacatcaacatccgcatccacgacctggaccacaagatcggcaagaacggcatcctggagggcatcggcgtgaagaccgccctgagcttccagaagtaccagatcgacgagctgggcaaggagatccgcccctgccgcctgaagaagcgccctcctgtgcgctaa

SEQ ID NO: 19 - DNA, 3249 bp, Neisseria meningitidis
  source 1..3249: mol_type = other DNA
atggccgccttcaagcccaaccccatcaactacatcctgggcctggccatcggcatcgccagcgtgggctgggccatggtggagatcgacgaggacgagaaccccatctgcctgatcgacctgggtgtgcgcgtgttcgagcgcgctgaggtgcccaagactggtgacagtctggctatggctcgccggcttgctcgctctgttcggcgccttactcgccggcgcgctcaccgccttctgcgcgctcgccgcctgctgaagcgcgagggtgtgctgcaggctgccgacttcgacgagaacggcctgatcaagagcctgcccaacactccttggcagctgcgcgctgccgctctggaccgcaagctgactcctctggagtggagcgccgtgctgctgcacctgatcaagcaccgcggctacctgagccagcgcaagaacgagggcgagaccgccgacaaggagctgggtgctctgctgaagggcgtggccgacaacgcccacgccctgcagactggtgacttccgcactcctgctgagctggccctgaacaagttcgagaaggagagcggccacatccgcaaccagcgcggcgactacagccacaccttcagccgcaaggacctgcaggccgagctgatcctgctgttcgagaagcagaaggagttcggcaacccccacgtgagcggcggcctgaaggagggcatcgagaccctgctgatgacccagcgccccgccctgagcggcgacgccgtgcagaagatgctgggccactgcaccttcgagccagccgagcccaaggccgccaagaacacctacaccgccgagcgcttcatctggctgaccaagctgaacaacctgcgcatcctggagcagggcagcgagcgccccctgaccgacaccgagcgcgccaccctgatggacgagccctaccgcaagagcaagctgacctacgcccaggcccgcaagctgctgggtctggaggacaccgccttcttcaagggcctgcgctacggcaaggacaacgccgaggccagcaccctgatggagatgaaggcctaccacgccatcagccgcgccctggagaaggagggcctgaaggacaagaagagtcctctgaacctgagccccgagctgcaggacgagatcggcaccgccttcagcctgttcaagaccgacgaggacatcaccggccgcctgaaggaccgcatccagcccgagatcctggaggccctgctgaagcacatcagcttcgacaagttcgtgcagatcagcctgaaggccctgcgccgcatcgtgcccctgatggagcagggcaagcgctacgacgaggcctgcgccgagatctacggcgaccactacggcaagaagaacaccgaggagaagatctacctgcctcctatccccgccgacgagatccgcaaccccgtggtgctgcgcgccctgagccaggcccgcaaggtgatcaacggcgtggtgcgccgctacggcagccccgcccgcatccacatcgagaccgcccgcgaggtgggcaagagcttcaaggaccgcaaggagatcgagaagcgccaggaggagaaccgcaaggaccgcgagaaggccgccgccaagttccgcgagtacttccccaacttcgtgggcgagcccaagagcaaggacatcctgaagctgcgcctgtacgagcagcagcacggcaagtgcctgtacagcggcaaggagatcaacctgggccgcctgaacgagaagggctacgtggagatcgccgctgccctgcccttcagccgcacctgggacgacagcttcaacaacaaggtgctggtgctgggcagcgaggctcagaacaagggcaaccagaccccctacgagtacttcaacggcaaggacaacagccgcgagtggcaggagttcaaggcccgcgtggagaccagccgcttcccccgcagcaagaagcagcgcatcctgctgcagaagttcgacgaggacggcttcaaggagcgcaacctgaacgacacccgctacgtgaaccgcttcctgtgccagttcgtggccgaccgcatgcgcctgaccggcaagggcaagaagcgcgtgttcgccagcaacggccagatcaccaacctgctgcgcggcttctggggcctgcgcaaggtgcgcgccgagaacgaccgccaccacgccctggacgccgtggtggtggcctgcagcaccgtggccatgcagcagaagatcacccgcttcgtgcgctacaaggagatgaacgccttcgacggtaaaaccatcgacaaggagaccggcgaggtgctgcaccagaagacccacttcccccagccctgggagttcttcgcccaggaggtgatgatccgcgtgttcggcaagcccgacggcaagcccgagttcgaggaggccgacacccccgagaagctgcgcaccctgctggccgagaagctgagcagccgccctgaggccgtgcacgagtacgtgactcctctgttcgtgagccgcgcccccaaccgcaagatgagcggtcagggtcacatggagaccgtgaagagcgccaagcgcctggacgagggcgtgagcgtgctgcgcgtgcccctgacccagctgaagctgaaggacctggagaagatggtgaaccgcgagcgcgagcccaagctgtacgaggccctgaaggcccgcctggaggcccacaaggacgaccccgccaaggccttcgccgagcccttctacaagtacgacaaggccggcaaccgcacccagcaggtgaaggccgtgcgcgtggagcaggtgcagaagaccggcgtgtgggtgcgcaaccacaacggcatcgccgacaacgccaccatggtgcgcgtggacgtgttcgagaagggcgacaagtactacctggtgcccatctacagctggcaggtggccaagggcatcctgcccgaccgcgccgtggtgcagggcaaggacgaggaggactggcagctgatcgacgacagcttcaacttcaagttcagcctgcaccccaacgacctggtggaggtgatcaccaagaaggcccgcatgttcggctacttcgccagctgccaccgcggcaccggcaacatcaacatccgcatccacgacctggaccacaagatcggcaagaacggcatcctggagggcatcggcgtgaagaccgccctgagcttccagaagtaccagatcgacgagctgggcaaggagatccgcccctgccgcctgaagaagcgccctcctgtgcgctaa

SEQ ID NO: 20 - DNA, 3282 bp, Neisseria meningitidis
  source 1..3282: mol_type = other DNA
atggccgccttcaagcccaaccccatcaactacatcctgggcctggacatcggcatcgccagcgtgggctgggccatggtggagatcgacgaggacgagaaccccatctgcctgatcgacctgggtgtgcgcgtgttcgagcgcgctgaggtgcccaagactggtgacagtctggctatggctcgccggcttgctcgctctgttcggcgccttactcgccggcgcgctcaccgccttctgcgcgctcgccgcctgctgaagcgcgagggtgtgctgcaggctgccgacttcgacgagaacggcctgatcaagagcctgcccaacactccttggcagctgcgcgctgccgctctggaccgcaagctgactcctctggagtggagcgccgtgctgctgcacctgatcaagcaccgcggctacctgagccagcgcaagaacgagggcgagaccgccgacaaggagctgggtgctctgctgaagggcgtggccgacaacgcccacgccctgcagactggtgacttccgcactcctgctgagctggccctgaacaagttcgagaaggagagcggccacatccgcaaccagcgcggcgactacagccacaccttcagccgcaaggacctgcaggccgagctgatcctgctgttcgagaagcagaaggagttcggcaacccccacgtgagcggcggcctgaaggagggcatcgagaccctgctgatgacccagcgccccgccctgagcggcgacgccgtgcagaagatgctgggccactgcaccttcgagccagccgagcccaaggccgccaagaacacctacaccgccgagcgcttcatctggctgaccaagctgaacaacctgcgcatcctggagcagggcagcgagcgccccctgaccgacaccgagcgcgccaccctgatggacgagccctaccgcaagagcaagctgacctacgcccaggcccgcaagctgctgggtctggaggacaccgccttcttcaagggcctgcgctacggcaaggacaacgccgaggccagcaccctgatggagatgaaggcctaccacgccatcagccgcgccctggagaaggagggcctgaaggacaagaagagtcctctgaacctgagccccgagctgcaggacgagatcggcaccgccttcagcctgttcaagaccgacgaggacatcaccggccgcctgaaggaccgcatccagcccgagatcctggaggccctgctgaagcacatcagcttcgacaagttcgtgcagatcagcctgaaggccctgcgccgcatcgtgcccctgatggagcagggcaagcgctacgacgaggcctgcgccgagatctacggcgaccactacggcaagaagaacaccgaggagaagatctacctgcctcctatccccgccgacgagatccgcaaccccgtggtgctgcgcgccctgagccaggcccgcaaggtgatcaacggcgtggtgcgccgctacggcagccccgcccgcatccacatcgagaccgcccgcgaggtgggcaagagcttcaaggaccgcaaggagatcgagaagcgccaggaggagaaccgcaaggaccgcgagaaggccgccgccaagttccgcgagtacttccccaacttcgtgggcgagcccaagagcaaggacatcctgaagctgcgcctgtacgagcagcagcacggcaagtgcctgtacagcggcaaggagatcaacctgggccgcctgaacgagaagggctacgtggagatcgaccacgccctgcccttcagccgcacctgggacgacagcttcaacaacaaggtgctggtgctgggcagcgagaaccagaacaagggcaaccagaccccctacgagtacttcaacggcaaggacaacagccgcgagtggcaggagttcaaggcccgcgtggagaccagccgcttcccccgcagcaagaagcagcgcatcctgctgcagaagttcgacgaggacggcttcaaggagcgcaacctgaacgacacccgctacgtgaaccgcttcctgtgccagttcgtggccgaccgcatgcgcctgaccggcaagggcaagaagcgcgtgttcgccagcaacggccagatcaccaacctgctgcgcggcttctggggcctgcgcaaggtgcgcgccgagaacgaccgccaccacgccctggacgccgtggtggtggcctgcagcaccgtggccatgcagcagaagatcacccgcttcgtgcgctacaaggagatgaacgccttcgacggtaaaaccatcgacaaggagaccggcgaggtgctgcaccagaagacccacttcccccagccctgggagttcttcgcccaggaggtgatgatccgcgtgttcggcaagcccgacggcaagcccgagttcgaggaggccgacacccccgagaagctgcgcaccctgctggccgagaagctgagcagccgccctgaggccgtgcacgagtacgtgactcctctgttcgtgagccgcgcccccaaccgcaagatgagcggtcagggtcacatggagaccgtgaagagcgccaagcgcctggacgagggcgtgagcgtgctgcgcgtgcccctgacccagctgaagctgaaggacctggagaagatggtgaaccgcgagcgcgagcccaagctgtacgaggccctgaaggcccgcctggaggcccacaaggacgaccccgccaaggccttcgccgagcccttctacaagtacgacaaggccggcaaccgcacccagcaggtgaaggccgtgcgcgtggagcaggtgcagaagaccggcgtgtgggtgcgcaaccacaacggcatcgccgacaacgccaccatggtgcgcgtggacgtgttcgagaagggcgacaagtactacctggtgcccatctacagctggcaggtggccaagggcatcctgcccgaccgcgccgtggtgcagggcaaggacgaggaggactggcagctgatcgacgacagcttcaacttcaagttcagcctgcaccccaacgacctggtggaggtgatcaccaagaaggcccgcatgttcggctacttcgccagctgccaccgcggcaccggcaacatcaacatccgcatccacgacctggaccacaagatcggcaagaacggcatcctggagggcatcggcgtgaagaccgccctgagcttccagaagtaccagatcgacgagctgggcaaggagatccgcccctgccgcctgaagaagcgccctcctgtgcgcagcagggctgaccccaagaagaagaggaaggtgtga

SEQ ID NO: 21 - DNA, 3342 bp, Neisseria meningitidis
  source 1..3342: mol_type = other DNA
atggccgccttcaagcccaaccccatcaactacatcctgggcctggacatcggcatcgccagcgtgggctgggccatggtggagatcgacgaggacgagaaccccatctgcctgatcgacctgggtgtgcgcgtgttcgagcgcgctgaggtgcccaagactggtgacagtctggctatggctcgccggcttgctcgctctgttcggcgccttactcgccggcgcgctcaccgccttctgcgcgctcgccgcctgctgaagcgcgagggtgtgctgcaggctgccgacttcgacgagaacggcctgatcaagagcctgcccaacactccttggcagctgcgcgctgccgctctggaccgcaagctgactcctctggagtggagcgccgtgctgctgcacctgatcaagcaccgcggctacctgagccagcgcaagaacgagggcgagaccgccgacaaggagctgggtgctctgctgaagggcgtggccgacaacgcccacgccctgcagactggtgacttccgcactcctgctgagctggccctgaacaagttcgagaaggagagcggccacatccgcaaccagcgcggcgactacagccacaccttcagccgcaaggacctgcaggccgagctgatcctgctgttcgagaagcagaaggagttcggcaacccccacgtgagcggcggcctgaaggagggcatcgagaccctgctgatgacccagcgccccgccctgagcggcgacgccgtgcagaagatgctgggccactgcaccttcgagccagccgagcccaaggccgccaagaacacctacaccgccgagcgcttcatctggctgaccaagctgaacaacctgcgcatcctggagcagggcagcgagcgccccctgaccgacaccgagcgcgccaccctgatggacgagccctaccgcaagagcaagctgacctacgcccaggcccgcaagctgctgggtctggaggacaccgccttcttcaagggcctgcgctacggcaaggacaacgccgaggccagcaccctgatggagatgaaggcctaccacgccatcagccgcgccctggagaaggagggcctgaaggacaagaagagtcctctgaacctgagccccgagctgcaggacgagatcggcaccgccttcagcctgttcaagaccgacgaggacatcaccggccgcctgaaggaccgcatccagcccgagatcctggaggccctgctgaagcacatcagcttcgacaagttcgtgcagatcagcctgaaggccctgcgccgcatcgtgcccctgatggagcagggcaagcgctacgacgaggcctgcgccgagatctacggcgaccactacggcaagaagaacaccgaggagaagatctacctgcctcctatccccgccgacgagatccgcaaccccgtggtgctgcgcgccctgagccaggcccgcaaggtgatcaacggcgtggtgcgccgctacggcagccccgcccgcatccacatcgagaccgcccgcgaggtgggcaagagcttcaaggaccgcaaggagatcgagaagcgccaggaggagaaccgcaaggaccgcgagaaggccgccgccaagttccgcgagtacttccccaacttcgtgggcgagcccaagagcaaggacatcctgaagctgcgcctgtacgagcagcagcacggcaagtgcctgtacagcggcaaggagatcaacctgggccgcctgaacgagaagggctacgtggagatcgaccacgccctgcccttcagccgcacctgggacgacagcttcaacaacaaggtgctggtgctgggcagcgagaaccagaacaagggcaaccagaccccctacgagtacttcaacggcaaggacaacagccgcgagtggcaggagttcaaggcccgcgtggagaccagccgcttcccccgcagcaagaagcagcgcatcctgctgcagaagttcgacgaggacggcttcaaggagcgcaacctgaacgacacccgctacgtgaaccgcttcctgtgccagttcgtggccgaccgcatgcgcctgaccggcaagggcaagaagcgcgtgttcgccagcaacggccagatcaccaacctgctgcgcggcttctggggcctgcgcaaggtgcgcgccgagaacgaccgccaccacgccctggacgccgtggtggtggcctgcagcaccgtggccatgcagcagaagatcacccgcttcgtgcgctacaaggagatgaacgccttcgacggtaaaaccatcgacaaggagaccggcgaggtgctgcaccagaagacccacttcccccagccctgggagttcttcgcccaggaggtgatgatccgcgtgttcggcaagcccgacggcaagcccgagttcgaggaggccgacacccccgagaagctgcgcaccctgctggccgagaagctgagcagccgccctgaggccgtgcacgagtacgtgactcctctgttcgtgagccgcgcccccaaccgcaagatgagcggtcagggtcacatggagaccgtgaagagcgccaagcgcctggacgagggcgtgagcgtgctgcgcgtgcccctgacccagctgaagctgaaggacctggagaagatggtgaaccgcgagcgcgagcccaagctgtacgaggccctgaaggcccgcctggaggcccacaaggacgaccccgccaaggccttcgccgagcccttctacaagtacgacaaggccggcaaccgcacccagcaggtgaaggccgtgcgcgtggagcaggtgcagaagaccggcgtgtgggtgcgcaaccacaacggcatcgccgacaacgccaccatggtgcgcgtggacgtgttcgagaagggcgacaagtactacctggtgcccatctacagctggcaggtggccaagggcatcctgcccgaccgcgccgtggtgcagggcaaggacgaggaggactggcagctgatcgacgacagcttcaacttcaagttcagcctgcaccccaacgacctggtggaggtgatcaccaagaaggcccgcatgttcggctacttcgccagctgccaccgcggcaccggcaacatcaacatccgcatccacgacctggaccacaagatcggcaagaacggcatcctggagggcatcggcgtgaagaccgccctgagcttccagaagtaccagatcgacgagctgggcaaggagatccgcccctgccgcctgaagaagcgccctcctgtgcgcgcggccgcagatccaaaaaagaagagaaaggtagatccaaaaaagaagagaaaggtagatccaaaaaagaagagaaaggtagatacggccgcatag

SEQ ID NO: 22 - DNA, 3468 bp, Neisseria meningitidis
  source 1..3468: mol_type = other DNA
atggccgccttcaagcccaaccccatcaactacatcctgggcctggccatcggcatcgccagcgtgggctgggccatggtggagatcgacgaggacgagaaccccatctgcctgatcgacctgggtgtgcgcgtgttcgagcgcgctgaggtgcccaagactggtgacagtctggctatggctcgccggcttgctcgctctgttcggcgccttactcgccggcgcgctcaccgccttctgcgcgctcgccgcctgctgaagcgcgagggtgtgctgcaggctgccgacttcgacgagaacggcctgatcaagagcctgcccaacactccttggcagctgcgcgctgccgctctggaccgcaagctgactcctctggagtggagcgccgtgctgctgcacctgatcaagcaccgcggctacctgagccagcgcaagaacgagggcgagaccgccgacaaggagctgggtgctctgctgaagggcgtggccgacaacgcccacgccctgcagactggtgacttccgcactcctgctgagctggccctgaacaagttcgagaaggagagcggccacatccgcaaccagcgcggcgactacagccacaccttcagccgcaaggacctgcaggccgagctgatcctgctgttcgagaagcagaaggagttcggcaacccccacgtgagcggcggcctgaaggagggcatcgagaccctgctgatgacccagcgccccgccctgagcggcgacgccgtgcagaagatgctgggccactgcaccttcgagccagccgagcccaaggccgccaagaacacctacaccgccgagcgcttcatctggctgaccaagctgaacaacctgcgcatcctggagcagggcagcgagcgccccctgaccgacaccgagcgcgccaccctgatggacgagccctaccgcaagagcaagctgacctacgcccaggcccgcaagctgctgggtctggaggacaccgccttcttcaagggcctgcgctacggcaaggacaacgccgaggccagcaccctgatggagatgaaggcctaccacgccatcagccgcgccctggagaaggagggcctgaaggacaagaagagtcctctgaacctgagccccgagctgcaggacgagatcggcaccgccttcagcctgttcaagaccgacgaggacatcaccggccgcctgaaggaccgcatccagcccgagatcctggaggccctgctgaagcacatcagcttcgacaagttcgtgcagatcagcctgaaggccctgcgccgcatcgtgcccctgatggagcagggcaagcgctacgacgaggcctgcgccgagatctacggcgaccactacggcaagaagaacaccgaggagaagatctacctgcctcctatccccgccgacgagatccgcaaccccgtggtgctgcgcgccctgagccaggcccgcaaggtgatcaacggcgtggtgcgccgctacggcagccccgcccgcatccacatcgagaccgcccgcgaggtgggcaagagcttcaaggaccgcaaggagatcgagaagcgccaggaggagaaccgcaaggaccgcgagaaggccgccgccaagttccgcgagtacttccccaacttcgtgggcgagcccaagagcaaggacatcctgaagctgcgcctgtacgagcagcagcacggcaagtgcctgtacagcggcaaggagatcaacctgggccgcctgaacgagaagggctacgtggagatcgccgctgccctgcccttcagccgcacctgggacgacagcttcaacaacaaggtgctggtgctgggcagcgaggctcagaacaagggcaaccagaccccctacgagtacttcaacggcaaggacaacagccgcgagtggcaggagttcaaggcccgcgtggagaccagccgcttcccccgcagcaagaagcagcgcatcctgctgcagaagttcgacgaggacggcttcaaggagcgcaacctgaacgacacccgctacgtgaaccgcttcctgtgccagttcgtggccgaccgcatgcgcctgaccggcaagggcaagaagcgcgtgttcgccagcaacggccagatcaccaacctgctgcgcggcttctggggcctgcgcaaggtgcgcgccgagaacgaccgccaccacgccctggacgccgtggtggtggcctgcagcaccgtggccatgcagcagaagatcacccgcttcgtgcgctacaaggagatgaacgccttcgacggtaaaaccatcgacaaggagaccggcgaggtgctgcaccagaagacccacttcccccagccctgggagttcttcgcccaggaggtgatgatccgcgtgttcggcaagcccgacggcaagcccgagttcgaggaggccgacacccccgagaagctgcgcaccctgctggccgagaagctgagcagccgccctgaggccgtgcacgagtacgtgactcctctgttcgtgagccgcgcccccaaccgcaagatgagcggtcagggtcacatggagaccgtgaagagcgccaagcgcctggacgagggcgtgagcgtgctgcgcgtgcccctgacccagctgaagctgaaggacctggagaagatggtgaaccgcgagcgcgagcccaagctgtacgaggccctgaaggcccgcctggaggcccacaaggacgaccccgccaaggccttcgccgagcccttctacaagtacgacaaggccggcaaccgcacccagcaggtgaaggccgtgcgcgtggagcaggtgcagaagaccggcgtgtgggtgcgcaaccacaacggcatcgccgacaacgccaccatggtgcgcgtggacgtgttcgagaagggcgacaagtactacctggtgcccatctacagctggcaggtggccaagggcatcctgcccgaccgcgccgtggtgcagggcaaggacgaggaggactggcagctgatcgacgacagcttcaacttcaagttcagcctgcaccccaacgacctggtggaggtgatcaccaagaaggcccgcatgttcggctacttcgccagctgccaccgcggcaccggcaacatcaacatccgcatccacgacctggaccacaagatcggcaagaacggcatcctggagggcatcggcgtgaagaccgccctgagcttccagaagtaccagatcgacgagctgggcaaggagatccgcccctgccgcctgaagaagcgccctcctgtgcgcagcagggctgaccccaagaagaagaggaaggtggaggccagcggttccggacgggctgacgcattggacgattttgatctggatatgctgggaagtgacgccctcgatgattttgaccttgacatgcttggttcggatgcccttgatgactttgacctcgacatgctcggcagtgacgcccttgatgatttcgacctggacatgctgattaactctagatga

SEQ ID NO: 23 - DNA, 3489 bp, Neisseria meningitidis
  source 1..3489: mol_type = other DNA
atgcccaagaagaagaggaaggtggccgccttcaagcccaaccccatcaactacatcctgggcctggccatcggcatcgccagcgtgggctgggccatggtggagatcgacgaggacgagaaccccatctgcctgatcgacctgggtgtgcgcgtgttcgagcgcgctgaggtgcccaagactggtgacagtctggctatggctcgccggcttgctcgctctgttcggcgccttactcgccggcgcgctcaccgccttctgcgcgctcgccgcctgctgaagcgcgagggtgtgctgcaggctgccgacttcgacgagaacggcctgatcaagagcctgcccaacactccttggcagctgcgcgctgccgctctggaccgcaagctgactcctctggagtggagcgccgtgctgctgcacctgatcaagcaccgcggctacctgagccagcgcaagaacgagggcgagaccgccgacaaggagctgggtgctctgctgaagggcgtggccgacaacgcccacgccctgcagactggtgacttccgcactcctgctgagctggccctgaacaagttcgagaaggagagcggccacatccgcaaccagcgcggcgactacagccacaccttcagccgcaaggacctgcaggccgagctgatcctgctgttcgagaagcagaaggagttcggcaacccccacgtgagcggcggcctgaaggagggcatcgagaccctgctgatgacccagcgccccgccctgagcggcgacgccgtgcagaagatgctgggccactgcaccttcgagccagccgagcccaaggccgccaagaacacctacaccgccgagcgcttcatctggctgaccaagctgaacaacctgcgcatcctggagcagggcagcgagcgccccctgaccgacaccgagcgcgccaccctgatggacgagccctaccgcaagagcaagctgacctacgcccaggcccgcaagctgctgggtctggaggacaccgccttcttcaagggcctgcgctacggcaaggacaacgccgaggccagcaccctgatggagatgaaggcctaccacgccatcagccgcgccctggagaaggagggcctgaaggacaagaagagtcctctgaacctgagccccgagctgcaggacgagatcggcaccgccttcagcctgttcaagaccgacgaggacatcaccggccgcctgaaggaccgcatccagcccgagatcctggaggccctgctgaagcacatcagcttcgacaagttcgtgcagatcagcctgaaggccctgcgccgcatcgtgcccctgatggagcagggcaagcgctacgacgaggcctgcgccgagatctacggcgaccactacggcaagaagaacaccgaggagaagatctacctgcctcctatccccgccgacgagatccgcaaccccgtggtgctgcgcgccctgagccaggcccgcaaggtgatcaacggcgtggtgcgccgctacggcagccccgcccgcatccacatcgagaccgcccgcgaggtgggcaagagcttcaaggaccgcaaggagatcgagaagcgccaggaggagaaccgcaaggaccgcgagaaggccgccgccaagttccgcgagtacttccccaacttcgtgggcgagcccaagagcaaggacatcctgaagctgcgcctgtacgagcagcagcacggcaagtgcctgtacagcggcaaggagatcaacctgggccgcctgaacgagaagggctacgtggagatcgccgctgccctgcccttcagccgcacctgggacgacagcttcaacaacaaggtgctggtgctgggcagcgaggctcagaacaagggcaaccagaccccctacgagtacttcaacggcaaggacaacagccgcgagtggcaggagttcaaggcccgcgtggagaccagccgcttcccccgcagcaagaagcagcgcatcctgctgcagaagttcgacgaggacggcttcaaggagcgcaacctgaacgacacccgctacgtgaaccgcttcctgtgccagttcgtggccgaccgcatgcgcctgaccggcaagggcaagaagcgcgtgttcgccagcaacggccagatcaccaacctgctgcgcggcttctggggcctgcgcaaggtgcgcgccgagaacgaccgccaccacgccctggacgccgtggtggtggcctgcagcaccgtggccatgcagcagaagatcacccgcttcgtgcgctacaaggagatgaacgccttcgacggtaaaaccatcgacaaggagaccggcgaggtgctgcaccagaagacccacttcccccagccctgggagttcttcgcccaggaggtgatgatccgcgtgttcggcaagcccgacggcaagcccgagttcgaggaggccgacacccccgagaagctgcgcaccctgctggccgagaagctgagcagccgccctgaggccgtgcacgagtacgtgactcctctgttcgtgagccgcgcccccaaccgcaagatgagcggtcagggtcacatggagaccgtgaagagcgccaagcgcctggacgagggcgtgagcgtgctgcgcgtgcccctgacccagctgaagctgaaggacctggagaagatggtgaaccgcgagcgcgagcccaagctgtacgaggccctgaaggcccgcctggaggcccacaaggacgaccccgccaaggccttcgccgagcccttctacaagtacgacaaggccggcaaccgcacccagcaggtgaaggccgtgcgcgtggagcaggtgcagaagaccggcgtgtgggtgcgcaaccacaacggcatcgccgacaacgccaccatggtgcgcgtggacgtgttcgagaagggcgacaagtactacctggtgcccatctacagctggcaggtggccaagggcatcctgcccgaccgcgccgtggtgcagggcaaggacgaggaggactggcagctgatcgacgacagcttcaacttcaagttcagcctgcaccccaacgacctggtggaggtgatcaccaagaaggcccgcatgttcggctacttcgccagctgccaccgcggcaccggcaacatcaacatccgcatccacgacctggaccacaagatcggcaagaacggcatcctggagggcatcggcgtgaagaccgccctgagcttccagaagtaccagatcgacgagctgggcaaggagatccgcccctgccgcctgaagaagcgccctcctgtgcgcagcagggctgaccccaagaagaagaggaaggtggaggccagcggttccggacgggctgacgcattggacgattttgatctggatatgctgggaagtgacgccctcgatgattttgaccttgacatgcttggttcggatgcccttgatgactttgacctcgacatgctcggcagtgacgcccttgatgatttcgacctggacatgctgattaactctagatga

SEQ ID NO: 24 - DNA, 3249 bp, Neisseria meningitidis
  source 1..3249: mol_type = other DNA
atggctgccttcaaacctaattcaatcaactacatcctcggcctcgatatcggcatcgcatccgtcggctgggcgatggtagaaattgacgaagaagaaaaccccatccgcctgattgatttgggcgtgcgcgtatttgagcgtgccgaagtaccgaaaacaggcgactcccttgccatggcaaggcgtttggcgcgcagtgttcgccgcctgacccgccgtcgcgcccaccgcctgcttcggacccgccgcctattgaaacgcgaaggcgtattacaagccgccaattttgacgaaaacggcttgattaaatccttaccgaatacaccatggcaacttcgcgcagccgcattagaccgcaaactgacgcctttagagtggtcggcagtcttgttgcatttaatcaaacatcgcggctatttatcgcaacggaaaaacgagggcgaaactgccgataaggagcttggcgctttgcttaaaggcgtagccggcaatgcccatgccttacagacaggcgatttccgcacaccggccgaattggctttaaataaatttgagaaagaaagcggccatatccgcaatcagcgcagcgattattcgcatacgttcagccgcaaagatttacaggcggagctgattttgctgtttgaaaaacaaaaagaatttggcaatccgcatgtttcaggcggccttaaagaaggtattgaaaccctactgatgacgcaacgccctgccctgtccggcgatgccgttcaaaaaatgttggggcattgcaccttcgaaccggcagagccgaaagccgctaaaaacacctacacagccgaacgtttcatctggctgaccaagctgaacaacctgcgtattttagagcaaggcagcgagcggccattgaccgataccgaacgcgccacgcttatggacgagccatacagaaaatccaaactgacttacgcacaagcccgtaagctgctgggtttagaagataccgcctttttcaaaggcttgcgctatggtaaagacaatgccgaagcctcaacattgatggaaatgaaggcctaccatgccatcagccgtgcactggaaaaagaaggattgaaagacaaaaaatccccattaaacctttctcccgaattacaagacgaaatcggcacggcattctccctgttcaaaaccgatgaagacattacaggccgtctgaaagaccgtatacagcccgaaatcttagaagcgctgttgaaacacatcagcttcgataagttcgtccaaatttccttgaaagcattgcgccgaattgtgcctctaatggaacaaggcaaacgttacgatgaagcctgcgccgaaatctacggagaccattacggcaagaagaatacggaagaaaagatttatctgccgccgattcccgccgacgaaatccgcaaccccgtcgtcttgcgcgccttatctcaagcacgtaaggtcattaacggcgtggtacgccgttacggctccccagctcgtatccatattgaaactgcaagggaagtaggtaaatcgtttaaagaccgcaaagaaattgagaaacgccaagaagaaaaccgcaaagaccgggaaaaagccgccgccaaattccgagagtatttccccaattttgtcggagaacccaaatccaaagatattctgaaactgcgcctgtacgagcaacaacacggcaaatgcctgtattcgggcaaagaaatcaacttaggccgtctgaacgaaaaaggctatgtcgaaatcgaccatgccctgccgttctcgcgcacatgggacgacagtttcaacaataaagtactggtattgggcagcgaaaaccaaaacaaaggcaatcaaaccccttacgaatacttcaacggcaaagacaacagccgcgaatggcaggaatttaaagcgcgtgtcgaaaccagccgtttcccgcgcagtaaaaaacaacggattctgctgcaaaaattcgatgaagacggctttaaagaacgcaatctgaacgacacgcgctacgtcaaccgtttcctgtgtcaatttgttgccgaccgtatgcggctgacaggtaaaggcaagaaacgtgtctttgcatccaacggacaaattaccaatctgttgcgcggcttttggggattgcgcaaagtgcgtgcggaaaacgaccgccatcacgccttggacgccgtcgtcgttgcctgctcgaccgttgccatgcagcagaaaattacccgttttgtacgctataaagagatgaacgcgtttgacggtaaaaccatagacaaagaaacaggagaagtgctgcatcaaaaaacacacttcccacaaccttgggaatttttcgcacaagaagtcatgattcgcgtcttcggcaaaccggacggcaaacccgaattcgaagaagccgataccctagaaaaactgcgcacgttgcttgccgaaaaattatcatctcgccccgaagccgtacacgaatacgttacgccactgtttgtttcacgcgcgcccaatcggaagatgagcgggcaagggcatatggagaccgtcaaatccgccaaacgactggacgaaggcgtcagcgtgttgcgcgtaccgctgacacagttaaaactgaaagacttggaaaaaatggtcaatcgggagcgcgaacctaagctatacgaagcactgaaagcacggctggaagcacataaagacgatcctgccaaagcctttgccgagccgttttacaaatacgataaagcaggcaaccgcacccaacaggtaaaagccgtacgcgtagagcaagtacagaaaaccggcgtatgggtgcgcaaccataacggtattgccgacaacgcaaccatggtgcgcgtagatgtgtttgagaaaggcgacaagtattatctggtaccgatttacagttggcaggtagcgaaagggattttgccggatagggctgttgtacaaggaaaagatgaagaagattggcaacttattgatgatagtttcaactttaaattctcattacaccctaatgatttagtcgaggttataacaaaaaaagctagaatgtttggttactttgccagctgccatcgaggcacaggtaatatcaatatacgcattcatgatcttgatcataaaattggcaaaaatggaatactggaaggtatcggcgtcaaaaccgccctttcattccaaaaataccaaattgacgaactgggcaaagaaatcagaccatgccgtctgaaaaaacgcccgcctgtccgttaa

SEQ ID NO: 25 - DNA, 4188 bp, Treponema denticola
  source 1..4188: mol_type = other DNA
atgaaaaaggaaattaaggattattttctcggattggatgtaggaaccggatcggttggttgggcagttactgatactgactataaactcttaaaggctaatcgtaaagacctttggggaatgaggtgttttgagacggcggaaactgcggaagtgagaaggcttcacaggggggctaggcgccgtattgagagaagaaaaaaaagaataaagctgcttcaagagcttttttcccaagaaattgcaaaaacagatgagggatttttccaaagaatgaaggaaagccctttctatgcagaagacaagactatattacaggaaaacactctttttaatgataaagattttgccgataagacctaccataaagcctatcctaccataaaccatctgataaaggcttggattgaaaacaaggtaaagccggatccaaggttattatacttagcctgtcataatattataaaaaaaagaggtcattttttattcgagggcgatttcgattcagaaaatcagtttgatacttctatacaagccctttttgaatatctgcgtgaagatatggaagtcgatattgatgccgatagccaaaaagtaaaagagattttaaaggatagctctttaaaaaattccgaaaaacaaagccgcctaaataagattttaggactgaaaccctccgacaaacaaaaaaaagctattactaatttaatatcaggcaacaaaataaactttgccgatctttatgataatccggatttaaaggatgcggagaaaaatagtatatctttttcgaaagatgattttgatgctttgagtgatgatcttgcttccattctaggagattcttttgagcttttattaaaagcaaaggctgtatataactgctcggttctttccaaggtaataggcgatgaacagtatctttcttttgcaaaggtaaaaatatatgaaaagcataaaaccgatttgactaaattaaaaaatgttataaaaaagcatttcccaaaagattataaaaaagtattcggatacaataaaaacgaaaaaaataacaacaattactccggatatgtaggcgtatgtaaaaccaagagtaaaaaactaattataaacaattctgtaaatcaagaagatttttacaaatttttaaaaactatcctttcagcaaaatccgagataaaggaagtaaatgatatattgaccgaaattgaaacagggacttttttacctaaacagatatctaaaagcaatgcggagattccttatcaattacgcaagatggagctggaaaaaatattatcaaacgcagaaaaacatttttcctttttaaaacaaaaagatgaaaaaggtttatctcacagtgaaaagattataatgcttttaacatttaagattccttattatattggacctataaacgataaccataaaaaattttttcccgatagatgctgggtagtaaaaaaagaaaaatcgccttccggtaaaactactccatggaacttttttgatcatatcgataaagaaaaaacagctgaagcatttattacaagcagaaccaatttttgcacatatttagtaggggaatccgttttaccaaaaagttctcttttatattccgagtataccgttttaaatgaaatcaacaatttacagattatcattgacggaaaaaatatctgcgatattaaactaaaacaaaaaatatacgaagatttatttaaaaaatataaaaagattacacaaaaacaaatttcaacttttatcaaacacgaaggtatttgcaataaaactgatgaagtaattattctaggtatcgataaagaatgtacatcttcgttaaaatcatatatagaacttaaaaacatattcggaaagcaagtagatgaaatttctacaaagaatatgcttgaagaaattatacgatgggctactatctatgatgaaggagaaggcaaaacaatacttaaaacaaaaataaaagccgaatatggaaaatattgttctgatgaacagatcaaaaaaattctaaatcttaaattttcaggttggggccgcttgtcacgcaaattccttgaaaccgtcacatcagaaatgccgggttttagcgaaccggtaaatataataactgcaatgcgggaaactcaaaataatttaatggagttgcttagcagtgaatttacatttactgaaaatattaaaaagataaattcgggatttgaagatgctgaaaagcaattttcatatgacggtttggttaagcctctgtttttatcaccatcggtaaaaaaaatgttgtggcagactctaaagcttgtaaaagaaatatcgcatattacccaagcccctcctaaaaaaatatttatagaaatggcaaagggtgcagagcttgaacctgcgaggactaagacaagattaaaaattttacaagacttatacaataactgtaaaaatgatgcggatgcttttagttccgagataaaagacctttcaggtaaaatagaaaatgaagataatttaaggcttcgaagcgacaaactttatctttattacacgcagcttggaaagtgcatgtattgcggtaaaccgattgaaataggccatgtatttgatacaagcaactatgatatagatcatatttatccccaatccaagattaaagatgacagtataagtaatcgggttttagtatgcagcagctgcaataaaaataaggaagataaatatcctttgaagtctgaaattcaatcaaagcaaaggggcttttggaattttttacaacgaaataactttataagccttgaaaaattgaataggttaacaagggccactccaatctcggatgacgaaacggcaaaattcattgccagacagcttgtagaaacaagacaggcgacaaaagtagctgcaaaagtattagaaaaaatgtttcccgaaactaagattgtttattctaaagctgaaaccgtatcaatgtttagaaataaattcgatattgtaaaatgcagagaaataaacgattttcatcatgctcatgatgcatatttaaatattgttgtcggaaatgtatataatacaaaatttacaaataatccttggaactttataaaggagaaacgggataatccaaagattgccgatacttacaattattataaagtttttgattatgatgtaaaaagaaataatattacggcatgggaaaaaggaaaaacaattatcactgtgaaggatatgcttaaaagaaatacccctatttatacacgccaagccgcctgcaaaaaaggagaactctttaaccaaaccattatgaaaaaaggattgggccagcatcctctaaaaaaagaaggtcctttttctaatatttcaaaatatgggggctataataaagtctctgctgcatattatactcttatagaatacgaagaaaaagggaataaaatacgaagcttagaaaccatccctctatatttggtaaaagacattcaaaaagatcaagatgtattaaagagttacttaacagatctgctagggaaaaaagaatttaagattttggttcctaaaataaaaatcaactccctcttaaaaattaacggtttcccttgtcatataacagggaaaaccaatgattctttcttactgcgtccggctgttcagttttgctgttcaaataatgaagttctttattttaaaaaaattataagattcagtgaaataagaagtcaaagagaaaagataggaaaaacaatttctccttatgaagacttatcctttagatcttatatcaaagaaaatttatggaaaaagacaaaaaatgatgaaataggagaaaaggagttttatgaccttcttcaaaagaagaatttggaaatctatgatatgcttttaacaaaacataaggatactatttataaaaaaagacctaactctgcaactattgatatcttagtcaaaggaaaagaaaagtttaaatctttaataatcgaaaatcagtttgaagttattttagagattttaaaactgttttctgccactagaaatgtatcagacttacaacatataggcggaagcaaatattcaggagttgcaaagataggaaataaaatatctagtcttgataactgtattttaatttaccaatcaataacaggtatttttgaaaaaaggattgatttgttaaaggtatga

SEQ ID NO: 26 - DNA, 4188 bp, Treponema denticola
  source 1..4188: mol_type = other DNA
atgaagaaggagatcaaggactacttcctgggcctggacgtgggcaccggcagcgtgggctgggccgtgaccgacaccgactacaagctgctgaaggccaaccgcaaggacctgtggggcatgcgctgcttcgagactgctgagaccgccgaggtgcgccggctgcaccgcggtgctcgccggcgcatcgagcgccgcaagaagcgcatcaagctgctgcaggagctgttcagccaggagatcgccaagaccgacgagggcttcttccagcgcatgaaggagagccccttctacgccgaggacaagaccatcctgcaggagaacaccctgttcaacgacaaggacttcgccgacaagacctaccacaaggcctaccccaccatcaaccacctgatcaaggcctggatcgagaacaaggtgaagcccgaccctcgcctgctgtacctggcctgccacaacatcatcaagaagcgcggccacttcctgttcgagggcgacttcgacagcgagaaccagttcgacaccagcatccaggccctgttcgagtacctgcgcgaggacatggaggtggacatcgacgccgacagccagaaggtgaaggagatcctgaaggacagcagcctgaagaacagcgagaagcagagccgcctgaacaagatcctgggcctgaagcccagcgacaagcagaagaaggccatcaccaacctgatcagcggcaacaagatcaacttcgccgacctgtacgacaaccccgacctgaaggacgccgagaagaacagcatcagcttcagcaaggacgacttcgacgccctgagcgacgacctggccagcatcctgggcgacagcttcgagctgctgctgaaggccaaggccgtgtacaactgcagcgtgctgagcaaggtgatcggcgacgagcagtacctgagcttcgccaaggtgaagatctacgagaagcacaagaccgaccttaccaagctgaagaacgtgatcaagaagcacttccccaaggactacaagaaggtgttcggctacaacaagaacgagaagaacaacaacaactacagcggctacgtgggcgtgtgcaagaccaagagcaagaagctgatcatcaacaacagcgtgaaccaggaggacttctacaagttcctgaagaccatcctgagcgccaagagcgagatcaaggaggtgaacgacatcctgaccgagatcgagaccggcaccttcctgcccaagcagatcagcaagagcaacgccgagatcccctaccagctgcgcaagatggagctggagaagatcctgagcaacgccgagaagcacttcagcttcctgaagcagaaggacgagaagggcctgagccacagcgagaagatcatcatgctgctgaccttcaagatcccctactacatcggccccatcaacgacaaccacaagaagttcttccccgaccgctgctgggtggtgaagaaggagaagagccccagcggcaagaccaccccctggaacttcttcgaccacatcgacaaggagaagaccgccgaggccttcatcaccagccgcaccaacttctgcacatacctggtgggcgagagcgtgctgcccaagagcagcctgctgtacagcgagtacaccgtgctgaacgagatcaacaacctgcagatcatcatcgacggcaagaacatctgcgacatcaagctgaagcagaagatctacgaggacctgttcaagaagtacaagaagatcacccagaagcagatcagcaccttcatcaagcacgagggcatctgcaacaagaccgacgaggtgatcatcctgggcatcgacaaggagtgcaccagcagcctgaagagctacatcgagctgaagaacatcttcggcaagcaggtggacgagatcagcaccaagaacatgctggaggagatcatccgctgggccaccatctacgacgagggcgagggcaagaccatcctgaagaccaagatcaaggccgagtacggcaagtactgcagcgacgagcagatcaagaagatcctgaacctgaagttcagcggctggggccgcctgagccgcaagttcctggagaccgtgaccagcgagatgcccggcttcagcgagcccgtgaacatcatcaccgccatgcgcgagacccagaacaacctgatggagctgctgagcagcgagttcaccttcaccgagaacatcaagaagatcaacagcggcttcgaggacgccgagaagcagttcagctacgacggcctggtgaagcccctgttcctgagccccagcgtgaagaagatgctgtggcagaccctgaagctggtgaaggagatcagccacatcacccaggctcctcctaagaagatcttcatcgagatggccaagggcgccgagctggagcctgctcgcaccaagacccgcctgaagatcctgcaggacctgtacaacaactgcaagaacgacgccgacgcattcagcagcgagatcaaggacctgagcggcaagatcgagaacgaggacaacctgcgcctgcgcagcgacaagctgtacctgtactacacccagctgggcaagtgcatgtactgcggcaagcccatcgagatcggccacgtgttcgacaccagcaactacgacatcgaccacatctacccccagagcaagatcaaggacgacagcatcagcaaccgcgtgctggtgtgcagcagctgcaacaagaacaaggaggacaagtaccctctgaagagcgagatccagagcaagcagcgcggcttctggaacttcctgcagcgcaacaacttcatcagcctggagaagctgaaccgcctgacccgcgccacccccatcagcgacgacgagaccgccaagttcatcgcccgccagctggtggagactcgccaagctaccaaggtggccgccaaggtgctggagaagatgttccccgagaccaagatcgtgtacagcaaggccgagaccgtgagcatgttccgcaacaagttcgacatcgtgaagtgccgcgagatcaacgacttccaccacgcccacgacgcctacctgaacatcgtggtgggcaacgtgtacaacaccaagttcaccaacaacccctggaatttcattaaggagaagcgcgacaaccccaagatcgccgacacctacaactactacaaggtgttcgactacgacgtgaagcgcaacaacatcaccgcctgggagaagggcaagaccatcatcaccgtgaaggacatgctgaagcgcaacacccccatctacacccgccaggccgcctgcaagaagggcgagctgttcaaccagaccatcatgaagaagggcctgggccagcaccccctgaagaaggagggccccttcagcaacatcagcaagtacggcggctacaacaaggtgagcgccgcctactacaccctgatcgagtacgaggagaagggcaacaagatccgcagcctggagaccatccccctgtacctggtgaaggacatccagaaggaccaggacgtgctgaagagctacctgaccgacctgctgggcaagaaggagttcaagatcctggtgcccaagatcaagatcaacagcctgctgaagatcaacggcttcccctgccacatcaccggcaagaccaacgacagcttcctgctgcgccccgccgtgcagttctgctgcagcaacaacgaggtgctgtacttcaagaagatcatccgcttcagcgagatccgcagccagcgcgagaagatcggcaagaccatcagcccctacgaggacctgagcttccgcagctacatcaaggagaacctgtggaagaagaccaagaacgacgagatcggcgagaaggagttctacgacctgctgcagaagaagaacctggagatctacgacatgctgctgaccaagcacaaggacaccatctacaagaagcgccccaacagcgccaccatcgacatcctggtgaagggcaaggagaagttcaagagcctgatcatcgagaaccagttcgaggtgatcctggagatcctgaagctgttcagcgccacccgcaacgtgagcgacctgcagcacatcggcggcagcaagtacagcggcgtggccaagatcggcaacaagatcagcagcctggacaactgcatcctgatctaccagagcatcaccggcatcttcgagaagcgcatcgacctgctgaaggtgtaa

SEQ ID NO: 27 - DNA, 4188 bp, Treponema denticola
  source 1..4188: mol_type = other DNA
atgaagaaggagatcaaggactacttcctgggcctggccgtgggcaccggcagcgtgggctgggccgtgaccgacaccgactacaagctgctgaaggccaaccgcaaggacctgtggggcatgcgctgcttcgagactgctgagaccgccgaggtgcgccggctgcaccgcggtgctcgccggcgcatcgagcgccgcaagaagcgcatcaagctgctgcaggagctgttcagccaggagatcgccaagaccgacgagggcttcttccagcgcatgaaggagagccccttctacgccgaggacaagaccatcctgcaggagaacaccctgttcaacgacaaggacttcgccgacaagacctaccacaaggcctaccccaccatcaaccacctgatcaaggcctggatcgagaacaaggtgaagcccgaccctcgcctgctgtacctggcctgccacaacatcatcaagaagcgcggccacttcctgttcgagggcgacttcgacagcgagaaccagttcgacaccagcatccaggccctgttcgagtacctgcgcgaggacatggaggtggacatcgacgccgacagccagaaggtgaaggagatcctgaaggacagcagcctgaagaacagcgagaagcagagccgcctgaacaagatcctgggcctgaagcccagcgacaagcagaagaaggccatcaccaacctgatcagcggcaacaagatcaacttcgccgacctgtacgacaaccccgacctgaaggacgccgagaagaacagcatcagcttcagcaaggacgacttcgacgccctgagcgacgacctggccagcatcctgggcgacagcttcgagctgctgctgaaggccaaggccgtgtacaactgcagcgtgctgagcaaggtgatcggcgacgagcagtacctgagcttcgccaaggtgaagatctacgagaagcacaagaccgaccttaccaagctgaagaacgtgatcaagaagcacttccccaaggactacaagaaggtgttcggctacaacaagaacgagaagaacaacaacaactacagcggctacgtgggcgtgtgcaagaccaagagcaagaagctgatcatcaacaacagcgtgaaccaggaggacttctacaagttcctgaagaccatcctgagcgccaagagcgagatcaaggaggtgaacgacatcctgaccgagatcgagaccggcaccttcctgcccaagcagatcagcaagagcaacgccgagatcccctaccagctgcgcaagatggagctggagaagatcctgagcaacgccgagaagcacttcagcttcctgaagcagaaggacgagaagggcctgagccacagcgagaagatcatcatgctgctgaccttcaagatcccctactacatcggccccatcaacgacaaccacaagaagttcttccccgaccgctgctgggtggtgaagaaggagaagagccccagcggcaagaccaccccctggaacttcttcgaccacatcgacaaggagaagaccgccgaggccttcatcaccagccgcaccaacttctgcacatacctggtgggcgagagcgtgctgcccaagagcagcctgctgtacagcgagtacaccgtgctgaacgagatcaacaacctgcagatcatcatcgacggcaagaacatctgcgacatcaagctgaagcagaagatctacgaggacctgttcaagaagtacaagaagatcacccagaagcagatcagcaccttcatcaagcacgagggcatctgcaacaagaccgacgaggtgatcatcctgggcatcgacaaggagtgcaccagcagcctgaagagctacatcgagctgaagaacatcttcggcaagcaggtggacgagatcagcaccaagaacatgctggaggagatcatccgctgggccaccatctacgacgagggcgagggcaagaccatcctgaagaccaagatcaaggccgagtacggcaagtactgcagcgacgagcagatcaagaagatcctgaacctgaagttcagcggctggggccgcctgagccgcaagttcctggagaccgtgaccagcgagatgcccggcttcagcgagcccgtgaacatcatcaccgccatgcgcgagacccagaacaacctgatggagctgctgagcagcgagttcaccttcaccgagaacatcaagaagatcaacagcggcttcgaggacgccgagaagcagttcagctacgacggcctggtgaagcccctgttcctgagccccagcgtgaagaagatgctgtggcagaccctgaagctggtgaaggagatcagccacatcacccaggctcctcctaagaagatcttcatcgagatggccaagggcgccgagctggagcctgctcgcaccaagacccgcctgaagatcctgcaggacctgtacaacaactgcaagaacgacgccgacgcattcagcagcgagatcaaggacctgagcggcaagatcgagaacgaggacaacctgcgcctgcgcagcgacaagctgtacctgtactacacccagctgggcaagtgcatgtactgcggcaagcccatcgagatcggccacgtgttcgacaccagcaactacgacatcgctgctatctacccccagagcaagatcaaggacgacagcatcagcaaccgcgtgctggtgtgcagcagctgcgccaagaacaaggaggacaagtaccctctgaagagcgagatccagagcaagcagcgcggcttctggaacttcctgcagcgcaacaacttcatcagcctggagaagctgaaccgcctgacccgcgccacccccatcagcgacgacgagaccgccaagttcatcgcccgccagctggtggagactcgccaagctaccaaggtggccgccaaggtgctggagaagatgttccccgagaccaagatcgtgtacagcaaggccgagaccgtgagcatgttccgcaacaagttcgacatcgtgaagtgccgcgagatcaacgacttccaccacgcccacgacgcctacctgaacatcgtggtgggcaacgtgtacaacaccaagttcaccaacaacccctggaatttcattaaggagaagcgcgacaaccccaagatcgccgacacctacaactactacaaggtgttcgactacgacgtgaagcgcaacaacatcaccgcctgggagaagggcaagaccatcatcaccgtgaaggacatgctgaagcgcaacacccccatctacacccgccaggccgcctgcaagaagggcgagctgttcaaccagaccatcatgaagaagggcctgggccagcaccccctgaagaaggagggccccttcagcaacatcagcaagtacggcggctacaacaaggtgagcgccgcctactacaccctgatcgagtacgaggagaagggcaacaagatccgcagcctggagaccatccccctgtacctggtgaaggacatccagaaggaccaggacgtgctgaagagctacctgaccgacctgctgggcaagaaggagttcaagatcctggtgcccaagatcaagatcaacagcctgctgaagatcaacggcttcccctgccacatcaccggcaagaccaacgacagcttcctgctgcgccccgccgtgcagttctgctgcagcaacaacgaggtgctgtacttcaagaagatcatccgcttcagcgagatccgcagccagcgcgagaagatcggcaagaccatcagcccctacgaggacctgagcttccgcagctacatcaaggagaacctgtggaagaagaccaagaacgacgagatcggcgagaaggagttctacgacctgctgcagaagaagaacctggagatctacgacatgctgctgaccaagcacaaggacaccatctacaagaagcgccccaacagcgccaccatcgacatcctggtgaagggcaaggagaagttcaagagcctgatcatcgagaaccagttcgaggtgatcctggagatcctgaagctgttcagcgccacccgcaacgtgagcgacctgcagcacatcggcggcagcaagtacagcggcgtggccaagatcggcaacaagatcagcagcctggacaactgcatcctgatctaccagagcatcaccggcatcttcgagaagcgcatcgacctgctgaaggtgtaa

SEQ ID NO: 28 - protein, 1053 aa, Streptococcus aureus
MKRNYILGLDIGITSVGYGIIDYETRDVIDAGVRLFKEANVENNEGRRSKRGARRLKRRRRHRIQRVKKLLFDYNLLTDHSELSGINPYEARVKGLSQKLSEEEFSAALLHLAKRRGVHNVNEVEEDTGNELSTKEQISRNSKALEEKYVAELQLERLKKDGEVRGSINRFKTSDYVKEAKQLLKVQKAYHQLDQSFIDTYIDLLETRRTYYEGPGEGSPFGWKDIKEWYEMLMGHCTYFPEELRSVKYAYNADLYNALNDLNNLVITRDENEKLEYYEKFQIIENVFKQKKKPTLKQIAKEILVNEEDIKGYRVTSTGKPEFTNLKVYHDIKDITARKEIIENAELLDQIAKILTIYQSSEDIQEELTNLNSELTQEEIEQISNLKGYTGTHNLSLKAINLILDELWHTNDNQIAIFNRLKLVPKKVDLSQQKEIPTTLVDDFILSPVVKRSFIQSIKVINAIIKKYGLPNDIIIELAREKNSKDAQKMINEMQKRNRQTNERIEEIIRTTGKENAKYLIEKIKLHDMQEGKCLYSLEAIPLEDLLNNPFNYEVDHIIPRSVSFDNSFNNKVLVKQEENSKKGNRTPFQYLSSSDSKISYETFKKHILNLAKGKGRISKTKKEYLLEERDINRFSVQKDFINRNLVDTRYATRGLMNLLRSYFRVNNLDVKVKSINGGFTSFLRRKWKFKKERNKGYKHHAEDALIIANADFIFKEWKKLDKAKKVMENQMFEEKQAESMPEIETEQEYKEIFITPHQIKHIKDFKDYKYSHRVDKKPNRELINDTLYSTRKDDKGNTLIVNNLNGLYDKDNDKLKKLINKSPEKLLMYHHDPQTYQKLKLIMEQYGDEKNPLYKYYEETGNYLTKYSKKDNGPVIKKIKYYGNKLNAHLDITDDYPNSRNKVVKLSLKPYRFDVYLDNGVYKFVTVKNLDVIKKENYYEVNSKCYEEAKKLKKISNQAEFIASFYNNDLIKINGELYRVIGVNNDLLNRIEVNMIDITYREYLENMNDKRPPRIIKTIASKTQSIKKYSTDILGNLYEVKSKKHPQIIKKG

SEQ ID NO: 29 - DNA, 3162 bp, Streptococcus aureus
  source 1..3162: mol_type = other DNA
atgaaaaggaattatatcttaggattagatatcggaattacatcagtgggttatggaattattgattatgaaactagagatgtcatagatgcgggcgtacgtttatttaaagaggctaatgttgaaaataatgaaggacgacgatcaaaaagaggtgccagaaggcttaagaggcgtcgtagacatagaatacaaagagtaaagaaacttttatttgattacaatttgttgacagatcatagtgagctaagtggaatcaatccttacgaggcgcgcgtaaagggattaagtcaaaaattaagtgaagaggaattttctgcggcattgctacatttagcaaagcgtagaggtgtacataatgttaatgaagtggaagaagatacaggtaatgaattatccactaaagaacaaatttcaagaaatagtaaagcgttagaagagaagtatgttgcagaattacagttggaacgtttgaaaaaagacggtgaagtgagaggttcgattaaccgtttcaaaacatctgactatgtaaaagaagcaaagcagttattaaaagtacaaaaagcatatcatcaacttgatcaatcatttatagacacttatattgatttattggaaacaagaagaacatattatgagggaccaggtgaaggtagcccatttggatggaaagatattaaagaatggtatgaaatgttaatgggacattgtacgtatttcccagaagaattacgtagtgtgaaatatgcctataatgctgatttatataatgcgctgaatgatttgaacaacttggttattacacgagatgagaatgagaagctagagtattatgaaaaattccaaattatcgagaatgtctttaaacaaaagaaaaagccgacgcttaaacaaattgcgaaggaaatcttggtgaatgaagaagacatcaaaggctatcgtgtcacaagtacaggtaaaccagaatttacaaacttgaaagtttatcacgatatcaaagatattacagcaagaaaagaaattatcgagaatgcagagctactcgatcaaatagctaaaatattaactatttaccagtcatcagaagatatacaagaagaattaacaaacctaaattcagaattgacacaagaagagattgaacaaatttcaaacttgaaaggttatacaggaactcataacctttcactaaaggcaataaatttaatattagacgaattgtggcatacgaacgataatcaaatagctattttcaatcgtttgaaacttgtacctaaaaaggtagatttaagccaacaaaaagaaattcctactactttagttgatgattttatactgtctccagtagtgaaacgttcatttatacaatctattaaagttattaacgctattattaaaaaatacggtttgccaaatgatattattattgaacttgcgagagaaaagaattctaaagatgcacaaaaaatgattaatgaaatgcagaagagaaatcgtcaaacgaatgaacgtattgaggaaattataagaacgacaggtaaagaaaatgctaaatatttaattgaaaaaattaagctgcacgatatgcaagaagggaaatgtttatactcgttagaagcaatccctctagaagatttacttaataatccattcaattacgaagtagaccatatcattccacgttctgtttctttcgataactctttcaataataaagtgttggtgaaacaagaagaaaatagtaaaaaaggtaatagaacgccatttcaatatttaagttcttcagattctaaaataagttatgagacattcaaaaagcatattttaaatcttgctaaaggcaaaggtagaatctctaagacgaaaaaagaatatttgttagaagaacgagatatcaatcgcttcagtgtccaaaaagattttattaaccgtaacttagtagatacacgctatgcgacaagagggttaatgaacttattaagatcttattttagagtgaataacttagatgtcaaagtgaaatcgattaatggcggattcacaagtttcttaagaaggaaatggaagttcaaaaaagaaagaaataagggctacaaacaccatgctgaagatgcactgattattgcgaacgctgattttattttcaaagaatggaaaaaactagataaagctaaaaaagtgatggaaaatcaaatgtttgaagaaaagcaagctgaaagtatgcctgaaattgagactgagcaagagtataaagaaatttttataacgcctcatcaaattaaacatattaaggattttaaagattataaatattcacatagagttgataaaaagccgaatagagagttaataaatgatacattatattctacgagaaaagatgacaagggtaatacattaatcgttaataacttaaatggtttatacgataaagataatgataaattgaaaaaattaattaataaatcacctgaaaaattattgatgtatcatcatgatccacaaacatatcaaaaattaaaattgatcatggaacaatatggcgatgagaaaaatccgctttataaatattatgaagaaacaggcaattacttaacaaaatatagtaaaaaagataacggaccagtcatcaaaaaaattaaatattatggtaacaagctaaatgcgcatttagatattacggatgattatccaaatagcagaaataaagtagtaaaactttcattaaaaccatatcgctttgatgtttatttagataatggggtatataaatttgtgacagttaaaaatttagatgttatcaaaaaagaaaactactatgaagttaattcaaagtgttatgaagaagcaaaaaaactgaagaaaattagtaatcaagcagaatttatcgcaagtttttacaataatgacttgattaagattaacggagaattatatagagtcataggtgtaaataatgatctacttaacagaattgaagtaaatatgatagacatcacatatagagaatatttagagaacatgaatgataaaagaccacctagaataattaaaacaatagcaagcaaaacacaatctattaaaaagtattctacagatattctaggcaatctttatgaagtgaagagtaaaaagcatcctcaaatcataaagaaaggatga

SEQ ID NO: 30 - protein, 1629 aa, Francisella tularensis
MNFKILPIAIDLGVKNTGVFSAFYQKGTSLERLDNKNGKVYELSKDSYTLLMNNRTARRHQRRGIDRKQLVKRLFKLIWTEQLNLEWDKDTQQAISFLFNRRGFSFITDGYSPEYLNIVPEQVKAILMDIFDDYNGEDDLDSYLKLATEQESKISEIYNKLMQKILEFKLMKLCTDIKDDKVSTKTLKEITSYEFELLADYLANYSESLKTQKFSYTDKQGNLKELSYYHHDKYNIQEFLKRHATINDRILDTLLTDDLDIWNFNFEKFDFDKNEEKLQNQEDKDHIQAHLHHFVFAVNKIKSEMASGGRHRSQYFQEITNVLDENNHQEGYLKNFCENLHNKKYSNLSVKNLVNLIGNLSNLELKPLRKYFNDKIHAKADHWDEQKFTETYCHWILGEWRVGVKDQDKKDGAKYSYKDLCNELKQKVTKAGLVDFLLELDPCRTIPPYLDNNNRKPPKCQSLILNPKFLDNQYPNWQQYLQELKKLQSIQNYLDSFETDLKVLKSSKDQPYFVEYKSSNQQIASGQRDYKDLDARILQFIFDRVKASDELLLNEIYFQAKKLKQKASSELEKLESSKKLDEVIANSQLSQILKSQHTNGIFEQGTFLHLVCKYYKQRQRARDSRLYIMPEYRYDKKLHKYNNTGRFDDDNQLLTYCNHKPRQKRYQLLNDLAGVLQVSPNFLKDKIGSDDDLFISKWLVEHIRGFKKACEDSLKIQKDNRGLLNHKINIARNTKGKCEKEIFNLICKIEGSEDKKGNYKHGLAYELGVLLFGEPNEASKPEFDRKIKKFNSIYSFAQIQQIAFAERKGNANTCAVCSADNAHRMQQIKITEPVEDNKDKIILSAKAQRLPAIPTRIVDGAVKKMATILAKNIVDDNWQNIKQVLSAKHQLHIPIITESNAFEFEPALADVKGKSLKDRRKKALERISPENIFKDKNNRIKEFAKGISAYSGANLTDGDFDGAKEELDHIIPRSHKKYGTLNDEANLICVTRGDNKNKGNRIFCLRDLADNYKLKQFETTDDLEIEKKIADTIWDANKKDFKFGNYRSFINLTPQEQKAFRHALFLADENPIKQAVIRAINNRNRTFVNGTQRYFAEVLANNIYLRAKKENLNTDKISFDYFGIPTIGNGRGIAEIRQLYEKVDSDIQAYAKGDKPQASYSHLIDAMLAFCIAADEHRNDGSIGLEIDKNYSLYPLDKNTGEVFTKDIFSQIKITDNEFSDKKLVRKKAIEGFNTHRQMTRDGIYAENYLPILIHKELNEVRKGYTWKNSEEIKIFKGKKYDIQQLNNLVYCLKFVDKPISIDIQISTLEELRNILTTNNIAATAEYYYINLKTQKLHEYYIENYNTALGYKKYSKEMEFLRSLAYRSERVKIKSIDDVKQVLDKDSNFIIGKITLPFKKEWQRLYREWQNTTIKDDYEFLKSFFNVKSITKLHKKVRKDFSLPISTNEGKFLVKRKTWDNNFIYQILNDSDSRADGTKPFIPAFDISKNEIVEAIIDSFTSKNIFWLPKNIELQKVDNKNIFAIDTSKWFEVETPSDLRDIGIATIQYKIDNNSRPKVRVKLDYVIDDDSKINYFMNHSLLKSRYPDKVLEILKQSTIIEFESSGFNKTIKEMLGMKLAGIYNETSNN

SEQ ID NO: 31 - DNA, 4890 bp, Francisella tularensis
  source 1..4890: mol_type = other DNA
atgaatttcaaaatattgccaatagcaatagatttaggtgttaaaaatactggtgtctttagcgcattttatcaaaaaggaacttctcttgagagattggataataaaaatggcaaagtatatgaactatcaaaagattcttatactttattgatgaataatagaacagcaagaagacatcaaagaagagggatagatagaaagcagctagtcaaaaggctctttaagcttatttggacagagcagctaaatttagagtgggataaagacactcaacaagcaattagctttttatttaatcgtagaggttttagttttattactgatggttattcgcctgaatatttaaatattgttccagagcaagtaaaagcgatacttatggatatatttgatgattacaacggtgaagatgatttagacagttatttaaaattagctactgagcaagaaagcaaaatttctgaaatttataacaagctaatgcaaaaaatattagagtttaaattaatgaaattatgtactgatattaaggatgataaagtaagtactaaaacgcttaaagaaatcacaagctatgaatttgagttattagctgattatttagcaaactatagcgagagtttaaaaacacaaaaatttagttatacagataaacaaggtaatttaaaagagctaagctactatcatcatgataaatataatattcaagaatttctaaagcgacatgctactataaatgatcgaattttagatactcttttaactgatgatttagatatttggaattttaattttgagaaatttgattttgataagaatgaagaaaagcttcagaatcaggaagataaagatcatatacaagcgcatttacatcattttgtttttgcagtaaataaaataaaaagtgaaatggcaagtggtggtcgtcatcgtagccaatattttcaagagataacaaatgtgctagatgaaaataatcatcaagagggatatctcaagaatttctgtgaaaatttgcataataaaaaatattcaaatttaagtgttaaaaatttagttaatctaattggtaacctaagtaatttagagctaaaaccgctaagaaaatattttaatgacaaaattcacgcaaaagctgatcattgggatgagcaaaagtttacagaaacttattgccactggatattaggagagtggcgagtaggtgtcaaagatcaagataagaaagatggcgctaaatatagttataaagatctgtgtaatgaattaaaacaaaaagttactaaggctggtttggtagattttttattagagttagatccatgtagaactataccaccatatctggataacaataaccgtaaaccaccaaaatgtcaaagtttgattttaaatccgaagtttttagataatcaatatccaaactggcaacaatatttacaagaattaaagaaactacaaagtattcaaaattatttagacagttttgaaactgatttaaaagtcttaaagtcaagtaaagatcaaccatattttgttgaatacaagagttcaaatcagcaaatagcaagtggtcaaagagattataaagatttagatgctcgaatattacagtttatatttgatagggtaaaagctagtgatgagttgcttttgaatgagatttattttcaggctaaaaaacttaaacaaaaagctagctctgagttagaaaaactcgagtcgagcaaaaagctagatgaagttatagcaaatagtcaactatcacagatactaaagtctcaacatacaaatggtatttttgaacagggtacttttttgcatttggtttgtaaatattataaacaaagacaaagagcgagagactctaggctatatattatgcctgaatatcgttatgataaaaaactacataaatataacaatacaggcaggtttgatgatgataatcagctgctaacatattgtaatcataagccaagacaaaaaagataccaattgttaaatgatttagctggggtgttgcaggtatcacctaattttttgaaagataaaattggttctgatgatgatctatttattagcaaatggttggtagagcatattagaggatttaaaaaagcttgtgaagatagtttaaaaatacaaaaagacaatagaggattattaaatcataaaataaatatagctaggaatacaaaaggcaaatgtgaaaaagaaatatttaatttaatatgtaaaatagaaggttcagaagataaaaaaggtaattacaagcatggtttagcttacgaattaggagtacttttatttggtgaacctaatgaagctagtaaacctgagttcgatagaaaaattaaaaaatttaactcaatatacagttttgcacagattcaacaaattgcttttgcagagcgtaaaggcaatgctaacacttgtgcagtttgtagtgctgataatgctcatagaatgcaacaaattaagatcactgagcctgtagaggacaataaagataagataatcttaagtgccaaagctcagagactaccagcgattccaactagaatagttgacggtgcggttaagaaaatggcaactatattagctaaaaatatagttgatgataattggcagaatatcaaacaagttttatcagcaaaacatcagttacatatacctattatcacagaatcaaatgcttttgagtttgaaccagcattagctgatgtaaaaggtaagagcctaaaagataggagaaaaaaagcattagagagaataagtcctgaaaatatattcaaggataaaaacaatagaataaaagaatttgctaaaggtatatcagcatatagtggtgctaatttaactgatggcgattttgatggtgcaaaagaagaattagatcatataatacctcgttcacataaaaaatacggtactctaaatgatgaagcaaatctaatttgtgtaactcgtggtgataataaaaataaaggtaatagaattttctgcctacgtgatcttgcagataactataaactaaaacagtttgagacaactgatgatttagaaattgaaaagaagatagctgatacaatctgggatgctaacaagaaagattttaaatttggtaattatcgtagttttattaacctaacaccacaagagcagaaagcatttcgtcacgcgctatttctggctgatgaaaatcctatcaaacaagcagtcataagagcgataaataatcgtaatcgtacatttgtaaatggcactcaacgctattttgcagaagtactggcaaacaatatctatctaagggctaaaaaagaaaatctaaatacagataaaatttcatttgattattttggtattccaactataggtaatggtagaggtattgctgaaatccgtcaactttatgaaaaagttgatagtgatatacaagcttatgcaaaaggtgataaacctcaagctagctactctcacctaatagatgcgatgctggctttttgtattgctgctgatgaacacagaaatgatggaagtataggtctagaaatcgataaaaattatagtttatatccattagataaaaatacaggagaagtctttaccaaagatatttttagtcaaattaaaattactgataatgagtttagcgataaaaaattagtaagaaaaaaagctatagagggctttaacacgcatagacaaatgactagagatggcatttatgcagaaaattacctaccaatactaatccataaagaactaaatgaagttagaaaaggctatacttggaaaaatagtgaagaaataaaaatattcaaaggtaaaaagtacgatatacaacaattgaataaccttgtgtattgtctaaaatttgtagataaacctatatctatagatatacaaattagtaccttagaagagttaagaaatatattaacaacaaataatatagctgctacagcagaatactattatataaatctaaaaacccaaaaattacatgagtattatatcgaaaactataatactgccttaggttataaaaaatacagtaaagaaatggagtttttgagaagcttagcttatcgtagcgaaagggtaaaaattaaatcaatagatgatgtaaagcaggttttggataaggatagtaactttatcatcggtaagattactttaccatttaaaaaagagtggcaaagactatatcgtgagtggcaaaatacaactatcaaagatgattatgagtttttaaaatcattctttaatgttaaaagtattactaagttgcataaaaaagttagaaaagatttctctttacctatttctacaaatgaaggtaaattcctggtcaaaagaaaaacatgggataacaattttatctatcagatattaaatgattctgattctagagcagacggaacaaagccatttattccagcttttgacatttctaaaaatgaaatagtcgaagccataattgattcatttacatcaaaaaatattttttggctgcctaaaaatatagaattacaaaaggtggataataaaaacatttttgctatagatactagtaaatggttcgaagtagaaacacctagtgatcttagagacattggaatagcaacaattcaatacaagatagataataattctcgccctaaagtcagagttaaacttgattatgttatcgatgatgatagtaagataaattattttatgaatcattctttattaaaatcaagatatcctgacaaagttttagaaattttaaaacaatcaactattatagaatttgaaagttcaggttttaataaaactatcaaagaaatgcttggtatgaaattagcaggtatttataatgaaacatctaataattag

SEQ ID NO: 32 - DNA, 3903 bp, Francisella tularensis
  misc_feature 1..3903: note = Francisella tularensis subsp. novicida (strain U112)
  source 1..3903: mol_type = other DNA
atgtcaatttatcaagaatttgttaataaatatagtttaagtaaaactctaagatttgagttaatcccacagggtaaaacacttgaaaacataaaagcaagaggtttgattttagatgatgagaaaagagctaaagactacaaaaaggctaaacaaataattgataaatatcatcagttttttatagaggagatattaagttcggtttgtattagcgaagatttattacaaaactattctgatgtttattttaaacttaaaaagagtgatgatgataatctacaaaaagattttaaaagtgcaaaagatacgataaagaaacaaatatctgaatatataaaggactcagagaaatttaagaatttgtttaatcaaaaccttatcgatgctaaaaaagggcaagagtcagatttaattctatggctaaagcaatctaaggataatggtatagaactatttaaagccaatagtgatatcacagatatagatgaggcgttagaaataatcaaatcttttaaaggttggacaacttattttaagggttttcatgaaaatagaaaaaatgtttatagtagcaatgatattcctacatctattatttataggatagtagatgataatttgcctaaatttctagaaaataaagctaagtatgagagtttaaaagacaaagctccagaagctataaactatgaacaaattaaaaaagatttggcagaagagctaacctttgatattgactacaaaacatctgaagttaatcaaagagttttttcacttgatgaagtttttgagatagcaaactttaataattatctaaatcaaagtggtattactaaatttaatactattattggtggtaaatttgtaaatggtgaaaatacaaagagaaaaggtataaatgaatatataaatctatactcacagcaaataaatgataaaacactcaaaaaatataaaatgagtgttttatttaagcaaattttaagtgatacagaatctaaatcttttgtaattgataagttagaagatgatagtgatgtagttacaacgatgcaaagtttttatgagcaaatagcagcttttaaaacagtagaagaaaaatctattaaagaaacactatctttattatttgatgatttaaaagctcaaaaacttgatttgagtaaaatttattttaaaaatgataaatctcttactgatctatcacaacaagtttttgatgattatagtgttattggtacagcggtactagaatatataactcaacaaatagcacctaaaaatcttgataaccctagtaagaaagagcaagaattaatagccaaaaaaactgaaaaagcaaaatacttatctctagaaactataaagcttgccttagaagaatttaataagcatagagatatagataaacagtgtaggtttgaagaaatacttgcaaactttgcggctattccgatgatatttgatgaaatagctcaaaacaaagacaatttggcacagatatctatcaaatatcaaaatcaaggtaaaaaagacctacttcaagctagtgcggaagatgatgttaaagctatcaaggatcttttagatcaaactaataatctcttacataaactaaaaatatttcatattagtcagtcagaagataaggcaaatattttagacaaggatgagcatttttatctagtatttgaggagtgctactttgagctagcgaatatagtgcctctttataacaaaattagaaactatataactcaaaagccatatagtgatgagaaatttaagctcaattttgagaactcgactttggctaatggttgggataaaaataaagagcctgacaatacggcaattttatttatcaaagatgataaatattatctgggtgtgatgaataagaaaaataacaaaatatttgatgataaagctatcaaagaaaataaaggcgagggttataaaaaaattgtttataaacttttacctggcgcaaataaaatgttacctaaggttttcttttctgctaaatctataaaattttataatcctagtgaagatatacttagaataagaaatcattccacacatacaaaaaatggtagtcctcaaaaaggatatgaaaaatttgagtttaatattgaagattgccgaaaatttatagatttttataaacagtctataagtaagcatccggagtggaaagattttggatttagattttctgatactcaaagatataattctatagatgaattttatagagaagttgaaaatcaaggctacaaactaacttttgaaaatatatcagagagctatattgatagcgtagttaatcagggtaaattgtacctattccaaatctataataaagatttttcagcttatagcaaagggcgaccaaatctacatactttatattggaaagcgctgtttgatgagagaaatcttcaagatgtggtttataagctaaatggtgaggcagagcttttttatcgtaaacaatcaatacctaaaaaaatcactcacccagctaaagaggcaatagctaataaaaacaaagataatcctaaaaaagagagtgtttttgaatatgatttaatcaaagataaacgctttactgaagataagtttttctttcactgtcctattacaatcaattttaaatctagtggagctaataagtttaatgatgaaatcaatttattgctaaaagaaaaagcaaatgatgttcatatattaagtatagatagaggtgaaagacatttagcttactatactttggtagatggtaaaggcaatatcatcaaacaagatactttcaacatcattggtaatgatagaatgaaaacaaactaccatgataagcttgctgcaatagagaaagatagggattcagctaggaaagactggaaaaagataaataacatcaaagagatgaaagagggctatctatctcaggtagttcatgaaatagctaagctagttatagagtataatgctattgtggtttttgaggatttaaattttggatttaaaagagggcgtttcaaggtagagaagcaggtctatcaaaagttagaaaaaatgctaattgagaaactaaactatctagttttcaaagataatgagtttgataaaactgggggagtgcttagagcttatcagctaacagcaccttttgagacttttaaaaagatgggtaaacaaacaggtattatctactatgtaccagctggttttacttcaaaaatttgtcctgtaactggttttgtaaatcagttatatcctaagtatgaaagtgtcagcaaatctcaagagttctttagtaagtttgacaagatttgttataaccttgataagggctattttgagtttagttttgattataaaaactttggtgacaaggctgccaaaggcaagtggactatagctagctttgggagtagattgattaactttagaaattcagataaaaatcataattgggatactcgagaagtttatccaactaaagagttggagaaattgctaaaagattattctatcgaatatgggcatggcgaatgtatcaaagcagctatttgcggtgagagcgacaaaaagttttttgctaagctaactagtgtcctaaatactatcttacaaatgcgtaactcaaaaacaggtactgagttagattatctaatttcaccagtagcagatgtaaatggcaatttctttgattcgcgacaggcgccaaaaaatatgcctcaagatgctgatgccaatggtgcttatcatattgggctaaaaggtctgatgctactaggtaggatcaaaaataatcaagagggcaaaaaactcaatttggttatcaaaaatgaagagtattttgagttcgtgcagaataggaataactaa

SEQ ID NO: 33 - protein, 1300 aa, Francisella tularensis
  REGION 1..1300: note = Francisella tularensis subsp. novicida (strain U112)
MSIYQEFVNKYSLSKTLRFELIPQGKTLENIKARGLILDDEKRAKDYKKAKQIIDKYHQFFIEEILSSVCISEDLLQNYSDVYFKLKKSDDDNLQKDFKSAKDTIKKQISEYIKDSEKFKNLFNQNLIDAKKGQESDLILWLKQSKDNGIELFKANSDITDIDEALEIIKSFKGWTTYFKGFHENRKNVYSSNDIPTSIIYRIVDDNLPKFLENKAKYESLKDKAPEAINYEQIKKDLAEELTFDIDYKTSEVNQRVFSLDEVFEIANFNNYLNQSGITKFNTIIGGKFVNGENTKRKGINEYINLYSQQINDKTLKKYKMSVLFKQILSDTESKSFVIDKLEDDSDVVTTMQSFYEQIAAFKTVEEKSIKETLSLLFDDLKAQKLDLSKIYFKNDKSLTDLSQQVFDDYSVIGTAVLEYITQQIAPKNLDNPSKKEQELIAKKTEKAKYLSLETIKLALEEFNKHRDIDKQCRFEEILANFAAIPMIFDEIAQNKDNLAQISIKYQNQGKKDLLQASAEDDVKAIKDLLDQTNNLLHKLKIFHISQSEDKANILDKDEHFYLVFEECYFELANIVPLYNKIRNYITQKPYSDEKFKLNFENSTLANGWDKNKEPDNTAILFIKDDKYYLGVMNKKNNKIFDDKAIKENKGEGYKKIVYKLLPGANKMLPKVFFSAKSIKFYNPSEDILRIRNHSTHTKNGSPQKGYEKFEFNIEDCRKFIDFYKQSISKHPEWKDFGFRFSDTQRYNSIDEFYREVENQGYKLTFENISESYIDSVVNQGKLYLFQIYNKDFSAYSKGRPNLHTLYWKALFDERNLQDVVYKLNGEAELFYRKQSIPKKITHPAKEAIANKNKDNPKKESVFEYDLIKDKRFTEDKFFFHCPITINFKSSGANKFNDEINLLLKEKANDVHILSIDRGERHLAYYTLVDGKGNIIKQDTFNIIGNDRMKTNYHDKLAAIEKDRDSARKDWKKINNIKEMKEGYLSQVVHEIAKLVIEYNAIVVFEDLNFGFKRGRFKVEKQVYQKLEKMLIEKLNYLVFKDNEFDKTGGVLRAYQLTAPFETFKKMGKQTGIIYYVPAGFTSKICPVTGFVNQLYPKYESVSKSQEFFSKFDKICYNLDKGYFEFSFDYKNFGDKAAKGKWTIASFGSRLINFRNSDKNHNWDTREVYPTKELEKLLKDYSIEYGHGECIKAAICGESDKKFFAKLTSVLNTILQMRNSKTGTELDYLISPVADVNGNFFDSRQAPKNMPQDADANGAYHIGLKGLMLLGRIKNNQEGKKLNLVIKNEEYFEFVQNRNN

SEQ ID NO: 34 - DNA, 3924 bp, unidentified
  misc_feature 1..3924: note = Acidaminococcus sp. (strain BV3L6)
  source 1..3924: mol_type = other DNA; note = Acidaminococcus sp.
atgacccaatttgaaggttttaccaatttataccaagtttcgaagacccttcgttttgaactgattccccaaggaaaaacactcaaacatatccaggagcaagggttcattgaggaggataaagctcgcaatgaccattacaaagagttaaaaccaatcattgaccgcatctataagacttatgctgatcaatgtctccaactggtacagcttgactgggagaatctatctgcagccatagactcctatcgtaaggaaaaaaccgaagaaacacgaaatgcgctgattgaggagcaagcaacatatagaaatgcgattcatgactactttataggtcggacggataatctgacagatgccataaataagcgccatgctgaaatctataaaggactttttaaagctgaacttttcaatggaaaagttttaaagcaattagggaccgtaaccacgacagaacatgaaaatgctctactccgttcgtttgacaaatttacgacctatttttccggcttttatgaaaaccgaaaaaatgtctttagcgctgaagatatcagcacggcaattccccatcgaatcgtccaggacaatttccctaaatttaaggaaaactgccatatttttacaagattgataaccgcagttccttctttgcgggagcattttgaaaatgtcaaaaaggccattggaatctttgttagtacgtctattgaagaagtcttttcctttcccttttataatcaacttctaacccaaacgcaaattgatctttataatcaacttctcggcggcatatctagggaagcaggcacagaaaaaatcaagggacttaatgaagttctcaatctggctatccaaaaaaatgatgaaacagcccatataatcgcgtccctgccgcatcgttttattcctctttttaaacaaattctttccgatcgaaatacgttatcctttattttggaagaattcaaaagcgatgaggaagtcatccaatccttctgcaaatataaaaccctcttgagaaacgaaaatgtactggagactgcagaagcccttttcaatgaattaaattccattgatttgactcatatctttatttcccataaaaagttagaaaccatctcttcagcgctttgtgaccattgggataccttgcgcaatgcactttacgaaagacggatttctgaactcactggcaaaataacaaaaagtgccaaagaaaaagttcaaaggtcattaaaacatgaggatataaatctccaagaaattatttctgctgcaggaaaagaactatcagaagcattcaaacaaaaaacaagtgaaattctttcccatgcccatgctgcacttgaccagcctcttcccacaacattaaaaaaacaggaagaaaaagaaatcctcaaatcacagctcgattcgcttttaggcctttatcatcttcttgattggtttgctgtcgatgaaagcaatgaagtcgacccagaattctcagcacggctgacaggcattaaactagaaatggaaccaagcctttcgttttataataaagcaagaaattatgcgacaaaaaagccctattcggtggaaaaatttaaattgaattttcaaatgccaacccttgcctctggttgggatgtcaataaagaaaaaaataatggagctattttattcgtaaaaaatggtctctattaccttggtatcatgcctaaacagaaggggcgctataaagccctgtcttttgagccgacagaaaaaacatcagaaggattcgataagatgtactatgactacttcccagatgccgcaaaaatgattcctaagtgttccactcagctaaaggctgtaaccgctcattttcaaactcataccacccccattcttctctcaaataatttcattgaacctcttgaaatcacaaaagaaatttatgacctgaacaatcctgaaaaggagcctaaaaagtttcaaacggcttatgcaaagaagacaggcgatcaaaaaggctatagagaagcgctttgcaaatggattgactttacgcgggattttctctctaaatatacgaaaacaacttcaatcgatttatcttcactccgcccttcttcgcaatataaagatttaggggaatattacgccgaactgaatccgcttctctatcatatctccttccaacgaattgctgaaaaggaaatcatggatgctgtagaaacgggaaaattgtatctgttccaaatctacaataaggattttgcgaagggccatcacgggaaaccaaatctccacaccctgtattggacaggtctcttcagtcctgaaaaccttgcgaaaaccagcatcaaacttaatggtcaagcagaattgttctatcgacctaaaagccgcatgaagcggatggcccatcgtcttggggaaaaaatgctgaacaaaaaactaaaggaccagaagacaccgattccagataccctctaccaagaactgtacgattatgtcaaccaccggctaagccatgatctttccgatgaagcaagggccctgcttccaaatgttatcaccaaagaagtctcccatgaaattataaaggatcggcggtttacttccgataaatttttcttccatgttcccattacactgaattatcaagcagccaatagtcccagtaaattcaaccagcgtgtcaatgcctaccttaaggagcatccggaaacgcccatcattggtatcgatcgtggagaacgcaatctaatctatattaccgtcattgacagtactgggaaaattttggagcagcgttccctgaataccatccagcaatttgactaccaaaaaaaattggacaacagggaaaaagagcgtgttgccgcccgtcaagcctggtccgtcgtcggaacgatcaaagaccttaaacaaggctacttgtcacaggtcatccatgaaattgtagacctgatgattcattaccaagctgttgtcgtccttgaaaacctcaacttcggatttaaatcaaaacggacaggcattgccgaaaaagcagtctaccaacaatttgaaaagatgctaatagataaactcaactgtttggttctcaaagattatcctgctgagaaagtgggaggcgtcttaaacccgtatcaacttacagatcagttcacgagctttgcaaaaatgggcacgcaaagcggcttccttttctatgtaccggccccttatacctcaaagattgatcccctgactggttttgtcgatccctttgtatggaagaccattaaaaatcatgaaagtcggaagcatttcctagaaggatttgatttcctgcattatgatgtcaaaacaggtgattttatcctccattttaaaatgaatcggaatctctctttccagagagggcttcctggcttcatgccagcttgggatattgttttcgaaaagaatgaaacccaatttgatgcaaaagggacgcccttcattgcaggaaaacgaattgttcctgtaatcgaaaatcatcgttttacgggtcgttacagagacctctatcccgctaatgaactcattgcccttctggaagaaaaaggcattgtctttagagacggaagtaatatattacccaaacttttagaaaatgatgattctcatgcaattgatacgatggtcgccttgattcgcagtgtactccaaatgagaaacagcaatgccgcaacgggggaagactacatcaactctcccgttagggatctgaacggggtgtgtttcgacagtcgattccaaaatccagaatggccaatggatgcggatgccaacggagcttatcatattgccttaaaagggcagcttcttctgaaccacctcaaagaaagcaaagatctgaaattacaaaacggcatcagcaaccaagattggctggcctacattcaggaactgagaaactga

SEQ ID NO: 35 - protein, 1307 aa, unidentified
  REGION 1..1307: note = Acidaminococcus sp. (strain BV3L6)
  source 1..1307: note = Acidaminococcus sp.
MTQFEGFTNLYQVSKTLRFELIPQGKTLKHIQEQGFIEEDKARNDHYKELKPIIDRIYKTYADQCLQLVQLDWENLSAAIDSYRKEKTEETRNALIEEQATYRNAIHDYFIGRTDNLTDAINKRHAEIYKGLFKAELFNGKVLKQLGTVTTTEHENALLRSFDKFTTYFSGFYENRKNVFSAEDISTAIPHRIVQDNFPKFKENCHIFTRLITAVPSLREHFENVKKAIGIFVSTSIEEVFSFPFYNQLLTQTQIDLYNQLLGGISREAGTEKIKGLNEVLNLAIQKNDETAHIIASLPHRFIPLFKQILSDRNTLSFILEEFKSDEEVIQSFCKYKTLLRNENVLETAEALFNELNSIDLTHIFISHKKLETISSALCDHWDTLRNALYERRISELTGKITKSAKEKVQRSLKHEDINLQEIISAAGKELSEAFKQKTSEILSHAHAALDQPLPTTLKKQEEKEILKSQLDSLLGLYHLLDWFAVDESNEVDPEFSARLTGIKLEMEPSLSFYNKARNYATKKPYSVEKFKLNFQMPTLASGWDVNKEKNNGAILFVKNGLYYLGIMPKQKGRYKALSFEPTEKTSEGFDKMYYDYFPDAAKMIPKCSTQLKAVTAHFQTHTTPILLSNNFIEPLEITKEIYDLNNPEKEPKKFQTAYAKKTGDQKGYREALCKWIDFTRDFLSKYTKTTSIDLSSLRPSSQYKDLGEYYAELNPLLYHISFQRIAEKEIMDAVETGKLYLFQIYNKDFAKGHHGKPNLHTLYWTGLFSPENLAKTSIKLNGQAELFYRPKSRMKRMAHRLGEKMLNKKLKDQKTPIPDTLYQELYDYVNHRLSHDLSDEARALLPNVITKEVSHEIIKDRRFTSDKFFFHVPITLNYQAANSPSKFNQRVNAYLKEHPETPIIGIDRGERNLIYITVIDSTGKILEQRSLNTIQQFDYQKKLDNREKERVAARQAWSVVGTIKDLKQGYLSQVIHEIVDLMIHYQAVVVLENLNFGFKSKRTGIAEKAVYQQFEKMLIDKLNCLVLKDYPAEKVGGVLNPYQLTDQFTSFAKMGTQSGFLFYVPAPYTSKIDPLTGFVDPFVWKTIKNHESRKHFLEGFDFLHYDVKTGDFILHFKMNRNLSFQRGLPGFMPAWDIVFEKNETQFDAKGTPFIAGKRIVPVIENHRFTGRYRDLYPANELIALLEEKGIVFRDGSNILPKLLENDDSHAIDTMVALIRSVLQMRNSNAATGEDYINSPVRDLNGVCFDSRFQNPEWPMDADANGAYHIALKGQLLLNHLKESKDLKLQNGISNQDWLAYIQELRN

SEQ ID NO: 36 - DNA, 3741 bp, unidentified
  misc_feature 1..3741: note = Lachnospiraceae bacterium (strain ND2006)
  source 1..3741: mol_type = other DNA; note = Lachnospiraceae bacterium
atgcttaagaatgttggaattgataggttagatgttgaaaaagggagaaaaaatatgtctaaattagagaagtttacaaattgttactctttgtcaaaaacacttcgttttaaggcgattcctgttggaaaaacccaagaaaatattgataataaaagattgcttgtcgaggatgaaaaacgtgcagaagattataagggggttaaaaaattacttgataggtattatttatcatttattaatgatgttcttcattccattaaactaaagaatttaaataattatatttcgttgtttagaaagaaaactcggacggaaaaagaaaacaaagaattagaaaatttagagataaatttacgtaaagaaatcgctaaggcttttaagggtaatgaaggttataaatctttatttaagaaggatattatcgagacgatattgcctgaatttcttgatgataaagatgaaattgctttggttaattcatttaatggatttacaacggcatttaccggtttttttgataatagggaaaatatgttttcggaagaagctaaatcaacctcaattgcttttcgttgtattaatgagaatttaacaagatatatatcaaatatggatatatttgaaaaagttgatgcaattttcgataagcatgaagtacaggaaataaaagaaaaaattctaaacagtgattatgatgttgaagatttcttcgaaggagaattttttaattttgttcttacgcaagaaggtatcgatgtttataacgctataattggtggctttgtgacagaatccggagaaaaaataaaaggattaaatgaatatattaatttatataatcagaaaactaagcaaaaattaccgaagtttaagcctttatataaacaggttttatcagatagagagtcactttctttttatggcgaaggttatacatctgatgaggaagttttagaagtatttagaaatactcttaataagaattcagaaatattttcttcaattaagaaattggaaaagttatttaaaaacttcgatgaatattcaagtgcaggaattttcgtaaaaaatggaccggctatttctacaatttctaaggatatatttggagagtggaatgtaattagagacaaatggaatgcggagtacgatgatatacatttaaaaaagaaggctgtagtaacagaaaaatatgaagatgacaggcgtaaatcattcaaaaaaataggaagtttttcattggagcagttgcaagaatacgctgatgctgatctatctgtggtagagaagttaaaagaaatcattatccaaaaagtggatgagatatataaagtttatggctcgtcagaaaaattgttcgatgctgattttgtactagaaaaatcgttaaaaaagaatgatgcagttgtagcaataatgaaagatttactagattctgtgaagtcttttgaaaattatataaaagccttttttggagagggaaaagaaacaaatcgagatgaatcattttatggtgattttgttttggcatatgacattcttttgaaagtggatcatatttatgatgcaatacgaaattatgtgacacaaaaaccgtattcgaaagataagtttaaattatattttcaaaacccgcaatttatggggggctgggataaggataaagagacagactatagggcaactatacttagatatggctcaaagtattacttggcgattatggataaaaaatatgctaagtgcttgcaaaaaatagataaggatgatgtaaatggaaactatgaaaaaataaattataagttgcttccaggacctaataagatgcttccaaaggtgttttttagtaagaagtggatggcttattataatccgtcggaagatattcaaaaaatatataaaaatggaacatttaaaaaaggagatatgtttaatttaaatgattgtcataaattaattgatttctttaaggattcaatcagtcggtatccgaaatggagtaacgcatatgattttaacttttctgagaccgagaaatataaggatatagcaggtttttacagagaggttgaagaacaaggatataaagtatcatttgaaagtgcgtctaaaaaagaagttgataaattggtagaagaaggaaaattatacatgttccaaatttataataaagacttttcggataaaagtcatggaacgccaaatcttcatacaatgtattttaagttgctgtttgatgaaaataatcatggtcaaattaggctttctggtggtgctgagctattcatgcgacgtgcaagtttgaaaaaggaagaattagttgtgcatcctgccaatagcccgatagcgaataaaaacccggataatccaaagaaaacgactacgttgtcatatgatgtatacaaggacaaaagattttcggaagatcagtatgagttgcatatacctattgcaataaataaatgccctaaaaatatatttaagataaatacagaggttagagtgctgctgaagcatgatgataatccttatgttataggaattgataggggggagagaaatttactttacattgtggtggttgatggtaagggtaatattgtggagcaatattcgctgaatgaaataattaataattttaatggaattagaattaagacggattaccattcacttttggataaaaaggagaaggaaagatttgaagctcgtcaaaattggacgtctatagaaaacattaaagaactaaaagccggatatattagtcaggttgttcataagatatgtgagttggtagaaaaatatgatgcggtaattgcacttgaagatttgaattctggttttaagaatagtcgagttaaagttgaaaagcaagtatatcagaaatttgaaaaaatgctgattgataaacttaactatatggtagataagaaatctaatccttgcgctacgggtggtgctctgaaaggctatcaaattactaacaagtttgagagttttaagtcgatgagtacacaaaatggttttattttttatattccggcgtggttgactagcaaaattgatccgtcaacaggatttgtaaatttgttgaaaacaaagtatacgagcattgcagattcaaagaaatttataagttcttttgacagaattatgtatgtacctgaagaagatttattcgagtttgcattagattataagaatttttctcggacagacgcggattatataaaaaaatggaaactctatagctatggtaacaggattagaatatttagaaatcctaaaaaaaataatgtatttgattgggaagaggtatgtcttacatcagcctataaggaactttttaataaatatgggattaattatcagcaaggagatatacgagctctcttatgtgaacagagtgataaggcattctatagctcttttatggcattaatgtcactcatgctgcaaatgagaaatagtataacaggtaggacggatgtagattttttgatttcaccagtaaaaaattctgacggtattttttatgattccagaaattatgaagctcaggaaaatgcaatattaccgaaaaatgcagatgctaatggggcttataatatcgcaagaaaagttttgtgggctataggtcagtttaaaaaggctgaagatgaaaaacttgataaggttaaaattgcaatatcaaataaggaatggctcgaatatgcgcaaacaagtgttaagcattga

SEQ ID NO: 37 - protein, 1228 aa, unidentified
  REGION 1..1228: note = Lachnospiraceae bacterium (strain ND2006)
  source 1..1228: note = Lachnospiraceae bacterium
MSKLEKFTNCYSLSKTLRFKAIPVGKTQENIDNKRLLVEDEKRAEDYKGVKKLLDRYYLSFINDVLHSIKLKNLNNYISLFRKKTRTEKENKELENLEINLRKEIAKAFKGNEGYKSLFKKDIIETILPEFLDDKDEIALVNSFNGFTTAFTGFFDNRENMFSEEAKSTSIAFRCINENLTRYISNMDIFEKVDAIFDKHEVQEIKEKILNSDYDVEDFFEGEFFNFVLTQEGIDVYNAIIGGFVTESGEKIKGLNEYINLYNQKTKQKLPKFKPLYKQVLSDRESLSFYGEGYTSDEEVLEVFRNTLNKNSEIFSSIKKLEKLFKNFDEYSSAGIFVKNGPAISTISKDIFGEWNVIRDKWNAEYDDIHLKKKAVVTEKYEDDRRKSFKKIGSFSLEQLQEYADADLSVVEKLKEIIIQKVDEIYKVYGSSEKLFDADFVLEKSLKKNDAVVAIMKDLLDSVKSFENYIKAFFGEGKETNRDESFYGDFVLAYDILLKVDHIYDAIRNYVTQKPYSKDKFKLYFQNPQFMGGWDKDKETDYRATILRYGSKYYLAIMDKKYAKCLQKIDKDDVNGNYEKINYKLLPGPNKMLPKVFFSKKWMAYYNPSEDIQKIYKNGTFKKGDMFNLNDCHKLIDFFKDSISRYPKWSNAYDFNFSETEKYKDIAGFYREVEEQGYKVSFESASKKEVDKLVEEGKLYMFQIYNKDFSDKSHGTPNLHTMYFKLLFDENNHGQIRLSGGAELFMRRASLKKEELVVHPANSPIANKNPDNPKKTTTLSYDVYKDKRFSEDQYELHIPIAINKCPKNIFKINTEVRVLLKHDDNPYVIGIDRGERNLLYIVVVDGKGNIVEQYSLNEIINNFNGIRIKTDYHSLLDKKEKERFEARQNWTSIENIKELKAGYISQVVHKICELVEKYDAVIALEDLNSGFKNSRVKVEKQVYQKFEKMLIDKLNYMVDKKSNPCATGGALKGYQITNKFESFKSMSTQNGFIFYIPAWLTSKIDPSTGFVNLLKTKYTSIADSKKFISSFDRIMYVPEEDLFEFALDYKNFSRTDADYIKKWKLYSYGNRIRIFRNPKKNNVFDWEEVCLTSAYKELFNKYGINYQQGDIRALLCEQSDKAFYSSFMALMSLMLQMRNSITGRTDVDFLISPVKNSDGIFYDSRNYEAQENAILPKNADANGAYNIARKVLWAIGQFKKAEDEKLDKVKIAISNKEWLEYAQTSVKH

SEQ ID NO: 38 - protein, 1064 aa, unidentified
  REGION 1..1064: note = Bradyrhizobium sp. BTAi1
  source 1..1064: note = Bradyrhizobium sp.
MKRTSLRAYRLGVDLGANSLGWFVVWLDDHGQPEGLGPGGVRIFPDGRNPQSKQSNAAGRRLARSARRRRDRYLQRRGKLMGLLVKHGLMPADEPARKRLECLDPYGLRAKALDEVLPLHHVGRALFHLNQRRGLFANRAIEQGDKDASAIKAAAGRLQTSMQACGARTLGEFLNRRHQLRATVRARSPVGGDVQARYEFYPTRAMVDAEFEAIWAAQAPHHPTMTAEAHDTIREAIFSQRAMKRPSIGKCSLDPATSQDDVDGFRCAWSHPLAQRFRIWQDVRNLAVVETGPTSSRLGKEDQDKVARALLQTDQLSFDEIRGLLGLPSDARFNLESDRRDHLKGDATGAILSARRHFGPAWHDRSLDRQIDIVALLESALDEAAIIASLGTTHSLDEAAAQRALSALLPDGYCRLGLRAIKRVLPLMEAGRTYAEAASAAGYDHALLPGGKLSPTGYLPYYGQWLQNDVVGSDDERDTNERRWGRLPNPTVHIGIGQLRRVVNELIRWHGPPAEITVELTRDLKLSPRRLAELEREQAENQRKNDKRTSLLRKLGLPASTHNLLKLRLWDEQGDVASECPYTGEAIGLERLVSDDVDIDHLIPFSISWDDSAANKVVCMRYANREKGNRTPFEAFGHRQGRPYDWADIAERAARLPRGKRWRFGPGARAQFEELGDFQARLLNETSWLARVAKQYLAAVTHPHRIHVLPGRLTALLRATWELNDLLPGSDDRAAKSRKDHRHHAIDALVAALTDQALLRRMANAHDDTRRKIEVLLPWPTFRIDLETRLKAMLVSHKPDHGLQARLHEDTAYGTVEHPETEDGANLVYRKTFVDISEKEIDRIRDRRLRDLVRAHVAGERQQGKTLKAAVLSFAQRRDIAGHPNGIRHVRLTKSIKPDYLVPIRDKAGRIYKSYNAGENAFVDILQAESGRWIARATTVFQANQANESHDAPAAQPIMRVFKGDMLRIDHAGAEKFVKIVRLSPSNNLLYLVEHHQAGVFQTRHDDPEDSFRWLFASFDKLREWNAELVRIDTLGQPWRRKRGLETGSEDATRIGWTRPKKWP

SEQ ID NO: 39 - protein, 1035 aa, Candidatus Puniceispirillum marinum
MRRLGLDLGTNSIGWCLLDLGDDGEPVSIFRTGARIFSDGRDPKSLGSLKATRREARLTRRRRDRFIQRQKNLINALVKYGLMPADEIQRQALAYKDPYPIRKKALDEAIDPYEMGRAIFHINQRRGFKSNRKSADNEAGVVKQSIADLEMKLGEAGARTIGEFLADRQATNDTVRARRLSGTNALYEFYPDRYMLEQEFDTLWAKQAAFNPSLYIEAARERLKEIVFFQRKLKPQEVGRCIFLSDEDRISKALPSFQRFRIYQELSNLAWIDHDGVAHRITASLALRDHLFDELEHKKKLTFKAMRAILRKQGVVDYPVGFNLESDNRDHLIGNLTSCIMRDAKKMIGSAWDRLDEEEQDSFILMLQDDQKGDDEVRSILTQQYGLSDDVAEDCLDVRLPDGHGSLSKKAIDRILPVLRDQGLIYYDAVKEAGLGEANLYDPYAALSDKLDYYGKALAGHVMGASGKFEDSDEKRYGTISNPTVHIALNQVRAVVNELIRLHGKPDEVVIEIGRDLPMGADGKRELERFQKEGRAKNERARDELKKLGHIDSRESRQKFQLWEQLAKEPVDRCCPFTGKMMSISDLFSDKVEIEHLLPFSLTLDDSMANKTVCFRQANRDKGNRAPFDAFGNSPAGYDWQEILGRSQNLPYAKRWRFLPDAMKRFEADGGFLERQLNDTRYISRYTTEYISTIIPKNKIWVVTGRLTSLLRGFWGLNSILRGHNTDDGTPAKKSRDDHRHHAIDAIVVGMTSRGLLQKVSKAARRSEDLDLTRLFEGRIDPWDGFRDEVKKHIDAIIVSHRPRKKSQGALHNDTAYGIVEHAENGASTVVHRVPITSLGKQSDIEKVRDPLIKSALLNETAGLSGKSFENAVQKWCADNSIKSLRIVETVSIIPITDKEGVAYKGYKGDGNAYMDIYQDPTSSKWKGEIVSRFDANQKGFIPSWQSQFPTARLIMRLRINDLLKLQDGEIEEIYRVQRLSGSKILMAPHTEANVDARDRDKNDTFKLTSKSPGKLQSASARKVHISPTGLIREG

SEQ ID NO: 40 - protein, 1358 aa, unidentified
  source 1..1358: note = Acidaminococcus sp.
MGKMYYLGLDIGTNSVGYAVTDPSYHLLKFKGEPMWGAHVFAAGNQSAERRSFRTSRRRLDRRQQRVKLVQEIFAPVISPIDPRFFIRLHESALWRDDVAETDKHIFFNDPTYTDKEYYSDYPTIHHLIVDLMESSEKHDPRLVYLAVAWLVAHRGHFLNEVDKDNIGDVLSFDAFYPEFLAFLSDNGVSPWVCESKALQATLLSRNSVNDKYKALKSLIFGSQKPEDNFDANISEDGLIQLLAGKKVKVNKLFPQESNDASFTLNDKEDAIEEILGTLTPDECEWIAHIRRLFDWAIMKHALKDGRTISESKVKLYEQHHHDLTQLKYFVKTYLAKEYDDIFRNVDSETTKNYVAYSYHVKEVKGTLPKNKATQEEFCKYVLGKVKNIECSEADKVDFDEMIQRLTDNSFMPKQVSGENRVIPYQLYYYELKTILNKAASYLPFLTQCGKDAISNQDKLLSIMTFRIPYFVGPLRKDNSEHAWLERKAGKIYPWNFNDKVDLDKSEEAFIRRMTNTCTYYPGEDVLPLDSLIYEKFMILNEINNIRIDGYPISVDVKQQVFGLFEKKRRVTVKDIQNLLLSLGALDKHGKLTGIDTTIHSNYNTYHHFKSLMERGVLTRDDVERIVERMTYSDDTKRVRLWLNNNYGTLTADDVKHISRLRKHDFGRLSKMFLTGLKGVHKETGERASILDFMWNTNDNLMQLLSECYTFSDEITKLQEAYYAKAQLSLNDFLDSMYISNAVKRPIYRTLAVVNDIRKACGTAPKRIFIEMARDGESKKKRSVTRREQIKNLYRSIRKDFQQEVDFLEKILENKSDGQLQSDALYLYFAQLGRDMYTGDPIKLEHIKDQSFYNIDHIYPQSMVKDDSLDNKVLVQSEINGEKSSRYPLDAAIRNKMKPLWDAYYNHGLISLKKYQRLTRSTPFTDDEKWDFINRQLVETRQSTKALAILLKRKFPDTEIVYSKAGLSSDFRHEFGLVKSRNINDLHHAKDAFLAIVTGNVYHERFNRRWFMVNQPYSVKTKTLFTHSIKNGNFVAWNGEEDLGRIVKMLKQNKNTIHFTRFSFDRKEGLFDIQPLKASTGLVPRKAGLDVVKYGGYDKSTAAYYLLVRFTLEDKKTQHKLMMIPVEGLYKARIDHDKEFLTDYAQTTISEILQKDKQKVINIMFPMGTRHIKLNSMISIDGFYLSIGGKSSKGKSVLCHAMVPLIVPHKIECYIKAMESFARKFKENNKLRIVEKFDKITVEDNLNLYELFLQKLQHNPYNKFFSTQFDVLTNGRSTFTKLSPEEQVQTLLNILSIFKTCRSSGCDLKSINGSAQAARIMISADLTGLSKKYSDIRLVEQSASGLFVSKSQNLLEYL

SEQ ID NO: 41 - protein, 1358 aa, unidentified; identical to SEQ ID NO: 40
  REGION 1..1358: note = Acidaminococcus sp. D21
  source 1..1358: note = Acidaminococcus sp.

SEQ ID NO: 42 - protein, 1138 aa, Acidothermus cellulolyticus
MGGSEVGTVPVTWRLGVDVGERSIGLAAVSYEEDKPKEILAAVSWIHDGGVGDERSGASRLALRGMARRARRLRRFRRARLRDLDMLLSELGWTPLPDKNVSPVDAWLARKRLAEEYVVDETERRRLLGYAVSHMARHRGWRNPWTTIKDLKNLPQPSDSWERTRESLEARYSVSLEPGTVGQWAGYLLQRAPGIRLNPTQQSAGRRAELSNATAFETRLRQEDVLWELRCIADVQGLPEDVVSNVIDAVFCQKRPSVPAERIGRDPLDPSQLRASRACLEFQEYRIVAAVANLRIRDGSGSRPLSLEERNAVIEALLAQTERSLTWSDIALEILKLPNESDLTSVPEEDGPSSLAYSQFAPFDETSARIAEFIAKNRRKIPTFAQWWQEQDRTSRSDLVAALADNSIAGEEEQELLVHLPDAELEALEGLALPSGRVAYSRLTLSGLTRVMRDDGVDVHNARKTCFGVDDNWRPPLPALHEATGHPVVDRNLAILRKFLSSATMRWGPPQSIVVELARGASESRERQAEEEAARRAHRKANDRIRAELRASGLSDPSPADLVRARLLELYDCHCMYCGAPISWENSELDHIVPRTDGGSNRHENLAITCGACNKEKGRRPFASWAETSNRVQLRDVIDRVQKLKYSGNMYWTRDEFSRYKKSVVARLKRRTSDPEVIQSIESTGYAAVALRDRLLSYGEKNGVAQVAVFRGGVTAEARRWLDISIERLFSRVAIFAQSTSTKRLDRRHHAVDAVVLTTLTPGVAKTLADARSRRVSAEFWRRPSDVNRHSTEEPQSPAYRQWKESCSGLGDLLISTAARDSIAVAAPLRLRPTGALHEETLRAFSEHTVGAAWKGAELRRIVEPEVYAAFLALTDPGGRFLKVSPSEDVLPADENRHIVLSDRVLGPRDRVKLFPDDRGSIRVRGGAAYIASFHHARVFRWGSSHSPSFALLRVSLADLAVAGLLRDGVDVFTAELPPWTPAWRYASIALVKAVESGDAKQVGWLVPGDELDFGPEGVTTAAGDLSMFLKYFPERHWVVTGFEDDKRINLKPAFLSAEQAEVLRTERSDRPDTLTEAGEILAQFFPRCWRATVAKVLCHPGLTVIRRTALGQPRWRRGHLPYSWRPWSADPWSGGTP

SEQ ID NO: 43 - protein, 1045 aa, Acidovorax avenae
MQKEKPLAYRLALDLGSTSLGWAVLRLSAPGEPSAVIRAGSRIFSDGRNPKDGSSLAVTRRAARAMRRRRDRLLKRKARMLAALERHGFFPQDEAARKALEKLNPYGLRARGLESALKPEEFGRALFHLNQRRGFQSNRKTDRKDSDSGALKQAIGTLRAQMHESGCRTVGEWFWKVRMERKPEGVKGQGVRARYRETPFTTDEGKKRIDKRYDLYVDRAMVAQEFDALWAAQATFAPALFNEAARAELRDILLHQRKLRPVQPGRCTLVPEEPRALLALPSTQRFRIYQEVNHLRVLHDELREEALTLAQRDQIVALLERQAKVTFTAMRKALGFSALFNLEDAKRDGLKGNATTAALGKKDLFGPLWAGFDTALQDEIVTQLMTEESEPRLIAWLQEHTGVDEARAQAIANAGLPEGYGSLGRTALARIVPELQRDVITYDKAVQAAGFAHHSDLGFSFEHDADEVERIGERTIASTGEIKPVFAFKQLPYYGRALQRHVAFAKENPRNDEERYGKIANPTVHIGLNQVRVVVNALMCRYGRPTEVVIELARDLKQSREQKLEAQQRQADNQKRNARIRRSIAEVLGISEERVRTLDIQKWILWEELSHDAADRRCPYSGVQISASMLLGERVEIEHILPFSMTLDDSLNNRTVALREANRIKRNRTPWDARTDFEAHGWSYDGILQRAERMPQRKRHRFAPDGYERWLGEDKDFLARALNDTRYLSRVAAEYLRLVCPGSATRVIPGQMTALLRGKFGLNDVLGLDGEKNRNDHRHHAVDACVIGVTDQRMMQRFAQANAQAREDGLTRLVEDMPLPWPTYRAHVERAVRHIWVSHKPDHGFEGAMMEETSYGILRDGTIKQRRKADGSAGREISRLIRITEPSQPQRHGVDAEGRPLPYKGYVGGSNYCLEITVNDKGKWEGQVISTFDAYRIVREGGLRQLRHSTQGQNGQALAMRLVIGDSVRLEVDEQERVMRIVKINGNNGQVFMAPVHEANVDARNSDKNEAFAYTSKIAGSFQKTKARQVTISPIGELRDPGFKG

SEQ ID NO: 44 - protein, 1131 aa, Acidovorax ebreus
MAQHVFGLDIGIASVGWAILGEQRIIDLGVRCFDKAETAKEGDPLNLTRRQARLLRRRLYRRAWRLTQLSRLLKRKGLIADAKLFAKAPSYGDSAWELRRQGLDRLLTPLEWARVIYHQCKHRGFHWTSKAEEAKADSDAEGGRVKQGLAHTKALMQAKNYRSAAEMVLAEFPDAQRNKRGQYDKALSRVLLGEELALLFATQRRLGNPHASDFFEKLILGDGDRKSGLFWQQKPALSGADLLKMLGKCTFEKGEYRAPKASFSVERHVWLTRLNNLRIVVDGRSRPLNEAERQAALLLPYQTETSKYKTLKNAFIKAGLWGDGVRFGGLAYPSQAQIDAEKTKDPEDQFLVKLPAWHELRKAFKAAGHEALWQQISTPALDGDPTLLDQIATVLSVYKDGAEVVQQLRQLALPEPAASIAVLEKISFDKFSSLSLKALRRIVPLMQSGLRYDEAVAQIPEYGHHSQRIEPGAAKHLYLPPFYEAQRKYAGKGDHIGSMQFRDDADIPRNPVVLRALNQARKVVNALIREYGSPIAVNIEMARDLSRPLDERNKVKRAQEEFRDRNDRARSEFERDFGYKPKAAAFEKWMLYREQLGQCAYSQQPLDIQRVLDDHNYAQVDHALPYSRSYDDSKNNKVLVLTHENQNKGNRTAFEYLTSFPDGEDGERWRTFVAWVQGNKAYRMAKRNRLLRKNYGVDESKGFIDRNLNDTRYICKFFKNYVEEHLQLAARADGDTARRCVVVNGQLTAFLRARWGLTKVRGDSDRHHALDAAVVAACTHGMVKALADYSRRKEISFLQEGFPDPETGEILNPAAFDRARQHFPEPWTHFAHELKARLFTDDLAALREDMQRLGSYTTEDLGRLRTLFVSRAPQRRSGGAVHKETIYAQPESLKQQGGVIEKILLTSLKLQDFDKLLNPESNDHFVEPHRNERLYAAIRQRLEQFGGRADKAFGPDNLFHKPDKNNQPTGPVVRSIKLVRGKQTGIPIRGGLAKNDSMLRVDIFTKAGKFHLVPVYVHHRVTGLPNRAIVAFKDEDEWTLIDESFAFLFSVYPNDYVKVTLKKEQQSGYYSGADRSTGAMNLWAHDRAASVGKDGLIRGIGVKTALSVEKFNVDVLGRIYLAPPETRSGLA

SEQ ID NO: 45 - protein, 1056 aa, Actinobacillus minor
  REGION 1..1056: note = Actinobacillus minor NM305
MKALNYILGLDLGIASVGWAVVEIDQNELPIRLIDLGVRTFERAEVPKTGDSLALARRLARSSRRLVRRRAVRLLKAKRLLKQEGILQADDFHSSHLKPLPNNPWELRVKGLNHLLDRKEWAAVLLHLLKHRGYLSQRKNESKTDNKELGALLKGVSENRQLLQAQAFSTPAEIAIKKFQQEEGHIRNQRGAYSHTFDRNDLLAELRLLFQKQREFNNPYTSQSLEQAIAELLMWQKPALSGEAILKMLGKCTFEPSEYKAPKNSYSAEYFVWLTKLNNLRILENGADRGLTAEERQLLINQPFEKAKFTYAQARKLLELSDLAIFKGVRYGKDNAESATLMEMKAWHAIRKALESNGLKTEWNGLKTKPELLDKIGTAFSIYKTDEDISQYLNGELSPAVLNALLENLSFDKFIRLSLQSLAKILPLMEQGLRYDEACKQVYGDHYGKKEQLELRFLPKIPVEDIRNPVVLRTLSQARKVINGVVRLYGSPARIHIETGREVGKSFSERRDISKRQEENRNERQRAVEKFKEFFPHFVGEPKAKDILKMRLYEQQHGKCLYSGKELDLNRLLEKGYVEIDHALPFSRTWDDSFNNKVLVLASENQNKGNQTPYEWLNGKENAERWKLFQALVNGSRFPYSKKQRILTKYLDEDGFRERNLNDTRYVARFLCNFIEDNMQLVGQGKKRVFASNGQITALLRRSWGIQKVREDNDRHHAVDAVVVACSTRALQKKITDYVRYKEMNVFTGEKIDQETGEIIKFHFPEPWKFFRQEVEIRVFSETPAEDVVIALPDRPQANHEFIQPLFVSRAPTRKMTGQGHMETIKSAKRLAEGLSVSRVPLTQLKLKDLENMVNREREKALYEALKVRLEKFNNDPAKAFADPFYKKGGQQVKAVRVEQVQKSGVLVRQENGVADNASMVRVDVFIKGGKYFLVPIYTWQVAKGILPNRAATQGKEEEYWDIMDETAIFQFSLYQNDLIKLVTKKKTIFGYFNGLNRATSNINIKEHDLDKSKGKDGIYLEVGVKLALSLEKYQVDELGKNIQPCRSMKKRPPVR

SEQ ID NO: 46 - protein, 1054 aa, Actinobacillus pleuropneumoniae
  REGION 1..1054: note = Actinobacillus pleuropneumoniae serovar 10 str. D13039
MKLTPLNYILGLDLGIASVGWAVVEIDEQENPLGLIDVGVRTFDRAEVAKTGESLALARRLARSSRRLVKRRADRIKKVKRLLKSENILLSADEQLPNDVWQLRVKGLDQKLERQEWAAVLLHLLKHRGYLSQRKNESKSENKELGALRSGVAANHQILQSAEYRTPAEIAVKKFHVEEGHIRNQRGAYTHTFSRLDLLAEIELLFTRQTELGNPHTSAKLLENLTALLMWQKPALAGEAILKMLGKCTFEPTEYKAAKNSYSAERFVWLTKLNNLRILEQGAERALTDNERFALLDQPYEKAKFTYAQARTMLALPDEAIFKGVRYQGEDKKAVETKTILMEMKAYHQIRKALENADLKAEWNELKNNSELLDDIGTAFSLHKTDEDICRYLDGKLSESILNALLENLNFDKFIQLSLKALQQILPLMLQGQRYDEAVSAIYGDHYGKKSAEINRLLPTIPADEIRNPVVLRTLTQARKVINAVVRLYGSPARIHIETGREVGKSYQDRKKLEKQQEDNRKHRESAVQKFKEYFPNFVGEPKGKDILKMRLYELQQAKCLYSGKSLELHRLLEKGYVEVDHALPFSRTWDDSFNNKVLVLANENQNKGNLTPYEWLDGKNNSEPWQNFVARVQTSGFSHTKKQRILSHKLDEKGFIERNLNDTRYVVRFLCNFIADNMLLTGKGKRKVFASNGQITALLRGRWGLQKVRDDNDRHHALDAVVVACSTVAMQQKITRFVRYEEGNVFSGERIDRETGEIIPLHFPSPWAFFRENVEIRIFSENPKLELENRLPDYPQYNHEFVQPLFVSRMPTRKMTGQGHMETVKSAKRLDEGLSVLKVPLTQLKLNDLERMVNREREMALYESLKVRLEQFDNDPAKAFAEPFYKKGGALVKAVRVEQTQKSGVLVRDGNGVADNASMVRVDVFTKAGKYFLVPIYTWQVAKGILPNKAVTANVDEIDWLEMDESYQFIFTMYPNDLVKVKLKKEEFFGYYGGLDRATGAIVIKEHDLEKSKGRQGIYRIGVKLALSFEKYQVDELGKNIRPCRPTKRQHVR

SEQ ID NO: 47 - protein, 1062 aa, Actinobacillus succinogenes
MNLNYILGLDLGIASVGWAVVEIDEQENPQRLIDVGVRTFDRAEVLKTGESLALARRLARSSRRLVKRRAERIKKAKRLLKAENLLLSADEILPNEAWQLRVKGLDQKLERQEWAAVLLHLLKHRGYLSQRKNESKSENKELGALLSGVAINHQILQSAEYRTPAEIAVNKFQAEEGHIRNQRGAYTHTFSRLDLLAEMELLFQRQATLGNPHTSTKLLENLTALLMWQKPALAGEAILKMLGKCTFEPTEYKAAKNSYSAERFVWLTKLNNLRILEQGAERALTDNERFALLDQPYEKAKLTYAQVRTLLGLSDEAIFKGLRYQGEDKKAVETKTTLMEVKAYHQIRKALEGLDLKAEWNELKNNPALLDEIGTAFSLYKTDDDIHRYLDGKLSESVLNALLENLNFDKFIQLSLKALQQILPLMLQGQRYDEAVSAIYGDHYGKKSDEIDRLLPNIPTDEIRNPVVLRTLTQARKVINAVVRLYGSPARIHIETGREVGKSYQDRKKLEKQQEENRKQRENAVKKFKEYFPNFVGEPKGKDILKMRLYELQQAKCLYSGKSLELYRLLEKGYVEVDHALPFSRTWDDSFNNKVLVLANENQNKGNATPYEWLDGKNNSEGWQHFVARVQTSGFSYAKKQRVLIQELDEKSFIERNLNDTRYVARFLCNHIADNMLLTGKGKRKVFASNGQITALLRGCWGLQKVRENNDRHHALDAVVVACSTKSMQDKITKFVKYKEGRLFKDKKDGVYKGERINRETGEIISLHFPTPWKFFKENVEIRIFSENPKLELENRLPDYPQYNHEFVQPLFVSRMPTRKMTGQGHMETVKSAKRLDKGLSVLKVPLTQLKLSDLERMVNREREMALYEALKECLEQFGNDPAKAFAEPFYKKGGALVKAVRVEQTQKSGVLVRNGNGVADNATGSIVRVDVFTKGGKYFLVPIYTWQVAKGILPNKAVIQGKDESEWEEMDENAVFQFSMHKNDLIKVKTKKGEIFGYFNGLDRATGSIEIEEHDLEKSKGKNGSHRGLGVKTAFFLEKYQVDELGKNIRPCRPTKRQHVR

SEQ ID NO: 48 - protein, 1054 aa, Actinobacillus suis
MKLTPLNYILGLDLGIASVGWAVVEIDEQENPLGLIDVGVRTFDRAEVPKTGESLALARRLARSARRLVKRRADRIKKAKRLLKAENILLSADEHLPNDVWQLRVKGLDQKLERQEWAAVLLHLLKHRGYLSQRKNESKSENKELGALLSGVETNHQILQSAEYRTPAEIAVKKFHVEDGHIRNQRGAYTHTFSRLDLLAEMELLFQRQTDLGNPHTSAKLLENLTALLMWQKPALAGEAILKMLGKCTFEPTEYKAAKNSYSAERFVWLTKLNNLRILEQGAERALTDNERFALLDQPYEKAKFTYAQARTMLALPDEAIFKGVRYQGEDKKAVETKTILMEMKAYHQIRKALENADLKAEWNELKNNSELLDDIGTAFSLHKTDEDICRYLDGKLSESILNALLENLNFDKFIQLSLKALQQILPLMLQGQRYDEAVSAIYGDHYGKKSAEINRLLPTIPADEIRNPVVLRTLTQARKVINAVVRLYGSPARIHIETGREVGKSYQDRKKLEKQQEDNRKQRESAVKKFKEYFPNFVGEPKGKDILKMRLYELQQAKCLYSGKSLELHRLLEKGYVEVDHALPFSRTWDDSFNNKVLVLANENQNKGNLTPYEWLDGKNNSEHWQNFVARVQTSGFSHTKKQRILSHKLDEKGFIERNLNDTRYVARFLCNFIADNMLLTGKGKRKVFASNGQITALLRGRWGLQKVRDDNDRHHALDAVVVACSTVVMQQKITRFVRYEEGNVFSGERIDRETGEIIPLHFPSPWAFFRENVEIRIFSENPKLELENRLPDYPQYNHEFVQPLFVSRMPTRKMTGQGHMETVKSAKRLDEGLSVLKVPLTQLKLSDLERMVNREREVTLYESLKARLEQFGNDPAKAFAEPFHKKGGAVVKAVRVEQTQKSGVLVRDGNGVADNASMVRVDVFTKGGKYFLVPIYTWQVAKGILPNKAVTANVDEIDWLEMDESYQFIFTMYPNDLVKVKLKKEEFFGYYGGLDRATGAIVIKEHDLEKSKGKQGIYRIGVKLALSFEKYQVDELGKNIRPCRPTKRQHVR

SEQ ID NO: 49 - protein, 1105 aa, Actinomyces coleocanis
  REGION 1..1105: note = Actinomyces coleocanis DSM 15436
MDNKNYRIGIDVGLNSIGFCAVEVDQHDTPLGFLNLSVYRHDAGIDPNGKKTNTTRLAMSGVARRTRRLFRKRKRRLAALDRFIEAQGWTLPDHADYKDPYTPWLVRAELAQTPIRDENDLHEKLAIAVRHIARHRGWRSPWVPVRSLHVEQPPSDQYLALKERVEAKTLLQMPEGATPAEMVVALDLSVDVNLRPKNREKTDTRPENKKPGFLGGKLMQSDNANELRKIAKIQGLDDALLRELIELVFAADSPKGASGELVGYDVLPGQHGKRRAEKAHPAFQRYRIASIVSNLRIRHLGSGADERLDVETQKRVFEYLLNAKPTADITWSDVAEEIGVERNLLMGTATQTADGERASAKPPVDVTNVAFATCKIKPLKEWWLNADYEARCVMVSALSHAEKLTEGTAAEVEVAEFLQNLSDEDNEKLDSFSLPIGRAAYSVDSLERLTKRMIENGEDLFEARVNEFGVSEDWRPPAEPIGARVGNPAVDRVLKAVNRYLMAAEAEWGAPLSVNIEHVREGFISKRQAVEIDRENQKRYQRNQAVRSQIADHINATSGVRGSDVTRYLAIQRQNGECLYCGTAITFVNSEMDHIVPRAGLGSTNTRDNLVATCERCNKSKSNKPFAVWAAECGIPGVSVAEALKRVDFWIADGFASSKEHRELQKGVKDRLKRKVSDPEIDNRSMESVAWMARELAHRVQYYFDEKHTGTKVRVFRGSLTSAARKASGFESRVNFIGGNGKTRLDRRHHAMDAATVAMLRNSVAKTLVLRGNIRASERAIGAAETWKSFRGENVADRQIFESWSENMRVLVEKFNLALYNDEVSIFSSLRLQLGNGKAHDDTITKLQMHKVGDAWSLTEIDRASTPALWCALTRQPDFTWKDGLPANEDRTIIVNGTHYGPLDKVGIFGKAAASLLVRGGSVDIGSAIHHARIYRIAGKKPTYGMVRVFAPDLLRYRNEDLFNVELPPQSVSMRYAEPKVREAIREGKAEYLGWLVVGDELLLDLSSETSGQIAELQQDFPGTTHWTVAGFFSPSRLRLRPVYLAQEGLGEDVSEGSKSIIAGQGWRPAVNKVFGSAMPEVIRRDGLGRKRRFSYSGLPVSWQG

SEQ ID NO: 50 - protein, 1113 aa, Actinomyces georgiae
  REGION 1..1113: note = Actinomyces georgiae F0490
MSASSQNVERIRYKVGIDVGLRSIGFCAVQVDADDRPVKLLNTVVHVHDAGVSPADAKKADTRKLVSGVARRTRRLYRTRKRRLVDLDRQLDGLGWPLVDPARFADPREPWFAREKLVSGRVDDADERKELLSVALRHIAHHRGWRNPYSTVESLQADAPPSEFLQGLNQRVSEKLGTELDPGLTQGQLVAKLLHRFPNAKIRGPEGILRGKLHQSDNAGELRLICRTQGLDCHITEELVRLVFQAKSPKANKEMRKRIGRDQLPGQGAHIRAEKAHPVFQRFRIVAVLANLRIREAHVDRRLTAEEMRTLTDFLLGLAGSEQPTWEELADNLNIERHQLRGTAKASVDGAPALRFPPIDATTDRIYASKLKWLAEWWRQADEERRGYMVDALSNSGGSEDEPYLDDEIAEMLEQASEEDQAKLDSLHLPGGRASYCLDTLRRLTDAMLGGGLDLFEARKAVFHVDDDWAPPTDPIGAPVGNPPVDRVLKHVARWLEAATGRWGAPQTINIEHVREGLGSEKAARELTRMNDRRRRNNQKLVEEMGEKLGMSGRIRRSDRMRYEAIRRQNCECLYCGQPITYQTMEMDHIVPRAGAASTNSRSNLAAVCRRCNHQKGKLPFAVWAESQDSPAEVRLQDAVQRVRHWLRDAGMGQKELQALRVQVIARLKSKRPDEEFDGRSMESIAWMANELRARVEAQYRGSGTTVRVYRGALTAEARKASGFEGRVNLIGGRGKDRFDRRHHAMDALVIALMNQSVAQTLALRLNMRDSQWLTQSEQTWRQFHGAPGEAARKWEAWDRDMRDASDLFNLALDGGRIPITENVRLRVGNGRVHEDGVIRFKPEYEVKGKTIKGGEARLLGDSLPSEQIDRAETPALWTALTRLPEYDRKSGLPENPDRVIRVNGAVVQATDRIRFFGTPASVAVRGGYAKLGESIHHARIYRINGKTPKYAMIRVYTIDLMRLNHEDIFTAVLKPSTISMRCAEKKLKYAIAEGNAEQIGWLVEGDQLELDAAAYAKGVGADLMREYPMATCWRVAGFPDEAKLRLRPVLLAAEGMGEDAPKFMREVLENQGWRPAVNALLSPGSVRVVRRNVLGEPRFKSSGHLPTTVDLV

SEQ ID NO: 51 - protein, 1101 aa, Actinomyces naeslundii
  REGION 1..1101: note = Actinomyces naeslundii str. Howell 279
MWYASLMSAHHLRVGIDVGTHSVGLATLRVDDHGTPIELLSALSHIHDSGVGKEGKKDHDTRKKLSGIARRARRLLHHRRTQLQQLDEVLRDLGFPIPTPGEFLDLNEQTDPYRVWRVRARLVEEKLPEELRGPAISMAVRHIARHRGWRNPYSKVESLLSPAEESPFMKALRERILATTGEVLDDGITPGQAMAQVALTHNISMRGPEGILGKLHQSDNANEIRKICARQGVSPDVCKQLLRAVFKADSPRGSAVSRVAPDPLPGQGSFRRAPKCDPEFQRFRIISIVANLRISETKGENRPLTADERRHVVTFLTEDSQADLTWVDVAEKLGVHRRDLRGTAVHTDDGERSAARPPIDATDRIMRQTKISSLKTWWEEADSEQRGAMIRYLYEDPTDSECAEIIAELPEEDQAKLDSLHLPAGRAAYSRESLTALSDHMLATTDDLHEARKRLFGVDDSWAPPAEAINAPVGNPSVDRTLKIVGRYLSAVESMWGTPEVIHVEHVRDGFTSERMADERDKANRRRYNDNQEAMKKIQRDYGKEGYISRGDIVRLDALELQGCACLYCGTTIGYHTCQLDHIVPQAGPGSNNRRGNLVAVCERCNRSKSNTPFAVWAQKCGIPHVGVKEAIGRVRGWRKQTPNTSSEDLTRLKKEVIARLRRTQEDPEIDERSMESVAWMANELHHRIAAAYPETTVMVYRGSITAAARKAAGIDSRINLIGEKGRKDRIDRRHHAVDASVVALMEASVAKTLAERSSLRGEQRLTGKEQTWKQYTGSTVGAREHFEMWRGHMLHLTELFNERLAEDKVYVTQNIRLRLSDGNAHTVNPSKLVSHRLGDGLTVQQIDRACTPALWCALTREKDFDEKNGLPAREDRAIRVHGHEIKSSDYIQVFSKRKKTDSDRDETPFGAIAVRGGFVEIGPSIHHARIYRVEGKKPVYAMLRVFTHDLLSQRHGDLFSAVIPPQSISMRCAEPKLRKAITTGNATYLGWVVVGDELEINVDSFTKYAIGRFLEDFPNTTRWRICGYDTNSKLTLKPIVLAAEGLENPSSAVNEIVELKGWRVAINVLTKVHPTVVRRDALGRPRYSSRSNLPTSWTIE

SEQ ID NO: 52 - protein, 1144 aa, unidentified
  REGION 1..1144: note = Actinomyces sp. ICM47
  source 1..1144: note = Actinomyces sp.
MSMIDSSENVPGIRYRVGIDVGLKSIGFCAVEVDRNDQPVRMLNSMVFIHDAGVDPNENKAAKSRKLTAGVARRTRRLYRTRHQRLVNLDRVLSKEFGWPLPDLTSFKDPREPWHVRAGLLEGYIADDEKRKEALSIALRHIARHRGWRNPYAKVETLLQPSEPSDFLKGLNDRISEELGRAFPADATPGQLVDTYLAHPDYVGRAGTPKLRGPQGILAGKLHQSDNAQEIRGICDVQRIEPAERDRLIRVVFEAKSPKGSAKERGLVGYDELPGQGRHVRAEKAHPAFQLFRMVSVLANLRIREGREERPLTPDELEDLVDFINQVSLKQEVTWQDLADKLRIERADLRGTAKASFDGSPVLRNPPTDVTTEKIMACKVKWLKEWWKEADDEQRGYMVDAFSNSGGSEDGTDVNDEVAELLEQATEDDQLEFEKISLPQGRAAYSLDSLRRLTDRMLRDGVDLHTARRLEFNVGDDWKPAVEPIGAPTGNPAVDRVLKQVSRWLHAATERWGEPTVINIEHARDGLGSERVARELMRENEKRRKANASAVAEMAAKLKLSGKVHRSDQIRYFALQRQNCQCLYCGAPITYTTAEMDHIVPRADGSSTNDRSNLAAVCRTCNHMKGKIPFAVWASSDKANQGVSLTGALERVNMWQRDSGMSPRQLKQLQREVCARLKSKKPDQEFDGRSMESVAWMAVELRTRIEGFYRSRDEESVPSVGVYRGQLTAEARRASGFESRVNLIGGRGKTRFDRRHHAMDALVIALMNPSVSRTLALRLNMRDAQRLTGVEETWKHFYGKPGEASKRFESWRESMLRGVELFNIALSDNAIPFVENIRLRVGSSVIHDATVHSFCPPKTPDGKQIITKGYGEQHSLGSAMPVELIDRAETPALWTALTRCPDFDPKKGLPENPQRTISVNGTRVGPTELVNFFEFSKSGPKACLKVRGGYVDLSGAIHHARIYRIAGKKTAYAMIRVFQVDLLRLKDHDVFTTPLKPSTISMRTAEPKIREALANGTATQIGWLVEGDELVIDTSKYSGGFIGEVLARYPEATSWRVAGFMTPAKLRIKPILLSKEGFVDETQAALLGVEVTSEAIQKTVDRPGWLPAVNVLFGAGGVRVIRRNCLGEERYHSSASLPVSMTLE

SEQ ID NO: 53 - protein, 1095 aa, unidentified
  REGION 1..1095: note = Actinomyces sp. oral taxon 175 str. F0384
  source 1..1095: note = Actinomyces sp.
MPAHHLRVGIDVGTHSVGLATLRVDDQGTPIELLSALSHIHDSGIGKEGQKDHDTRKKLSGVARRTRHLLRNRRERLQQLDKVLVDLGFPIPKPEEYPDLSERTDPYRVWRVRARLVEETLPEELRGPAISMAVRHIARHRGWRNPYSKVESLLSPAEESSFMKALRKRIMTKTGEVLDDDITPGQAMAQVALTHKIYMRGPEGILGKLHQSDNANEIRKICARQGISSDVCKQLLRAVFKAESPRGSAVSRVAPDPLPGQGSFRRAPKCDPEFQRFRIISIVANLRISETKGENRPLTVDERRQVVAFLMEDSQADLTWVDVAEKLRVSRQALRGTAMLTADGERSAAQPPIDVTDQIMRKTKISALKTWWDKADAERRGAMVRYLYEGLEDSECAEVIAKLPEKDHAKLDSLHLPAGRAAYSRESLTALSDHMLETTNDLHEARKRLFGVDDSWAPPAEPVGAPVGNPSVDRTLKIVARYLSAVESIWGTPEVIHVEHVRDGFTSERTAEERDKANRSRHNDNQKAIEKIQHDYGKEGYISRGDIVRFHALKLQGSACLYCGTTIGYHTCQLDHIVPQAGPGSNNRRGNLVAVCERCNHSKSNTPFAVWAQKCGIPHVGVKEAISRVNGWVEHNHSTSSGDLTRLKKEVIARLRRTQKDPEIDERSMESVAWMANELHHRIAAAYPETTVMVYRGSITAAARKAASIESRINLIGEKGRKDRLDRRHHAVDASVVALMEPSVAKTLAERSSLRGEQRLTGQEQTWKQYTGLTVGARERFEAWRGHMHRLTELFNESLAADEVYVTQNIRLRLSDGSAHTVKASKLVSHRLGDGLTVQQIDRACTPALWCALTREIDFDEKNGLPAREDRVIRVHGQEISSADCIQVFSKRKKTKSDRDEAPFGAIAVRGGFVEIGSSIHHARIYRIEGEKPAYAMLRVFTHDLLSQRHGDLFSAVIPPQSISMRCAATELRQAISEGRATYLGWIVSGDELHIPVETFTTHKIGSFLKDYPNTTRWRICGYDSETMLILKPRILSAEGLNNSSDIAEYVIKNKGWRVAINKLAKVHPTVVRRDALGRPRHSSRSNLPVTWSIE

SEQ ID NO: 54 - protein, 1181 aa, unidentified
  REGION 1..1181: note = Actinomyces sp. oral taxon 180 str. F0310
  source 1..1181: note = Actinomyces sp.
MLHCIAVIRVPPSEEPGFFETHADSCALCHHGCMTYAANDKAIRYRVGIDVGLRSIGFCAVEVDDEDHPIRILNSVVHVHDAGTGGPGETESLRKRSGVAARARRRGRAEKQRLKKLDVLLEELGWGVSSNELLDSHAPWHIRKRLVSEYIEDETERRQCLSVAMAHIARHRGWRNSFSKVDTLLLEQAPSDRMQGLKERVEDRTGLQFSEEVTQGELVATLLEHDGDVTIRGFVRKGGKATKVHGVLEGKYMQSDLVAELRQICRTQRVSETTFEKLVLSIFHSKEPAPSAARQRERVGLDELQLALDPAAKQPRAERAHPAFQKFKVVATLANMRIREQSAGERSLTSEELNRVARYLLNHTESESPTWDDVARKLEVPRHRLRGSSRASLETGGGLTYPPVDDTTVRVMSAEVDWLADWWDCANDESRGHMIDAISNGCGSEPDDVEDEEVNELISSATAEDMLKLELLAKKLPSGRVAYSLKTLREVTAAILETGDDLSQAITRLYGVDPGWVPTPAPIEAPVGNPSVDRVLKQVARWLKFASKRWGVPQTVNIEHTREGLKSASLLEEERERWERFEARREIRQKEMYKRLGISGPFRRSDQVRYEILDLQDCACLYCGNEINFQTFEVDHIIPRVDASSDSRRTNLAAVCHSCNSAKGGLAFGQWVKRGDCPSGVSLENAIKRVRSWSKDRLGLTEKAMGKRKSEVISRLKTEMPYEEFDGRSMESVAWMAIELKKRIEGYFNSDRPEGCAAVQVNAYSGRLTACARRAAHVDKRVRLIRLKGDDGHHKNRFDRRNHAMDALVIALMTPAIARTIAVREDRREAQQLTRAFESWKNFLGSEERMQDRWESWIGDVEYACDRLNELIDADKIPVTENLRLRNSGKLHADQPESLKKARRGSKRPRPQRYVLGDALPADVINRVTDPGLWTALVRAPGFDSQLGLPADLNRGLKLRGKRISADFPIDYFPTDSPALAVQGGYVGLEFHHARLYRIIGPKEKVKYALLRVCAIDLCGIDCDDLFEVELKPSSISMRTADAKLKEAMGNGSAKQIGWLVLGDEIQIDPTKFPKQSIGKFLKECGPVSSWRVSALDTPSKITLKPRLLSNEPLLKTSRVGGHESDLVVAECVEKIMKKTGWVVEINALCQSGLIRVIRRNALGEVRTSPKSGLPISLNLR

SEQ ID NO: 55 - protein, 1103 aa, unidentified
  REGION 1..1103: note = Actinomyces sp. oral taxon 181 str. F0379
  source 1..1103: note = Actinomyces sp.
MTKINDDLRYRVGIDVGLKSIGFCAVEVDENDQPLRLLNSMVFVHDAGVDPNENKAAKSRKLTAGVARRTQRGTAQNRRRLAELDRALSEELNWPLPNLEDFEDSYEPWHTRAELVEHYIKDDAERAEALAIAIRHIARHRGWRNPYLSVDSLLTPQEPSKFLRGLNERVTQALGREFPADATPGQLICAYIDSPKYAETQGIRGDSGILSGKLHQFDNVGEIRKICEVQRLDHDVFKLLVRKVFFAKSPRGSAAGLVGHDQIPGQGKYIRAEKAHPDFQLFRIVAVLTNLRIREGKAERCLTPDELRGLVDYILEVQLKQQVTWADLADNLGIERTDLRGTARASFDGSPALRFPPTDVTAEKIMASKVKWLKDWWDKADSERRGFMVDALSNSGGSTGDNDIDDEVAALLEAATEDEQAELEKIQLPQGRAAYSLDSLRRLTKRMLEEGVDLHTARKEEFNVDDDWRPEPEPIEAPVGNPAVDRVLKQVARWLNMATDRWGVPDVINIEHTRDGLGSEKVARELLRESQKRQDLNQKDMDKMIRELGISGKARRSSLIKYQAIQRQNSMCLYCGTEIGFETAEMDHIVPRALSGSTNDRSNLAAVCRACNHQKGAVPFAVWATSGEAHAGVSLEDAIKRVRLWQKGPGMSPKQHKAFQNEVISRLKSRKPDEEFDGRSMESVAWMAVELRTRIDGYYRKVNSDSVPKVGIYRGQLTAEARKASGFENRVNLIGGKGKTRFDRRHHAMDALVIAMMNQSVSQTLALRVNMRESQRITGQEETWKNFYGKPGQASERFEKWREGMLRAVELFNIELAKNAIPFHENVRLRVGSSKVHDDTVRKFIHAKLGEALSVAMIDCAETPALWTALTRLPDFDPKDGLPEDLSREIYIHSRKITADEQLNFFNSPSACLKVRGGYVEIGSSIHHARVYRIDGKKTTYSMVRVFATDLVKMTHEDVFTTPLKPSTISMRTADPKIRKALADGTATQIGWLVEGDELQLETDKYSGGLIGEVLAEYPQLTSWRVAGFYGVTQLRLRPYMLAAEGIPSDASESLRKVIEGKGWLPAINALLSSGCVKVVRRNCLGEPRFNAKSSLPVSQLLR

SEQ ID NO: 56 - protein, 1120 aa, unidentified
  REGION 1..1120: note = Actinomyces sp. oral taxon 848 str. F0332
  source 1..1120: note = Actinomyces sp.
MNAMKQYNAGIDVGINSVGFAAIEVDSKGLPLNILNNMVVLHDSGVDPGTAKTGATRLANSGTARRTRKLIARRRKRLQKLDRYIEVQGWPLVDFSSLPDPYTPWKIRAKLTQDRLEGEEQGRGLSIALRHMARHRGWRNPYEGVESLHSPKEASKQFKDLKDRVTKVSGVIFDEDATPAEVVCDIGLSPKQRLRSAPSAKYKEGATLADEPVGGKSKEGLLGGKLMQSDNANELRKIGIVQGLSNEKVNEIIDQVFASESPKGQAGKRAKKDELPGQEQYVRALRAHLAFQRFRIVAAVANLRILEAEPKHERLLSQSEKDKVIEFLMSADGDDGVTWSDVAEELGIERECLSGTAKRGADGERPSSFPPTNSTNISIVRSKVKPLIEWWRKASDDEQATLVTALSNADELTDDQPSAETVRQFLSSPDEQSQEKIDKISLPKGRAAYSVNSLERLTRRMLKDSVDLFEARKREFGVDNNWTPTPDSIGEPVGNPAVDRVLKIVNRWLLAVTRKWGPPKVVNIEHVRVGFTSAAQTRKYEEENKTNRERNLAILEELRDKFGTSGKIRREDITRFAALRRQNCQCAYCGEAITFFDCEMDHIVPRKGPGSTNTRNNLVAICERCNKSKSNMPFSLWAQNCDIPGVSVEAVIDRVRTWIKDPELNPKQYNNFKKDVIERLRKTVDDDAIDNRSIESVAWMATELADRIGSHFRTAGANTKVRVYRGWLTSEARKASGFEGKINLIGGRGKTRLDRRHHAMDAATIALMRQSVAQTLVERASIRESDRLRRVVSSSWKDYRGADRDKQFSYGSWLNSMNALAELFNRAIDADGIPVTQNLRLRLGNGEAHDATIRSLEKKRVGASWTIGEIDRASTPQLWLALTRQEDFDQNDGLPANASRELRVKNHWFHAEENVTLFPTKSAAIAVRGGYAEIGNTIHHARLYKLPGKKLTYGMIRVFAIDLLCAWHTDLFSSPLLPESISLRTAETKVRRAVEDGAAMYIGWLVDGDEIVLDPETKAFKSNKIGEYLCEFPGTKRWKVDGFPDKEKLRLRPLQLAGEGLPEDVSAGTEEILGPKGNGWRVAINALFKSSQLVVVRRTALGMVRKLSRRHLPLTTRLRG

SEQ ID NO: 57 - protein, 1114 aa, Actinomyces turicensis
  REGION 1..1114: note = Actinomyces turicensis ACS-279-V-Col4
MQFHFYMVYVTMKGMNDKDASQQLRYRVGIDVGTHSIGFCAVEVDESGMPIQLLNSMVHKHDSGIDPGGNDTATTRLAEAGVARRTRRLIRRRKKRLQELDAFIEECGWPLVDLATITDARSPWRIRAHLATEHIDDEAEQGKLLSIALRHMARHRGWRSPYARISSLHIQADPSEQLKALAQRVSEKTGISLTADQTPAQLISVYLDVFETGKLRGPEGILGGKLMQSDNANELRRIATVQGLDNDLLKKIIGFVFAAESPKGSAAKRVGKDVLPGAHGLRAEKAHPAFQQFRIVSIVQNLRIKEGTGLRALTSEETEIVVDFLNQAGLTEAPTWEEVADNLEIPRSHLKGTATEGFDGIAPSTRPPFDVTSQKILNGKLKKLSAWWKDADYDHRCAMVNALSNVGSDDEGSLADDDVREFLSDFTDEELEALDKVELPGGRAAYSVDSLEKLTNTMLSEGCDLHSARKIAFGVDDSWTPPAEPIGQPVGNPAVDRVLKQVARWISAATNQWGTPESVNIEHVRDALGSEKASREYQRSLQTRRIRNEKLFAEMRERLDIGGKPRRSELTRYLALQRQNCQCLYCGMPITYTDAEMDHIVPRKGAASTNTRENFAAVCRACNHQKSNLPFAVWAEKTERPGVSVKEAYKRVSDMRIEPGMNGRQMNEFRKAIRLRLTTKHADAEIDGRSLESVAWMANELRHRIEGFYRSAENDVTVRVFRGAVTAEGRRASGFESRVNLIGGKGKTRLDRRHHAMDALTIALMEPGIAQTIALRMNMRESQRVLGEQETWKSFTGGSDTARKRWEHWCEEMLRASELFNVFLAEDRIPICQNKRLRLGSSAVHKAIVQPFEASDKRIVSDAMPVELIDRASTPALWTALTRDPDFDPKEGLPANPSRTIRLHDKRLGPNETVEFFPTAAACLAIRGGYCEIGAGIHHARIFRISGKKTTYAMLRVYQCDLVRFQKENLLTVELPANTISVRTAVPKLREALAHGTAEQIGWLVVGDELKIDLSGFTTGQIETFNETYPQATRWEVTGFPTKTQLRLKPLLIASEGLADDVPDDIVKIVKGPGWWPAIDKLLKIGNVVLYRRDTHGKPRVVSHRSLPLSSKLQ

SEQ ID NO: 58 - protein, 1101 aa, Akkermansia muciniphila
MSRSLTFSFDIGYASIGWAVIASASHDDADPSVCGCGTVLFPKDDCQAFKRREYRRLRRNIRSRRVRIERIGRLLVQAQIITPEMKETSGHPAPFYLASEALKGHRTLAPIELWHVLRWYAHNRGYDNNASWSNSLSEDGGNGEDTERVKHAQDLMDKHGTATMAETICRELKLEEGKADAPMEVSTPAYKNLNTAFPRLIVEKEVRRILELSAPLIPGLTAEIIELIAQHHPLTTEQRGVLLQHGIKLARRYRGSLLFGQLIPRFDNRIISRCPVTWAQVYEAELKKGNSEQSARERAEKLSKVPTANCPEFYEYRMARILCNIRADGEPLSAEIRRELMNQARQEGKLTKASLEKAISSRLGKETETNVSNYFTLHPDSEEALYLNPAVEVLQRSGIGQILSPSVYRIAANRLRRGKSVTPNYLLNLLKSRGESGEALEKKIEKESKKKEADYADTPLKPKYATGRAPYARTVLKKVVEEILDGEDPTRPARGEAHPDGELKAHDGCLYCLLDTDSSVNQHQKERRLDTMTNNHLVRHRMLILDRLLKDLIQDFADGQKDRISRVCVEVGKELTTFSAMDSKKIQRELTLRQKSHTDAVNRLKRKLPGKALSANLIRKCRIAMDMNWTCPFTGATYGDHELENLELEHIVPHSFRQSNALSSLVLTWPGVNRMKGQRTGYDFVEQEQENPVPDKPNLHICSLNNYRELVEKLDDKKGHEDDRRRKKKRKALLMVRGLSHKHQSQNHEAMKEIGMTEGMMTQSSHLMKLACKSIKTSLPDAHIDMIPGAVTAEVRKAWDVFGVFKELCPEAADPDSGKILKENLRSLTHLHHALDACVLGLIPYIIPAHHNGLLRRVLAMRRIPEKLIPQVRPVANQRHYVLNDDGRMMLRDLSASLKENIREQLMEQRVIQHVPADMGGALLKETMQRVLSVDGSGEDAMVSLSKKKDGKKEKNQVKASKLVGVFPEGPSKLKALKAAIEIDGNYGVALDPKPVVIRHIKVFKRIMALKEQNGGKPVRILKKGMLIHLTSSKDPKHAGVWRIESIQDSKGGVKLDLQRAHCAVPKNKTHECNWREVDLISLLKKYQMKRYPTSYTGTPR

SEQ ID NO: 59 - protein, 1113 aa, Alcanivorax pacificus
  REGION 1..1113: note = Alcanivorax pacificus W11-5
MRYRVGLDLGTASVGAAVFSMDEQGNPMELIWHYERLFSEPLVPDMGQLKPKKAARRLARQQRRQIDRRASRLRRIAIVSRRLGIAPGRNDSGVHGNDVPTLRAMAVNERIELGQLRAVLLRMGKKRGYGGTFKAVRKVGEAGEVASGASRLEEEMVALASVQNKDSVTVGEYLAARVEHGLPSKLKVAANNEYYAPEYALFRQYLGLPAIKGRPDCLPNMYALRHQIEHEFERIWATQSQFHDVMKDHGVKEEIRNAIFFQRPLKSPADKVGRCSLQTNLPRAPRAQIAAQNFRIEKQMADLRWGMGRRAEMLNDHQKAVIRELLNQQKELSFRKIYKELERAGCPGPEGKGLNMDRAALGGRDDLSGNTTLAAWRKLGLEDRWQELDEVTQIQVINFLADLGSPEQLDTDDWSCRFMGKNGRPRNFSDEFVAFMNELRMTDGFDRLSKMGFEGGRSSYSIKALKALTEWMIAPHWRETPETHRVDEEAAIRECYPESLATPAQGGRQSKLEPPPLTGNEVVDVALRQVRHTINMMIDDLGSVPAQIVVEMAREMKGGVTRRNDIEKQNKRFASERKKAAQSIEENGKTPTPARILRYQLWIEQGHQCPYCESNISLEQALSGAYTNFEHILPRTLTQIGRKRSELVLAHRECNDEKGNRTPYQAFGHDDRRWRIVEQRANALPKKSSRKTRLLLLKDFEGEALTDESIDEFADRQLHESSWLAKVTTQWLSSLGSDVYVSRGSLTAELRRRWGLDTVIPQVRFESGMPVVDEEGAEITPEEFEKFRLQWEGHRVTREMRTDRRPDKRIDHRHHLVDAIVTALTSRSLYQQYAKAWKVADEKQRHGRVDVKVELPMPILTIRDIALEAVRSVRISHKPDRYPDGRFFEATAYGIAQRLDERSGEKVDWLVSRKSLTDLAPEKKSIDVDKVRANISRIVGEAIRLHISNIFEKRVSKGMTPQQALREPIEFQGNILRKVRCFYSKADDCVRIEHSSRRGHHYKMLLNDGFAYMEVPCKEGILYGVPNLVRPSEAVGIKRAPESGDFIRFYKGDTVKNIKTGRVYTIKQILGDGGGKLILTPVTETKPADLLSAKWGRLKVGGRNIHLLRLCAE

SEQ ID NO: 60 - protein, 1029 aa, Alicycliphilus denitrificans
  REGION 1..1029: note = Alicycliphilus denitrificans BC
MRSLRYRLALDLGSTSLGWALFRLDACNRPTAVIKAGVRIFSDGRNPKDGSSLAVTRRAARAMRRRRDRLLKRKTRMQAKLVEHGFFPADAGKRKALEQLNPYALRAKGLQEALLPGEFARALFHINQRRGFKSNRKTDKKDNDSGVLKKAIGQLRQQMAEQGSRTVGEYLWTRLQQGQGVRARYREKPYTTEEGKKRIDKSYDLYIDRAMIEQEFDALWAAQAAFNPTLFHEAARADLKDTLLHQRPLRPVKPGRCTLLPEEERAPLALPSTQRFRIHQEVNHLRLLDENLREVALTLAQRDAVVTALETKAKLSFEQIRKLLKLSGSVQFNLEDAKRTELKGNATSAALARKELFGAAWSGFDEALQDEIVWQLVTEEGEGALIAWLQTHTGVDEARAQAIVDVSLPEGYGNLSRKALARIVPALRAAVITYDKAVQAAGFDHHSQLGFEYDASEVEDLVHPETGEIRSVFKQLPYYGKALQRHVAFGSGKPEDPDEKRYGKIANPTVHIGLNQVRMVVNALIRRYGRPTEVVIELARDLKQSREQKVEAQRRQADNQRRNARIRRSIAEVLGIGEERVRGSDIQKWICWEELSFDAADRRCPYSGVQISAAMLLSDEVEVEHILPFSKTLDDSLNNRTVAMRQANRIKRNRTPWDARAEFEAQGWSYEDILQRAERMPLRKRYRFAPDGYERWLGDDKDFLARALNDTRYLSRVAAEYLRLVCPGTRVIPGQLTALLRGKFGLNDVLGLDGEKNRNDHRHHAVDACVIGVTDQGLMQRFATASAQARGDGLTRLVDGMPMPWPTYRDHVERAVRHIWVSHRPDHGFEGAMMEETSYGIRKDGSIKQRRKADGSAGREISNLIRIHEATQPLRHGVSADGQPLAYKGYVGGSNYCIEITVNDKGKWEGEVISTFRAYGVVRAGGMGRLRNPHEGQNGRKLIMRLVIGDSVRLEVDGAERTMRIVKISGSNGQIFMAPIHEANVDARNTDKQDAFTYTSKYAGSLQKAKTRRVTISPIGEVRDPGFKG

SEQ ID NO: 61 - protein, 1029 aa, unidentified; identical to SEQ ID NO: 60
  source 1..1029: note = Alicycliphilus sp.

SEQ ID NO: 62 - protein, 1146 aa, Alicyclobacillus hesperidum
  REGION 1..1146: note = Alicyclobacillus hesperidum URH17-3-68
MAYRLGLDIGITSVGWAVVALEKDESGLKPVRIQDLGVRIFDKAEDSKTGASLALPRREARSARRRTRRRRHRLWRVKRLLEQHGILSMEQIEALYAQRTSSPDVYALRVAGLDRCLIAEEIARVLIHIAHRRGFQSNRKSEIKDSDAGKLLKAVQENENLMQSKGYRTVAEMLVSEATKTDAEGKLVHGKKHGYVSNVRNKAGEYRHTVSRQAIVDEVRKIFAAQRALGNDVMSEELEDSYLKILCSQRNFDDGPGGDSPYGHGSVSPDGVRQSIYERMVGSCTFETGEKRAPRSSYSFERFQLLTKVVNLRIYRQQEDGGRYPCELTQTERARVIDCAYEQTKITYGKLRKLLDMKDTESFAGLTYGLNRSRNKTEDTVFVEMKFYHEVRKALQRAGVFIQDLSIETLDQIGWILSVWKSDDNRRKKLSTLGLSDNVIEELLPLNGSKFGHLSLKAIRKILPFLEDGYSYDVACELAGYQFQGKTEYVKQRLLPPLGEGEVTNPVVRRALSQAIKVVNAVIRKHGSPESIHIELARELSKNLDERRKIEKAQKENQKNNEQIKDEIREILGSAHVTGRDIVKYKLFKQQQEFCMYSGEKLDVTRLFEPGYAEVDHIIPYGISFDDSYDNKVLVKTEQNRQKGNRTPLEYLRDKPEQKAKFIALVESIPLSQKKKNHLLMDKRAIDLEQEGFRERNLSDTRYITRALMNHIQAWLLFDETASTRSKRVVCVNGAVTAYMRARWGLTKDRDAGDKHHAADAVVVACIGDSLIQRVTKYDKFKRNALADRNRYVQQVSKSEGITQYVDKETGEVFTWESFDERKFLPNEPLEPWPFFRDELLARLSDDPSKNIRAIGLLTYSETEQIDPIFVSRMPTRKVTGAAHKETIRSPRIVKVDDNKGTEIQVVVSKVALTELKLTKDGEIKDYFRPEDDPRLYNTLRERLVQFGGDAKAAFKEPVYKISKDGSVRTPVRKVKIQEKLTLGVPVHGGRGIAENGGMVRIDVFAKGGKYYFVPIYVADVLKRELPNRLATAHKPYSEWRVVDDSYQFKFSLYPNDAVMIKPSREVDITYKDRKEPVGCRIMYFVSANIASASISLRTHDNSGELEGLGIQGLEVFEKYVVGPLGDTHPVYKERRMPFRVERKMN

SEQ ID NO: 63 - protein, 1052 aa, Aminomonas paucivorans
  REGION 1..1052: note = Aminomonas paucivorans DSM 12260
MIGEHVRGGCLFDDHWTPNWGAFRLPNTVRTFTKAENPKDGSSLAEPRRQARGLRRRLRRKTQRLEDLRRLLAKEGVLSLSDLETLFRETPAKDPYQLRAEGLDRPLSFPEWVRVLYHITKHRGFQSNRRNPVEDGQERSRQEEEGKLLSGVGENERLLREGGYRTAGEMLARDPKFQDHRRNRAGDYSHTLSRSLLLEEARRLFQSQRTLGNPHASSNLEEAFLHLVAFQNPFASGEDIRNKAGHCSLEPDQIRAPRRSASAETFMLLQKTGNLRLIHRRTGEERPLTDKEREQIHLLAWKQEKVTHKTLRRHLEIPEEWLFTGLPYHRSGDKAEEKLFVHLAGIHEIRKALDKGPDPAVWDTLRSRRDLLDSIADTLTFYKNEDEILPRLESLGLSPENARALAPLSFSGTAHLSLSALGKLLPHLEEGKSYTQARADAGYAAPPPDRHPKLPPLEEADWRNPVVFRALTQTRKVVNALVRRYGPPWCIHLETARELSQPAKVRRRIETEQQANEKKKQQAEREFLDIVGTAPGPGDLLKMRLWREQGGFCPYCEEYLNPTRLAEPGYAEMDHILPYSRSLDNGWHNRVLVHGKDNRDKGNRTPFEAFGGDTARWDRLVAWVQASHLSAPKKRNLLREDFGEEAERELKDRNLTDTRFITKTAATLLRDRLTFHPEAPKDPVMTLNGRLTAFLRKQWGLHKNRKNGDLHHALDAAVLAVASRSFVYRLSSHNAAWGELPRGREAENGFSLPYPAFRSEVLARLCPTREEILLRLDQGGVGYDEAFRNGLRPVFVSRAPSRRLRGKAHMETLRSPKWKDHPEGPRTASRIPLKDLNLEKLERMVGKDRDRKLYEALRERLAAFGGNGKKAFVAPFRKPCRSGEGPLVRSLRIFDSGYSGVELRDGGEVYAVADHESMVRVDVYAKKNRFYLVPVYVADVARGIVKNRAIVAHKSEEEWDLVDGSFDFRFSLFPGDLVEIEKKDGAYLGYYKSCHRGDGRLLLDRHDRMPRESDCGTFYVSTRKDVLSMSKYQVDPLGEIRLVGSEKPPFVL

SEQ ID NO: 64 - protein, 1361 aa, Anaerococcus tetradius
  REGION 1..1361: note = Anaerococcus tetradius ATCC 35098
MGNYYLGLDIGTNSVGWAVTDENYNIERFKKKNMWGIRLFDEAKTAESRRIHRQARRMRQRKIQRLNLLMELFDVEISKVDESFFIRKKESDLHYEDKSQDSRYALFNDKEFNDKDYHNKYPTIFHLIMDLIENDEKKDIRLLYLACHYLIKNRGHFIFEGQKFDVNSSLNNNINKLKSHLDQFYNICLDFDNDKLIEILVNQNLNISEKSKKIKELLRKTNLEVGIANLIAGGSIKLSNMFDDDELKNLDYNSLSFKNSNFDEGRELFEEVLEDRFELVEILKDIHDASVLETMLSSASISPDGGKYISSSMINSYNKHKRDLKLLKKIIKKYKKSEYDNIFRDENIKNNYLSYTRTGINKNKKVQAEDNTDSDGFYKYIVKILKDIKENDSDEDIKYILSEIDKKNFVPKQRTKENSVIPYQLREIELRKIIDNQSKYHKFLNEVDEKGISVKEKIISLLTFRIPYYIGPLNPSYNEEKNFTTSWVKRLAKGKVTPWNFEDMVDIDASREAFIENKLNKCSFLLDETVLPKDSLLYQEYMVLNELNNLKINGQSINTDLKKSIYEELFKKYKKVTRKRLISYIKEKENMSGDIVITGIDGDFKQGLKSYIAFKDIIGEKIDDDIYRKEVEKIIRDISLYGDDKSFIQKKIKNENKLDLSDDQISKIAKLKFKDWGRFSKKLLVGIKASDKNTGEIDNIIGFMRNYNYNIMQLMANVFTFKDEIEKLNSKYYTDEKINIDYLDDLYLSSPAKRMLWQSFQIVDEIKNIKNSDPKKIFIEMARSKEDKPTRKMSRKSRLEKLYTDSKKQFIKLFGPDEYDKLNNEIKNKSESDFRWDNLYLYYTQFGRCMYSLDPIDLEELSNKNLYDQDHIYPKSKIYDDSIENRVLVKKQLNLDKSNEYPIPDRVLNKDKNKLLAFWKMLNEKELIGDKKYARLIRKSPFTDEELGDFIARQLVETRQATKETANMLKRLCPDSKIVYVKAKNVSDFRRKFDILKCRSINDLHHAHDAYLNIVVGNVFDTKFTSNPLNFIKNNSKNRSYNLEKIYDYDVIRNEKIAWLAERKEENQDGSIATVLKNLSKNDIRVTRRTYIKCEDLFDENIVRKGNGKFPIKENNNKSDTNKYGGYSGIKNAYFVLLEDEKHNRILEAIPSFIYKKEKNGEKGSVINYLQNILGIKSAKILRDKIKIGSLLKIDKFPYNLAGKSGNGILISGGVQLILDKNTSKYIKKIENYKYKLDENKDYQINIFDKLSKEENIKLFDLFVDKFENSIYKNRVNIKLKEIKLARPKFEHLSIEEQIKTLTQMLILFGRENNAVNLEYIGLPKNTGKTKINKKINNKDIKIINQSITGLYETEEDLANI

SEQ ID NO: 65 - protein, 1552 aa, unidentified
  REGION 1..1552: note = Anaerophaga sp. HS1
  source 1..1552: note = Anaerophaga sp.
MFSQRNNPYCELLQNVKQLYKEKFGKTNQVDNSIIYGFMKRILGLDLGTNSIGWALVENDENDRKGKIIGMGSRIIPMDMSELDNFNKGASISKTAERTRLRMTRRLRERHLLRRARLHRILNIMGFLPEHYRNSIDFIDKKGCFFEGQEPKIAYKPDKNSEQFCFLFTSSFHEMLEDFRKFQPELIQNRKKVPYDWTIYYLRKKALTQKISKEELAWIILNFNTKRGYYHLRGEDEDNQDNKKIKEFRALKVVNVTEREGANSSGKKWYDMELENGWVYSRQSNLPPNLEGKTIELIVSYTLDNNGNIKKDKNGKEKYSLSMPGEEDWNLVKIKTENDLKTSKKSVGEYIYDHLLKNPDQKIRGKLISTIERKFYKEELSRILKTQMNFYEELKNRELYQKCVEELYPNNKSHQQTLLQKDFIHLIVEDIIFYQRPLKSKRAFVNNCPLEYRVYVDKKSGELIKSGVKCIPKSHPLFQEFRLWQYVRNLRIYERERMVNGRLMVNVDVTNELLPDEEHIVRLFDLLNDRKSFKQDDVLRFVGIKSPKDRKRYSWNYPEDKELPGNETRHLILAWLKKVDGVPEDWLDPEKLKALWHLLYSVTDREEIIKGLHSFAKKYELPDTFVEHFKKIPRLEREYGSFSEKAIKKLLPLMRMGKYWKAEEIPADLLEKAQKIIDAEADDRISDEVREKLLHLKDISQLKGLPLWQASYLVYGRHSETGEVVKWRTSEDLEKYILQFKQHSLRNPVVEQVILEALRVVKDIWEHYGEGKEGFFNEIHVEIGRELKNPADKRKKITSQIQENENTNLRIKALLEELFNDPSVKNVRPYSPAQQEILRIYEDGVLNGQKEIPDDILKISKMARPSKSQLVKYKLWLEQKYRSPYTGEIIPLSQLFTSAYEIEHIIPQARYFDDSFSNKVICEAEVNREKGHQLAFEFITKRGGDEIELNFGKKVTILNVEEYQKFVKDHYGRSLRSLSKMRKLLMEDIPDDFIDRQLNDSRYISKVVRNLLSNIVRAEDENSLVSKHLITCTGGVTTRLKHEWGLNDVWNELITPRFVRLNKMGKEKFGEWINKKGKQVFQIQMPLELQKGFNKKRIDHRHHALDALVVACASRSHVNYLNNDSARANASETRYDLRNKLCYKDKTDSNGNYRWKFYKPWESFTEEAKNRLAGTVVSFKSNRRIMTRSSNRYFKWVDTSEGKKKKLVRQIKGDNQAIRKPLHKDTVLGKVSLRKEKKVSLSKAIDLWESIVDKPLKKRIQSLREQGYDKKLLLKYFKDRNNQFNGQDISRVNIYFFDNNLAARRVTLDASFNSEKRIDGITDSGIKKILYAHLQNEKYHGKKDEKGNEISPYELAFSPEGLEEMNANIKKLNGGKPHCPIYKVRLAETIGEKFKLGEKGNKNKKYVEAAKGTNLFFAVYVDEKGVRSFETIPFSVALERRKQKLAVVPEENENKEKLLFYLSPNDLVYVPDEDEKLIDYRQLSINPTRIYKMVSSSGTQCFFIPHFVASPIVQTMELGPNNKSERAWDGQMIKNVCYKLSVDRLGNVKIEK

SEQ ID NO: 66 - protein, 1515 aa, Anaerophaga thermohalophila
  REGION 1..1515: note = Anaerophaga thermohalophila DSM 12881
MKRILGLDLGTNSIGWALVESDEEQKSGKIQGIGSRIIPMDQNELDNFNKGNTVSQTAERTRLRMVRRLRERHLLRRERLHRVLKEIGFLPEHYLEQIDFTEKPGGFLPGKEPKIAYKPDNFKDKYDFLFQDSYHEMLSDFQDKNPEFIQKRKKVPQDWTIYYLRKKALTAKITKEELAWIILNFNQKRGYYQLRGEDEDVAKNTKKEEFHALKVVKVKEREDSEGASGKWYDIELENGWVYPRQSNIRPDWEGKILELIVTYNLDKDGNIKTDKEGNEKRSFRMPNKDDWTLRKKRTENEIEKSGKTVGEYIYDNLLDAPDLKIRGKLVSTIERKYYRSELEQILTAQKKYHPELSNSELFNKCISNLYPNNDIHRKALLSKDFVHLIINDIIFYQRPLKSKRSTVSNCPLEYRVYVDKVTGEKKKVPLKCIPKSHPLYQEFRLWQYVKNLRLFEKERFENGRLLTNVDVTEQFLPDEDKYVELFEFLNGRKTFKQDDILKFAGIKSAKDRVKYYWNYPQEKEYPGNETRYLIESRLKKIENVPDEWLNYEKIEELWHLLYSVTDKVEIEKGLQSFAAKYQLPDLFVEVFKGFPRMEREYGAFSKKAIKKLLPLMRMGKYWKLENINPDLIEKVQKIIDGEADDNINDGIRERFSEINEMSDLRGMPLWKASYLVYGRHSEAAEVIRWRTSADLDQYIKDFKQHALRNPIVEQVVLEALRVVKDVWNYFGEGREKFFDEIHVEIGRDLKNPADKRQKIANQIQENENTNLRIKALLVELFNDPEVQNVRPYSPVQQQLLKIYEDGVLNAERDIPDDIQKISRMANPTRNQLIRYKLWLEQKYRSPYTGEIIPLNKLFTSEYEVEHIIPRARYFDDSFSNKIISEAEVNRKKDRMLAFEFIKKLGGSTIDLNYGKKVSVLTVEEYQQFVKDHYGINPHSRLKMQKLLMDEIPESFIERQLNDSRYISKMVRNLLSNIVREENENSPVAKQLITCSGSITNTLKQEWGLNDVWNTIITPRFERLNKMGEQKYGEWVNKEGKPVFQIQMPLELQKGFNKKRIDHRHHALDALIVASATRSHVNYLSNEAAKTNAKDTRFDLRNRLCYKEKRGQNRNFTWRFYKPWNTFTEDAKNALNDIVVSFKSNHRVINKSTNRYFKWENLPGGMKKKRLVRQEKGDNWAIRQSLHKDTVLGKVSLRKVKPVSLSVALDSWNNIVDKALKKKIRSLKDQGYDKKLMLKYFKDRRNEYNGENISRVNVYYFDEEMAARRVDLDTSFNSEKRIEGITDSGIKKIIYAHLKNEKYHGQKDDKGKDISPYELAFSPEGIAEMNANIKQLNGGKPHCPIYKVRLAEPVGEKFQLGETGNKTEKLVEVAKGTNLFFGVYANDEGVRSFATVPFYLAVEREKQGLPAVPQENENGDQLLFWLSPNDLVYVPSEEDAHFANPKQIELDNSRIYKMVSSTGTQCFFIPHFVATPIVQTIELGPNNKSERAWDGQMIKKVCYKLSVDRLGNVEIE

SEQ ID NO: 67 - protein, 1168 aa, Azospirillum lipoferum
MARPAFRAPRREHVNGWTPDPHRISKPFFILVSWHLLSRVVIDSSSGCFPGTSRDHTDKFAEWECAVQPYRLSFDLGTNSIGWGLLNLDRQGKPREIRALGSRIFSDGRDPQDKASLAVARRLARQMRRRRDRYLTRRTRLMGALVRFGLMPADPAARKRLEVAVDPYLARERATRERLEPFEIGRALFHLNQRRGYKPVRTATKPDEEAGKVKEAVERLEAAIAAAGAPTLGAWFAWRKTRGETLRARLAGKGKEAAYPFYPARRMLEAEFDTLWAEQARHHPDLLTAEAREILRHRIFHQRPLKPPPVGRCTLYPDDGRAPRALPSAQRLRLFQELASLRVIHLDLSERPLTPAERDRIVAFVQGRPPKAGRKPGKVQKSVPFEKLRGLLELPPGTGFSLESDKRPELLGDETGARIAPAFGPGWTALPLEEQDALVELLLTEAEPERAIAALTARWALDEATAAKLAGATLPDFHGRYGRRAVAELLPVLERETRGDPDGRVRPIRLDEAVKLLRGGKDHSDFSREGALLDALPYYGAVLERHVAFGTGNPADPEEKRVGRVANPTVHIALNQLRHLVNAILARHGRPEEIVIELARDLKRSAEDRRREDKRQADNQKRNEERKRLILSLGERPTPRNLLKLRLWEEQGPVENRRCPYSGETISMRMLLSEQVDIDHILPFSVSLDDSAANKVVCLREANRIKRNRSPWEAFGHDSERWAGILARAEALPKNKRWRFAPDALEKLEGEGGLRARHLNDTRHLSRLAVEYLRCVCPKVRVSPGRLTALLRRRWGIDAILAEADGPPPEVPAETLDPSPAEKNRADHRHHALDAVVIGCIDRSMVQRVQLAAASAEREAAAREDNIRRVLEGFKEEPWDGFRAELERRARTIVVSHRPEHGIGGALHKETAYGPVDPPEEGFNLVVRKPIDGLSKDEINSVRDPRLRRALIDRLAIRRRDANDPATALAKAAEDLAAQPASRGIRRVRVLKKESNPIRVEHGGNPSGPRSGGPFHKLLLAGEVHHVDVALRADGRRWVGHWVTLFEAHGGRGADGAAAPPRLGDGERFLMRLHKGDCLKLEHKGRVRVMQVVKLEPSSNSVVVVEPHQVKTDRSKHVKISCDQLRARGARRVTVDPLGRVRVHAPGARVGIGGDAGRTAMEPAEDIS

SEQ ID NO: 68 - protein, 1068 aa, Bacillus cereus
  REGION 1..1068: note = Bacillus cereus BAG4X12-1
MRYVLGLDIGIASCGWAVINQEKERIEDLGVRIFDKAENPKDGKSLAAPRRDARSTRRTLRRKKHRMQRIKILLVKQGLLFKTELNHLYESATEFDVWNLRLDALERKLHPKEFARVLIHLAKRRGFKSNRKETTLSENGQILESISENQQIMEQQNYRTVGEMILKDKKFENHKRNKDGTYIGTVTRQQLQDEIQMIFHTQRLYKNDYATEEFESSYLEIWASQRPYASKDQIEKMIGYCTLEPKEKRTPKASWSFQYFVALQTINNLRLISKDKIEELSFEEKKQIMNLALEKPIVKYIDIRKLLSIPNDFQFNSLSYSADTVDTTLENKRCIELKEYHSINKVYKQVYGKNTPNLLPIDYDTIAYGLTIFKDDKDILEYLQNKYVNAKGKPIKNLAKKTYDDTFIQALLNLNFTKMGHLSFKALKNIIPFLEEGLSYDKACEKAGYNFKGTSYTERTKYLPVIPQNTNPVVHRALSQTRKVINAIIKKYGSPNAIHIETARELSKTFQERKEIDSRYQDNSKKNEHAIHKLKELGNINPSGINIVKFKLWSEQDGRCMYSGKYIEPHRLFEEGYTEVDHILPYSRSLDDSYNNKILTLGTENQRKGNKTPYEYMGNTSIWDEFETRVQSNKKINFKKQQKLLLQNFSYAREQEFIERNLNDTRYATIYLTSLIQQHLIFSESSSKKKVRTVSGIITSHLRSRWGFNKDRKEGHIHHALDAVIVAVTSNHMIQRVTKYYKLKELNKNLQAKQLPFPEPWEGFRLELEARISPNTQQYLKGIHFKNYADVNLSDIKPIFVSRMPKRSITGELHQETIRKFLGYNEKGKVLTAIKTKLEDIPFDANGDFPMYGKETDLYTYNAIKERYLSHEKDKRKSFQEPLYKPTKSGEIGPLIKSIKIMDTRTIVNPVNQGKGVVYNSKIARTDVFKKEDKYYLIPIYTIDLLKNILPHKAITAGKGYEDWTTIDSSFTFLFSLFPNDLIQIVPSKNKTIKARTTVSKKEILLPSLTGYFKGVHSGTAGITVETHDGSVIANVGSKQLLLFEKYQVDVLGHYTKIKEEKRMGMAI

SEQ ID NO: 69 - protein, 1078 aa, Bacillus cereus
  REGION 1..1078: note = Bacillus cereus BAG4X2-1
MRYVLGLDIGIASCGWAVINQEKERIEDLGVRIFDKAENPKDGKSLAAPRRDARSTRRTLRRKKHRMQRIKVLLVKHGLLSKTELDHLYESATEVDVWNLRLDALERKLYPKEFARILIHLAKRRGFKSNRKETTLSENGQILESISENQQIMEKQNYRTVGEMILKDKKFENHKRNKNGTYVGTVTRQQLQDEIQMIFHAQRLYKNDYATEEFESSYLEIWASQRPYASKDQIEKMIGYCTLEPKEKRAPKASWSFQYFVALQTINNLRLISKDRIEELSFEEKKQIMNLALEKSIVKYIDIRKLLSVPNEFQFNSLSYSADTVDTAVESRKCIELKEYHSINKVYKQIYGENALNLLPKYYDTIAYGLTIFKDDKDILEYLQNKYVNAKGKPISNFANKTYDDTFIQALLNLNFTKMGHLSFKALKNIIPFLEEGLSYDKACEKAGYNFKGTSYTEQTKYLPVIPQNTNPVVHRALSQTRKVINAIIKKYGSPNAIHIETARELSKTFQERKEIDSMYQDNSKKNEHAIHKLKELGNINPSGINIVKFKLWNEQDGRCMYSGKYIEPHRLFEEGYTEVDHILPYSRSLDDSYNNKTLTLGTENQRKGNKIPYEYMGNTSIWNDFETRVQSNKKINKKKQQKLLLQHFSYAREQEFIERNLNDTRYATIYLSSLIQQHLIFSESSRKKKVHTVSGIITSHLRSRWGFNKDRKEGHIHHALDAVIVAVTSDHMIQRVTKYYKLKELNRNLQAKRMPFPEPWEGFRLELEARISPNTQQYLKGLRFKNYADVNLSEIKSIFVSRMPKHSITGELHQETIRKFIGYNEKGKVLTAIKTKLEDIPFDANGDFPMYGKESDLYTYNAIKERYLSHKKDKRKSFQEPLYKPTKSGGIGPLIKSIKIMDTRTIVNPVNQGKGVVYNSKIARTDVFKKEEKYYLIPIYTIDLMKNILPQKAITAGKGYEDWTTIDPSFTFLFSLFPNDLIQIVPSKNKTIKARTTVSKKEVLLPSLTGYFKGVHSGTAGITVETHDGSVIANVGSKQLLLIEKYQVDVLGNYTKIKEEKRIGLTTYNDNKKIAAC

SEQ ID NO: 70 - protein, 1069 aa, Bacillus cereus
  REGION 1..1069: note = Bacillus cereus Rock1-15
MNYDIGLRIGITSCGWSIINKDLERIEDLGVRVFEKAENPDGTASAAPRREARKSRRKHRRKKHRIERIKRLIVQHDLLSKKELDSLYLSPFNIDVWNLQVEALERKLDNREFARVLIHLVQRRGFQTIRKSVEIQEEGKLLENVSENERIMKVNGYKTVGEMFSKHEKFTHHKRNKDGSYTSVVTRSLLLKEIKTIFNSQRILGNVFSTQKLESDYLYIWGSQRPTLTYEQLMSMVGNCIYEKKEKRAPKTSWAFQYFSLLQKINKLKVSDDNTLRKLSKEERDIVIELAFKKKNVSFVDIRKALKLNDNTKFNHLTYSHVVETKKVEKATFIELKGYHLIKKQLKDRNVELTQELQPKDYDAIAAASTFFKNDIEFRDYLRNQYLDSNGKRKSNIANKVFEDKVIAAVFELNFSKVCHLSFKSLYKLIPHLEKGLDYKEAILCAGYNFRDENKRDKKLFLPVIQQETNPVVHRALTQARKVINAIIREYGSPNTIRFVVANDLAKTYKQRKELESTLKKNRAENEKIKTKLLSMGIINPTGMDIVKYKLWYEQSGICLYTGRQMELSSLFKPGYSIVNHIIPYNRSFDDTYHNRVLTLTETKYEKGNKIPFEYFGAEETCWNEYEKRVSTSKKIHDKKREKLLIRNFDIEYENEMISNNVFDTHYIGSYFEKYIDEHLQFKKSTKKQKVFSIHGNMVAHLHSRWGFNKNSREIYLNHAVDAAIVAVLTDQLIRNIADYYRRDNILEQKGSLKFPEPWKSFSIELEARISPQVRDLIKKLNLDSYLDVDILHIKPVFISKKPRRKVNGEAHKSTIRSLIGINEIGKTVTCIKTRLEDIPFDENGDFPMYGKDTDKYTYTAIKERYLEFNKDKEKAFSTPLYKLKRNGEPGNQIKSVKIIDTRNIVNKVNQGKGIAYNSNIIRVDVFSRDQKYYVVPIYLRDFIKGSLPNKIITAAKGFMQWPETDNSYTFLFSIFPNDLIKVVPKEGKFIKAKNENKENINLTEILGYFKGLDSSTGAFTLESHDGSLLARGIGTKNLLLIEKYQVDVLGRYNKVGNEERQDIKIQQN

SEQ ID NO: 71 - protein, 1088 aa, Bacillus smithii
  REGION 1..1088: note = Bacillus smithii 7_3_47FAA
MNYKMGLDIGIASVGWAVINLDLKRIEDLGVRIFDKAEHPQNGESLALPRRIARSARRRLRRRKHRLERIRRLLVSENVLTKEEMNLLFKQKKQIDVWQLRVDALERKLNNDELARVLLHLAKRRGFKSNRKSERNSKESSEFLKNIEENQSILAQYRSVGEMIVKDSKFAYHKRNKLDSYSNMIARDDLEREIKLIFEKQREFNNPVCTERLEEKYLNIWSSQRPFASKEDIEKKVGFCTFEPKEKRAPKATYTFQSFIVWEHINKLRLVSPDETRALTEIERNLLYKQAFSKNKMTYYDIRKLLNLSDDIHFKGLLYDPKSSLKQIENIRFLELDSYHKIRKCIENVYGKDGIRMFNETDIDTFGYALTIFKDDEDIVAYLQNEYITKNGKRVSNLANKVYDKSLIDELLNLSFSKFAHLSMKAIRNILPYMEQGEIYSKACELAGYNFTGPKKKEKALLLPVIPNIANPVVMRALTQSRKVVNAIIKKYGSPVSIHIELARDLSHSFDERKKIQKDQTENRKKNETAIKQLIEYELTKNPTGLDIVKFKLWSEQQGRCMYSLKPIELERLLEPGYVEVDHILPYSRSLDDSYANKVLVLTKENREKGNHTPVEYLGLGSERWKKFEKFVLANKQFSKKKKQNLLRLRYEETEEKEFKERNLNDTRYISKFFANFIKEHLKFADGDGGQKVYTINGKITAHLRSRWDFNKNREESDLHHAVDAVIVACATQGMIKKITEFYKAREQNKESAKKKEPIFPQPWPHFADELKARLSKFPQESIEAFALGNYDRKKLESLRPVFVSRMPKRSVTGAAHQETLRRCVGIDEQSGKIQTAVKTKLSDIKLDKDGHFPMYQKESDPRTYEAIRQRLLEHNNDPKKAFQEPLYKPKKNGEPGPVIRTVKIIDTKNKVVHLDGSKTVAYNSNIVRTDVFEKDGKYYCVPVYTMDIMKGTLPNKAIEANKPYSEWKEMTEEYTFQFSLFPNDLVRIVLPREKTIKTSTNEEIIIKDIFAYYKTIDSATGGLELISHDRNFSLRGVGSKTLKRFEKYQVDVLGNIHKVKGEKRVGLAAPTNQKKGKTVDSLQSVSD

SEQ ID NO: 72 - protein, 1069 aa, Bacillus thuringiensis
MNYDIGLRIGITSCGWSIINKDLERIEDLGVRVFEKAENPDGTASAAPRREARKSRRKHRRKKHRIERIKRLIVQHDLLSKKELDSLYLSPFNIDVWNLRVEALERKLDNREFARVLIHLVQRRGFQTIRKSVEIQEEGKLLENVSENERIMKVNGYKTVGEMFSKHEKFTHHKRNKDGSYTSVVTRSLLLKEIKTIFNSQRILGNVFSTQKLESDYLYIWGSQRPTLTYEQLMSMVGNCIYEKKEKRAPKTSWAFQYFSLLQKINKLKVSDDNTLRKLSKEERDIVIELAFKKKNVSFVDIRKALKLNDNTKFNHLTYSHVVETKKVEKATFIELKGYHLIKKQLKDRNVELTQELQPKDYDAIAAASTFFKNDIEFRDYLRNQYLDSNGKRKSNIANKVFEDKVIAAVFELNFSKVCHLSFKSLYKLIPHLEKGLDYKEAILCAGYNFRDENKRDKKLFLPVIQQETNPVVHRALTQARKVINAIIREYGSPNTIRFVVANDLAKTYKQRKELESTLKKNRAENEKIKTKLLSMGIINPTGMDIVKYKLWYEQSGICLYTGRQMELSSLFKPGYSIVNHIIPYNRSFDDTYHNRVLTLTETKYEKGNKIPFEYFGAEETCWNEYEKRVSTSKKIHDKKREKLLIRNFDIEYENEMISNNVFDTHYIGSYFEKYIDEHLQFKKSTKKQKVFSIHGNMVAHLHSRWGFNKNSREIYLNHAVDAAIVAVLTDQLIRNIADYYRRDNILEQKGSLKFPEPWKSFSIELEARISPQVRDLIKKLNLDSYLDVDILHIKPVFISKKPRRKVNGEAHKSTIRSLIGINEIGKTVTCIKTRLEDIPFDENGDFPMYGKDTDKYTYTAIKERYLEFNKDKEKAFSTPLYKLKRNGEPGNQIKSVKIIDTRNIVNKVNQGKGIAYNSNIIRVDVFSRDQKYYVVPIYLRDFIKGSLPNKIITAAKGFMQWPETDNSYTFLFSIFPNDLIKVVPKEGKFIKAKNENKENINLTEILGYFKGLDSSTGAFTLESHDGSLLARGIGTKNLLLIEKYQVDVLGRYNKVGNEERQDIKIQQN

SEQ ID NO: 73 - protein, 1509 aa, Bacteroides coprophilus
  REGION 1..1509: note = Bacteroides coprophilus DSM 18228
MKKTLGLDLGTNSIGWAVINSNIDSEGKEKLVGISSCGSRIIPMDATTLGDFGKGNTKSPVAERTRLRGIRRLLERSLLRRERLHRVLSVMGFLPEHYASQLDRYGKFLPETEPKLAWYKDDSGRYQFLFQKSFHEMLEDFRQHQPELVAGEKKIPYDWTIYYLRKKALSQEITKEELAWILLNFNQKRGYYQLRGEEEQEENNKSVEYHALKVVSVEDSGERKGKDIWYNVTLENGWVYRRASNIPLDWTGKVKEFVVTTELDDAGNPKKDKEGNVKRSFRAPKEDDWGLLKTRTQAQIDESGKTVGTYIYESLLCMPNQKIRGKLVRTIERKYYKDELRQILVKQSEFHAALQDHNLLLSCIEELYPNNEAHRRLLSASSFIYFLIEDILFYQRPLKSQKGLIDNCPYESHIYKDKKDGSLHHVPLKCVSKSHPLFQEFRLWQFLSNLRIYQRERMMDGSLKLDVDVTREFLPSEEDYVKLFDWLNERKEISQKFLLAYKPFGLKKNEQANYRWNYVEDKSYPCNETRAEIKSRLSKAGVPEEFLTEEKEEALWHILYSISDKKELTKALGTFAAKNCLNESFVEVFAKIPPFESNYAAYSLKAIRKLLALMRMGKYWNEQAIDRQTRDRIEKILTGEYDETIRSRVREKAMLLTDISSFRGLPLWLACYIVYDRHSESKELVKWETPADIDHFLSKFKQNSLRNPIVEQVITESLRTVRDIWKQEGKIDEIHVELGREMKNPAKERARITAQVQENENTNLRIKALLAEFMNPEFEIENVHPYSPGQQEILRIYEDGVLSGIAEKDLPDDITAILKKFRENDVKKRPTTSEVLRYKLWLEQRYRSPYTGRVIPLGKLFTPAYEIEHVIPQSRYFDDSISNKVICESAVNKLKDNCLGYEFIKKHSGEMVELGNGETVPVFSVEEYERFVKESYFGNSKKMKKLLLEDIPDSFIERQLNDSRYISRVVTSLLSNLVCEEGEQDGLSKNVIVCTGGITDRLKKDWGVQEVWNRIILPRFLRLNEITGRTDFTSTSVNGHLLPALPLYLQKGFNKKRIDHRHHAMDAIVIACANRNIVNYLNNSSARKNSEISRYDLQRLLCEKVKTDANGNYKWILRKPWETFTQDVYAALTNIVVSFKQNLRVINRTTNYYQHYNEAGEKRMIPQTKGDRWAIRKPMHKDTVYGEVNLRKEKTLPLRDVVKNPSIVVDKSLKNKLYELLKSQYDLKAIAKYFETHQDVWADVNLKKIKVYYFTKETNERFFATRKSLDPSFDQKKIEEEVTDTGVQKILLHHLQQNNNDPDMAFSPDGIDRMNQNMTILNDGKWHQPIYKVRTYEKADKFAVGESGNKAKKFVEAAKGTNLFFAVYESVQEDEAIGKQVCKRTFATIPLNEVIKRKKQGLPAAPEDLNGNLPKFVLSPNDLVYLPTEEERNSSRIIQPLDRERIYKMVSSSGSQCFFIKVFVANSIWDKNEYSSLNKMERAITNEMIKEICVPIKIDRLGNVSLIQI

SEQ ID NO: 74 - protein, 1504 aa, Bacteroides coprosuis
  REGION 1..1504: note = Bacteroides coprosuis DSM 18011
MKKVLGLDIGTNSVGWAVVNQNDKGEFLSIEKIGSRIIPMSQDVMDKFGAGQTESSTAQRTQYRGVRRLRERSLLRRERLHRVLHILHFLPQHYDAAIGWNKKENKTYGKFLPGVEVNIPWVATDQGHQFIFMDSYAEMLKDLKQHQPHLFEKSSTPVPLDWTIYYLRKKALTQAISKEELAWILLNFNQKRGYYQLRGEEVEDNTKREEFYALKVVKVELDKDNTSAKTWYKVHLENGFIYPCPSDTPIDSWVGMVKDFIVTTTLEKDGSEKRTADGEIKRSFRAPKEDDWTLLKKKTESELEKSGKQVGAFIYDTLLSNPDQKIIGGLIKTIERKYYKKELEQILETQQKFIAELSDKKLFQACAEELYPLNDSHRENLLERDFKHLFVQDIIFYHRPLKTKKSLISNCTYEYRTFYKNGEKQISPIKCIAKSNPLFQEFRVWQFVQNLRILQRQRSEGDSIKYNVDVTAEFLKDENDIANLFTWLNERKVIKQDQLLKSYFKLKVNKETKELDYRWNYVDDKNKEYPCNATRTHILSFLEKCKEEKRIEDDRFVYSLWHLLYSVVEPIELRGALAKFAEREHLHPSFVDVFAQFPPLEKEYGSYSEKAIKRLLPLMRMGDYWHEDKIDVKTKQRIQRIIDGEADDDITHRSREKVENLRSITDFKGLPLWKAGYVVYNRHSESGELTKWKTPHELSNYIQNEFKQYSLRNPIVEQIVLETLRVVHDLWVKHGDFSEIHLELGRDIKNSSDKRKRMAERQQENENSRQRVLEMLIDLKKEAAFADLNPYSPSQQEKLRIVEDGVLRSNIEIPKDIEKITKSAKPTSRELTKYRLWLDQKYRSPYTGQPISLAQLFTSKYEIEHVIPQAKYFDDSFTNKVICESEVNKEKGSMLAHEFILKNGGSTVNVGGRQVQVLKNDAYVELINRLYGKNNPVKAKKLLAEDIDEVVGDFSERQLNDTRYISRVVQKLLSNIVREEDEQESTSKHVIGCSGQVTTALKKDWGLNDIWNKIIQPRFERLNEMTATEDYGVWQSPNHFQIRVPEEIQKGFTKKRIDHRHHAMDALVIACATRSHINYISNRSGQDRNAKFETTRTDLRSKLCYKENSSGNNYNYIFNKPWDTFTQDAHRALENIVVSHKQNLRVLTKTNNYTQFINKDGKKDLQKQVKGDHFAVRKPMHQETIYGRVSIRSIKEVALKKALENWKQIVDRTLKDKIRELIGAYGKYDAQTILKYFKDRDYKFNNLKINRVEVYEYDHNCAAVRKSIGDDLTIKQIERITDESIRKILMNHLSNYDDNLKEAFSPEGLMEMNKNIKELNGGKNHQPIYKVRLFEDLGSKFPLGVSHNNPDKYAIAAKGTNLFFGIYEDQEGKRMFDSIPLNIVIDRLKEKKSPVPETYNESKLKFHLSPNDLVYVPTDEEQKQPELVDVDHLSDEQKGRVYKAVSFTGNRAFFVNHRVSKVIHDYVEFGTKNKIENDDDKRSLKHICWKLKVNRLGEITDVKR

SEQ ID NO: 75 - protein, 1504 aa, Bacteroides dorei
  REGION 1..1504: note = Bacteroides dorei DSM 17855
MKNIVGLDLGTNSIGWAVVNGSVNDDGSEQLVKIQASGSRIIPMDAAMIGDFNKGNSISQTAERTRLRGVRRLSERYLLRRERLHRILDILGFLPFHFAQDLDRHGKIVKGKEPKLAWRKNEAGQFEFIFQDSFKEMLEDFKLNYPNLITDDKKVPYDWTIYYLRKKGLTSKISKEELAWILLNFNQKRGYYQLRGEEEEENKDKLVEFYALKVVAVEDSGEKKGKDIWYNVHLENGWVYRRTSNMSLDWVGKTKEFIVTTDLEKDGTPKKDKEGNVKRSFRAPKEDDWSLVKKKTEADIDQTHKTVGAYIYDTLLGNPSQKIRGRLVRTIERKYYKEELKLILEKQKEFHLELQDRALYAACIEELYPINEAHRNNVGNRDFTYLFLEDILFYQRPLKSKKSLIDNCPYEENQGLDKETGEIKSFPVKCIAKSHPLFQEFRLWQFIINLRIYRKDLAQDVDVTNELLKTEEDYVALFDWLNGKKEIDQKAFLKYPVFGLKKEIENYRWNYVQDKPYPCNETRSLMLARLEKCDISIEFLTKENEEALWHILYSVEDKNEIVKALQKFADKHDLNASFVDVFQKFPPFKKEYGSYSAKAIKKLLPLMRMGKYWSENSIDKGTRERIDKIITGEYDEKIENRVREKAIHLADVSDFKGLPLWLVCYIVYGRHSEAKEIIQWKSPADIDSYLRSFKQHSLRNPIVEQIIIETLRVVRDIWKQVGNIDEIHVELGREMKNPADKRKKMTQQMSENENTNLRIKYLLTEFLNPEYEVENVRPYSPSQQDILRIYEEGVLNSVSDLPEEISDILKKFTETDLKKRPSRSEVLRYKLWLEQKYRSPYTGEVIPLGKLFTPAYEIEHVIPQSYYFDDSFSNKVICEAEVNKLKSNLLGHEFIVKHHGEIVELPFGKKVRIFTVDEYEQFVKDNYSRTRSKMKKLLMDDIPEEFVTRQLNDSRYISKVVKSLLSNIVREKGEEEAISKNVIPCTGGVTDRLKKDWGINEVWNKIILPRFQRLNELTGTNKFTTKNVGIQEIPTMPLELQKGFNKKRIDHRHHAMDAIIIACANRNIINYLNNKSATAKAELSRYDLQKMLCDKAKTDNNGNYKWVIRKPWASFTQDTYLALENIIVSFKQNLRVINKATNRFLHYNEEGKKIFVKQGKGDNWAIRKSMHKDTVFGEVNLRRIKTVALNEAMKNPQSIVVKDFKRKLLELWNLGFDAKRIKKYFEDNRETWSDINLSKIEVYYFSKDTKDRFFATRKPLDTSFDRKKIENNITDTGIQKILLRHLELKDNNPDIAFSPDGIDEMNRNIIQLNNGKYHQPIIKIRWYEQADKFAVGQTGNKSSKFVEAAKGTNLFFAVYESNILDKKTNTIIKKRNYATIPLNVAIERQKQGLPVAPEDENGNDPIFVLSPNDLVYLPTDDELANGIIAQPLDRGRIYKMVSSSGEQCFFIKHIVANVLVDKFEFSPLNKMERALTGEMIKMICIPIKVDRLGNVLESSSSYKK

SEQ ID NO: 76 - protein, 1509 aa, Bacteroides eggerthii
  REGION 1..1509: note = Bacteroides eggerthii 1_2_48FAA
MKTILGLDLGTNSVGWAVINSVIKEQAERIWIEMAGSRIIPMDAAVLGDFDKGNSISQTSERTRLRGARRLRERQLLRRERLHKVLNILGFLPNHYLEYIDFEKHPGKFLADAEPKLAWVKDEQGKYTFLFQAAFDEMLADFAIHQPSLVSGDKKIPYDWTIYYLRKKALTEMISKEELAWILLNFNQKRGYYQLRGEEEEDNAGKSVEFYALKVLTVEATDEKKGRDVWYNVHLENGWIYRRSSSVPLDWEGQVKEFIVTTDLNPDGTPKLDKYGEVKRSFRAPKEDDWMLIKKRTEADIANTHKTVGAYIYDTLLQKPQQKIIGKLVKTVERKLYRDELSLILQKQCAFHAELQDRALYARCVEALYPSNEVRRKNIANRDFVYLLMDDILFYQRPLKTKKSLIANCPYEENEYVDRETGEIKKTPLKCIAKSHPLFQEFRLWNFLSNIRIYQKEKEINGTLHLDVDVTAEFLKTEDDYVALFDWLNSRKEIEQKTFLKYPKFGLKKEISNYRWNYVEDKQYPCNETRHAILSSLEKANVCIDFLSNEKEVALWHILYSVSDKQEIEKALRTFAAKNGLDESFVEAFKKFPPFKSEYGAYSAKAIKKMLPLMRCGKYWDVSSIDDTTKERIKKIVTGEYDERISVKVRDKVMNLSDISCFRRLPLWLACYIVYNRHSEDKEAVKWESPADIDAYLASFKQHSLRNPIVEQVITETLRVVRDIWKQVGRIDEIHIELGREMKNPADKRKRMTAQILENENANLRIKALLAEFMNPEYEIENVRPYSPSQQEILRIYEDTVLHAEDQLPEEIDAILKKFNSSKVPTKSEFLRYKLWLEQKYRSPYTGELIPLGKLFTAAYEIEHVIPQSRYFDDSFSNKVICESAVNKLKDNQLGYEFIKNHHGQKVEVGFGKSVEIFSVDSYERFVKEQYAKSAVKMKKLLMDDIPEQFIERQLNDSRYISKVIKGLLSNIVREKNDSGEYEPEAVSKNIVVCTGSVTDRLKRDWGMNDVWNSIVYPRFERLNSLTDTQSFGHWENKSGKKVFQTELPLEYQKGFSKKRIDHRHHAMDAIVIACATRNHVNYLSNESASRNAKISRYDLQRLLCDKNRTDDNGNYKWVIKKPWDTFTQDAREVLSKIVVSLKQNLRIINKTTNVYRHLDATGNRVYEKQKTGDSWAIRKPMHKDTVFGAVNLRKVKVVRLSVALDTPAMIVDKRVKNKVFELLSYKYDKKRIEKYFKENAFLWKELDLAKVAVYYFTEATTEPLVAVRKPLDSTFNEKKIKESVTDTGIQKILLNHLCTKEGKPDLAFSAEGIEEMNRNLLQLNNGKSHQPIYKVRVYEPRGNKFSVGVLGNKGTKWVEAAKGTNLFFAIYITEDGKRTYETIPLNVVIEREKQGLVPVPDRNKKGDKLLFWLSPNDLVYLPTEEEREFGRINEPIDRGRIYKMVSCTGNEGHFIPANVANPIVPVIELGSNNKAQRAWTNEMIKDICIPIKVDRLGHIIEVKYRIDE

SEQ ID NO: 77 - protein, 1526 aa, Bacteroides faecis
  REGION 1..1526: note = Bacteroides faecis MAJ27
MKKILGLDLGTNSIGWAVLNAADDNSLKYIEAAGSRIIPMDAAILGDFDRGNSISQTAERTRIRGMRHLRERYLLRRARLHRILNLLGFLPFHYAQDIDRYGNFSADMEPKIAWCKNLEGELEFIFIESFNEMLEDFRKNQPELVADNKKVPYDWVIYYLRKKALEKKISKEELAWILLNFNQKRGYYQLRGEDDDESMKTAKTRQYFDKQIIKNIIDTNQTYKGQRILIVELQNGDKGKIFKKEIPDWIGQEKNIIVTVDIDKDGNDKYEESGSLSCRFKIPTDAEWESEWKLIKMKTQKDLDESNKTVGTYIYDSILQNPTQKVRGKLVRTIERKYYKAELKQILEKQTEFHSELQDKDLYIECLNELYSNNDTHRNAITDRDFVYLFMNDILFYQRPLKSKKSLIDNCPYERNIYIDKETGEIKYSPIKCIAKSHPLFQEFRLWKFISSIRIYQRESVVEVVDKQLDLFSSQSTSVQKLVTDVDVTDKFLTCENDYVALFEWLNKKKIIDQKEFLKYRPFGLKGDIDNYRWNYVEDKSYPCNETHAMILTYFAKAGISEDILTKEMEEALWHILYSVEDRQEITKALRTFASKYHLSDSFVKVFSNIPPFKKEYGSYSAKAIKKLLSLMRMGKYWSEDAIDVNTRERIDKIVTGEYDEKIRDRVREKTIRLNDIRHFRALPDWLACYVVYDRHSETREITEWKSPEEIDEYIRNFKQHSLRNPIVEQVITETLRTVRDIWKQVGCIDEIHVELGREMKNPADKRKRITSQIIENENANLRVKALLTEFVNSEFEIENVRPYSLSQQDILRIYEDGVLNSVAEVPGDIAGILKKFNENDAKKRPTTSEILRYKLWLEQKYRSPYTGEMIPLSKLFTSAYEIEHVIPQSRYFDDSFSNKVICEAEVNKLKDNALGYEFIKKHHGEKVELGFGKIVEIFSVSVYEQFVKDNYSRNRGKMKKLLMDEIPEQFIERQLNDSRYISKVVKTLLSNVVREKAEQEAVSKNVIVCTGGVTDRLKKDWGINDVWNKIVLPRFLRLNELTNSTNFTAKNAAGNEIPAMPLELQKGFNKKRIDHRHHAMDAIVIACANRNIVNYLNNESASRKAKISRHDLQAILCDKVRTDDKGNYQWRVKKPWDTFTQDVYVALENIIVSFKQNLRVINKTSNYYWHYENGKKVLVKQVKGDSWAIRKPMHKDTVFGEVNLRKVKSVSLNEALKNPQFIVEKDLKRQLLSLLQQNFDIKKIKKYFEEHKDIWSDISLSKMNIYYFTKETKDRYFATRKPLDASFDKKKIESCITDTGIQQILLRHLELKENDPERAFSPDGIDEMNRNIIQLNKGKGHHPIAKVRVYEKADKFEVGQRGNKSSKFVEAAKGTNLFFAVYETEYPDEKTNSIVRKRNYATIPLNIAIERQKRGLSTAPEDEKGNVPSFVLSPNDLVYLPTSEDIVNGHITQPIDKSRIYKMVSSSGSQCFFIKHNIANIIVDKYEFSPLNKMERAISNEMIKEICIPVKVDRLGNIVKLGKSE

SEQ ID NO: 78 - protein, 1509 aa, Bacteroides fluxus
  REGION 1..1509: note = Bacteroides fluxus YIT 12057
MKTILGLDLGTNSVGWAVINSVIKEQAERIWIEMAGSRIIPMDAAVLGDFDKGNSISQTSERTRLRGVRRLRERQLLRRERLHKVLNILGFLPNHYLEYIDFEKHPGKFLSDAEPKLPWVKDEQGKYTFLFQAAFDEMLADFAIHQPSLVSGDKKIPYDWTIYYLRKKALTEMISKEELAWILLNFNQKRGYYQLRGEEEEDNAGKSVEFYALKVLTVEATDEKKGRDVWYNVHLENGWIYRRSSSVPLDWEGQIKEFIVTTDLNPDSTPKLDKYGEVKRSFRAPKEDDWMLIKKRTEADIANTHKTVGAYIYDTLLQKPQQKIIGKLVKTVERKLYRDELSLILQKQCAFHAELQDRTLYARCVEALYPNNEVQRRNIANRDFVYLLMDDVLFYQRPLKTKKSLIANCPYEENEYVDRETGEIKKAPLKCIAKSHPLFQEFRLWNFLSNIRIYQKEKEINGTLHLDVDVTAEFLKTEDDYVALFDWLNSRKEIEQKTFLKYPKFGLKKEISNYRWNYVEDKQYPCNETRHAILSRLEKANVCIDFLSNEKEVALWHILYSVSDKQEIEKALRTFAAKNGLDESFVEAFKKFPPFKSEYGAYSAKAIKKLLPLMRCGKYWDVSSIDDTTKERIKKIVAGEYDERIAVKVRDKVMNLSDISCFKRLPLWLACYIVYNRHSEDKEAVKWESPADIDAYLASFKQHSLRNPIVEQVITETLRVVRDIWKQVGRIDEIHIELGREMKNPADKRKRMTAQILENENANLRIKALLAEFMNPEYEIENVRPYSPSQQEILRIYEDMVLHAEDQLPEEIDAILKKFNSSKVPTKSEFLRYKLWLEQKYRSPYTGELIPLGKLFTAAYEIEHVIPQSRYFDDSFSNKVICESAVNKLKDNQLGYEFIKNHHGQKVEVGFGKSVEIFSVDSYERFVKEQYAKSAVKMKKMLMDDIPEQFIERQLNDSRYISKVIKGLLSNIVREKNDSGEYEPEAVSKNIVVCTGSVTDRLKRDWGMNDVWNSIVYPRFERLNSLTDTQSFGHWENKSGKKVFQTELPLEYQKGFSKKRIDHRHHAMDAIVIACATRNHVNYLSNESASRNAKISRYDLQRLLCDKSRTDDNGNYKWVIKKPWDTFTQDAREVLSKIVVSLKQNLRIINKTTNVYRHLDATGNRVYEKQKTGDSWAIRKPMHKDTVFGAVNLRKVKVVRLSVALDAPTMIVDKRVKNKVFELLSYKYDKKRIEKYFKENAVLWKELDLARVAVYYFTEATTEPLVAVRKPLDSTFNEKKIKESVTDTGIQKILLNHLCTKEGKPDLAFSAEGIEEMNRNLLQLNNGKRHQPIYKVRVYEPRGNKFSVGVLGNKGTKWVEAAKGTNLFFAIYITEDGKRTYETIPLNMVIEREKQGLAPVPDKNEKGDKLLFWLSPNDLVYLPTEEELEFGRINEPIDRGRIYKMVSSSGNQCFFIPQSISNAIIPTKELGANNKAERSWDGAMIKNICIPVKVDRLGRIIEVKYRINE

SEQ ID NO: 79 - protein, 1436 aa, Bacteroides fragilis
MKRILGLDLGTNSIGWALVNEAENKDERSSIVKLGVRVNPLTVDELTNFEKGKSITTNADRTLKRGMRRNLQRYKLRRETLTEVLKEHKLITEDTILSENGNRTTFETYRLRAKAVTEEISLEEFARVLLMINKKRGYKSSRKAKGVEEGTLIDGMDIARELYNNNLTPGELCLQLLDAGKKFLPDFYRSDLQNELDRIWEKQKEYYPEILTDVLKEELRGKKRDAVWAICAKYFVWKENYTEWNKEKGKTEQQEREHKLEGIYSKRKRDEAKRENLQWRVNGLKEKLSLEQLVIVFQEMNTQINNSSGYLGAISDRSKELYFNKQTVGQYQMEMLDKNPNASLRNMVFYRQDYLDEFNMLWEKQAVYHKELTEELKKEIRDIIIFYQRRLKSQKGLIGFCEFESRQIEVDIDGKKKIKTVGNRVISRSSPLFQEFKIWQILNNIEVTVVGKKRKRRKLKENYSALFEELNDAEQLELNGSRRLCQEEKELLAQELFIRDKMTKSEVLKLLFDNPQELDLNFKTIDGNKTGYALFQAYSKMIEMSGHEPVDFKKPVEKVVEYIKAVFDLLNWNTDILGFNSNEELDNQSYYKLWHLLYSFEGDNTPTGNGRLIQKMTELYGFEKEYATILANVSFQDDYGSLSAKAIHKILPHLKEGNRYDVACVYAGYRHSESSLTREEIANKVLKDRLMLLPKNSLHNPVVEKILNQMVNVINVIIDIYGKPDEIRVELARELKKNAKEREELTKSIAQTTKAHEEYKTLLQTEFGLTNVSRTDILRYKLYKELESCGYKTLYSNTYISREKLFSKEFDIEHIIPQARLFDDSFSNKTLEARSVNIEKGNKTAYDFVKEKFGESGADNSLEHYLNNIEDLFKSGKISKTKYNKLKMAEQDIPDGFIERDLRNTQYIAKKALSMLNEISHRVVATSGSVTDKLREDWQLIDVMKELNWEKYKALGLVEYFEDRDGRQIGRIKDWTKRNDHRHHAMDALTVAFTKDVFIQYFNNKNASLDPNANEHAIKNKYFQNGRAIAPMPLREFRAEAKKHLENTLISIKAKNKVITGNINKTRKKGGVNKNMQQTPRGQLHLETIYGSGKQYLTKEEKVNASFDMRKIGTVSKLAYRDALLKRLYENDNDPKKAFAGKNSLDKQPIWLDKEQMRKVPEKVKIVTLEAIYTIRKEISPDLKVDKVIDVGVRKILIDRLNEYGNDAKKAFSNLDENPIWLNKEKGISIKRVTISGISNAQSLHVKKDKDGKPILDENGRNIPVDFVNTGNNHHVAVYYRPVIDKRGQLVVDEAGNPKYELEEVVVSFFEAVTRANLGQPIIDKDYKTTEGWQFLFSMKQNEYFVFPNEKTGFNPKEIDLLDVENYGLISPNLFRVQKFSLKNYVFRHHLETTIKDTSSILRGITWIDFRSSKGLDTIVKVRVNHIGQIVSVGEY

SEQ ID NO: 80 - protein, 1436 aa, unidentified
  source 1..1436: note = Bacteroides sp.
MKRILGLDLGTNSIGWALVNEAENKDERSSIVKLGVRVNPLTVDELTNFEKGKSITTNADRTLKRGMRRNLQRYKLRRETLTEVLKEHKLITEDTILSENGNRTTFETYRLRAKAVTEEISLEEFARVLLMINKKRGYKSSRKAKGVEEGTLIDGMDIARELYNNNLTPGELCLQLLDAGKKFLPDFYRSDLQNELDRIWEKQKEYYPEILTDVLKEELRGKKRDAVWAICAKYFVWKENYTEWNKEKGKTEQQEREHKLEGIYSKRKRDEAKRENLQWRVNGLKEKLSLEQLVIVFQEMNTQINNSSGYLGAISDRSKELYFNKQTVGQYQMEMLDKNPNASLRNMVFYRQDYLDEFNMLWEKQAVYHKELTEELKKEIRDIIIFYQRRLKSQKGLIGFCEFESRQIEVDIDGKKKIKTVGNRVISRSSPLFQEFKIWQILNNIEVTVVGKKRKRRKLKENYSALFEELNDAEQLELNGSRRLCQEEKELLAQELFIRDKMTKSEVLKLLFDNPQELDLNFKTIDGNKTGYALFQAYSKMIEMSGHEPVDFKKPVEKVVEYIKAVFDLLNWNTDILGFNSNEELDNQPYYKLWHLLYSFEGDNTPTGNGRLIQKMTELYGFEKEYATILANVSFQDDYGSLSAKAIHKILPHLKEGNRYDVACVYAGYRHSESSLTREEIANKVLKDRLMLLPKNSLHNPVVEKILNQMVNVINVIIDIYGKPDEIRVELARELKKNAKEREELTKSIAQTTKAHEEYKTLLQTEFGLTNVSRTDILRYKLYKELESCGYKTLYSNTYISREKLFSKEFDIEHIIPQARLFDDSFSNKTLEARSVNIEKGNKTAYDFVKEKFGESGADNSLEHYLNNIEDLFKSGKISKTKYNKLKMAEQDIPDGFIERDLRNTQYIAKKALSMLNEISHRVVATSGSVTDKLREDWQLIDVMKELNWEKYKALGLVEYFEDRDGRQIGRIKDWTKRNDHRHHAMDALTVAFTKDVFIQYFNNKNASLDPNANEHAIKNKYFQNGRAIAPMPLREFRAEAKKHLENTLISIKAKNKVITGNINKTRKKGGVNKNMQQTPRGQLHLETIYGSGKQYLTKEEKVNASFDMRKIGTVSKSAYRDALLKRLYENDNDPKKAFAGKNSLDKQPIWLDKEQMRKVPEKVKIVTLEAIYTIRKEISPDLKVDKVIDVGVRKILIDRLNEYGNDAKKAFSNLDKNPIWLNKEKGISIKRVTISGISNAQSLHVKKDKDGKPILDENGRNIPVDFVNTGNNHHVAVYYRPVIDKRGQLVVDEAGNPKYELEEVVVSFFEAVTRANLGLPIIDKDYKTTEGWQFLFSMKQNEYFVFPNEKTGFNPKEIDLLDVENYGLISPNLFRVQKFSLKNYVFRHHLETTIKDTSSILRGITWIDFRSSKGLDTIVKVRVNHIGQIVSVGEY

SEQ ID NO: 81 - protein, 1512 aa, Bacteroides nordii
  REGION 1..1512: note = Bacteroides nordii CL02T12C05
MKNILGLDLGTNSIGWAVINSEEDGPIVKKRIELAGSRIIPMDAAVLGNFDSGVTKSQTAERTSFRSIRRLRERQLLRRERLHKVLQILGFLPEHYVNDIDFENHPGKIKRNTEPKLPWRKNSMGQFEFIFQDSFEAMLTDFATHQPVFVSEGKKVPYDWTLYYLRKKALTEGISKEELAWLILNFNQKRGYYQLRGEEEEEQSNKLVEFYALRVVKVEATDDKKGKDTWYNVHLENGWIYRRTSNIPLDWEGKVKEFIVTTDLNEDGTPKLDKYGEVKRSFRAPKEDDWTLIKKKTESDIANSHKTVGCYIYDALLQNPHQKIKGRLVRTVERKFYKEELRLILEKQLSFHPELQDRDLYRACIDALYVSNEAHKNNISGRDFVYLFIDDIIFYQRPLKTKKSLIDNCPYEENQYMDRETGEVKQAPIKCIAKSHPLFQEFRLWQFISNIRIYQRERVLDDGKLETDVDVTPDFLKTEDDYTTLFEWFNDRKEVDQKAFLKNPQFGLKKTFTEYRWNYVEDKSYPCNETRNAILNGLQKAGVSADFLSREVEEALWHILYSVEDKIEIESALRKFASKHDLDDRFADVFKKLPPFKKEYGAYSAKAIKKLLPLMRIGKYWELSNIDDKTKERIDKIITGEWDENIHDRVREKAIKLSDITDFKGLPLWLSCYVVYNRHSEARAIAKWESPEDIDSYLRLFRQHSLRNPIVEQVITETLRTVRDIWKRVGQIDEIHVELGREIKNPADKRAKMTAQIVENENTNLRIKALLAEFINSEYEIENVRPYSSNQQEKLKIYEDTVLNGVKEIPEDINTILKKFRESDLKKRPTKSDFLHYKLWLEQKYCSPYTGRIIPLGKLFTSAYEIEHIIPQAHYFDDSFSNKVICEAEVNGLKDKKLGYEFIKHNPGKMVEIGFGKPPVRIFSVEEYERFVKENYSGIKNKMNKLLMDDIPETFIERQLNDSRYISKVVKSLLSNIVREKDSNGEYEPEAISKNVIVCTGSVTDRLKRDWGVNDVWNSIIYPRFERLNELTGSQQFGCWENKEGKRVFQTAVPLEMQKGFSKKRIDHRHHAMDAIVIACATRNHINYLSNESASKKAKISRTDLQRLLCTKCRTDDNGNYKWIVKKPWPAFTQDIRKALENITVSFKQNLRVINKTTNYYVHFDESGKKVLEKQINGDSWAIRKPMHKDTVFGKVNLQKVKEVRLSLALDTPKMIVDKKLKEKVLQLYSYKYDKKRIDKYFKENASLWKDLNLSKVAVYYFTNDSTEPLVAVRKPLDTSFNAKKIKESVTDTGIQKILLNHLSNNQDDPNLAFSPDGIDKMNKNLTALNDGKYHQPIYKVRVCEPQGNKFSVGTSGNKTSKYVEAAKGTNLFFAVYQTEDGKRSYETIPLNVVIEREKLGWTPVPENNNNGDKLLFWLSPNDLVYVPTADELNNGMRLDNMDKGRIYKMISCSGPQCFFIPQNVSNAIIPVIELGANNKAEKSWNNEMIKVVCVPIRVDRLGCITQINNQK

SEQ ID NO: 82 - protein, 1436 aa, unidentified
  REGION 1..1436: note = Bacteroides sp. 2_1_16
  source 1..1436: note = Bacteroides sp.
MKRILGLDLGTNSIGWALVNEAENKDERSSIVKLGVRVNPLTVDELTNFEKGKSITTNADRTLKRGMRRNLQRYKLRRETLTEVLKEHKLITEDTILSENGNRTTFETYRLRAKAVTEEISLEEFARVLLMINKKRGYKSSRKAKGVEEGTLIDGMDIARELYNNNLTPGELCLQLLDAGKKFLPDFYRSDLQNELDRIWEKQKEYYPEILTDVLKEELRGKKRDAVWAICAKYFVWKETYTEWNKEKGKTEQQEREHKLEGIYSKRKRDEAKRENLQWRVNGLKEKLSLEQLVIVFQEMNTQINNSSGYLGAISDRSKELYFNKQTVGQYQMEMLDKNPNASLRNMVFYRQDYLDEFNMLWEKQAVYHKELTEELKKEIRDIIIFYQRRLKSQKGLIGFCEFESRQIEVDIDGKKKIKTVGNRVISRSSPLFQEFKIWQILNNIEVTVVGKKRKRRKLKENYSAIFEELNDAEQLELNGSRRLCQEEKELLAQELFVRDKMTKSEVLKLLFDNPQELDLNFKTIDGNKTGYALFQAYSKMIEMSGHEPVDFKKPVEKVVEYIKAVFDLLNWNTDILGFNSNEELDNQSYYKLWHLLYSFEGDNTPTGNGRLIQKMTELYGFEKEYATILANVSFQDDYGSLSAKAIHKILPHLKEGNRYDVACVYAGYRHSESSLTREEIANKVLKDRLMLLPKNSLHNPVVEKILNQMVNVINVIIDIYGKPDEIRVELARELKKNAKEREELTKSIAQTTKANEEYKTLLQTEFGLTNVSRTDILRYKLYKELESCGYKTLYSNTYISREKLFSKEFDIEHIIPQARLFDDSFSNKTLEARSVNIEKGNKTAYDFVKEKFGESGADNSLEHYLNNIEDLFKSGKISKTKYNKLKMAEQDIPDGFIERDLRNTQYIAKKALSMLNEISHRVVATSGSVTDKLREDWQLIDVMKELNWEKYKALGLVEYFEDRDGRQIGRIKDWTKRNDHRHHAMDALTVAFTKDVFIQYFNNKNASLDPNANEHAIKNKYFQNGRAIAPMPLREFRAEAKKHLENTLISIKAKNKVITGNINKTRKKGGVNKNMQQTPRGQLHLETIYGSGKQYLTKEEKVNASFDMRKIETVSKSAYRDALLKRLYENDNDPKKAFAGKNSLDKQPIWLDKEQMRKVPEKVKIVTLEAIYTIRKEISPDLKVDKVIDVGVRKILIDRLNEYGNDAKKAFSNLDKNPIWLNKEKGISIKRVTISGISNAQSLHVKKDKDGKPILDENGRNIPVDFVNTGNNHHVAVYYRPVIDKRGQLVVDEAGNPKYELEEVVVSFFEAVTRANLGLPIIDKDYKTTEGWQFLFSMKQNEYFVFPNEKIGFNPKEIDLLDVENYGLISPNLFRVQKFSLKNYVFRHHLETTIKDTSSILRGITWIDFRSSKGLDTIVKVRVNHIGQIVSVGEY

SEQ ID NO: 83 - protein, 1517 aa, unidentified
  REGION 1..1517: note = Bacteroides sp. 20_3
  source 1..1517: note = Bacteroides sp.
MKKIVGLDLGTNSIGWALINAYINKEHLYGIEACGSRIIPMDAAILGNFDKGNSISQTADRTSYRGIRRLRERHLLRRERLHRILDLLGFLPKHYSDSLNRYGKFLNDIECKLPWVKDETGSYKFIFQESFKEMLANFTEHHPILIANNKKVPYDWTIYYLRKKALTQKISKEELAWILLNFNQKRGYYQLRGEEEETPNKLVEYYSLKVEKVEDSGERKGKDTWYNVHLENGMIYRRTSNIPLDWEGKTKEFIVTTDLEADGSPKKDKEGNIKRSFRAPKDDDWTLIKKKTEADIDKIKMTVGAYIYDTLLQKPDQKIRGKLVRTIERKYYKNELYQILKTQSEFHEELRDKQLYIACLNELYPNNEPRRNSISTRDFCHLFIEDIIFYQRPLKSKKSLIDNCPYEENRYIDKESGEIKHASIKCIAKSHPLYQEFRLWQFIVNLRIYRKETDVDVTQELLPTEADYVTLFEWLNEKKEIDQKAFFKYPPFGFKKTTSNYRWNYVEDKPYPCNETHAQIIARLGKAHIPKAFLSKEKEETLWHILYSIEDKQEIEKALHSFANKNNLSEEFIEQFKNFPPFKKEYGSYSAKAIKKLLPLMRMGKYWSIENIDNGTRIRINKIIDGEYDENIRERVRQKAINLTDITHFRALPLWLACYLVYDRHSEVKDIVKWKTPKDIDLYLKSFKQHSLRNPIVEQVITETLRTVRDIWQQVGHIDEIHIELGREMKNPADKRARMSQQMIKNENTNLRIKALLTEFLNPEFGIENVRPYSPSQQDLLRIYEEGVLNSILELPEDIGIILGKFNQTDTLKRPTRSEILRYKLWLEQKYRSPYTGEMIPLSKLFTPAYEIEHIIPQSRYFDDSLSNKVICESEINKLKDRSLGYEFIKNHHGEKVELAFDKPVEVLSVEAYEKLVHESYSHNRSKMKKLLMEDIPDQFIERQLNDSRYISKVVKSLLSNIVREENEQEAISKNVIPCTGGITDRLKKDWGINDVWNKIVLPRFIRLNELTESTRFTSINTNNTMIPSMPLELQKGFNKKRIDHRHHAMDAIIIACANRNIVNYLNNVSASKNTKITRRDLQTLLCHKDKTDNNGNYKWVIDKPWETFTQDTLTALQKITVSFKQNLRVINKTTNHYQHYENGKKIVSNQSKGDSWAIRKSMHKETVHGEVNLRMIKTVSFNEALKKPQAIVEMDLKKKILAMLELGYDTKRIKNYFEENKDTWQDINPSKIKVYYFTKETKDRYFAVRKPIDTSFDKKKIKESITDTGIQQIMLRHLETKDNDPTLAFSPDGIDEMNRNILILNKGKKHQPIYKVRVYEKAEKFTVGQKGNKRTKFVEAAKGTNLFFAIYETEEIDKDTKKVIRKRSYSTIPLNVVIERQKQGLSSAPEDENGNLPKYILSPNDLVYVPTQEEINKGEVVMPIDRDRIYKMVDSSGITANFIPASTANLIFALPKATAEIYCNGENCIQNEYGIGSPQSKNQKAITGEMVKEICFPIKVDRLGNIIQVGSCILTN

SEQ ID NO: 84 - protein, 1424 aa, unidentified
  REGION 1..1424: note = Bacteroides sp. 3_1_19
  source 1..1424: note = Bacteroides sp.
MKRILGLDLGTNSIGWALVNEAETDEEVSSIIRLGVRVNPLTVDETQNFEKGKSITTNAERTLKRSMRRNLQRYKLRRDALVEFLKELGFITDETILSEQGNRTTFETCRLRAKAAEEEISLEELSRVLLMINKKRGYKSSRKVKKEEDGVLIDGMEIAKKLYEEDLTPGQLCSQLLESGKKVLPDFYHSDLQEELDRIWSVQKQFHPDVFCDAAKEEIKGKNRSQTWAILANYFVWKEEVVGWNDREAKNETIEKECKLVGLKRTTKGYELKKENYRWRAQALTEQLGLEEIAVVLQEINGQINASSGYLGAISDRSKVLYFNHQTVGQYQMAELDKNPHASLRNMVFYRQDYLDEFDRIWEKQAEFHKELTAELKKEIRDMIIFYQRRLKSQKGLISFCEFERLEIVVEKDGKKQTKVIGCKVIPRSHPLFQEFKVWQTLNDIKVLGREKKRNALSASESRALYPEEKEILARELAIKENMKKADVLKLLFENPQELDLNFKQIDGNRTGFSLFSAYSKMIEKYGYEPLDFKKPADEIIGQLRTIFTDLGWNTNLFTIDLTKEGKELEMQPYFRLWHLLYSFEGDNTSTGNGKLIEKIMQLCGVEKEYAVELASLSFQDDYGSLSAKAIKRILPYLKEGNLYDVACEYAGYRHSKSSLTKEEIENKVLKGKLEVLPKNSLRNPVVEKILSQMVNVINTIIDTYGKPDEIRVELARELKKSAKEREELTKAIAKSTREHEEIRKLLQDEFGMMNVSRNDIIRYKLYEELKDNGYKTLYSNQYIPKEKIFSKEIDIEHIIPQSRLFDDSLSNKTLEYKAINIEKGNKTAYDFVKEKYGEEGLQQYINRCESLFNDKKAKLRKLKMEQKDIPDGFIDRDLRNTQYIAKKALAMLNEICRRVVATTGSITDQLREDWQLVDVMKELNLPKYEALGFVETYEDKDGRKIKRIKDWTKRNDHRHHAMDALTVAFTKDAFIQYFNNKNAAQDSGNRNHTNIIGIKTRYFDKGRALPPIPLEQFRIEAKQHLEKLLVSIKAKNKVVTVNVNRTKKRKGENTKIQQTPRGQLHLETVYGSHKQYVTKIEKVNASFDAAKIATVSKRAYRNALLKRLETFGNDPKKAFTGKNALEKNPLYADKYQTIRVPEKVQTVEFETIYTIRKPVDPALNVDKVVDVKVRAILERRLKEYGGDPKKAFVNFWENPIWLNKEKGISIKRVSIRGINNAQSIHVKKDKNGNPIWDENGKQIPVDFVNTGNNHHVAIYRKPVLDKKGQVTFDEDGNLMYELDEVVVPFFEAVTRANLGLPIIDKDYRKSEGWQFLFSMKQNEYFVFPNEKTGFNPKEVDLLNPDNYAMISPNLFRVQTMSKVMYGNNVVRDYKFRHHLETTVKDMKELKDIAYKQYKTLSFGNSVVKIRINHIGQIVSVGEY

SEQ ID NO: 85 - protein, 1510 aa, unidentified
  REGION 1..1510: note = Bacteroides sp. D2
  source 1..1510: note = Bacteroides sp.
MKRILGLDLGTNSIGWALVDSEEQRILGMGSRIIPMDQGVLDTFSGGNPVETQTAARTAYRGTRRLRERALLRRERLIRVLNMMKFLPEHYASQIDFEKRLGQFFDEKEPKLAWKQNDEGRFEFIFQQSFNEMIEEFKNKGVVREDKKIPYDWTIYYLRKKALSQEIEKEELAWILLNFNQKRGYYQLRGEEEEENPNKLVEYYSLKIVDVIADEKPNSKGDIWYSLHLENGWIYRRSSKIPLFGWKDKTRDFIVTTDLNDDGTVKKDKEGIEKRSFRAPSENDWVLLKKKTESDIEKSHKTVGAYVYETLLQNPMQKVRGKLVRTIERKFYKDELKQILEKQREFHPELRDEDLYNDCVRELYRSNETYQFILSKRDFVHLFLDDILFYQRPLRSQKSAIGDCILEFKTYKDKDGNNIKEYLKVISKSNPLYQEFRIWQWLYNLKIYRKEDDEDVTLQFIANIEDKEQLFDFLSNRKSIEQKPLLEYLIKAKGLKKQVKTEAYRWNYVEDKIYPCSETKTMISTRLAKVENIPDNFFTKEIEQKLWHIIYSVTDKNEFEKALRTFAKKYDLDIASFVDNFKKIPPFKNEYGSFSEKAIKKLLPLMRLGKYWKWNDIDNNTQNRISKIITGEYDEEIKDIVREKSIALTNENDFQGLQLWLAQYLVYGRHSEADIAGKWHSVADLEKYLNEFKQHSLRNPIVEQIITETLRVVRDIWRKYGQGAENFFSEIHVELGRDMKNTADERKKIVNVVTENENTNLRIKALLMELKNNSDGKLEVENVRPYSPTQQDILKIYEEYAISTGLDNEKDEKVKEDIKKISRVAQPTTTELQRYKLWLEQKYCSPYTGKVIPLGKLFTEEYQIEHIIPKSRYYDDSFSNKVICEAAVNKLKDKCLGLEFIKNYHGQIVETGFGQKVTIFDEEAYQNFVKQHYAYNRSKRTKLLLEEIPEKMIERQMNDTRYISKFVLPLLSNLVRAEENDNGVNSKNVLPVNGKITTMLKQDWGLNDVWNDLILPRFVRMNELAKTIAFTSWNEQHQKYLPTVPLELSKGFQKKRIDHRHHAMDALVIACATRDHVNLLNNKHANTDTIRYDLQRKLRLFERVTYIDPQTKNNVTKDIPKEFKKPWDNFTVDARNELEKIIVSFKQNLRIINKATNIYTKYENGKKIKVGQKGLNWAIRKPLHKETVFAKVSLRKRKTVRLSEALKDWKKIVDKKLKQEIKRLTCQYGKFDVDTILRYFKDRKYQFGEVDVSKVKMYYFDEENAAVRKNVDTSFTEKFIQGSVTDTGIQKILLNHLEAKGNKVEIAFSPEGIEEMNKNIIQLNEGKLHLPIFKVRVYETIGNKFSVGVKGNKKDKYVEAAKGTNLFFAIYVDENGIRSYETIPLNIVIERLKQGLSVVPEKNRKEHSLLFYLSPNDLVYVPIEDERENIHAVNLDQLNNEQRKRIYKMVSCTGSECHFVPYYVASPIVNKVEYSSLNKIGRSLTGEMIKDVCIKLKVDRLGNVKGISGL

SEQ ID NO: 86 - protein, 1436 aa, unidentified
  REGION 1..1436: note = Bacteroides sp. D2
  source 1..1436: note = Bacteroides sp.
MKRILGLDLGTNSIGWALVDEAENKDERSSIVKLGVRVNPLTVDELTNFEKGKSITTNADRTLKRGMRRNLQRYKLRRETLMEVLKEHKLITEDTILSENGNRTTFETYRLRAKAATEKISLEEFARVLLMINKKRGYKSCRKAKGAEEGTLIDGMDIARELYNNNLTPGELCLQLLDAGKKYLPDFYRSDLQNELDRIWEKQKEYYPEILTEVLKEELRGKKRDAVWAICAKSFVWEEYYTEWNKEKGKTEQQEREHKLEGIYSKRKRDEAKRENLQWRVNGLKEKLSLEQLVIVLQEMNIQINNSSGYLGAISDRSKELYFNKQTVGQYQMEMLDKNPNASLRNMVFYRQDYLDEFNTLWEKQAEYHKELTGELKKEIRDIVIFYQRRLKSQKGLVGFCEFESRQIEVEIDGKKKIKTVGNRVIPRSSPLFQEFKIWQILNNIEVTVVGKKGKRRKQKDNSPTLFDGLDDTEQLELNGSRYLYQEEKELLAQELFVRDKMTKSDVLKLLFDNPQELDLNFKTIDGNKTGYTLFQAYSKMIEMSGHEPVDFKKTVEKVVEHVKAVFDLLNWNTDILGFNSNEELDNQSYYKLWHLLYSFEGDNTPTGNARLVQKITELYGFEKEYAIILANVTFQDDYGSLSAKAIHKILPHLKEGNRYDVACAYAGYKHSESSLTKEEIANKALKDRLTLLPKNNLRNPVVEKILNQMVNVINAIIDTYGKPDEIRVELARELKKNAKEREELTKFIAETTRKHEEFKILLQSEFGLTNVSRTDILRYKLYKELESCGYKTLYSNTYIPREKLFSKEFDIEHIIPQARLFDDSFSNKTLEARSINLEKGNKTAYDFVKEKFGESGADNSLDHYLNNIEDLFKSGKISKTKYNKLKMAEQDIPDGFINRDLRNTQYIAKKALSMLNEISRRVVATSGTITDKLRQDWQLVDVMKELNWEKYKALGLVEYFEDKDGRQIGRIKDWTKRNDHRHHAMDALTVAFTKDIFIQYFNNKNASLNSNTNEYAIKNKYFQNGRAIAPIPLREFRVEAKKHLENTLISIKAKNKVVTGNINKTKKRGGVNKYLQQTPRGQLHLETIYGSGKQYLTKEEKVNASFDMKKIATVSKSAYRDVLLKRLHENDNDPKKAFTGKNSLDKQPIWLDKEQTRKVPEKVKTVTLETIYTVRKEISPDLKVDKVIDAGVRKILTGRLNEYGNDAKKAFSNLDENPIWLNKEKGISIKRVTISGISNAQSLHVKKDKDGKPILDEDSRNIPVDFVNTGNNHHVAVYRRPVIDKRGQLVIDEAGNPKYELEEVVVSFFEAVTRANLGQPIIDKDYKTSEGWQFLFSMKQNEYFVFPNEKTGFNPKEIDLLDAENYGVISPNLFRVQKFAHKNYVFRHHLETTIKDTSSILKGITWIDFRSSKGLDAIVKVRVNHIGQIVSVGEY

SEQ ID NO: 87 - protein, 1508 aa, Bacteroides uniformis
  REGION 1..1508: note = Bacteroides uniformis CL03T00C23
MRTILGLDLGTNSIGWAVINSVIKEQTERIWIEMAGSRIIPMDAAILGDFDKGNSISQTAERTRFRGVRRLRERQLLRRERLHKVLKILGFLPEHYLKGIDFEKHTGKFLSGSEPKLPWVKDRWGKYSFLFQTAFNEMLADFAKHQPSLVFDGKKIPYDWTVYYLRKKALTEMISKEELAWILLNFNQKRGYYQLRGEEEEDNAGKSVEFYALKVLSVEATDEKKGRDIWYNVHLENGWVYRRSSNVPLDWEGRVKEFIVTTDLNPDGTPKLDKYGEVKRSFRAPKEDDWMLIKKRTEADITGTHKTIGSYIYDALLQEPQQKIIGKLVKTVERKFYKEELNFILQKQCAFHAELQDRDLYMRCIEALYPGNEVQRRNIANRDFIYLLIDDVLFYQRPLKTKKSLIANCPYEENEYVNRKTGEIKTAPLKCIAKSHPLFQEFRLWYFLSNIRVYQKEREVNGTLHLDVDVTTEFLKTEDDYVALFDWLNSRKEIDQKAFLRYPAFGLKKEINNYRWNYVEDKFYPCNETRHAILSRLEKAGIGIDFLSDEKETALWHILYSVSDKQEIEKALATFAVKNGLNESFVEVFKKFPPFKSEYGAYSAKAIKKLLPLMRCGKYWDMSLIDGTTKERIERIIAGECDESIGAKVREKAMNLSDISCFKRLPLWLACYVVYNRHSEDKEITKWETPADIDAYLAAFKQHSLRNPIVEQVITETLRVVRDIWKQVGKIDEIRIELGREMKNPADKRKRMTTQILENENANLRIKALLAEFVNPEYGVENVRPYSPSQQEILRIYEDAVLKGEEQIPEDIDVILKKFNTSKLPTKSEFLRYKLWLEQKYRSPYTGELIPLAKLFTAAYEIEHVIPQSRYFDDSFSNKVICESAVNKLKDNQLGYEFIKNHHGQKVEVGFGKTVEIFSVDSYERFVKEQYAKSGIKMKKLLMDDIPEQFIERQLNDSRYISKVVKGLLSNIVREKNDSGEYEPEAVSKNILVCTGSVTDRLKKDWGMNDVWNSIVSPRFERLNALTETQCFGHWENKDGKKVFQTAVPLEYQKGFSKKRIDHRHHAMDAIVIACATRNHVNYLNNESASRNAKISRYDLQRLLCDKSRGDGNGNYRWIIKKPWTTFTQDAREALSGIIVSLKQNLRIINKTTNIYQHFDANGTRVYEKQKIGDSWAIRKPMHKDTVFGAVNLRKVKVVRLSVALDTPSMIVNKRVKNKVLELLSYKYDKKKIEKYFKENAFLWKELDIAKVAVYYFTENTTEPLVAVRKSLDSTFNEKKIASVTDTGIQKILLNHLKSKEGKAELAFSAEGIEEMNRNLLQLNDGKGHQPIYKVRVYEPRGNKFKVGVLGNKGAKWVEAAKGTNLFFAIYITEDGNRTYETIPLNWVIEREKQGLVPVPDRNEKGDKLLFWLSPNDLVYLPTEEERDFGRINEPIDRGRIYKMVSSSGNQCFFIPQSISNAIISTKELGSNNKAEKSWDGEMIKNICIPVKVDRLGRIIEVKYRVNE

SEQ ID NO: 88 - protein, 1504 aa, Bacteroides vulgatus
  REGION 1..1504: note = Bacteroides vulgatus CL09T03C04
MKNIVGLDLGTNSIGWAVVNGSVNDDGSEQLVKIQASGSRIIPMDAAMIGDFNKGNSISQTAERTRLRGVRRLSERYLLRRERLHRILDILGFLPFHFAQDLDRHGKIVKGKEPKLAWRKNEAGQFEFIFQDSFKEMLEDFKLNHPNLITDDKKVPYDWTIYYLRKKGLTSKISKEELAWILLNFNQKRGYYQLRGEEEEENKNKLVEFYALKVVAVEDSGEKKGKDIWYNVHLENGWVYRRTSNMPLDWVGKTKEFIVTTDLEKDGTPKKDKEGNVKRSFRAPKEDDWSLLKKKTEADIDQTHKTVGVYIYDTLLGNPSQKIRGRLVRTIERKYYKEELKQILEKQKEFHLELQDRALYAACIEELYPINEAHRNNVGNRDFTYLFLEDILFYQRPLKSKKSLIDNCPYEENQGLDKETGEIKSFPVKCIAKSHPLFQEFRLWQFIVNLRIYRKDLAQDVDVTNELLKTEEDYVALFDWLNGKKEIDQKAFLKYPVFGLKKEIENYRWNYVQDKPYPCNETRSLMLARLEKCDISIEFLTKENEEALWHILYSVEDKNEIVKALQKFADKHDLNASFVDVFQKFPPFKKEYGSYSAKAIKKLLPLMRMGKYWSENSIDKGTRERIDKIITGEYDEKIENRVREKAIHLADVSDFKGLPLWLVCYIVYGRHSEAKEITQWKSPADIDSYLRSFKQHSLRNPIVEQIIIETLRVVRDIWKQVGNIDEIHVELGREMKNPADKRKKMTQQMSENENTNLRIKYLLTEFLNPEYEVENVRPYSPSQQDILRIYEEGVLNSVSDLPEEISDILKKFTETDLKKRPSRSEILRYKLWLEQKYRSPYTGEVIPLGKLFTPAYEIEHVIPQSCYFDDSFSNKVICEAEVNKLKSNLLGHEFIVKHHGEIVELPFGKKVRIFTVDEYEQFVKDNYSRTRSKMKKLLMDDIPEEFVTRQLNDSRYISKVVKSLLSNIVREKGEEEAISKNVIPCTGGVTDRLKKDWGINEVWNKIILPRFQRLNELTGTNKFTTKNVGIQEIPTMPLELQKGFNKKRIDHRHHAMDAIIIACANRNIINYLNNESATAKAELSRYDLQKMLCDKAKTDNNGNYKWVIRKPWASFTQDTYLALENIIVSFKQNLRVINKATNRFLHYNEEGKKIFVKQGKGDNWAIRKSMHKDTVFGEVNLRRIKTVALNEAMKNPQSIVVKDFKRKLLELWNLGFDAKRIKKYFEDNRETWSDINLSKIEVYYFSKDTKDRFFATRKPLDTSFDRKKIENNITDTGIQKILLRHLELKDNNPDIAFSPDGIDEMNRNIIQLNNGKYHQPIIKIRWYEQADKFAVGQTGNKFSKFVEAAKGTNLFFAVYESNILDKKTNTIIKKRNYATIPLNVAIERQKQGLPVAPEDENGNDPIFVLSPNDLVYLPTDDELANGIIAQPLDRGRIYKMVSCTGNEGHFIPARIANPILQTIELGSNNKAQKAWTDEMIKEICMPIKVDRLGNVLESSSSYKK

SEQ ID NO: 89 - protein, 1434 aa, unidentified
  REGION 1..1434: note = Description of Unknown: Bacteroidetes oral taxon 274 str. F0058 polypeptide
MKNILGLDLGTNSIGWAYVKQAQNDSEKSEIAELGVRVNPLTVDEKTNFEKGKPISTNADRTLKRGARRNLQRYKLRRQELIELLKDYQVISDKTILAEDGKETTFETLRLRVKSAKEQVSLEELARILLMINKKRGYKSSRKAKNEDEGQLIDGMEIARRLYDENLTTGQLSLQLLKEGKKSLPDYYRSDLQHELDKVWNFQKQFHPDILTDEFYTSIQGKGQKATRESFSSKYGIDTAENKGSREEKKLQAYQWRADATHKELTKEELAFVITEINNNINNSSGYLGAISDRSKELIFANETVGEYLWKQIQNDPHTSLKNQVFYRQDYFDEFERIWETQSGFYPQILTESLKNELRDILIFYQRKLKSQKALVSICEFESKEIPLKDKQGNPISKNGIPVTKLVGPKVAPKSSPLFQEFKIWQNLNNVLVRPKGSRKRKVTTNQQSTLLEGQEPVFELNLEQKELLFEELNLKGNLKTDYCLELIGYSAKEWEMNYPTLEGNKTNKALYEAYLKIIDSEGYDAKKLLKVKTDKDDINLDDIKVSASEIKTMISDIFNELGINTKILDFDAELERKQFEAQASYRLWHLLYSYEGDDSKSGNELLYRLLEDKFGFKREHSKTLANVSLLSDYGNLSTKAIRTIYPYIKENKFSTACELAGYRHSKLSISKEENENRTLKDTLDVLKKNSLRQPVVEKILNQMINLINELIEKHSEKDEKGNIVKYFKFDEIHIELARELKKNAEERRELDSKVREGKDRNEKIITILKSEFGLPYPTKNDITRYRLYEELKDNGYKDLYTNTYIPREKLFSKEIDIEHIIPKSRLFNDSFSNKTICYRQDNLNKGERTAYDYIEGLGKTQLDEYLNRVENLYTNKFITKAKYRNLLKKESEIGDGFIERDLRETQYIAKKAKEMLLQITRHVVSTTGSITDRLRDDWELVNVMRELNLPKYKVLGLTEIQERKNGQTVEVITDWTKRNDHRHHAMDALTVAFTKHSHIQYLNFLNARKDEKHKEYSNIMGIQQLETEKTTDKDGKDRRVFKTPIPNFRQVAKEHLESILISHKTKNKVVTRATNKIAGSKKQQETLSPRGQLHKETVYGKYRRYVQKEEKIGSKFDLQTIERVANPLYKRLLTKRLEENGGDPKKAFTGKNALAKSPIYLDETQTQQLPEKVKLVWLETDFSIRKDITPDNFKDEKSIDKVLDEGIKRILKDRLKSFDGDAKRAFTDLEQNPIWLNKEKGIAIKRVTISGVSNAEPLHTKKDHLGNEIFDDTGKPIPVDYVSTGNNHHIAIYRDENGNLQEKAVSFFEAVTRANQGLPTVDKTYNQHLGWQFLFTMKQNEMFVFPNKETGFDPQEIDLLDPKNKKLISPNLFRVQKISTKNYFFRHHLETSVETHNALNGVTYKSQLGLNGITDIIKVRINHLGDIVHIGEY

SEQ ID NO: 90 - protein, 1153 aa, Barnesiella intestinihominis
  REGION 1..1153: note = Barnesiella intestinihominis YIT 11860
MKNILGLDLGLSSIGWSVIRENSEEQELVAMGSRVVSLTAAELSSFTQGNGVSINSQRTQKRTQRKGYDRYQLRRTLLRNKLDTLGMLPDDSLSYLPKLQLWGLRAKAVTQRIELNELGRVLLHLNQKRGYKSIKSDFSGDKKITDYVKTVKTRYDELKEMRLTIGELFFRRLTENAFFRCKEQVYPRQAYVEEFDCIMNCQRKFYPDILTDETIRCIRDEIIYYQRPLKSCKYLVSRCEFEKRFYLNAAGKKTEAGPKVSPRTSPLFQVCRLWESINNIVVKDRRNEIVFISAEQRAALFDFLNTHEKLKGSDLLKLLGLSKTYGYRLGEQFKTGIQGNKTRVEIERALGNYPDKKRLLQFNLQEESSSMVNTETGEIIPMISLSFEQEPLYRLWHVLYSIDDREQLQSVLRQKFGIDDDEVLERLSAIDLVKAGFGNKSSKAIRRILPFLQLGMNYAEACEAAGYNHSNNYTKAENEARALLDRLPAIKKNELRQPVVEKILNQMVNVVNALMEKYGRFDEIRVELARELKQSKEERSNTYKSINKNQRENEQIAKRIVEYGVPTRSRIQKYKMWEESKHCCIYCGQPVDVGDFLRGFDVEVEHIIPKSLYFDDSFANKVCSCRSCNKEKNNRTAYDYMKSKGEKALSDYVERVNTMYTNNQISKTKWQNLLTPVDKISIDFIDRQLRESQYIARKAKEILTSICYNVTATSGSVTSFLRHVWGWDTVLHDLNFDRYKKVGLTEVIEVNHRGSVIRREQIKDWSKRFDHRHHAIDALTIACTKQAYIQRLNNLRAEEGPDFNKMSLERYIQSQPHFSVAQVREAVDRILVSFRAGKRAVTPGKRYIRKNRKRISVQSVLIPRGALSEESVYGVIHVWEKDEQGHVIQKQRAVMKYPITSINREMLDKEKVVDKRIHRILSGRLAQYNDNPKEAFAKPVYIDKECRIPIRTVRCFAKPAINTLVPLKKDDKGNPVAWVNPGNNHHVAIYRDEDGKYKERTVTFWEAVDRCRVGIPAIVTQPDTIWDNILQRNDISENVLESLPDVKWQFVLSLQQNEMFILGMNEEDYRYAMDQQDYALLNKYLYRVQKLSKSDYSFRYHTETSVEDKYDGKPNLKLSMQMGKLKRVSIKSLLGLNPHKVHISVLGEIKEIS

SEQ ID NO: 91 - protein, 1352 aa, Belliella baltica
MKKILGLDLGTTSIGWAFIKEPEKDVVGSEIVDMGVRIVPLSSDEENDFAKGNTISINADRTLKRGARRNLQRFKQRRNALLEIFKEKKLISTNFKYAEDGPSSTFSTLNLRAKAAKEKIELQDLVKVLLQINKKRGYKSSRKAKSEEDDGSAIDSMGIAKELYENDLTPGQWVYEALQKGRKNVPDFYRSDLQEEFKKIVNYQSEFFPDIFNASFVEDWMGKASTPTKQYFNKKGVQLAENKGKREERRLQEYKWRAEAVNFKIDLSEIALILSQINSQISNSSGYLGAISDRSKELYFKNLTVGQYLYQQIKKNPHTRLKGQVFYRQDYLDEFERIWSVQSSFYPQLNDALKREVRDITIFFQRRLKSQKHLISNCEFEDHHKVVPKSHPVFQEFRIWQNLNNLLLIKKDNLNEKFDLELESKIALANELAFKRELNVKDALKILGLKPNEWEFNFTKIEGNRTNQAFFDAFAKIIELEDGEPIDLGDLKADDILDQFSEAFLRIGIDTELLQVNSDIEGAEYEKQSYIQFWHLLYSSEDDQKLKLNLIRKFGFKPEHAKILASISLQDDHASLSSRAIKKILPHLQSGLIYDKACTYAGYNHSSSFTKDENEKRELRAELELLKKNSLRNPVVEKILNQMINVVNAILKDPELGRPDEIRVEMARELKANAEQRKNMTSNIASATRDHDKYREILKSEFGLKRVTKNDLLRYKLWLETDGISLYTGKPIEASKLFSKEYDIEHIIPKARLFDDSFSNKTICERQLNIDKANVTAFSFLQNKLSADEFEQYQSRVKSLYGKLSKAKIQKLLMANDKIPEDFIARQLQETRYISKKAKEILFEISRRVSVTTGTITDKLREDWGLVEIMKELNWEKYDKLGLTYTIEGKHGERLNKIKDWSKRNDHRHHAMDALTVALTKPAYIQYLNNLNAKGLNNKKGTEVFAIEQKYLKRENGKLCFIPPIENIRSEAKKHLSRILVSYKAKNKVVTINKNKTKSKAGLNEQIALTPRGQLHKETVYGKSFHYSTKFEKIGASFNVQKINTVAKKEEREALLKRLAENGNDPKKAFTGKNTLNKMPIYLDLGKNIKLSEKVKTVVLEQNYTIRKNIDPDLKVDKVIDVGIKRILESRLEEFGGNAKLAFSNLEENPIWLNKEKGISIKRVKISGVSNVESLHVKKDHFGEPILDQEGNEIPVDFVSTGNNHHVAIYEDENGNLQEEVVSFFEAVVRQNQGLPIIKKNHTLGWKFLFTLKQNEYFVFPSDDFVPADVDLMDEQNYHLISPNLFRVQKIARKNYVFNNHLETKAVDNDLLKSKKELSKITYHFYQTPEHLRGIIKIRINHLGKIIQIGEY

SEQ ID NO: 92 - protein, 1415 aa, Bergeyella zoohelcum
  REGION 1..1415: note = Bergeyella zoohelcum ATCC 43767
MKHILGLDLGTNSIGWALIERNIEEKYGKIIGMGSRIVPMGAELSKFEQGQAQTKNADRRTNRGARRLNKRYKQRRNKLIYILQKLDMLPSQIKLKEDFSDPNKIDKITILPISKKQEQLTAFDLVSLRVKALTEKVGLEDLGKIIYKYNQLRGYAGGSLEPEKEDIFDEEQSKDKKNKSFIAFSKIVFLGEPQEEIFKNKKLNRRAIIVETEEGNFEGSTFLENIKVGDSLELLINISASKSGDTITIKLPNKTNWRKKMENIENQLKEKSKEMGREFYISEFLLELLKENRWAKIRNNTILRARYESEFEAIWNEQVKHYPFLENLDKKTLIEIVSFIFPGEKESQKKYRELGLEKGLKYIIKNQVVFYQRELKDQSHLISDCRYEPNEKAIAKSHPVFQEYKVWEQINKLIVNTKIEAGTNRKGEKKYKYIDRPIPTALKEWIFEELQNKKEITFSAIFKKLKAEFDLREGIDFLNGMSPKDKLKGNETKLQLQKSLGELWDVLGLDSINRQIELWNILYNEKGNEYDLTSDRTSKVLEFINKYGNNIVDDNAEETAIRISKIKFARAYSSLSLKAVERILPLVRAGKYFNNDFSQQLQSKILKLLNENVEDPFAKAAQTYLDNNQSVLSEGGVGNSIATILVYDKHTAKEYSHDELYKSYKEINLLKQGDLRNPLVEQIINEALVLIRDIWKNYGIKPNEIRVELARDLKNSAKERATIHKRNKDNQTINNKIKETLVKNKKELSLANIEKVKLWEAQRHLSPYTGQPIPLSDLFDKEKYDVDHIIPISRYFDDSFTNKVISEKSVNQEKANRTAMEYFEVGSLKYSIFTKEQFIAHVNEYFSGVKRKNLLATSIPEDPVQRQIKDTQYIAIRVKEELNKIVGNENVKTTTGSITDYLRNHWGLTDKFKLLLKERYEALLESEKFLEAEYDNYKKDFDSRKKEYEEKEVLFEEQELTREEFIKEYKENYIRYKKNKLIIKGWSKRIDHRHHAIDALIVACTEPAHIKRLNDLNKVLQDWLVEHKSEFMPNFEGSNSELLEEILSLPENERTEIFTQIEKFRAIEMPWKGFPEQVEQKLKEIIISHKPKDKLLLQYNKAGDRQIKLRGQLHEGTLYGISQGKEAYRIPLTKFGGSKFATEKNIQKIVSPFLSGFIANHLKEYNNKKEEAFSAEGIMDLNNKLAQYRNEKGELKPHTPISTVKIYYKDPSKNKKKKDEEDLSLQKLDREKAFNEKLYVKTGDNYLFAVLEGEIKTKKTSQIKRLYDIISFFDATNFLKEEFRNAPDKKTFDKDLLFRQYFEERNKAKLLFTLKQGDFVYLPNENEEVILDKESPLYNQYWGDLKERGKNIYVVQKFSKKQIYFIKHTIADIIKKDVEFGSQNCYETVEGRSIKENCFKLEIDRLGNIVKVIKR

SEQ ID NO: 93 - protein, 1430 aa, Bergeyella zoohelcum
  REGION 1..1430: note = Bergeyella zoohelcum CCUG 30536
MKHILGLDLGTNSIGWAVVKEAQNDNEQSEIVDVGVRVNPLTTDEKTNFEKGKPISTNADRTLKRSARRNLQRYKLRRKELIELLKEHQLISTDTILTENGKGTTFQTLELRAKSAKEKISLEELARVFLTINKKRGYKSSRKAKNEDEGQLIDGMEIAKRLYEENLTTGQLSLQLLKEGKKSLPDYYRSDLQFELDKVWNFQKQFHSDILTDEFYAQLKGKGQRATSALFLAKYQIYTAENKGSREDKKLQAYQWRVDALSKELTREQLAFVITEINNNLNNSSGYLGAISDRSKELYFNNETVGEYLWKQIAANPHTSLKNQVFYRQDYLDEFEQIWKTQSAFYPEILTDELKKELRDVVIFYQRKLKSQKSLVSFCEFENKEIEIKKEDGTSTKKVIGLKVAPKSSPLFQEFKIWQNLNNVLIRKKGSKTKKVAKNQQAVLFEEEKTISELDLEAKQALFNELNLKGNLKADYCLEILGYSPKEWEMNYSVLEGNRTNKALYEAYLKITDLEGYDAKNHLKVKLNKDEVELDDLKVPASEIKDMVQAIFKEAGINTDILHFNAELDGKDFENQASYQLWHLLYSYEGDDSKSGNELLYKLLETKFGFKKEYAQILANVSLSDDYGSLSTKAMRKIHPYIKENKFSTACELAGYRHSKHSLTKEENDNRVLKDSLEVLKKNSLRQPVVEKILNQMINLVNALLKKYRTENPNFKFDEIRIELARELKKNAEERANMTANINKAKTEHEKIIKILKNEFGLPNPTRNDIIRYRLYEELKANGYKDLYTNIKIPQEKLFTKEIDIEHIIPKSRVFDDSFSNKTLSFRKTNLDKGERTAFDYMESKFGADKLEEYVARVEDLYKNNIISKAKYQKLLKKESEIGDGFVERDLRETQYIAKKAKEILLQITPNVLSTSGGITDRLREDWDLINVMKELNLPKYRALGLTQMEDRKYGQQVEVITDWTKRNDHRHHAMDALTVAFTKHNHIQYLNYLNARKNEKHKEHSNIMGIQQLETIKVTDKNGNEKRVFKAPMPNFRQVTKAFLENILISHKAKNKVVTKNKNKVAGSNKVQEVLTPRGQLHKETVYGKYQYYVQKEEKIGAKFDLETIKKVANPLYQSLLKKRLEENGGDPKKAFTGKNSLAKNPIYLDDTQTEQLPEKVKLVWLENSFSIRKDITPENFKDEKLIDKILDEGVKRILKERLQSFGNDAKKAFSDLDKNPIWLNKEKGITIKRVTISGVANAEPLHTKKDHLGKEILDKEGKPIPVDFISTGSNHHVAVYRDEKGNLQEKVVSVFEAVVRANQGLPIIDKTYNQHLGWEFLFTMKQNEMFVFPNESTGFNPNDIDLLDPKNKRIISPNLFRVQKFSKLQYGNSFVREFVFRHHLETTVEDRKELQGITYKQMKNSTFFNDIIKVRINHLGDIVSIGEY

SEQ ID NO: 94 - protein, 1420 aa, Bifidobacterium bifidum
MSRKNYVDDYAISLDIGNASVGWSAFTPNYRLVRAKGHELIGVRLFDPADTAESRRMARTTRRRYSRRRWRLRLLDALFDQALSEIDPSFLARRKYSWVHPDDENNADCWYGSVLFDSNEQDKRFYEKYPTIYHLRKALMEDDSQHDIREIYLAIHHMVKYRGNFLVEGTLESSNAFKEDELLKLLGRITRYEMSEGEQNSDIEQDDENKLVAPANGQLADALCATRGSRSMRVDNALEALSAVNDLSREQRAIVKAIFAGLEGNKLDLAKIFVSKEFSSENKKILGIYFNKSDYEEKCVQIVDSGLLDDEEREFLDRMQGQYNAIALKQLLGRSTSVSDSKCASYDAHRANWNLIKLQLRTKENEKDINENYGILVGWKIDSGQRKSVRGESAYENMRKKANVFFKKMIETSDLSETDKNRLIHDIEEDKLFPIQRDSDNGVIPHQLHQNELKQIIKKQGKYYPFLLDAFEKDGKQINKIEGLLTFRVPYFVGPLVVPEDLQKSDNSENHWMVRKKKGEITPWNFDEMVDKDASGRKFIERLVGTDSYLLGEPTLPKNSLLYQEYEVLNELNNVRLSVRTGNHWNDKRRMRLGREEKTLLCQRLFMKGQTVTKRTAENLLRKEYGRTYELSGLSDESKFTSSLSTYGKMCRIFGEKYVNEHRDLMEKIVELQTVFEDKETLLHQLRQLEGISEADCALLVNTHYTGWGRLSRKLLTTKAGECKISDDFAPRKHSIIEIMRAEDRNLMEIITDKQLGFSDWIEQENLGAENGSSLMEVVDDLRVSPKVKRGIIQSIRLIDDISKAVGKRPSRIFLELADDIQPSGRTISRKSRLQDLYRNANLGKEFKGIADELNACSDKDLQDDRLFLYYTQLGKDMYTGEELDLDRLSSAYDIDHIIPQAVTQNDSIDNRVLVARAENARKTDSFTYMPQIADRMRNFWQILLDNGLISRVKFERLTRQNEFSEREKERFVQRSLVETRQIMKNVATLMRQRYGNSAAVIGLNAELTKEMHRYLGFSHKNRDINDYHHAQDALCVGIAGQFAANRGFFADGEVSDGAQNSYNQYLRDYLRGYREKLSAEDRKQGRAFGFIVGSMRSQDEQKRVNPRTGEVVWSEEDKDYLRKVMNYRKMLVTQKVGDDFGALYDETRYAATDPKGIKGIPFDGAKQDTSLYGGFSSAKPAYAVLIESKGKTRLVNVTMQEYSLLGDRPSDDELRKVLAKKKSEYAKANILLRHVPKMQLIRYGGGLMVIKSAGELNNAQQLWLPYEEYCYFDDLSQGKGSLEKDDLKKLLDSILGSVQCLYPWHRFTEEELADLHVAFDKLPEDEKKNVITGIVSALHADAKTANLSIVGMTGSWRRMNNKSGYTFSDEDEFIFQSPSGLFEKRVTVGELKRKAKKEVNSKYRTNEKRLPTLSGASQP

SEQ ID NO: 95 - protein, 1138 aa, Bifidobacterium dentium
MLCRCHRRYRIGIDVGLMSVGLAAIEVDETGFPIRILNIQSVIHDGGIDPQLGKKKSISRKAISGVARRTRRMRRRKVVRLRQLDATLESLGFPIVEPDSLDTWEIWLTRAKLASSYIQDDETRKEDVSIALRHIARHRGWRNPYSNVESLFVDVAPSEQYEELRRKAEEKLGTSLSGNPTSAEIVECILKRQVGEVQLRTRSRKGVNGNAVEKEGLLPTKLMQSDNAAEIRRIFKVQRIDDETGRKLLRAVFKACSPKGSVERRVGRDALAPGLPRALKASLAFQEYRIANVLTNLVISEDGTKRKLTIAEKQRVFGFLSSNETDDITWIDVAEKLGLERRQIQGVGCLTADGEERISSTPPRNITALHIHSAKPVIREKLVAWWKAASPTVRETMVELLSNTVDIDRVREDMDYSSAVAFIDSLGDEELTALDSVDLLSGRAAYSRQTLKQLTERMLNTDDDLHEARKAVFGVDDNWKPPVDAISTSVGNPAVDRVLKIVNRYLLACQKRWRNPQSVQIEHVRESFSSVAKAKETERVQGERARYRNDLRRELCEQEGLNKIRESDIRRWESVQRQNGTCLYCGSPITFRTCEMDHIVPRKGVGSTNTRVNLAAACAACNKLKSNTAFSVWARTEGAANRKVSQRDAIERVKTFIFNKSVPPREQRAFKQAVISRLRQAESDPAIDNRSIESVAWMADELHRRIEAYFNQDADVSGNTPATQVWVFQGRVTALARKASGIEGRIHFAGEWKKTRLDRRHHAVDAAVIAMMNHSAAQTLVERDSLRLSQWITRKPETWKNYPFSEGQKKTRFKEWLDCMNALLDLLNDALDSDRVPVTRCQRMSLGNSQAHAATIRKMKRVELFSPMDADLIRRASTPALYCALTRLPEYSPEKGLPENRGREIVLNGRHIRSTETVDFFASGAAQLMVRNGSAEIGDSIHHMRIYRYRKTGAKSQEYVYGMIRVFQIDLLHASSENLFAVQLPSQSVSVRYGDKNVVQAIQEGRAEYLGHIVPNDEILISYEGVRMKDSEKIGAYANDFSGTASELAQRRHWVVVGSDVSKLALRPSYLSEEGLENSGSESERLSKQTRKVIEGKGWVVAVNILAKYHPVVIRRNALGEPRFRTNSGMPVSWRWDR

SEQ ID NO: 96 - protein, 1187 aa, Bifidobacterium longum
MLSRQLLGASHLARPVSYSYNVQDNDVHCSYGERCFMRGKRYRIGIDVGLNSVGLAAVEVSDENSPVRLLNAQSVIHDGGVDPQKNKEAITRKNMSGVARRTRRMRRRKRERLHKLDMLLGKFGYPVIEPESLDKPFEEWHVRAELATRYIEDDELRRESISIALRHMARHRGWRNPYRQVDSLISDNPYSKQYGELKEKAKAYNDDATAAEEESTPAQLVVAMLDAGYAEAPRLRWRTGSKKPDAEGYLPVRLMQEDNANELKQIFRVQRVPADEWKPLFRSVFYAVSPKGSAEQRVGQDPLAPEQARALKASLAFQEYRIANVITNLRIKDASAELRKLTVDEKQSIYDQLVSPSSEDITWSDLCDFLGFKRSQLKGVGSLTEDGEERISSRPPRLTSVQRIYESDNKIRKPLVAWWKSASDNEHEAMIRLLSNTVDIDKVREDVAYASAIEFIDGLDDDALTKLDSVDLPSGRAAYSVETLQKLTRQMLTTDDDLHEARKTLFNVTDSWRPPADPIGEPLGNPSVDRVLKNVNRYLMNCQQRWGNPVSVNIEHVRSSFSSVAFARKDKREYEKNNEKRSIFRSSLSEQLRADEQMEKVRESDLRRLEAIQRQNGQCLYCGRTITFRTCEMDHIVPRKGVGSTNTRTNFAAVCAECNRMKSNTPFAIWARSEDAQTRGVSLAEAKKRVTMFTFNPKSYAPREVKAFKQAVIARLQQTEDDAAIDNRSIESVAWMADELHRRIDWYFNAKQYVNSASIDDAEAETMKTTVSVFQGRVTASARRAAGIEGKIHFIGQQSKTRLDRRHHAVDASVIAMMNTAAAQTLMERESLRESQRLIGLMPGERSWKEYPYEGTSRYESFHLWLDNMDVLLELLNDALDNDRIAVMQSQRYVLGNSIAHDATIHPLEKVPLGSAMSADLIRRASTPALWCALTRLPDYDEKEGLPEDSHREIRVHDTRYSADDEMGFFASQAAQIAVQEGSADIGSAIHHARVYRCWKTNAKGVRKYFYGMIRVFQTDLLRACHDDLFTVPLPPQSISMRYGEPRVVQALQSGNAQYLGSLVVGDEIEMDFSSLDVDGQIGEYLQFFSQFSGGNLAWKHWVVDGFFNQTQLRIRPRYLAAEGLAKAFSDDVVPDGVQKIVTKQGWLPPVNTASKTAVRIVRRNAFGEPRLSSAHHMPCSWQWRHE

SEQ ID NO: 97 - protein, 1124 aa, Bifidobacterium longum
  REGION 1..1124: note = Bifidobacterium longum subsp. longum 2-2B
LTGHSGHTFWPTSSSPPIQLEQEKRPLPQRNTSQNGHTFWPITRERCFMRGKRYRIGIDVGLNSVGLAAVEVSDENSPVRLLNAQSVIHDGGVDPQKNKEAITRKNMSGVARRTRRMRRRKRERLHKLDMLLGKFGYPVIEPESLDKPFEEWHVRAELATRYIEDDELRRESISIALRHMARHRGWRNPYRQVDSLISDNPYSKQYGELKEKAKAYNDDATAAEEESTPAQLVVAMLDAGYAEAPRLRWRTGSKKPDAEGYLPVRLMQEDNANELKQIFRVQRVPADEWKPLFRSVFYAVSPKGSAEQRVGQDPLAPEQARALKASLAFQEYRIANVITNLRIKDASAELRKLTVDEKQSIYDQLVSPSSEDITWSDLCDFLGFKRSQLKGVGSLTEDGEERISSRPPRLTSVQRIYESDNKIRKPLVAWWKSASDNEHEAMIRLLSNTVDIDKVREDVAYASAIEFIDGLDDDALTKLDSVDLPSGRAAYSVETLQKLTRQMLTTDDDLHEARKTLFNVTDSWRPPADPIGEPLGNPSVDRVLKNVNRYLMNCQQRWGNPVSVNIEHVRSSFSSVAFARKDKREYEKNNEKRSIFRSSLSEQLRADEQMEKVRESDLRRLEAIQRQNGQCLYCGRTITFRTCEMDHIVPRKGVGSTNTRTNFAAVCAECNRMKSNTPFAIWARSEDAQTRGVSLAEAKKRVTMFTFNPKSYAPREVKAFKQAVIARLQQTEDDAAIDNRSIESVAWMADELHRRIDWYFNAKQYVNSASIDDAEAETMKTTVSVFQGRVTASARRAAGIEGKIHFIGQQSKTRLDRRHHAVDASVIAMMNTAAAQTLMERESLRESQRLIGLMPGERSWKEYPYEGTSRYESFHLWLDNMDVLLELLNDALDNDRIAVMQSQRYVLGNSIAHDATIHPLEKVPLGSAMSADLIRRASTPALWCALTRLPDYDEKEGLPEDSHREIRVHDTRYSADDEMGFFASQAAQIAVQEGSADIGSAIHHARVYRCWKTNAKGVRKYFYGMIRVFQTDLLRACHDDLFTVPLPPQSISMRYGEPRVVQALQSGNAQYLGSLVVGDEIEMDFPVSMLMVRLASIYNSSRSLVEGTLHGNIGLLMDSLTRRS

SEQ ID NO: 98 - protein, 1138 aa, unidentified
  source 1..1138: note = Bifidobacterium sp.
MNSVGLAAVEVSDENSPVRLLNAQSVIHDGGVDPQKNKEAITRKNMSGVARRTRRMRRRKRERLHKLDMLLGKFGYPVIEPESLDKPFEEWHVRAELATRYIEDDELRRESISIALRHMARHRGWRNPYRQVDSLISDNPYSKQYGELKEKAKAYNDDATAAEEESTPAQLVVAMLDAGYAEAPRLRWRTGSKKPDAEGYLPVRLMQEDNANELKQIFRVQRVPADEWKPLFRSVFYAVSPKGSAEQRVGQDPLAPEQARALKASLAFQEYRIANVITNLRIKDASAELRKLTVDEKQSIYDQLVSPSSEDITWSDLCDFLGFKRSQLKGVGSLTEDGEERISSRPPRLTSVQRIYESDNKIRKPLVAWWKSASDNEHEAMIRLLSNTVDIDKVREDVAYASAIEFIDGLDDDALTKLDSVDLPSGRAAYSVETLQKLTRQMLTTDDDLHEARKTLFNVTDSWRPPADPIGEPLGNPSVDRVLKNVNRYLMNCQQRWGNPVSVNIEHVRSSFSSVAFARKDKREYEKNNEKRSIFRSSLSEQLRADEQMEKVRESDLRRLEAIQRQNGQCLYCGRTITFRTCEMDHIVPRKGVGSTNTRTNFAAVCAECNRMKSNTPFAIWARSEDAQTRGVSLAEAKKRVTMFTFNPKSYAPREVKAFKQAVIARLQQTEDDAAIDNRSIESVAWMADELHRRIDWYFNAKQYVNSASIDDAEAETMKTTVSVFQGRVTASARRAAGIEGKIHFIGQQSKTRLDRRHHAVDASVIAMMNTAAAQTLMERESLRESQRLIGLMPGERSWKEYPYEGTSRYESFHLWLDNMDVLLELLNDALDNDRIAVMQSQRYVLGNSIAHDATIHPLEKVPLGSAMSADLIRRASTPALWCALTRLPDYDEKEGLPEDSHREIRVHDTRYSADDEMGFFASQAAQIAVQEGSADIGSAIHHARVYRCWKTNAKGVRKYFYGMIRVFQTDLLRACHDDLFTVPLPPQSISMRYGEPRVVQALQSGNAQYLGSLVVGDEIEMDFSSLDVDGQIGEYLQFFSQFSGGNLAWKHWVVDGFFNQTQLRIRPRYLAAEGLAKAFSDDVVPDGVQKIVTKQGWLPPVNTASKTAVRIVRRNAFGEPRLSSAHHMPCSWQWRHE

SEQ ID NO: 99 - protein, 1151 aa, unidentified
  REGION 1..1151: note = Bifidobacterium sp. 12_1_47BFAA
  source 1..1151: note = Bifidobacterium sp.
MRGKRYRIGIDVGLNSVGLAAVEVSDENSPVRLLNAQSVIHDGGVDPQKNKEAITRKNMSGVARRTRRMRRRKRERLHKLDMLLGKFGYPVIEPESLDKPFEEWHVRAELATRYIEDDELRRESISIALRHMARHRGWRNPYRQVDSLISDNPYSKQYGELKEKAKAYNDDATAAEEESTPAQLVVAMLDAGYAEAPRLRWRTGSKKPDAEGYLPVRLMQEDNANELKQIFRVQRVPADEWKPLFRSVFYAVSPKGSAEQRVGQDPLAPEQARALKASLAFQEYRIANVITNLRIKDASAELRKLTVDEKQSIYDQLVSPSSEDITWSDLCDFLGFKRSQLKGVGSLTEDGEERISSRPPRLTSVQRIYESDNKIRKPLVAWWKSASDNEHEAMIRLLSNTVDIDKVREDVAYASAIEFIDGLDDDALTKLDSVDLPSGRAAYSVETLQKLTRQMLTTDDDLHEARKTLFNVTDSWRPPADPIGEPLGNPSVDRVLKNVNRYLMNCQQRWGNPVSVNIEHVRSSFSSVAFARKDKREYEKNNEKRSIFRSSLSEQLRADEQMEKVRESDLRRLEAIQRQNGQCLYCGRTITFRTCEMDHIVPRKGVGSTNTRTNFAAVCAECNRMKSNTPFAIWARSEDAQTRGVSLAEAKKRVTMFTFNPKSYAPREVKAFKQAVIARLQQTEDDAAIDNRSIESVAWMADELHRRIDWYFNAKQYVNSASIDDAEAETMKTTVSVFQGRVTASARRAAGIEGKIHFIGQQSKTRLDRRHHAVDASVIAMMNTAAAQTLMERESLRESQRLIGLMPGERSWKEYPYEGTSRYESFHLWLDNMDVLLELLNDALDNDRIAVMQSQRYVLGNSIAHDATIHPLEKVPLGSAMSADLIRRASTPALWCALTRLPDYDEKEGLPEDSHREIRVHDTRYSADDEMGFFASQAAQIAVQEGSADIGSAIHHARVYRCWKTNAKGVRKYFYGMIRVFQTDLLRACHDDLFTVPLPPQSISMRYGEPRVVQALQSGNAQYLGSLVVGDEIEMDFSSLDVDGQIGEYLQFFSQFSGGNLAWKHWVVDGFFNQTQLRIRPRYLAAEGLAKAFSDDVVPDGVQKIVTKQGWLPPVNTASKTAVRIVRRNAFGEPRLSSAHHMPCSWQWRHE

SEQ ID NO: 100 - protein, 1092 aa, Brevibacillus laterosporus
  REGION 1..1092: note = Brevibacillus laterosporus GI-9
MAYTMGIDVGIASCGWAIVDLERQRIIDIGVRTFEKAENPKNGEALAVPRREARSSRRRLRRKKHRIERLKYMFVRNGLAVDIQHLEQTLRSQNEIDVWQLRVDGLDRMLTQKEWLRVLIHLAQRRGFQSNRKTDGSSEDGQVLVNVTENDRLMEEKDYRTVAEMMVKDEKFSDHKRNKNGNYHGVVSRASLLVEIHTLFESQRQHHNFLASKDFELEYINIWSSQRPVATKDQIEKMIGTCTFLPKEKRAPKASWHFQYFMLLQTINHIRITNAQGTRPLNKEEIEQVVNMALTKSKVSYHDIRKVLDLSEEYQFVGLDYGKEDEKKKVESKETIIKLDDYHKLNKIFNEVELAKGETWEAVDYDTVAYALTFFKDDEDIRDYLQNKYKDSKNRLVKNVANKEYTNELIEKVSTLSFRKVGHLSLKALRKIIPFLEQGMTYDKACQAAGFNFQGISKKKRSVVLPVIDQISNPVVNRALTQTRKVINALIKKYGSPETIHIETARELSKRFDERKNITKDYKENRDKNERAKKHLSELGIINPTGLDIVKYKLWCEQQGRCMYSNQPISFERLRESGYTEVDHIIPYSRSMNDSYNNRVLVMTRENREKSNQTPYEYMGNDTQRWDEFEQRVTTNPQIKKEKRQNLLLKGFTNRRELEMLERNLNDTRHITKYLSHFISTNLEFSPSDKKKKVVNTSGRITSHLRSRWGLEKNREQNDLHHAMDAVVIAVTSDSFIQQVTNYYKRKERRELNGDDKFPLPWKFFREEVIARLSPNPKEQIEALPNHFYSEDELADLQPIFVSRMPKRSITGEAHQAQFRRVVGKTKEGKNITAKKTALVDISYDKNGDFNMYGRETDPATYEAIKERYLEFGGNAKKAFSTDLHKPKKDGTKGPLIKSVRIMENKTLVHPVNKGKGVVYNSSIVRTDVFQRKEKYYLLPVYVTDVTKGKLPNKVIAAKKGYDDWIEVDDSFTFLYSLYPNDLIFIRQNPKKKISLKKRIESHSISDSKEVQEILTYYKGVDSSTAAIEFITHDGSYYAKGVGVQNLDCFEKYQVDILGNYSKVKGEKRLELETSDNNHKGKDVNSIKSTSR

SEQ ID NO: 101 - protein, 1428 aa, unidentified
  REGION 1..1428: note = Burkholderiales bacterium 1_1_47
  source 1..1428: note = Burkholderiales bacterium
MGKTHIIGVGLDLGGTYTGTFITSHPSDEAEHRDHSSAFTVVNSEKLSFSSKSRTAVRHRVRSYKGFDLRRRLLLLVAEYQLLQKKQTLAPEERENLRIALSGYLKRKGYARTEAETDTSVLESLDPSVFSSAPSFTNFFNDSEPLNIQWEAIANSPETTKALNKELSGQKEADFKKYIKTSFPEYSAKEILANYVEGRRAILDASKYIANLQSLGHKHRSKYLSDILQDMKRDSRITRLSEAFGSTDNLWRIIGNISNLQERAVRWYFNDAKFEQGQEQLDAVKLKNVLVRALKYLRSDDKEWSASQKQIIQSLEQSGDVLDVLAGLDPDRTIPPYEDQNNRRPPEDQTLYLNPKALSSEYGEKWKSWANKFAGAYPLLTEDLTEILKNTDRKSRIKIRSDVLPDSDYRLAYILQRAFDRSIALDECSIRRTAEDFENGVVIKNEKLEDVLSGHQLEEFLEFANRYYQETAKAKNGLWFPENALLERADLHPPMKNKILNVIVGQALGVSPAEGTDFIEEIWNSKVKGRSTVHSICNAIENERKTYGPYFSEDYKFVKTALKEGKTEKELSKKFAAVIKVLKMVSEVVPFIGKELRLSDEAQSKFDNPYSLAQLYNLIETERNGFSKVSLAAHLENAWRMTMTDGSAQCCRLPADCVRPFDGFIRKAIDRNSWEVAKRIAEEVKKSVDFTNGTVKIPVAIEANSFNFTASLTDLKYIQLKEQKLKKKLEDIQRNEENQEKRWLSKEERIRADSHGICAYTGRPLDDVGEIDHIIPRSLTLKKSESIYNSEVNLIFVSAQGNQEKKNNIYLLSNLAKNYLAAVFGASDLSQITNEIESTVLQLKAAGRLGYFDLLSEKERACARHALFLNSDSEARRAVIDVLGSRRKASVNGTQAWFVRSIFSKVRQALAAWTQETGNELIFDAISVPAADSSEMRKRFAEYRPEFRKPKVQPVASHSIDAMCIYLAACSDPFKTKRMGSQLAIYEPINFDNLFTGSCQVIQNTPRNFSDKTNIANSPIFKETIYAERFLDIIVSRGEIFIGYPSNMPFEEKPNRISIGGKDPFSILSVLGAYLDKAPSSEKEKLTIYRVVKNKAFELFSKVAGSKFTAEEDKAAKILEALHFVTVKQDVAATVSDLIKSKKELSKDSIENLAKQKGCLKKVEYSSKEFKFKGSLIIPAAVEWGKVLWNVFKENTAEELKDENALRKALEAAWPSSFGTRNLHSKAKRVFSLPVVATQSGAVRIRRKTAFGDFVYQSQDTNNLYSSFPVKNGKLDWSSPIIHPALQNRNLTAYGYRFVDHDRSISMSEFREVYNKDDLMRIELAQGTSSRRYLRVEMPGEKFLAWFGENSISLGSSFKFSVSEVFDNKIYTENAEFTKFLPKPREDNKHNGTIFFELVGPRVIFNYIVGGAASSLKEIFSEAGKERS

SEQ ID NO: 102 - protein, 1442 aa, Caenispirillum salinarum
  REGION 1..1442: note = Caenispirillum salinarum AK4
MPVLSPLSPNAAQGRRRWSLALDIGEGSIGWAVAEVDAEGRVLQLTGTGVTLFPSAWSNENGTYVAHGAADRAVRGQQQRHDSRRRRLAGLARLCAPVLERSPEDLKDLTRTPPKADPRAIFFLRADAARRPLDGPELFRVLHHMAAHRGIRLAELQEVDPPPESDADDAAPAATEDEDGTRRAAADERAFRRLMAEHMHRHGTQPTCGEIMAGRLRETPAGAQPVTRARDGLRVGGGVAVPTRALIEQEFDAIRAIQAPRHPDLPWDSLRRLVLDQAPIAVPPATPCLFLEELRRRGETFQGRTITREAIDRGLTVDPLIQALRIRETVGNLRLHERITEPDGRQRYVPRAMPELGLSHGELTAPERDTLVRALMHDPDGLAAKDGRIPYTRLRKLIGYDNSPVCFAQERDTSGGGITVNPTDPLMARWIDGWVDLPLKARSLYVRDVVARGADSAALARLLAEGAHGVPPVAAAAVPAATAAILESDIMQPGRYSVCPWAAEAILDAWANAPTEGFYDVTRGLFGFAPGEIVLEDLRRARGALLAHLPRTMAAARTPNRAAQQRGPLPAYESVIPSQLITSLRRAHKGRAADWSAADPEERNPFLRTWTGNAATDHILNQVRKTANEVITKYGNRRGWDPLPSRITVELAREAKHGVIRRNEIAKENRENEGRRKKESAALDTFCQDNTVSWQAGGLPKERAALRLRLAQRQEFFCPYCAERPKLRATDLFSPAETEIDHVIERRMGGDGPDNLVLAHKDCNNAKGKKTPHEHAGDLLDSPALAALWQGWRKENADRLKGKGHKARTPREDKDFMDRVGWRFEEDARAKAEENQERRGRRMLHDTARATRLARLYLAAAVMPEDPAEIGAPPVETPPSPEDPTGYTAIYRTISRVQPVNGSVTHMLRQRLLQRDKNRDYQTHHAEDACLLLLAGPAVVQAFNTEAAQHGADAPDDRPVDLMPTSDAYHQQRRARALGRVPLATVDAALADIVMPESDRQDPETGRVHWRLTRAGRGLKRRIDDLTRNCVILSRPRRPSETGTPGALHNATHYGRREITVDGRTDTVVTQRMNARDLVALLDNAKIVPAARLDAAAPGDTILKEICTEIADRHDRVVDPEGTHARRWISARLAALVPAHAEAVARDIAELADLDALADADRTPEQEARRSALRQSPYLGRAISAKKADGRARAREQEILTRALLDPHWGPRGLRHLIMREARAPSLVRIRANKTDAFGRPVPDAAVWVKTDGNAVSQLWRLTSVVTDDGRRIPLPKPIEKRIEISNLEYARLNGLDEGAGVTGNNAPPRPLRQDIDRLTPLWRDHGTAPGGYLGTAVGELEDKARSALRGKAMRQTLTDAGITAEAGWRLDSEGAVCDLEVAKGDTVKKDGKTYKVGVITQGIFGMPVDAAGSAPRTPEDCEKFEEQYGIKPWKAKGIPLA

SEQ ID NO: 103 - protein, 984 aa, Campylobacter coli
  REGION 1..984: note = Campylobacter coli 1098
MARILAFDIGISSIGWAFSENDELKDCGVRIFTKAENPKTGESLALPRRLARSARKRLARRKARLNHLKHLIANEFKLNYEDYQSFDESLAKAYKGSLISPYELRFRALNELLSKQDFARVILHIAKRRGYDDIKNNGDEEKSEILKAIKQNEEKLVNYQSVGEYLYKEYFQKFKENSKEFINVRNKKESYERCIAQSFLKDELKLIFQKQREFGFSFSKKFEEEVLSVAFYKRALKDFSHLVGNCSFFTDEKRAPKNSPLAFMFVALTRIINLLNNLKNTEGILYTKDDLNALLNEVLKNGTLTYKQTKKLLGLSDDYEFKGEKGTYFIEFKKYKEFIKALGEHNLSQDDLNEIAKDITLIKDEIKLKKALAKYDLNQNQIDSLSKLEFKDHLNISFKALKLITPLMLEGKKYDEACNELNLKVAINEDKKDFLPAFNETYYKDEVTNPVVLRAIKEYRKVLNALLKKYGKVHKINIELAREVGKNYSQRAKIEKEQNENYKAKKDAELECEKLGLKINSKNILKLRLFKEQKEFCAYSGEKIKISDLQDEKMLEIDHIYPYSRSFDDSYMNKVLVFTKQNQEKLNQTPFEAFGNDSAKWQKIEVLAKNLPTKKQKRILDKNYKDKEQKNFKDRNLNDTRYIARLVLNYTKDYLDFLPLSDDENTKLNDTQKGSKVHVEAKSGMLTSALRHTWGFSAKDRNNHLHHAIDAVIIAYANNSIVKAFSDFKKEQESNSAELYAKKISELDYKNKRKFFEPFSGFRQKVLDKIDEIFVSKPERKKPSGALHEETFRKEEEFYQSYGGKEGVLKALELGKIRKVNGKIVKNGDMFRVDIFKHKKTNKFYAVPIYTMDFALKVLPNKAVARSKKGEIKDWILMDENYEFCFSLYKDSLILIQTKDMQEPEFVYYNAFTSSTVSLIVSKHDNKFETLSKNQKILFKNANEKEVIAKSIGIQNLKVFEKYIVSALGEVTKAEFRQREDFKK

SEQ ID NO: 104 - protein, 984 aa, Campylobacter coli
  REGION 1..984: note = Campylobacter coli 111-3
MARILAFDIGISSIGWAFSENDELKDCGVRIFTKAENPKTGESLALPRRLARSARKRLARRKARLNHLKHLIANEFKLNYEDYQSFDESLAKAYKGSLISPYELRFRALNELLSKQDFARVILHIAKRRGYDDIKNNGDEEKSEILKAIKQNEEKLVNYQSVGEYLYKEYFQKFKENSKEFINVRNKKESYERCIAQSFLKDELKLIFQKQREFGFSFSKKFEEEVLSVAFYKRALKDFSHLVGNCSFFTDEKRAPKNSPLAFMFVALTRIINLLNNLKNTEGILYTKDDLNTLLNEVLKNGTLTYKQTKKLLGLSDDYEFKGEKGTYFIEFKKYKEFIKALGEHNLSQDNLNEIAKDITLIKDEIKLKKALAKYDLNQNQIDSLSKLEFKDHLNISFKALKLITPLMLEGKKYDEAYNELNLKVAINEDKKDFLPAFNETYYKDEVTNPVVLRAIKEYRKVLNALLKKYGKVHKINIELAREVGKNHSQRAKIEKEQNENYKAKKDAELECEKLGLKINSKNILKLRLFKEQKEFCAYSGEKIKISDLQDEKMLEIDHIYPYSRSFDDSYMNKVLVFTKQNQEKLNQTPFEAFGNDSAKWQKIEVLAKNLPTKKQKRILDKNYKDKEQKDFKDRNLNDTRYIARLVLNYTKDYLDFLPLSDDENTKLNDTQKGSKVHVEAKSGMLTSALRHTWGFSAKDRNNHLHHAIDAVIIAYANNSIVKAFSDFKKEQESNSAELYAKKISELDYKNKRKFFEPFSGFRQKVLDKIDEIFVSKPERKKPSGALHEETFRKEEEFYQSYGGKEGVLKALELGKIRKVNGKIVKNGDMFRVDIFKHKKTNKFYAVPIYTMDFALKVLPNKAVARSKKGEIKDWILMDENYEFCFSLYKDSLILIQTKDMQEPELVYFNAFTSSTVSLIVSKHDNKFETLSKNQKILFKNANEKEVIAKSIGIQNLKVFEKYIVSALGEVTKAEFRQREDFKK

SEQ ID NO: 105 - protein, 987 aa, Campylobacter coli
  REGION 1..987: note = Campylobacter coli 132-6
MARILAFDIGISSIGWAFSENDELKDCGVRIFTKAENPKTGESLALPRRLARSARKRLARRKARLNHLKHLIANEFKLNYEDYQSFDESLAKAYKGSLISPYELRFRALNELLSKQDFARVILHIAKRRGYDDIKNNGDEEKSEILKAIKQNEEKLVNYQSVGEYLYKEYFQKFKENSKEFINVRNKKESYERCIAQSFLKDELKLIFQKQREFGFSFSKKFEEEVLSVAFYKRALKDFSHLVGNCSFFTDEKRAPKNSPLAFMFVALTRIINLLNNLKNTEGILYTKDDLNTLLNEVLKNGTLTYKQTKKLLGLSDDYEFKGEKGTYFIEFKKYKEFIKALGEHNLSQDNLNEIAKDITLIKDEIKLKKALAKYDLNQNQIDSLSKLEFKDHLNISFKALKLITPLMLEGKKYDEAYNELNLKVAINEDKKDFLPAFNETYYKDEVTNPVVLRAIKEYRKVLNALLKKYGKVHKINIELAREVGKNHSQRAKIEKEQNENYKAKKDAELECEKLGLKINSKNILKLRLFKEQKEFCAYSGEKIKISDLQDEKMLEIDHIYPYSRSFDDSYMNKVLVFTKQNQEKLNQTPFEAFGNDSAKWQKIEVLAKNLPTKKQKRILDKNYKDKEQKDFKDRNLNDTRYIARLVLNYTKDYLDFLPLSDDENTKLNDTQKGSKVHVEAKSGMLTSALRHTWGFSAKDRNNHLHHAIDAVIIAYANNSIVKAFSDFKKEQESNSAELYAKKISELDYKNKRKFFEPFSGFRQKVLDKIDEIFVSKPERKKPSGALHEETFRKEEEFYQSYGGKEGVLKALELGKIRKVNGKIVKNGDMFRVDIFKHKKTNKFYAVPIYTMDFALKVLPNKAVARSKKGEIKDWILMDENYEFCFSLYKDSLILIQTKDMQEPELVYFNAFTSSTVSLIVSKHDNKFETLSKNQKILFKNANEKEVIAKSIGIQNLKVFEKYIVSALGEVTKAEFRQREDFKNELR

SEQ ID NO: 106 - protein, 984 aa, Campylobacter coli
  REGION 1..984: note = Campylobacter coli 151-9
MARILAFDIGISSIGWAFSENDELKDCGVRIFTKAENPKTGESLALPRRLARSARKRLARRKARLNHLKHLIANEFKLNYEDYQSFDESLAKAYKGSLISPYELRFRALNELLSKQDFARVILHIAKRRGYDDIKNNGDEEKSEILKAIKQNEEKLVNYQSVGEYLYKEYFQKFKENSKEFINVRNKKESYERCIAQSFLKDELKLIFQKQREFGFSFSKKFEEEVLSVAFYKRALKDFSHLVGNCSFFTDEKRAPKNSPLAFMFVALTRIINLLNNLKNTEGILYTKDDLNTLLNEVLKNGTLTYKQTKKLLGLSDDYEFKGEKGTYFIEFKKYKEFIKALGEHNLSQDNLNEIAKDITLIKDEIKLKKALAKYDLNQNQIDSLSKLEFKDHLNISFKALKLITPLMLEGKKYDEAYNELNLKVAINEDKKDFLPAFNETYYKDEVTNPVVLRAIKEYRKVLNALLKKYGKVHKINIELAREVGKNHSQRAKIEKEQNENYKAKKDAELECEKLGLKINSKNILKLRLFKEQKEFCAYSGEKIKISDLQDEKMLEIDHIYPYSRSFDDSYMNKVLVFTKQNQEKLNQTPFEAFGNDSAKWQKIEVLAKNLPTKKQKRILDKNYKDKEQKDFKDRNLNDTRYIARLVLNYTKDYLDFLPLSNDENTKLNDTQKGSKVHVEAKSGMLTSALRHTWGFSAKDRNNHLHHAIDAVIIAYANNSIVKAFSDFKKEQESNSAELYAKKISELDYKNKRKFFEPFSGFRQKVLDKIDEIFVSKPERKKPSGALHEETFRKEEEFYQSYGGKEGVLKALELGKIRKVNGKIVKNGDMFRVDIFKHKKTNKFYAVPIYTMDFALKVLPNKAVARSKKGEIKDWILMDENYEFCFSLYKDSLILIQTKDMQEPELVYFNAFTSSTVSLIVSKHDNKFETLSKNQKILFKNANEKEVIAKSIGIQNLKVFEKYIVSALGEVTKAEFRQREDFKK

SEQ ID NO: 107 - protein, 984 aa, Campylobacter coli
  REGION 1..984: note = Campylobacter coli 1909
MARILAFDIGISSIGWAFSENDELKDCGVRIFTKAENPKTGESLALPRRLARSARKCLARRKARLNHLKHLIANEFKLNYEDYQSFDESLAKAYKGSLISPYELRFRALNELLSKQDFARVILHIAKRRGYDDIKNNGDEEKSEILKAIKQNEEKLVNYQSVGEYLYKEYFQKFKENSKEFINVRNKKESYERCIAQSFLKDELKLIFQKQREFGFSFSKKFEEEVLSVAFYKRALKDFSHLVGNCSFFTDEKRAPKNSPLAFMFVALTRIINLLNNLKNTEGILYTKDDLNALLNEVLKNGTLTYKQTKKLLGLSDDYEFKGEKGTYFIEFKKYKEFIKALGEHNLSQDDLNEIAKDITLIKDEIKLKKALAKYDLNQNQIDSLSKLEFKDHLNISFKALKLITPLMLEGKKYDEACNELNLKVAINEDKKDFLPAFNETYYKDEVTNPVVLRAIKEYRKVLNALLKKYGKVHKINIELAREVGKNHSQRAKIEKEQNENYKAKKDAELECEKLGLKINSKNILKLRLFKEQKEFCAYSGEKIKISDLQDEKMLEIDHIYPYSRSFDDSYMNKVLVFTKQNQEKLNQTPFEAFGNDSAKWQKIEVLAKNLPTKKQKRILDKNYKDKEQKNFKDRNLNDTRYIARLVLNYTKDYLDFLPLSDDENTKLNDTQKGSKVHVEAKSGMLTSALRHTWGFSAKDRNNHLHHAIDAVIIAYANNSIVKAFSDFKKEQESNSAELYAKKISELDYKNKRKFFEPFSGFRQKVLDKIDEIFVSKPERKKPSGALHEETFRKEEEFYQSYGGKEGVLKALELGKIRKVNGKIVKNGDMFRVDIFKHKKTNKFYAVPIYTMDFALKVLPNKAVARSKKGEIKDWILMDENYEFCFSLYKDSLILIQTKDMQEPEFVYYNAFTSSTVSLIVSKHDNKFETLSKNQKILFKNANEKEVIAKSIGIQNLKVFEKYIVSALGEVTKAEFRQREDFKK

SEQ ID NO: 108 - protein, 965 aa, Campylobacter coli
  REGION 1..965: note = Campylobacter coli 1957
MKIIGFNLGIANIGWALRENDEIIDCGVRVFDIPENPKNGNSLALERRENKARMKIVKRKKARMLATKTFLKKELNVDLSKLFLIGSTQSIYELRTKALSSLISKEELSAIILHIAKHRGYDDSALKNENGTIIEALNKNKEAMLKFKSVGEYFYKNFVQNKEVKKIRNTTEDYSNSVPRSLLKQELDLILDKQKELGLIKNADFKEKLFEIIFFKRPLKDFSNKIGNCIFFENEKRAAKNTISACEFVALGKVVNLLKSIEKDIGIVYEKDSINEIMSIILDKTSISYKKIRDILNLPQDINFKGLDYSKNNAENSKLVDLKKLNEFKKALGDGFANLDKDILDSIATDITLTKDTATLKEKLKNYNVLNAEQIEKLSELVFNDHINLSLKALKQIIPLMYEGKRYDEACELCNFTIAKNQEKNEYLPLFEKTRFAKDISSPVVIRAICEFRKLLNDIIRRYGSVHKIHLELTRDFGISFNDRKKIIKEIEQNEQSRIKALETIKELKLEETSKNIQIVRLFEDQKGICPYSGLKMDLKCLDELVIDYIRPYNRSLDDSYSNKILTFKKLNDLKQGKTPFEAFGEDEKLWAEINERIKEYNGKKRFKIFDKFFKDKKPFDFTEQTLQDTRWLTKLVASYLNEYLLFLPINEDENTALGYGEKGSKQHVVLSSGMITQMLRNFWYLGFKNHKDYKNNAMDAIIVAFTTNSIIFAFNNFKKELDLAKAEFYANKISESDYLLKRKFLPPFSGFKEQALEKVKNIFVSHSLKIKNKGTLHELTPLKIKELKNTYGDLDLAVKLGKIRKYNDKYYANAKGSLVRTDLFADKENKFHAVSIYKADFSTKKLPNKTPATTSNGETKEGIEMNENYNFCMSLYKNTPISVKIKGMKEPIICYYHGFNTSGSKITYKKHDNNYHNLSEDEMVVFRKNDKESIVVGKILEIKKYSISPSGELSLIENEERKWF

SEQ ID NO: 109 - protein, 984 aa, Campylobacter coli
  REGION 1..984: note = Campylobacter coli 2692
MARILAFDIGISSIGWAFSENDELKDCGVRIFTKAENPKTGESLALPRRLARSARKRLARRKARLNHLKHLIANEFKLNYEDYQSFDESLAKAYKGSLISPYELRFRALNELLSKQDFARVILHIAKRRGYDDIKNSDDKEKGAILKAIKQNEEKLTNYQSVGEYLYKEYFQKFKENSKEFTNVRNKKESYERCIAQSFLKDELKLIFKKQREFGFSFSKKFEEEVLSVAFYKRALKDFSHLVGNCSFFTDEKRAPKNSPLAFMFVALTRIINLLNNLKNTEGILYTKDDLNALLNEVLKNGTLTYKQTKKLLGLSDDYEFKGEKGTYFIEFKKYKEFIKALGDHSLSQDDLNEIAKDITLIKDEIKLKKALAKYDLNQNQIDSLSKLEFKDHLNISFKALKLITPLMLEGKKYDEACNELNLKVAINEDKKDFLPAFNETYYKDEVTNPVVLRAIKEYRKVLNALLKKYGKVHKINIELAREVGKNYSQRAKIEKEQNENYKAKKDAELECEKLGLKINSKNILKLRLFKEQKEFCAYSGEKIKISDLQDEKMLEIDHIYPYSRSFDDSYMNKVLVFTKQNQEKLNQTPFEAFGNDSAKWQKIEVLAKNLPTKKQKRILDKNYKDKEQKDFKDRNLNDTRYIARLVLNYTKDYLDFLPLSDDENTKLNDTQKGSKVHVEAKSGMLTSALRHTWGFSAKDRNNHLHHAIDAVIIAYANNSIVKAFSDFKKEQESNSAELYAKKISELDYKNKRKFFEPFSGFRQKVLDKIDEIFVSKPERKKPSGALHEETFRKEEEFYQSYGGKEGVLKALELGKIRKVNGKIVKNGDMFRVDIFKHKKTNKFYAVPIYTMDFALKVLPNKAVARSKKGEIKDWILMDENYEFCFSLYKDSLILIQTKDMQEPEFVYYNAFTSSTVSLIVSKHDNKFETLSKNQKILFKNANEKEVIAKSIGIQNLKVFEKYIVSALGEVTKAEFRQREDFKK

SEQ ID NO: 110 - protein, 984 aa, Campylobacter coli
  REGION 1..984: note = Campylobacter coli 59-2
MARILAFDIGISSIGWAFSENDELKDCGVRIFTKAENPKTGESLALPRRLARSARKRLARRKARLNHLKHLIANEFKLNYEDYQSFDESLAKAYKGSLISPYELRFRALNELLSKQDFARVILHIAKRRGYDDIKNNGDEEKGKILKAIKQNEEKLVNYQSVGEYLYKEYFQKFKENSKEFINVRNKKESYERCITQSFLKYELKLIFQKQREFGFSFSKKFEEEVLSVAFYKRALKDFSHLVGNCSFFSDEKRAPKNSPLAFMFVALTRIINLLNNLKNTEGILYTKDDLNALLNEVLKNGTLTYKQTKKLLGLSDDYEFKGEKGTYFIEFKKYKEFIKALGEHNLSQDDLNEIAKDITLIKDEIKLKKALAKYDLNQNQIDSLSKLEFKDHLNISFKALKLITPLMLEGKKYDEACNELNLKVAINEDKKDFLPAFNETYYKDEVTNPVVLRAIKEYRKVLNALLKKYGKVHKINIELAREVGKNYSQRAKIEKEQNENYKAKKDAELECEKLGLKINSKNILKLRLFKEQKEFCAYSGEKIKISDLQDEKMLEIDHIYPYSRSFDDSYMNKVLVFTKQNQEKLNQTPFEAFGNDSAKWQKIEVLAKNLPTKKQKRILDKNYKDKEQKNFKDRNLNDTRYIARLVLNYTKDYLDFLPLSDDENTKLNDTQKGSKVHVEAKSGMLTSALRHTWGFSAKDRNNHLHHAIDAVIIAYANNSIVKAFSDFKKEQESNSAELYAKKISELDYKNKRKFFEPFSGFRQKVLDKIDEIFVSKPERKKPSGALHEETFRKEEEFYQSYGGKEGVLKALELGKIRKVNGKIVKNGDMFRVDIFKHKKTNKFYAVPIYTMDFALKVLPNKAVARSKKGEIKDWILMDENYEFCFSLYKDSLILIQTKDMQEPEFVYYNAFTSSTVSLIVSKHDNKFETLSKNQKILFKNANEKEVIAKSIGIQNLKVFEKYIVSALGEVTKAEFRQREDFKK

SEQ ID NO: 111 - protein, 965 aa, Campylobacter coli
  REGION 1..965: note = Campylobacter coli 67-8
MKIIGFNLGIANIGWALRENDEIIDCGVRVFDIPENPKNGNSLALERRENKARMKIVKRKKARMLATKTFLKKELNVDLSKLFLIGSTQSIYELRTKALSSLISKEELSAIILHIAKHRGYDDSALKNENGTIIEALNKNKEAMLKFKSVGEYFYKNFVQNKEVKKIRNTTEDYSNSVPRSLLKQELDLILDKQKELGLIKNADFKAKLFEIIFFKRPLKDFSNKIGNCIFFENEKRAAKNTISACEFVALGKVVNLLKSIEKDIGIVYEKDSINEIMSIILDKTSISYKKIRDILNLPQDINFKGLDYSKNNAENSKLVDLKKLNEFKKALGDGFANLDKDILDSIATDITLTKDTATLKEKLKNYNVLNAEQIEKLSELVFNDHINLSLKALKQIIPLMYEGKRYDEACELCNFTIAKNQEKNEYLPLFEKTRFAKDISSPVVIRAICEFRKLLNDIIRRYGSVHKIHLELTRDFGISFNDRKKIIKEIEQNEQSRIKALETIKELKLEETSKNIQIVRLFEDQKGICPYSGLKMDLKCLDELVIDYIRPYNRSLDDSYSNKVLTFKKLNDLKQGKTPFEAFGEDEKLWAEINERIKEYNGKKRFKIFDKFFKDKKPFDFTEQTLQDTRWLTKLVASYLNEYLSFLPISEDENTALGYGEKGSKQHVVLSSGMITQMLRNFWYLGFKNHKNYKNNAMDAIIVAFTTNSIIFAFNNFKKELDLAKAEFYANKISESDYLLKRKFLPPFSGFKEQALEKVKNIFVSHSLKIKNKGTLHELTPLKIKELKNTYGDLDLAVKLGKIRKYNDKYYANTKGSLVRTDLFVDKENKFHAVSIYKADFSTKKLPNKTPATTSNGETKEGIEMNENYNFCMSLYKNTPVSVKIKGMKEPIICYYHGFNTSGSKITYKKHDNNYHNLSEDEMVVFRKNDKESIVVGKILEIKKYSISPSGELSLIENEKRKWF

SEQ ID NO: 112 - protein, 965 aa, Campylobacter coli
  REGION 1..965: note = Campylobacter coli 80352
MKIIGFNLGIANIGWALRENDEIIDCGVRVFDIPENPKNGNSLALERRENKARMKIVKRKKARMLATKTFLKKELNVDLSKLFLIGSTQSIYELRTKALSSLISKEELSAIILHIAKHRGYDDSALKNENGTIIEALNKNKEAMLKFKSVGEYFYKNFVQNKEVKKIRNTTEDYSNSVPRSLLKQELDLILDKQKELGLIKNADFKAKLFEIIFFKRPLKDFSNKIGNCIFFENEKRAAKNTISACEFVALGKVVNLLKSIEKDIGIVYEKDSINEIMSIILDKTSISYKKIRDILNLPQDINFKGLDYSKNNVENSKLVDLKKLNEFKKALGDGFTNLDKDILDSIATDITLTKDTATLKEKLKNYNVLNAEQIEKLSELVFNDHINLSLKALKQIIPLMYEGKRYDEACELCNFTIAKNQEKNEYLPLFEKTRFAKDISSPVVIRAICEFRKLLNDIIRRYGSVHKIHLELTRDFGISFNDRKKIIKEIEQNEQSRIKALETIKELKLEETSKNIQIVRLFEDQKGICPYSGLKMDLKCLDELVIDYIRPYNRSLDDSYSNKVLTFKKLNDLKQGKTPFEAFGEDEKLWAEINERIKEYNGKKRFKIFDKFFKDKKPFDFTEQTLQDTRWLTKLVASYLNEYLSFLPISEDENTALGYGEKGSKQHVILSSGMITQMLRNFWYLGFKNHKDYKNNAMDAIIVAFTTNSIIFTFNNFKKELDLAKAEFYANKISESDYLLKRKFLPPFSGFKEQALEKVKNIFVSHSLKIKNKGTLHELTPLKIKELKNTYGDLDLAVKLGKIRKYNDKYYANAKGSLVRTDLFADKENKFHAVSIYKADFSTKKLPNKTPATTSNGETKEGIEMNENYNFCMSLYKNTPISVKIKGMKEPIICYYHGFNTSGSKITYKKHDNNYHNLSEDEMVVFRKNDKESIVVGKILEIKKYSISPSGELSLIENEERKWF

SEQ ID NO: 113 - protein, 987 aa, Campylobacter coli
  REGION 1..987: note = Campylobacter coli 80352
MARILAFDIGISSIGWAFSENDELKDCGVRIFTKAENPKTGESLALPRRLARSARKRLARRKARLNHLKHLIANEFKLNYEDYQSFDESLAKAYKGSLISPYELRFRALNELLSKQDFARVILHIAKRRGYDDIKNSDDKEKGAILKAIKQNEEKLANYQSVGEYLYKEYFQKFKENSKEFTNVRNKKESYERCIAQSFLKDELKLIFKKQREFGFSFSKKFEEEVLSVAFYKRALKDFSHLVGNCSFFTDEKRAPKNSPLAFMFVALTRIINLLNNLKNTEGILYTKDDLNALLNEVLKNGTLTYKQTKKLLGLSDDYEFKGEKGTYFIEFKKYKEFIKALGDHSLSQDDLNEIAKDITLIKDEIKLKKALAKYDLNQNQIDSLSKLEFKDHLNISFKALKLITPLMLEGKKYDEACNELNLKVAINEDKKDFLPAFNETYYKDEVTNPVVLRAIKEYRKVLNALLKKYGKVHKINIELAREVGKNYSQRAKIEKEQNENYKAKKDAELECEKLGLKINSKNILKLRLFKEQKEFCAYSGEKIKISDLQDEKMLEIDHIYPYSRSFDDSYMNKVLVFTKQNQEKLNKTPFEAFGNDSTKWQKIEVLAKNLPEKKQKRILDKNYKDKEQKDFKDRNLNDTRYIARLVLNYTKDYLDFLPLSDDENTKLNDTQKGSKVHVEAKSGMLTSALRHTWGFSTKDRNNHLHHAIDAVIIAYANNSIVKAFSDFKKEQESNSAELYAKKISELDYKNKRKFFEPFSGFRQKVLDKIDEIFVSKPERKKPSGALHEETFRKEEEFYQSYGGKEGVLKALELGKIRKVNGKIVKNGDMFRVDIFKHKKTNKFYAVPIYTMDFALKVLPNKAVARSKKGEIKDWILMDENYEFCFSLYKDSLILIQTKDMQEPEFVYYNAFTSSTVSLIVSKHDNKFETLSKNQKILFKNANEKEVIAKSIGIQNLKVFEKYIVSALGEVTKAEFRQREDFKNELR

SEQ ID NO: 114 - protein, 984 aa, Campylobacter jejuni
MAKILAFDIGISSIGWAFSENDELKDCGVRIFTKAENPKTGESLALPRRIARSARKRLARRKARLNHLKHLIANEFKLNYEDYQSFDEILAKAYKGSLISPYELRFRALNELLSKQDFARVILHIAKRRGYDDIKNNGDEEKGKILKAIKQNEEKLANYQSVGEYLYKEYFQKFKENSKEFINVRNKKESYERCIAQSFLKDELKLIFKKQREFGFSFSKKFEEEVLSVAFYKRALKDFSHLVGNCSFFTDEKRAPKNSPLAFMFVALTRIINLLNNLKNTLYTKDDLNALLNEVLKNGTLTYKQTKKLLGLSDDYEFKGEKGNYFIEFKKYKEFIKALGEHSLSQDDLNEIAKDITLIKDEIKLKKALAKYDLNENQIDNLSKLEFKDHLNISFKALKLITPLMLEGKKYDEACNELTLKVAINEDKKDFLPAFNETYYKDEVTNPVVLRAIKEYRKVLNALLKKYGKVHKINIELAREVGKNHSQRAKIEKEQNENYKAKKDAELECEKLGLKINSKNILKLRLFKEQKEFCVYSGEKIKLSDLQDEKMLEIDHIYPYSRSFDDSYMNKVLVFTKQNQEKLNQTPFEAFGNDSAKWQKIEVLAKNLPTKKQKRILDKNYKDKEQKDFKDRNLNDTRYIARLVLNYTKDYLDFLPLSDDENTKLNDTQKGSKVHVEAKSGMLTSALRHTWGFSTKDRNNHLHHAIDAVIIAYANNSIVKAFSDFKKEQESNTAELYAKKISELDYKNKRKFFEPFSGFRQKVLDKIDEIFVSKPERKKPSGALHEETFRKEEEFYQSYGGKEGVLKALELGKIRKVNGKIVKNGDMFRVDIFKHKKTNKFYAVPIYTMDFALKVLPNKAVARSKKGEIKDWILMDENYEFCFSLYKDSLILIQTKDMQEPEFVYYNAFTSSTVSLIVSKHDNKFETLSKNQKILFKNANEKEVIAKSIGIQNLKVFEKYIVSALGEVTKAEFRQREEFKNELR

SEQ ID NO: 115 - protein, 987 aa, Campylobacter jejuni
  REGION 1..987: note = Campylobacter jejuni subsp. jejuni 110-21
MARILAFDIGISSIGWAFSENDELKDCGVRIFTKAENPKTGESLALPRRLARSARKRLARRKARLNHLKHLIANEFKLNYEDYQSFDESLAKAYKGSLISPYELRFRALNELLSKQDFARVILHIAKRRGYDNIKNSDNEEKSEILKAIKQNEEKLVNYQSVGEYLYKEYFQKFKENSKEFINVRNKKESYERCIAQSFLKDELKLIFQKQREFGLSFSKKFEEEVLSVAFYKRALKDFSHLVGNCSFFTDEKRAPKNSPLAFMFVALTRIINLLNNLKNTEGILYTKDDLNTLLNEVLKNGTLTYKQTKKLLGLSDDYEFKGEKGTYFIEFKKYKEFIKALGDHSLSQDDLNEIAKDITLIKDEIKLKKALAKYDLNQNQIDSLSKLEFKDHLNISFKALKLITPLMLEGKKYDEACNELNLKVVINEDKKDFLPAFNETYYKDEVTNPVVLRAIKEYRKVLNALLKKYGKVHKINIELAREVGKNHSQRAKIEKEQNENYKAKKDAELECEKLGLKINNKNILKLRLFKEQKEFCAYSGEKIKLSDLQDEKMLEIDHIYPYSRSFDDSYMNKVLVFTKQNQEKLNKTPFEAFGNDSTKWQKIEVLAKNLPTKKQKRILDKNYKDKEQKDFKDRNLNDTRYIARLVLNYTKDYLDFLPLSDDENTKLNDIQKGSKVHVEAKSGMLTSALRHTWGFSTKDRNNHLHHAIDAVIIAYANNSIVKAFSDFKKEQESNSAELYAKKISELDYKNKRKFFEPFSGFRQKVLDKIDEIFVSKPERKKPSGALHEETFRKEEEFYQSYGGKEGVLKALELGKIRKVNGKIVKNGDMFRVDIFKHKKTNKFYAVPIYTMDFALKVLPNKAVVQGKDKKSGLIKDWILMDENYEFCFSLYKDSLILIQTKDMQEPEFVYYNAFTSSTVSLIVSKHDNKFETLSKNQKILFKNANEKEVIAKSIGIQNLKVFEKYIVSALGEVTKAEFRQREDFKK

SEQ ID NO: 116 - protein, 987 aa, Campylobacter jejuni
  REGION 1..987: note = Campylobacter jejuni subsp. jejuni 129-258
MARILAFDIGISSIGWAFSENDELKDCGVRIFTKAENPKTGESLALPRRLARSARKRLARRKARLNHLKHLIANEFKLNYEDYQSFNESLAKAYKGSLISPYELRFRALNELLSKQDFARVILHIAKRRGYDDIKNSDDKEKGAILKVIKQNEEKLANYQSVGEYLYKEYFQKFKENSKEFTNVRNKKESYERCIAQSFLKDELKLIFQKQREFGFSFSKKFEEEVLSVAFYKRALKDFSHLVGNCSFFTDEKRAPKNSPLAFMFVALTRIINLLNNLKNTEGILYTKDDLNALLNEVLKNGTLTYKQTKKLLGLSDDYEFKGEKGTYFIEFKKYKEFIKALGDHSLSQDDLNEIAKDITLIKDEIKLKKALAKYDLNQNQIDSLSKLEFKDHLNISFKALKLITPLMLEGKKYDEACNELNLKVAINEDKKDFLPAFNETYYKDEVTNPVVLRAIKEYRKVLNALLKKYGKVHKINIELAREVGKNYSQRAKIEKEQNENYKAKKDAELECEKLGLKINSKNILKLRLFKEQKEFCAYSGEKIKISDLQDEKMLEIDHIYPYSRSFDDSYMNKVLVFTKQNQEKLNQTPFEAFGNDSAKWQKIEVLAKNLPTKKQKRILDKNYKDKEQKDFKDRNLNDTRYIARLVLNYTKDYLDFLPLSDDENTKLNDTQKGSKVHVEAKSGMLTSALRHTWGFSAKDRNNHLHHAIDAVIIAYANNSIVKAFSDFKKEQESNSAELYAKKISELDYKNKRKFFEPFSGFRQKVLDKIDEIFVSKPERKKPSGALHEETFRKEEEFYQSYGGKEGVLKALELGKIRKVNGKIVKNGDMFRVDIFKHKKTNKFYAVPIYTMDFALKVLPNKAVARSKKGEIKDWILMDENYEFCFSLYKDSLILIQTKDMQEPELVYFNAFTSSTVSLIVSKHDNKFETLSKNQKILFKNANEKEVIAKSIGIQNLKVFEKYIVSALGEVTKAEFRQREDFKNELR

SEQ ID NO: 117 - protein, 987 aa, Campylobacter jejuni
  REGION 1..987: note = Campylobacter jejuni subsp. jejuni 1336
MARILAFDIGISSIGWAFSENDELKDCGVRIFTKAENPKTGESLALPRRLARSARKRLARRKARLNHLKHLIANEFKLNYEDYQSFDESLAKAYKGSLISPYELRFRALNELLSKQDFARVILHIAKRRGYDDIKNNGDEEKGKILKAIKQNEEKLVSYQSVGEYLYKEYFQKFKENSKEFINVRNKKESYERCIAQSFLKDELKLIFQKQREFGFSFSKKFEEEVLSVAFYKRALKDFSHLVGNCSFLLMKKERQKNSPLAFMFVALTRIINLLNNLKNTEGILYTKDDLNTLLNEALKNGTLTYKQTKKLLGLSNDYEFKGEKGTYFIEFQKYKEFVKALGEHNLSQDDLNEIAKDITLIKDEIKLKKALAKYDLNQNQIDSLSKLEFKDHLNISFKALKLITPLMLEGKKYDEACNELNLKVAINEDKKDFLPAFNETYYKDEVTNPVVLRAIKEYRKVLNALLKKYGKVHKINIELAREVGKNHSQRAKIEKEQNENYKAKKDAELECEKLGLKINSKNILKLRLFKEQKEFCVYSGEKIKISDLQDEKMLEIDHIYPYSRSFDDSYMNKVLVFTKQNQEKLNKTPFETFGNDRVKWQKIEVLAKNLPTKKQKRILDKNYKDKEQKDFKDRNLNDTRYIARLVLNYTKDYLDFLPLSDDENTKLNDTQKGSKVHVEAKSGMLTSTLRHTWGFSTKDRNNHLHHAIDAAIIAYANNSIVKAFSDFKKEQESNTAELYAKKISELDYKNKRKFFEPFSGFRQKLLDKIDEIFVSKPERKKPSGALHEETFRKEEEFYQSYGGKEGVLKALELGKIRKVNGKMVKNGDMFRVDIFKHKKTNKFYAVPIYTMDFALKVLPNKAVVQGKDKKSGLIKDWILMDENYEFCFSLYKDSLILIQTKDMQEPELVYYERLDSSNASLTVSKHDNKFETLSKNQKILFKNANEKEVIAKSIGIQNLKVFEKYIVSALGEVTKAEFRQREDFKK

SEQ ID NO: 118 - protein, 984 aa, Campylobacter jejuni
  REGION 1..984: note = Campylobacter jejuni subsp. jejuni 140-16
MARILAFDIGISSIGWAFSENDELKDCGVRIFTKVENPKTGESLALPRRLARSARKRLARRKARLNHLKHLIANEFKLNYEDYQSFDESLAKAYKGSLISPYELRFRALNELLSKQDFARVILHIAKRRGYDDIKNSDDKEKGAILKAIKQNEEKLANYQSVGEYLYKEYFQKFKENSKEFTNVRNKKESYERCIAQSFLKDELKLIFKKQREFGFSFSKKFEEEVLSVAFYKRALKDFSHLVGNCSFFTDEKRAPKNSPLAFMFVALTRIINLLNNLKNTEGILYTKDDLNALLNEVLKNGTLTYKQTKKLLGLSDDYEFKGEKGTYFIEFKKYKEFIKALGEHNLSQDDLNEIAKDITLIKDEIKLKKALAKYDLNQNQIDSLSKLEFKDHLNISFKALKLITPLMLEGKKYDEACNELNLKVAINEDKKDFLPAFNETYYKDEVTNPVVLRAIKEYRKVLNALLKKYGKVHKINIELAREVGKNHSQRAKIEKEQNENYKAKKDAELECEKLGLKINSKNILKLRLFKEQKEFCAYSGEKIKISDLQDEKMLEIDHIYPYSRSFDDSYMNKVLVFTKQNQEKLNKTPFEAFGNDSAKWQKIEVLAKNLPTKKQKRILDKNYKDKEQKDFKDRNLNDTRYIARLVLNYTKDYLDFLPLSDDENTKLNDTQKGSKVHVEAKSGMLTSALRHTWGFSTKDRNNHLHHAIDAVIIAYANNSIVKAFSDFKKEQESNSAELYAKKISELDYKNKRKFFEPFSGFRQKVLDKIDEIFVSKPERKKPSGALHEETFRKEEEFYQSYGGKEGVLKALELGKIRKVNGKIVKNGDMFRVDIFKHKKTNKFYAVPIYTMDFALKVLPNKAVARSKKGEIKDWILMDENYEFCFSLYKDSLILIQTKDMQEPEFVYYNAFTSSTVSLIVSKHDNKFETLSKNQKILFKNANEKEVIAKSIGIQNLKVFEKYIVSALGEVTKAEFIQREDFKK

SEQ ID NO: 119 - protein, 984 aa, Campylobacter jejuni
  REGION 1..984: note = Campylobacter jejuni subsp. jejuni 1577
MARILAFDIGISSIGWAFSENDELKDCGVRIFTKVENPKTGESLALPRRLARSARKRLARRKVRLNHLKHLIANEFKLNYEDYQSFDESLAKAYKGSLISPYELRFRALNELLSKQDFARVILHIAKRRGYDDIKNSDDKEKGAILKAIKQNEEKLANYQSVGEYLYKEYFQKFKENSKEFTNVRNKKESYERCIAQSFLKDELKLIFKKQREFGFSFSKKFEEEVLSVAFYKRALKDFSHLVGNCSFFTDEKRAPKNSPLAFMFVALTRIINLLNNLKNTEGILYTKDDLNALLNEVLKNGTLTYKQTKKLLGLSDDYEFKGEKGTYFIEFKKYKEFIKALGEHNLSQDDLNEIAKDITLIKDEIKLKKALAKYDLNQNQIDSLSKLEFKDHLNISFKALKLITPLMLEGKKYDEACNELNLKVAINEDKKDFLPAFNETYYKDEVTNPVVLRAIKEYRKVLNALLKKYGKVHKINIELAREVGKNHSQRAKIEKEQNENYKAKKDAELECEKLGLKINSKNILKLRLFKEQKEFCAYSGEKIKISDLQDEKMLEIDHIYPYSRSFDDSYMNKVLVFTKQNQEKLNKTPFEAFGNDSAKWQKIEVLAKNLPTKKQKRILDKNYKDKEQKDFKDRNLNDTRYIARLVLNYTKDYLDFLPLSDDENTKLNDTQKGSKVHVEAKSGMLTSALRHTWGFSTKDRNNHLHHAIDAVIIAYANNSIVKAFSDFKKEQESNSAELYAKKISELDYKNKRKFFEPFSGFRQKVLDKIDEIFVSKPERKKPSGALHEETFRKEEEFYQSYGGKEGVLKALELGKIRKVNGKIVKNGDMFRVDIFKHKKTNKFYAVPIYTMDFALKVLPNKAVARSKKGEIKDWILMDENYEFCFSLYKDSLILIQTKDMQEPEFVYYNAFTSSTVSLIVSKHDNKFETLSKNQKILFKNANEKEVIAKSIGIQNLKVFEKYIVSALGEVTKAEFRQREDFKK

SEQ ID NO: 120 - protein, 987 aa, Campylobacter jejuni
  REGION 1..987: note = Campylobacter jejuni subsp. jejuni 1854
MARILAFDIGISSIGWAFSENDELKDCGVRIFTKAENPKTGESLALPRRLARSARKRLARRKARLNHLKHLIANEFKLNYEDYQSFDESLAKAYKGSLISPYELRFRALNELLSKQDFARVILHIAKRRGYDDIKNSDDKEKGAILKAIKQNEEKLANYQSVGEYLYKEYFQKFKENSKEFTNVRNKKESYERCIAQSFLKDELKLIFKKQREFGFSFSKKFEEEVLSVAFYKRALKDFSHLVGNCSFFTDEKRAPKNSPLAFMFVALTRIINLLNNLKNTEGILYTKDDLNTLLNEVLKNGTLTYKQTKKLLGLSDDYEFKGEKGTYFIEFKKYKEFIKSLGDHSLSQDDLNEIAKDITLIKDEIKLKKALAKYDLNQNQIDSLSKLEFKDHLNISFKALKLITPLMLEGKKYDEACNELNLKVAINEDKKDFLPAFNETYYKDEVTNPVVLRAIKEYRKVLNALLKKYGKVHKINIELAREVGKNHSQRAKIEKEQNENYKAKKDAELECEKLGLKINSKNILKLRLFKEQKEFCAYSGEKIKISDLQDEKMLEIDHIYPYSRSFDDSYMNKVLVFTKQNQEKLNQTPFEAFGNDSAKWQKIEVLAKNLPTKKQKRILDKNYKDKEQKNFKDRNLNDTRYIARLVLNYTKDYLDFLPLSDDENTKLNDTQKGSKVHVEAKSGMLTSALRHTWGFSAKDRNNHLHHAIDAVIIAYANNSIVKAFSDFKKEQESNSAELYAKKISELDYKNKRKFFEPFSGFRQKVLDKIDEIFVSKPERKKPSGALHEETFRKEEEFYQSYGGKEGVLKALELGKIRKVNGKIVKNGDMFRVDIFKHKKTNKFYAVPIYTMDFALKVLPNKAVARSKKGEIKDWILMDENYEFCFSLYKDSLILIQTKDMQEPEFVYYNAFTSSTVSLIVSKHDNKFETLSKNQKILFKNANEKEVIAKSIGIQNLKVFEKYIVSALGEVTKAEFRQREDFKNELR

SEQ ID NO: 121 - protein, 984 aa, Campylobacter jejuni
  REGION 1..984: note = Campylobacter jejuni subsp. jejuni 1997-10
MARILAFDIGISSIGWAFSENDELKDCGVRIFTKAENPKTGESLALPRRLARSARKRLARRKARLNRLKHLIANEFKLNYEDYQSFDESLAKAYKGSLISPYELRFRALNELLSKQDFARVILHIAKRRGYDDIKNSDDKEKGAILKAIKQNEEKLANYQSVGEYLYKEYFQKFKENSKEFTNVRNKKESYERCIAQSFLKDELKLIFKKQREFGFSFSKKFEEEVLSVAFYKRALKDFSHLVGNCSFFTDEKRAPKNSPLAFMFVALTRIINLLNNLKNTEGILYTKDDLNALLNEVLKNGTLTYKQTKKLLGLSDDYEFKGEKGTYFIEFKKYKEFIKALGDHSLNQDDLNEIAKDITLIKDEIKLKKALAKYDLNQNQIDSLSKLEFKDHLNISFKALKLITPLMLEGKKYDEACNELNLKVAINEDKKDFLPAFNETYYKDEVTNPVVLRAIKEYRKVLNALLKKYGKVHKINIELAREVGKNYSQRAKIEKEQNENYKAKKDAELECEKLGLKINSKNILKLRLFKEQKEFCVYSGEKIKISDLQDEKMLEIDHIYPYSRSFDDSYMNKVLVFTKQNQEKLNQTPFEAFGNDSAKWQKIEVLAKNLPTKKQKRILDKNYKDKEQKDFKDRNLNDTRYIARLVLNYTKDYLDFLPLSDDENTKLNDTQKGSKVYVEAKSGMLTSALRHTWGFSTKDRNNHLHHAIDAVIIAYANNSIVKAFSDFKKEQESNSAELYAKKISELDYKNKRKFFEPFSGFRQKVLDKIDEIFVSKPERKKPSGALHEETFRKEEEFYQSYGGKEGVLKALELGKIRKVNGKIVKNGDMFRVDIFKHKKTNKFYAVPIYTMDFALKVLPNKAVARSKKGEIKDWILMDENYEFCFSLYKDSLILIQTKDMQEPEFVYYNAFTSSTVSLIVSKHDNKFETLSKNQKILFKNANEKEVIAKSIGIQNLKVFEKYIVSALGEVTKAEFRQREDFKK

SEQ ID NO: 122 - protein, 987 aa, Campylobacter jejuni
  REGION 1..987: note = Campylobacter jejuni subsp. jejuni 2008-1025
MARILAFDIGISSIGWAFSENDELKDCGVRIFTKAENPKTGESLALPRRLARSARKRLARRKARLNHLKHLIANEFKLNYEDYQSFDESLAKAYKGSLISPYELRFRALNELLSKQDFARVILHIAKRRGYDDIKNNGDEEKSEILKAIKQNEEKLVNYQSVGEYLYKEYFQKFKENSKEFINVRNKKESYERCIAQSFLKDELKLIFQKQREFGFSFSKKFEEEVLSVAFYKRALKDFSHLVGNCSFFTDEKRAPKNSPLAFMFVALTRIINLLNNLKNTEGILYTKDDLNTLLNEVLKNGTLTYKQTKKLLGLSDDYEFKGEKGTYFIEFKKYKEFIKALGEHNLSQDNLNEIAKDITLIKDEIKLKKALAKYDLNQNQIDSLSKLEFKDHLNISFKALKLITPLMLEGKKYDEAYNELNLKVAINEDKKDFLPAFNETYYKDEVTNPVVLRAIKEYRKVLNALLKKYGKVHKINIELAREVGKNHSQRAKIEKEQNENYKAKKDAELECEKLGLKINSKNILKLRLFKEQKEFCAYSGEKIKISDLQDEKMLEIDHIYPYSRSFDDSYMNKVLVFTKQNQEKLNQTPFEAFGNDSAKWQKIEVLAKNLPTKKQKRILDKNYKDKEQKDFKDRNLNDTRYIARLVLNYTKDYLDFLPLSDDENTKLNDTQKGSKVHVEAKSGMLTSALRHTWGFSAKDRNNHLHHAIDAVIIAYANNSIVKAFSDFKKEQESNSAELYAKKISELDYKNKRKFFEPFSGFRQKVLDKIDEIFVSKPERKKPSGALHEETFRKEEEFYQSYGGKEGVLKALELGKIRKVNGKIVKNGDMFRVDIFKHKKTNKFYAVPIYTMDFALKVLPNKAVVQGKDKKSGLIKDWILMDENYEFCFSLYKDSLILIQTKDMQEPELVYFNAFTSSTVSLIVSKHDNKFETLSKNQKILFKNANEKEVIAKSIGIQNLKVFEKYIVSALGEVTKAEFRQREDFKK

SEQ ID NO: 123 - protein, 984 aa, Campylobacter jejuni
  REGION 1..984: note = Campylobacter jejuni subsp. jejuni 2008-872
MARILAFDIGISSIGWAFSENDELKDCGVRIFTKVENPKTGESLALPRRLARSARKRLARRKARLNHLKHLIANEFKLNYEDYQSFDESLAKAYKGSLISPYELRFRALNELLSKQDFARVILHIAKRRGYDDIKNSDDKEKGAILKAIKQNEEKLANYQSVGEYLYKEYFQKFKENSKEFTNVRNKKESYERCIAQSFLKDELKLIFKKQREFGFSFSKKFEEEVLSVAFYKRALKDFSHLVGNCSFFTDEKRAPKNSPLAFMFVALTRIINLLNNLKNTEGILYTKDDLNALLNEVLKNGTLTYKQTKKLLGLSDDYEFKGEKGTYFIEFKKYKEFIKALGEHNLSQDDLNEIAKDITLIKDEIKLKKALAKYDLNQNQIDSLSKLEFKDHLNISFKALKLITPLMLEGKKYDEACNELNLKVAINEDKKDFLPAFNETYYKDEVTNPVVLRAIKEYRKVLNALLKKYGKVHKINIELAREVGKNHSQRAKIEKEQNENYKAKKDAELECEKLGLKINSKNILKLRLFKEQKEFCAYSGEKIKISDLQDEKMLEIDHIYPYSRSFDDSYMNKVLVFTKQNQEKLNKTPFEAFGNDSAKWQKIEVLAKNLPTKKQKRILDKNYKDKEQKDFKDRNLNDTRYIARLVLNYTKDYLDFLPLSDDENTKLNDTQKGSKVHVEAKSGMLTSALRHTWGFSTKDRNNHLHHAIDAVIIAYANNSIVKAFSDFKKEQESNSAELYAKKISELDYKNKRKFFEPFSGFRQKVLDKIDEIFVSKPERKKPSGALHEETFRKEEEFYQSYGGKEGVLKALELGKIRKVNGKIVKNGDMFRVDIFKHKKTNKFYAVPIYTMDFALKVLPNKAVARSKKGEIKDWILMDENYEFCFSLYKDSLILIQTKDMQEPEFVYYNAFTSSTVSLIVSKHDNKFETLSKNQKILFKNANEKEVIAKSIGIQNLKVFEKYIVSALGEVTKAEFRQREDFKK

SEQ ID NO: 124 - protein, 987 aa, Campylobacter jejuni
  REGION 1..987: note = Campylobacter jejuni subsp. jejuni 2008-979
MARILAFDIGISSIGWAFSENDELKDCGVRIFTKAENPKTGESLALPRRLARSARKRLARRKARLNHLKHLIANEFKLNYEDYQSFDESLAKAYKGSLISPYELRFRALNELLSKQDFARVILHIAKRRGYDDIKNSDDKEKGAILKAIKQNEEKLVNYQSVGEYLYKEYFQKFKENSKEFTNVRNKKESYERCIAQSFLKDELKLIFKKQREFGFSFSKKFEEEVLSVAFYKRALKDFSHLVGNCSFFTDEKRAPKNSPLAFMFVALTRIINLLNNLKNTEGILYTKDDLNALLNEVLKNGTLTYKQTKKLLGLSDDYEFKGEKGTYFIEFKKYKEFIKALGDHSLSQDDLNEIAKDITLIKDEIKLKKALAKYDLNQNQIDSLSKLEFKDHLNISFKALKLITPLMLEGKKYDEACNELNLKVAINEDKKDFLPAFNETYYKDEVTNPVVLRAIKEYRKVLNALLKKYGKVHKINIELAREVGKNYSQRAKIEKEQNENYKAKKDAELECEKLGLKINSKNILKLRLFKEQKEFCAYSGEKIKISDLQDEKMLEIDHIYPYSRSFDDSYMNKVLVFTKQNQEKLNQTPFEAFGNDSAKWQKIEVLAKNLPTKKQKRILDKNYKDKEQKDFKDRNLNDTRYIARLVLNYTKDYLDFLPLSDDENTKLNDTQKGSKVHVEAKSGMLTSALRHTWGFSAKDRNNHLHHAIDAVIIAYANNSIVKAFSDFKKEQESNSAELYAKKISELDYKNKRKFFEPFSGFRQKVLDKIDEIFVSKPERKKPSGALHEETFRKEEEFYQSYGGKEGVLKALELGKIRKVNGKIVKNGDMFRVDIFKHKKTNKFYAVPIYTMDFALKVLPNKAVARSEKGEIKDWILMDENYEFCFSLYKDSLILIQTKDMQEPELVYFNAFTSSTVSLIVSKHDNKFETLSKNQKILFKNANEKEVIAKSIGIQNLKVFEKYIVSALGEVTKAEFRQREDFKNELR

SEQ ID NO: 125 - protein, 965 aa, Campylobacter jejuni
  REGION 1..965: note = Campylobacter jejuni subsp. jejuni 2008-988
MKIIGFNLGIANIGWALRENDEIIDCGVRVFDIPENPKNGNSLALERRENKARMKIVKRKKARMLATKTFLKKELNVDLSKLFLIGSTQSIYELRAKALSSLISKEELSAIILHIAKHRGYDDSALKNENGTIIEALNKNKETMLKFKSVGEYFYKNFVQNKEVKKIRNTTEDYSNSVPRSLLKQELDLILDKQKELGLIKNADFKEKLFEIIFFKRPLKDFSNKIGNCIFFENEKRAAKNTISACEFVALGKVVNLLKSIEKDIGIVYEKDSINEIMSIILDKTSISYKKIRDILNLPQEINFKGLDYSKNNVENSKLVDLKKLNEFKKALGDGFANLDKDILDSIATDITLTKDTATLKEKLKNYNVLNAEQIEKLSELVFNDHINLSLKALKQIIPLMYEGKRYDEACELCNFTIAKNQEKSEYLPLFEKTRFAKDISSPVVIRAICEFRKLLNDIIRRYGSVHKIHLELTRDFGISFSDRKKIIKEIEQNEQSRIKALETIKELKLEETSKNIQIVRLFEDQKGICPYSGLKMDLNRLDELVIDYIRPYNRSLDDSYSNKVLTFKKLSDLKQGKTPFEAFGEDEKLWAEINERIKEYNGKKRFKIFDKFFKDKKPFDFTEQTLQDTRWLTKLVASYLNEYLSFLPISEDENTALGYGEKGSKQHVILSSGMITQMLRNFWYLGFKNHKDYKNNAMDAIIVAFTTNSIIFAFNNFKKELDLAKAEFYANKISESDYLLKRKFLPPFSGFKEQALEKVKNIFVSHSLKIKNKGTLHDLTPLKIKELKNTYGDLDLAVKLGKIRKYNDKYYANANGSLVRADLFVDKKNKFHAVSIYKADFSTKKLPNKTPATTSNGETKEGIEMNENYNFCMSLYKNTPISVKIKGMKEPIICYYHGFNTSGSKITYKKHDNNYHNLSEDEMVVFRKNDKESIAVGKILEIKKYSISPSGELSLIENEERKWF

SEQ ID NO: 126 - protein, 984 aa, Campylobacter jejuni
  REGION 1..984: note = Campylobacter jejuni subsp. jejuni 2008-988
MARILAFDIGISSIGWAFSENDELKDCGVRIFTKVENPKTGESLALPRRLARSARKRLARRKARLNHLKHLIANEFKLNYEDYQSFDESLAKAYKGSLISPYELRFRALNELLSKQDFARVILHIAKRRGYDDIKNSDDKEKGAILKAIKQNEEKLANYQSVGEYLYKEYFQKFKENSKEFTNVRNKKESYERCIAQSFLKDELKLIFKKQREFGFSFSKKFEEEVLSVAFYKRALKDFSHLVGNCSFFTDEKRAPKNSPLAFMFVTLTRIINLLNNLKNTEGILYTKDDLNALLNEVLKNGTLTYKQTKKLLGLSDDYEFKGEKGTYFIEFKKYKEFIKALGEHNLSQDDLNEIAKDITLIKDEIKLKKALAKYDLNQNQIDSLSKLEFKDHLNISFKALKLITPLMLEGKKYDEACNELNLKVAINEDKKDFLPAFNETYYKDEVTNPVVLRAIKEYRKVLNALLKKYGKVHKINIELAREVGKNHSQRAKIEKEQNENYKAKKDAELECEKLGLKINSKNILKLRLFKEQKEFCAYSGEKIKISDLQDEKMLEIDHIYPYSRSFDDSYMNKVLVFTKQNQEKLNKTPFEAFGNDSAKWQKIEVLAKNLPTKKQKRILDKNYKDKEQKDFKDRNLNDTRYIARLVLNYTKDYLDFLPLSDDENTKLNDTQKGSKVHVEAKSGMLTSALRHTWGFSTKDRNNHLHHAIDAVIIAYANNSIVKAFSDFKKEQESNSAELYAKKISELDYKNKRKFFEPFSGFRQKVLDKIDEIFVSKPERKKPSGALHEETFRKEEEFYQSYGGKEGVLKALELGKIRKVNGKIVKNGDMFRVDIFKHKKTNKFYAVPIYTMDFALKVLPNKAVARSKKGEIKDWILMDENYEFCFSLYKDSLILIQTKDMQEPEFVYYNAFTSSTVSLIVSKHDNKFETLSKNQKILFKNANEKEVIAKSIGIQNLKVFEKYIVSALGEVTKAEFRQREDFKK

SEQ ID NO: 127 - protein, 961 aa, Campylobacter jejuni
  REGION 1..961: note = Campylobacter jejuni subsp. jejuni 260.94
MARILAFDIGISSIGWAFSENDELKDCGVRIFTKAENPKTGESLALPRRLARSARKRLARRKARLNHLKHLIANEFKLNYEDYQSFDESLAKAYKGSLISPYELRFRALNELLSKQDFARVILHIAKRRGYDDIKNNGDEEKGKILKAIKQNEEKLVNYQSVGEYLYKEYFQKFKENSKEFINVRNKKESYERCITQSFLKYELKLIFQKQREFGFSFSKKFEEEVLSVAFYKRALKDFSHLVGNCSFFSDEKRAPKNSPLAFMFVALTRIINLLNNLKNTEGILYTKDDLNALLNEVLKNGTLTYKQTKKLLGLSDDYEFKGEKGTYFIEFKKYKEFIKALGEHNLSQDDLNEIAKDITLIKDEIKLKKALAKYDLNQNQIDSLSKLEFKDHLNIGFKALKLITPLMLEGKKYDEACNELNLKVAINEDKKDFLPAFNETYYKDEVTNPVVLRAIKEYRKVLNALLKKYGKVHKINIELAREVGKNHSQRAKIEKEQNENYKAKKDAELECEKLGLKINSKNILKLRLFKEQKEFCAYSGEKIKLSDLQDEKMLEIDHIYPYSRSFDDSYMNKVLVFTKQNQEKLNKTPFEAFGNDNVKWQKIEVLAKNLPEKKQKRILDKNYKDKEQKDFKDRNLNDTRYIARLVLNYTKDYLDFLPLSDDENTKLKGSKVHVEAKSGMLTSALRHTWGFSTKDRNNHLHHAIDAAIIAYANNSIVKDFSDFKKEQESNSAELYAKKISELDYKNKRKFFEPFSGFRQKVLDKIDEIFVSKPERKKPSGALHEETFRKEEEFYQSYGGKEGVLKALELGKIRKVNGKIVKNGDMFRVDIFKHKKTNKFYAVPIYTMDFALKVLPNKAVARSKKGEIKDWILMDENYEFCFSLYKDSLILIQTKDMQEPELVYFNAFTSSTVSLIVSKHDNKFETLSKNLKVFEKYIVSALGEVTKAEFRQREDFKNELR

SEQ ID NO: 128 - protein, 985 aa, Campylobacter jejuni
  REGION 1..985: note = Campylobacter jejuni subsp. jejuni 414
MAKILAFDIGISSIGWAFVENDELKDCGVRIFTKAENPKTGESLALPRRLARSARKRLARRKARLNHLKHLIANEFKLNYEDYQSFDESLAKAYKGTLISPYELRFKALNELLSKQDLARVILHIAKRRGYDNIKNSDDKEKGAILKAVKENEEKLANYKSVGEYLYKEYFQKFKENSKEFINVRNKKESYERCIAQSFLKDELKLIFQKQREFGFNFSKKFEEEVLSVAFYKRALKDFSHLVGNCSFFVDEKRAPKNSPLAFEFVALTRIVNLLNNLNKNNSYIKDDLNALLSEVLKNGTLTYKQTKKILGLSDDYEFKGQKGNYFIEFKKYKEFIKALCEHNLNQDDLNEIAKDITLVKDETKLKKALAKYDLNQNQIENLSKIEFKDHLNISFKALKLIVPLMREGKKYDEVCNELNLKTAINEDKKEFLPAFNETYYKDEVNNPVVLRAIKEYRKVLNSLLKKYGKVHKINIELAREVGKNHRERSKIEKEQNENFKAKKDAELECEKLGLKINSKNILKLRLFKEQKEFCVYSGEKIKISDLQDEKMLEIDHIYPYSRSFDDSYMNKVLVFTKQNQEKLNKTPFEAFGKDDVKWQKIETLAKNLPAKKQKRILDKNYKDKEQKDFKDRNLNDTRYIARLVLNYTKDYLEFLPLSDDENIKLNDTQKGSKVHVEAKSGMLTSVLRHTWGFSTKDRNNHLHHAIDAVIIAYANASVVKAFSDFKKEQENYTAELYAKKINELDFKNKRKFFEPFSNFRQKVLEKIDEIFVSKPERKKPSGALHEETFYKEEEFYKEYGGKEGVLKALELGKIRKVNGKIVSNANMFRVDIFKYKKTNKFYAVPIYTMDFALGILPNKAVVGGKDKQGIIKDWLLMDENYEFCFSLYKDSLILLQTKDMQEPELVYFKSFKSSTAGLVVSKHDNKFENLNENQKKLFKSANEKKVVAEGIGIQNLKVFEKYIVSALGEITKAEIKERENFKKK

SEQ ID NO: 129 - protein, 984 aa, Campylobacter jejuni
  REGION 1..984: note = Campylobacter jejuni subsp. jejuni 51037
MARILAFDIGISSIGWAFSENDELKDCGVRIFTKAENPKTGESLALPRRLARSARKRLARRKARLNHLKHLIANEFKLNYEDYQSFDESLAKAYKGSLISPYELRFRALNELLSKQDFARVILHIVKRRGYDDIKNSDDKEKGTILKAIKQNEEKLANYQSVGEYLYKEYFQKFKENSKEFTNVRNKKESYERCIAQSFLKDELKLIFKKQREFGFSFSKKFEEEVLSVAFYKRALKDFSHLVGNCSFFTDEKRAPKNSPLAFMFVALTRIINLLNNLKNTEGILYTKDDLNTLLNEVLKNGTLTYKQTKKLLGLSDDYEFKGEKGTYFIEFKKYKEFIKALGEHNLSQDDLNEIAKDITLIKDEIKLKKALAKYDLNQNQIDSLSKLEFKDHLNISFKALKLITPLMLEGKKYDEACNELNLKVAINEDKKDFLPAFNETYYKDEVTNPVVLRAIKEYRKVLNALLKKYGKVHKINIELAREVGKNYSQRAKIEKEQNENYKAKKDAELECEKLGLKINSKNILKLRLFKEQKEFCAYSGEKIKISDLQDEKMLEIDHIYPYSRSFDDSYMNKVLVFTKQNQEKLNQTPFEAFGNDSAKWQKIEVLAKNLPTKKQKRILDKNYKDKEQKDFKDRNLNDTRYIARLVLNYTKDYLDFLPLSDDENTKLNDTQKGSKVHVEAKSGMLTSALRHTWGFSAKDRNNHLHHAIDAVIIAYANNSIVKAFSDFKKEQESNSAELYAKKISELDYKNKRKFFEPFSGFRQKVLDKIDEIFVSKPERKKPSGALHEETFRKEEEFYQSYGGKEGVLKALELGKIRKVNGKIVKNGDMFRVDIFKHKKTNKFYAVPIYTMDFALKVLPNKAVARSKKGEIKDWILMDENYEFCFSLYKDSLILIQTKDMQEPEFVYYNAFTSSTVSLIVSKHDNKFETLSKNQKILFKNANEKEVIAKSIGIQNLKVFEKYIVSALGEVTKAEFRQREDFKK

SEQ ID NO: 130 - protein, 984 aa, Campylobacter jejuni
  REGION 1..984: note = Campylobacter jejuni subsp. jejuni 51494
MARILAFDIGISSIGWAFSENDELKDCGVRIFTKAENPKTGESLALPRRLARSARKRLARRKARLNHLKHLIANEFKLNYEDYQSFDESLAKAYKGSLISPYELRFRALNELLSKQDFARVILHIAKRRGYDDIKNSDDKEKGAILKAIKQNEEKLANYQSVGEYLYKEYFQKFKENSKEFTNVRNKKESYERCIAQSFLKDELKLIFKKQREFGFSFSKKFEEEVLSVAFYKRALKDFSHLVGNCSFFTDEKRAPKNSPLAFMFVALTRIINLLNNLKNTEGILYTKDDLNTLLNEVLKNGTLTYKQTKKLLGLSDDYEFKGEKGTYFIEFKKYKEFIKALGEHNLSQDDLNEIAKDITLIKDEIKLKKALAKYDLNQNQIDSLSKLEFKDHLNISFKALKLITPLMLEGKKYDEACNELNLKVAINEDKKDFLPAFNETYYKDEVTNPVVLRAIKEYRKVLNALLKKYGKVHKINIELAREVGKNYSQRAKIEKEQNENYKAKKDAELECEKLGLKINSKNILKLRLFKEQKEFCAYSGEKIKISDLQDEKMLEIDHIYPYSRSFDDSYMNKVLVFTKQNQEKLNKTPFEAFGNDSTKWQKIEVLAKNLPEKKQKRILDKNYKDKEQKDFKDRNLNDTRYIARLVLNYTKDYLDFLPLSDDENTKLNDTQKGLKVHVEAKSGMLTSALRHTWGFSAKDRNNHLHHAIDAVIIAYANNSIVKAFSDFKKEQESNSAELYAKKISELDYKNKRKFFEPFSGFRQKVLDKIDEIFVSKPERKKPSGALHEETFRKEEEFYQSYGGKEGVLKALELGKIRKVNGKIVKNGDMFRVDIFKHKKTNKFYAVPIYTMDFALKVLPNKAVARSKKGEIKDWILMDENYEFCFSLYKDSLILIQTKDMQEPEFVYYNAFTSSTVSLIVSKHDNKFETLSKNQKILFKNANEKEVIAKSIGIQNLKVFEKYIVSALGEVTKAEFRQREDFKK

SEQ ID NO: 131 - protein, 987 aa, Campylobacter jejuni
  REGION 1..987: note = Campylobacter jejuni subsp. jejuni 53161
MARILAFDIGISSIGWAFSENDELKDCGVRIFTKAENPKTGESLALPRRLARSARKRLARRKARLNHLKHLIANEFKLNYEDYQSFDEGLAKAYKGSLISPYELRFRALNELLSKQDFARVILHIAKRRGYDDIKNNGDEEKSEILKAIKQNEEKLVNYQSVGEYLYKEYFQKFKENSKEFINVRNKKESYERCIAQSFLKDELKLIFQKQREFGFSFSKKFEEEVLSVAFYKRALKDFSHLVGNCSFFTDEKRAPKNSPLAFMFVALTRIINLLNNLKNTEGILYTKDDLNTLLNEVLKNGTLTYKQTKKLLGLSDDYEFKGEKGTYFIEFKKYKEFIKALGEHNLSQDNLNEIAKDITLIKDEIKLKKALAKYDLNQNQIDSLSKLEFKDHLNISFKALKLITPLMLEGKKYDEAYNELNLKVAINEDKKDFLPAFNETYYKDEVTNPVVLRAIKEYRKVLNALLKKYGKVHKINIELAREVGKNHSQRAKIEKEQNENYKAKKDAELECEKLGLKINSKNILKLRLFKEQKEFCAYSGEKIKISDLQDEKMLEIDHIYPYSRSFDDSYMNKVLVFTKQNQEKLNQTPFEAFGNDSAKWQKIEVLAKNLPTKKQKRILDKNYKDKEQKDFKDRNLNDTRYIARLVLNYTKDYLDFLPLSDDENTKLNDTQKGSKVHVEAKSGMLTSALRHTWGFSAKDRNNHLHHAIDAVIIAYANNSIVKAFSDFKKEQESNSAELYAKKISELDYKNKRKFFEPFSGFRQKVLDKIDEIFVSKPERKKPSGALHEETFRKEEEFYQSYGGKEGVLKALELGKIRKVNGKIVKNGDMFRVDIFKHKKTNKFYAVPIYTMDFALKVLPNKAVVQGKDKKSGLIKDWILMDENYEFCFSLYKDSLILIQTKDMQEPELVYFNAFTSSTVSLIVSKHDNKFETLSKNQKILFKNANEKEVIAKSIGIQNLKVFEKYIVSALGEVTKAEFRQREDFKK

SEQ ID NO: 132 - protein, 984 aa, Campylobacter jejuni
  REGION 1..984: note = Campylobacter jejuni subsp. jejuni 60004
MARILAFDIGISSIGWAFSENDELKDCGVRIFTKAENPKTGESLALPRRLARSARKRLARRKARLNHLKHLIANEFKLNYEDYQSFDESLAKAYKGSLISPYELRFRALNELLSKQDFARVILHIAKRRGYDDIKNNGDEEKGKILKAIKQNEEKLVNYQSVGEYLYKEYFQKFKENSKEFINVRNKKESYERCITQSFLKYELKLIFQKQREFGFSFSKKFEEEVLSVAFYKRALKDFSHLVGNCSFFTDEKRAPKNSPLAFMFVALTRIINILNNLKNTEGILYTKDDLNALLNEVLKNGTLTYKQTKKLLGLSDDYEFKGEKGTYFIEFKKYKEFIKALGEHNLSQDDLNEIAKDITLIKDEIKLKKALAKYDLNQNQIDSLSKLEFKDHLNISFKALKLITPLMLEGKKYDEACNELNLKVAINEDKKDFLPAFNETYYKDEVTNPVVLRAIKEYRKILNALLKKYGKVHKINIELAREVGKNHSQRAKIEKEQNENYKAKKDAEIECEKLGLKINSKNILKLRLFKEQKEFCAYSGEKIKISDLQDEKMLEIDHIYPYSRSFDDSYMNKVLVFTKQNQEKLNQTPFEAFGNDSAKWQKIEVLAKNLPTKKQKRILDKNYKDKEQKDFKDRNLNDTRYIARLVLNYTKDYLDFLPLSDDENTKLNDTQKGSKVHVEAKSGMLTSALRHTWGFSAKDRNNHLHHAIDAVIIAYANNSIVKAFSDFKKEQESNSAELYAKKISELDYKNKRKFFEPFSGFRQKVLDKIDEIFVSKPERKKPSGALHEETFRKEEEFYQSYGGKEGVLKALELGKIRKVNGKIVKNGDMFRVDIFKHKKTNKFYAVPIYTMDFALKVLPNKAVARSKKGEIKDWILMDENYEFCFSLYKDSLILIQTKDMQEPEFVYYNAFTSSTVSLIVSKHDNKFETLSKNQKILFKNANEKEVIAKSIGIQNLKVFEKYIVSALGEVTKAEFRQREDFKK

SEQ ID NO: 133 - protein, 984 aa, Campylobacter jejuni
MARILAFDIGISSIGWAFSENDELKDCGVRIFTKAENPKTGESLALPRRLARSARKRLARRKARLNHLKHLIANEFKLNYEDYQSFDESLAKAYKGSLISPYELRFRALNELLSKQDFARVILHIAKRRGYDDIKNNGDEEKSEILKAIKQNEEKLVNYQSVGEYLYKEYFQKFKENSKEFINVRNKKESYERCITQSFLKDELKLIFQKQREFGFSFSKKFEEEVLSVAFYKRALKDFSHLVGNCSFFTDEKRAPKNSPLAFMFVALTRIINILNNLKNTEGILYTKDDLNALLNEVLKNGTLTYKQTKKLLGLSDDYEFKGEKGTYFIEFKKYKEFIKALGEHNLSQDDLNEIAKDITLIKDEIKLKKALAKYDLNQNQIDSLSKLEFKDHLNISFKALKLITPLMLEGKKYDEACNELNLKVAINEDKKDFLPAFNETYYKDEVTNPVVLRAIKEYRKILNALLKKYGKVHKINIELAREVGKNHSQRAKIEKEQNENYKAKKDAEIECEKLGLKINSKNILKLRLFKEQKEFCAYSGEKIKLSDLQDEKMLEIDHIYPYSRSFDDSYMNKVLVFTKQNQEKLNKTPFEAFGNDSTKWQKIEVLAKNLPEKKQKRILDKNYKDKEQKDFKDRNLNDTRYIARLVLNYTKDYLDFLPLSDDENTKLNDTQKGSKVHVEAKSGMLTSALRHTWGFSAKDRNNHLHHAIDAAIIAYANNSIVKAFSDFKKEQESNSVELYAKKISELDYKNKRKFFEPFSGFRQKVLDKIDEIFVSKPERKKPSGALHEETFRKEEEFYQSYGGKEGVLKALELGKIRKVNGKIVKNGDMFRVDIFKHKKTNKFYAVPIYTMDFALKVLPNKAVARSKKGEIKDWILMDENYEFCFSLYKDSLILIQTKDMQEPELVYFNAFTSSTVSLIVSKHDNKFETLSKNQKILFKNANEKEVIAKSIGIQNLKVFEKYIVSALGEVTKAEFRQREDFKK

SEQ ID NO: 134 - protein, 984 aa, Campylobacter jejuni
  REGION 1..984: note = Campylobacter jejuni subsp. jejuni 84-25
MVRILAFDIGISSIGWAFSENDELKDCGVRIFTKVENPKTGESLALPRRLARSARKRLARRKARLNHLKHLIANEFKLNYEDYQSFDESLAKAYKGSLISPYELRFRALNELLSKQDFARVILHIAKRRGYDDIKNSDDKEKGAILKAIKQNEEKLANYQSVGEYLYKEYFQKFKENSKEFTNVRNKKESYERCIAQSFLKDELKLIFKKQREFGFSFSKKFEEEVLSVAFYKRALKDFSHLVGNCSFFTDEKRAPKNSPLAFMFVALTRIINLLNNLKNTEGILYTKDDLNALLNEVLKNGTLTYKQTKKLLGLSDDYEFKGEKGTYFIEFKKYKEFIKALGEHNLSQDDLNEIAKDITLIKDEIKLKKALAKYDLNQNQIDSLSKLEFKDHLNISFKALKLITPLMLEGKKYDEACNELNLKVAINEDKKDFLPAFNETYYKDEVTNPVVLRAIKEYRKVLNALLKKYGKVHKINIELAREVGKNHSQRAKIEKEQNENYKAKKDAELECEKLGLKINSKNILKLRLFKEQKEFCAYSGEKIKISDLQDEKMLEIDHIYPYSRSFDDSYMNKVLVFTKQNQEKLNKTPFEAFGNDSAKWQKIEVLAKNLPTKKQKRILDKNYKDKEQKDFKDRNLNDTRYIARLVLNYTKDYLDFLPLSDDENTKLNDTQKGSKVHVEAKSGMLTSALRHTWGFSTKDRNNHLHHAIDAVIIAYANNSIVKAFSDFKKEQESNSAELYAKKISELDYKNKRKFFEPFSGFRQKVLDKIDEIFVSKPERKKPSGALHEETFRKEEEFYQSYGGKEGVLKALELGKIRKVNGKIVKNGDMFRVDIFKHKKTNKFYAVPIYTMDFALKVLPNKAVARSKKGEIKDWILMDENYEFCFSLYKDSLILIQTKDMQEPEFVYYNAFTSSTVSLIVSKHDNKFETLSKNQKILFKNANEKEVIAKSIGIQNLKVFEKYIVSALGEVTKAEFRQREDFKK

SEQ ID NO: 135 - protein, 984 aa, Campylobacter jejuni
  REGION 1..984: note = Campylobacter jejuni subsp. jejuni 87459
MARILAFDIGISSIGWAFSENDELKDCGVRIFTKAENPKTGESLALPRRLARSARKRLARRKARLNHLKHLIANEFKLNYEDYQSFDESLAKAYKGSLISPYELRFRALNELLSKQDFARVILHIAKRRGYDDIKNSDDKEKGAILKAIKQNEEKLANYQSVGEYLYKEYFQKFKENSKEFTNVRNKKESYERCIAQSFLKDELKLIFKKQREFGFSFSKKFEEEVLSVAFYKRALKDFSHLVGNCSFFTDEKRAPKNSPLAFMFVALTRIINLLNNLKNTEGILYTKDDLNTFLNEVLKNGTLTYKQTKKLLGLSDDYEFKGEKGTYFIEFKKYKEFIKALGDHNLSQDDLNEIAKDITLIKDEIKLKKALAKYDLNQNQIDSLSKLEFKDHLNISFKALKLITPLMLEGKKYDEACNELNLKVAINEDKKDFLPAFNETYYKDEVTNPVVLRAIKEYRKVLNALLKKYGKVHKINIELAREVGKNHSQRAKIEKEQNENYKAKKDAELECEKLGLKINSKNILKLRLFKEQKEFCAYSGEKIKISDLQDEKMLEIDHIYPYSRSFDDSYMNKVLVFTKQNQEKLNKTPFEAFGNDSAKWQKIEVLAKNLPTKKQKRILDKNYKDKEQKDFKDRNLNDTRYIARLVLNYTKDYLDFLPLSDDENTKLNDTQKGSKVHVEAKSGMLTSALRHTWGFSTKDRNNHLHHAIDAVIIAYANNSIVKAFSDFKKEQESNSAELYAKKISELDYKNKRKFFEPFSGFRQKVLDKIDEIFVSKPERKKPSGALHEETFRKEEEFYQSYGGKEGVLKALELGKIRKVNGKIVKNGDMFRVDIFKHKKTNKFYAVPIYTMDFALKVLPNKAVARSKKGEIKDWILMDENYEFCFSLYKDSLILIQTKDMQEPEFVYYNAFTSSTVSLIVSKHDNKFETLSKNQKILFKNANEKEVIAKSIGIQNLKVFEKYIVSALGEVTKAEFRQREDFKK

SEQ ID NO: 136 - protein, 984 aa, Campylobacter jejuni
  REGION 1..984: note = Campylobacter jejuni subsp. jejuni ATCC 33560
MARILAFDIGISSIGWAFSENDELKDCGVRIFTKAENPKTGESLALPRRLARSARKRLARRKARLNHLKHLIANEFKLNYEDYQSFDESLAKAYKGSLISPYELRFRALNELLSKQDFARVILHIAKRRGYDDIKNSDDKEKGAILKAIKQNEEKLANYQSVGEYLYKEYFQKFKENSKEFTNVRNKKESYERCIAQSFLKDELKLIFKKQREFGFSFSKKFEEEVLSVAFYKRALKDFSHLVGNCSFFTDEKRAPKNSPLAFMFVALTRIINLLNNLKNTEGILYTKDDLNALLNEVLKNGTLTYKQTKKLLGLSDDYEFKGEKGTYFIEFKKYKEFIKALGDHSLSQDDLNEIAKDITLIKDEIKLKKALAKYDLNQNQIDSLSKLEFKDHLNISFKALKLITPLMLEGKKYDEACNELNLKVAINEDKKDFLPAFNETYYKDEVTNPVVLRAIKEYRKVLNALLKKYGKVHKINIELAREVGKNYSQRAKIEKEQNENYKAKKDAELECEKLGLKINSKNILKLRLFKEQKEFCAYSGEKIKISDLQDEKMLEIDHIYPYSRSFDDSYMNKVLVFTKQNQEKLNQTPFEAFGNDSAKWQKIEVLAKNLPTKKQKRILDKNYKDKEQKNFKDRNLNDTRYIARLVLNYTKDYLDFLPLSDDENTKLNDTQKGSKVHVEAKSGMLTSALRHTWGFSAKDRNNHLHHTIDAVIIAYANNSIVKAFSDFKKEQESNSAELYAKKISELDYKNKRKFFEPFSGFRQKVLDKIDEIFVSKPERKKPSGALHEETFRKEEEFYQSYGGKEGVLKALELGKIRKVNGKIVKNGDMFRVDIFKHKKTNKFYAVPIYTMDFALKVLPNKAVARSKKGEIKDWILMDENYEFCFSLYKDSLILIQTKDMQEPEFVYYNAFTSSTVSLIVSKHDNKFETLSKNQKILFKNANEKEVIAKSIGIQNLKVFEKYIVSALGEVTKAEFRQREDFKK

SEQ ID NO: 137 - protein, 987 aa, Campylobacter jejuni
  REGION 1..987: note = Campylobacter jejuni subsp. jejuni CF93-6
MARILAFDIGISSIGWAFSENDELKDCGVRIFTKVENPKTGESLALPRRLARSARKRLARRKARLNHLKHLIANEFKLNYEDYQSFDESLAKAYKGSLISPYELRFRALNELLSKQDFARVILHIAKRRGYDDIKNSDDKEKGAILKAIKQNEEKLANYQSVGEYLYKEYFQKFKENSKEFTNVRNKKESYERCIAQSFLKDELKLIFKKQREFGFSFSKKFEEEVLSVAFYKRALKDFSHLVGNCSFFTDEKRVPKNSPLAFMFVALTRIINLLNNLKNTEGILYTKDDLNALLNEVLKNGTLTYKQTKKLLGLSDDYEFKGEKGTYFIEFKKYKEFIKALGEHNLSQDDLNEIAKDITLIKDEIKLKKALAKYDLNQNQIDSLSKLEFKDHLNISFKALKLITPLMLEGKKYDEACNELNLKVAINEDKKDFLPAFNETYYKDEVTNPVVLRAIKEYRKVLNALLKKYGKVHKINIELAREVGKNHSQRAKIEKEQNENYKAKKDAELECEKLGLKINSKNILKLRLFKEQKEFCAYSGEKIKISDLQDEKMLEIDHIYPYSRSFDDSYMNKVLVFTKQNQEKLNQTPFEAFGNDSAKWQKIEVLAKNLPTKKQKRILDKNYKDKEQKNFKDRNLNDTRYIARLVLNYTKDYLDFLPLSDDENTKLNDTQKGSKVHVEAKSGMLTSALRHTWGFSAKDRNNHLHHAIDAVIIAYANNSIVKAFSDFKKEQESNSAELYAKKISELDYKNKRKFFEPFSGFRQKVLDKIDEIFVSKPERKKPSGALHEETFRKEEEFYQSYGGKEGVLKALELGKIRKVNGKIVKNGDMFRVDIFKHKKTNKFYGVPIYTMDFALKVLPNKAVARSKKGEIKDWILMDENYEFCFSLYKDSLILIQTKDMQEPEFVYYNAFTSSTVSLIVSKHDNKFETLSKNQKILFKNANEKEVIAKSIGIQNLKVFEKYIVSALGEVTKAEFRQREDFKNELR

SEQ ID NO: 138 - protein, 984 aa, Campylobacter jejuni
  REGION 1..984: note = Campylobacter jejuni subsp. jejuni CG8486
MARILAFDIGISSIGWAFSENDELKDCGVRIFTKAENPKTGESLALPRRLARSARKRLARRKARLNHLKHLIANEFKLNYEDYQSFDESLAKAYKGSLISPYELRFRALNELLSKQDFARVILHIAKRRGYDDIKNSDDKEKGAILKAIKQNEEKLANYQSVGEYLYKEYFQKFKENSKEFTNVRNKKESYERCIAQSFLKDELKLIFKKQREFGFSFSKKFEEEVLSVAFYKRALKDFSHLVGNCSFFTDEKRAPKNSPLAFMFVALTRIINLLNNLKNTEGILYTKDDLNALLNEVLKNGTLTYKQTKKLLGLSDDYEFKGEKGTYFIEFKKYKEFIKALGDHSLSQDDLNEIAKDITLIKDEIKLKKALAKYDLNQNQIDSLSKLEFKDHLNISFKALKLITPLMLEGKKYDEACNELNLKVAINEDKKDFLPAFNETYYKDEVTNPVVLRAIKEYRKVLNALLKKYGKVHKINIELAREVGKNYSQRAKIEKEQNENYKAKKDAELECEKLGLKINSKNILKLRLFKEQKEFCAYSGEKIKISDLQDEKMLEIDHIYPYSRSFDDSYMNKVLVFTKQNQEKLNQTPFEAFGNDSAKWQKIEVLAKNLPTKKQKRILDKNYKDKEQKDFKDRNLNDTRYIARLVLNYTKDYLDFLPLSDDENTKLNDTQKGSKVHVEAKSGMLTSALRHTWGFSAKDRNNHLHHAIDAVIIAYANNSIVKAFSDFKKEQESNSAELYAKKISELDYKNKRKFFEPFSGFRQKVLDKIDEIFVSKPERKKPSGALHEETFRKEEEFYQSYGGKEGVLKALELGKIRKVNGKIVKNGDMFRVDIFKHKKTNKFYAVPIYTMDFALKVLPNKAVARSKKGEIKDWILMDENYEFCFSLYKDSLILIQTKDMQEPEFVYYNAFTSSTVSLIVSKHDNKFETLSKNQKILFKNANEKEVIAKSIGIQNLKVFEKYIVSALGEVTKAEFRQREDFKK

SEQ ID NO: 139 - protein, 984 aa, Campylobacter jejuni
  REGION 1..984: note = Campylobacter jejuni subsp. jejuni HB93-13
MARILAFDIGISSIGWAFSENDELKDCGVRIFTKVENPKTGESLALPRRLARSARKRLARRKARLNHLKHLIANEFKLNYEDYQSFDESLAKAYKGSLISPYELRFRALNELLSKQDFARVILHIAKRRGYDDIKNSDDKEKGAILKAIKQNEEKLANYQSVGEYLYKEYFQKFKENSKEFTNVRNKKESYERCIAQSFLKDELKLIFKKQREFGFSFLKKFEEEVLSVAFYKRALKDFSHLVGNCSFFTDEKRAPKNSPLAFMFVALTRIINLLNNLKNTEGILYTKDDLNALLNEVLKNGTLTYKQTKKLLGLSDDYEFKGEKGTYFIEFKKYKEFIKALGEHNLSQDDLNEIAKDITLIKDEIKLKKALAKYDLNQNQIDSLSKLEFKDHLNISFKALKLITPLMLEGKKYDEAYNELNLKVAINEDKKDFLPAFNETYYKDEVTNPVVLRAIKEYRKVLNALLKKYGKVHKINIELAREVGKNHSQRAKIEKEQNENYKAKKDAELECEKLGLKINSKNILKLRLFKEQKEFCAYSGEKIKISDLQDEKMLEIDHIYPYSRSFDDSYMNKVLVFTKQNQEKLNQTPFEAFGNDSAKWQKIEVLAKNLPTKKQKRILDKNYKDKEQKDFKDRNLNDTRYIARLVLNYTKDYLDFLPLSDDENTKLNDTQKGSKVHVEAKSGMLTSALRHTWGFSAKDRNNHLHHAIDAVIIAYANNSIVKAFSDFKKEQESNSAELYAKKISELDYKNKRKFFEPFSGFRQKVLDKIDEIFVSKPERKKPSGALHEETFRKEEEFYQSYGGKEGVLKALELGKIRKVNGKIVKNGDMFRVDIFKHKKTNKFYAVPIYTMDFALKVLPNKAVARSKKGEIKDWILMDENYEFCFSLYKDSLILIQTKDMQEPELVYFNAFTSSTVSLIVSKHDNKFETLSKNQKILFKNANEKEVIAKSIGIQNLKVFEKYIVSALGEVTKAEFRQREDFKK

SEQ ID NO: 140 - protein, 987 aa, Campylobacter jejuni
  REGION 1..987: note = Campylobacter jejuni subsp. jejuni LMG 23210
MARILAFDIGISSIGWAFSENDELKDCGVRIFTKAENPKTGESLALPRRLARSARKRLARRKARLNHLKHLIANEFKLNYEDYQSFDESLAKAYKGSLISPYELRFRALNELLSKQDFARVILHIAKRRGYDDIKNSDDKEKGAILKAIKQNEEKLANYQSVGEYLYKEYFQKFKENSKEFTNVRNKKESYERCIAQSFLKDELKLIFKKQREFGFSFSKKFEEEVLSVAFYKRALKDFSHLVGNCSFFTDEKRAPKNSPLAFMFVALTRIINLLNNLKNTEGILYTKDDLNALLNEVLKNGTLTYKQTKKLLGLSDDYEFKGEKGTYFIEFKKYKEFIKALGDHSLSQDDLNEIAKDITLIKDEIKLKKALVKYDLNQNQIDSLSKLEFKDHLNISFKALKLITPLMLEGKKYDEACNELNLKVAINEDKKDFLPAFNETYYKDEVTNPVVLRAIKEYRKVLNALLKKYGKVHKINIELAREVGKNYSQRAKIEKEQNENYKAKKDAELECEKLGLKINSKNILKLRLFKEQKEFCAYSGEKIKISDLQDEKMLEIDHIYPYSRSFDDSYMNKVLVFTKQNQEKLNQTPFEAFGNDSAKWQKIEVLAKNLPTKKQKRILDKNYKDKEQKDFKDRNLNDTRYIARLVLNYTKDYLDFLPLSDDENTKLNDTQKGSKVHVEAKSGMLTSALRHTWGFSAKDRNNHLHHAIDAVIIAYANNSIVKAFSDFKKEQESNSAELYAKKISELDYKNKRKFFEPFSGFRQKVLDKIDEIFVSKPERKKPSGALHEETFRKEEEFYQSYGGKEGVLKALELGKIRKVNGKIVKNGDMFRVDIFKHKKTNKFYAVPIYTMDFALKVLPNKAVARSKKGEIKDWILMDENYEFCFSLYKDSLILIQTKDMQEPELVYFNAFTSSTVSLIVSKHDNKFETLSKNQKILFKNANEKEVIAKSIGIQNLKVFEKYIVSALGEVTKAEFRQREDFKNELR

SEQ ID NO: 141 - protein, 984 aa, Campylobacter jejuni
  REGION 1..984: note = Campylobacter jejuni subsp. jejuni LMG 23211
MARILAFDIGISSIGWAFSENDELKDCGVRIFTKAENPKTGESLALPRRLARSARKRLARRKARLNHLKHLIANEFKLNYEDYQSFDESLAKAYKGSLISPYELRFRALNELLSKQDFARVILHIAKRRGYDDIKNNGDEEKSEILKAIKQNEEKLVNYQSVGEYLYKEYFQKFKENSKEFINVRNKKESYERCITQSFLKDELKLIFQKQREFGFSFSKKFEEEVLSVAFYKRALKDFSHLVGNCSFFTDEKRAPKNSPLAFMFVALTRIINLLNNLKNTEGILYTKDDLNALLNEVLKNGTLTYKQTKKLLGLSDDYEFKGEKGTYFIEFKKYKEFIKALDEHSLSQDDLNEIAKDITLIKDEIKLKKALAKYDLNQNQIDSLSKLEFKDHLNISFKALKLITPLMLEGKKYDEACNELNLKVAINEDKKDFLPAFNETYYKDEVTNPVVLRAIKEYRKILNALLKKYGKVHKINIELAREVGKNHSQRAKIEKEQNENYKAKKDAEIECEKLGLKINSKNILKLRLFKEQKEFCAYSGEKIKISDLQDEKMLEIDHIYPYSRSFDDSYMNKVLVFTKQNQEKLNKTPFEAFGNDGVKWQKIEVLAKNLPEKKQKRILDKNYKDKEQKDFKDRNLNDTRYIARLVLNYTKDYLDFLPLSDDENTKLNDTQKGSKVHVEAKSGMLTSALRHTWGFSTKDRNNHLHHAIDAAIIAYANNSIVKAFSDFKKEQESNSAELYAKKISELDYKNKRKFFEPFSGFRQKVLDKIDEIFVSKPERKKPSGALHEETFRKEEEFYQSYGGKEGVLKALELGKIRKVNGKIVKNGDMFRVDIFKHKKTNKFYAVPIYTMDFALKVLPNKAVARSKKGEIKDWILMDENYEFCFSLYKDSLILIQTKDMQEPELVYFNAFTSSTVSLVVSKHDNKFETLSKNQKILFKNANEKEVIAKSIGIQNLKVFEKYIVSALGEVTKAEFRQREDFKK

SEQ ID NO: 142 - protein, 984 aa, Campylobacter jejuni
  REGION 1..984: note = Campylobacter jejuni subsp. jejuni LMG 23263
MARILAFDIGISSIGWAFSENDELKDCGVRIFTKAENPKTGESLALPRRLARSARKRLARRKARLNHLKHLIANEFKLNYEDYQSFDESLAKAYKGSLISPYELRFRALNELLSKQDFARVILHIVKRRGYDDIKNSDDKEKGAILKAIKQNEEKLANYQSVGEYLYKEYFQKFKENSKEFTNVRNKKESYERCIAQSFLKDELKLIFKKQREFGFSFSKKFEEEVLSVAFYKRALKDFSHLVGNCSFFTDEKRAPKNSPLAFMFVALTRIINLLNNLKNTEGILYTKDDLNTLLNEVLKNGTLTYKQTKKLLGLSDDYEFKGEKGTYFIEFKKYKEFIKALGDHSLSQDDLNEIAKDITLIKDEIKLKKALAKYDLNQNQIDSLSKLEFKDHLNISFKALKLITPLMLEGKKYDEACNELNLKVAINEDKKDFLPAFNETYYKDEVTNPVVLRAIKEYRKVLNALLKKYGKVHKINIELAREVGKNHSQRAKIEKEQNENYKAKKDAEFECEKLGLKINSKNILKLRLFKEQKEFCAYSGEKIKISDLQDEKMLEIDHIYPYSRSFDDSYMNKVLVFTKQNQEKLNKTPFEAFGNDSAKWQKIEVLAKNLPTKKQKRILDKNYKDKEQKDFKDRNLNDTRYIARLVLNYTKDYLDFLPLSDDENTKLNDTQKGSKVHVEAKSGMLTSALRHTWGFSTKDRNNHLHHAIDAVIIAYANNSIVKAFSDFKKEQESNSAELYAKKISELDYKNKRKFFEPFSGFRQKVLDKIDEIFVSKPERKKPSGALHEETFRKEEEFYQSYGGKEGVLKALELGKIRKVNGKIVKNGDMFRVDIFKHKKTNKFYAVPIYTMDFALKVLPNKAVARSKKGEIKDWILMDENYEFCFSLYKDSLILIQTKDMQEPEFVYYNAFTSSTVSLIVSKHDNKFETLSKNQKILFKNANEKEVIAKSIGIQNLKVFEKYIVSALGEVTKAEFRQREDFKK

SEQ ID NO: 143 - protein, 984 aa, Campylobacter jejuni
  REGION 1..984: note = Campylobacter jejuni subsp. jejuni LMG 23264
MARILAFDIGISSIGWAFSENDELKDCGVRIFTKVENPKTGESLALPRRLARSARKRLARRKARLNHLKHLIANEFKLNYEDYQSFDESLAKAYKGSLISPYELRFRALNELLSKQDFARVILHIAKRRGYDDIKNSDDKEKGAILKAIKQNEEKLANYQSVGEYLYKEYFQKFKENSKEFTNVRNKKESYERCIAQSFLKDELKLIFKKQREFGFSFSKKFEEEVLSVAFYKRALKDFSHLVGNCSFFTDEKRAPKNSPLAFMFVALTRIINLLNNLKNTEGILYTKDDLNALLNEVLKNGTLTYKQTKKLLGLSDDYEFKGEKGTYFIEFKKYKEFIKALGEHNLSQDDLNEIAKDITLIKDEIKLKKALAKYDLNQNQIDSLSKLEFKDHLNISFKALKLITPLMLEGKKYDEACNELNLKVAINEDKKDFLPAFNETYYKDEVTNPVVLRAIKEYRKVLNALLKKYGKVHKINIELAREVGKNHSQRAKIEKEQNENYKAKKDAELECEKLGLKINSKNILKLRLFKEQKEFCAYSGEKIKISDLQDEKMLEIDHIYPYSRSFDDSYMNKVLVFTKQNQEKLNKTPFEAFGNDSAKWQKIEVLAKNLPTKKQKRILDKNYKDKEQKDFKDRNLNDTRYIARLVLNYTKDYLDFLPLSNDENTKLNDTQKGSKVHVEAKSGMLTSALRHTWGFSTKDRNNHLHHAIDAVIIAYANNSIVKAFSDFKKEQESNSAELYAKKISELDYKNKRKFFEPFSGFRQKVLDKIDEIFVSKPERKKPSGALHEETFRKEEEFYQSYGGKEGVLKALELGKIRKVNGKIVKNGDMFRVDIFKHKKTNKFYAVPIYTMDFALKVLPNKAVARSKKGEIKDWILMDENYEFCFSLYKDSLILIQTKDMQEPEFVYYNAFTSSTVSLIVSKHDNKFETLSKNQKILFKNANEKEVIAKSIGIQNLKVFEKYIVSALGEVTKAEFRQREDFKK

SEQ ID NO: 144 - protein, 987 aa, Campylobacter jejuni
  REGION 1..987: note = Campylobacter jejuni subsp. jejuni LMG 23269
MARILAFDIGISSIGWAFSENDELKDCGVRIFTKAENPKTGESLALPRRLARSARKRLARRKARLNHLKHLIANEFKLNYEDYQSFDESLAKAYKGSLISPYELRFRALNELLSKQDFARVILHIAKRRGYDDIKNNGDEEKSEILKAIKQNEEKLVNYQSVGEYLYKEYFQKFKENSKEFINVRNKKESYERCIAQSFLKDELKLIFQKQREFGFSFSKKFEEEVLSVAFYKRALKDFSHLVGNCSFFTDEKRAPKNSPLAFMFVALTRIINLLNNLKNTEGILYTKDDLNTLLNEVLKNGTLTYKQTKKLLGLSDDYEFKGEKGTYFIEFKKYKEFIKALGEHNLSQDNLNEIAKDITLIKDEIKLKKALAKYDLNQNQIDSLSKLEFKDHLNISFKALKLITPLMLEGKKYDEAYNELNLKVAINEDKKDFLPAFNETYYKDEVTNPVVLRAIKEYRKVLNALLKKYGKVHKINIELAREVGKNHSQRAKIEKEQNENYKAKKDAELECEKLGLKINSKNILKLRLFKEQKEFCAYSGEKIKISDLQDEKMLEIDHIYPYSRSFDDSYMNKVLVFTKQNQEKLNQTPFEAFGNDSAKWQKIEVLAKNLPTKKQKRILDKNYKDKEQKDFKDRNLNDTRYIARLVLNYTKDYLDFLPLSDDENTKLNDTQKGSKVHVEAKSGMLTSALRHTWGFSAKDRNNHLHHAIDAVIIAYANNSIVKAFSDFKKEQESNSAELYAKKISELDYKNKRKFFEPFSGFRQKVLDKIDEIFVSKPERKKPSGALHEETFRKEEEFHQSYGGKEGVLKALELGKIRKVNGKIVKNGDMFRVDIFKHKKTNKFYAVPIYTMDFALKVLPNKAVVQGKDKKSGLIKDWILMDENYEFCFSLYKDSLILIQTKDMQEPELVYFNAFTSSTVSLIVSKHDNKFETLSKNQKILFKNANEKEVIAKSIGIQNLKVFEKYIVSALGEVTKAEFRQREDFKK

SEQ ID NO: 145 - protein, 987 aa, Campylobacter jejuni
  REGION 1..987: note = Campylobacter jejuni subsp. jejuni LMG 23357
MARILAFDIGISSIGWAFSENDELKDCGVRIFTKAENPKTGESLALPRCLARSARKRLARRKARLNHLKHLIANEFKLNYEDYQSFDESLAKAYKGSLISPYELRFRALNELLSKQDFARVILHIAKRRGYDDIKNNGDEEKGEILKAIKQNEEKLVSYQSVGEYLYKEYFQKFKENSKEFINVRNKKESYERCIAQSFLKDELKLIFQKQRKFGFSFSKKFEEEVLSVAFYKRALKDFSHLVGNCSFFTDEKRAPKNSPLAFMFVALTRIINLLNNLKNTEGILYTKDDLNTLLNEVLKNGTLTYKQTKKLLGLSNDYEFKGEKGTYFIEFQKYKEFVKALGEHNLSQDDLNEIAKDITLIKDEIKLKKALAKYDLNQNQIDSLSKLEFKDHLNISFKALKLITPLMLEGKKYDEACNELNLKVAINEDKKDFLPAFNETYYKDEVTNPVVLRAIKEYRKVLNALLKKYGKVHKINIELAREVGKNHSQRAKIEKEQNENYKAKKDAELECEKLGLKINSKNILKLRLFKEQKEFCVYSGEKIKISDLQDEKMLEIDHIYPYSRSFDDSYMNKVLVFTKQNQEKLNKTPFETFGNDRVKWQKIEVLAKNLPTKKQKRILDKNYKDKEQKDFKDRNLNDTRYIARLVLNYTKDYLDFLPLSDDENTKLNDTQKGSKVHVEAKSGMLTSTLRHTWGFSTKDRNNHLHHAIDAAIIAYANNSIVKAFSDFKKEQESNTAELYAKKISELDYKNKRKFFEPFSGFRQKLLDKIDEIFVSKPERKKPSGALHEETFRKEEEFYQSYGGKEGVLKALELGKIRKVNGKIVSNGDMFRVDIFKHKKTNKFYAVPIYTMDFALKVLPNKAVVQGKDKKSGLIKDWILMDENYEFCFSLYKDSLILIQTKDMQEPELVYYERLDSSNASLTVSKHDNKFETLSKNQKILFKNANEKEVIAKSIGIQNLKVFEKYIVSALGEVTKAEFRQREDFKK

SEQ ID NO: 146 - protein, 984 aa, Campylobacter jejuni
  REGION 1..984: note = Campylobacter jejuni subsp. jejuni NCTC 11168 = ATCC 700819
MARILAFDIGISSIGWAFSENDELKDCGVRIFTKVENPKTGESLALPRRLARSARKRLARRKARLNHLKHLIANEFKLNYEDYQSFDESLAKAYKGSLISPYELRFRALNELLSKQDFARVILHIAKRRGYDDIKNSDDKEKGAILKAIKQNEEKLANYQSVGEYLYKEYFQKFKENSKEFTNVRNKKESYERCIAQSFLKDELKLIFKKQREFGFSFSKKFEEEVLSVAFYKRALKDFSHLVGNCSFFTDEKRAPKNSPLAFMFVALTRIINLLNNLKNTEGILYTKDDLNALLNEVLKNGTLTYKQTKKLLGLSDDYEFKGEKGTYFIEFKKYKEFIKALGEHNLSQDDLNEIAKDITLIKDEIKLKKALAKYDLNQNQIDSLSKLEFKDHLNISFKALKLVTPLMLEGKKYDEACNELNLKVAINEDKKDFLPAFNETYYKDEVTNPVVLRAIKEYRKVLNALLKKYGKVHKINIELAREVGKNHSQRAKIEKEQNENYKAKKDAELECEKLGLKINSKNILKLRLFKEQKEFCAYSGEKIKISDLQDEKMLEIDHIYPYSRSFDDSYMNKVLVFTKQNQEKLNQTPFEAFGNDSAKWQKIEVLAKNLPTKKQKRILDKNYKDKEQKNFKDRNLNDTRYIARLVLNYTKDYLDFLPLSDDENTKLNDTQKGSKVHVEAKSGMLTSALRHTWGFSAKDRNNHLHHAIDAVIIAYANNSIVKAFSDFKKEQESNSAELYAKKISELDYKNKRKFFEPFSGFRQKVLDKIDEIFVSKPERKKPSGALHEETFRKEEEFYQSYGGKEGVLKALELGKIRKVNGKIVKNGDMFRVDIFKHKKTNKFYAVPIYTMDFALKVLPNKAVARSKKGEIKDWILMDENYEFCFSLYKDSLILIQTKDMQEPEFVYYNAFTSSTVSLIVSKHDNKFETLSKNQKILFKNANEKEVIAKSIGIQNLKVFEKYIVSALGEVTKAEFRQREDFKK

SEQ ID NO: 147 - protein, 983 aa, Campylobacter jejuni
  REGION 1..983: note = Campylobacter jejuni subsp. jejuni NW
MARILAFDIGISSIGWAFSENDELKDCGVRIFTKAENPKTGESLALPRRLARSARKRLARRKARLNHLKHLIANEFKLNYEDYQSFDESLAKAYKGSLISPYELRFRALNELLSKQDFARVILHIAKRRGYDDIKNSDDKEKGAILKAIKQNEEKLANYQSVGEYLYKEYFQKFKENSKEFTNVRNKKESYERCIAQSFLKDELKLIFKKQREFGFSFSKKFEEEVLSVAFYKRALKDFSHLVGNCSFFTDEKRAPKNSPLAFMFVALTRIINLLNNLKNTEGILYTKDDLNALLNEVLKNGTLTYKQTKKLLGLSDDYEFKGEKGTYFIEFKKYKEFIKALGEHNLSQDDLNEIAKDITLIKDEIKLKKALAKYDLNQNQIDSLSKLEFKDHLNISFKALKLVTPLMLEGKKYDEACNELNLKVAINEDKKDFLPAFNETYYKDEVTNPVVLRAIKEYRKVLNALLKKYGKVHKINIELAREVGKNHSQRAKIEKEQNENYKAKKDAELECEKLGLKINSKNILKLRLFKEQKEFCAYSGEKIKISDLQDEKMLEIDHIYPYSRSFDDSYMNKVLVFTKQNQEKLNQTPFEAFGNDSAKWQKIEVLAKNLPTKKQKRILDKNYKDKEQKNFKDRNLNDTRYIARLVLNYTKDYLDFLPLSDDENTKLNDTQKGSKVHVEAKSGMLTSALRHTWGFSAKDRNNHLHHAIDAVIIAYANNSIVKAFSDFKKEQESNSAELYAKKISELDYKNKRKFFEPFSGFRQKVLDKIDEIFVSKPERKKPSGALHEETFRKEEFYQSYGGKEGVLKALELGKIRKVNGKIVKNGDMFRVDIFKHKKTNKFYAVPIYTMDFALKVLPNKAVARSKKGEIKDWILMDENYEFCFSLYKDSLILIQTKDMQEPEFVYYNAFTSSTVSLIVSKHDNKFETLSKNQKILFKNANEKEVIAKSIGIQNLKVFEKYIVSALGEVTKAEFRQREDFKK

SEQ ID NO: 148 - protein, 987 aa, Campylobacter jejuni
MARILAFDIGISSIGWAFSENDELKDCGVRIFTKAENPKTGESLALPRRLARSARKRLARRKARLNHLKHLIANEFKLNYEDYQSFDESLAKAYKGSLISPYELRFRALNELLSKQDFARVILHIAKRRGYDDIKNNGDEEKSEILKAIKQNEEKLVNYQSVGEYLYKEYFQKFKENSKEFINVRNKKESYERCIAQSFLKDELKLIFQKQREFGFSFSKKFEEEVLSVAFYKRALKDFSHLVGNCSFFTDEKRAPKNSPLAFMFVALTRIINLLNNLKNTEGILYTKDDLNTLLNEVLKNGTLTYKQTKKLLGLSDDYEFKGEKGTYFIEFKKYKEFIKALGEHNLSQDNLNEIAKDITLIKDEIKLKKALAKYDLNQNQIDSLSKLEFKDHLNISFKALKLITPLMLEGKKYDEAYNELNLKVAINEDKKDFLPAFNETYYKDEVTNPVVLRAIKEYRKVLNALLKKYGKVHKINIELAREVGKNHSQRAKIEKEQNENYKAKKDAELECEKLGLKINSKNILKLRLFKEQKEFCAYSGEKIKISDLQDEKMLEIDHIYPYSRSFDDSYMNKVLVFTKQNQEKLNQTPFEAFGNDSAKWQKIEVLAKNLPTKKQKRILDKNYKDKEQKDFKDRNLNDTRYIARLVLNYTKDYLDFLPLSDDENTKLNDTQKGSKVHVEAKSGMLTSALRHTWGFSAKDRNNHLHHAIDAVIIAYANNSIVKAFSDFKKEQESNSAELYAKKISELDYKNKRKFFEPFSGFRQKVLDKIDEIFVSKPERKKPSGALHEETFRKEEEFYQSYGGKEGVLKALELGKIRKVNGKIVKNGDMFRVDIFKHKKTNKFYPVPIYTMDFALKVLPNKAVVQGKDKKSGLIKDWILMDENYEFCFSLYKDSLILIQTKDMQEPELVYFNAFTSSTVSLIVSKHDNKFETLSKNQKILFKNANEKEVIAKSIGIQNLKVFEKYIVSALGEVTKAEFRQREDFKK

SEQ ID NO: 149 - protein, 1003 aa, Campylobacter lari
MRILGFDIGINSIGWAFVENDELKDCGVRIFTKAENPKNKESLALPRRNARSSRRRLKRRKARLIAIKRILAKELKLNYKDYVAADGELPKAYEGSLASVYELRYKALTQNLETKDLARVILHIAKHRGYMNKNEKKSNDAKKGKILSALKNNALKLENYQSVGEYFYKEFFQKYKKNTKNFIKIRNTKDNYNNCVLSSDLEKELKLILEKQKEFGYNYSEDFINEILKVAFFQRPLKDFSHLVGACTFFEEEKRACKNSYSAWEFVALTKIINEIKSLEKISGEIVPTQTINEVLNLILDKGSITYKKFRSCINLHESISFKSLKYDKENAENAKLIDFRKLVEFKKALGVHSLSRQELDQISTHITLIKDNVKLKTVLEKYNLSNEQINNLLEIEFNDYINLSFKALGMILPLMREGKRYDEACEIANLKPKTVDEKKDFLPAFCDSIFAHELSNPVVNRAISEYRKVLNALLKKYGKVHKIHLELARDVGLSKKAREKIEKEQKENQAVNAWALKECENIGLKASAKNILKLKLWKEQKEICIYSGNKISIEHLKDEKALEVDHIYPYSRSFDDSFINKVLVFTKENQEKLNKTPFEAFGKNIEKWSKIQTLAQNLPYKKKNKILDENFKDKQQEDFISRNLNDTRYIATLIAKYTKEYLNFLLLSENENANLKSGEKGSKIHVQTISGMLTSVLRHTWGFDKKDRNNHLHHALDAIIVAYSTNSIIKAFSDFRKNQELLKARFYAKELTSDNYKHQVKFFEPFKSFREKILSKIDEIFVSKPPRKRARRALHKDTFHSENKIIDKCSYNSKEGLQIALSCGRVRKIGTKYVENDTIVRVDIFKKQNKFYAIPIYAMDFALGILPNKIVITGKDKNNNPKQWQTIDESYEFCFSLYKNDLILLQKKNMQEPEFAYYNDFSISTSSICVEKHDNKFENLTSNQKLLFSNAKEGSVKVESLGIQNLKVFEKYIITPLGDKIKADFQPRENISLKTSKKYGLR

SEQ ID NO: 150 - protein, 1430 aa, Capnocytophaga canimorsus
MKHILGLDLGTNSIGWAVVKEAQNDNEQSEIVDVGVRVNPLTTDEKTNFEKGKPISTNADRTLKRSARRNLQRYKLRRKELIELLKEHQLISTDTILTENGKGTTFQTLELRAKSAKEKISLEELARVFLTINKKRGYKSSRKAKNEDEGQLIDGMEIAKRLYEENLTTGQLSLQLLKEGKKSLPDYYRSDLQFELDKVWNFQKQFHSHILTDEFYAQLKGKGQRATSALFLAKYQIYTAENKGSREDKKLQAYQWRVDALSKELTREQLAFVITEINNNLNNSSGYLGAISDRSKELYFNNETVGEYLWKQIAANPHTSLKNQVFYRQDYLDEFEQIWKTQSAFYPEILTDELKKELRDVVIFYQRKLKSQKSLVSFCEFENKEIEIKKEDGTSTKKVIGLKVAPKSSPLFQEFKIWQNLNNVLIRKKGSKTKKVDKNQQAVLFEEEKTIFELDLEAKQALFNELNLKGNLKAYYCLEILGYSPKEWEMNYSVLEGNRTNKALYEAYLKITDLEGYDAKNHLKVKLNKDEVELDDLKVPASEIKDMVQAIFKEAGINTDILHFNAELDGKDFENQASYQLWHLLYSYEGDDSKSGNELLYKLLETKFGFKKEYAQILANVSLSDDYGSLSTKAMRKIHPYIKENKFSTACELAGYRHSKHSLTKEENDNRVLKDSLEVLKKNSLRQPVVEKILNQMINLVNALLKKYRTENPNFKFDEIRIELARELKKNAEERANMTVNINKAKTEHEKIIKILKNEFGLPNPTRNDIIRYRLYEELKANGYKDLYTNEYIEKQDLFTKNIDIEHIIPKSRVFDDSFSNKTLSFRKTNLDKGERTAFDYIESKFGADKLEEYVARVEDLYKNNIISKAKYQKLLKKESEIGDGFVERDLRETQYIAKKAKEILLQITPNVLSTSGGITDRLREDWDLINVMKELNLPKYRALGLTQMEDRKYGQQVEVIIDWTKRNDHRHHAMDALTVAFTKHNHIQYLNYLNARKNEKHREHSNIMGIQQLETIKVTDKNGNEKRVFKAPMPNFRQVTKAFLENVLISHKAKNKVVTKNKNKVAGSNKVQEVLTPRGQLHKETVYGKYQYYVQKEEKIGGKFDLETIKKVANPLYQSLLKKRLEENGGDPKKAFTGKNSLAKNPIYLDDAQTEQLPEKVKLVWLENSFSIRKDITPENFKDEKLIDKILDEGVKRILKERLQSFGNDAKKAFSDLDKNPIWLNKEKGIAIKRVAISGVANAEPLHTKKDHLGKEILDKEGKSIPVDFISTGNNHHVAVYRDEKGNLQEKVVSVFEAVVRANQGLPIIDKTYNQHLGWEFLFTMKQNEMFVFSNESTGFNPNDIDLLDPKNKKIISPNLFRVQKFSKLQYGNSFVREFVFRHHLETTVEDRKELQGITYKQMKNSAFFNDIIKVRINHLGGIVSVGEY

SEQ ID NO: 151 - protein, 1436 aa, Capnocytophaga gingivalis
  REGION 1..1436: note = Capnocytophaga gingivalis ATCC 33624
MKYIKYILGLDIGSNSIGWALIQLDLLQKTKRIIAAGSRIIPMDQKVLSDFGKGITISPTAQRTSYRNARHCRERHLLRRERLHRVLHILGFLPTHYDKQIDFSKRYGKFVDNTEPKIAYNEGKFLFMDSFQEMLSDFKSHQPDLFYTKKNGEESKIPYDWTIYYLRKKALSQKISKEELAWIILNFNQKRGYYQLREEEGNKENDFEIISSKIISVIKKDKDKKYNKYWYDIILENGLVYQAAFYNDFVYNWINQDREFIIERTSLKNGAEKVKLSYLPTFDEIDKMDKKEQDKYYKKIKIKTENSIGNKTVGCYIYDHILQNPNEKIKGKLVRTIERKYYKEELKAILEKQIALQPELFTDQLLADCIRELYSKNEAQQRNLAARDFVHLLVEDIIFYQRPLRRQKSTLANCSLESRSYIDKDSHTRKEAPLKVCPKSNPYYQEFRVLQWLQNLKIYEIDSDQEVTHQFIKTLEDKQQLFEFLMAQKEIDCEELLKYFLNQTYPNAKEKALKSELKKWKDTYRWNYVYDIGEKSSKKYPMNETRYELKRHLEKVANLPDDFLSSEVEYLLWHLIYSVKDKVAYEKGLKKFAQKHHLDKDSFVESFKKFNPYPSEYGSFSEKAIRKLLPLMRFGAHWDFNHIDKNTQKRIEDLITGVENEEIRTILREKAEKYQLEKETDFQDLPLWLAQYIVYNRHAEASSLEKWTSVNDLETYLNEFKQHSLRNPIVEQVVMETLRVVRDIWQQYGQGQASFFNEIHIELGRELKKTAKEREKLSKQNQKNEDINLSIKEKLKELEKYNTRAYSITHQEKYKLWLEQKHISPYTGQIISPENLFTDNYEIEHIIPQSRFFDDSLSNKVVCESIVNKAPYKDRQLGLEFIKNQGGRIVKELSKENKTIKIFTEEQYRTFIKEHYSNNPEKTKKLLLEEIPEKMVARQMNDTCYISKFISEILSKIVRSDEQDEGVHSKNVILCTGKITSILRQDWGLNDIWDNLILPRFERMNNLLQKEKFTIYSIEKQKKIPVVPINDQFKSFQKKRIDHRHHAMDAIIIACTTREHINYINNQHALEKEKDKKEKQEERDKLREKLCIKKYNNRSEGNYSWIFKKPWDTFTQEVRVALEDIVVSFKQNLRVINKATNYYERWVEENGKYIKKMVKQEGTNWAIRKPLHEETISGKIYLDREKITKNDILTATRKTVDSSFDDKRIKKITDTGIQKILLNYLKYKGSPEIAFSPEGLEELNKNLSIYNDGKPHKPIYKVRIYEKGSGRFALGEKGRKYKKYVQGASNLYFGIYQGAKRSFATIPLNEVIERQKQGLPSVPEYNEKGDLLLFSLSPNDLVYVPIEGEIIENIDFRNLSKEQKERIYNVNDFSSTCYFTPNRIAKAIFPKEVDLQRKGDKLSGSYDTKTASLEGIQIKEVCIKLKVDRLGNISKA

SEQ ID NO: 152 - protein, 1426 aa, Capnocytophaga ochracea
MKNILGLDLGTTSIGFAHIVEDENKEKSEIKELGVRIVSLTTDEQSDFEKGKSITTNANRTLKHGARLNLDRYQQRRKYLIDLLQKANLITPSSILAENGKNTTHSTWQLRAKAVTERIEKEEFARILLAINKKRGYKSSRKAKTEDEGQAIDGMAIAKRLYDENLTPGQLSLQLLQQNKKLLPDFYRSDLQKEFDLVWNFQKQFYPDILTDIFYKELQGKGKDATSKAFSKRYHFDTTENKGSKESVRLQAYQWRAEAISKQLSKEEVAYVLTEINNNLNNASGYLGAISDRSKELYFNRQTVGQYLYAKLQENRHNSLKNKVFYRQDYLDEFERIWETQASFHKELTDELKKQIRDVVIFYQRKPKSQKGLISFCEFESKEIEIEKDGKTITKNIGARVVPKSSPLFQEFKIWQILNNVICKRKGIRKKKISAKTTQLDLLNESSQTIFSLDMECKQLLFDELNLKGDLKSDKVLKLLGYSPQEWEINYNQLEGNRTQKALYEAYLKIVEMEAHDVKDILQIKSAKDDWSLDESPLSASEIREKVKAIFQTLGICTKILYFDPLLPVKEFEEQDSYQLWHLLYSYESDDSTSGNETLYRILEKKYAFKREHARILANVALQDDYGSLSTKAIRKIYPNIKENQYSTACEKAGYKHSKLSLTTEELEARELKNIIPLLKKNALRNPVVEKILNQMINVVNALIEKNSERDAEGKITKYFHFDEIRIELARELKKNAQKRYEMTQNINKAKLEHQKISEILQKEFGIKNPTKSDIIRYRLYQELEHNGYKELYTNAPIARDMLFSKNIEIEHIVPKARVFDDSFSNKTLTFHRINSDKGEYTAFDYITSLNSEEELNQYLTRVENAYKTKSISPTKYKNLLKKASEIGDDFINRDLRDTQYIAKKAKEILFQVTKNVLSTSGSITDRLREDWGLVDVMKELNMPKYQSLGLTEVEERKDGNKVTVIKNWTKRNDHRHHAMDALTVAFTKPSYIQYLNHLNARKDENNKNYSVILAIEEKETIKVPTNNGKNKRVFIEPIPNFRQVAKKHLEEIFISHKAKNKVVTKNTNKPAGTDKQQITLTPRGQLHKETIYGKYQYYINKEEKIGVKFDERTIAKVSNPVYREALLKRLQANDNDPKKAFAGKNALSKNPIYLDESKTKTLPEKVNLTYLEEDFSIRKDISPDNFKDLKSIEKVIDQGVKRILIKRLQAYDNDPKKAFVDLEKNPIWLNKEKGIAIKRVTISGVNNAQPLHIGKDHLGKTTLNKEGKEIPVDYVSTGNNHHVAIYRDKEGNLQEQIVSFFDAVVRAQQGIPIIDKTYKQAEGWQFLFTMKQNEMFVFPNATTGFNPAEIDLLDPKNKKLISPNLFRVQKIATKDYFFRHHLETNVETDNILKNVTWKREGLSGLKDIVKVRINHLGDIVSIGEY

SEQ ID NO: 153 - protein, 1437 aa, unidentified
  REGION 1..1437: note = Capnocytophaga sp. CM59
  source 1..1437: note = Capnocytophaga sp.
MKYIKYILGLDIGSNSIGWALIQLDLLQKTKRIIATGSRIIPMDQKVLSDFGKGITISPTAQRTSYRNARHCRERHLLRRERLHRVLHILGFLPTHYDKQIDFSKRYGKFVDNTEPKIAYNERKFLFMDSFQEMLADFKIHQPDLFYTKKNGEESKIPYDWTIYYLRKKALSRKISKEELAWIILNFNQKRGYYQLREEEEENKENDFEIISSKIISVIKKDKDKKYNKYWYDIILENGLVYQAAFYNDFVYNWINQDREFIIERISLKNGTEKVKLSYLPTFDEIDKMDKKEQDKYYKKIKIKTENSIGNKTVGCYIYDHILQNPNEKIKGKLVRTIERKYYKEELKAILEKQVALQPELFTDQLFADCIRELYSKNEAQQRNLAARDFVHLFVEDIIFYQRSLRRQKSTLANCSLESRSYIDKDSHTRKEAPLKVCPKSNPYYQEFRVLQWLQNLKIYEIDTDQEVTHEFIKTLEDKQQFFDFLMNQKEIDCEELLKYFLNQTYPNAREKALKSELKKWKDTYRWNYVYDIGEKSSKKYPMNETRYELKRHLEKVANLPDDFLSSEVEYLLWHLIYSVKDKVAYEKGLKTFAQKHHLDKDSFVESFKKFKPYPSEYGSFSEKAIRKLLPLMRFGSYWDFNHIDKNTQKRIEDLITGVENEEIRTILREKAEKYQLEKETDFQDLPLWLAQYIVYNRHAEASSLEKWTSVNDLETYLNEFKQYSLRNPIVEQVVMETLRVVRDIWQQYGQGQASFFDEIHIELGRELKKTAKEREKLSKQNQKNEDINLSIKEKLKELEKYNTRAYSITHQEKYKLWLEQKHISPYTGQIISPENLFTDNYEIEHIIPQSRFFDDSLSNKVVCESIVNKAPYKDRQLGLEFIKNQGGRIVKELSTENKTIKIFTEEQYRTFIKEHYSNNPEKTKKLLLEEIPEKMVARQMNDTCYISKFISEILSKIVRSDEQDEGVHSKNVILCTGKITSALKQDWGVNDVWNDLILPRFERMNDLTQSTLFTTYNEKYQKYLPTVPMEYSNGFQKKRIDHRHHAMDAIIIACATREHINYINNQHALEKGKDKKEKQKEHDKLREKLCIKKDNKGSEENYSWIFKKPWDTFTQEVQAALEGIVVSFKQNLRVINKATNYYERWVEENGKYIKKMVKQEGTNWAIRKPLHEETISGKIYLDREEITKNDILTATRKTVDSSFDEKRIKKITDTGIQKILLNYLKYKGSPEIAFSPEGLEELNKNLSIYNDGKPHKPIYKVRIYEKGSGRFALGEKGRKYKKYVQGAPNLYFGIYQGANKRSFATIPLNEVIERQKQGRPSIPEYNEKGDPLLFSLSPNDLVYVPVEGEIIEDIDFQNLSKEQKERIYNVNDFSSTCYFTPNRIAKAIFPKEVDLQRKGDKLPGSYDTKTASLEGIQIKEVCIKLKIDRLGNISKA

SEQ ID NO: 154 - protein, 1471 aa, unidentified
  REGION 1..1471: note = Capnocytophaga sp. oral taxon 324 str. F0483
  source 1..1471: note = Capnocytophaga sp.
MCKYFYIKNFITFVLSKSIIPMKHILGLDLGSNSIGWAFVQQDFENKQGKIIATGSRIIPMDQGILGDFERGNTVSQTAERTTYRSTRRLRERHLLRRERLHRVLHILGFLPPHYDAQIDFTKRYGKFIDNAEPKIAYNNGNFIFMNSFNEMIEDFKKHQPQLFYKKSNGEESKIPYDWTIYYLRKKALSQKITQQELAWLILHFNQKRGYYQLRGEEETENPNKEVAFHSLKVVDVEAEAPNKKGEIWYTIRLENGWIYRRTSKIPLDDWKGKTRDFIVTTDLNDDGTIKVDKEGKEKRSFRAPDENDWNLLKKKTEHDIDFSGKTVGAYIYDHLLQNPNQKIKGKLVRTIERKYYKDELKAILAKQIALQPELFTETLLADCIRELYRKNETQQQNLLSKDFLHLFVEDIIFYQRPLRSKKSTIANCTLEKRSYIDKETNERKDAPIKVCAKSNPYYQEFRVLQWLQNLRIYEIETDREVTAEFIETPQDCEALFNFLMSQKEIDNKGLLKYFLFAKNPQIKDKAAKSELKKWLTTYRWNYVYDAADNSSKKYPMNETGYELQRYLQKVEGLPANFLTFDITYQLWHLLYSVKDKVEFEKALKKFAKKKQLDKTSFVDSFKNFKPYPNEYGSFSEKAIKKLLPLMRFGNHWDFNRIDVSTQKRIDDLINGVANEDIRTIIREKAEKYQLNSETCFQDLPLWLAQYVVYNRHAEATDIEKWTSVSDLEAYLEDFKQHSLRNPIVEQVVTETLRVVRDIWQQYGGGQANFFDEIHIELGRELKKTAEERKQLSDKNQENESTNLRIKKLLAELKEDASIQNVRPYSLVQQELLKIYEEGVFSATDEVEEDIQKIRKKAEPSKADLQRYKLWLEQKYKSPYTGEVISLTKLFTEEYEIEHIIPQSRYYDDSLSNKVICESAVNKLKTNQLGLEFIQNHHGEKVRITANKEVTIFTEEQYKEFVKKHYANNSAKQQKLLLNEIPEKMVARQLNDTRYISKYISEILSKIVRSDEKDEGVNSKNIIPCTGKITTALKQDWGLNDVWNKLILPRFERMNQLTQTQLFTSYNDRLQKNLPTVPIEYSQGFQKKRIDHRHHAMDALVIACATREHINYMNNQHALDKSKDKKEKQQSRIDLRTILCEKKNNNWQFKKPWSTFTQEAKEALEHIVVSFKQNLRVINKATNYYEKWEEKNGVLVKKKVKQEGTNWAIRKPLHKETVSGKIVLDRKIGKDKILTATRKAVDITFTEKIISSITDTGIQKILLNYLKYKGSPEVAFSTEGLEELNKNIAQYNNGKKHQPIYKVRIFEEGSKFPLGETGAKATKYVEAAKGTNLFFGVYQGKGKRTYATIPLNEVIERQKQGLPSVPERNEKGEPLLFSLSPNDLVYVPMEGEIAETIDFNNLSKEQKERIYKTVSFTGNQCFFVQEAVATPIVNKMEYSPLNKMERDILGTMIKEVCIKLKVDRLGNITKA

SEQ ID NO: 155 - protein, 1450 aa, unidentified
  REGION 1..1450: note = Capnocytophaga sp. oral taxon 326 str. F0382
  source 1..1450: note = Capnocytophaga sp.
MKRILGLDLGSNSIGWAFVEQDFENKQGKIIATGSRIIPMDQGILGDFEKGNTVSQTAERTTYRSMRRLRERHLLRRERLHRVLHILGFLPPHYDAQIDFTKRYGKFIDNAEPKIAYNNGNFIFMNSFNEMIEDFKKYQPQLFYKKSNGEESKIPYDWTIYYLRKKVLSQKITQQELAWLILHFNQKRGYYQLRGEEETENPNKEVAFHSLKVVDVEAEAPNKKGEIWYTIRLENGWIYRRTSKIPLDDWKGKTRDFIVTTDLNDDGTIKVDKEGKEKRSFRAPDENDWNLLKKKTEHDIDFSGKTVGAYIYDHLLQNPNQKIKGKLVRTIERKYYKDELKAILAKQIALQPELFTETLLADCIRELYRKNETQQQNLLSKDFLHLFVEDIIFYQRPLRSKKSTIANCTLEKRSYIDKETNERKDTFIKVCAKSNPYYQEFRVLQWLQNLRIYEIETDREVTAEFIETAEDYEALFNFLMSQKEIDNEGLLKYFLFAKNPQIKDKVAKSELKKWLTTYRWNYVYDAADNSSKKYPMNETGYDLQRYLQKVEGLPANFLTFDITYRLWHLLYSVKDKVEFEKALKKFAQEYQLDEASFVDSFKNFKPYPNEYGSFSEKAIKKLLPLMRFGNHWDFNRIDVSTQKRIDDLINGVANDEIRTIIREKAEKYQLNSESCFQGLPLWLAQYVVYNRHAEATDIEKWTSVSDLETYLEDFKQHSLRNPIVEQVVTETLRVVRDIWQQYGGGQANFFDEIHIELGRELKKTAEERKQLSNRNQENENTNLRIKKLLAELKEDASIQNVRPYSPVQQELLKIYEEGVFSSTDQVEEDIQKIRKKAEPTTPEIQRYKLWLEQKYKSPYTGEVISLTKLFTEEYEIEHIIPQSRYYDDSLSNKVICESAVNKLKTNQLGLEFIQNHHGEKVRITGNKEVTIFTEEQYKEFVKKHYANNSAKQQKLLLNEIPEKMVARQLNDTRYISKYISEILSKIVRSDEKDEGVNSKNVIPCTGKITTALKQDWGLNDVWNELILPRFERMNQLTQTQLFTSYNDRFQKNLPTVPIEYSQGFQKKRIDHRHHAMDALVIACATREHINYMNNQHALDKNKDKKEKQQSRIDLRTILCEKKNNNWQFKKPWSTFTQETKEALEHIVVSFKQNLRVINKATNYYEKWEEKNGVLVKKKVKQEGTNWAIRKPLHKETVSGKIVLDRKIGKDKILTATRKEVDITFTEKIISSITDTGIQKILLNYLNYKGSPEVAFSAEGLEELNKNIAQYNDGKKHQPIYKVRIFEEGSKFPLGETGAKATKFVEAAKGTNLFFGVYQGKEKRSYATIPLNEVIERQKQGLPSVPERNEKGEPLLFSLSPNDLVYVPMEGEIAETIDFNNLSKEQKERIYKTVSFTGNQCFFVQEAVATPIVNKMEYSPLNKMERDILGTMIKEVCIKLKVDRLGNITKA

SEQ ID NO: 156 - protein, 1435 aa, unidentified
  REGION 1..1435: note = Capnocytophaga sp. oral taxon 329 str. F0087
  source 1..1435: note = Capnocytophaga sp.
MKNILGLDLGTTSIGFAHIVEDENKEKSEIKELGVRIVSLATDEQSDFEKGKSISTNANRTLKHGARLNLDRYQQRRKFLIDLLQKANLITSASILAENGKNTTHSTWQLRAKAVTERIEKEEFARVLLAINKKRGYKNSRKTKTEDEGQAIDGMAIAKCLYDENLTPGQLSLQLLQQNKKLLPDFYRSDLQKEFDLVWNLQKQFYPDILTDSFYKELQGKGKDATSKAFSKRYHFDTAENKGSKESVRLQAYQWRAEAISKQLSKEEVAYVLTEINNNLNNSSGYLGAISDRSKELYFNRQTVGQYLYAQLQENRHNSLKNKVFYRQDYLDEFERIWETQASFHKELTDELKKQIRDVVIFYQRKLKSQKGLVSFCEFESKEIEIEKDGKAITKSIGARVVPKSSPLFQEFKIWQILNNVTCKRKGIRKKKSSAKSTELDLFNEPSQSIFSLDMECKQLLFDELNLKGDLKSDKVLKLLGYSPQEWEINYNQLEGNRTQKSLYEAYLKIIEIEGYEVKDILQIKSTKDDWSLDESPLSASEIRERVKVIFQTLGICTKILYFDPLLPVKEFEQQYSYQLWHLLYSYESDDSTSGNETLYRILEKKYAFKREHATILANVALQDDYGSLSTKAIRKIYPYIKENQYSTACELAGYKHSKLSLTTEELEARELKNIIPLLKKNALRNPVVEKILNQMINVVNALIEKNSERDAEGKITKYFHFDEIRIELARELKKNAQERYEMTQNINKAKLEHQKISEKLQKQFGIKNPTKSDIIRYRLYQELEHNGYKELYTNTYIAPDVLFSKNIDIEHIVPKARVFDDSFSNKTLAFKEFNIKKGESTAFDYITSLNCEGELNQYLTRVENAYKTKSISLTKYKNLLKKASEIGDGFINRDLRDTQYIAKKAKEILFQVTKNVLSTSGSITDRLREDWGLVDVMKELNMPKYQSLGLTEVEERKDGNKVTVIKDWTKRNDHRHHAMDALTVAFTKPSYIQYLNHLNARKDENNKNYSVILAIEKKETIKVPINNGKNKRVFIEPILNFRQVAKKHLEEIFISHKAKNKVVTKNINKPAGTDKQQITLTPRGQLHKETIYGKYQYYVNKEEKVGVKFDERTITKVSNPLYREALLKRLQANDNDPKKAFAGKNALSKNPIYLDEAKTKTLPEKVNLTYLEEDFSIRKDISPDNFKDLKSIEKVIDQGVKRILIKRLQAYDNDPKKAFVDLEKNPIWLNKEKGIAIKRVTISGVSNAQPLHIGKDHLGKTTLNKEGKEVPVDYVSTGNNHHVAIYRDKEGNLQEQIVSFFEAVVRAQQGLPIIDKNYKQAEGWQFMFTMKQNEMFVFPNEATGFNPAEIDLLDPKNKKLISPNLFRVQTISIVKYGNSVVRDFKFRHHLETTLQDDKILQGITFQQIKSLEPLRNIVKVRINHLGDIVNIGEY

SEQ ID NO: 157 - protein, 1426 aa, unidentified
  REGION 1..1426: note = Capnocytophaga sp. oral taxon 335 str. F0486
  source 1..1426: note = Capnocytophaga sp.
MKNILGLDLGTTSIGFTHIVEDENKEKSEIKELGVRIVSLTTDEQSDFEKGKSISTNANRTLKHGARLNLDRYQQRRKFLIDLLQKANLITSSSILAENGKNTTHSTWQLRAKAVTERIEKEEFARVLLAINKKRGYKSSRKAKTEDEGQAIDGMAIAKRLYDENLTPGQLSLQLLQQNKKLLPDFYRSDLQKEFDLVWNFQKQFYPDILTDSFYKELQGKGKDATSKAFSKRYHFDTAENKGSRESVRLQAYQWRAEAISKQLSKEEVAYVLTEINNNLNNASGYLGAISDRSKELYFNRQTVGQYLYAQLQENKHNSLKNKVFYRQDYLDEFERIWETQASFHKELTEELKKQIRDVVIFYQRKLKSQKGLISFCEFESKEIEIEKDGKTITKSIGARVVPKSSPLFQEFKIWQILNNVTCKRKGIRKKKSSAKSTELDLFNEPSQTIFSLDMECKQLLFEELNLKGDLKSDKVLKLLGYSPQEWEINYNQLEGNRTQKALYEAYLKIVEMEAHDVKDILQIKSTKDDWALEESPLSASEIRERVKAIFQTLGICTKILYFDPLLPVKEFEEQDSYQLWHLLYSYESDDSTSGNETLYRILEKKYAFKREHATILANVTLQDDYGSLSTKAIRKIYPYIKENQYSTACEKAGYKHSKLSLTTEELEARELKNIIPLLKKNALRNPVVEKILNQMINVVNALIEKNSERDAEGKITKYFHFDEIRIELARELKKNAQERYEMTQNINKAKLEHQKISGILQKEFGIKNPTKSDITRYRLYQELAHNGYNDLYTNTYIPKELLFSKNIDIEHIVSKARVFDDSFSNKTLAFREFNIKKGESTAFDYITSLNNEEELNQYLNRVENAYKTKNISPAKYKNLLKKASEIGDGFINRDLRDTQYIAKKAKEILFQVTKNVLSTSGSITDRLREDWGLVDVMKELNMPKYQSLGLTEVEERKEGNKVTVIKNWTKRNDHRHHAMDALTVAFTKPSYIQYLNHLNARKDKNNKNYSVILAIEEKETIKVPTNNGKNKRVFIEPIPNFRQVAKKHLEEIFISHKAKNKVVTKNTNKPAGTDKQQITLTPRGQLHKETVYGKYQYYVNKEEKIGVKFDKETIAKVSNPVYREALLKRLQANDNDPKKAFAGKNALSKNPIYLDEAKTKTLTEKVNLTYLEEDFSIRKDISPDNFKDLKSIEKVIDQGVKRILIKRLQDYDNDPKKAFVDLEKNPIWLNKEKGIAIKRVTISGVNNAQPLHIGKDHLGKTTLNKEGKEIPVDYVSTGNNHHVAIYRDKEGNLQEQIVSFFEAVVGAQQGLPIVDKTYKQAEGWQFLFTMKQNEMFVFPNEATGFNPAEIDLLDPKNKKQISPNLFRVQKIATKDYFFRHHLETNVDTDNVLKNTTWKREGLSGLKDIVKVRINHLGDIVSIGEY

SEQ ID NO: 158 - protein, 1432 aa, unidentified
  REGION 1..1432: note = Capnocytophaga sp. oral taxon 380 str. F0488
  source 1..1432: note = Capnocytophaga sp.
MKNILGLDLGTTSIGFAHIVEDENKEKSEIKELGVRIVSLTTDEQSDFEKGKSITTNANRTLKHGARLNLDRYQQRRKYLIDLLHKANLITPSSILAENGKNTTHSTWQLRAKAVTERIEKEEFARILLAINKKRGYKSSRKAKTEDEGQAIDGMAIAKRLYDENLTPGQLSLQLLQQNKKLLPDFYRSDLQKEFDLVWNFQKQFYPDILTDIFYKELQGKGKDATSKAFSKRYHFDTAENKGSKESVRLQAYQWRAEAVSKQLSKEEVAYVLTEINNNLNNASGYLGAISDRSKELYFNRQTVGQYLYAQLQENRHNSLKNKVFYRQDYLDEFERIWETQALFHKELTDELKKQIRDVVIFYQRKPKSQKGLISFCEFESKEIEIEKDGKTITKNIGARVVPKSSPLFQEFKIWQILNNVICKRKGIRKKKISAKTTQLDLLNESSQTIFSLDMECKQLLFDELNLKGDLKSDKVLKLLGYSPQEWEINYNQLEGNRTQKALYEAYLKIVEMEAHDVKDILQIKSTKDDWSLDESPLSASEIRESVKAIFQALGICTKILYFDPLLPVKDFEEQDSYQLWHLLYSYESDDSTSGNETLYRILEKKYAFKREHARILANVALQDDYGSLSTKAIRKIYPNIKENQYSTACEMAGYKHSKLSLTTEELEARELKNIIPLLKKNALRNPVVEKILNQMINVVNALIEKNSERDAEGKITKYFHFDEIRIELARELKKNAQKRYEMTQNINKAKSEHQKISEILQKEFGIKNPTKSDIIRYRLYKELEHNGYKELYTNTYIAPDVLFSKNIDIEHIVPKARVFDDSFSNKTLAFKDFNIKKGESTAFDYITSLKNEEKLNQYLARVENAYKTKNISPAKYKNLLKKASEIGDGFINRDLRDTQYIAKKAKEILFQVTKNVLSTSGSITDRLREDWSLVDVMKELNMPKYQSLGLTEVEERKDGNKVTVIKDWTKRNDHRHHAMDALTVAFTKPSYIQYLNHLNARKDENNKNYSVILAIEKKETIKVPTNNGKNKRVFIEPIPNFRQVAKKHLEEIFISHKAKNKVVTKNTNKPAGTNKQQITLTPRGQLHKETIYGKYQYYVNKEEKVGVKFDKETIAKVSNPLYREALLKRLQANDNDPKKAFTGKNALSKNPIYLDEAKTKTLPEKVNLTYLEEDFSVRKKIVPKNPTSKEFVPNLKSIEKVVDEGVRNILIERLRVYNNDPEKAFVDLEKNPIWLNKEKGIAIKRVTISGVNNAQPLHIGKDHLGKTTLNKEGKEIPVDYVSTGNNHHVAIYRDKEGNLQEQIVSFFEAVVRTQQGLPIIDKTYKQEEGWQFLFTMKQNEMFVFPNEATGFNPAEIDLLDPKNKKQISPNLFRVQKIATKDYFFRHHLETNVETDNVLKNTTWKREGLSGLKDIVKVRINHLGDIVSIGEY

SEQ ID NO: 159 - protein, 1450 aa, unidentified
  REGION 1..1450: note = Capnocytophaga sp. oral taxon 412 str. F0487
  source 1..1450: note = Capnocytophaga sp.
MKHILGLDLGSNSIGWAFVQQDFENKQGKIIATGSRIIPMDQGILGDFERGNTVSQTAERTTYRNTRRLRERHLLRRERLHRVLHILGFLPPHYDSQIDFTKRYGKFIDNAEPKIAYNNGNFIFMNSFNEMIEDFKKYQPQLFYKKSNGEESKIPYDWTIYYLRKKALSQKITQQELAWLILHFNQKRGYYQLRGEEETENPNKEVAFHSLEVVDVEAEAPNKKGEIWYTIRLENGWIYRRTSKIPLDDWKGKTRDFIVTTDLNDDGTIKLDKEGKEKRSFRAPDENDWNLLKKKTEHDIDFSGKTVGAYIYDHLLQNPNQKIKGKLVRTIERKYYKDELKAILAKQIALQPELFTETLLADCIRELYRKNETQQQNLLSKDFLHLFVEDIIFYQRPLRSKKSTIANCTLEKRSYIDKETNERKDTPIKVCAKSNPYYQEFRVLQWLQNLRIYEIETDREVTAEFIETAQDNEALFNFLMSQKEIDNESLLKYFLFAKNPQIKDKVAKSELKKWLTTYRWNYVYDAADNSSKKYPMNETGYELQQYLQKVEGLPANFLTFDITYRLWHLLYSVKDKVEFEKALKKFAQEYQLDEASFVDSFKNFKPYPNEYGSFSEKAIKKLLPLMRFGNHWDFNRIDVSTQKRIDDLINGVANDEIRTIIREKAEKYQLNSETCFQGLPLWLAQYVVYNRHAEAADIEKWTSVNDLEAYLEDFKQHSLRNPIVEQVITETLRVVRDIWQRYGGGQANFFDEIHIELGRELKKTAEERKQLSNRNQENENTNLRIKKLLAELKEDASIQNVRPYSPVQQELLKIYEEGVFSATDEVEEDIQKIRKKAEPTTPEIQRYKLWLEQKYKSPYTGEVISLTKLFTEEYEIEHIIPQSRYYDDSLSNKVICESAVNKLKTNQLGLEFIQNHHGEKVRITANKEVTIFTEEQYKEFVKKHYANNSAKQQKLLLNEIPEKMVARQLNDTRYISKYISEILSKIVRSDEKDEGVNSKNIIPCTGKITTALKQDWGLNDVWNELILPRFERMNQLTQTQLFTSYNDRFQKNLPTVPIEYSQGFQKKRIDHRHHAMDALVIACATREHINYMNNQHALDKSKDKKEKQQSRIDLRTILCEKKNNNWQFKKPWSTFTQEAQEALEHIVVSFKQNLRVINKATNYYEKWEEKNGVLVKKKVKQEGTNWAIRKPLHKETVSGKIVLDRKIGKDKILTATRKSVDITFTEKIISSITDTGIQKILLNYLKYKGSPEVAFSAEGLEELNKNIAQYNDGKKHQPIYKVRIFEEGSKFPLGETGAKATKYVEAAKGTNLFFGVYQGKGKRTYATIPLNEVIERQKQGLPSVPERNEKGEPLLFSLSPNDLVYVPMEGEIAETIDFNNLSKEQKERIYKTVSFTGNQCFFVQEAVATPIVNKIEYSPLNKMERDILGTMIKEVCIKLKVDRLGNITKA

SEQ ID NO: 160 - protein, 1426 aa, Capnocytophaga sputigena
  REGION 1..1426: note = Capnocytophaga sputigena ATCC 33612
MKNILGLDLGITSISFAHIVEDENKEKSEIKELGVRIVSLTTDEQSDFEKGKSITTNANRTLKHGARLNLDRYQQRRKYLIDLLQKANLITSSSILAENGKNTTHSTWQLRAKAVTERIEKEEFARVLLAINKKRGYKSSRKAKTEDEGQAIDGMAIAKRLYDENLTPGQLSLQLLQQNKKLLPDFYRSDLQREFDLVWNFQKQFYPDILTDSFYKELQGKGKDATSKAFSKRYHFDTAENKGSKESVRLQAYQWRAEAISKQLSKEEVAYVLTEINNNLNNASGYLGAISDRSKELYFNRQTVGQYLYAQLQENRHNSLKNKVFYRQDYLDEFERIWETQASFHKELTDELKKQIRDVVIFYQRKLKSQKGLISFCEFESKEIEIEKDGKTITKTIGARVVPKSSPLFQEFKIWQILNNVTCKRKGIRKKKSSAKSTELDLFNEPSQTIFSLDMECKQLLFDELNLKGDLKSDKVLKLLGYSPQEWEINYNQLEGNRTQKALYEAYLKIVEMEAHDVKDILQIKSAKDDWSLDESPLSASEIKEKVKDIFQALGICTKILYFDPLLPVKEFEKQDSYQLWHLLYSYESDDSTSGNETLYRILEKKYAFKREHARILANVALQDDYGSLSTKAIRKIYPNIKENQYSKACELAGYKHSKLSLTTEELEARELKNIIPLLKKNALRNPVVEKILNQMINVVNALIEKNSERDAEGKITKYFHFDEIRIELARELKKNAQKRYEMTQNINKAKLEHQKISEILQKKFGIKNPTKSDIIRYRLYQELEHNGYKELYTNAPIARDMLFSKNIEIEHIVPKARVFDDSFSNKTLTFHRINSNKGEYTAFDYITSLNSEEELNQYLTRVENAYKTKSISLTKYKNLLKKASEIGDGFINRDLRDTQYIAKKAKEILFQVTKNVLSTSGSITDRLREDWGLVDVMKELNMPKYQSLGLTEVEERKEGNKVTVIKNWTKRNDHRHHAMDALTVAFTKPSYIQYLNHLNARKDENNKNYSVILAIEEKETIKVPTNNGKNKRVFIEPIPNFRQVAKKHLEEIFISHKAKNKVVTKNVNKPAGTDKQQITLTPRGQLHKETIYGKYQYYVNKEEKVGVKFDERTITKVSNPLYREALLKRLQANDNDPKKAFTGKNALSKNPIYLDETKTKTLPEKVNLTYLEEDFSIRKDISPDNFKDLKSIEKVIDQGVKRILIKRLQDYDNDPKKAFVDLEKNPIWLNKEKGIAIKRVTISGVSNAQPLHIGKDHLGKTTLNKEGNEIPVDYVSTGNNHHVAIYRDKEGNLQEQIVSFFEAVVRTQQGLPIIDKTYKQEEGWQFLFTMKQNEMFVFPNATTGFNPAEIDLLDPKNKKLISPNLFRVQKIATKDYFFRHHLETNVETDNVLKNTTWKREGLSGLKDIVKVRINHLGDIVSIGEY

SEQ ID NO: 161 - protein, 1140 aa, Catellicoccus marimammalium
  REGION 1..1140: note = Catellicoccus marimammalium M35/04/3
MKNMTKVNVGLDVGISSAGWSVINAETNQILESGVRLFSGSDADENVNRRNQRQGRRLFRRRKLRIQEAKKYLENVFQLKDIEPKDEWNPYEIRVRALNEKVSKEELSIALLNIVKHRGISYELEDVTDEEGTNTQSFQSGLDYNRRLLKTKTVGEIQYDRLQKYGQVRGQIQTEDGLLINIFPTKNYVEEVERILETQKKYHPEIDDVFIEKIISFVTRKREYFVGPGNEKSRTDYGIYRENGETLDNLFEILIGKDKFYPEEYRAAGSSYTAQIFNLLNDLNNLRIPTTEDHHLTKAQKEEIITELKNTSRLSGGMLKLISKVTKAPKEEISGYRKDEKDKPDLHSLAYYRKQKNMLEKEGIQIADFSEELLDELATMMTLNTEPGEIRKQLNKITNQYDILTPEVIEVLVKNHTAFVATSNHKWHRFSLKLMKEFIPELLETSKEQSTILCERGFIQNRASYLDENHHFNYAELRENLYNPVVRKSTCEMLKVFTAIQEKYPNIQNVIVELPRETNEDEQKRKIKKINDNNAKRKKEILKEAQAQSGLSEEALEEKLLKTKGLYLKLMLWYEQEGKCVYSGQEIPLSDLLQNKGGYEVDHIIPISISFDDRLCNKVLVRQQLNSQKSNQTPFEYMTTHTDGHLSFHELKELVGKNKRFSKEKRELLLAEIYSNDIETRKRFINRNLVDTSYTARIVLNALQQYKKENQLSMNVSVVRGAMTNILRKKVKLDKTRETFHHHAIDASLMAVIPNIEFFKERKEWLPKSANEEVVEVEVSEEETMPEKEFKVKMRLPESFIQDVQILQRNSFAKEEVSGPQTRERNLKIKFSHQVDQKMNRKVADDTIYGTRQAQLGKDKKEETYVIGKIKDIYNYDEYVRFKKRYDKNKESFLMYHHDPQTFEKLEEILAQYPEYIEDEKGKKKKVSPFALYREENGPVTKYAKKNNGPVIKQLKYYDSKLNRKIDISHKYSTKNRQVVLQSLKPYRTDVYRNQDTGEYTLVGIDQNDGKFVNGHYGIPKSRYEEIKANNKLSEHDEFVFSLYKNSMVKVIDENGESIVVRYLSRSMPNRKNNAEIKPVEKYQFEDGEVVPVYGKCRKQMQTVFVKKGWTLLKGNTDILGNTYFVEKESENPKKMIDDK

SEQ ID NO: 162 - protein, 1329 aa, Catenibacterium mitsuokai
  REGION 1..1329: note = Catenibacterium mitsuokai DSM 15897
IVDYCIGLDLGTGSVGWAVVDMNHRLMKRNGKHLWGSRLFSNAETAANRRASRSIRRRYNKRRERIRLLRAILQDMVLEKDPTFFIRLEHTSFLDEEDKAKYLGTDYKDNYNLFIDEDFNDYTYYHKYPTIYHLRKALCESTEKADPRLIYLALHHIVKYRGNFLYEGQKFNMDASNIEDKLSDIFTQFTSFNNIPYEDDEKKNLEILEILKKPLSKKAKVDEVMTLIAPEKDYKSAFKELVTGIAGNKMNVTKMILCEPIKQGDSEIKLKFSDSNYDDQFSEVEKDLGEYVEFVDALHNVYSWVELQTIMGATHTDNASISEAMVSRYNKHHDDLKLLKDCIKNNVPNKYFDMFRNDSEKSKGYYNYINRPSKAPVDEFYKYVKKCIEKVDTPEAKQILNDIELENFLLKQNSRTNGSVPYQMQLDEMIKIIDNQAEYYPILKEKREQLLSILTFRIPYYFGPLNETSEHAWIKRLEGKENQRILPWNYQDIVDVDATAEGFIKRMRSYCTYFPDEEVLPKNSLIVSKYEVYNELNKIRVDDKLLEVDVKNDIYNELFMKNKTVTEKKLKNWLVNNQCCSKDAEIKGFQKENQFSTSLTPWIDFTNIFGKIDQSNFDLIENIIYDLTVFEDKKIMKRRLKKKYALPDDKVKQILKLKYKDWSRLSKKLLDGIVADNRFGSSVTVLDVLEMSRLNLMEIINDKDLGYAQMIEEATSCPEDGKFTYEEVERLAGSPALKRGIWQSLQIVEEITKVMKCRPKYIYIEFERSEEAKERTESKIKKLENVYKDLDEQTKKEYKSVLEELKGFDNTKKISSDSLFLYFTQLGKCMYSGKKLDIDSLDKYQIDHIVPQSLVKDDSFDNRVLVVPSENQRKLDDLVVPFDIRDKMYRFWKLLFDHELISPKKFYSLIKTEYTERDEERFINRQLVETRQITKNVTQIIEDHYSTTKVAAIRANLSHEFRVKNHIYKNRDINDYHHAHDAYIVALIGGFMRDRYPNMHDSKAVYSEYMKMFRKNKNDQKRWKDGFVINSMNYPYEVDGKLIWNPDLINEIKKCFYYKDCYCTTKLDQKSGQLFNLTVLSNDAHADKGVTKAVVPVNKNRSDVHKYGGFSGLQYTIVAIEGQKKKGKKTELVKKISGVPLHLKAASINEKINYIEEKEGLSDVRIIKDNIPVNQMIEMDGGEYLLTSPTEYVNARQLVLNEKQCALIADIYNAIYKQDYDNLDDILMIQLYIELTNKMKVLYPAYRGIAEKFESMNENYVVISKEEKANIIKQMLIVMHRGPQNGNIVYDDFKISDRIGRLKTKNHNLNNIVFISQSPTGIYTKKYKL

SEQ ID NO: 163 - protein, 1419 aa, unidentified
  REGION 1..1419: note = Chryseobacterium sp. CF314
  source 1..1419: note = Chryseobacterium sp.
MMIKNILGLDLGTNSIGWALIKQNFENKYGEILGMGSRIIPMSQDVLGEFGKGNSVSQTAARTGYRGVRRLRERFLLRRERLHRVLNVLNFLPEHYASQIDFEKRFGKFKYETEPKLAYNNDGFFFKNSFDEMLGDFKDHQFHLLENGRKVPYDWTIYYLRKKALSQKIEKEELAWILLNFNQKRGYYQLRGEDFEEEKDRVFVRLKVDRVVDSGENIKGKILYDVYFENGWKYEKQIVKTEDWIGRTKEFIVTESILKNGDTKRTFKAVDSEKDWIAIKTKTEQEIDKSHKTVGAYIYEALLQNPKQKIKGKLVRTIERKFYREELKKILERQKEFHPELQSDDLYNDCIRELYRNNEAHQITLSKKDFVHLLLNDLIFYQRPLRSQKSSVSNCTLEFRKYKDENGVEHAQYLKTIPKSNPYYQEFRVWQWMFNLNIYRKDDDTNVTKEFLSSTEDYETLFEFLNNRKEVDQKALLRHFKLNEKTHRWNYVEDKKYPCNETKTMISTRLEKVENYPSDFLTREMEQNIWHIIYSVNDKIEYEKALKSFAHKNNLDENSFFEAFKKFPPFKSEYGSFSEKAIKKLLPLLRLGKYWNWESIDRKSQGRIEKIITGEFDGNIKDKVREKAIHLTAENDFQGLQLWLAQYIVYGRHSEASMIGKWNSADDLEEFLKGFKQHSLRNPIVEQVITETLRVVKDIWLKYGNGAKDFFSEIHIELGREMKQTKDERVDATKRITENENTNLRIKALLAEMMNDNSVENIRPYSPMQQEILKIYEDGILKSDIEIDDDILKISKTAQPSSSDLKRYKLWLEQRYKSPYTGQIIPLNKLFTSEYEIEHIIPQSRYFDDSFSNKIICESAVNKLKDNYIGLGFIKQFGGMIVECGFGKSVEIFKAEEYEDFVKKHYANNRSKRNKLLLEEIPEKMIDRQLNDTRHISKYISGVLSNIVRQEDGTDEGVNSKNIVPGNGKITTQLKQDWGLNDVWNELILPRFERMNQLTNSTDFTSWNKNHQKFLPTVPIEFSKGFSKKRIDHRHHAMDALVIACATKDHINLLNNQSAKSDTKRYDLKRKLMKFERVVYSHSKTGEKIEKEVPKQFLKPWDNFTVDAKNKMETIIVSFKQNLRVINKATNHYEKWIEKDGIKRKELIKQEGTNWAIRKPMHKETVSGKVDLPGIKIPKGKILTATRKSLDTSFDLKTINSITDTGIQKILKNYLEFKGSSELAFSPEGIEDMNKNIEKFNDGKPHQSINKVRIFELGSKFSVGQTGNKKDKYVEAAKGTNLFFAVYEDKNGKRSYETIPLNEVIERQKQGLDSVSFKNKEDFLLCPNDLVYVPSEDELENIYNIDFKNLTTEKTGNIYKVVSFSGNQIFFIRQDIAISIVNKAEFSTLNKMERAIDGSMIKENCIKLKIDRLGNIAKI

SEQ ID NO: 164 - protein, 1021 aa, Clostridium cellulolyticum
MKYTLGLDVGIASVGWAVIDKDNNKIIDLGVRCFDKAEESKTGESLATARRIARGMRRRISRRSQRLRLVKKLFVQYEIIKDSSEFNRIFDTSRDGWKDPWELRYNALSRILKPYELVQVLTHITKRRGFKSNRKEDLSTTKEGVVITSIKNNSEMLRTKNYRTIGEMIFMETPENSNKRNKVDEYIHTIAREDLLNEIKYIFSIQRKLGSPFVTEKLEHDFLNIWEFQRPFASGDSILSKVGKCTLLKEELRAPTSCYTSEYFGLLQSINNLVLVEDNNTLTLNNDQRAKIIEYAHFKNEIKYSEIRKLLDIEPEILFKAHNLTHKNPSGNNESKKFYEMKSYHKLKSTLPTDIWGKLHSNKESLDNLFYCLTVYKNDNEIKDYLQANNLDYLIEYIAKLPTFNKFKHLSLVAMKRIIPFMEKGYKYSDACNMAELDFTGSSKLEKCNKLTVEPIIENVTNPVVIRALTQARKVINAIIQKYGLPYMVNIELAREAGMTRQDRDNLKKEHENNRKAREKISDLIRQNGRVASGLDILKWRLWEDQGGRCAYSGKPIPVCDLLNDSLTQIDHIYPYSRSMDDSYMNKVLVLTDENQNKRSYTPYEVWGSTEKWEDFEARIYSMHLPQSKEKRLLNRNFITKDLDSFISRNLNDTRYISRFLKNYIESYLQFSNDSPKSCVVCVNGQCTAQLRSRWGLNKNREESDLHHALDAAVIACADRKIIKEITNYYNERENHNYKVKYPLPWHSFRQDLMETLAGVFISRAPRRKITGPAHDETIRSPKHFNKGLTSVKIPLTTVTLEKLETMVKNTKGGISDKAVYNVLKNRLIEHNNKPLKAFAEKIYKPLKNGTNGAIIRSIRVETPSYTGVFRNEGKGISDNSLMVRVDVFKKKDKYYLVPIYVAHMIKKELPSKAIVPLKPESQWELIDSTHEFLFSLYQNDYLVIKTKKGITEGYYRSCHRGTGSLSLMPHFANNKNVKIDIGVRTAISIEKYNVDILGNKSIVKGEPRRGMEKYNSFKSN

SEQ ID NO: 165 - protein, 1065 aa, Clostridium perfringens
  REGION 1..1065: note = Clostridium perfringens C str. JGS1495
MNKDINYALGLDIGITSVGWAVINLDLNRIEDLGVRIFNAAENPKDGSSLALPRRLARGRRRLLRRKAYRVERVRKLIVKNNILTKEELEGLFKNKEVIDVWEARVKGLDYKLSREEWAKILINFCKRRGFKSNRKNETKDKEAGQILSSISYNIEKMKETNSRTIGEYIYNEVKNSDDSYAPLRNKFGEYKMCVSRDVLREEIHTLFEKQRELGNNFASDEIEDKYFEIFNSQRPFSNFEDLEKLVGFCTFERKKHKRAPKHCISSEEFTLYEGINKLSIIKDGEKRKLSEEERTLVVNEAFNKKEIKYTTLRKLLGLSEDELFSTLTYSIDKDISKTENTKFVSLKGYHEIKRAIEKGVSKKAWQDIENNRNLLNDIAYVLTLGKTDDEIEKQLRLRNVPEELFESLLDMSFSKFNNLSIYALEKILPFMKEGYQYNEACEKAGYNFKAIYEGVRTKKLPVIEIDEIVNPVVNRALAQTRKVINSVIDKYGSPVRINIELARDLAKNFKDRKLIEKEQKENRANLDKIRENLRELMDKEPTAVEVLKYRLWEQQRGECAYTQSQIALERLFSPGYCEIDHIIPFSRSFDDSLSNKILVLGSENQRKGNKIPYEYFGEDSERWNSFEIWVKGSYLNYKKKANLLKKKFTEEEQRDWKARNLQDTKYICRYISNFVNNRLEFKESENKQKVITVNGRATAYLRSRWGLNKVREDGDKHHALDAAVVGVTTQGMVQKISKYSKAHELYTVRKNDEFVDVETGECVDVDEYKEIRKDILPRPWRGFSEELKLRLSDNPLEELKKLPIETYNEEFIKENVKPIFVSRVPFRKISGKLFKETIYSERAFKDGYFVSKKSLVDLKRGDLDNFYNYECDKKLYDAISERMKEFNYNGKKAFESPFRKPTKSGKEGPVVRSVKIKSAAPFKDGIPMNEGLVAKEGMVRIDIYEKEGKYFVVPVYRYQLAKGIVPKRAAIAGKSELKWPIMDQTYNFKFSIFKNDLIEIKYAKKDGYFGYYDGFDRHTASLVIENHDNSDRYRGIGVKTGVVEFNKYEVDVLGNYHKVNLGGN

SEQ ID NO: 166 - protein, 1065 aa, Clostridium perfringens
  REGION 1..1065: note = Clostridium perfringens D str. JGS1721
MNKDINYALGLDIGITSVGWAVINLDLNRIEDLGVRIFNAAENLKDGSSLALPRRLARGRRRLLRRKAYRVERVRKLILKNNILTKEELEGLFKNKEVIDVWEARVKGLDYKLSREEWAKILINFCKRRGFKSNRKNEAKDKEAGQILSSISYNIEKMKETNSRTIGEYIYNEVKNSEDSYAPLRNKFGEYKMCVSRDVIREEIHTLFEKQRELGNNFASDEIEDKYFEIFNSQRPFSNFEDLEKLVGFCTFERKKHKRAPKHCISSEEFTLYEGINKLSIIKDGEKRKLSEEERTLVVNEAFNKKEIKYTTLRKLLGLSEEELFSTLTYSIDKDISKTENTKFVSLKGYHEIKRAIEKGVSKKAWQDIENNRNLLNDIAYVLTLGKTDDEIEKQLRLRNVPEELFESLLDMSFNKFNNLSIYALEKILPFMKEGYQYNEACEKAGYNFKAIYEGVRTKKLPVIEIDEIVNPVVNRALAQTRKVINSVIDKYGSPVRINIELARDLAKNFKDRKLIEKEQKENRANLDKIRENLRELMDKEPTVVEVLKYRLWEQQRGECAYTQSQIPLERLFSPGYCEIDHIIPFSRSFDDSLSNKILVLGSENQRKGNRTPYEYFGEDSERWNSFEIWVKGSYLNYKKKANLLKKKFSEEEQRDWKARNLQDTKYICRYISNFVNNRLEFKESENKQKVITVNGRATAYLRSRWGLNKVREDGDKHHALDAAVVGVTTQGMVQKISKYSKAHELYTVRKNDEFVDVETGECVDVDEYKEIRKDILPRPWRGFSEELKLRLSDNPLEELKKSPIETYNEEFIKENVKPIFVSRVPFRKISGKLFKETIYSERAFKDGYFVSKKSLVDLKRGDLDNFYNYECDKKLYDAISERMKEFNYNGKKAFESPFRKPTKSGKEGPVVRSVKIKSAVPFKDGIPMNEGLVAKEGMVRIDIYEKEGKYFVVPVYRYQLAKGIVPKRAAIAKKDELKWPIMDQTYNFKFSIYKNDLIEVKYDKKGVYFGYYDGFDRNSASLTIEKHDNSERYRSIGLKVGVLEINKYEVDVLGNYHKVKLGGN

SEQ ID NO: 167 - protein, 1116 aa, Clostridium spiroforme
  REGION 1..1116: note = Clostridium spiroforme DSM 1552
MVEFLLKEMKIMGRLVLGLDIGITSVGYGVIDIDKNEFVDYGVRLFKEGTAINNEERRSKRGARRLKRRKTNRIADMKKLLERNGLIDEQYTALNNPYEIRKKGLKNKLSNYELATAILHITKNRGTCLESNADETQDEESTKNILSKNALELKDKYICEIQLARLEESGKIRGINNNFKTEDYLKELSKILENQDLEKETIDKIKEIVARRRRYDQGPGSEKSPTPYGSYRMENGELVHVNLIDMMRGKCSVFPDQLRAPQQSYSAELFNLLNDLNNLKINGEKLSSTEKQKIIDFVNEKGGITVKQLLKLIDVGITEISGFRIDKNEKPLITEFKGYKKVLKVFKNYNQESLLNDKSIVDTIMDINTKIKSIDERSDQLKQVLPSLDTSIINDLASIKGVSGYHSLSLKALNLINNEMLKTEMNQMQVLHQLDIFDKNRVSLKGQRQIYADDNAILSPVAKRAHRETFKVINKLRSIYGEFDSIVIETTRDKNTQDQKKRIKNNQKNYEERNTEVNNFLKEAGYNPENINAKTKMKIRLYIEQDAKSAYTLQDINLKELIEDEKAYEIDHIIPISISLDDSFNNKVLTTHDENQEKGNLTPISAFLKGKFHNGNLNTYKVFIQNNKNLNRKKKEYLLCEDDITRYEVVQNFINRNLVDTSYACRTVMNTLVHYFKDNEINTKVHTIKGQATSTFRKRIGLIKDREEDYFHHAIDALIVASLKKMNLINSYLMKVDFNEMYDEETGEIFNVLPDNSYLDEKYISFVSNLKNIYEESNKYIRGVMIKEKMTYPLIKVSHKIDTKPNRKISDDTIYSTRNVDNQDMLVERIKNIYDPKENAANTLINDIINDNTDKYIMYHKDPQTFDKIKAIVLNHFNEFKTDKNCYIVTKEGLYKLKGTSPLALYYEEFGPITKYAKKNNGPTIHSMKFYSEKLGNHLSITHKYSTVNKKVITKQISPYRTDFYQSPEGKYKFVTVRYKDVAYNAKKDKYIIDHSWYREQKKLKKIADEWIFVCSVHRDELIGIMKADGQKRIFDSSTESDGETLYHDAKTYEILKFTATNNDITGRFEVKPIYCYCKKQLMVSIGTCRKIQKFATDVLGNLYIVKDNVLKLEFK

SEQ ID NO: 168 - protein, 1338 aa, Coprococcus catus
  REGION 1..1338: note = Coprococcus catus GD/7
MKQEYFLGLDMGTGSLGWAVTDSTYQVMRKHGKALWGTRLFESASTAEERRMFRTARRRLDRRNWRIQVLQEIFSEEISKVDPGFFLRMKESKYYPEDKRDAEGNCPELPYALFVDDNYTDKNYHKDYPTIYHLRKMLMETTEIPDIRLVYLVLHHMMKHRGHFLLSGDISQIKEFKSTFEQLIQNIQDEELEWHISLDDAAIQFVEHVLKDRNLTRSTKKSRLIKQLNAKSACEKAILNLLSGGTVKLSDIFNNKELDESERPKVSFADSGYDDYIGIVEAELAEQYYIIASAKAVYDWSVLVEILGNSVSISEAKIKVYQKHQADLKTLKKIVRQYMTKEDYKRVFVDTEEKLNNYSAYIGMTKKNGKKVDLKSKQCTQADFYDFLKKNVIKVIDHKEITQEIESEIEKENFLPKQVTKDNGVIPYQVHDYELKKILDNLGTRMPFIKENAEKIQQLFEFRIPYYVGPLNRVDDGKDGKFTWSVRKSDARIYPWNFTEVIDVEASAEKFIRRMTNKCTYLVGEDVLPKDSLVYSKFMVLNELNNLRLNGEKISVELKQRIYEELFCKYRKVTRKKLERYLVIEGIAKKGVEITGIDGDFKASLTAYHDFKERLTDVQLSQRAKEAIVLNVVLFGDDKKLLKQRLSKMYPNLTTGQLKGICSLSYQGWGRLSKTFLEEITVPAPGTGEVWNIMTALWQTNDNLMQLLSRNYGFTNEVEEFNTLKKETDLSYKTVDELYVSPAVKRQIWQTLKVVKEIQKVMGNAPKRVFVEMAREKQEGKRSDSRKKQLVELYRACKNEERDWITELNAQSDQQLRSDKLFLYYIQKGRCMYSGETIQLDELWDNTKYDIDHIYPQSKTMDDSLNNRVLVKKNYNAIKSDTYPLSLDIQKKMMSFWKMLQQQGFITKEKYVRLVRSDELSADELAGFIERQIVETRQSTKAVATILKEALPDTEIVYVKAGNVSNFRQTYELLKVREMNDLHHAKDAYLNIVVGNAYFVKFTKNAAWFIRNNPGRSYNLKRMFEFDIERSGEIAWKAGNKGSIVTVKKVMQKNNILVTRKAYEVKGGLFDQQIMKKGKGQVPIKGNDERLADIEKYGGYNKAAGTYFMLVKSLDKKGKEIRTIEFVPLYLKNQIEINHESAIQYLAQERGLNSPEILLSKIKIDTLFKVDGFKMWLSGRTGNQLIFKGANQLILSHQEAAILKGVVKYVNRKNENKDAKLSERDGMTEEKLLQLYDTFLDKLSNTVYSIRLSAQIKTLTEKRAKFIGLSNEDQCIVLNEILHMFQCQSGSANLKLIGGPGSAGILVMNNNITACKQISVINQSPTGIYEKEIDLIKL

SEQ ID NO: 169 - protein, 1384 aa, Coriobacterium glomerans
MKLRGIEDDYSIGLDMGTSSVGWAVTDERGTLAHFKRKPTWGSRLFREAQTAAVARMPRGQRRRYVRRRWRLDLLQKLFEQQMEQADPDFFIRLRQSRLLRDDRAEEHADYRWPLFNDCKFTERDYYQRFPTIYHVRSWLMETDEQADIRLIYLALHNIVKHRGNFLREGQSLSAKSARPDEALNHLRETLRVWSSERGFECSIADNGSILAMLTHPDLSPSDRRKKIAPLFDVKSDDAAADKKLGIALAGAVIGLKTEFKNIFGDFPCEDSSIYLSNDEAVDAVRSACPDDCAELFDRLCEVYSAYVLQGLLSYAPGQTISANMVEKYRRYGEDLALLKKLVKIYAPDQYRMFFSGATYPGTGIYDAAQARGYTKYNLGPKKSEYKPSESMQYDDFRKAVEKLFAKTDARADERYRMMMDRFDKQQFLRRLKTSDNGSIYHQLHLEELKAIVENQGRFYPFLKRDADKLVSLVSFRIPYYVGPLSTRNARTDQHGENRFAWSERKPGMQDEPIFPWNWESIIDRSKSAEKFILRMTGMCTYLQQEPVLPKSSLLYEEFCVLNELNGAHWSIDGDDEHRFDAADREGIIEELFRRKRTVSYGDVAGWMERERNQIGAHVCGGQGEKGFESKLGSYIFFCKDVFKVERLEQSDYPMIERIILWNTLFEDRKILSQRLKEEYGSRLSAEQIKTICKKRFTGWGRLSEKFLTGITVQVDEDSVSIMDVLREGCPVSGKRGRAMVMMEILRDEELGFQKKVDDFNRAFFAENAQALGVNELPGSPAVRRSLNQSIRIVDEIASIAGKAPANIFIEVTRDEDPKKKGRRTKRRYNDLKDALEAFKKEDPELWRELCETAPNDMDERLSLYFMQRGKCLYSGRAIDIHQLSNAGIYEVDHIIPRTYVKDDSLENKALVYREENQRKTDMLLIDPEIRRRMSGYWRMLHEAKLIGDKKFRNLLRSRIDDKALKGFIARQLVETGQMVKLVRSLLEARYPETNIISVKASISHDLRTAAELVKCREANDFHHAHDAFLACRVGLFIQKRHPCVYENPIGLSQVVRNYVRQQADIFKRCRTIPGSSGFIVNSFMTSGFDKETGEIFKDDWDAEAEVEGIRRSLNFRQCFISRMPFEDHGVFWDATIYSPRAKKTAALPLKQGLNPSRYGSFSREQFAYFFIYKARNPRKEQTLFEFAQVPVRLSAQIRQDENALERYARELAKDQGLEFIRIERSKILKNQLIEIDGDRLCITGKEEVRNACELAFAQDEMRVIRMLVSEKPVSRECVISLFNRILLHGDQASRRLSKQLKLALLSEAFSEASDNVQRNVVLGLIAIFNGSTNMVNLSDIGGSKFAGNVRIKYKKELASPKVNVHLIDQSVTGMFERRTKIGL

SEQ ID NO: 170 - protein, 1099 aa, Corynebacterium accolens
  REGION 1..1099: note = Corynebacterium accolens ATCC 49725
MSLSYRVGIDVGTYSLGCTAIEVDDNDQPVNILSSVSLIHDSGLDPDQQKRAVTRLASSGVARRTRRLYRRRRRRMINLEKFLTSQGWETRPFEHYSDPYLPWNARVALVNGYISDDAQRGMYLSIAFRHIANHRGWRNPYWKVSSLYSPDKPSDAFEQIRKELEESTGHKIPETVTVGQLISFAQFGKDRLRGGGKKKDEKKPQEQVNQAVISARLHQIDHAREINEICRVQKIDDALRKQILDLVFAAESPKGAQIGRVGKDPLQPKLPRALKASDAFQQYRIVALAGNLRIYRDGVSTPLDRDEKLIVFNYLINLSHKEEPSWLKVAEVLNIDRGQLHGTATMTDDGERAGAAPPVHDTNRTILGCKIKPLVHWWEGANDDERAAMLKALSNSEVEDFDSPAGAQTQAFFANLDESEQEKLDSLHLPIGRAAYSEDTLMRLTSRMLDENLDLYEARLAEFDIPKDWAPPAPRIGEPVGNPAVDRVLKGVARWLEAAADEWGAPKSVVIEHVRDGFISKSKANEIDRANNARHKRNRELFKQMQENLGIDGKLRSSDLWRYQSVQRQNCQCAYCGSPITYTTCEMDHIVPRAGEGSTNTRDNLVATCHRCNLAKKNIPFAVWAAQTNIPGVSVKEALDRTRHWSEDSGMTSKDFKKFRKNVCDRLKRTVVDEPLDARSMESVAWMANELRGRVAQRFQEENTVVNVYRGELTAEARRAAGISDKLRFIDGTGKSRLDRRHHAVDAAVVAFTQNYVAETLAIRSNKKREAQLLQAAEQWKEFTGSDAEHRAAWNAWLPKMQKLAVLLQKALDEDRIAVTSNLRLRLGNGRAHEDSIGELKTIRVGDAISVTDIDRASSEALWCALTREPDFDENNGLPENPDRRIRIHGTWYDAEDDIEVFPVGAGAIKVRGGYAELSRFHHARIYKIPGKKAPVYCMLRVYNADLIRHRHEDLFSVEIKPQTMSVRQAEPKLRKALAENTAEYLGWLVTDDELVIDTSNFNTGQIAEMQSELGQVRRWRLDGFYSPSTLRLRPLQMSAEGLREDTSIGAKKIIDRPGWLPAINKLFGEGHVTVVRRDALGRARLTSNAHLPISWKAE

SEQ ID NO: 171 - protein, 1099 aa, Corynebacterium accolens
  REGION 1..1099: note = Corynebacterium accolens ATCC 49726
MSLLYRVGIDVGTYSLGCTAIEVDDNDQPVSILSSVSLIHDSGLDPDQQKRAVTRLASSGVARRTRRLYRRRRRRMVKLENFLTAQGWETLPFERYSDPYLPWHARVALVNGYISDDTQRGQYLSIAFRHIANHRGWRNPYWKVSSLYSPDKPSDAFEQIRKELEASTGRQIPETATVGQLISFAQFGKDRLRGGGKQKDKKKPQEQVNQAVISARLHQIDHAREINEICRVQKIDDTLRKQILDLVFAAESPKGAQKGRVGKDPLQPKLFRALKASDAFQQYRIAALTGNLRIYRNGVTVPLDRDEKLIVFNYLVNLPKKEEPSWLKIAEILNIDRGQLRGTATMTDDGERAGATPPVHDTNRTILDSKVKPLAHWWENASDDERAAMLKSLSNSEVEDFDSPAGAQVQAFFADLDETEQEKLDSLHLPMGRAAYSEDTLMRLTNRMLDENLDLYEARLAEFGIPKDWAPPAPRIGEPVGNPAVDRVLKGVARWLEAAADEWGAPKSVVIEHVRDGFVSKSKAIEIDRANNNRHKRNRELFQKMQENLGIEGKVRSSDLWRYQSVQRQNCQCAYCGSPITYTTCEMDHIVPRAGEGSTNTRDNLVATCHRCNLAKKNIPFAVWAEKSTIPGVSVKEALDRTRHWSEDSGMSKKDFQKFRKNVCERLNRTVVDEPLDARSMESVAWMANELRGRVAQRFQEENTTVNVYRGALTAEARRAAGITDKLRFIDGTGKSRLDRRHHAVDAAVVAFIHNYVAETLAIRSNKKREAQLLQGTSQWKEFTGSDDKHRAVWNAWIPKMQKLAVLLQIALDEDRIVVTSNLRLRLGNGRAHEDTISELKTIRVGDAISVTDIDRASSEALWCALTREPDFDEKDGLPENPNRRIRVHGTWYDAEDEIEVFPVGAGAIKVRGGYAKLSRFHHARVYKIPGKKAPIYCMLRVYNTDLVQHRHEDLFSVELKPQTMSVRQAEPKLRKALAENTAEYLGWLVTDDELIIDTSTFRTGLIEEMQSEFGLVRRWRLDGFDSPSLLTLRPLHMSAEGLPDDCALGSRKIIDTKGWRVSINKVFNAGNTTVVRRDALGRARLTSNAHLPISWKEE

SEQ ID NO: 172 - protein, 1084 aa, Corynebacterium diphtheriae
MKYHVGIDVGTFSVGLAAIEVDDAGMPIKTLSLVSHIHDSGLDPDKIKSAVTRLASSGIARRTRRLYRRKRRRLQQLDKFIQRQGWPVIELEDYSDPLYPWKVRAELAASYIADEKERGEKLSVALRHIARHRGWRNPYAKVSSLYLPDEPSDAFKAIREEIKRASGQPVPETATVGQMVTLCELGTLKLRGEGGVLSARLQQSDHAREIQEICRMQEIGQELYRKIIDVVFAAESPKGSASSRVGKDPLQPGKNRALKASDAFQRYRIAALIGNLRVRVDGEKRILSVEEKNLVFDHLVNLAPKKEPEWVTIAEILGIDRGQLIGTATMTDDGERAGARPPTHDTNRSIVNSRIAPLVDWWKTASALEQHAMVKALSNAEVDDFDSPEGAKVQAFFADLDDDVHAKLDSLHLPVGRAAYSEDTLVRLTRRMLADGVDLYTARLQEFGIEPSWTPPAPRIGEPVGNPAVDRVLKTVSRWLKSATKTWGAPERVIIEHVREGFVTEKRAREMDGDMRRRAARNAKLFQEMQEKLNVQGKPSRADLWRYQSVQRQNCQCAYCGSPITFSNSEMDHIVPRAGQGSTNTRENLVAVCHRCNQSKGNTPFAIWAKNTSIEGVSVKEAVERTRHWVTDTGMRSTDFKKFTKAVVERFQRATMDEEIDARSMESVAWMANELRSRVAQHFASHGTTVRVYRGSLTAEARRASGISGKLEFLDGVGKSRLDRRHHAIDAAVIAFTSDYVAETLAVRSNLKQSQAHRQEAPQWREFTGKDAEHRAAWRVWCQKMEKLSALLTEDLRDDRVVVMSNVRLRLGNGSAHEETIGKLSKVKLGSQLSVSDIDKASSEALWCALTREPDFDPKDGLPANPERHIRVNGTHVYAGDNIGLFPVSAGSIALRGGYAELGSSFHHARVYKITSGKKPAFAMLRVYTIDLLPYRNQDLFSVELKPQTMSMRQAEKKLRDALATGNAEYLGWLVVDDELVVDTSKIATDQVKAVEAELGTIRRWRVDGFFGDTRLRLRPLQMSKEGIKKESAPELSKIIDRPGWLPAVNKLFSEGNVTVVRRDSLGRVRLESTAHLPVTWKVQ

SEQ ID NO: 173 - protein, 1084 aa, Corynebacterium diphtheriae
MKYHVGIDVGTFSVGLAAIEVDDAGMPIKTLSLVSHIHDSGLDPDKMKSAVTRLASSGIARRTRRLYRRKRRRLQQLDKFIQRQGWPVIELEDYSDPLYPWKVRAELAASYIADEKERGEKLSVALRHIARHRGWRNPYAKVSSLYLPDEPSDAFKSIREEIKRASGQPVPETATVGQMVTLCELGTLKLRGEGGVLSARLQQSDHAREIQEICRMQEIGQELYRKIIDVVFAAESPKGSASSRVGKDPLQPGKNRALKASDAFQRYRIAALIGNLRVRVDGEKRILSVEEKNLVFDHLVNLAPKKEPEWVTIAEILGIDRGQLIGTATMTDDGERAGARPPTHDTNRSIVNSRIAPLVDWWKTASALEQHAMVKALSNAEVDDFDSPEGAKVQAFFADLDDDVHAKLDSLHLPVGRAAYSEDTLVRLTRRMLADGVDLYTARLQEFGIEPSWTPPAPRIGEPVGNPAVDRVLKTVSRWLESATKTWGAPERVIIEHVREGFVTEKRAREMDGDMRRRAARNAKLFQEMQEKLNVQGKPSRADLWRYQSVQRQNCQCAYCGSPITFSNSEMDHIVPRAGQGSTNTRENLVAVCHRCNQSKGNTPFAIWAKNTSIEGVSVKEAVERTRHWVTDTGMRSTDFKKFTKAVVERFQRATMDEEIDARSMESVAWMANELRSRVAQHFASHGTTVRVYRGSLTAEARRASGISGKLEFLDGVGKSRLDRRHHAIDAAVIAFTSDYVAETLAVRSNLKQSQAHRQEAPQWREFTGKDAEHRAAWRVWCQKMEKLSALLTEDLRDDRVVVMSNVRLRLGNGSAHEETIGKLSKVKLGSQLSVSDIDKASSEALWCALTREPDFDPKDGLPANPERHIRVNGTHVYAGDNIGLFPVSAGSIALRGGYAELGSSFHHARVYKITSGKKPAFAMLRVYTIDLLPYRNQDLFSVELKPQTMSMRQAEKKLRDALATGNAEYLGWLVVDDELVVDTSKIATDQVKAVEAELGTIRRWRVDGFFGDTRLRLRPLQMSKEGIKKESAPELSKIIDRPGWLPAVNKLFSEGNVTVVRRDSLGRVRLESTAHLPVTWKVQ

SEQ ID NO: 174 - protein, 1084 aa, Corynebacterium diphtheriae
MKYHVGIDVGTFSVGLAAIEVDDAGMPIKTLSLVSHIHDSRLDPDKIKSAVTRLASSGIARRTRRLYRRKRRRLQQLDKFIQRQGWPVIELEDYSDPLYPWKVRAELAASYIADEKERGEKLSVALRHIARHRGWRNPYAKVSSLYLPDEPSDAFKAIREEIKRASGQPVPETATVGQMVTLCELGTLKLRGEGGVLSARLQQSDHAREIQEICRMQEIGQELYRKIIDVVFAAESPKGSASSRVGKDPLQPGKNRALKASDAFQRYRIAALIGNLRVRVDGEKRILSVEEKNLVFDHLVNLAPKKEPEWVTIAEILGIDRGQLIGTATMTDDGERAGARPPTHDTNRSIVNSRIAPLVDWWKTASALEQHAMVKALSNAEVDDFDSPEGAKVQAFFADLDDDVHAKLDSLHLPVGRAAYSEDTLVRLTRRMLADGVDLYTARLQEFGIEPSWTPPAPRIGEPVGNPAVDRVLKTVSRWLESATKTWGAPERVIIEHVREGFVTEKRAREMDGDMRRRAARNAKLFQEMQEKLNIQGKPSRADLWRYQSVQRQNCQCAYCGSPITFSNSEMDHIVPRAGQGSTNTRENLVAVCHRCNQSKGNTPFAIWAKNTSIEGVSVKEAVERTRHWVTDTGMRSTDFKKFTKAVVERFQRVTMDEEIDARSMESVAWMANELRSRVAQHFASRGTTVRVYRGSLTAEARRASGISGKLEFLDGVGKSRLDRRHHAIDAAVIAFTSDYVAETLAVRSNLKQSQAHRQEAPQWREFTGKDAEHRAAWRVWCQKMEKLSALLTEDLRDDRVVVMSNVRLRLGNGSAHEETIGKLSKVKLGSQLSVSDIDKASSEALWCALTREPDFDPKDGLPANPERHIRVNGTHVYAGDNIGLFPVSAGSIALRGGYAELGSSFHHARVYKITSGKKPAFAMLRVYTIDLLPYRNQDLFSVELKPQTMSMRQAEKKLRDALATGNAEYLGWLVVDDELVVDTSKIATDQVKAVEAELGTIRRWRVDGFFGDTRLRLRPLQMSKEGIKKESAPELSKIIDRPGWLPAVNKLFSEGNVTVVRRDSLGRVRLESTAHLPVTWKVQ

SEQ ID NO: 175 - protein, 1084 aa, Corynebacterium diphtheriae
  REGION 1..1084: note = Corynebacterium diphtheriae bv. intermedius str. NCTC 5011
MKYHVGIDVGTFSVGLAAIEVDDAGMPIKTLSLVSHIHDSGLDPDEIKSAVTRLASSGIARRTRRLYRRKRRRLQQLDKFIQRQGWPVIELEDYSDPLYPWKVRAELAASYIADEKERGEKLSVALRHIARHRGWRNPYAKVSSLYLPDGPSDAFKAIREEIKRASGQPVPETATVGQMVTLCELGTLKLRGEGGVLSARLQQSDHAREIQEICRMQEIGQELYRKIIDVVFAAESPKGSASSRVGKDPLQPGKNRALKASDAFQRYRIAALIGNLRVRVDGEKRILSVEEKNLVFDHLVNLAPKKEPEWVTIAEILGIDRGQLIGTATMTDDGERAGARPPTHDTNRSIVNSRIAPLVDWWKTASALEQHAMVKALSNAEVDDFDSPEGAKVQAFFADLDDDVHAKLDSLHLPVGRAAYSEDTLVRLTRRMLADGVDLYTARLQEFGIEPSWTPPAPRIGEPVGNPAVDRVLKTVSRWLESATKTWGAPERVIIEHVREGFVTEKRAREMDGDMQRRAARNAKLFQEMQEKLNVQGKPSRADLWRYQSVQRQNCQCAYCGSPITFSNSEMDHIVPRAGQGSTNTRENLVAVCHRCNQSKGNTPFAIWAKNTSIEGVSVKEAVERTRHWVTDTGMRSPDFKKFTKAVVERFQRATMDEEIDARSMESVAWMANELRSRVAQHFASHGTTVRVYRGSLTAEARRASGISGKLKFFDGVGKSRLDRRHHAIDAAVIAFTSDYVAETLAVRSNLKQSQAHRQEAPQWREFTGKDAEHRAAWRVWCQKMEKLSALLTEDLRDDRVVVMSNVRLRLGNGSAHKETIGKLSKVKLGSQLSVSDIDKASSEALWCALTREPDFDPKEGLPANPERHIRVNGTHVYAGDNIGLFPVSAGSIALRGGYAELGSSFHHARVYKITSGKKPAFAMLRVYTIDLLPYRNQDLFSVELKPQTMSMRQAEKKLRDALATGNAEYLGWLVVDDELVVDTSKIATDQVKAVEAELGTIRRWRVDGFFSPSKLRLRPLQMSKEGIKKESAPELSKIIDRPGWLPAVNKLFSDGNVTVVRRDSLGRVRLESTAHLPVTWKVQ

SEQ ID NO: 176 - protein, 1084 aa, Corynebacterium diphtheriae
MKYHVGIDVGTFSVGLAAIEVDDAGMPIKTLSLVSHIHDSGLDPDKIKSAVTRLASSGIARRTRRLYRRKRRRLQQLDKFIQRQGWPVIELEDYSDPLYPWKVRAELAASYIADEKERGEKLSVALRHIARHRGWRNPYAKVSSLYLPDEPSDAFKAIREEIKRASGQPVPETATVGQMVTLCELGTLKLRGEGGVLSARLQQSDHAREIQEICRMQEIGQELYRKIIDVVFAAESPKGSASSRVGKDPLQPGKNRALKASDAFQRYRIAALIGNLRVRVDGEKRILSVEEKNLVFDHLVNLAPKKEPEWVTIAEILGIDRGQLIGTATMTDDGERAGARPPTHDTNRSIVNSRIAPLVDWWKTASALEQHAMVKALSNAEVDDFDSPEGAKVQAFFADLDDDVHAKLDSLHLPVGRAAYSEDTLVRLTRRMLADGVDLYTARLQEFGIEPSWTPPAPRIGEPVGNPAVDRVLKTVSRWLESATKTWGAPERVIIEHVREGFVTEKRAREMDGDMRRRAARNAKLFQEMQEKLNVQGKPSRADLWRYQSVQRQNCQCAYCGSPITFSNSEMDHIVPRAGQGSTNTRENLVAVCHRCNQSKGNTPFAIWAKNTSIEGVSVKEAVERTRHWVTDTGMRSTDFKKFTKAVVERFQRATMDEEIDARSMESVAWMANELRSRVAQHFASHGTTVRVYRGSLTAEARRASGISGKLEFLDGVGKSRLDRRHHAIDAAVIAFTSDYVAETLAVRSNLKQSQAHRQEAPQWREFTGKDAEHRAAWRVWCQKMEKLSALLTEDLRDDRVVVMSNVRLRLGNGSAHEETIGKLSKVKLGSQLSVSDIDKASSEALWCALTREPDFDPKDGLPANPERHIRVNGTHVYAGDNIGLFPVSAGSIALRGGYAELGSSFHHARVYKITSGKKPAFAMLRVYTIDLLPYRNQDLFSVELKPQTMSMRQAEKKLRDALATGNAEYLGWLVVDDELVVDTSKIATDQVKAVEAELGTIRRWRVDGFFGDTRLRLRPLQMSKEGIKKESAPELSKIIDRPGWLPAVNKLFSEGNVTVVRRDSLGRVRLESTAHLPVTWKVQ

SEQ ID NO: 177 - protein, 1084 aa, Corynebacterium diphtheriae
MKYHVGIDVGTFSVGLAAIEVDDAGMPIKTLSLVSHIHDSGLDPDEIKSAVTRLASSGIARRTRRLYRRKRRRLQQLDKFIQRQGWPVIELEDYSDPLYPWKVRAELAASYIADEKERGEKLSVALRHIARHRGWRNPYAKVSSLYLPDGPSDAFKAIREEIKRASGQPVPETATVGQMVTLCELGTLKLRGEGGVLSARLQQSDHAREIQEICRMQEIGQELYRKIIDVVFAAESPKGSASSRVGKDPLQPGKNRALKASDAFQRYRIAALIGNLRVWVDGEKRILSVEEKNLVFDHLVNLTPKKEPEWVTIAEILGIDRGQLIGTATMTDDGERAGARPPTHDTNRSIVNSRIAPLVDWWKTASALEQHAMVKALSNAEVDDFDSPERAKVQAFFADLDDDVHAKLDSLHLPVGRAAYSEDTLVRLTRRMLSDGVDLYTARLQEFGIEPSWTPPTPRIGEPVGNPAVDRVLKTVSRWLESATKTWGAPERVIIEHVREGFVTEKRAREMDGDMRRRAARNAKLFQEMQEKLNVQGKPSRADLWRYQSVQRQNCQCAYCGSPITFSNSEMDHIVPRAGQGSTNTRENLVAVCHRCNQSKGNTPFAIWAKNTSIEGVSVKEAVERTRHWVTDTGMRSTDFKKFTKAVVERFQRATMDEEIDARSMESVAWMANELRSRVAQHFASHGTTVRVYRGSLTAEARRASGISGKLEFLDGVGKSRLDRRHHAIDAAVIAFTSDYVAETLAVRSNLKQSQAHRQEAPQWREFTGKDAEHRATWRVWCQKMEKLSALLTEDLRDDRVVVMSNVRLRLGNGSAHEETIGKLSKVKLGSQLSVSDIDKASSEALWCALTREPDFDPKDGLPANPERHIRVNGTHVYAGDNIGLFPVSAGSIALRGGYAELGSSFHHARVYKITSGKKPAFAMLRVYTIDLLPYRNQDLFSVELKPQTMSMRQAEKKLRDALATGNAEYLGWLVVDDELVVDTSKIATDQVKAVEAELGTIRRWRVDGFFGDTRLRLRPLQMSKEGIKKESAPELSKIIDRPGWLPAVNKLFSEGNVTVVRRDSLGRVRLESTAHLPVTWKVQ

SEQ ID NO: 178 - protein, 1084 aa, Corynebacterium diphtheriae
MKYHVGIDVGTFSVGLAAIEVDDAGMPIKTLSLVSHIHDSGLDPDEIKSAVTRLASSGIARRTRRLYRRKRRRLQQLDKFIQRQGWPVIELEDYSDPLYPWKVRAELAASYIADEKERGEKLSVALRHIARHRGWRNPYAKVSSLYLPDGPSDAFKAIREEIKRASGQPVPETATVGQMVTLCELGTLKLRGEGGVLSARLQQSDYAREIQEICRMQEIGQELYRKIIDVVFAAESPKGSASSRVGKDPLQPGKNRALKASDAFQRYRIAALIGNLRVRVDGEKRILSVEEKNLVFDHLVNLTPKKEPEWVTIAEILGIDRGQLIGTATMTDDGERAGARPPTHDTNRSIVNSRIAPLVDWWKTASALEQHAMVKALSNAEVDDFDSPEGAKVQAFFADLDDDVHAKLDSLHLPVGRAAYSEDTLVRLTRRMLSDGVDLYTARLQEFGIEPSWTPPTPRIGEPVGNPAVDRVLKTVSRWLESATKTWGAPERVIIEHVREGFVTEKRAREMDGDMRRRAARNAKLFQEMQEKLNVQGKPSRADLWRYQSVQRQNCQCAYCGSPITFSNSEMDHIVPRAGQGSTNTRENLVAVCHRCNQSKGNTPFAIWAKNTSIEGVSVKEAVERTRHWVTDTGMRSTDFKKFTKAVVERFQRATMDEEIDARSMESVAWMANELRSRVAQHFASHGTTVRVYRGSLTAEARRASGISGKLKFFDGVGKSRLDRRHHAIDAAVIAFTSDYVAETLAVRSNLKQSQAHRQEAPQWREFTGKDAEHRAAWRVWCQKMEKLSALLTEDLRDDRVVVMSNVRLRLGNGSAHKETIGKLSKVKLSSQLSVSDIDKASSEALWCALTREPGFDPKEGLPANPERHIRVNGTHVYAGDNIGLFPVSAGSIALRGGYAELGSSFHHARVYKITSGKKPAFAMLRVYTIDLLPYRNQDLFSVELKPQTMSMRQAEKKLRDALATGNAEYLGWLVVDDELVVDTSKIATDQVKAVEAELGTIRRWRVDGFFSPSKLRLRPLQMSKEGIKKESAPELSKIIDRPGWLPAVNKLFSDGNVTVVRRDSLGRVRLESTAHLPVTWKVQ

SEQ ID NO: 179 - protein, 1084 aa, Corynebacterium diphtheriae
MKYHVGIDVGTFSVGLAAIEVDDAGMPIKTLSLVSHIHDSGLDPDKMKSAVTRLASSGIARRTRRLYRRKRRRLQQLDKFIQRQGWPVIELEDYSDPLYPWKVRAELAASYIADEKERGEKLSVALRHIARHRGWRNPYAKVSSLYLPDEPSDAFKSIREEIKRASGQPVPETATVGQMVTLCELGTLKLRGEGGVLSARLQQSDHAREIQEICRMQEIGQELYRKIIDVVFAAESPKGSASSRVGKDPLQPGKNRALKASDSFQRYRIAALISNLRVRVDGEKRILSVEEKNLVFDHLVNLAPKKEPEWVTIAEILGIDRGQLIGTATMTDDGERAGARPPTHDTNRSIVNSRIAPLVDWWKTASALEQHAMVKALSNAEVDDFDSPEGAKVQAFFADLDDDVHAKLDSLHLPVGRAAYSEDTLVRLTRRMLADGVDLYTARLQEFGIEPSWTPPAPRIGEPVGNPAVDRVLKTVSRWLESATKTWGAPERVIIEHVRDGFVTEKRAREMDGDMRRRAARNAKLFQEMQEKLNVQGKPSRADLWRYQSVQRQNCQCAYCGSPITFSNSEMDHIVPRAGQGSTNTRENLVAVCHRCNQSKGNTPFAIWAKNTSIEGVSVKEAVERTRHWVTDTGMRSTDFKKFTKAVVERFQRATMDEEIDARSMESVAWMANELRSRVAQHFASHGTTVRVYRGSLTAEARRASGISGKLEFLDGVGKSRLDRRHHAIDAAVIAFTSDYVAETLAVRSNLKQSQAHRQEAPQWREFTGKDAEHRAAWRVWCQKMEKLSALLTEDLRDDRVVVMSNVRLRLGNGSAHEETIGKLSKVKLGSQLSVSDIDKASSEALWCALTREPDFDPKDGLPANPERHIRVNGTHVYAGDNIGLFPVSAGSIALRGGYAELGSSFHHARVYKITSGKKPAFAMLRVYTIDLLPYRNQDLFSVELKPQTMSMRQAEKKLRDALATGNAEYLGWLVVDDELVVDTSKIATDQVKAVEAELGTIRRWRVDGFFGDTRLRLRPLQMSKEGIKKELAPELSKIIDRPGWLPAVNKLFSEGNVTVVRRDSLGRVRLESTAHLPVTWKVQ

SEQ ID NO: 180 - protein, 1089 aa, Corynebacterium matruchotii
  REGION 1..1089: note = Corynebacterium matruchotii ATCC 14266
MNSANVNYRVGIDVGSYSLGMAAIAIDDDGKPTEILSAISLIHDSGVDPDSAKSAATRLATSGIARRTRRLYRRKRKRLAKLDKFISSQGWPLKEFEKYEDPFYPWRVRAELATTAITDQQELGEKLSIALRHIARHRGWRNPYSKVTALYTVTEPSDAFLAMQEECAKQLGRTIPETITVGQLVTGMNLGKTRLRGENSLLAARPRQSDNANEIHTIAKVQGLSNELVRQIIDHVFAAESPKGSAAEQVGKDPLQPTKKRALKASDAFQQYRIAALIGNLRIRGGKGNRRLTTEETRLVFDYLRSLPAKQEPTWQLVAEQLKIDRGNLVGTAIMTDDGERAGAKPPVHDTNRIMENTKIKPLATWWKSADADARAAMVKALSNAEVDDFDSQAGAQVQEFFFGISDEDQEKLDGLHLPIGRAAYSEDTLDRLTKRMIGEGMDLYEARQAEFKISNDWAPPAPEIGERVGNPAVDRVLKATARWLNAAERQWGAPKSVNIEHVRAAFMSESSARELDRDNQQRAKRNVKVVAEMQEKLGIEGRPSRADVWRFQSIQRQNGKCAYCGAEISFKNSEMDHIIPQAGEGSTNTRDNLVAVCRECNSSKSNIAFAVWAENTSRPGVSVQKAIERTHHWVTDSGLRKPEFDKFRKQVCDRLRRKATDEPIDARSLESVAWMANELRSRIAQKFKDGDTKVRVYKGALTAEARRASGISGKLEFVDGKGKSRLDRRHHAVDAAVVAFTSNYVAETLALRSNMKFDQELRRKAPQWREFTGSDHVHQVEWTKWKYRMQALAELLNNALVQDRIVVMHNLRLRLGNGAAHEDTIGKLTRLKVGDAISTTDIDRASSEALWCALTRDPDYDPKTGLPENPNRTIRIHGTHLTASDEITVFPVAAASIPIRDGFAKLGSNYHHVRLFRVPSGKKYKYCLMQVYTVDLLKFRKEDLFTVELKPQTISVRTCEALLRKALANGTAEYLGWLVSDDELLIDTSSFDTPGIVKLREEYGPVNRWRLAGLTSVTRLNLRPLYLSKEGLKPNVNPEIKKIIDNRSWIITVNKLFSSGHVKIIRRDALGRPRLHSAAHLPICWEVK

SEQ ID NO: 181 - protein, 1069 aa, Corynebacterium matruchotii
  REGION 1..1069: note = Corynebacterium matruchotii ATCC 33806
MAAIAIDDDGKPTEILSAISLIHDSGVDPDSAKSAATRLATSGIARRTRRLYRRKRKRLAKLDKFISSQGWPLKEFEKYEDPFYPWRVRAELATTAITDQQELGEKLSIALRHIARHRGWRNPYSKVTALYTVTEPSDAFLAMQEECAKQLGRTIPETITVGQLVTGMNLGKTRLRGENSLLAARPRQSDNANEIHTIAKVQGLSNELVRQIIDHVFAAESPKGSAAEQVGKDPLQPTKKRALKASDAFQQYRIAALIGNLRIRGGKGNRRLTTEETRLVFDYLRSLPAKQEPTWQLVAEQLKIDRGNLVGTAIMTDDGERAGAKPPVHDTNRIMENTKIKPLATWWKSADADARAAMVKALSNAEVDDFDSQAGAQVQEFFFGISDEDQEKLDGLHLPIGRAAYSEDTLDRLTKRMIGEGMDLYEARQAEFKISNDWAPPAPEIGERVGNPAVDRVLKATARWLNAAERQWGAPKSVNIEHVRAAFMSESSARELDRDNQQRAKRNVKVVAEMQEKLGIEGRPSRADVWRFQSIQRQNGKCAYCGAEISFKNSEMDHIIPQVGEGSTNTRDNLVAVCRECNSSKSNIAFAVWAENTSRPGVSVQKAIERTHHWVTDSGLRKPEFDKFRKQVCDRLRRKATDEPIDARSLESVAWMANELRSRIAQKFKDGDTKVRVYKGALTAEARRASGISGKLEFVDGKGKSRLDRRHHAVDAAVVAFTSNYVAETLALRSNMKFDQELRRKAPQWREFTGSDHVHQVEWTKWKYRMQALAELLNNALVQDRIVVMHNLRLRLGNGAAHEDTIGKLTRLKVGDAISTTDIDRASSEALWCALTRDPDYDPKTGLPENPNRTIRIHGTHLTASDEITVFPVAAASIPIRDGFAKLGSNYHHVRLFRVPSGKKYKYCLMQVYTVDLLKFRKEDLFTVELKPQTISVRTCEALLRKALANGTAEYLGWLVSDDELLIDTSSFDTPGIVKLREEYGPVNRWRLAGLTSVTRLNLRPLYLSKEGLKPNVNPEIKKIIDNRSWIITVNKLFSSGHVKIIRRDALGRPRLHSAAHLPICWEVK

SEQ ID NO: 182 - protein, 1079 aa, Dinoroseobacter shibae
MRLGLDIGTSSIGWWLYETDGAGSDARITGVVDGGVRIFSDGRDPKSGASLAVDRRAARAMRRRRDRYLRRRATLMKVLAETGLMPADPAEAKALEALDPFALRAAGLDEPLPLPHLGRALFHLNQRRGFKSNRKTDRGDNESGKIKDATARLDMEMMANGARTYGEFLHKRRQKATDPRHVPSVRTRLSIANRGGPDGKEEAGYDFYPDRRHLEEEFHKLWAAQGAHHPELTETLRDLLFEKIFFQRPLKEPEVGLCLFSGHHGVPPKDPRLPKAHPLTQRRVLYETVNQLRVTADGREARPLTREERDQVIHALDNKKPTKSLSSMVLKLPALAKVLKLRDGERFTLETGVRDAIACDPLRASPAHPDRFGPRWSILDADAQWEVISRIRRVQSDAEHAALVDWLTEAHGLDRAHAEATAHAPLPDGYGRLGLTATTRILYQLTADVVTYADAVKACGWHHSDGRTGECFDRLPYYGEVLERHVIPGSYHPDDDDITRFGRITNPTVHIGLNQLRRLVNRIIETHGKPHQIVVELARDLKKSEEQKRADIKRIRDTTEAAKKRSEKLEELEIEDNGRNRMLLRLWEDLNPDDAMRRFCPYTGTRISAAMIFDGSCDVDHILPYSRTLDDSFPNRTLCLREANRQKRNQTPWQAWGDTPHWHAIAANLKNLPENKRWRFAPDAMTRFEGENGFLDRALKDTQYLARISRSYLDTLFTKGGHVWVVPGRFTEMLRRHWGLNSLLSDAGRGAVKAKNRTDHRHHAIDAAVIAATDPGLLNRISRAAGQGEAAGQSAELIARDTPPPWEGFRDDLRVRLDRIIVSHRADHGRIDHAARKQGRDSTAGQLHQETAYSIVDDIHVASRTDLLSLKPAQLLDEPGRSGQVRDPQLRKALRVATGGKTGKDFENALRYFASKPGPYQAIRRVRIIKPLQAQARVPVPAQDPIKAYQGGSNHLFEIWRLPDGEIEAQVITSFEAHTLEGEKRPHPAAKRLLRVHKGDMVALERDGRRVVGHVQKMDIANGLFIVPHNEANADTRNNDKSDPFKWIQIGARPAIASGIRRVSVDEIGRLRDGGTRPI

SEQ ID NO: 183 - protein, 1332 aa, Dolosigranulum pigrum
  REGION 1..1332: note = Dolosigranulum pigrum ATCC 51524
MQKNYTIGLDIGTNSVGWAVMKDDYTLIRKRMKVLGNTDIKKIKKNFWGVRLFDEGETAKETRLKRGTRRRYQRRRNRLIYLQDIFQQPMLAIDENFFHRLDDSFFVPDDKSYDRHPIFGSLEEEVAYHNTYPTIYHLRKHLADNPEKADLRLVYTALAHIVKYRGHFLIEGELNTENTSISETFEQFLDTYSDIFKEQLVGDISKVEEILSSKQSRSRKHEQIMALFPNENKLGNFGRFMMLIVGNTSNFKPVFDLDDEYKLKLSDETYEEDLDTLLGMTDDVFLDVFMAAKNVYDAVEMSAIISTDTGNSKAVLSNQMINFYDEHKVDLAQLKQFFKTHLPDKYYECFSDPSKNGYAGYIDGKTNQEDFYKYIEKVMKTIKSDKKDYFLDKIDREVFLRKQRSFYNSVIPHQIHLQEMQAILDRQSQYYPFLAENRDKIESLVTFRIPYYVGPLTVSDQSEFAWMERQSDEPIRPWNFDEIVNKERSAEKFIERMTNMDTYLLEEKVLPKRSLLYQTFEVYNELTKVRYTNEQGKTEKLNRQQKAEIIETLFKQKNRVREKDIANYLEQYGYVDGTDIKGVEDKFNASLSTYNDLAKIDGAKAYLDDPEYADVWEDIIKILTIFEDKAMRKKQLQTYSDTLSPEILKKLERKHYTGWGRFSKKLINGLRDEGSNKTILDYLKSDEGSSGPTNRNFMQLIRDNTLSFKKKIEDAQTIEDTTHIYDTVAELPGSPAIKKGIRQALKIVEEIIDIIGYEPENIVVEMARESQTTKKGKDLSKERLEKLTEAIKEFDGPSDVKVKDLKNENLRNDRLYLYYLQNGRDMYTNEPLDINNLSKYDIDHIIPQSFTTDNSIDNKVLVSRTKNQGNKSDDVPSINIVHKMKPFWRQLHKAGLISDRKFKNLTKAEHGGLTEADRAHFLNRQLVETRQITKHVANLLDSQYNTAEEQRINIVLLKSSMTSRFRKEFKLYKVREINDYHHGHDAYLNAVVATTIMKVYPNLKPQFVYGQYKKTSMFKEEKATARKHFYSNITKFFKKEKVVNEETGEILWDTERHLSTIKRVLSWKQMNIVKKVEKQKGQLWKETIYPKGDSSKLIPVKEGMDPQKYGGLSQVSEAFAVVITHEKGKKKQLKSDLISIPIVDQKAYEQHPTAYLEEAGYNNPTVLHELFKYQLFELEDGSRRMIASAKEFQKGNQMVLPLELVELLYHANRYDKVKFPDSIEYVHDNLAKFDDLLEYVIDFSNKYINADKNVQKIQKIYKEHGTEDVELTVESFVNLMTFTAMGAPATFKFYGESITRSRYTSITEFRGSTLIFQSITGLYETRYKLEDN

SEQ ID NO: 184 - protein, 1340 aa, Dorea longicatena
  REGION 1..1340: note = Dorea longicatena DSM 13814
MEQEYYLGLDMGTGSVGWAVTDSEYHVLRKHGKALWGVRLFESASTAEERRMFRTSRRRLDRRNWRIEILQEIFAEEISKKDPGFFLRMKESKYYPEDKRDINGNCPELPYALFVDDDFTDKDYHKKFPTIYHLRKMLMNTEETPDIRLVYLAIHHMMKHRGHFLLSGDINEIKEFGTTFSKLLENIKNEELDWNLELGKEEYAVVESILKDNMLNRSTKKTRLIKALKAKSICEKAVLNLLAGGTVKLSDIFGLEELNETERPKISFADNGYDDYIGEVENELGEQFYIIETAKAVYDWAVLVEILGKYTSISEAKVATYEKHKSDLQFLKKIVRKYLTKEEYKDIFVSTSDKLKNYSAYIGMTKINGKKVDLQSKRCSKEEFYDFIKKNVLKKLEGQPEYEYLKEELERETFLPKQVNRDNGVIPYQIHLYELKKILGNLRDKIDLIKENEDKLVQLFEFRIPYYVGPLNKIDDGKEGKFTWAVRKSNEKIYPWNFENVVDIEASAEKFIRRMTNKCTYLMGEDVLPKDSLLYSKYMVLNELNNVKLDGEKLSVELKQRLYTDVFCKYRKVTVKKIKNYLKCEGIISGNVEITGIDGDFKASLTAYHDFKEILTGTELAKKDKENIITNIVLFGDDKKLLKKRLNRLYPQITPNQLKKICALSYTGWGRFSKKFLEEITAPDPETGEVWNIITALWESNNNLMQLLSNEYRFMEEVETYNMGKQTKTLSYETVENMYVSPSVKRQIWQTLKIVKELEKVMKESPKRVFIEMAREKQESKRTESRKKQLIDLYKACKNEEKDWVKELGDQEEQKLRSDKLYLYYTQKGRCMYSGEVIELKDLWDNTKYDIDHIYPQSKTMDDSLNNRVLVKKKYNATKSDKYPLNENIRHERKGFWKSLLDGGFISKEKYERLIRNTELSPEELAGFIERQIVETRQSTKAVAEILKQVFPESEIVYVKAGTVSRFRKDFELLKVREVNDLHHAKDAYLNIVVGNSYYVKFTKNASWFIKENPGRTYNLKKMFTSGWNIERNGEVAWEVGKKGTIVTVKQIMNKNNILVTRQVHEAKGGLFDQQIMKKGKGQIAIKETDERLASIEKYGGYNKAAGAYFMLVESKDKKGKTIRTIEFIPLYLKNKIESDESIALNFLEKGRGLKEPKILLKKIKIDTLFDVDGFKMWLSGRTGDRLLFKCANQLILDEKIIVTMKKIVKFIQRRQENRELKLSDKDGIDNEVLMEIYNTFVDKLENTVYRIRLSEQAKTLIDKQKEFERLSLEDKSSTLFEILHIFQCQSSAANLKMIGGPGKAGILVMNNNISKCNKISIINQSPTGIFENEIDLLKI

SEQ ID NO: 185 - protein, 1380 aa, unidentified
  REGION 1..1380: note = Eggerthella sp. YY7918
  source 1..1380: note = Eggerthella sp.
MNLRHVGNYNIGLDMGTASVGWAAIDEQGELLHFKGKPTWGSRLFDSANTAATARMPRGQRRRYIRRRWRLDLLQKFFSEEMAEKDPEFFIRLRQSSLWPEDREGGHTAYHWPLFNDSDFNEKEYYEKFPTIFHLRQWLMETDEKADIRLIYLAFHNIVKHRGNFLQENNDSLSAQNANMRESLESFCIALEEWCDEKELTCSCDPQKLEHLFKEVKYRSDIRDGFAALLGLACSGENEVDVKAMAKEMGKAIVGYKADFSKIFTECDKEGSSFRLSDDEGPEAFLDICPDDGIALFEAIQMVYSSFILTGMLTEKGLSLSKISAYNQYGQDLESLKALVKEYVPNEYSSFFRGPTYSGSTEYDPSKAQGYTRYNLGPSKKGSGAKPMAYEDFKKSVEQLFANTNAINDERYKEMMGRFAEEKFLRRLRTSDNGRIPFQLNLEEMTAIIINQGKYYPFLLEQQEKLESLVRFRIPYYVGPLTRINARLDSKGNACFAWSKRKDGMDSASIKPWNWDEVIDKHASAQAFIERMTGTCTYLRGEPVLPRCSLLYEEYCVLNELNGARWTQDGDKFIRFDYKDRSDIIEELFKKRRGRIQYAAVADWMKQERSHANVHVSGGQGENAFESRLSSYHFFCNDVFGVDELPGSYVDMVEEIILWSTLFEDRSILREEIQRKYGDVLNEEQIKTICKKRFSGWGRLSRKLLCSLKAQTDNGPKSIMDILQEGDQNNGRVGRAMVFQEILHDEQLGFEQKIEEENTQSMLEGENLLIEDLPGSPAIRRSINQAVRIVDEIVGIAGHAPDNIFIEVTREDDTKKKGKRTTTRYSNIQKALEALKEEGAEALRELKTYKHNELDKRLSLYFMQNGKSLYSGIPLDIRRLSEYQIDHIIPQSYIKDDSYENMALVLPGENQSKADNLLISQDIRIKMKATWTALHKAGLMGDKKYNNLMNSSISDAKMKGFINRQLVETSQSVKLTQMMLSQKYPGAKVRPIKASISSQLRDACDLVKCREANDYHHAHDAYLACQVGRFVLKRHSSMFDNPIGMTKVIRDFVKRQGQEFKRNGKLPAYASRSGFIVQSFMRSGFDAETGELLRDDWNAPFEIARIKRCLNYRDCYISRMPMEDSGAFWDATIYSPKAGKKGALPVKQGLPVEKYGSYSREQFAYFFVYKAYNPKKKAYRLEFEAVPVRVASAVETRENALEEYAKSVAKQAGLEFVEVARPKVYKYQLIELGEDRLYITGKREVRNASQLAFSLDEIDLLKRLAEGEETSSEERERLFDVLIEKYARYAPRLARQLSVDSMSATFETLNAEEQLGILLSLVEIANGKRNMIDLSSAGGSKNAGCMNPTFSSELSSPGSNFTFIDQSVTGMFERRQRLEL

SEQ ID NO: 186 - protein, 1195 aa, Elusimicrobium minutum
MQKNINTKQNHIYIKQAQKIKEKLGDKPYRIGLDLGVGSIGFAIVSMEENDGNVLLPKEIIMVGSRIFKASAGAADRKLSRGQRNNHRHTRERMRYLWKVLAEQKLALPVPADLDRKENSSEGETSAKRFLGDVLQKDIYELRVKSLDERLSLQELGYVLYHIAGHRGSSAIRTFENDSEEAQKENTENKKIAGNIKRLMAKKNYRTYGEYLYKEFFENKEKHKREKISNAANNHKFSPTRDLVIKEAEAILKKQAGKDGFHKELTEEYIEKLTKAIGYESEKLIPESGFCPYLKDEKRLPASHKLNEERRLWETLNNARYSDPIVDIVTGEITGYYEKQFTKEQKQKLFDYLLTGSELTPAQTKKLLGLKNTNFEDIILQGRDKKAQKIKGYKLIKLESMPFWARLSEAQQDSFLYDWNSCPDEKLLTEKLSNEYHLTEEEIDNAFNEIVLSSSYAPLGKSAMLIILEKIKNDLSYTEAVEEALKEGKLTKEKQAIKDRLPYYGAVLQESTQKIIAKGFSPQFKDKGYKTPHTNKYELEYGRIANPVVHQTLNELRKLVNEIIDILGKKPCEIGLETARELKKSAEDRSKLSREQNDNESNRNRIYEIYIRPQQQVIITRRENPRNYILKFELLEEQKSQCPFCGGQISPNDIINNQADIEHLFPIAESEDNGRNNLVISHSACNADKAKRSPWAAFASAAKDSKYDYNRILSNVKENIPHKAWRFNQGAFEKFIENKPMAARFKTDNSYISKVAHKYLACLFEKPNIICVKGSLTAQLRMAWGLQGLMIPFAKQLITEKESESFNKDVNSNKKIRLDNRHHALDAIVIAYASRGYGNLLNKMAGKDYKINYSERNWLSKILLPPNNIVWENIDADLESFESSVKTALKNAFISVKHDHSDNGELVKGTMYKIFYSERGYTLTTYKKLSALKLTDPQKKKTPKDFLETALLKFKGRESEMKNEKIKSAIENNKRLFDVIQDNLEKAKKLLEEENEKSKAEGKKEKNINDASIYQKAISLSGDKYVQLSKKEPGKFFAISKPTPTTTGYGYDTGDSLCVDLYYDNKGKLCGEIIRKIDAQQKNPLKYKEQGFTLFERIYGGDILEVDFDIHSDKNSFRNNTGSAPENRVFIKVGTFTEITNNNIQIWFGNIIKSTGGQDDSFTINSMQQYNPRKLILSSCGFIKYRSPILKNKEG

SEQ ID NO: 187 - protein, 1337 aa, Enterococcus faecalis
  REGION 1..1337: note = Enterococcus faecalis ATCC 29200
MKKDYVIGLDIGTNSVGWAVMTEDYQLVKKKMPIYGNTEKKKIKKNFWGVRLFEEGHTAEDRRLKRTARRRISRRRNRLRYLQAFFEEAMTDLDENFFARLQESFLVPEDKKWHRHPIFAKLEDEVAYHETYPTIYHLRKKLADSSEQADLRLIYLALAHIVKYRGHFLIEGKLSTENISVKEQFQQFMIIYNQTFVNGESRLVSAPLPESVLIEEELTEKASRTKKSEKVLQQFPQEKANGLFGQFLKLMVGNKADFKKVFGLEEEAKITYASESYEEDLEGILAKVGDEYSDVFLAAKNVYDAVELSTILADSDKKSHAKLSSSMIVRFTEHQEDLKKFKRFIRENCPDEYDNLFKNEQKDGYAGYIAHAGKVSQLKFYQYVKKIIQDIAGAEYFLEKIAQENFLRKQRTFDNGVIPHQIHLAELQAIIHRQAAYYPFLKENQEKIEQLVTFRIPYYVGPLSKGDASTFAWLKRQSEEPIRPWNLQETVDLDQSATAFIERMTNFDTYLPSEKVLPKHSLLYEKFMVFNELTKISYTDDRGIKANFSGKEKEKIFDYLFKTRRKVKKKDIIQFYRNEYNTEIVTLSGLEEDQFNASFSTYQDLLKCGLTRAELDHPDNAEKLEDIIKILTIFEDRQRIRTQLSTFKGQFSAEVLKKLERKHYTGWGRLSKKLINGIYDKESGKTILGYLIKDDGVSKHYNRNFMQLINDSQLSFKNAIQKAQSSEHEETLSETVNELAGSPAIKKGIYQSLKIVDELVAIMGYAPKRIVVEMARENQTTSTGKRRSIQRLKIVEKAMAEIGSNLLKEQPTTNEQLRDTRLFLYYMQNGKDMYTGDELSLHRLSHYDIDHIIPQSFMKDDSLDNLVLVGSTENRGKSDDVPSKEVVKDMKAYWEKLYAAGLISQRKFQRLTKGEQGGLTLEDKAHFIQRQLVETRQITKNVAGILDQRYNANSKEKKVQIITLKASLTSQFRSIFGLYKVREVNDYHHGQDAYLNCVVATTLLKVYPNLAPEFVYGEYPKFQTFKENKATAKAIIYTNLLRFFTEDEPRFTKDGEILWSNSYLKTIKKELNYHQMNIVKKVEVQKGGFSKESIKPKGPSNKLIPVKNGLDPQKYGGFDSPIVAYTVLFTHEKGKKPLIKQEILGITIMEKTRFEQNPILFLEEKGFLRPRVLMKLPKYTLYEFPEGRRRLLASAKEAQKGNQMVLPEHLLTLLYHAKQCLLPNQSESLAYVEQHQPEFQEILERVVDFAEVHTLAKSKVQQIVKLFEANQTADVKEIAASFIQLMQFNAMGAPSTFKFFQKDIERARYTSIKEIFDATIIYQSTTGLYETRRKVVD

SEQ ID NO: 188 - protein, 1337 aa, Enterococcus faecalis
  REGION 1..1337: note = Enterococcus faecalis ATCC 4200
MKKDYVIGLDIGTNSVGWAVMTEDYQLVKKKMPIYGNTEKKKIKKNFWGVRLFEEGHTAEDRRLKRTARRRISRRRNRLRYLQAFFEEAMTALDENFFARLQESFLVPEDKKWHRHPIFAKLEDEVAYHETYPTIYHLRKKLADSSEQADLRLIYLALAHIVKYRGHFLIEGKLSTENISVKEQFQQFMIIYNQTFVNGESRLVSAPLPESVLIEEELTEKASRTKKSEKVLQQFPQEKANGLFGQFLKLMVGNKADFKKVFGLEEEAKITYASESYEEDLEGILAKVGDEYSDVFLAAKNVYDAVELSTILADSDKKSHAKLSSSMIVRFTEHQEDLKKFKRFIRENCPDEYDNLFKNEQKDGYAGYIAHAGKVSQLKFYQYVKKIIQDIAGAEYFLEKIAQENFLRKQRTFDNGVIPHQIHLAELQAIIHRQAAYYPFLKENQEKIEQLVTFRIPYYIGPLSKGDASTFAWLKRQSEEPIRPWNLQETVDLDQSATAFIERMTNFDTYLSSEKVLPKHSLLYEKFMVFNELTKISYTDDRGIKANFSGKEKEKIFDYLFKTRRKVKKKDIIQFYRNEYNTEIVTLSGLEEDQFNASFSTYQDLLKCGLTRAELDHPDNAEKLEDIIKILTIFEDRQRIRTQLSTFKGQFSAEVLKKLERKHYTGWGRLSKKLINGIYDKESGKTILGYLIKDDGVSKHYNRNFMQLINDSQLSFKNAIQKAQSSEHEETLSETVNELAGSPAIKKGIYQSLKIVDELVAIMGYAPKRIVVEMARENQTTSTGKRRSIQRLKIVEKAMAEIGSNLLKEQPTTNEQLRDTRLFLYYMQNGKDMYTGDELSLHRLSHYDIDHIIPQSFMKDDSLDNLVLVGSTENRGKSDDVPSKEVVKDMKAYWEKLYAAGLISQRKFQRLTKGEQGGLTLEDKAHFIQRQLVETRQITKNVAGILDQRYNANSKEKKVQIITLKASLTSQFRSIFGLYKVREVNDYHHGQDAYLNCVVATTLLKVYPNLAPEFVYGEYPKFQAFKENKATAKAIIYTNLLRFFTEDEPRFTKDGEILWSNSYLKTIKKELNYHQMNIVKKVEVQKGGFSKESIKPKGPSNKLIPVKNGLDPQKYGGFDSPVVAYTVLFTHEKGKKPLIKQEILGITIMEKTRFEQNPILFLEEKGFLRPRVLMKLPKYTLYEFPEGRRRLLASAKEAQKGNQMVLPEHLLTLLYHAKQCLLPNQSESLAYVEQHQPEFQEILERVVDFAEVHTLAKSKVQQIVKLFEANQTADVKEIAASFIQLMQFNAMGAPSTFKFFQKDIERARYTSIKEIFDATIIYQSTTGLYETRRKVVD

SEQ ID NO: 189 - protein, 1337 aa, Enterococcus faecalis
  REGION 1..1337: note = Enterococcus faecalis D6
MKKDYVIGLDIGTNSVGWAVMTEDYQLVKKKMPIYGNTEKKKIKKNFWGVRLFEEGHTAEDRRLKRTARRRISRRRNRLRYLQAFFEEAMTALDENFFARLQESFLVPEDKKWHRHPIFAKLEDEVAYHETYPTIYHLRKKLADSSEQADLRLIYLALAHIVKYRGHFLIEGKLSTENISVKEQFQQFMIIYNQTFVNGESRLVSAPLPESVLIEEELTEKASRTKKSEKVLQQFPQEKANGLFGQFLKLMVGNKADFKKVFGLEEEAKITYASESYEEDLEGILAKVGDEYSDVFLAAKNVYDAVELSTILADSDKKSHAKLSSSMIVRFTEHQEDLKNFKRFIRENCPDEYDNLFKNEQKDGYAGYITHAGKVSQLKFYQYVKKIIQDIAGAEYFLEKIAQENFLRKQRTFDNGVIPHQIHLAELQAIIHRQAAYYPFLKENQEKIEQLVTFRIPYYVGPLSKGDANTFAWLKRQSEEPIRPWNLQETVDLDQSATAFIERMTNFDTYLPSEKVLPKHSLLYEKFMVFNELTKISYTDDRGIKANFSGKEKEKIFDYLFKTRRKVKKKDIIQFYRNEYNTEIVTLSGLEEDQFNASFSTYQDLLKCGLTRAELDHPDNAEKLEDIIKILTIFEDRQRIRTQLSTFKGQFSAEVLKKLERKHYTGWGRLSKKLINGIYDKESGKTILDYLIKDDGVSKHYNRNFMQLINDSQLSFKNAIQKAQSSEHEETLSETVNELAGSPAIKKGIYQSLKIVDELVAIMGYAPKRIVVEMARENQTTSTGKRRSIQRLKIVEKAMAEIGSNLLKEQPTTNEQLRDTRLFLYYMQNGKDMYTGDELSLHRLSHYDIDHIIPQSFMKDDSLDNLVLVGSTENRGKSDDVPSKEVVKDMKAYWEKLYAAGLISQRKFQRLTKGEQGGLTLEDKAHFIQRQLVETRQITKNVAGILDQRYNAKSKEKKVQIITLKASLTSQFRSIFGLYKVREVNDYHHGQDAYLNCVVATTLLKVYPNLAPEFVYGEYPKFQTFKENKATAKAIIYTNLLRFFTEDEPRFTKDGEILWSNSYLKTIKKELNYHQMNIVKKVEVQKGGFSKESIKPKGPSNKLIPVKNGLDPQKYGGFDSPIVAYTVLFTHEKGKKPLIKQEILGITIMEKTRFEQNPILFLEEKGFLRPRVLMKLPKYTLYQFPEGRRRLLASAKEAQKGNQMVLPEHLLTLLYHAKQCLLPNQSESLAYVEQHQPEFQEILERVVDFAEVHTLAKSKVQQIVKLFEANQTADVKEIAASFIQLMQFNAMGAPSTFKFFQKDIERARYTSIKEIFDATIIYQSTTGLYETRRKVVD

SEQ ID NO: 190 - protein, 1337 aa, Enterococcus faecalis
  REGION 1..1337: note = Enterococcus faecalis E1Sol
MKKDYVIGLDIGTNSVGWAVMTEDYQLVKKKMPIYGNTEKKKIKKNFWGVRLFEEGHTAEDRRLKRTARRRISRRRNRLRYLQAFFEEAMTDLDENFFARLQESFLVPEDKKWHRHPIFAKLEDEVAYHETYPTIYHLRKKLADSSEQADLRLIYLALAHIVKYRGHFLIEGKLSTENTSVKEQFQQFMVIYNQTFVNGESRLVSAPLPESVLIEEELTEKASRTKKSEKVLQQFPQEKANGLFGQFLKLMVGNKADFKKVFGLEEEAKITYASESYEEDLEGILAKVGDEYSDVFLAAKNVYDAVELSTILADSDKKSHAKLSSSMIVRFTEHQEDLKKFKRFIRENCPDEYDNLFKNEQKDGYAGYIAHAGKVSQLKFYQYVKKIIQDIAGAEYFLEKIAQENFLRKQRTFDNGVIPHQIHLAELQAIIHRQAAYYPFLKENQEKIEQLVTFRIPYYVGPLSKGDASTFAWLKRQSEEPIRPWNLQETVDLDQSATAFIERMTNFDTYLPSEKVLPKHSLLYEKFMVFNELTKISYTDDRGIKANFSGKEKEKIFDYLFKTRRKVKKKDIIQFYRNEYNTEIVTLSGLEEDQFNASFSTYQDLLKCGLTRAELDHPDNAEKLEDIIKILTIFEDRQRIRTQLSTFKGQFSAEVLKKLERKHYTGWGRLSKKLINGIYDKESGKTILDYLVKDDGVSKHYNRNFMQLINDSQLSFKNAIQKAQSSEHEETLSETVNELAGSPAIKKGIYQSLKIVDELVAIMGYAPKRIVVEMARENQTTSTGKRRSIQRLKIVEKAMAEIGSNLLKEQPTTNEQLRDTRLFLYYMQNGKDMYTGDELSLHRLSHYDIDHIIPQSFMKDDSLDNLVLVGSTENRGKSDDVPSKKVVKKMKAYWEKLYAAGLISQRKFQRLTKGEQGGLTLEDKAHFIQRQLVETRQITKNVAGILDQRYNAKSKEKKVQIITLKASLTSQFRSIFGLYKVREVNDYHHGQDAYLNCVVATTLLKVYPNLAPEFVYGEYPKFQAFKENKATAKTIIYTNLMRFFTEDEPRFTKDSEILWSNSYLKTIKKELNYHQMNIVKKVEVQKGGFSKESIKPKGPSNKLIPVKNGLDPQKYGGFDSPVVAYTVLFTHEKGKKPLIKQEILGITIMEKTRFEQNPILFLEEKGFLRPRVLMKLPKYTLYEFPEGRRRLLASAKEAQKGNQMVLPEHLLTLLYHAKQCLLPNQSESLAYVEQHQPEFQEILERVVDFAEVHTLAKSKVQQIVKLFEANQTADVKEIAASFIQLMQFNAMGAPSTFKFFQKDIERARYTSIKEIFDATIIYQSTTGLYETRRKVVD

SEQ ID NO: 191 - protein, 1150 aa, Enterococcus faecalis
  REGION 1..1150: note = Enterococcus faecalis Fly1
MYSIGLDLGISSVGWSVIDERTGNVIDLGVRLFSAKNSEKNLERRTNRGGRRLIRRKTNRLKDAKKILAAVGFYEDKSLKNSCPYQLRVKGLTEPLSKGEIYKVTLHILKKRGISYLDEDDTEAAKESQDYKEQVRKNAQLLTKYTPGQIQLQRLKENNRVKTGINAQGNYQLNVFKVSAYANELATILKTQQAFYPNELTDDWIALFVQPGIAEEAGLIYRKRPYYHGPGNEANNSPYGRWSDFKKTGQPATNIFDRLIGKDFQGELRASGLSLSAQQYNLLNDLTNLKIDGEIPLSPEQKEYILAELMTKEFTRFGVNDVAKLLGVKKERLSGWRLDKKGKPEIHTLKGYRNWRKIFAESGIDLATLPTETIDCLAKVLTLNTEHEGIENTLAFELPELAESVKLLVLDRYKELSQSVSTQAWHRFSLKTLHLLIPELMNATSEQNTLLEQFQLKSDVRKRYSEYKKLPTKDVLTEIYNPTVNKTVSQAFKVIDALLVKYGKEQIRYITIEMPRDDNEEDEKKRIKELHAKNSQRKNDSQSYFMQKSGWSQEKFQTTIQKNRRFLAKLLYYYEQDGICAYTGLSISPELLVSDSTEIDHIIPISISLDDSINNKVLVLSKANQVKGQQTPYDAWMDGSFKKINGKFSNWDDYQKWVESRHFSHKKENNLLETRNIFDSEQVEKFLARNLNDTRYASRLVLNTLQSFFANHETKVRVVNGSFTHTLRKKWGADLDKTRETHHHHAVDATLCAVTPFVKVSRYHYAVKEETGEKVMREIDFETGEIVDEMSYQEFKKSKKYERKTYQVKWPNFREQLKPVNLHPRIKFSHQVDRKANRKLSDATIYSVREKTEVKTLKSGKQKITTDEYTIGKIKDIYTVDGWEAFKKKQDKLLMKDLDEKTYERLLSIAETTPDFQEVEEKNGKVKRVKRSPFAVYCEENDIPAIQKYAKKNNGPLIRSLKYYDGKLNKHINITKDSQGRPVEKTKNGRKVTLQSLKPYRYDIYQDLETKAYYTVQLYYSDLRFVEGKYGITEKEYMKKVAEQTKGQVVRFCFSLQKNDGLEIEWKDSQRYDVRFYNFQSANSINFKGLEQEMMPAENQFKQKPYNNGAINLNIAKYGKEGKKLRKFNTDILGKKHYLYYEKEPKNIIK

SEQ ID NO: 192 - protein, 1337 aa, Enterococcus faecalis
MKKDYVIGLDIGTNSVGWAVMTEDYQLVKKKMPIYGNTEKKKIKKNFWGVRLFEEGHTAEDRRLKRTARRRISRRRNRLRYLQAFFEEAMTDLDENFFARLQESFLVPEDKKWHRHPIFAKLEDEVAYHETYPTIYHLRKKLADSSEQADLRLIYLALAHIVKYRGHFLIEGKLSTENISVKEQFQQFMIIYNQTFVNGESRLVSAPLPESVLIEEELTEKASRTKKSEKVLQQFPQEKANGLFGQFLKLMVGNKADFKKVFGLEEEAKITYASESYEEDLEGILAKVGDEYSDVFLAAKNVYDAVELSTILADSDKKSHAKLSSSMIVRFTEHQEDLKKFKRFIRENCPDEYDNLFKNEQKDGYAGYIAHAGKVSQLKFYQYVKKIIQDIAGAEYFLEKIAQENFLRKQRTFDNGVIPHQIHLAELQAIIHRQAAYYPFLKENQEKIEQLVTFRIPYYVGPLSKGDASTFAWLKRQSEEPIRPWNLQETVDLDQSATAFIERMTNFDTYLPSEKVLPKHSLLYEKFMVFNELTKISYTDDRGIKANFSGKEKEKIFDYLFKTRRKVKKKDIIQFYRNEYNTEIVTLSGLEEDQFNASFSTYQDLLKCGLTRAELDHPDNAEKLEDIIKILTIFEDRQRIRTQLSTFKGQFSAEVLKKLERKHYTGWGRLSKKLINGIYDKESGKTILDYLVKDDGVSKHYNRNFMQLINDSQLSFKNAIQKAQSSEHEETLSETVNELAGSPAIKKGIYQSLKIVDELVAIMGYAPKRIVVEMARENQTTSTGKRRSIQRLKIVEKAMAEIGSNLLKEQPTTNEQLRDTRLFLYYMQNGKDMYTGDELSLHRLSHYDIDHIIPQSFMKDDSLDNLVLVGSTENRGKSDDVPSKEVVKDMKAYWEKLYAAGLISQRKFQRLTKGEQGGLTLEDKAHFIQRQLVETRQITKNVAGILNQRYNANSKEKKVQIITLKASLTSQFRSIFGLYKVREVNDYHHGQDAYLNCVVATTLLKVYPNLAPEFVYGEYPKFQTFKENKATAKAIIYTNLLRFFTEDEPRFTKDGEILWSNSYLKTIKKELNYHQMNIVKKVEVQKGGFSKESIKPKGPSNKLIPVKNGLDPQKYGGFDSPVVAYTVLFTHEKGKKPLIKQEILGITIMEKTRFEQNPILFLEEKGFLRPRVLMKLPKYTLYEFPEGRRRLLASAKEAQKGNQMVLPEHLLTLLYHAKQCLLPNQSESLAYVEQHQPEFQEILERVVDFAEVHTLAKSKVQQIVKLFEANQTADVKEIAASFIQLMQFNAMGAPSTFKFFQKDIERARYTSIKEIFDATIIYQSTTGLYETRRKVVD

SEQ ID NO: 193 - protein, 1150 aa, Enterococcus faecalis
  REGION 1..1150: note = Enterococcus faecalis R508
MYSIGLDLGISSVGWSVIDERTGNVIDLGVRLFSAKNSEKNLERRTNRGGRRLIRRKTNRLKDAKKILAAVGFYEDKSLKNSCPYQLRVKGLTEPLSKGEIYKVTLHILKKRGISYLDEDDTEAAKESQDYKEQVRKNAQLLTKYTPGQIQLQRLKENNRVKTGINVQGNYQLNVFKVSAYANELATILKTQQAFYPNELTDDWIALFVQPGIAEEAGLIYRKRPYYHGPGNEANNSPYGRWSDFQKTGEPATNIFDKLIGKDFQGELRASGLSLSAQQYNLLNDLTNLKIDGEVPLSSEQKEYILTELMTKEFTRFGVNDVVKLLGVKKERLSGWRLDKKGKPEIHTLKGYRNWRKIFAEAGIDLATLPTETIDCLAKVLTLNTEREGIENTLAFELPELSESVKLLVLDRYKELSQSISTQSWHRFSLKTLHLLIPELMNATSEQNTLLEQFQLKSDVRKRYSEYKKLPTKDVLAEIYNPTVNKTVSQAFKVIDALLVKYGKEQIRYITIEMPRDDNEEDEKKRIKELHAKNSQRKNDSQSYFMQKSGWSQEKFQTTIQKNRRFLAKLLYYYEQDGICAYTGLPISPELLVSDSTEIDHIIPISISLDDSINNKVLVLSKANQVKGQQTPYDAWMDGSFKKINGKFSNWDDYQKWVESRHFSHKKENNLLETRNIFDSEQVEKFLARNLNDTRYASRLVLNTLQSFFTNQETKVRVVNGSFTHTLRKKWGADLDKTRETHHHHAVDATLCAVTPFVKVSRYHYAVKEETGEKVMREIDFETGEIVNEMSYREFKKSKKYERKTYQVKWPNFREQLKPVNLHPRIKFSHQVDRKANRKLSDATIYSVREKTEVKTLKSGKQKITTDEYTIGKIKDIYTLDGWEAFKKKQDKLLMKDLDEKTYERLLSIAETTPDFQEVEEKNGKVKRVKRSPFAVYCEENDIPAIQKYAKKNNGPLIRSLKYYDGKLNKHINITKDSQGRPVEKTKNGRKVTLQSLKPYRYDIYQDLETKAYYTVQLYYSDLRFVEGKYGITEKEYMKKVAEQTKGQVVRFCFSLQKNDGLEIEWKDSQRYDVRFYNFQSANSINFKGLEQEIMPAENQFKQKPYNNGAINLNIAKYGKEGKKLRKFNTDILGKKHYLFYEKEPKNIIK

SEQ ID NO: 194 - protein, 1150 aa, Enterococcus faecalis
  REGION 1..1150: note = Enterococcus faecalis T11
MYSIGLDLGISSVGWSVIDERTGNVIDLGVRLFSAKNSEKNLERRTNRGGRRLIRRKTNRLKDAKKILAAVGFYEDKSLKNSCPYQLRVKGLTEPLSKGEIYKVTLHILKKRGISYLDEDDTEAAKESQDYKEQVRENAQLLTKYTPGQIQLQRLKENNRVKTGINAQGNYQLNVFKVSAYANELATILKTQQAFYPNELTDDWIALFVQPGIAEEAGLIYRKRPYYHGPGNEANNSPYGRWSDFKKTGQPATNIFDKLIGKDFQGELRASGLSLSAQQYNLLNDLTNLKIDGEIPLSPEQKEYILAELMTKEFTRFGVNDVVKLLGVKKERLSGWRLDKKGKPEIHTLKGYRNWRKIFAESGIDLAMLPTETIDCLAKILTLNTEREGIENTLAFELPELAESVKLLVLDRYKELSQSVSTQAWHRFSLKTLHLLIPELMNATSEQNTLLEQFQLKSDVRKRYSEYKKLPTKDVLTEIYNPTVNKTVSQAFKVIDALLVKYGKEQIRYITIEMPRDDNEEDEKKRIKELHAKNSQRKNDSQSYFMQKSGWSQEKFQTTIQKNRRFLAKLLYYYEQDGICAYTGLSISPELLVSDSTEIDHIIPISISLDDSINNKVLVLSKANQVKGQQTPYDAWMDGSFKKINGKFSNWDDYQKWVESRHFSHKKENNLLETRNIFDSEQVEKFLARNLNDTRYASRLVLNTLQSFFANQETKVRVVNGSFTHTLRKKWGADLDKTRETHHHHAVDATLCAVTPFVKVSRYHYAVKEETGEKVMREIDFETGEIVDEMSYREFKKSKKYERKTYQVKWPNFREQLKPVNLHPRIKFSHQVDRKANRKLSDATIYSVREKTEVKTLKSGKQKITTDEYTIGKIKDIYTVDGWEAFKKKQDKLLMKDLDEKTYERLLSIAETTPDFQEVEEKNGKVKRVKRSPFAVYCEENDIPAIRKYAKKNNGPLIRSLKYYDGKLNKHINITKDSQGRPVEKTKNGRKVTLQSLKPYRYDIYQDLETKAYYTVQLYYSDLRFVEGKYGITEKEYMKKVAEQTKGQVVRFCFSLQKNDGLEIEWKDSQRYDVRFYNFQSANSINFKGLEQEMMPAENQFKQKPYNNGAINLNIAKYGKEGKKLRKFNTDILGKKHYLYYEKEPKNIIK

SEQ ID NO: 195 - protein, 1150 aa, Enterococcus faecalis
  REGION 1..1150: note = Enterococcus faecalis TX0012
MYSIGLDLGISSVGWSVIDERTGNVIDLGVRLFSAKNSEKNLERRTNRGGRRLIRRKTNRLKDAKKILAAVGFYEDKSLKNSCPYQLRVKGLTEPLSRGEIYKVTLHILKKRGISYLDEVDTEAAKESQDYKEQVRKNAQLLTKYTPGQIQLQRLKENNRVKTGINAQGNYQLNVFKVSAYANELATILKTQQAFYPNELTDDWIALFVQPGIAEEAGLIYRKRPYYHGPGNEANNSPYGRWSDFQKTGEPATNIFDKLIGKDFQGELRASGLSLSAQQYNLLNDLTNLKIDGEVPLSSEQKEYILTELMTKEFTRFGVNDVVKLLGVKKERLSGWRLDKKGKPEIHTLKGYRNWRKIFAEAGIDLATLPTETIDCLAKVLTLNTEREGIENTLAFELPELSESVKLLVLDRYKELSQSISTQSWHRFSLKTLHLLIPELMNATSEQNTLLEQFQLKSDVRKRYSEYKKLPTKDVLAEIYNPTVNKTVSQAFKVIDALLVKYGKEQIRYITIEMPRDDNEEDEKKRIKELHAKNSQRKNDSQSYFMQKSGWSQEKFQTTIQKNRRFLAKLLYYYEQDGICAYTGLPISPELLVSDSTEIDHIIPISISLDDSINNKVLVLSKANQVKGQQTPYDAWMDGSFKKINGKFSNWDDYQKWVESRHFSHKKENNLLETRNIFDSEQVEKFLARNLNDTRYASRLVLNTLQSFFTNQETKVRVVNGSFTHTLRKKWGADLDKTRETHHHHAVDATLCAVTSFVKVSRYHYAVKEETGEKVMREIDFETGEIVNEMSYWEFKKSKKYERKTYQVKWPNFREQLKPVNLHPRIKFSHQVDRKANRKLSDATIYSVREKTEVKTLKSGKQKITTDEYTIGKIKDIYTLDGWEAFKKKQDKLLMKDLDEKTYERLLSIAETTPDFQEVEEKNGKVKRVKRSPFAVYCEENDIPAIQKYAKKNNGPLIRSLKYYDGKLNKHINITKDSQGRPVEKTKNGRKVTLQSLKPYRYDIYQDLETKAYYTVQLYYSDLRFVEGKYGITEKEYMKKVAEQTKGQVVRFCFSLQKNDGLEIEWKDSQRYDVRFYNFQSANSINFKGLEQEMMPAENQFKQKPYNNGAINLNIAKYGKEGKKLRKFNTDILGKKHYLFYEKEPKNIIK

SEQ ID NO: 196 - protein, 1150 aa, Enterococcus faecalis; identical to SEQ ID NO: 195
  REGION 1..1150: note = Enterococcus faecalis TX0012

SEQ ID NO: 197 - protein, 1337 aa, Enterococcus faecalis
  REGION 1..1337: note = Enterococcus faecalis TX0470
MKKDYVIGLDIGTNSVGWAVMTEDYQLVKKKMPIYGNTEKKKIKKNFWGVRLFEEGHTAEDRRLKRTARRRISRRRNRLRYLQAFFEEAMTALDENFFARLQESFLVPEDKKWHRHPIFAKLEDEVAYHETYPTIYHLRKKLADSSEQADLRLIYLALAHIVKYRGHFLIEGKLSTENISVKEQFQQFMIIYNQTFVNGESRLVSTPLPESVLIEEELTEKASRTKKSEKVLQQFPQEKANGLFGQFLKLMVGNKADFKKVFGLEEEAKITYASESYEEDLEGILAKVGDEYSDVFLAAKNVYDAVELSTILADSDKKSHAKLSSSMIVRFTEHQEDLKNFKRFIRENCPDEYDNLFKNEQKDGYAGYITHAGKVSQLKFYQYVKKIIQDIAGAEYFLEKIAQENFLRKQRTFDNGVIPHQIHLAELQAIIHRQAAYYPFLKENQEKIEQLVTFRIPYYVGPLSKGDASTFAWLKRQSEEPIRPWNLQETVDLDQSATAFIERMTNFDTYLPSEKVLPKHSLLYEKFMVFNELTKISYTDDRGIKANFSGKEKEKIFDYLFKTRRKVKKKDIIQFYRNEYNTEIVTLSGLEEDQFNASFSTYQDLLKCGLTRAELDHPDNAEKLEDIIKILTIFEDRQRIRTQLSTFKGQFSAEVLKKLERKHYTGWGRLSKKLINGIYDKESGKTILDYLVKDDGVSKHYNRNFMQLINDSQLSFKNAIQKAQSSEHEETLSETVNELAGSPAIKKGIYQSLKIVDELVAIMGYAPKRIVVEMARENQTTSTGKRRSIQRLKIVEKAMAEIGSNLLKEQPTTNEQLRDTRLFLYYMQNGKDMYTGDELSLHRLSHYDIDHIIPQSFMKDDSLDNLVLVGSTENRGKSDDVPSKEVVKDMKAYWEKLYAAGLISQRKFQRLTKGEQGGLTLEDKAHFIQRQLVETRQITKNVAGILDQRYNAKSKEKKVQIITLKASLTSQFRSIFGLYKVREVNDYHHGQDAYLNCVVATTLLKVYPNLAPEFVYGEYPKFQTFKENKATAKAIIYTNLLRFFTEDEPRFTKDGEILWSNSYLKTIKKELNYHQMNIVKKVEVQKGGFSKESIKPKGPSNKLIPVKNGLDPQKYGGFDSPIVAYTVLFTHEKGKKPLIKQEILGITIMEKTRFEQNPILFLEEKGFLRPRVLMKLPKYTLYEFPEGRRRLLASAKEAQKGNQMVLPEHLLTLLYHAKQCLLPNQSESLAYVEQHQPEFQEILERVVDFAEVHTLAKSKVQQIVKLFEANQTADVKEIAASFIQLMQFNAMGAPSTFKFFQKDIERARYTSIKEIFDATIIYQSTTGLYETRRKVVD

SEQ ID NO: 198 - protein, 1150 aa, Enterococcus faecalis
  REGION 1..1150: note = Enterococcus faecalis TX1342
MYSIGLDLGVSSVGWSVIDERTGNVIDLGVRLFSAKNSEKNLERRTNRGGRRLIRRKTNRLKDAKKILAAVGFYEDKSLKNSCPYQLRVKGLTEPLSKGEIYKVTLHILKKRGISYLDEDDTEAAKESQDYKEQVRENAQLLTKYTPGQIQLQRLKENNRVKTGINAQGNYQLNVFKVSAYANELATILKTQQAFYPNELTDDWIALFVQPGIAEEAGLIYRKRPYYHGPGNEANNSPYGRWSDFKKTGQPATNIFDKLIGKDFQGELRASGLSLSAQQYNLLNDLTNLKIDGEIPLSPEQKEYILAELMTKEFTRFGINDVAKLLGVKKERLSGWRLDKKGKPEIHTLKGYRNWRKIFAESGIDLATLPTETIDCLAKVLTLNTEREGIENTLAFELPELAESVKLLVLDRYKELSQSVSTQAWHRFSLKTLHLLIPELMNATSEQNTLLEQFQLKSDVRKRYSEYKKLPTKDVLTEIYNPTVNKTVSQAFKVIDALLVKYGKEQIRYITIEMPRDDNEEDEKKRIKELHAKNSQRKNDSQSYFMQKSGWSQEKFQTTIQKNRRFLAKLLYYYEQDGICAYTGLSISPELLVSDSTEIDHIIPISISLDDSINNKVLVLSKANQVKGQQTPYDAWMDGSFKKINGKFSNWDDYQKWVESRHFSHKKENNLLETRNIFDSEQVEKFLARNLNDTRYASRLVLNTLQSFFANQETKVRVVNGSFTHTLRKKWGADLDKTRETHHHHAVDATLCAVTPFVKVSRYHYAVKEETGEKVMREIDFETGEIVDEMSYREFKKSKKYERKTYQVKWPNFREQLKPVNLHPRIKFSHQVDRKANRKLSDATIYSVREKTEVKTLKSGKQKITTDEYTIGKIKDIYTVDGWEAFKKKQDKLLMKDLDEKTYERLLSIAETTPDFQEVEEKNGKVKRVKRSPFAVYCEENDIPAIRKYAKNNNGPLIRSLKYYDGKLNKHINITKDSQGRPVEKTKNGRKVTLQSLKPYRYDIYQDLETKAYYTVQLYYSDLRFVEGKYGITEKEYMKKVAEQTKGQVVRFCFSLQKNDGLEIEWKDSQCYDVRFYNFQSANSINFKGLEQEMMPAENQFKQKPYNNGAINLNIAKYGKEGKKLRKFNTDILGKKHYLYYEKEPKNIIK

SEQ ID NO: 199 - protein, 1337 aa, Enterococcus faecalis
  REGION 1..1337: note = Enterococcus faecalis TX4244
MKKDYVIGLDIGTNSVGWAVMTEDYQLVKKKMPIYGNTEKKKIKKNFWGVRLFEEGHTAEDRRLKRTARRRISRRRNRLRYLQAFFEEAMTDLDENFFARLQESFLVPEDKKWHRHPIFAKLEDEVAYHETYPTIYHLRKKLADSSEQADLRLIYLALAHIVKYRGHFLIEGKLSTENISVKEQFQQFMIIYNQTFVNGESRLVSAPLPESVLIEEELTEKASRTKKSEKVLQQFPQEKANGLFGQFLKLMVGNKADFKKVFGLEEEAKITYASESYEEDLEGILAKVGDEYSDVFLAAKNVYDAVELSTILADSDKKSHAKLSSSMIVRFTEHQEDLKKFKRFIRENCPDEYDNLFKNEQKDGYAGYIAHAGKVSQLKFYQYVKKIIQDIAGAEYFLEKIAQENFLRKQRTFDNGVIPHQIHLAELQAIIHRQAAYYPFLKENQEKIEQLVTFRIPYYVGPLSKGDASTFAWLKRQSEEPIRPWNLQETVDLDQSATAFIERMTNFDTYLPSEKVLPKHSLLYEKFMVFNELTKISYTDDRGIKANFSGKEKEKIFDYLFKTRRKVKKKDIIQFYRNEYNTEIVTLSGLEEDQFNASFSTYQDLLKCGLTRAELDHPDNAEKLEDIIKILTIFEDRQRIRTQLSTFKGQFSAEVLKKLERKHYTGWGRLSKKLINGIYDKESGKTILGYLIKDDGVSKHYNRNFMQLINDSQLSFKNAIQKAQSSEHEETLSETVNELAGSPAIKKGIYQSLKIVDELVAIMGYAPKRIVVEMARENQTTSTGKRRSIQRLKIVEKAMAEIGSNLLKEQPTTNEQLRDTRLFLYYMQNGKDMYTGDELSLHRLSHYDIDHIIPQSFMKDDSLDNLVLVGSTENLGKSDDVPSKEVVKDMKAYWEKLYAAGLISQRKFQRLTKGEQGGLTLEDKAHFIQRQLVETRQITKNVAGILDQRYNANSKEKKVQIITLKASLTSQFRSIFGLYKVREVNDYHHGQDAYLNCVVATTLLKVYPNLAPEFVYGEYPKFQTFKENKATAKAIIYTNLLRFFTEDEPRFTKDGEILWSNSYLKTIKKELNYHQMNIVKKVEVQKGGFSKESIKPKGPSNKLIPVKNGLDPQKYGGFDSPIVAYTVLFTHEKGKKPLIKQEILGITIMEKTRFEQNPILFLEEKGFLRPRVLMKLPKYTLYEFPEGRRRLLASAKEAQKGNQMVLPEHLLTLLYHAKQCLLPNQSESLAYVEQHQPEFQEILERVVDFAEVHTLAKSKVQQIVKLFEANQTADVKEIAASFIQLMQFNAMGAPSTFKFFQKDIERARYTSIKEIFDATIIYQSTTGLYETRRKVVD

SEQ ID NO: 200 - protein, 1339 aa, Enterococcus faecium
  REGION 1..1339: note = Enterococcus faecium 1,141,733
MKKEYTIGLDIGTNSVGWSVLTDDYRLVSKKMKVAGNTEKSSTKKNFWGVRLFDEGQTAEARRSKRTARRRLARRRQRILELQKIFAPEILKIDEHFFARLNESFLVLDEKKQSRHPVFATIKQEKSYHQTYPTIYHLRQALADSSEKADIRLVYLAMAHLLKYRGHFLIEGELNTENSSVTETFRQFLSTYNQQFSEADDKQTEKLDEAVDCSFVFTEKMSKTKKAETLLKYFPHEKSNGYLSQFIKLMVGNQGNFKNVFGLEEAKLQFSKETYEEDLEELLEKIGDDYIDLFVQAKNVYDAVLLSEILSDSTKNTRAKLSAGMIRRYDAHKEDLVLLKRFVKENLPKKYRAFFGDNSVNGYAGYIEGHATQEDFYKFVKKELTGIRGSEVFLTKIEQENFLRKQRTFDNGVIPHQIHLTELRAIIANQKKHYPFLKEEQEKLESLLTFKIPYYVGPLAKKQENSPFAWLIRKSEEKIKPWNLPEIVDMEGSAVRFIERMINTDMYMPHNKVLPKNSLLYQKFSIYNELTKVRYQDERGQMNYFSSIEKKEIFHELFEKNRKVTKKDLQEFLYLKYDIKHAELSGIEKAFNASYTTYHDFLTMSENKREMKQWLEDPELASMFEEIIKTLTVFEDREMIKTRLSHHEATLGKHIIKKLTKKHYTGWGRLSKELIQGIRDKQSNKTILDYLINDDDFPHHRNRNFMQLINDDSLSFKKEIKKAQMITDTENLEEIVKELTGSPAIKKGILQSLKIVDEIVGIMGYEPANIVVEMARENQTTGRGLKSSRPRLKALEESLKDFGSQLLKEYPTDNSSLQKDRLYLYYLQNGRDMYTGAPLDIHRLSDYDIDHIIPRSFTTDNSIDNKVLVSSKENRLKKDDVPSEKVVKKMRSFWYDLYSSKLISKRKLDNLTKIKLTEEDKAGFIKRQLVETRQITKHVAGILHHRFNKAEDTNEPIRKVRIITLKSALVSQFRNRFGIYKVREINEYHHAHDAYLNGVVALALLKKYPQLAPEFVYGEYLKFNAHKANKATVKKEFYSNIMKFFESDTPVCDENGEIFWDKSKSIAQVKKVINHHHMNIVKKTEIQKGGFSKETVEPKKDSSKLLPRKNNWDPAKYGGLGSPNVAYTVAFTYEKGKARKRTNALEGITIMEREAFEQSPVLFLKNKGYEQAEIEMKLPKYALFELENGRKRMVASNKEAQKANSFLLPEHLVTLLYHAKQYDEISHKESFDYVNEHHKEFSEVFARVLEFAGKYTLAEKNIEKLEKIYKENQTDDLAKLASSFVNLMQFNAMGAPADFKFFDVTIPRKRYTSLTEIWQSTIIHQSITGLYETRIRMGK

SEQ ID NO: 201 - protein, 1340 aa, Enterococcus faecium
  REGION 1..1340: note = Enterococcus faecium 1,231,408
MKKEYTIGLDIGTNSVGWSVLTDDYRLVSKKMKVAGNTEKSSTKKNFWGVRLFDEGQTAEARRSKRTARRRLARRRQRILELQKIFAPEILKIDEHFFARLNESFLVPDEKKQSRHPVFATIKQEKSYHQTYPTIYHLRQALADSSEKADIRLVYLAMAHLLKYRGHFLIEGELNTENSSVTETFRQFLSTYNQQFSEAGDKQTEKLDEAVDCSFVFTEKMSKTKKAETLLKYFPHEKSNGYLSQFIKLMVGNQGNFKNVFGLEEEAKLQFSKETYEEDLEELLEKIGDDYIDLFVQAKNVYDAVLLSEILSDSTKNTRAKLSAGMIRRYDAHKEDLVLLKRFVKENLPKKYRAFFGDNSVNGYAGYIEGHATQEAFYKFVKKELTGIRGSEVFLTKIEQENFLRKQRTFDNGVIPHQIHLSELRAIIANQKKHYPFLKEEQEKLESLLTFKIPYYVGPLAKKQENSPFAWLIRKSEEKIKPWNLPEIVDMEGSAVRFIERMINTDMYMPHNKVLPKNSLLYQKFSIYNELTKVRYQDERGQMNYFSSIEKKEIFHELFEKNRKVTKKDLQEFLYLKYDIKHAELSGIEKAFNASYTTYHDFLTMSENKREMKQWLEDPELASMFEEIIKTLTVFEDREMIKTRLSHHEATLGKHIIKKLTKKHYTGWGRLSKELIQGIRDKQSNKTILDYLINDDDFPHHRNRNFMQLINDDSLSFKKEIKKAQMITDTENLEEIVKELTGSPAIKKGILQSLKIVDEIVGIMGYEPANIVVEMARENQTTGRGLKSSRPRLKALEESLKDFGSQLLKEYPTDNSSLQKDRLYLYYLQNGRDMYTGAPLDIHRLSDYDIDHIIPRSFTTDNSIDNKVLVSSKENRLKKDDVPSEKVVKKMRSFWYDLYSSKLISKRKLDNLTKIKLTEEDKAGFIKRQLVETRQITKHVAGILHHRFNKAEDTNDPIRKVRIITLKSALVSQFRNRFGIYKVREINEYHHAHDAYLNGVVALALLKKYPQLAPEFVYGEYLKFNAHKANKATVKKEFYSNIMKFFESDTPVCDENGEIFWDKSKSIAQVKKVINHHHMNIVKKTEIQKGGFSKETVEPKKDSSKLLPRKNNWDPAKYGGLGSPNVAYTVAFTYEKGKARKRTNALEGITIMEREAFEQSPVLFLKNKGYEQAEIEMKLPKYALFELENGRKRMVASNKEAQKANSFLLPEHLVTLLYHAKQYDEISHKESFDYVNEHHKEFSEVFARVLEFAGKYTLAEKNIEKLEKIYKENQTDDLAKLASSFVNLMQFNAMGAPADFKFFDVTIPRKRYTSLTEIWQSTIIHQSITGLYETRIRMGK

SEQ ID NO: 202 - protein, 1339 aa, Enterococcus faecium
  REGION 1..1339: note = Enterococcus faecium E1133
MKKEYTIGLDIGTNSVGWSVLTDDYRLVSKKMKVAGNTEKSSTKKNFWGVRLFDEGQTAEARRSKRTARRRLARRRQRILELQKIFAPEILKIDEHFFARLNESFLVLDEKKQSRHPVFATIKQEKSYHQTYPTIYHLRQALADSSEKADIRLVYLAMAHLLKYRGHFLIEGELNTENSSVTETFRQFLSTYNQQFSEADDKQTEKLDEAVDCSFVFTEKMSKTKKAETLLKYFPHEKSNGYLSQFIKLMVGNQGNFKNVFGLEEAKLQFSKETYEEDLEELLEKIGDDYIDLFVQAKNVYDAVLLSEILSDSTKNTRAKLSAGMIRRYDAHKEDLVLLKRFVKENLPKKYRAFFGDNSVNGYAGYIEGHATQEDFYKFVKKELTGIRGSEVFLTKIEQENFLRKQRTFDNGVIPHQIHLTELRAIIANQKKHYPFLKEEQEKLESLLTFKIPYYVGPLAKKQENSPFAWLIRKSEEKIKPWNLPEIVDMEGSAVRFIERMINTDMYIPHNKVLPKNSLLYQKFSIYNELTKVRYQDERGQMNYFSSIEKKEIFHELFEKNRKVTKKDLQEFLYLKYDIKHAELSGIEKAFNASYTTYHDFLTMSENKREMKQWLEDPELASMFEEIIKTLTVFEDREMIKTRLSHHEATLGKHIIKKLTKKHYTGWGRLSKELIQGIRDKQSNKTILDYLINDDDFPHHRNRNFMQLINDDSLSFKKEIKKAQMITDTENLEEIVKELTGSPAIKKGILQSLKIVDEIVGIMGYEPANIVVEMARENQTTGRGLKSSRPRLKALEESLKDFGSQLLKEYPTDNSSLQKDRLYLYYLQNGRDMYTGAPLDIHRLSDYDIDHIIPRSFTTDNSIDNKVLVSSKENRLKKDDVPSEKVVKKMRSFWYDLYSSKLISKRKLDNLTKIKLTEEDKAGFIKRQLVETRQITKHVAGILHHRFNKAEDTNEPIRKVRIITLKSALVSQFRNRFGIYKVREINEYHHAHDAYLNGVVALALLKKYPQLAPEFVYGEYLKFNAHKANKATVKKEFYSNIMKFFESDTPVCDENGEIFWDKSKSIAQVKKVINHHHMNIVKKTEIQKGGFSEETVEPKKDSSKLLPRKNNWDPAKYGGLGSPNVAYTVAFTYEKGKARKRTNALEGITIMEREAFEQSPVLFLKNKGYEQAEIEMKLPKYALFELENGRKRMVASNKEAQKANSFLLPEHLVTLLYHAKQYDEISHKESFDYVNEHHKEFSEVFARVLEFAGKYTLAEKNIEKLEKIYKENQTDDLAKLASSFVNLMQFNAMGAPADFKFFDVTIPRKRYTSLTEIWQSTIIHQSITGLYETRIRMGK

SEQ ID NO: 203 - protein, 1340 aa, Enterococcus faecium
  REGION 1..1340: note = Enterococcus faecium E3083
MKKEYTIGLDIGTNSVGWSVLTDDYRLVSKKMKVAGNTEKSSTKKNFWGVRLFDEGQTAEARRSKRTARRRLARRRQRILELQKIFAPEILKIDEHFFARLNESFLVLDEKKQSRHPVFATIKQEKSYHQTYPTIYHLRQALADSSEKADIRLVYLAMAHLLKYRGHFLIEGELNTENSSVTETFRQFLSTYNQQFSEADDKQTEKLDEAVDCSFVFTEKMSKTKKAETLLKYFPHEKSNGYLSQFIKLMVGNQGNFKNVFGLEEEAKLQFSKETYEEDLEELLEKIGDDYIDLFVQAKNVYDAVLLSEILSDSTKNTRAKLSAGMIRRYDAHKEDLVLLKRFVKENLPKKYRAFFGDNSVNGYAGYIEGHATQEDFYKFVKKELTGIRGSEVFLTKIEQENFLRKQRTFDNGVIPHQIHLTELRAIIANQKKHYPFLKEEQEKLESLLTFKIPYYVGPLAKKQENSPFAWLIRKSEEKIKPWNLPEIVDMEGSAVRFIERMINTDMYIPHNKVLPKNSLLYQKFSIYNELTKVRYQDERGQMNYFSSIEKKEIFHELFEKNRKVTKKDLQEFLYLKYDIKHAELSGIEKAFNASYTTYHDFLTMSENKREMKQWLEDPELASMFEEIIKTLTVFEDREMIKTRLSHHEATLGKHIIKKLTKKHYTGWGRLSKELIQGIRDKQSNKTILDYLINDDDFPHHRNRNCMQLINDDSLSFKKEIKKAQMITDTENLEEIVKELTGSPAIKKGILQSLKIVDEIVGIMGYEPANIVVEMARENQTTGRGLKSSRPRLKALEESLKDFGSQLLKEYPTDNSSLQKDRLYLYYLQNGRDMYTGAPLDIHRLSDYDIDHIIPRSFTTDNSIDNKVLVSSKENRLKKDDVPSEKVVKKMRSFWYDLYSSKLISKRKLDNLTKIKLTEEDKAGFIKRQLVETRQITKHVAGILHHRFNKAEDTNEPIRKVRIITLKSALVSQFRNRFGIYKVREINEYHHAHDAYLNGVVALALLKKYPQLAPEFVYGEYLKFNAHKANKATVKKEFYSNIMKFFESDTPVCDENGEIFWDKSKSIAQVKKVINHHHMNIVKKTEIQKGGFSKETVEPKKDSSKLLPRKNNWDPTKYGGLGSPNVAYTVAFTYEKGKARKRTNALEGITIMEREAFEQSPVLFLKNKGYEQAEIEMKLPKYALFELENGRKRMVASNKEAQKANSFLLPEHLVTLLYHAKQYDEISHKESFDYVNEHHKEFSEVFARVLEFAGKYTLAEKNIEKLEKIYKENQTDDLAKLASSFVNLMQFNAMGAPADFKFFDVTIPRKRYTSLTEIWQSTIIHQSITGLYETRIRMGK

SEQ ID NO: 204 - protein, 1340 aa, Enterococcus faecium
  REGION 1..1340: note = Enterococcus faecium PC4.1
MKKEYTIGLDIGTNSVGWSVLTDDYRLVSKKMKVAGNTEKSSTKKNFWGVRLFDEGQTAEARRSKRTARRRLARRRQRILELQKIFAPEILKIDEHFFARLNESFLVLDEKKQSRHPVFATIKQEKSYHQTYPTIYHLRQALADSSEKADIRLVYLAMAHLLKYRGHFLIEGELNTENSSVTETFRQFLSTYNQQFSEADDKQTEKLDEAVDCSFVFTEKMSKTKKAETLLKYFPHEKSNGYLSQFIKLMVGNQGNFKNVFGLEEEAKLQFSKETYEEDLEELLEKIGDDYIDLFVQAKNVYDAVLLSEILSDSTKNTRAKLSAGMIRRYDAHKEDLVLLKRFVKENLPKKYRAFFGDNSVNGYAGYIEGHATQEDFYKFVKKELTGIRGSEVFLTKIEQENFLRKQRTFDNGVIPHQIHLTELRAIIANQKKHYPFLKEEQEKLESLLTFKIPYYVGPLAKKQENSPFAWLIRKSEEKIKPWNLPEIVDMEGSAVRFIERMINTDMYIPHNKVLPKNSLLYQKFSIYNELTKVRYQDERGQMNYFSSIEKKEIFHELFEKNRKVTKKDLQEFLYLKYDIKHAELSGIEKAFNASYTTYHDFLTMSENKREMKQWLEDPELASMFEEIIKTLTVFEDREMIKTRLSHHEATLGKHIIKKLTKKHYTGWGRLSKELIQGIRDKQSNKTILDYLINDDDFPHHRNRNFMQLINDDSLSFKKEIKKAQMITDTENLEEIVKELTGSPAIKKGILQSLKIVDEIVGIMGYEPANIVVEMARENQTTGRGLKSSRPRLKALEESLKDFGSQLLKEYPTDNSSLQKDRLYLYYLQNGRDMYTGAPLDIHRLSDYDIDHIIPRSFTTDNSIDNKVLVSSKENRLKKDDVPSEKVVKKMRSFWYDLYSSKLISKRKLDNLTKIKLTEEDKAGFIKRQLVETRQITKHVAGILHHRFNKAEDTNEPIRKVRIITLKSALVSQFRNRFGIYKVREINEYHHAHDAYLNGVVALALLKKYPQLAPEFVYGEYLKFNAHKANKATVKKEFYSNIMKFFESDTPVCDENGEIFWDKSKSIAQVKKVINHHHMNIVKKTEIQKGGFSKETVEPKKDSSKLLPRKNNWDPAKYGGLGSPNVAYTVAFTYEKGKARKRTNALEGITIMEREAFEQSPVLFLKNKGYEQAEIEMKLPKYALFELENGRKRMVASNKEAQKANSFLLPEHLVTLLYHAKQYDEISHKESFDYVNEHHKEFSEVFARVLEFAGKYTLAEKNIEKLEKIYKENQTDDLAKLASSFVNLMQFNAMGAPADFKFFDVTIPRKRYTSLTEIWQSTIIHQSITGLYETRIRMGK

SEQ ID NO: 205 - protein, 1340 aa, Enterococcus faecium
  REGION 1..1340: note = Enterococcus faecium TX1330
MKKEYTIGLDIGTNSVGWSVLTDDYRLVSKKMKVAGNTEKSSTKKNFWGVRLFDEGQTAEARRSKRTARRRLARRRQRILELQKIFAPEILKIDEHFFARLNESFLVLDEKKQSRHPVFATIKQEKSYHQTYPTIYHLRQALADSSEKADIRLVYLAMAHLLKYRGHFLIEGELNTENSSVTETFRQFLSTYNQQFSEADDKQTEKLDEAVDCSFVFTEKMSKTKKAETLLKYFPHEKSNGYLSQFIKLMVGNQGNFKNVFGLEEEAKLQFSKETYEEDLEELLEKIGDDYIDLFVQAKNVYDAVLLSEILSDSTKNTRAKLSAGMIRRYDAHKEDLVLLKRFVKENLPKKYRAFFGDNSVNGYAGYIEGHATQEDFYKFVKKELTGIRGSEVFLTKIEQENFLRKQRTFDNGVIPHQIHLTELRAIIANQKKHYPFLKEEQEKLESLLTFKIPYYVGPLAKKQENSPFAWLIRKSEEKIKPWNLPEIVDMEGSAVRFIERMNNTDMYIPHNKVLPKNSLLYQKFSIYNELTKVRYQDERGQMNYFSSIEKKEIFHELFEKNRKVTKKDLQEFLYLKYDIKHAELSGIEKAFNASYTTYHDFLTMSENKREMKQWLEDPELASMFEEIIKTLTVFEDREMIKTRLSHHEATLGKHIIKKLTKKHYTGWGRLSKELIQGIRDKQSNKTILDYLINDDDFPHHRNRNFMQLINDDSLSFKKEIKKAQMITDTENLEEIVKELTGSPAIKKGILQSLKIVDEIVGIMGYEPANIVVEMARENQTTGRGLKSSRPRLKALEESLKDFGSQLLKEYPTDNSSLQKDRLYLYYLQNGRDMYTGAPLDIHRLSDYDIDHIIPRSFTTDNSIDNKVLVSSKENRLKKDDVPSEKVVKKMRSFWYDLYSSKLISKRKLDNLTKIKLTEEDKAGFIKRQLVETRQITKHVAGILHHRFNKAEDTNEPIRKVRIITLKSALVSQFRNRFGIYKVREINEYHHAHDAYLNGVVALALLKKYPQLAPEFVYGEYLKFNAHKANKATVKKEFYSNIMKFFESDTPVCDENGEIFWDKSKSIAQVKKVINHHHMNIVKKTEIQKGGFSKETVEPKKDSSKLLPRKNNWDPAKYGGLGSPNVAYTVAFTYEKGKARKRTNALEGITIMEREAFEQSPVLFLKNKGYEQAEIEMKLPKYALFELENGRKRMVASNKEAQKANSFLLPEHLVTLLYHAKQYDEISHKESFDYVNEHHKEFSEVFARVLEFAGKYTLAEKNIEKLEKIYKENQTDDLAKLASSFVNLMQFNAMGAPADFKFFDVTIPRKRYTSLTEIWQSTIIHQSITGLYETRIRMGK

SEQ ID NO: 206 - protein, 1340 aa, Enterococcus faecium
  REGION 1..1340: note = Enterococcus faecium TX1337RF
MKKEYTIGLDIGTNSVGWSVLTDDYRLVSKKMKVAGNTEKSSTKKNFWGVRLFDEGQTAEARRSKRTARRRLARRRQRILELQKIFAPEILKIDEHFFARLNESFLVLDEKKQSRHPVFATIKQEKSYHQTYPTIYHLRQALADSSEKADIRLVYLAMAHLLKYRGHFLIEGELNTENSSVTETFRQFLSTYNQQFSEADDKQTEKLDEAVDCSFVFTEKMSKTKKAETLLKYFPHEKSNGYLSQFIKLMVGNQGNFKNVFGLEEEAKLQFSKETYEEDLEELLEKIGDDYIDLFVQAKNVYDAVLLSEILSDSTKNTRAKLSAGMIRRYDAHKEDLVLLKRFVKENLPKKYRAFFGDNSVNGYAGYIEGHATQEDFYKFVKKELTGIRGSEVFLTKIEQENFLRKQRTFDNGVIPHQIHLTELRAIIANQKKHYPFLKEEQEKLESLLTFKIPYYVGPLAKKQENSPFAWLIRKSEEKIKPWNLPEIVDMEGSAVRFIERMINTDMYMPHNKVLPKNSLLYQKFSIYNELTKVRYQDERGQMNYFSSIEKKEIFHELFEKNRKVTKKDLQEFLYLKYDIKHAELSGIEKAFNASYTTYHDFLTMSENKREMKQWLEDPELASMFEEIIKTLTVFEDREMIKTRLSHHEATLGKHIIKKLTKKHYTGWGRLSKELIQGIRDKQSNKTILDYLINDDDFPHHRNRNFMQLINDDSLSFKKEIKKAQMITDTENLEEIVKELTGSPAIKKGILQSLKIVDEIVGIMGYEPANIVVEMARENQTTGRGLKSSRPRLKALEESLKDFGSQLLKEYPTDNSSLQKDRLYLYYLQNGRDMYTGAPLDIHRLSDYDIDHIIPRSFTTDNSIDNKVLVSSKENRLKKDDVPSEKVVKKMRSFWYDLYSSKLISKRKLDNLTKIKLTEEDKAGFIKRQLVETRQITKHVAGILHHRFNKAEDTNEPIRKVRIITLKSALVSQFRNRFGIYKVREINEYHHAHDAYLNGVVALALLKKYPQLAPEFVYGEYLKFNAHKANKATVKKEFYSNIMKFFESDTPVCDENGEIFWDKSKSIAQVKKVINHHHMNIVKKTEIQKGGFSKETVEPKKDSSKLLPRKNNWDPAKYGGLGSPNVAYTVAFTYEKGKARKRTNALEGITIMEREAFEQSPVLFLKNKGYEQAEIEMKLPKYALFELENGRKRMVASNKEAQKANSFLLPEHLVTLLYHAKQYDEISHKESFDYVNEHHKEFSEVFARVLEFAGKYTLAEKNIEKLEKIYKENQTDDLAKLASSFVNLMQFNAMGAPADFKFFDVTIPRKRYTSLTEIWQSTIIHQSITGLYETRIRMGK

SEQ ID NO: 207 - protein, 1336 aa, Enterococcus hirae
MTKDYTIGLDIGTNSVGWAVLTDDYQLMKRKMSVHGNTEKKKIKKNFWGARLFDEGQTAEFRRTKRTNRRRLARRKYRLSKLQDLFAEELCKQDDCFFVRLEESFLVPEEKQYKPASIFPTLEEEKEYYQKYPTIYHLRQKLVDSTEKEDLRLVYLALAHLLKYRGHFLFEGDLDTENTSIEESFRVFLEQYSKQSDQPLIVHQPVLTILTDKLSKTKKVEEILKYYPTEKINSFFAQCLKLIVGNQANFKRIFDLEAEVKLQFSKETYEEDLESLLEKIGDEYLDIFLQAKKVHDAILLSEIISSTVKHTKAKLSSGMVERYERHKADLAKFKQFVKENVPQKATVFFKDTTKNGYAGYIKGKTTQEEFYKFVKKELSGVVGSEPFLEKIDQETFLLKQRTYTNGVIPHQVHLIELKAIIDQQKQHYPFLEEAGPKIIALFKFRIPYYVGPLAKEQEASSFAWIERKTAEKINPWNFSEVVDIEKSAMRFIQRMTKQDTYLPTEKVLPKNSLLYQKYMIFNELTKVSYKDERGVKQYFSGDEKQQIFKQLFQKERGKITVKKLQNFLYTHYHIENAQIFGIEKAFNASYSTYHDFMKLAKTNQKAMQEWLEQPEMEPIFEDIVKILTIFEDRQMIKHQLSKYQEVFGEKLLKEFARKHYTGWGRFSAKLIHGIRDRKTNKTILDYLINDDDVPANRNRNLMQLINDEHLSFKEEIAKATVFSKHKSLVDVIQDLPGSPAIKKGIWQSLKIVEELIAIIGYKPKNIVIEMARENQKTHRTSPRLKALENGLKQIGSTLLKEQPTDNKALQKERLYLYYLQNGRDMYTGEPLEIENLHQYEVDHIIPRSFIVDNSIDNKVLVASKQNQKKRDDVPKKQIVNEQRIFWNQLKEAKLISPKKYAYLTKIELTPEDKARFIQRQLVETRQITKHVANILHQSFNQEEEGTDCDGVQIITLKATLTSQFRQTFGLYKVREINPHHHAHDAYLNGFIANVLLKRYPKLAPEFVYGKYVKYSLARENKATAKKEFYSNILKFLESDEPFCDENGEIYWEKSHHLPRIKKVLSSHQVNVVKKVEQQKGGFYKETVNSKEKPDKLIERKNNWDVTKYGGFGSPVIAYAIAFVYAKGKTQKKTRAIEGITIMEQAAFEKDPTTFLKEKGFPQVTEFIKLPKYTLFEFDNGRRRFLASHKESQKGNPFILSDQLVTLLYHAQHYDKITYQESFDYVNTHLSDFSAILTEVLAFAEKYTLADKNIERIQELYEENKYGETSMIAQSFLQLLQFNAIGAPADFKFFGVTIPRKRYTSLTEIWDATIIYQSVTGLYETRIRMGDLWAGEQ

SEQ ID NO: 208 - protein, 1330 aa, Enterococcus italicus
  REGION 1..1330: note = Enterococcus italicus DSM 15952
MKNDYTIGLDIGTNSVGYSVVTDDYKVISKKMNVFGNTEKKSIKKNFWGVRLFESGQTAQEARMKRTSRRRIARRKNRICYLQEIFQPEMNHLDNNFFYRLNESFLVADDAKYDKHPIFGTLDEEIHFHEQFPTIYHLRKYLADGDEKADLRLVYLAIAHIIKFRGNFLIEGELNTENNSVIELSKVFVQLYNQTLSELEGFQFIDESIDFSEVLTQQLSKSERADNVLKLFPDEKGTGIFAQFIKLIVGNQGNFKKVFQLEEDQKLQLSTDDYEENIENLLAIIGDEYGDIFVAAQNLYQAILLAGILTSTEKTRAKLSASMIQRYEEHAKDLKLLKRFVKEHIPDKYAEIFNDATKNGYAGYIDGKTKEEEFYKYLKTTLVQKSGYQYFIEKIEQENFLRKQRIYDNGVIPHQVHAEELRAILRKQEKYYSFLKENHEKIEQIFKVRIPYYVGPLAKHNEQSRFAWNIRKSDEPIRPWNMNDVVDENASAVAFIERMTIKDIYLNENVLPRHSLIYEKFTVFNELTKVLYADDRGVFQRFSAEEKEDIFEKLFKSERKVTKKKLENYLRIELSISSPSVKGIEEQFNANFGTYLDLKKFDELHPYLDDEKYQDTLEEVIKVLTVFEDRSMIQNQLEQLPLNLSTKTIKALSRRKYTGWGRLSARLIDGIHDKNSGKTILDYLIEDESDSYIVNRNFMQLINDDHLSFKKIIEDSQPYKEQQSAEEIVSELSGSPAIKKGILQSLKIVDELVAIMGYKPKNIVVEMARENQTTGRGKQNSKPRLKGIENGLKEFSDSVLKGSSIDNKQLQNDRLYLYYLQNGKDMYTGHELDIDHLSTYDIDHIIPQSFLTDNSIDNRVLTTSKSNRGKSDNVPSEEVVRKMDRFWRKLLNAKLISERKYTNLTKKELTESDKAGFLKRQLVETRQITKHVATILDSKFNEDSNNRDVQIITLKSALVSEFRKTFNLYKVREINDLHHAHDAYLNAVVALSLLRVYPQLKPEFVYGEYGKNSIHDQNKATIKKQFYSNITRYFASKDYIINDDGEILWNKQETIAQVIKTLGMHQVNVVKKVEIQKGGFSKESIQPKGESQKLIRRKQQWNTKKYGGFDSPVVAYAILLSFDKGKRKARSFKIVGITIQDRESFEGNPILYLSKKDYHNPKVEAILPKYSLFEFENGRRRMVASASETQKGNQLIIPGHLMELLYHSKKIINGKNSDSVSYIQNNKEKFREIFEYIVDFSSKYISADANLNKIEKIFENNFHKASEQEIAKSFINLLTFTAMGAPADFEFFGEKIPRKRYVSISEIIDAVFIHQSITGLYETRVRLTEV

SEQ ID NO: 209 - protein, 1096 aa, Eubacterium dolichum
  REGION 1..1096: note = Eubacterium dolichum DSM 3991
MMEVFMGRLVLGLDIGITSVGFGIIDLDESEIVDYGVRLFKEGTAAENETRRTKRGGRRLKRRRVTRREDMLHLLKQAGIISTSFHPLNNPYDVRVKGLNERLNGEELATALLHLCKHRGSSVETIEDDEAKAKEAGETKKVLSMNDQLLKSGKYVCEIQKERLRTNGHIRGHENNFKTRAYVDEAFQILSHQDLSNELKSAIITIISRKRMYYDGPGGPLSPTPYGRYTYFGQKEPIDLIEKMRGKCSLFPNEPRAPKLAYSAELFNLLNDLNNLSIEGEKLTSEQKAMILKIVHEKGKITPKQLAKEVGVSLEQIRGFRIDTKGSPLLSELTGYKMIREVLEKSNDEHLEDHVFYDEIAEILTKTKDIEGRKKQISELSSDLNEESVHQLAGLTKFTAYHSLSFKALRLINEEMLKTELNQMQSITLFGLKQNNELSVKGMKNIQADDTAILSPVAKRAQRETFKVVNRLREIYGEFDSIVVEMAREKNSEEQRKAIRERQKFFEMRNKQVADIIGDDRKINAKLREKLVLYQEQDGKTAYSLEPIDLKLLIDDPNAYEVDHIIPISISLDDSITNKVLVTHRENQEKGNLTPISAFVKGRFTKGSLAQYKAYCLKLKEKNIKTNKGYRKKVEQYLLNENDIYKYDIQKEFINRNLVDTSYASRVVLNTLTTYFKQNEIPTKVFTVKGSLTNAFRRKINLKKDRDEDYGHHAIDALIIASMPKMRLLSTIFSRYKIEDIYDESTGEVFSSGDDSMYYDDRYFAFIASLKAIKVRKFSHKIDTKPNRSVADETIYSTRVIDGKEKVVKKYKDIYDPKFTALAEDILNNAYQEKYLMALHDPQTFDQIVKVVNYYFEEMSKSEKYFTKDKKGRIKISGMNPLSLYRDEHGMLKKYSKKGDGPAITQMKYFDGVLGNHIDISAHYQVRDKKVVLQQISPYRTDFYYSKENGYKFVTIRYKDVRWSEKKKKYVIDQQDYAMKKAEKKIDDTYEFQFSMHRDELIGITKAEGEALIYPDETWHNFNFFFHAGETPEILKFTATNNDKSNKIEVKPIHCYCKMRLMPTISKKIVRIDKYATDVVGNLYKVKKNTLKFEFD

SEQ ID NO: 210 - protein, 1114 aa, Eubacterium rectale
MNYTEKEKLFMKYILALDIGIASVGWAILDKESETVIEAGSNIFPEASAADNQLRRDMRGAKRNNRRLKTRINDFIKLWENNNLSIPQFKSTEIVGLKVRAITEEITLDELYLILYSYLKHRGISYLEDALDDTVSGSSAYANGLKLNAKELETHYPCEIQQERLNTIGKYRGQSQIINENGEVLDLSNVFTIGAYRKEIQRVFEIQKKYHPELTDEFCDGYMLIFNRKRKYYEGPGNEKSRTDYGRFTTKLDANGNYITEDNIFEKLIGKCSVYPDELRAAAASYTAQEYNVLNDLNNLTINGRKLEENEKHEIVERIKSSNTINMRKIISDCMGENIDDFAGARIDKSGKEIFHKFEVYNKMRKALLEIGIDISNYSREELDEIGYIMTINTDKEAMMEAFQKSWIDLSDDVKQCLINMRKTNGALFNKWQSFSLKIMNELIPEMYAQPKEQMTLLTEMGVTKGTQEEFAGLKYIPVDVVSEDIFNPVVRRSVRISFKILNAVLKKYKALDTIVIEMPRDRNSEEQKKRINDSQKLNEKEMEYIEKKLAVTYGIKLSPSDFSSQKQLSLKLKLWNEQDGICLYSGKTIDPNDIINNPQLFEIDHIIPRSISFDDARSNKVLVYRSENQKKGNQTPYYYLTHSHSEWSFEQYKATVMNLSKKKEYAISRKKIQNLLYSEDITKMDVLKGFINRNINDTSYASRLVLNTIQNFFMANEADTKVKVIKGSYTHQMRCNLKLDKNRDESYSHHAVDAMLIGYSELGYEAYHKLQGEFIDFETGEILRKDMWDENMSDEVYADYLYGKKWANIRNEVVKAEKNVKYWHYVMRKSNRGLCNQTIRGTREYDGKQYKINKLDIRTKEGIKVFAKLAFSKKDSDRERLLVYLNDRRTFDDLCKIYEDYSDAANPFVQYEKETGDIIRKYSKKHNGPRIDKLKYKDGEVGACIDISHKYGFEKGSKKVILESLVPYRMDVYYKEENHSYYLVGVKQSDIKFEKGRNVIDEEAYARILVNEKMIQPGQSRADLENLGFKFKLSFYKNDIIEYEKDGKIYTERLVSRTMPKQRNYIETKPIDKAKFEKQNLVGLGKTKFIKKYRYDILGNKYSCSEEKFTSFC

SEQ ID NO: 211 - protein, 1391 aa, unidentified
  REGION 1..1391: note = Eubacterium sp. AS15
  source 1..1391: note = Eubacterium sp.
MENKQYYIGLDVGTNSVGWAVTDTSYNLLRAKGKDMWGARLFDEAKTAVERRTKRTSRRRSEREKARKAMLKELFADEINKVDPNFFIRLEESKFFLDDRSENNRQRYTLFNDAKFTDKDYYEKYKTIFHLRSALINSDEKFDVRLVFLAILNLFSHRGHFLNASLKGDGEIQGVDIFYNDLYEVCEEFEIDLPQISNIDNFEKILSQKGKSRTKILEELSEELSISKKEKIKYSLLKLICGMKIKVVDIYADEDIQEDDKKKDLGFRESDYEKSSLEVKEIIGDDHFELIERAKAVHDIGLLANIIGNSKYLCEARVEAYDNHHKDLQKIKELLKKYDIKAYTDMFRKMTDKNYSAYVGSVNSNIAKERRSVDNRKIEDLYEYIKKIALKNISDDNEDKIEILKKIETGEFLKKQLTASNGVIPNQLQSRELRAILKKAENYLPFLKEKGEKNLTVSEMIIQLFEFQIPYYVGPLDKNPKKDKNANSWAVIPSGGRILPWNFEDKVDVKGSRKEFIEKMVRKCTYLSEEHTLPKQSLLYEKFMVLNEINNIKIDGEKISVEAKQKIYNDLFMKGKKVSQKAIKQELISLNIMSKDSVLSGIDTVCNAYLSSIAKFRGVFDENVNNQSTIDMIEDIIFLKTVYSDEKRFVKEEIVEKYGDEIDKDKIKRILGFKFSNWGNISKSFLELEGADVGTGEIRSIIQSLWETNFNLMELLSSRFTYMDELEKRVKKLEKPLSEWTIEDLDDMYLSSPVKRMIWQSMKIVDEIQTVIGYAPKRIFVEMTRSEGEKVRTKSRKDRLKELYSAIKEDSKQWVKELDAKDESYFRSKKMYLYYLQKGRCMYSGEVIELDKLMDDNLYDIDHIYPRSFVKDDSLDNLVLVKKEINNRKQNDPITPQIQASCQGFWKVLHEQGFISNEKYSRLTRKTQEFSDEEKLSFINRQIVETGQATKCMAQILQKSMGEDVDVVFSKARLVSEFRHKFELFKSRLINDFHHANDAYLNIVVGNSYFVKFTRNPANFIKDARKNPDNPAYKYHMDRFFERDVKSKSEVAWIGQSEGNAGTIAIVKKTMSKNSPLITKKVEEGHGSITKETIVGVKEIKFGRNKVEKADKTPKKANLQAYRPIKTSDERLCNILRYGGRTSISISGYCLVEYVKKRKTIRSLEAIPVYLGRKDSLSEEKLLNYFRYNLNDGGKDSVSDIRLCLPFISTNSLVKIDGYLYYLGGKNDDRIQLYNAYQLKMKKEEVEYIRKIEKAVSMSKFDEIDREKNPVLTEEKNIELYNKIQDKFENTVFSKRMSLVKYNKKDLSFGDFLKNKKSKFEEIDLEKQCKVLYNIIFNLSNLKEVDLSDIGGSKSTGKCRCKKNITNYKEFKLIQQSITGLYSCEKDLMTI

SEQ ID NO: 212 - protein, 1107 aa, Eubacterium ventriosum
  REGION 1..1107: note = Eubacterium ventriosum ATCC 27560
MGYTVGLDIGVASVGVAVLDENDNIVEAVSNIFDEADTSNNKVRRTLREGRRTKRRQKTRIEDFKQLWETSGYIIPHKLHLNIIELRNKGLTELLSLDELYCVLLSMLKHRGISYLEDADDGEKGNAYKKGLAFNEKQLKEKMPCEIQLERMKKYGKYHGEFIIEINDEKEYQSNVFTTKAYKKELEKIFETQRCNGNKINTKFIKKYMEIYERKREYYIGPGNEKSRTDYGIYTTRTDEEGNFIDEKNIFGKLIGKCSVYPEEYRASSASYTAQEFNLLNDLNNLKINNEKLTEFQKKEIVEIIKDASSVNMRKIIKKVIDEDIEQYSGARIDKKGKEIYHTFEIYRKLKKELKTINVDIDSFTREELDKTMDILTLNTERESIVKAFDEQKFVYEENLIKKLIEFRKNNQRLFSGWHSFSYKAMLQLIPVMYKEPKEQMQLLTEMNVFKSKKEKYVNYKYIPENEVVKEIYNPVVVKSIRTTVKILNALIKKYGYPESVVIEMPRDKNSDDEKEKIDMNQKKNQEEYEKILNKIYDEKGIEITNKDYKKQKKLVLKLKLWNEQEGLCLYSGKKIAIEDLLNHPEFFEIDHIIPKSISLDDSRSNKVLVYKTENSIKENDTPYHYLTRINGKWGFDEYKANVLELRRRGKIDDKKVNNLLCMEDITKIDVVKGFINRNLNDTRYASRVVLNEMQSFFESRKYCNTKVKVIRGSLTYQMRQDLHLKKNREESYSHHAVDAMLIAFSQKGYEAYRKIQKDCYDFETGEILDKEKWNKYIDDDEFDDILYKERMNEIRKKIIEAEEKVKYNYKIDKKCNRGLCNQTIYGTREKDGKIHKISSYNIYDDKECNSLKKMINSGKGSDLLMYNNDPKTYRDMLKILETYSSEKNPFVAYNKETGDYFRKYSKNHNGPKVEKVKYYSGQINSCIDISHKYGHAKNSKKVVLVSLNPYRTDVYYDNDTGKYYLVGVKYNHIKCVGNKYVIDSETYNELLRKEGVLNSDENLEDLNSKNITYKFSLYKNDIIQYEKGGEYYTERFLSRIKEQKNLIETKPINKPNFQRKNKKGEWENTRNQIALAKTKYVGKLVTDVLGNCYIVNMEKFSLVVDK

SEQ ID NO: 213 - protein, 1391 aa, Eubacterium yurii
  REGION 1..1391: note = Eubacterium yurii subsp. margaretiae ATCC 43715
MENKQYYIGLDVGTNSVGWAVTDTSYNLLRAKGKDMWGARLFEKANTAAERRTKRTSRRRSEREKARKAMLKELFADEINRVDPSFFIRLEESKFFLDDRSENNRQRYTLFNDATFTDKDYYEKYKTIFHLRSALINSDEKFDVRLVFLAILNLFSHRGHFLNASLKGDGDIQGMDVFYNDLVESCEYFEIELPRITNIDNFEKILSQKGKSRTKILEELSEELSISKKDKSKYNLIKLISGLEASVVELYNIEDIQDENKKIKIGFRESDYEESSLKVKEIIGDEYFDLVERAKSVHDMGLLSNIIGNSKYLCEARVEAYENHHKDLLKIKELLKKYDKKAYNDMFRKMTDKNYSAYVGSVNSNIAKERRSVDKRKIEDLYKYIEDTALKNIPDDNKDKIEILEKIKLGEFLKKQLTASNGVIPNQLQSRELRAILKKAENYLPFLKEKGEKNLTVSEMIIQLFEFQIPYYVGPLDKNPKKDNKANSWAKIKQGGRILPWNFEDKVDVKGSRKEFIEKMVRKCTYISDEHTLPKQSLLYEKFMVLNEINNIKIDGEKISVEAKQKIYNDLFVKGKKVSQKDIKKELISLNIMDKDSVLSGTDTVCNAYLSSIGKFTGVFKEEINKQSIVDMIEDIIFLKTVYGDEKRFVKEEIVEKYGDEIDKDKIKRILGFKFSNWGNLSKSFLELEGADVGTGEVRSIIQSLWETNFNLMELLSSRFTYMDELEKRVKKLEKPLSEWTIEDLDDMYLSSPVKRMIWQSMKIVDEIQTVIGYAPKRIFVEMTRSEGEKVRTKSRKDRLKELYNGIKEDSKQWVKELDSKDESYFRSKKMYLYYLQKGRCMYSGEVIELDKLMDDNLYDIDHIYPRSFVKDDSLDNLVLVKKEINNRKQNDPITPQIQASCQGFWKILHDQGFMSNEKYSRLTRKTQEFSDEEKLSFINRQIVETGQATKCMAQILQKSMGEDVDVVFSKARLVSEFRHKFELFKSRLINDFHHANDAYLNIVVGNSYFVKFTRNPANFIKDARKNPDNPVYKYHMDRFFERDVKSKSEVAWIGQSEGNSGTIVIVKKTMAKNSPLITKKVEEGHGSITKETIVGVKEIKFGRNKVEKADKTPKKPNLQAYRPIKTSDERLCNILRYGGRTSISISGYCLVEYVKKRKTIRSLEAIPVYLGRKDSLSEEKLLNYFRYNLNDGGKDSVSDIRLCLPFISTNSLVKIDGYLYYLGGKNDDRIQLYNAYQLKMKKEEVEYIRKIEKAVSMSKFDEIDREKNPVLTEEKNIELYNKIQDKFENTVFSKRMSLVKYNKKDLSFGDFLKNKKSKFEEIDLEKQCKVLYNIIFNLSNLKEVDLSDIGGSKSTGKCRCKKNITNYKEFKLIQQSITGLYSCEKDLMTI

SEQ ID NO: 214 - protein, 1142 aa, Facklamia hominis
  REGION 1..1142: note = Facklamia hominis CCUG 36813
MYSVGLDIGIASCGYSIINDVNGNIVELGTLLFKSRNSDNNEERRTNRGSRRLINRRRTRLDDGKKLLAEKGFKQDSKLKHVCPYELRVKGLHEKLTQGEIYKVVLHILKKRGISYLDESDENSSGIDGASYKDQVNLNLNLQKELTPGQIQLKRLKENGRIKSGVTFENGYQLNVFSVSAYANELNKILTKQSEYYSEIDQIWIDRFTKNGYRKEAGLVYRKRPYYDGPGNEKNNSIYGRWANFKEDGHPKENIFDQLIGLDSVDSTQVRASASTLTAQKYNLLNDLNNLTIIEDDRKFTTDEKVSIINYLMTQDITRFGPKELAKFYQLEVDQIRGWRIDNKGNPEIHSLKVYRDWKKIFNTSSIDLTSIQTWVVDELANVITLNTEIPSTLATLKIKIPDIDQQILNFVENNFYELKKKTSKNSWHSFSLKTLNILIPELLNTSEEQNTILERLNLKFDLKNKYAEKNQIPVKELLEQIYNPTVTKSVHQSIKLFNEIIEKYGKNNISYVTIEMPRDKNDQDQKDTIKRINKLNSERKNDSEKYFLERSGWDTIRFESALKKPRFAEKLLFYYEQKGKCAYSGQDILAESLLNESCEVDHIIPLSISFDDSIHNKVLVTASSNQEKGQRTPYMAFIDGAKLGQSWDDFVAWVNSCGFHRKKVQNLLYEENIFNPDVQRGFVSRNLNDTRYASRIVLNAIQSFFYKQKDLTKVKVVNGSFTHTLRKKWGSSLDKNRDTYHHHAVDATLCAVTPFINIVKYEFFEEDGIKYMVDLTTGEKVAYSDYKKMKFYDKRAYVPIWDGFIKQLTPANLYPKIKFSHQVDSKWNRKISDATIYSTRKIVETKINKKGVAKETVKDIVIDKIKDIYTPEGWRKFKEKQDKLLMKNFDEKTYNKLIKIAKEYPEKKEVQTSNGKVSLVEVSPFKMYCEEQNVPAIRKYSKKGNGPYIRSLKFYDKELGKHINITKDSYGNDIERTIRNKKIILKNQNSWRTDVYYNSVNNCYELLGIKYCHLKFYRGKYGIPKSIYDELKKEDEISSESVFKFSLYRHDRVRFEKDGEYIEALFGSKNESNKNYLELSPIDKNKWLSKENVKFFGEVAASGRFIKGLKPGIKVIKQSTDYMGHVYAIHQEKLKFVLSDA

SEQ ID NO: 215 - protein, 1512 aa, Fibrobacter succinogenes
MKKILGLDLGTNSIGWAVVNADEITRDDGSRYLKPNGISAAGSRIIPMSADILGDFEKGNSISQTAERTRMRMARRLHERALLRRERLLRVLNLLDFLPKHFADKIDRYGKFTDDSEPKLAWRKNTEGKYEFIFQDAFNEMLAEFKDKQPEIVEEGKKIPYDWTIYYLRKKALEKALSKEELSWILLQFNQKRGYYQLRGEEEEIPQDKKIEYLAQKVVKVEATDQKKGDDVWYNVYLENGMIYRRTSKAPLDWEGKVKEFIVTTEVENDGETPKKDKEGNIKRSFRAPKEDDWTLLKKKTEADIENSHKTVGCYIYDSLLNNPKQKIIGKLVRTVERKFYKEELTQILKKQVELIPELRDDNLYKQCIEELYPINEAHRNTIAKTDFANLFINDILFYQRPLKSKKSQIDNCPYEERIFIDSKTGEKKKVPVKCIAKSNPLFQEFRLWQFIQNLRIYQREKEIDGKLLTDIDITSECLKSEEDYVRLFDWLNDRETIEQEDLLKHLFNTKKSKNKENPYRWNYVEDKVYPCNETRATILKGFSKCGINASVLSPELEMALWHILYSVEDKKEIETALTHFAQKQGWNDDFAKVFSKAKPFKKDYGSYSEKAIKKLLSLMRMGKYWNQDNIDKNTLDRIDKIINGEYDEKISNRVRDNAINLKDISDFRGLPVWLACYIVYDRHSEAKDCTKWNSPEEIDSYLKKFKQHSLRNPIVEQVVTETLRTVRDIWIQEEQIDEIHLELGRDLKNPADKRKKMSENILKNENTNLRIKAMLMEFMNPSMGIENVRPYSPSQQDILRIYEENALDNLTKDDKDFDFISKISKQAQPSKTDIIRYKCWLEQKYRSPYTGKTISLSKLFTPAYEIEHVIPQSLYFDDSFSNKVICEAEVNKLKDRQLGYKFIAEHHGEKVQLSQGEVVEILSVDAYEKFVKENYANNRIKMKKLLMESIPDEFIERQLNDSRYISKVVKGLLSNIVREKIDDENYEPEAVSKNLISCNGAITDRLKKDWGMNDVWNSIILPRFIRMNQITGKDCFTTTNAEGHLIPQMPLELQKGFNKKRIDHRHHAMDAIVIACTTRDHVNLLNNEAAHSKFNATRYQLQRKLRRFEKAVIDGKEREVAKEFLKPWDSFSSDSKNILENIIVSFKQNQRVINKTTNAFLHFDENGKKTFIKQGKGDSWAIRKSMHKDTVFGEINLRKVRSVSLNEAIKVPERVLNKKIKEKILELKNNKIDAKNIKKYIEENHTGGYGIDSSKIDVFYFTKETKERFFATRKTLDTSFNQAKIKDSIADSGIQKILLAHLKSKNGDAEQAFSPDGIDEMNKNIVELNNGKFHQPILKVRVYEKADKFAVGQKGNKKVKFVEAAKGTNLFFAIFEKDGKRSYLTIPLNVMIDCQKQYGNQWKNNIEAYLKEKELVEKDVKLQFILSPNDLVYLPTEGSIDKKRIYKVVSFTNNRLYAIPYAIAKSIVDKNEFTQLNKIEFTDNKESIKDACVPVIIDRLGNVIEFNGKRL

SEQ ID NO: 216 - protein, 1365 aa, Filifactor alocis
MTKEYYLGLDVGTNSVGWAVTDSQYNLCKFKKKDMWGIRLFESANTAKDRRLQRGNRRRLERKKQRIDLLQEIFSPEICKIDPTFFIRLNESRLHLEDKSNDFKYPLFIEKDYSDIEYYKEFPTIFHLRKHLIESEEKQDIRLIYLALHNIIKTRGHFLIDGDLQSAKQLRPILDTFLLSLQEEQNLSVSLSENQKDEYEEILKNRSIAKSEKVKKLKNLFEISDELEKEEKKAQSAVIENFCKFIVGNKGDVCKFLRVSKEELEIDSFSFSEGKYEDDIVKNLEEKVPEKVYLFEQMKAMYDWNILVDILETEEYISFAKVKQYEKHKTNLRLLRDIILKYCTKDEYNRMFNDEKEAGSYTAYVGKLKKNNKKYWIEKKRNPEEFYKSLGKLLDKIEPLKEDLEVLTMMIEECKNHTLLPIQKNKDNGVIPHQVHEVELKKILENAKKYYSFLTETDKDGYSVVQKIESIFRFRIPYYVGPLSTRHQEKGSNVWMVRKPGREDRIYPWNMEEIIDFEKSNENFITRMTNKCTYLIGEDVLPKHSLLYSKYMVLNELNNVKVRGKKLPTSLKQKVFEDLFENKSKVTGKNLLEYLQIQDKDIQIDDLSGFDKDFKTSLKSYLDFKKQIFGEEIEKESIQNMIEDIIKWITIYGNDKEMLKRVIRANYSNQLTEEQMKKITGFQYSGWGNFSKMFLKGISGSDVSTGETFDIITAMWETDNNLMQILSKKFTFMDNVEDFNSGKVGKIDKITYDSTVKEMFLSPENKRAVWQTIQVAEEIKKVMGCEPKKIFIEMARGGEKVKKRTKSRKAQLLELYAACEEDCRELIKEIEDRDERDFNSMKLFLYYTQFGKCMYSGDDIDINELIRGNSKWDRDHIYPQSKIKDDSIDNLVLVNKTYNAKKSNELLSEDIQKKMHSFWLSLLNKKLITKSKYDRLTRKGDFTDEELSGFIARQLVETRQSTKAIADIFKQIYSSEVVYVKSSLVSDFRKKPLNYLKSRRVNDYHHAKDAYLNIVVGNVYNKKFTSNPIQWMKKNRDTNYSLNKVFEHDVVINGEVIWEKCTYHEDTNTYDGGTLDRIRKIVERDNILYTEYAYCEKGELFNATIQNKNGNSTVSLKKGLDVKKYGGYFSANTSYFSLIEFEDKKGDRARHIIGVPIYIANMLEHSPSAFLEYCEQKGYQNVRILVEKIKKNSLLIINGYPLRIRGENEVDTSFKRAIQLKLDQKNYELVRNIEKFLEKYVEKKGNYPIDENRDHITHEKMNQLYEVLLSKMKKFNKKGMADPSDRIEKSKPKFIKLEDLIDKINVINKMLNLLRCDNDTKADLSLIELPKNAGSFVVKKNTIGKSKIILVNQSVTGLYENRREL

SEQ ID NO: 217 - protein, 1347 aa, Finegoldia magna
  REGION 1..1347: note = Finegoldia magna ACS-171-V-Col3
MKSEKKYYIGLDVGTNSVGWAVTDEFYNILRAKGKDLWGVRLFEKAKTAADTRTFRSGRRRNDRKGMRLQILREIFEDEIKKVDKDFYDRLDESKFWAEDKKVSGKYSLFNDKNFSDKQYFEKFPTIFHLRKYLMEEHGKVDIRYYFLAINQMMKRRGHFLIDGQISHVTDDKPLKEQLILLINDLLKIELEEELMDSIFEILADVNEKRTDKKNNLKELIKGQDFNKQEGNILNSIFESIVTGKAKIKNIISDEDILEKIKEDNKEDFVLTGDSYEENLQYFEEVLQENITLFNTLKSTYDFVILQSILKGKSTLSDAQVERYDEHKKDLEILKKVIKKYDEDGKLFKQVFKEDNGNGYVSYIGYYLNKNKKITAKKKISNIEFTKYVKGILEKQCDCEDEAVKYLLGKIEQENFLLKQISSINSVIPHQIHLFELDKILENLAKNYPSFNNKKEEFTKIEKIRKTFTFRIPYYVGPLNDYHKNNGGNAWIFRNKGEKIRPWNFEKIVDLHKSEEEFIKRMLNQCTYLPEETVLPKSSILYSEYMVLNELNNLRIKGKPLDTDVKLKLIEELFKKKTKVTLKSIRDYMIRNNFADKEDFDNSEKNLEIVSNMKSYIDFNNILGDKFELEMVEDLIEKITIHTGNKTLLKKYIEETYPDLSSSQIQKIINLKYKDWGRLSRKLLDGIKGRNKTDDVNTVINFMRNSSDNLMQIIEGKNYSFNEYIDNLRKKYIPQEISYEVVENLYVSPSVKKMIWQVIRVTEEITKVMGYDPDKIFIEMAKSEEEKKTTISRKNKLLDLYKAIKKDERDSQYEKLLTGLNKLDESELRSKKLYLYYTQMGRDMYTGEKIDLDKLFDSTHYDKDHIIPQSMKKDDSIINNLVLVNKNANQTTKGNIYPVPSSIRNNPDIYNYWKYLMEKEFISKEKYNRLIRNTPLTNEELGVFINRQLVETRQSTKAIKELFEKFYQKSKIIPVKASLASDLRKDMNTLKSREVNDLHHAHDAFLNIVAGDVWNREFTSNPINYVNENREGDKVKYSLSKYFTRPRKSKGKVIWTPEKGRKLIVDTLNKPSVLISNESHVKKGELFNATISGKKDYKKGKIYLPLKKDDRLKDVSKYGGYKAINGAFFFLVEHTKSKKRIRSIELFPLHLLSKFYEDKNTVLDYAINVLQLQDPKIIIDKINYRTEIIIDNFSYLISTKSNDGSITVKPNEQMYWRVDEISNLKKIENKYKKDAILTEEDRKIMESYIDKIYQQFKAGKYKNRRTTDTIIEKYEIIDLDTLDNKQLYQLLVAFISLSYKTSNNAVDFTVIGLGTECGKPRITNLPDNTYLVYKSITGIYEKRIRIK

SEQ ID NO: 218 - protein, 1348 aa, Finegoldia magna
MKSEKKYYIGLDVGTNSVGWAVTDEFYNILRAKGKDLWGVRLFEKADTAANTRIFRSGRRRNDRKGMRLQILREIFEDEIKKVDKDFYDRLDESKFWAEDKKVSGKYSLFNDKNFSDKQYFEKFPTIFHLRKYLMEEHGKVDIRYYFLAINQMMKRRGHFLIDGQISHVTDDKPLKEQLILLINDLLKIELEEELMDSIFEILADVNEKRTDKKNNLKELIKGQDFNKQEGNILNSIFESIVTGKAKIKNIISDEDILEKIKEDNKEDFVLTGDSYEENLQYFEEVLQENITLFNTLKSTYDFLILQSILKGKSTLSDAQVERYDEHKKDLEILKKVIKKYDEDGKLFKQVFKEDNGNGYVSYIGYYLNKNKKITAKKKISNIEFTKYVKGILEKQCDCEDEDVKYLLGKIEQENFLLKQISSINSVIPHQIHLFELDKILENLAKNYPSFNNKKEEFTKIEKIRKTFTFRIPYYVGPLNDYHKNNGGNAWIFRNKGEKIRPWNFEKIVDLHKSEEEFIKRMLNQCTYLPEETVLPKSSILYSEYMVLNELNNLRINGKPLDTDVKLKLIEELFKKKTKVTLKSIRDYMVRNNFADKEDFDNSEKNLEIASNMKSYIDFNNILEDKFDVEMVEDLIEKITIHTGNKKLLKKYIEETYPDLSSSQIQKIINLKYKDWGRLSRKLLDGIKGTKKETEKTDTVINFLRNSSDNLMQIIGSQNYSFNEYIDKLRKKYIPQEISYEVVENLYVSPSVKKMIWQVIRVTEEITKVMGYDPDKIFIEMAKSEEEKKTTISRKNKLLDLYKAIKKDERDSQYEKLLTGLNKLDDSDLRSRKLYLYYTQMGRDMYTGEKIDLDKLFDSTHYDKDHIIPQSMKKDDSIINNLVLVNKNANQTTKGNIYPVPSSIRNNPKIYNYWKYLMEKEFISKEKYNRLIRNTPLTNEELGGFINRQLVETRQSTKAIKELFEKFYQKSKIIPVKASLASDLRKDMNTLKSREVNDLHHAHDAFLNIVAGDVWNREFTSNPINYVKENREGDKVKYSLSKDFTRPRKSKGKVIWTPEKGRKLIVDTLNKPSVLISNESHVKKGELFNATIAGKKDYKKGKIYLPLKKDDRLQDVSKYGGYKAINGAFFFLVEHTKSKKRIRSIELFPLHLLSKFYEDKNTVLDYAINVLQLQDPKIIIDKINYRTEIIIDNFSYLISTKSNDGSITVKPNEQMYWRVDEISNLKKIENKYKKDAILTEEDRKIMESYIDKIYQQFKAGKYKNRRTTDTIIEKYEIIDLDTLDNKQLYQLLVAFISLSYKTSNNAVDFTVIGLGTECGKPRITNLPDNTYLVYKSITGIYEKRIRIK

SEQ ID NO: 219 - protein, 1348 aa, Finegoldia magna
  REGION 1..1348: note = Finegoldia magna SY403409CC001050417
MKSEKKYYIGLDVGTNSVGWAVTDEFYNILRAKGKDLWGVRLFEKAKTAADTRTFRSGRRRNDRKGVRLQILREIFEDEIKKVDKDFYDRLDESKFWAEDKKVSGKYSLFNDKNFSDKQYFEKFPTIFHLRKYLMEEHGKVDIRYYFLAINQMMKRRGHFLIDGQISHVTDDKPLKQQLILLINDLLKIELEEEFMDSIFEILADVNEKKTEKKNILKELINAQDFNKQEGKILYSIFESIVTGKAKIKNIISDEDILEKIKEDNKEDFVLTGDSYEENLQYFEEVLQENITLFNTLKSAYDFVILQSILKGKSTLSDAQVERYDEHKKDLEILKKVIKKYDEDGKLFKQVFKEDNGNGYVSYIGYYLNKNKKITAKKKISNIEFTKYVKGILEKQCDCEDEDVKYLLGKIEQENFLLKQISSINSVIPHQIHLFELDKILENLAKYYPSFNNKKEEFTKIEKIRKTFTFRIPYYVGPLNDYHKNNGGNAWIFRNKGEKIRPWNFEKIVDLHKSEEEFIKRMLNQCTYLPEETVLPKSSILYSEYMVLNELNNLRINGKPIDTDVKLKLIEELFKKKTKVTLKSIRDYMIRNNFADKEDFDNSEKNLEIVSNMKSYIDFNNILGDKFELEMVEDLIEKITIHTGNKKLLKKYIEETYPDLSSSQIQKIINLKYKDWGRLSRKLLDGITGTNIETGEIDTVINFLRNSSDNLMQIIGSQNYSFNNDIDKLRKKYIPQEISYEVVENLYVSPSVKKMIWQVIRITEEITKVMGYDPDKIFIEMAKSEEGKKTTISRKNKLLALYKAIKKDERDSQYEKLLTGLNKLDDSDLRSRKLYLYYTQMGRDMYTGEKIDLDKLFDSTHYDKDHIIPQSMKKDDSIINNLVLVNKNANQTTKGNIYPVPSSIRNNPKIYNYWKYLMEKEFISKEKYNRLIRNTPLTNEELGGFINRQLVETRQSTKAIKELFEKFYKKSKIIPVKAILASDLRKDMNTLKSREVNDLHHAHDAFLNIVAGDVWNREFTSNPINYVKENREGDKVKYSLSKYFTRPRKSKGKVIWTPEKGRKLIVDTLNKPSVLISNESHVKKGELFNATIAGKKDYKKGKIYLPLKKDDRLQDVSKYGGYKAINGAFFFLVEHTKSKKRIRSIELFPLHLLSKFYEDKNTVLDYAINVLQLQDPKIIIDKINYRTEIIIDNFSYLISTKSNDGSITVKPNEQMYWRVDEISNLKKIENKYKKDAILTEEDRKIMESYIDKIYQQFKAGKYKNRRTTDTIIEKYEIIDLDTLDNKQLYQLLVAFISLSYKTSNNAVDFTVIGLGTECGKPRITNLPDNTYLVYKSITGIYEKRIRIK

SEQ ID NO: 220 - protein, 1516 aa, unidentified
  REGION 1..1516: note = Flavobacteriaceae bacterium S85
  source 1..1516: note = Flavobacteriaceae bacterium
MLKQQKDKIIGMNKKILGLDLGTNSIGWALVKQDLENKYGEIIGCGSRIIPMSQDVLGKFDAGISISQTAERTNYRSVRKLIQRNTLRRERLHRVLHQLDFLPKHYNDSIDFEKKLGQFKTDKETKLNYFVNQHGKHEFLFKDSFNEMVKEFKEEQPELFYIKNNGKETKIPYDWTIYYLRKKALSKKISKEELSWLVLNFNQKRGYYQLRGEIDEEKEKNKRYEKLYVSEVVKTNNTIKKTGEYLYDIYFDNGWKYEKQTTKPQDWLHKHKEFIITTTTLKNGETKRTFKTVDSEKDWIAIKSKTEQDIKESNKTVGAFIYDTLLKNPTQKIRGSLVKTIERKFYREEFEKILKEQIKHRPEINVNTAIGKENYTKCVTELYPRNEAHANNILTNDFNYLFTKDILFYQRPLKSKKSEIANCQYEYRTYIKKKEKTGKEERVKQPLKATPKSHPLFQEFRLWQFIHNLKIYIRETTVGNKPLFDVDITDTFFTSENDWATLFEYLNNKKEIEQKHVLEYLVSKKIISKSEKTDYRWNYVEDKKYPGNETRVDFINRLKKVENLNVDEFLTSELEFKLWHIIYSVTDKNEYEKALENFAIRQNIDKDSFVNSFKKFPPFKSDYGAYSTKAIKKLLPLMRLGKFWDGSEIPKVVVEKITDIKTRLTSVNYDESLFKKDEKKILETIVDDITPKQLLKSFVKLKGKNHLAGLNTYQACYLVYERHSESSDITQWENPDDIDSFLNHFKQHSLRNPIVEQVVTETLRTVRDIWKYYGNGSPNYFNEIHIELGREMKNPADKRKQMSAKINENENTNQRIKGILQELMNDGVQDIKPYSPSQQEILKIYEEGISQNPNVDYSKVSEDEITKIKKSNNPTLKEIQRYKLWLEQKYISPYTGKPIPLSELFTPAYQIEHIIPQSRYFDNSLSNKIICESEVNEDKSNKTAYEYLKTNGGSIVHGHHLLSLKEYEDHCQHYFKKNRTKLKNLLSEEIPEGFINRQLNDSRYISKLIKGLLSNIVREENEQEATSKNIVPVTGSITSKLKQDWGLNDKWNEIIAPRFKRLNKMTNSNDFGYFDEKINTFRIQVPDAISRGFNKKRIDHRHHTLDALVIACCTKKHIQYLNSLNNEIIKHELKPSILIKNAQGDYTKHFMLPWNNFPIDCKNAIENTIVSFKQNLRVINKTSNKYQSYKDENGNLRLGKDGKPKKGLTKQTKGNNWAVRKAMHEDTFYGEIVDGENKGKLKIKTLLDTSFDVKKIEDKVLDKSIRTILINYLKQDKYKNLSKPHEEAFSPNGIIEMNKNIISLNNNIPHKPIKRVTLKHEKGKKFSIKTLLDKKTKFAKSATGTNVFFCIYKNINGKIKYHTPSFEEIIEIQKQEFEIKYKSKLNVPETLFDKKESFELLFYLQPNDLVYLPNDEELKNRQLIDFNNLNKKQIKRIYKFTDGSGTTANFIPYQVAKVIFNLNKKEQAKSSFKYPIQNEFGVGSPQSKNQKSIEGILIKERCIKLKIDRLGNISKA

SEQ ID NO: 221 - protein, 1473 aa, Flavobacterium branchiophilum
MAKILGLDLGTNSIGWAVVERENIDFSLIDKGVRIFSEGVKSEKGIESSRAAERTGYRSARKIKYRRKLRKYETLKVLSLNRMCPLSIEEVEEWKKSGFKDYPLNPEFLKWLSTDEESNVNPYFFRDRASKHKVSLFELGRAFYHIAQRRGFLSNRLDQSAEGILEEHCPKIEAIVEDLISIDEISTNITDYFFETGILDSNEKNGYAKDLDEGDKKLVSLYKSLLAILKKNESDFENCKSEIIERLNKKDVLGKVKGKIKDISQAMLDGNYKTLGQYFYSLYSKEKIRNQYTSREEHYLSEFITICKVQGIDQINEEEKINEKKFDGLAKDLYKAIFFQRPLKSQKGLIGKCSFEKSKSRCAISHPDFEEYRMWTYLNTIKIGTQSDKKLRFLTQDEKLKLVPKFYRKNDFNFDVLAKELIEKGSSFGFYKSSKKNDFFYWFNYKPTDTVAACQVAASLKNAIGEDWKTKSFKYQTINSNKEQVSRTVDYKDLWHLLTVATSDVYLYEFAIDKLGLDEKNAKAFSKTKLKKDFASLSLSAINKILPYLKEGLLYSHAVFVANIENIVDENIWKDEKQRDYIKTQISEIIENYTLEKSRFEIINGLLKEYKSENEDGKRVYYSKEAEQSFENDLKKKLVLFYKSNEIENKEQQETIFNELLPIFIQQLKDYEFIKIQRLDQKVLIFLKGKNETGQIFCTEEKGTAEEKEKKIKNRLKKLYHPSDIEKFKKKIIKDEFGNEKIVLGSPLTPSIKNPMAMRALHQLRKVLNALILEGQIDEKTIIHIEMARELNDANKRKGIQDYQNDNKKFREDAIKEIKKLYFEDCKKEVEPTEDDILRYQLWMEQNRSEIYEEGKNISICDIIGSNPAYDIEHTIPRSRSQDNSQMNKTLCSQRFNREVKKQSMPIELNNHLEILPRIAHWKEEADNLTREIEIISRSIKAAATKEIKDKKIRRRHYLTLKRDYLQGKYDRFIWEEPKVGFKNSQIPDTGIITKYAQAYLKSYFKKVESVKGGMVAEFRKIWGIQESFIDENGMKHYKVKDRSKHTHHTIDAITIACMTKEKYDVLAHAWTLEDQQNKKEARSIIEASKPWKTFKEDLLKIEEEILVSHYTPDNVKKQAKKIVRVRGKKQFVAEVERDVNGKAVPKKAASGKTIYKLDGEGKKLPRLQQGDTIRGSLHQDSIYGAIKNPLNTDEIKYVIRKDLESIKGSDVESIVDEVVKEKIKEAIANKVLLLSSNAQQKNKLVGTVWMNEEKRIAINKVRIYANSVKNPLHIKEHSLLSKSKHVHKQKVYGQNDENYAMAIYELDGKRDFELINIFNLAKLIKQGQGFYPLHKKKEIKGKIVFVPIEKRNKRDVVLKRGQQVVFYDKEVENPKDISEIVDFKGRIYIIEGLSIQRIVRPSGKVDEYGVIMLRYFKEARKADDIKQDNFKPDGVFKLGENKPTRKMNHNQFTAFVEGIDFKVLPSGKFEKI

SEQ ID NO: 222 - protein, 1459 aa, Flavobacterium columnare
MKFNLGLDIGTNSIGWALVNEDYENKKGKIIAAGSRIIPMTQDILDKFGSGAITETQTALRTDYRSKRKLIQRFLLRRERLHRVLNVLDFLPKHYAESIDFEKYFGKFLPNTEPKLAYNQNQFIFQNSFLEMLKEFQEKHPELLTNNKKIPYDWTIYYLRKKALNQRIEKEELAWLLLQFNQKRGYNQLRDEEEESVPNKQVEFYSLKIIDVVADQPKEGRDKRWYSINLENGWTYRRESKTPLFNWEGKTKDFIVTTDLNQDGSIKKDKEGKEKRSFRAPSEGDWTLLKKKTEKEIYESGKTLGTYIYDALLNTPDLKIKGDFIRTIDRSIYKEELQQIINKQKEYHLELNSSKLYKACLEELYPKNEIYKSALKNKDIAYLFINDILYYQRPLKAPKYNIGKCTYESRTFKKEDKKIREYIPAVAKSHPLFQEFRLWQWIKNLKIYEKLSSDNCTDFFLTNEQDFENLFEFLWNKKEIDHKGILEYLVKTKFPDLKPKQVKTKVKEYRWNYVYDHEKDESKTYPCGETYFLLKNKLDKIYNAQDDFLDKERLYNLWHIIYSVTDKKQYEKALAKFALKNHLDTKSFVNTFKRIPPFKNDYAIYSLKAIKKLLPLMRVGKYWNYDDIDPITKQKIQCIITGEENDTISTLVREKTNHFSNENDFKNLPLWLAGYIVYNSHNESSEIEKWKSPQDIDTFLKKFKQHALRNPIVEQVVTETLRVVRDIWSKKGQGKKDFFNEIHIELGKDLKNPVDKRRKLSSTNTKNESTNTRIKALLIELFTQGVENVKPNSPKHQEILKIFEEGALNSGIEIEEDIIKISNTDQPTKKQLELYILWLEHKYKSPYTGQSIPLSKLFTPNYEIEHIIPRSKYYDDNLSNKVICETEINRLKNNQLGYEFINNHEIREVTLEEGKTIRLLSPEQYWNFVTTYYAKNKAKRENLLLKELPVQMVEKQLNDTRYVSKYVMQLLSKIVRKEDGTDNGINSTNILSISGKMTRALKNDWDLNDVWNDLLLYRFERLNTITKTNLFTTYSEQKQKRMPIVPDQYAKGFHKKRLDHRHHALDAIVIACITRNHINYMNNQNIQGEKLKKNAIEKENYREILQKSRLDIRAQLCEKKYNDNDPTKYNWVFIKPWADFTENTKDILESIIPSFKQNLRIINKTVNYYEKYNENGKKVKVRQIKGDNWAIRKPLHKETISGKVHLSYKTPAKGKILTATRKVLDSSMDFKSIEKITDTGIQKILKNYLEYKKSPELAFSPEGIEELNATITKYNNGFHHKPIYKVRIYEEGVKFPLGNKGNKKSKYVEAEKGTNLFFAIYKDQENNRYFETIPFNDVLETLKKGMSAVPEKNQEENTLVFALSPQDLVFVPTLDEIENPDIVDFKNLTKDQTNRIYKMVSSSGKQCFFIKAEVATSIVNKMEFSTSNKMENSIEGIQIKSNCWKLKLDRLGTITRVIK

SEQ ID NO: 223 - protein, 1535 aa, Flavobacterium columnare
MTKILGLDLGTNSIGWAIRDTENEGINQILDKGARIFSEGVKSENGKEISRAAERTAYRSARKIKYRRKLRKYETLKVLSINGMCPLSVEEVEQWKKSGFKEYPLNPEFLDWLRTNEDKNINPYLFRDKASKQKVTLFELGRALYHIAQRRGFLSNRLDQSAEGVFEEHNPQIQNLIEDLDSSNTILNELKEYYINLGIIDETEKSGFKKDLDEGEKKLKSLYNSLVAITKKNANDIETCKQELIARLNKKEDLGKVKGKIKDISQAMLDRNFKTLGQYFFSLYNKERIRNQYTSREEHYLEEFIIICQTQGIEGINTNEKLPEKKFTGLAKDLYRAIFFQRPLKSQKGLIGKCSFEKNKSRCAVSHPDYEEFRMWSYLNTIKIGTQSEKTLRFLTLEEKLKLVPKFYRKSDFNFEVLAKELVEKGASFGYYKSSKKNEFFYWFNYKPTDSVSACVVSASLENAIGKDWKIKTFEYQTRNTEKNEVTKSVDYKDLWHLLSVATSDTYLYDFAIEKLKLEPKNAKAFSKTKLKKDFASLSLAAIAKILPYLKQGLLYSHAVFMANIENIVDADIWKDEEQQKFIQSKIVELVDNYIVEKSKLELINGLLKIYNTEDKEGRKVYYSKEAESLFEADLRKKLVPFYKANIIIEEHEQEIIFQDLFPILMDQLKKQEFIKIGRLDKQIEAFLEGENEEGQIFCNHTDKLKKLYHPSDIEVFKKKTIKDEWGNEKVVLGSPLTTSIKNPMAMRALHQLRKVLNTLIANDQIDEDTRIHIEMARELNDANKRKGIQDFQNENKKFREEAIKEIKKLYLEECHKDVNPTEDDILRYQLWLEQGKCEIYEEGNNISICDIIGSNPSYDIEHTIPRSISQDNSQMNKTLCSLKFNRSIKKQKMPVELSNYNDILPRIAHWKKEAEELTRQIETISRSIKSAATKVAKDKNIRKRHYLTLKRDYILGKYERFTWEEPKVGFKNSQIPDTGIITKYAQAYLKSYFKRVESVKGGAVAEFRKLWGIQESFIDENWWKHYKDKDRDKHTHHTIDAITIACMPKDKYDLLAHAWRLEDEQDKKAAKVLIEQAKPWKTFKEDIEKIETEILVSHFTPDNVKKQSKSIIKNRGKKVYVLKNELPVNFKNKIEGKDYFKLKFDSKILYKIPKKKEKQTDTFYEELPKNYLNGVEGKDYFKINTTGKTFYKIPIFNQGDTIRGSLHQETTYGAIKLPDIDIETKKPLHTDKGGFILKKDIKGNEIVFFVVRKEISKISENDVQNIVDNVVRKKIENAIANSLITFKIVKKKKVAVIKEGVTIWMREPNIEKGIEGIPIKKVRIITNSVKNPIEIKVHSPLSKSRHKHKQKVYGQNDENYAMALYELDGKREFELINNFNLAKLLKQSQSYYPLHKEKEIKGKKILVPIEKRNNKDVILKRGQQVVFYDKTVENPKDISEIIDFRERIYIIEGLTIQRQKDKKTSKVNEYGIIQLRHFKEARKSEEISKDNFKPDGEFKINENKPTRKMNHNQFTAFVEGIDFKVLPSGKFQKI

SEQ ID NO: 224 - protein, 1354 aa, Flavobacterium psychrophilum
  REGION 1..1354: note = Flavobacterium psychrophilum JIP02/86
MKKILGLDLGTNSIGWAFINEAENEIEVSSIVNTGVRIVPLTTDEESDFKKGNTISINADRTLKRGARRGLQRFKQRREALLETFNRIKFIATDFVYAETGAATTFSSYQLRAKSAVEAVTKEELVKVLLMLNKKRGYKSSRKAKTAEEGDAIDGMKIAKEIFENNLTPGQWVYNSLSKGGKFIPDFYHSDLQKELEKIVRFQNQFHSEQINDKLLADIQGKSRTQTSQHFSKTLNIPLAENKGTREETKLQHYQWRNEALANELDMKILAFIITEINNQINQSSGYLGAISDRSKELYFNQETVGQYQYKQLQENVHAKLKNQVFYRQDYLDEFEKIWETQAKFHSELNEKLKAEIRDITIFYQRKLKSQKHLVSFCEFEKGHKAIPKSSPLFQEFRIWQNLNNVVVKNETTKEVFELSEELKQLIAEELQFKESMTDVQMLTFCELKKGTHTVNFKKIEGNRTNTSIYKAFEKILEVEGYEIDFSKMKPLEIKETVAPIFETLNINTVILDFDPTIQGNDFDKQPYYQLWHLLYSAEDDDKLKETLKTKFGFKENHLPFILNINLQADYGSLSAKAIKKILPHLMDGHIYDKACLMVGYNHSSSLTTAQNNDRVLKDTLELLKKNSLRNPVVEKILNQMINVINAIMKDPAMGKPDEIRVELARELKANNEQRKKATSDINTATTEHERIRKLLHSEFNIPRVTRNDIIRYKLWLETGGISLYTGNPIKASDLFSKNYDIEHIIPKSRLFDDSFSNKTLCERQLNIDKSNKTAYSFLQEKLSENDFAAYENRVKDLFKTGKIKSYTKYKKLLMADNEIPEGFIDRQLRETQYIAKKAKEILLEVSRNVTATIGSVTDKLRQDWELVDVMKELNWEKYDKLGLTHIEEGKNGERLSKIKDWTKRNDHRHHAMDAITVAFTKPAYIQYLNNLNAKTQGENKANSIIGIENKHLYRDKNNKLRFISPMKNFREEAKKQLESILISYKAKNKVVTKNKNTTKKSGGTNQKIQLTPRGRLHKETVYGKLQQYATKEEKVNASFTEDYIQKVAKKEYREALLKRLEENDNDPKKAFTGKNALNKTPIYISLKDNIIVPEKVKTVWLETDYTIRKDITPDLKIDKVIDVGIKRILQNRLNEFNGDPKKAFVNLGESPIWLNKEKGIAIKRVTISGVSNAQALHTKKDHLGNEILDKNGNPIPVDFISTGNNHHVAIYRDEKGNLQEEVVSFYDAVIRRNLGLSVINKNHEKGWEFLFSMKQNEFFIFPSDGFNPHEIDLLNPNNYHLISPNIFRVQKISTKNYMFNHHLETKAVDGEMLKSKKELSKTSYHFIQTPTNLNGIIKVRINHLGKIVHLGEY

SEQ ID NO: 225 - protein, 1458 aa, Fluviicola taffensis
MTKTILGLDLGTNSIGWALINQDFDNKKGEILGMGSRIIPMTQDIKDEFGKGNSISQTAERTRLRGVRRLIHRTLLRRERLHRVLNIIGFLPEHYANQIDFEKRFGKFKPESEPKISFDGNDVFLFEKSYQEMLVDFKIHQPQLVSNGKKIPHDWTIYYLRKKALSKKIEKEELAWILLNFNQKRGYYQLRGEEEEETPNKLVEFHSLKIVEVNADEPQKGKPEIWYSLVLENGWVYRRASKTPLFDWKDKIREFIVTTEINNDGTVKTDKEGTEKRSFRAPKPEDWTLQKKKTEFELSKSGNEVGAFIYESILQKPNQKIRGKLISTIERKFYKEELKTILKTQLFFHKELKDEKLYNACIEELYKNNEAHRSLLSNKGFEHLFINDILFYQRPLRSKKSQISNCPLEKRTYKKEGIEITEGIKVISKSNPIYQEFRLWQWISNLSLYCIEPTETNVTSTFLNSIEDYENLFEFLNNRKEIEQKHLLKYLLENQGFKGKLLTNELEKFRWNFVADKKYPCNETGSLLHTRLSKVKNISPDFLTKEIEHQLWHIIYSVTDKIEYEQALKTFARKNNLDVDSFFEHFKKIPPFESTYGAYSEKAIKKLLPLIRLGKYWNWEAIDSISKDRISKILSGEYDENIKNRVREKAVHLTSENNFQGLQEWLAKYIVYDRHSEGNDLGKWTSVSDLETYLKEFKQHSLRNPIVEQVITETLRVVKDIWIKHGKGTENFFDEIHVELGREMKNNSEDRKRLTNTITENENTNLRIKALLMEMMNDNDVENVRPYSPSQQEILKIYEDGALNSNIELDDEIVKISKKAEPTKSELQRYKLWLEQKYRSPYTGQVIPLNKLFTSEYEIEHVVPQSRFFDDSFSNKVICESAVNKRKDNQLGLQFIKNHSGEKVELGFGKVVQVFTEEQYLDFVKEHYSKNRSKHNKLLLEEIPEKMIERQLNDTRYISKFVSSILSNIVRSEKDDDGLNSKNILPGNGKITTELKRDWGLNDVWNDLILPRFERMNTITNSDLFTTYNDKYQKHLPTVPFEYSKGFQKKRIDHRHHAMDALVIACATRDHLNLMNNQSAKSELKRYDLQNKLRKKEPYFNQKENKQKEAFKDFIKPWGTFTEDSKNALEKIIISFKQNLRVINKATNSYESYKDEDGNLRIGKDGKPEKGLIKQKGLNWAIRKPLHKDTVSGQINLSRIKLPNGKILTATRKNLDTSFDLKTIENSITDTGIQKILKNYLLSKESPELAFSPEGLEEMNNEIEKYNNGKFHHPINKARIYELGSKFNVGQTGNRRDKFVEAAKGTNLFFAIYQDENKNRSYETIPLNEVIEHQKWRASLPKEEQEKIPLVPVNKLKGTFIFSLSPNDLVYVPSNDELERSASIDFSKLKKEQINRLYKMVSSSGSQCFFVKSEVATSVVNKMEYSSLNKMEKSIDNLMVKEICIKLKIDRLGNISKA

SEQ ID NO: 226 - protein, 1646 aa, Francisella tularensis
MNIKILPIAIDLGAKNTGVFSAFYQKGTSLESLDNKNGKVYELSKDSYTLLMNNRTARRHQRRGIDRKQLVKRLFKLIWTKQLNLEWNKDTQQTISFLLNRRGFSFITDGYSPEYLNIAPEAVKAILMSILDDYNGEDDLDSYLQSATENDSKIDELYNKLLQKALEFKLRKLCIDIKEDKVTTKTLKELSNTEFKLLANYLVDYDRILRTQKFSYTDKQGNLRELNYYHHDKYNIQEFLKRNIIINDVILEKLTDDLDIWNLNFDKFDFEKNLEKLENQEDKDYLQTHLHHFVFAVNKIKSEMASGGRHRSQYFQEITNVLVENNHQEGYLKNFCENLHNKKYSNLSVKNLVNLIGNLSNLELKPLRKYFNDKIHAKADYWDEQKFAETYSDWILGEWRVGAKDKDKKDGAKYSYKNLCDELKQKVGINQDGIINQTKSDFVDFLLELDPCRTIPPYLDNNNRKPPKCQSLILNPKFLDNKYPNWQQYLQELKKLQTVQNYLGNFEIDLKDLKSSKEQPYFVKYKSLNQQIASGQRDYKDLDARVLQFIFDRVKASDELLLNEIYSHAKKLKQNTSSELEKLELCKKLDEVIANSQLSQILKSQHVNGIFEQGTFLHLVCKYYKQRQRARDSRLYIMPEYRYDKKLDKYNNTGRFDDDNQLLTYCNHKPRQKRYQLLNDLAGVLQVSPNFLKDKIGSDDDLFISKWLVEHIRGFKKACEDSLKIQKDNRGLLNHKINIARNTKGKCEKEIFNLICKIEGSEDKKGNYKHGLAYELGVLLFGEPNQASKLEFDRKIKKFNSIYSFAQIQQIAFAERKGNANTCAVCSADNAHRMQQIKVAKPVEGNKDNIILSAKAQRLPAIPTRIVDGAVKKIATILARNIVDDNWDNIKQALSNNQQLHVPIITESNAFEFEPALADIKGKSLKDKRKKALERIDPENVFKDKNNRIKEFAKGISAYSDANLANGDFDGAKEELDHIIPRSHKKYGTLNDEANLICVTREDNQNRGNKAVFLYDLKPNYKLKQFNTTDDLEIEKKIADTIWDASKQDFKFGNYRSFINLTPQEQIAFRHALFLADKNPIKKAVIRAIDNRNRTFVNGTQRYFAEVLANNIYLRAKKENLATNRITFDYFGIETTNSNGRGIADVRKLYEKVDSDIQAYAKGDKPQDSYSHLIDAMIAFCVAADEHKNEGSIGLKMGNQYGLFPTPDKYDENTGEIISWHNDDIFRKIKVSDNQFSDKKLVRKKATEGFNTHRQMTRDGIYGESYLPILIHKNLNEVRKGYNWENSEEIKIFKGKKYDIQQLNNLVYCLKFVDKPISIDIQITTLEELRNILETNNISTTAEYYYINLKTQKLHEYYIENYNTALGYKKYTKEMEFLRSLAYRTERVKIKSIDDVSMILAKDSNFKAGKIELPFKTEWQRLYLEWQNTTIKDNHEFLKSYFSVKNATKQHKKVRKDFSLPISTNEGKLLVKRKTWDNNFIYQILNDSDSRADGTKPFIPAFDISKNEIVETIIKSFTSKNIFWLPKNIELQKVDNKSIFAIDTSRWFEVETPKDLIEIGVSTIQYKIDNNSRPKVRVKLDYVMDDDSKINYFMNHSLLKSRYPDKVLEILKQSTIIEFESSGFNKTIKEMLGMTLAGIYNETSNN

SEQ ID NO: 227 - protein, 1629 aa, Francisella tularensis
MNFKILPIAIDLGVKNTGVFSAFYQKGTSLERLDNKNGKVYELSKDSYTLLMNNRTARRHQRRGIDRKQLVKRLFKLIWTEQLNLEWDKDTQQAISFLFNRRGFSFITDGYSPEYLNIVPEQVKAILMDIFDDYNGEDDLDSYLKLATEQESKISEIYNKLMQKILEFKLRKLCTDIKDDKVSTKTLKEITSYEFELLADYLANYSEILKTQKFSYTDKQGNLKELSYYHHDKYNIQEFLKRHATINIQILDTLLTDDLDIWNFNFEKFDFDKNEEKLQNQEDKDHIQAHLHHFVFAVNKIKSEMASGGRHRSQYFQEITNVLDENNHQEGYLKNFCENLHNKKYSNLSVKNLVNLIGNLSNLELKPLRKYFNDKIHAKADHWDEQKFTETYCHWILGEWRVGVKDQDKKDGAKYSYKDLCNELKQKVTKAGLVDFLLELDPCRTIPPYLDNNNRKPPKCQSLILNPKFLDNQYPNWQQYLQELKKLQSIQNYLESFETDLKVLKSSKDQPYFVEYRSSNQQIASGQRDYKDLDARILQFIFDRVKASDELLLNEIYFQAKKLKQKASSELEKLESSKKLDEVIANSQLSQILKSQHTNGIFEQGTFLHLVCKYYKQRQRARDSRLYIMPEYRYDKKLHKYNNTGRFDDDNQLLTYCNHKPRQKRYQLLNDLAGVLQVSPNFLKDKIGSDDDLFISKWLVEHIRGFKKACEDSLKIQKDNRGLLNHKINIARNTKGKCEKEIFNLICKIEGSEDKKGNYKHGLAYELGVLLFGEPNEASKPEFDRKIKKFNSIYSFAQIQQIAFAERKGNANTCAVCSADNAHRMQQIKITEPVEDNKDKIILSAKAQRLPAITTRIVDGAVKKMATILAKNIVDDNWQNIKQVLSAKHQLHIPIITESNAFEFEPALADVKGKSLKDRRKKALERISPENIFKDKNNRIKEFAKGISAYSGANLTDGDFDGAKEELDHIIPRSHKKYGTLNDEANLICVTRGDNKNKGNRIFCLRDLANNYKLKQFETTDDLEIEKKIADTIWDANKKDFKFGNYRSFINLTPQEQKAFRHALFLADENPIKQAVIRAINNRNRTFVNGTQRYFAEVLANNIYLRAKKENLNTDKISFDYFGIPTIGNGRGIAEIRQLYEKVDSDIQAYAKGDKPQASYSHLIDAMLAFCIAADEHRNDGSIGLEIDKNYSLYPLDKNTGEVFTKDIFSQIKITDNEFSDKKLVRKKATEGFNTHRQMTRDGIYAENYLPILIHKELDEVRKGYTWKNSEEIKIFKGKKYDIQQLNNLLYCLKFVDKPISIDIQISTLEELRNILTTNNIAATAEYYYINLKTQKLHEYYIENYNTALGYKKYTKEMEFLRSLAYRSERVKIKSIDDVKQVLDKDSNFIIGKITLPFKKEWQRLYREWQNITIKDDYEFLKSFFNVKSITKLHKKVRKDFSLPISTNEGKFLVKRKTWDNNFIYQILNDSDSRVDGTKPFIPAFDISKNEIVEAIIDSFTSKNIFWLPKNIELQKVDNKNIFAIDTSKWFEVETPSDLRDIGVATIQYKIDNNSRPKVRVKLDYVIDDDSKINYFTNHSLLKSRYPDKVLEILKQSTIIEFESSGFNKTIKEMLGMTLAGIYNETSNN

SEQ ID NO: 228 - protein, 1629 aa, Francisella novicida
  REGION 1..1629: note = Francisella novicida FTG
MNFKILPIAIDLGVKNTGVFSAFYQKGTSLERLDNKNGKVYELSKDSYTLLMNNRTARRHQRRGIDRKQLVKRLFKLIWTEQLNLEWDKDTQQAISFLFNRRGFSFITDGYSPEYLNIVPEQVKAILMDIFDDYNGEDDLDSYLKLATEQESKISEIYNKLMQKILEFKLMKLCTDIKDDKVSTKTLKEITSYEFELLADYLANYSESLKTQKFSYTDKQGNLKELSYYHHDKYNIQEFLKRHATINDRILDTLLTDDLDIWNFNFEKFDFDKNEEKLQNQEDKDHIQAHLHHFVFAVNKIKSEMASGGRHRSQYFQEITNVLDENNHQEGYLKNFCENLHNKKYSNLSVKNLVNLIGNLSNLELKPLRKYFNDKIHAKADHWDEQKFTETYCHWILGEWRVGVKDQDKKDGAKYSYKDLCNELKQKVTKAGLVDFLLELDPCRTIPPYLDNNNRKPPKCQSLILNPKFLDNQYPNWQQYLQELKKLQSIQNYLDSFETDLKVLKSSKDQPYFVEYKSSNQQIASGQRDYKDLDARILQFIFDRVKASDELLLNEIYFQAKKLKQKASSELEKLESSKKLDEVIANSQLSQILKSQHTNGIFEQGTFLHLVCKYYKQRQRARDSRLYIMPEYRYDKKLHKYNNTGRFDDDNQLLTYCNHKPRQKRYQLLNDLAGVLQVSPNFLKDKIGSDDDLFISKWLVEHIRGFKKACEDSLKIQKDNRGLLNHKINIARNTKGKCEKEIFNLICKIEGSEDKKGNYKHGLAYELGVLLFGEPNEASKPEFDRKIKKFNSIYSFAQIQQIAFAERKGNANTCAVCSADNAHRMQQIKITEPVEDNKDKIILSAKAQRLPAIPTRIVDGAVKKMATILAKNIVDDNWQNIKQVLSAKHQLHIPIITESNAFEFEPALADVKGKSLKDRRKKALERISPENIFKDKNNRIKEFAKGISAYSGANLTDGDFDGAKEELDHIIPRSHKKYGTLNDEANLICVTRGDNKNKGNRIFCLRDLADNYKLKQFETTDDLEIEKKIADTIWDANKKDFKFGNYRSFINLTPQEQKAFRHALFLADENPIKQAVIRAINNRNRTFVNGTQRYFAEVLANNIYLRAKKENLNTDKISFDYFGIPTIGNGRGIAEIRQLYEKVDSDIQAYAKGDKPQASYSHLIDAMLAFCIAADEHRNDGSIGLEIDKNYSLYPLDKNTGEVFTKDIFSQIKITDNEFSDKKLVRKKAIEGFNTHRQMTRDGIYAENYLPILIHKELNEVRKGYTWKNSEEIKIFKGKKYDIQQLNNLVYCLKFVDKPISIDIQISTLEELRNILTTNNIAATAEYYYINLKTQKLHEYYIENYNTALGYKKYSKEMEFLRSLAYRSERVKIKSIDDVKQVLDKDSNFIIGKITLPFKKEWQRLYREWQNTTIKDDYEFLKSFFNVKSITKLHKKVRKDFSLPISTNEGKFLVKRKTWDNNFIYQILNDSDSRVDGTKPFIPAFDISKNEIVEAIIDSFTSKNIFWLPKNIELQKVDNKNIFAIDTSKWFEVETPSDLRDIGVATIQYKIDNNSRPKVRVKLDYVIDDDSKINYFTNHSLLKSRYPDKVLEILKQSTTIEFESSGFNKTIKEMLGMTLAGIYNETSNN

SEQ ID NO: 229 - protein, 1629 aa, Francisella novicida
  REGION 1..1629: note = Francisella novicida GA99-3548
MNFKILPIAIDLGVKNTGVFSAFYQKGTSLERLDNKNGKVYELSKDSYTLLMNNRTARRHQRRGIDRKQLVKKLFKLIWTEQLNLEWDKDTQQAISFLFNRRGFSFITDGYSPEYLNIVPEQVKAILMDIFDDYNGEDDLDSYLKLATEQESKISEIYNKLMQKILEFKLRKLCTDIKDDKVSTKTLKEITSYEFELLADYLANYSESLKTQKFSYTDKQGNLKELSYYHHDKYNIQEFLKRHATINDEILDTLLTDDLDIWNFNFEKFDFDKNEEKLQNQEDKDHTQAHLHHFVFAVNKIKSEMASGGRHRGQYFQEITNVLDENNHQEGYLKNFCENLHNKKYSNLSVKNLVNLIGNLSNLELKPLRKYFNDKIHAKADHWDEQKFTETYCHWILGEWRVGLKDQDKKEGAKYSYKDLCNELKQKVTNAGLIDFLLELDPCRTIPPYLDNNNRKPPKCQSLILNPKFLDNQYPNWQQYLQELKKLQIIQDYLESFETDLKVLKSSKDQPYFVEYKSSNQQIASGQRDYKDLDARILQFIFDRVKASDELLLNEIYFQAKKLKQKASSELEKLESSKKLDEVIANSQLSKILKSQHTNGIFEQGTFLHLVCKYYKQRQRARDSRLYIMPEYRYDKKLDKYNNTGRFDDDNQLLTYCNHKPRQKRYQLLNDLAGVLQVSPNFLKDKIGSDDDLFISKWLVEHIRGFKKACEDSLKIQKDNRGLLNHKINIARNTKGKCEKEIFNLICKIEGSEDKKGNYKHGLAYELGVLLFGEPNEASKPEFDRKIKKFNSIYSFAQIQQIAFAERKGNANTCAVCSADNAHRMQQIKITEPVEDNKDKIILSAKAQRLPAIPTRIVDGAVKKMATILAKNIVDDNWQNIKQVLSAKHQLHIPIITESNAFEFEPALADVKGKSLKDRRKKALERISPENIFKDKNNRIKEFAKGISAYSGANLTDGDFDGAKEELDHIIPRSHKKYGTLNDEANLICVTRDDNKNKGNRIFCLHDLANNYKLKQFETTDDLEIEKKIADTIWDASKKDFKFGNYRSFINLTPQEQKAFRHALFLADENPIKQAVIRAINNRNRTFVNGTQRYFAEVLANNIYLRAKKENLNTDKISFDYFGIPTIGNGRGIAEIRQLYEKVDSDIQVYAKGDKPQASYSHLIDAMLAFCIAADEHRNDGSIGLEIDKNYSLYPLDKNTGEVFTKDIFSQIKITDNEFSDKKLVRKKATEGFNTHRQMTRDGIYAENYLPILIHKELDEVRKGYTWKNSEEIKIFKGKKYDIQQLNNLLYCLKFVDKPISIDIQISTLEELRNILTTNNIAATAEYYYINLKTQKLHEYYIENYNTALGYKKYTKEMEFLRSLAYRSERVKIKSIDDVKQVLDKDSNFIIGKITLPFKKEWQRLYREWQNTTIKDDYEFLKSFFNVKSITKLHKKVRKDFSLPISTNEGKFLVKRKTWDNNFIYQILNDSDSRVDGTKPFIPAFDISKNEIVEAIIDSFTSKNIFWLPKNIELQKVDNKNIFAIDTSKWFEVETPSDLRDIGVATIQYKIDNNSRPKVRVKLDYVIDDDSKINYFTNHSLLKSRYPDKVLEILKQSTIIEFESSGFNKTIKEMLGMTLAGIYNETSNN

SEQ ID NO: 230 - protein, 1629 aa, Francisella tularensis; identical to SEQ ID NO: 30

SEQ ID NO: 231 - protein, 1629 aa, Francisella novicida
  REGION 1..1629: note = Francisella novicida GA99-3549
MNVKILPIAIDLGVKNTGVFSAFYQKGTSLERLDNKNGKVYELSKDSYTLLMNNRTARRHQRRGIDRKQLVKRLFKLIWTEQLNLEWDKDTQQAISFLFNRRGFSFITDGYSPEYLNIVPEQVKAILMDIFDDYNGEDDLDSYLKLATEQESKISEIYNKLMQKILEFKLRKLCTDIKDDKVSTKTLKEITSYEFELLADYLANYSEILKTQKFSYTDKQGNLKELSYYHHDKYNIQEFLKRHATINDEILDTLLTDDLDIWNFNFEKFDFDKNEEKLQNQEDKDHTQAHLHHFVFAVNKIKSEMASGGRHRGQYFQEITNVLDENNHQEGYLKNFCENLHNKKYSNLSVKNLVNLIGNLSNLELKPLRKYFNDKIHAKADHWDEQKFTETYCHWILGEWRVGVKDQDKKDGAKYSYKDLCNELKQKVTKAGLVDFLLELDPCRTIPPYLDNNNRKPPKCQSLILNPKFLDNQYPNWQQYLQELKKLQSIQNYLESFETDLKVLKSSKDQPYFVEYKSSNQQIASGQRDYKDLDARILQFIFDRVKASDELLLNEIYFQAKKLKQKASSELEKLESSKKLDEVIANSQLSQILKSQHTNGIFEQGTFLHLVCKYYKQRQRARDSRLYIMPEYRYDKKLDKYNNTGRFDDDNQLLTYCNHKPRQKRYQLLNDLAGVLQVSPNFLKDKIGSDDDLFISKWLVEHIRGFKKACEDSLKIQKDNRGLLNHKINIARNTKGKCEKEIFNLICKIEGSEDKKGNYKHGLAYELGVLLFGEPNEASKPEFDRKIKKFNSIYSFAQIQQIAFAERKGNANTCAVCSADNAHRMQQIKITEPVEDNKDKIILSAKAQRLPAIPTRIVDGAVKKMATILAKNIVDDNWQNIKQVLSAKHQLHIPIITESNAFEFEPALADVKGKSIKDRRKKALERISPENIFKDKNNRIKEFAKGISAYSGDNLASGDFDGAKEELDHIIPRSHKKYGTLNDEANLICVTRDDNKNKGNRIFCLHDLANNYKLKQFETTDDLEIEKKIADTIWDASKKDFKFGNYRSFINLTPQEQKAFRHALFLADENPIKQAVIRAINNRNRTFVNGTQRYFAEVLANNIYLRAKKENLNTDKISFDYFGIPTIGNGRGIVEIRQLYEKVDSDIQAYAKGDKPQASYSHLIDAMLAFCIAADEHRNDGSIGLEIDKNYSLYPLDKNTGEVFTKDIFSQIKITNNEFSDKKLVRKKATEGFNTHRQMTRDGIYAENYLPILIHKELDEVRKGYTWGNSEELKIHKGKKYDIQQLNNLVYCLKFIDKSISIDIQISTLEELRNILTTNNIATTAEYYYINLKTQKLHEYYIENYNTALGYKKYTKEMEFLRSLAYRSERVKIKSIDDVKQVLDKDSNFIIGKITLPFKKEWQRLYREWQNTTIKDDYEFLKSFFNVKSITKLHKKVRKDFSLPISTNEGKFLVKRKTWDNNFIYQILNDSDSRVDGTKPFIPAFDISKNEIVEAIIDSFTSKNIFWLPKNIELQKVDNKNIFAIDTSKWFEVETPSDLRDIGVATIQYKIDNNSRPKVRVKLDYVIDDDSKINYFTNHSLLKSRYPDKVLEILKQSTIIEFESSGFNKTIKEMLGMTLAGIYNETSNN

SEQ ID NO: 232 - protein, 1323 aa, Fructobacillus fructosus
  REGION 1..1323: note = Fructobacillus fructosus KCTC 3544
MVYDVGLDIGTGSVGWVALDENGKLARAKGKNLVGVRLFDTAQTAADRRGFRTTRRRLSRRKWRLRLLDELFSAEINEIDSSFFQRLKYSYVHPKDEENKAHYYGGYLFPTEEETKKFHRSYPTIYHLRQELMAQPNKRFDIREIYLAIHHLVKYRGHFLSSQEKITIGSTYNPEDLANAIEVYADEKGLSWELNNPEQLTEIISGEAGYGLNKSMKADEALKLFEFDNNQDKVAIKTLLAGLTGNQIDFAKLFGKDISDKDEAKLWKLKLDDEALEEKSQTILSQLTDEEIELFHAVVQAYDGFVLIGLLNGADSVSAAMVQLYDQHREDRKLLKSLAQKAGLKHKRFSEIYEQLALATDEATIKNGISTARELVEESNLSKEVKEDTLRRLDENEFLPKQRTKANSVIPHQLHLAELQKILQNQGQYYPFLLDTFEKEDGQDNKIEELLRFRIPYYVGPLVTKKDVEHAGGDADNHWVERNEGFEKSRVTPWNFDKVFNRDKAARDFIERLTGNDTYLIGEKTLPQNSLRYQLFTVLNELNNVRVNGKKFDSKTKADLINDLFKARKTVSLSALKDYLKAQGKGDVTITGLADESKFNSSLSSYNDLKKTFDAEYLENEDNQETLEKIIEIQTVFEDSKIASRELSKLPLDDDQVKKLSQTHYTGWGRLSEKLLDSKIIDERGQKVSILDKLKSTSQNFMSIINNDKYGVQAWITEQNTGSSKLTFDEKVNELTTSPANKRGIKQSFAVLNDIKKAMKEEPRRVYLEFAREDQTSVRSVPRYNQLKEKYQSKSLSEEAKVLKKTLDGNKNKMSDDRYFLYFQQQGKDMYTGRPINFERLSQDYDIDHIIPQAFTKDDSLDNRVLVSRPENARKSDSFAYTDEVQKQDGSLWTSLLKSGFINRKKYERLTKAGKYLDGQKTGFIARQLVETRQIIKNVASLIEGEYENSKAVAIRSEITADMRLLVGIKKHREINSFHHAFDALLITAAGQYMQNRYPDRDSTNVYNEFDRYTNDYLKNLRQLSSRDEVRRLKSFGFVVGTMRKGNEDWSEENTSYLRKVMMFKNILTTKKTEKDRGPLNKETIFSPKSGKKLIPLNSKRSDTALYGGYSNVYSAYMTLVRANGKNLLIKIPISIANQIEVGNLKINDYIVNNPAIKKFEKILISKLPLGQLVNEDGNLIYLASNEYRHNAKQLWLSTTDADKIASISENSSDEELLEAYDILTSENVKNRFPFFKKDIDKLSQVRDEFLDSDKRIAVIQTILRGLQIDAAYQAPVKIISKKVSDWHKLQQSGGIKLSDNSEMIYQSATGIFETRVKISDLL

SEQ ID NO: 233 - protein, 1374 aa, Fusobacterium nucleatum
  REGION 1..1374: note = Fusobacterium nucleatum subsp. vincentii ATCC 49256
MKKQKFSDYYLGFDIGTNSVGWCVTDLDYNVLRFNKKDMWGSRLFDEAKTAAERRVQRNSRRRLKRRKWRLNLLEEIFSDEIMKIDSNFFRRLKESSLWLEDKNSKEKFTLFNDDNYKDYDFYKQYPTIFHLRDELIKNPEKKDIRLIYLALHSIFKSRGHFLFEGQNLKEIKNFETLYNNLISFLEDNGINKSIDKDNIEKLEKIICDSGKGLKDKEKEFKGIFNSDKQLVAIFKLSVGSSVSLNDLFDTDEYKKEEVEKEKISFREQIYEDDKPIYYSILGEKIELLDIAKSFYDFMVLNNILSDSNYISEAKVKLYEEHKKDLKNLKYIIRKYNKENYDKLFKDKNENNYPAYIGLNKEKDKKEVVEKSRLKIDDLIKVIKGYLPKPERIEEKDKTIFNEILNKIELKTILPKQRISDNGTLPYQIHEVELEKILENQSKYYDFLNYEENGVSTKDKLLKTFKFRIPYYVGPLNSYHKDKGGNSWIVRKEEGKILPWNFEQKVDIEKSAEEFIKRMTNKCTYLNGEDVIPKDSFLYSEYIILNELNKVQVNDEFLNEENKRKIIDELFKENKKVSEKKFKEYLLVNQIANRTVELKGIKDSFNSNYVSYIKFKDIFGEKLNLDIYKEISEKSILWKCLYGDDKKIFEKKIKNEYGDILNKDEIKKINSFKFNTWGRLSEKLLTGIEFINLETGECYSSVMEALRRTNYNLMELLSSKFTLQESIDNENKEMNEVSYRDLIEESYVSPSLKRAILQTLKIYEEIKKITGRVPKKVFIEMARGGDESMKNKKIPARQEQLKKLYDSCGNDIANFSIDIKEMKNSLSSYDNNSLRQKKLYLYYLQFGKCMYTGREIDLDRLLQNNDTYDIDHIYPRSKVIKDDSFDNLVLVLKNENAEKSNEYPVKKEIQEKMKSFWRFLKEKNFISDEKYKRLTGKDDFELRGFMARQLVNVRQTTKEVGKILQQIEPEIKIVYSKAEIASSFREMFDFIKVRELNDTHHAKDAYLNIVAGNVYNTKFTEKPYRYLQEIKENYDVKKIYNYDIKNAWDKENSLEIVKKNMEKNTVNITRFIKEEKGELFNLNPIKKGETSNEIISIKPKLYDGKDNKLNEKYGYYTSLKAAYFIYVEHEKKNKKVKTFERITRIDSTLIKNEKNLIKYLVSQKKLLNPKIIKKIYKEQTLIIDSYPYTFTGVDSNKKVELKNKKQLYLEKKYEQILKNALKFVEDNQGETEENYKFIYLKKRNNNEKNETIDAVKERYNIEFNEMYDKFLEKLSSKDYKNYINNKLYTNFLNSKEKFKKLKLWEKSLILREFLKIFNKNTYGKYEIKDSQTKEKLFSFPEDTGRIRLGQSSLGNNKELLEESVTGLFVKKIKL

SEQ ID NO: 234 - protein, 1367 aa, Fusobacterium sp.
  REGION 1..1367: note = Fusobacterium sp. 1_1_41FAA
MKKQQFSDYYLGFDIGTNSVGWCVTDFNYNVLRFNKKDMWGSRLFDEAKTAAERRVQRNSRRRLKRRKWRLNLLEEIFSDEILKIDSNFFRRLKESSLWLEDKSSKEKFTLFNDDNYKDYDFYKQYPTIFHLRNELIKNPEKKDIRLVYLALHSIFKSRGHFLFEGQNLKDIKNFETLYNNLMAFLEDNDIYKNIDSSYIGNLENIICDSKKGLKDKEKEFKEIFNSDKQLVGFFKLSVGSSVSLNDLFDTDEYKKGEVEKEKISFREQIYEDDKPIYYSILGEKIEFLDIAKSFYDFMVLNNILADSQYISEAKVKLYDEHKRDLKNLKYIIRKYNKENYDKLFKDKNESNYSAYIGLNKEKGKKEVIEKSRLKIDDFAKIIKGYLPKAEKIDEKDRSIFNEILDKIELKTILPKQRISDNGTLPYQIHEAELEKILENQAKYYDFLNHEENGISTKDKLLMTFKFRIPYYVGPLNSYHKNKGGNSWIVRKEEGKILPWNFEQKVDIEKSAEEFIKRMTNKCTYLNGEDVIPKDSFLYSEYIILNELNKVQVNDEFLNKEIKKKIIEDLFKKSKKISEKNFREYLLVNQITNKTVELKGVKDAFNSNYVSYIKFKDIFGDKLNLDIYKEISEKSILWKCLYGDDKKIFEKKIKSVYGDILTKDEIKKINSFKFNTWGRLSEKLLTEIEFIDLETGECYSSVMDALRRTNYNLMELLSSKFTLQENIDNENKEVSEFSYRDLVEESYVSPSLKRAILQTLKIYEEIRKITGRIPKKVFIEMARGGDETMKNKKIPARQEQLKKLYDSCGKDISNFSIDIKEMKNSLNSYDNNSLRQKKLYLYYLQFGKCMYTGKEIDLNRLLQNNDTYDIDHIYPRSKVIKDDSFDNLVLVLKNENAEKSNEYPLKKEIQEKMKSFWKFLKEKNFISDEKYKRLTGKDEFELRGFMARQLVNVRQTTKEAGKILQQIEPEIKIVYSKAEIASSFREMFDFIKVRELNDTHHAKDAYLNIVAGNVYNTKFTEKPYRYLQEIKENYDVKKIYNYDIKNAWDKEKSLEIVKKNMEKNTVNITRFIKEEKGQLFDLNPIRKGETSNEIIAIKPKFYEGSTEKLNEKYGYYKSLNPAYFIYVEHKEKNKIIRSFERVNLVDVNKIKDEKSLIKYLIENKGLIEPKVIKKVYKRQVILINNFPYSIVALDSNKLMDFENLKPLFLERKYEKILKNAIKFLEDNQGKTEEYYKFLYLKKKDRNEKNETIDSVKERYNIEFNEMYDKFLEKLDSKDYKNYINNKKYSELVNVKEKFIKLNLFDKAFTLKSFLDLFNRKTMADFSKVGLTKYLGKIQKISSNVLSKNELHLLEESVTGLFVKKIKL

SEQ ID NO: 235 - protein, 1367 aa, unidentified
  REGION 1..1367: note = Fusobacterium sp. 3_1_27
  source 1..1367: note = Fusobacterium sp.
MKKQKFSDYYLGFDIGTNSVGWCVTDLDYNVLRFNKKDMWGSRLFDEAKTAAERRVQRNSRRRLKRRKWRLNLLEEIFSDEIMKIDSNFFRRLKESSLWLEDKNSKEKFTLFNDDNYKDYDFYKQYPTIFHLRDELIKNPEKKDIRLIYLALHSIFKSRGHFLFEGQNLKEIKNFETLYNNLISFLEDNGINKSIDKDNIKKLEKIICDSGKGLKDKEKEFKEIFNSDKQLVAIFKLSVGSSVSLNDLFDTDEYKKEEVEKEKISFREQIYEDDKPIYYSILGEKIELLDIAKSFYDFMVLNNILSDSNYISEAKVKLYEEHKKDLKNLKYIIRKYNKENYDKLFKDKNENNYPAYIGLNKEKGKKEVVEKSGLKIDDLIKVIKGYLPKPERIEEKDKIIFNEILNKIELKTILPKQRISDNGTLPYQIHEVELEKILENQSKYYDFLNYEENGVSTKDKLLKTFKFRIPYYVGPLNSYHKDKGGNSWIVRKEEGKILPWNFEQKVDIEKSAEEFIKRMTNKCTYLNGEDVIPKDSFLYSEYIILNELNKVQVNDEFLNEENKRKIIDELFKENKKVSEKKFKEYLLVNQIANRTVELKGIKDSFNSNYVSYIKFKDIFGEKLNLDIYKEISEKSILWKCLYGDDKKIFEKKIKNEYGDILNKDEIKKINSFKFNTWGRLSEKLLTGIEFINLETGECYSSVMEALRRTNYNLMELLSSKFTLQESIDNGNKEMNEVSYRDLIEESYVSPSLKRAILQTLKIYEEIKKITGRVPKKVFIEMARGGDETMKNKKIPARQEQLKKLYDSCGNDIANFSIDIKKMKSSLSSYDNNSLRQKKLYLYYLQFGKCMYTGREIDLDRLLQNNDTYDIDHIYPRSKVIKDDSFDNLVLVLKNENAEKSNEYPVKKEIQEKMKSFWRFLKEKNFISDEKYKRLTGKDDFELRGFMARQLVNVRQTTKEVGKILQQIEPEIKIVYSKAEIASSFREMFDFIKVRELNDTHHAKDAYLNIVAGNVYNTKFTEKPYRYLQEIKENYDVKKIYNYDIKNAWDKENSLEIVKKNMKKNTVNITRFIKEEKGQLFDLNPIKKGETSNEIISIKPKLYNGKEEKLNEKYGYYKSLNPAYFLYVEHKEKNKRIKSFERVNLVDVNNIKDEKSLVKYLIENKKLVEPRLIKKVYKRQVILINDYPYSIVALDSNKLMDFENLKPLFLENKYEKILKNVIKFLEDNQGKSEENYKFIYLKKKDRYEKNETLESVKDRYNLEFNEMYDKFLEKLDSKDYKNYINNKKYKNLLDVKEKFIKLNLFDKAFTLKSFLDLFNRKTMADFSKVGLTKYLGKIQKISSNVLSKNELYLLEESVTGLFVKKIKL

SEQ ID NO: 236 - protein, 1367 aa, unidentified
  REGION 1..1367: note = Fusobacterium sp. 3_1_36A2
  source 1..1367: note = Fusobacterium sp.
MKKQKFSDYYLGFDIGTNSVGWCVTDLDYNVLRFNKKDMWGSRLFDEAKTAAERRVQRNSRRRLKRRKWRLNLLEEIFSDEIMKIDSNFFRRLKESSLWLEDKNSKEKFTLFNDDNYKDYDFYKQYPTIFHLRDELIKNPEKKDIRLIYLALHSIFKSRGHFLFEGQNLKEIKNFETLYNNLISFLEDNGINKSIDKDNIKKLEKIICDSGKGLKDKEKEFKEIFNSDKQLVAIFKLSVGSSVSLNDLFDTDEYKKEEVEKEKISFREQIYEDDKPIYYSILGEKIELLDIAKSFYDFMVLNNILSDSNYISEAKVKLYEEHKKDLKNLKYIIRKYNKENYDKLFKDKNENNYPAYIGLNKEKGKKEVVEKSGLKIDDLIKVIKGYLPKPERIEEKDKTIFNEILNKIELKTILPKQRISDNGTLPYQIHEVELEKILENQSKYYDFLNYEENGVSTKDKLLKTFKFRIPYYVGPLNSYHKDKGGNSWIVRKEEGKILPWNFEQKVDIEKSAEEFIKRMTNKCTYLNGEDVIPKDSFLYSEYIILNELNKVQVNDEFLNEENKRKIIDELFKENKKVSEKKFKEYLLVNQIANRTVELKGIKDSFNSNYVSYIKFKDIFGEKLNLDIYKEISEKSILWKCLYGDDKKIFEKKIKNEYGDILNKDEIKKINSFKFNTWGRLSEKLLTGIEFINLETGECYSSVMEALRRTNYNLMELLSSKFTLQESIDNGNKEMNEVSYRDLIEESYVSPSLKRAILQTLKIYEEIKKITGRVPKKVFIEMARGGDETMKNKKIPARQEQLKKLYDSCGNDIANFSIDIKKMKSSLSSYDNNSLRQKKLYLYYLQFGKCMYTGREIDLDRLLQNNDTYDIDHIYPRSKVIKDDSFDNLVLVLKNENAEKSNEYPVKKEIQEKMKSFWRFLKEKNFISDEKYKRLTGKDDFELRGFMARQLVNVRQTTKEVGKILQQIEPEIKIVYSKAEIASSFREMFDFIKVRELNDTHHAKDAYLNIVAGNVYNTKFTEKPYRYLQEIKENYDVKKIYNYDIKNAWDKENSLEIVKKNMKKNTVNITRFIKEEKGQLFDLNPIKKGETSNEIISIKPKLYNGKEEKLNEKYGYYKSLNPAYFLYVEHKEKNKRIKSFERVNLVDVNNIKDEKSLVKYLIENKKLVEPRLIKKVYKRQVILINDYPYSIVALDSNKLMDFENLKPLFLENKYEKILKNVIKFLEDNQGKSEENYKFIYLKKKDRYEKNETLESVKDRYNLEFNEMYDKFLEKLDSKDYKNYINNKKYKNLLDVKEKFIKLNLFDKAFTLKSFLDLFNRKTMADFSKVGLTKYLGKIQKISSNVLSKNELYLLEESVTGLFVKKIKL

SEQ ID NO: 237 - protein, 1391 aa, unidentified
  REGION 1..1391: note = Galbibacter sp. ck-I2-15
  source 1..1391: note = Galbibacter sp.
MKTILGLDLGTNSIGWALVKEAENENEVSDIIKLGVRVNPLTVDELTNFEGGKAYSNNAERTLKRGARRNLQRYKLRRENLIEILLKNGLINKDTALTEVGKETTHQTLKLRSKSANEKVSLEDLAKILLSINKKRGYKSSRKVNAEDDGVAIDGMEVAKLLYDENMTPGEYVLRLLESGKKHLPDFYRSDLQEEFNLVWKKQSEFYPLILTKELFFELHGKNKSQTWAICKEPLGIVGVKLKGSAKEQKFARYRLRKEALTQQIELEHLAIVLQDINNDSNKSSGYLGAISDRSKELFFNKETVGQYQYKQLQKDPNTSLKNQVFYRQDYLDEFEVIWRNQAKFYPQLTNELKQEIRDVVIFYQRKLKSQKNLISFCQFESTQQNYVEKETGKTKIRTIGRRVIPRSSPLFQEFKIWQSLNNLKFVNSESNQIIQFIELEDDVKKVVFDELNLRGDLKPNQVLKILSKYMKIGKLTQWKCNLEEIEGNRTNSALYNVFQMIAEEEGYGFNWGKKSALEIKSELKAIFSSIGINDSILDFDFSKKLDQQLSYQLWHLLYSAEEGNSKITEEDKFTYGNTGVALKKKLHLKFGFKPEYSTLISNLRFTSDYGNLSSKAISKILPFLRDGSDYSKACQYAGYNHSNSLSADELDNRELKPKLELLKKNSLRNPVVEKILNQMVNVVNQVIDNYGKPDEVRIELARELKKSAKERSQMTKNISDATRRNAEIKKYLSKEFGIPNPTKGDVIRYRLWEELASNGYKDLFRDKYIPKEKLFSNEIDIEHIIPKALLFDDSFSNKTLAFKVDNLKKADRTAFDFMSTDFSKDVDSYIGRIETLHKDGKISSSKYKKLMIPKSKLVDGFIERDLRNTQYIAKQARKMLLEVFKTVVPTTGKITDKLREDWDLINVMKELNFPKYKALGLTKKIERFDVGSEKIKSINVIEGWSKRNDHRHHAMDALAVAFTTHNHIQYLNYLNARKDIHHEMHGTIKSIENQIIGKDVMGKRRFIPPISDLRMKAKLQIESILISFKNKNKVVTWSVNKTKLKGKDNYNKRRQLTPRGQLHKETVYGKIKLIDPKPLKLNNKFTLVRASMIVDKVHREIVLQHLSKYDNNSEVAFDSKTIKIDPILIEGIGLKEVVCYEDVFKIRKKISGDNFKNEKHLEKVIDEKVKQILKDRVIKFQGNFKEAFSNLEENPIWLNKSKGIAVKSVAIKGVNNAESLHEGKDHFGDQILDKNKKQIPVDFVSTGNNHHVGIYEDKDGNLQERVVSFFEAVTRVNEGLPIIDKTYNSDIGWKFKFTMKQNEMFVFPSDDFDPNEFDLTDGKNAAKISPNLYRVQKIATKNYMFRHHLETVVTNDLEFTYKSIRSTGWLRNLVKVRINHLGEIVYVGEY

SEQ ID NO: 238 - protein, 1025 aa, unidentified
  REGION 1..1025: note = Description of Unknown: gamma proteobacterium HdN1 polypeptide
MGGYMPQLMRYRLALDIGSTSIGWAMIRLSMQNEPIAIIRMGVRIFSDGRNPKDGSSLAVTRRVARQMRRRRDRLLKRKTRLLNALVQKKFFPEDADARKALVVLNPYELRKEGLYRQLSGPEFGRALFHISQRRGFLSNRKTDKKDNDSSVLKKAIVDLRQQLEVENCQTIGEWLFKQQQSGKSVRARLRGKTQKDKAYDFYIDRAMIAHEFDTLWVSQAKYDPLLFNEDARAILRDILLYQRPLKPVKPGRCTLIPDESRAPLALPLTQQARIYQELNHLRITTPALGAQALTVAQRNTIAALLEKSDVTFVKIAKALGLTSTTEFNLQDIKRDRLKGNATAIILARNQYFGRRWHDFNADLQNLIVDKLVNEGSETALIEWLKANTDVDESAAERVSGVTLPEGYGSLSVAALRRLLPALKEDVVVYSEAVKRAGFDSHSALSLIEQTGELYQELPYYGEVLQRHVGFGSGDPNDSPERRFGKIANPTVHIGLNELRKIINALIKRYGNPAEVVVELARDLKLSREKRKEIQEEQKQRQDRNEKRIKDACEILGIDPLVIDRGKRREISQKMQLWDELNPKDAANRRCPYTGDQISIEKLLSAEVEIEHILPFSKTLDDSLNNKTVAMRRANRDKGNRTPYEAFGESLNPDYDYDAILQRASLMPREKRKRFASDGYQQWLRDDKDFLSRALNDTAYLSRIAKEYLTLICPPNSVRAIPGRMTAQLRAMFGLNRLLSEGGIKNREDHRHHAIDAAVIGVTDQGLLQKFSRASARTRELQLSRLVDDMPLPWDTYREHVTRALEHLVVSHKPDHGYQGKMHEDTAWGLRDNGQVTRRVRSEDGGPRQRLLENKNVVKINSTRDFSRHGIDEQGQVNAYKGYVGGSNYCIEIWIDEKGKWNSDVVSTFQAYQIVRELGEKAAWQKLRNPLLSLSAKPLVMRLIIDDVVKMQIAGQNKIMRVVKIAQNGQIFFAEHNEANVDARDKDKNNPFKYISKTAGSLQKAGGIHMAISPIGDARPVRYGR

SEQ ID NO: 239 - protein, 1397 aa, unidentified
  REGION 1..1397: note = Description of Unknown: gamma proteobacterium HTCC5015 polypeptide
MTKNYISPIAIDLGAKFTGVALYQYLEGADCTQEVAKGLLVDDRGNVTWSQEGRRGKRHQVRGYKRRKMAKRLLWLILDSEYGIKREEVTEPLLKFINGLLNRRGYTYISEEVDEESMNVSPLPFSEMMPDYFNSSAPLLEQLAKLLSDKNKLVRFRAEGKIPSNKNEFKKLLDTALDGKYKDEKKELSEAWGNILIASENVLKSTVDGHKSRSEYLANIKEDIKSNEELEKQISSKEIDGFYNLVGHLSNFQLRLLRKYFNDPNMSGVSYWDEKRLEKYFYQWVQGWHTKGGTDEAEKKNIILKTKGAPLLKTLKSLSADLTIPPYEDQNNRRPPKCQSVLLSDEKLTMHYPKWKEWVGQLVKQNDNAYLNENVTLANALHRIVERSRSIDPYQLRLLISITDAEKRNDLAGYKRLKLSLGSEVDEFLLLVKNIVDETKEAREGLWFETENKLFFKCGKTPPRKEKLKSTLLSAVLGKNLSDDEQSSFIEEFWKSGTPKIERRNVRGWCRLASQVQKTYGVYLKEYGLQQLHKLEAGKKLDDKPLALLYKNSGLIASKIGEALNIEPDEVSRFASPHSLAQIFNIIEGDVAGFNKTCRACTYENIWRMQEEKVESLLTNQLLSEIHGERKVPLKSAMCTRLSADSTRPFDGQMASIIEHIARKIAQHKIAQINDVPKEFSIDIPIIIESNQFSFTAELEEIKRGRGSAKAKKAKELGEKSKAGWVSKTERIKTSSEGICPYTGAPLGGSGEIDHIIPRSLTGRTKKTVFNSEANLIYCSSKGNHDKGNRVYVIEQLNDKYLKKQFSTSDVNLIKKKIKTTIQRFTEGGEKLRSFSELSREDQKAFRHALFVPELKSEVTSLLAVKNITRVNGTQAWLAKKIASLLAEHLDKQGRDYTLSAHQIDPWSVSKQRKMLASAEPIWAKKDPQPAASHVVDAVCTFLEALEQPHTASRLKTISSTSFEKTGWRSALIPDLIKVDALDRRPKYRRYNIGSTSLFKDGIYAERFLPILIDENGLMAGYDIDNSLKAKGADVVFESLSPFLLFKGEEVGAQSLSDWQERIDGRYLYMSIDKVKAFDYLQEKVGEKDIAAELLNSIHFTQRKTELRAKFSDDSGKKMKTLDAIRKSLKLTVTVNEIGKRKEKCGFSGTIGIPAKSAWENLLDEPLLETYWGTKMPPQEIWEKVYRKHFPRNIPNQAHRKVRKDFSLPVVDSVSGGFRVKRKTPNGYNYQLLAIDGYSAVGFKKEGDNVDFKSPALVPQIAESKSVTPISSELVHLDKNEIVYFDEWRKIDISDSDLKQFVSSLELAPGSQNRFYIRFTVDEDQFERHFKSALRVNGIQDLDTVNKTFDWNREIPSLLIPPRSNLFLLETGQKITFEYIANGANAEVKKAYSLRRA

SEQ ID NO: 240 - protein, 1186 aa, Gardnerella vaginalis
  REGION 1..1186: note = Gardnerella vaginalis 1500E
MEGNISYAIGIDVGLNSVGLAAIRLDNNGEPIRILKAMSVIHDAGIDPNGAKESDTRKAISGVARRVRRLYRQRRRRLQKLDFLLHSLGFPVVENKDLDFSDSFIPWIFRAKLADEYIADEKQRKQMLSVAIRHIARHRGWRNPYQSIKSMTQETEYSEFYNELLKNIEKFAPGVGCEGSTPAQLVRDYLLLQQGKASRRLRITTDEKRKNHPNSLNPILPRKLMQSDNMLEILNIFNVQHIDDKYVREQIINAVFYAKSPRGSAENRVGKDAITGKGKRALKASLAFQKYRIISTISNLRIRENSKERCLTIEEKQSVYKLLTTSTDESSKEKSAEAPLYTWIDVADCLGIERYKLRGVGSQIGDGESVGNRPPMLNSELAIIYANNKSLGKSLLTWWLDANRTQEDKEALIEILSNTVDIEAIHDNPEYQDKYGSAIAFIDSMDETEIAALENISLPDGRAAYSLETLDKLNKQMLETDDDLFEARKKLFNLPNNWRPSEAPIAEPTGNPSVDRVLKIVHRFLISAKNRWGNPERINIEHVRSGFKSKKMANSYKELLDKRTKGKENLKAMMRNSLHLGMSDSISDADIRRYEAVQRQNGQCLYCGSEITYHTCELDHIVPRKGPGSTNTRENLVATCSLCNAQKCNTPFSTWCEQSTYCKNHDISVDSAINRVRAFIFPPNSYDKRGANQFKKEVIARLKQKVGDEAFDNRSIESVAWMANELHRRIDWYYNSQNYQTNNGISDITNKAQTNVGVYAGSLTAIARRMSGIDGKLEFFDGRRKTRFDRRHHAVDASVIAMMTPGIAQILAIKCNLRETQLLQGNKVVPGGIDWKEYPTANDQGYQQYANWSVRMNALLKLLNEEMRADRIAVVNSIRLRYNNSSVHQYKVNALLKLHVGDEIDSGTIRRSSTPALYCALTRNPDYDVNNGLPENPNRAILLHDKKLNADDSITFFKAQAVQLFVREGSAEIGSSTHHLRIYEYFKKLKSGKIKKSYGMIRVFQNDLHRHIHEDLFSCDLPEQSISMRYADTEVAHAVQTGNSNYLGYLVPGDEIIVDFSHVKLSGNIGTFVEFLNKIGANCAAYNHWVVVGTDTEKVLILKPSMISSEGIDKLYSNCKRNNFDYSSYEKSINEILVGKGWRVSVNVLAKYNAETIRRNALGEVRWTSRSHLPISWSWNTGENRE

SEQ ID NO: 241 - protein, 1186 aa, Gardnerella vaginalis
  REGION 1..1186: note = Gardnerella vaginalis 284V
MEGNISYAIGIDVGLNSVGLAAIRLDDYGEPIRILKAMSVIHDAGIDPNGAKESDTRKAISGVARRVRRLYRQRRRRLQKLDFLLQSLGWPVVENKDLDFSDSFIPWIFRAKLADEYIADEEQRKQMLSVAIRHIARHRGWRNPYQSIKSMMQETEYSEFYNELLKNIEKLAPGVGCEGSTPAQLVRDYLLSQQGKASRRLRITTGGRRKNHPHSLDPVLPRKLMQSDNMLEILNIFNVQHIDDKYVREQIINAVFYAESPRGSAENRVGKDAITGKGKRALKASLAFQKYRIISTISNLRIRENSKERCLTIEEKQNVYKLLTTSIDKSSKRKSAEAPLYTWIDVADCLGIERYKLRGVGSQIGDGESVGNRPPMLNSELAILYANNKSLGQSLITWWLASNRTQEDKEALIEILSNTVDIEAIHDNPEYQDKYGSAIAFIDSMNETEIAALENISLPDGRAAYSLETLDELNKQMLETDDDLFEARKKLFNLPNNWRPAEAPIAEPTGNPSVDRVLKIVHRFLISAKNRWGNPERINIEHVRSGFQSKKMANSYKELLDKRTEGKENLKAMMRNSLHLGTSDSISDADIRRYEAVQRQNGQCLYCGSEITYHTCELDHIVPRKGPGSTNTRENLVATCSSCNAQKCNTPFATWCEQSTYCKNHDISADSAINRVRAFIFPPNSYDKRGANQFKKEVIARLKQKVGDEAFDNRSIESVAWMANELHRRIDWYYNSQNYQTNNGISDISNKAQTNVGVYAGSLTAIARRMSGIDGKLEFFDGRRKTRFDRRHHAVDASVIAMMTPGIAQILAIKCNLRETQLLQGNKVVPGGIDWKEYPTANDQGYQQYANWSVRMNALLKLLNEEMRADRIAVVNSIRLRYSNSSVHQYEVNALLKLHVGDEIDSETIRRSSTPALYCALTRNPDYDVNNGFPENPGRTILLHNKKLNADDSITFFKAQAVQLFVREGSAKIGNSIHHLRIYEYFEKLKSGKIKKSYGMIRVFQNDLHRHIHEDLFSCDLPEQSISMRYADTKVAHAVQTGNANYLGYLVPGDEIIVDFSHITLSENIGKFVEFLNKIGADCTAYRHWVVVGTDTEKVLILKPSMISSEGIDKLYSNCERNNFDYSSYEKSINEILAGKGWRVSVNVLAQYKAATIRRNALGEVRWASRSHLPISWSWDTGENRE

SEQ ID NO: 242 - protein, 1186 aa, Gardnerella vaginalis
  REGION 1..1186: note = Gardnerella vaginalis 5-1
MEGNISYAIGIDVGLNSVGLAAIRLDNNGEPIRILKAMSVIHDAGIDPNGAKESDTRKAISGVARRVRRLYRQRRRRLQKLDFLLHSLGFPVVENKDLDFSDSFTPWIFRAKLADEYIADEKQRKQMLSVAIRHIARHRGWRNPYQSIKSMTQETEYSEFYNELLKNIEKFAPGVSCEGSTPAQLVRDYLLSQQGKASRRLRITTDDRRKNHPNSLDPVLPRKLMQSDNMLEILNIFNVQHIDNKYVREQIINAVFYAKSPRGSAENRVGKDAITGKGKRALKASLAFQKYRIISTISNLRIRENSKERCLTIEEKQSVYKLLTTSTDEYSKEKSAEAPLYTWIDVADCLGIERYKLRGVGSQIEDGESVGNRPPMLNSELAILYANAKSLKQSLITWWLAANRTQEDKEAFIEILSNTVDIEAIHDNPEYQDKYGSVIAFIDSMDETEIAALENISLPNGRAAYSLETLDKLNKQMLETDDDLFEARKKLFNLPNNWRPSEAPIAEPTGNPSVDRVLKIVHRFLISAKNRWGNPERINIEHVRSGFQSKKMANSYKKLLDKRTEGKENLKAMMRNSLHLGTSDSISDADIRRYEAVQRQNGQCLYCGSEITYHTCELDHIVPRKGPGSTNTRENLVATCSSCNAQKCNTPFATWCEESTYCKNHDISVDSAINRVRAFIFPPNSYDKRGASQFKKEVIARLKQKVGDEAFDNRSIESVAWMANELHRRIDWYYNSQNYQTNNGISDITNKAQTNVGVYAGSLTAIARRMSGIDGKLEFFDGRRKTRFDRRHHAVDASVIAMMTPGIAQILAIKCNLRETQLLQGNKVVPGGIDWKEYPTANDQGYQQYANWSVRMNALLELLNEEMRADRIAVVNSIRLRYSNSSVHKDDVHALLKLHVGDEIDSETIRRASTPALYCALTRNPDYDVNNGLPENTDRTILLHDKKLNADDSITFFKSKAAQLFVREGSVEIGNSIHHLRIYEYFEKLKSGKVKKSYGMIRVFQDDLHRYIHEDLFSCDLPEQSISMRYADTKVAHAVQTGNANYLGYLVPGDEIIVDFSHVKLSGYIGEFVEFLNKIGANCAAYKHWVVAGTDDKTTLILKPSMISSEGIDKLYSNCERNNFDYASYEKSIDKILVDKGWRVSVNVLDQYKAATIRRNALGEPRWASRSHLPISWSWDTGENRE

SEQ ID NO: 243 - protein, 1392 aa, Gemella haemolysans
  REGION 1..1392: note = Gemella haemolysans ATCC 10379
MANKTWYLGLDIGSASVGWAATDTGYKIIRKNKKRLWGVRLFEEAKTAEDRRGYRSSRRRLARRKWRLNLLEELFTSEVKKVDENFFLRLKESQYHYEDKTHKVPYAIFNDKDYTDKDYYKDYPTIYHLRSKLMTEENPDIRKVFLAIHHIIKNRGHFLLQGQSFKDGNLNNLIKELLELDILHVGFEVTEEVVDKIADISLEKKTSKDKLNDIKELYPKEKQLLEVFRLIFGGKTSLDKLFAIDEYKELDAAIKSVSFKEKIYEEVRHDYEQVLSNYIELLDLAKLVYDSIILSDIKKEGKTLSESKVELFEKHRDDLLKLKNLVKNDSKLSEDKKVELYALIFKEDKDKGTNYVNYIRKSEEGKGCNYEDFKKFLVKELAKLEESSVKTEIIKDLELEQFLPLQRTKDNSVVPYQIHKEELVKILDNAARYHSFLNEKDESGYNVREKVIQLLEFRIPYYVGPLNSSKKAKEGGFAWSVRNTGYENTPVTPWNYSKVIDESASAEKFITNLTNKCTYLKGEDVLPKSSLLYSEFALLNELNALKYDGNRISLEARNTIIEKLFKQQGKKVTKTSIKNLLKAEGYIDGKGEITGIDITVKNDLKSYRDFKKILGNKFNSEHVENIILWITLYGESRKLIKAKIESVYGEVYSKDEITKMSRLVYKDWGRFSRKLLTELVSKKLYNEETGECLNIIGAMRQNNILFMELLADRFDYSKQIVEFNKELQEDVTEIAPEILDDLYVSPAVKRSIWQTVRIVEELKKIIGCAPAKIFVETTRSNQEKKKPTDSRKKQLELAYKAVKKDVKELEKEIGTINFDVLNDRLSSVEPSKLKAKKLYLYYTQLGRCMYSEEPINISELFDNNKYDIDHIYPQSKIKDDSFTNTVLVKRESNAAKTDRYPLGSDIQTPSNRRFWKFLKEKGLISDEKYNRLVRTEEFSDEELSGFIARQLVETSQSVKAVASILGELNPETSICYSKAENVSSFRQNFGKIKKGDRDSKNNDQLIKVREINDYHHAKDAYLNVVVGNVYDTKFTRNVFNFIKDKKDGRKYSLNKVFYENVSDSKTVAWEMDKTIHQVEKVMNNNNIMVTRRTSEQKGGLFDATVYKAKVAAKAKDGVYYPLKTSNSVVKDVAKYGGYTSIGIAYYSIFEYTIVNKKGEEKITRIIPIPIYISQNIKDSTALIEFGKSQIFCRAYEKIKDFKLLYRKLCIGSKININNYQYYIGGKSDERFYYDSAIQVTLDKKSEKYLKILSKYQNWKKENKDGELWENITKENNIELYNKLVEKMNSEIFTKKKSNKYNELNSEEIRNNFIKISVEEQAKVLLEILNLLTNKKSIFDLKSIDIKAARGKISFNLTSLIQFSIIEQSITGFYEKEITIIGDKGNDMENNNS

SEQ ID NO: 244 - protein, 1385 aa, Gemella morbillorum
  REGION 1..1385: note = Gemella morbillorum M424
MKNKTWYLGLGVGPTSIGWAATDSNYKLLRKNKKRLWGVRLFEEAKTAVDRRTFRAERRRLARRKWRISLLEELFAKEVSKNDPNFFLRLKESKYHFEDKSLMNEYILFNDKDYTDKDYYKEYPTIYHLRLSLTTEENPDIRKVYLAVHSMLKNRGHFLLQGQSFNDSNIDSVIKELLELETVKINFEVTDEVIHSLKKIALEKKNLSDKNNDVKKLYPKEKQLQEIFKLVFGGKTSLDKLYDIEEYKELDNSVKSISFKEKVYEEVRPDYEQILSNYIELLDLAKLVYDSIVLADIKKEGKTISESKVELYNKHKDDLANLKKLVKIDSKLSEDKKKEVYFTIFKEDKEKGTNYVNYTHRSQEGKSCSYEDFKKFLKKELEKLEDSPTKTTILEELDLETFLPLQRTKDNSVVPYQIHKEELVKILDNAAKYHSFLAEKDDSGYSTREKVVQLFEFRIPYYIGPLNAHHNTENGGYSWAIRKKGMESVPVTPWNFKDVIDESASAEAFVNNLKNKCAYLSGEDVLPKNSLLYSEYALLNELNALRYEGNRISVEARDVIVTKLFKEQGKKVTKKTIKELLKTEGFIDGKGEIVGIDNIVKNDLKSYRDFKKILADKFDKERVENIILWITLYGESRKLIKEKITKVYGDFYTVDEIEKMSRLTYKDWGILSRKLLTELVSEKLYNEETGECLNIIGAMRQGTILFMELLADKFDYMSQIKNHNKENKDDITEITPDILENLHASPAVKRSIWQTVRIVEELKTIIGCVPTKIFIETTKRNNAPYKVPTLNRNDLVTKYKTIREHEIFELEKELKNTLDFTLNKNRLINEEPSKLKATKLYLYYTQLGRCMYTGKKIDLGELFDNNNKYDIDHIYPQSKVKDGSFNNIVLVTKASNDMKADVFPLKSKFQTKENKIFWRFLKEKKLITEEKYNRLVRTEEFSNGELTGFITRQLVETSQAIKVISNVLRELNPETTICYSKAENVSSFRQSFGKIKEANRKAENNEKLIRVQEINDYYNAKDAYLSIVVGNVYDVKFTRNVHNFIKNNKDARRYSLNGLFYTDVKNANTIAWEMDKTVHVVEKTMNNNNILITRRTSEQKGALYDATLYKAKVAEKAKEGTYYPLKTTDSKIKDVGKYGGFTKIKIAYYSIFEYTLDGKKGKQKITRIVPIPIYISQNIKDDKALLEYAQTRLPGKDLKIKYRKLCIGSLVKINNFNYYIGGKTNNNFTFDSAVQVILDKDSESYIKELAKYLNWKKENKDGKLWESITEDKNIQLYDSLVKKMNTGIFIRKTPNKYTELLTLEVKNKFINIDIDEQVKLLLEILNLLTNKKFTSKLNEIGITASRGVCSFNLSNQSQFSIIEQSVTGVYEKEKLIIEKKKEGIL

SEQ ID NO: 245 - protein, 1003 aa, Gluconacetobacter diazotrophicus
MIDESLTFGIDLGIGSCGWAVLRRPSAFGRKGVIEGMGSWCFDVPETSKERTPTNQIRRSNRLLRRVIRRRRNRMAAIRRLLHAAGLLPSTDSDALKRPGHDPWELRARGLDKPLKPVEFAVVLGHIAKRRGFKSAAKRKATNISSDDKKMLTALEATRERLGRYRTVGEMFARDPDFASRRRNREGKYDRTTARDDLEHEVHALFAAQRRLGQGFASPELEEAFTASAFHQRPMQDSERLVGFCPFERTEKRAAKLTPSFERFRLLARLLNLRITTPDGERPLTVDEIALVTRDLGKTAKLSIKRVRTLIGLEDNQRFTTIRPEDEDRDIVARTGGAMTGTATLRKALGEALWTDMQERPEQLDAIVQVLSFFEANETITEKLREIGLTLAVLDVLLTALDAGVFAKFKGAAHISTKAARNLLPHLEQGRRYDEACTMAGYDHAASRLSHHGQIVAKTQFNALVTEIGESIANPIARKALIEGLKQIWAMRNHWGLPGSIHVELARDVGNSIEKRREIEKHIEKNTALRARERREVHDLLDLEDVNGDTLLRYRLWKEQGGKCLYTGKAIHIRQIAATDNSVQVDHILPWSRFGDDSFNNKTLCLASANQQKKRSTPYEWLSGQTGDAWNAFVQRIETNKELRGFKKRNYLLKNAKEAEEKFRSRNLNDTRYAARLFAEAVKLLYAFGERQEKGGNRRVFTRPGALTAALRQAWGVESLKKQDGKRINDDRHHALDALTVAAVDEAEIQRLTKSFHEWEQQGLGRPLRRVEPPWESFRADVEATYPEVFVARPERRRARGEGHAATIRQVKERECTPIVFERKAVSSLKEADLERIKDGERNEAIVEAIRSWIATGRPADAPPRSPRGDIITKIRLATTIKAAVPVRGGTAGRGEMVRADVFSKPNRRGKDEWYLVPVYPHQIMNRKAWPKPPMRSIVANKDEDEWTEVGPEHQFRFSLYPRSNIEIIRPSGEVIEGYFVGLHRNTGALIPTPVGPDSYVIA

SEQ ID NO: 246 - protein, 1050 aa, Gluconacetobacter diazotrophicus
MGENMIDESLTFGIDLGIGSCGWAVLRRPSAFGRKGVIEGMGSWCFDVPETSKERTPTNQIRRSNRLLRRVIRRRRNRMAAIRRLLHAAGLLPSTDSDALKRPGHDPWELRARGLDKPLKPVEFAVVLGHIAKRRGFKSAAKRKATNISSDDKKMLTALEATRERLGRYRTVGEMFARDPDFASRRRNREGKYDRTTARDDLEHEVHALFAAQRRLGQGFASPELEEAFTASAFHQRPMQDSERLVGFCPFERTEKRAAKLTPSFERFRLLARLLNLRITTPDGERPLTVDEIALVTRDLGKTAKLSIKRVRTLIGLEDNQRFTTIRPEDEDRDIVARTGGAMTGTATLRKALGEALWTDMQERPEQLDAIVQVLSFFEANETITEKLREIGLTLAVLDVLLTALDAGVFAKFKGAAHISTKAARNLLPHLEQGRRYDEACTMAGYDHAASRLSHHGQIVAKTQFNALVTEIGESIANPIARKALIEGLKQIWAMRNHWGLPGSIHVELARDVGNSIEKRREIEKHIEKNTALRARERREVHDLLDLEDVNGDTLLRYRLWKEQGGKCLYTGKAIHIRQIAATDNSVQVDHILPWSRFGDDSFNNKTLCLASANQQKKRSTPYEWLSGQTGDAWNAFVQRIETNKELRGFKKRNYLLKNAKEAEEKFRSRNLNDTRYAARLFAEAVKLLYAFGERQEKGGNRRVFTRPGALTAALRQAWGVESLKKQDGKRINDDRHHALDALTVAAVDEAEIQRLTKSFHEWEQQGLGRPLRRVEPPWESFRADVEATYPEVFVARPERRRARGEGHAATIRQVKERECTPIVFERKAVSSLKEADLERIKDGERNEAIVEAIRSWIATGRPADAPPRSPRGDIITKIRLATTIKAAVPVRGGTAGRGEMVRADVFSKPNRRGKDEWYLVPVYPHQIMNRKAWPKPPMRSIVANKDEDEWTEVGPEHQFRFSLYPRSNIEIIRPSGEVIEGYFVGLHRNTGALTISAHNDPKSIHSGIGTKTLLAISKYQVDRFGRKSPVRKEVRTWHGEACISPTPPG

SEQ ID NO: 247 - protein, 1371 aa, Gordonibacter pamelaeae
  REGION 1..1371: note = Gordonibacter pamelaeae 7-10-1-b
MNLRNVESYQVGLDIGTGSVGWAVLDDNGDLCRFKGKPTWGSRVFPTAETAAEARVHRGQRRRYDRRRQRIDLLQRFFADEVAKVDPEFFIRLNQARLHPENRDPAHADYRWPLFNGSNFTEKDYYRQFPTIYHLRAHLLKSDEPADIRLVYLALHNIVKHRGNFLHQDNPSLSARNANVGDAVEALCLALDEWCGAHDVECACDEAALAEALGDASLRPGEKRERAEAALGVEKAHKKLAKAVSSAVVGYAAEFGHVFFAESEGSKFALSNDEKVEAYVCPDEGRDLFDAMRAVHSSYVLMGILSEAQGELLSVCKVGEYERYKRDLETLKSLVRAYGPERYDEFFCGPFYEGTRDYDPGKAQGYTKYNLGASKLSHEDFLKEVQKLLKDIGAQADERYADIERAIEAGAFLRRLKTSDNGTIPYQLHLEEMDAIIERQAAFYPFLAQEKDKLKSLVSFRIPYYVGPLTQKNAARDGKGEARFAWSSRKPGMEDARVYPWNWEDVIDKDQSAEDFIRRMTGTCTYLKGEPVLARCSLDYELFCVLNELAGARWTQDGDKSYRFDAADRLGIVEDLFKKRKRVTYEAAEKWLARTHGPESGKSAGGAYHVSGGQGEDAFESQLSSHYDFCKILGVDELSDADEAMAEDIILWNTVFEDRSILKRKIKLAYGDRLGDAQVRKLCQKRYTGWGRLSGELLRGLRSATDNGPKTIMDILLEGDPNHARRMGAAMNLMEILHDDLLEFQAKIDEHNRERALAVGGMSVDEVTGSPALRRGINQALRVVDEIAGIAGKPPAHIYVEVTRDEGARNKGRRTTSRYRALEAALSSIKAQCADVYAELKERDPRALDDERLTLYFMQCGKCMYSGDALDINKLQTYQVDHILPQSYVKDDSFENKVLVRPDTNQRKGDTLLLDERLIARMRGFWRTLRDAELIGEKKFNNLTRTSVSDEQMKKFVSRQLVETGQMVKQVQQLLQARYPESEVQPVKAGVSHQLRVGCALAKSREINDFHHAHDAYLACQVGRFVQYRHSAVYSEPVKMAAVVKQFIKKQAEDYRRTRELPGSDGFIVSSFMTPGFDVKTGEVFRDAWDAGAEIDRIRRCFDYKDCFISRMPEETHGAFWDATIYSPRAAGKTLSLPLKRGLDPRKYGSYSREQFAYFFVYEAVKPKKKQRVLEFAPVPVRVASALANDPDALEDYARELAEAEGLVFERIRRRKVYKYQQIIVGDSRLYVTGREEVRNARQLAFSQDETKLICRIEQGEECEEGELLDLFRSMQRKYLACAPRLARLMKVAEMEEGFIAATASGKREVLLSLTSIAAAHRNSIDLKPIGRKGSSGQMKITFSKELSTNGILFVDSSVTGMFERRCRLGL

SEQ ID NO: 248 - protein, 1054 aa, Haemophilus parainfluenzae
  REGION 1..1054: note = Haemophilus parainfluenzae ATCC 33392
MENKNLNYILGLDLGIASVGWAVVEIDEKENPLRLIDVGVRTFERAEVPKTGESLALSRRLARSARRLTQRRVARLKKAKRLLKSENILLSTDERLPHQVWQLRVEGLDHKLERQEWAAVLLHLIKHRGYLSQRKNESKSENKELGALLSGVDNNHKLLQQATYRSPAELAVKKFEVEEGHIRNQQGAYTHTFSRLDLLAEMELLFSRQQHFGNPFASEKLLENLTALLMWQKPALSGEAILKMLGKCTFEDEYKAAKNTYSAERFVWITKLNNLRIQENGLERALNDNERLALMEQPYDKNRLFYSQVRSILKLSDEAIFKGLRYSGEDKKAIETKAVLMEMKAYHQIRKVLEGNNLKAEWAELKANPTLLDEIGTAFSLYKTDEDISAYLAGKLSQPVLNALLENLSFDKFIQLSLKALYKLLPLMQQGLRYDEACREIYGDHYGKKTEENHHFLPQIPADEIRNPVVLRTLTQARKVINGVVRLYGSPARIHIETGREVGKSYKDRRELEKRQEENRKQRENAIKEFKEYFPHFAGEPKAKDILKMRLYKQQNAKCLYSGKPIELHRLLEKGYVEVDHALPFSRTWDDSFNNKVLVLANENQNKGNLTPFEWLDGKHNSERWRAFKALVETSAFPYAKKQRILSQKLDEKGFIERNLNDTRYVARFLCNFIADNMHLTGEGKRKVFASNGQITALLRSRWGLAKSREDNDRHHALDAVVVACSTVAMQQKITRFVRFEAGDVFTGERIDRETGEIIPLHFPTPWQFFKQEVEIRIFSDNPKLELENRLPDRPQANHEFVQPLFVSRMPTRKMTGQGHMETVKSAKRLNEGISVIKMPLTKLKLKDLELMVNREREKDLYDTLKARLEAFNDDPAKAFAEPFIKKGGAIVKSVRVEQIQKSGVLVREGNGVADNASMVRVDVFTKGGKYFLVPIYTWQVAKGILPNKAATQYKDEEDWEVMDNSATFKFSLHPNDLVKLVTKKKTILGYFNGLNRATGNIDIKEHDLDKSKGKQGIFEGVGIKLALSFEKYQVDELGKNIRLCKPSKRQPVR

SEQ ID NO: 249 - protein, 1052 aa, Haemophilus sputorum
  REGION 1..1052: note = Haemophilus sputorum CCUG 13788
MKNTSLNYVLGLDLGISSVGWAVVEIDEKENPLSLIDVGVRTFERAETQKGESLALARRLARSARRLTQRRVARLKKAKRLLKSENILLSTDECLPHQVWQLRVEGLERKLERQEWAAVLLHLIKHRGYLSQRKNESKSENKELGALLSGVANNHKLLQQTTYRTPAELAVKKFEVEEGHIRNQQGSYTHTFSRLDLLSEMELLFSRQQHFGNPFTSEKLLENLTALLMWQKPALSGDAILKMLGKCTFENEYKAAKHTYSAERFIWITKLNNLRIQENGLERALNDNERLALMKQPYEKAKLTYAQVRSILNLSDEAIFKGLRYSGEDKKTSETKTVLMEMKAYHQIRLALEKNDLKTEWAELKVNSSLLDEIGTAFSLYKTDEDISTCLAGKLSQPVLNALLENLNFDKFIQLSLKALHKILPLMQQGLRYDEACAEIYGDHYGKKTEENHLLLPQIPADEIRNPVVLRTLTQARKVINGVVRLYSSPARIHIETGREVGKSYQDRRELEKRQEENRKQREKAISEIKTLFPNFSGEPKAKDILKMRLYYQQNAKCLYSGKPLELHRLLEQGYVEIDHALPFSRTWDDSFNNKVLVLANENQNKGNLTPFEWLDGKNNSERWKAFKALVETSAFPYTKKQRILSQKLDEKGFIERNLNDTRYVARFLCNFIADNMHLTGEGKRKVFASNGQITALLRGRWGLAKSREDNDRHHALDAVVVACSTVSMQQKITRFVRFEEGNVFTGERIDRETGEIIPLHFPAPWKFFREEVEIRIFSDNPKLELENRLIARPQANHEFVQPLFVSRMPTRKMIGQGHMETIKSAKRLNEGLSVIKMLLTKLRLKDLESMVNREREKELYEALKARLEAFNDEPAKAFAEPFMKKGGAIVKSVRVEQVQKSGVLVRDGNGVADNASMVRVDVFTKGGKYFLVPIYTWQVAKGILPNKAVIQGKNEEDWEVMDDATFRFSLHQNDLVKLVTKKKTIFGYFNGLNRATGNIDIKEHDLEKSKVKDGIHQSIGIKLALSFEKYQVDELGKNIRLCKSSKRQAVR

SEQ ID NO: 250 - protein, 1052 aa, Haemophilus parainfluenzae
MENKNLHYILGLDLGIASVGWAVVEIDEKENPLRLIDVGVRTFERAETQKGESLALSRRSARSARRLTQRRVARLKKAKRLLKSENILLSTDERLPHQVWQLRVEGLDRKLERQEWAAVLLHLIKHRGYLSQRKNESKSENKELGALLSGVASNHELLQQATYRTPAELAVKKFEVEEGHIRNQQGAYTHTFSRLDLLAEMELLFSRQQHFGNPFASEKLLENLTALLMWQKPALSGEDILKMLGKCTFEDEYKAAKNTYTAERFVWITKLNNLRIQENGLERALSDNERLMLIEQPYEKAKLTYAQVRSILNLSDDAIFKGVRYSGEDKKAIETKTTLMEMKAYHQIRKVLEGNNLKAEWVALKANPTLLDEIGTAFSLYKTDEDISAYLAGKLSQPVLNALLENLSFDKFIQLSLKALYKLLPLMQQGLRYDEACREIYGDHYGKKTEETHHFLPQIPADEIRNPVVLRTLTQARKVINGVVRLYGSPARIHIETGREVGKSYKDRHELKKRQEENRKQREKTISEIKTLFPNFSGEPKGKDILKMRLYYQQNAKCLYSGKPLELHRLFEQKYVEVDHALPLSRTWDDSFNNKVLVLANENQNKGNLTPFEWLDGKNNSERWRTFKALVETSAFPYAKKQRILSQKLDEKGFIERNLNDTRYVARFLCNFIADNMHLTGEGKRKVFASNGQITALLRRRWGLAKSREDNDRHHALDAVLVACSTVAMQQKITRFVRFKAGDVFTGERIDRETGEIIPLHFPTPWQFFKQEVEIRIFSDNPKLELENRLPDRPQANHEFVQPLFVSRMPTRKMTGQGHMETVKSAKRLNEGISMIKMPLTKLKLKDLELMVNREREKDLYDALKTRLEAFNDDPAKAFAEPFMKKGGAIVKSVRVEQVQKSGVLVRQGNGVADNASMVRVDVFTKDGKYFLVPIYTWQVAKGILPNKAVIQGKDEEDWEDIDDATFQFSLHPNDLISVKTKKDEFLGYFNGLNRHTGGINIRTHDLEKSKGKQGIFEGIGVKIALSFEKYQIDELGKNIRLCKPSKRQPVR

SEQ ID NO: 251 - protein, 1052 aa, Haemophilus sputorum
  REGION 1..1052: note = Haemophilus sputorum HK 2154
MKNTSLNYVLGLDLGISSVGWAVVEIDEKENPLSLIDVGVRTFERAETQKGESLALARRLARSARRLTQRRVARLKKAKRLLKSENILLSTDECLPHQVWQLRVEGLERKLERQEWAAVLLHLIKHRGYLSQRKNESKSENKELGALLSGVANNHKLLQQTTYRTPAELAVKKFEVEEGHIRNQQGSYTHTFSRLDLLSEMELLFSRQQHFGNPFTSEKLLENLTALLMWQKPALSGDAILKMLGKCTFENEYKAAKHTYSAERFIWITKLNNLRIQENGLERALNDNERLALMKQPYEKAKLTYAQVRSILNLSDEAIFKGLRYSGEDKKTSETKTVLMEMKAYHQIRLALEKNDLKTEWAELKVNSSLLDEIGTAFSLYKTDEDISTCLAGKLSQPVLNALLENLNFDKFIQLSLKALHKILPLMQQGLRYDEACAEIYGDHYGKKTEENHLLLPQIPADEIRNPVVLRTLTQARKVINGVVRLYSSPARIHIETGREVGKSYQDRRELEKRQEENRKQREKAISEIKTLFPNFSGEPKAKDILKMRLYYQQNAKCLYSGKPLELHRLLEQGYVEIDHALPFSRTWDDSFNNKVLVLANENQNKGNLTPFEWLDGKNNSERWKAFKALVETSAFPYTKKQRILSQKLDEKGFIERNLNDTRYVARFLCNFIADNMHLTGEGKRKVFASNGQITALLRGRWGLAKSREDNDRHHALDAVVVACSTVSMQQKITRFVRFEEGNVFTGERIDRETGEIIPLHFPAPWKFFREEVEIRIFSDNPKLELENRLIARPQANHEFVQPLFVSRMPTRKMTGQGHMETIKSAKRLNEGLSVIKMLLTKLRLKDLESMVNREREKELYEALKARLEAFNDEPAKAFAEPFMKKGGAIVKSVRVEQVQKSGVLVRDGNGVADNASMVRVDVFTKGGKYFLVPIYTWQVAKGILPNKAVIQGKNEEDWEVMDDATFRFSLHQNDLVKLVTKKKTIFGYFNGLNRATGNIDIKEHDLEKSKVKDGIHQSIGIKLALSFEKYQVDELGKNIRLCKSSKRQAVR

SEQ ID NO: 252 - protein, 1338 aa, Helcococcus kunzii
  REGION 1..1338: note = Helcococcus kunzii ATCC 51366
MQDYYLGLDIGTNSVGWAVTDENYNLLRKKGKDLWGVRLFKEAQPATERRGHRSSRRRTIRKSLRKQLLRELFEEEINAIDKDFFLRLDESKYWLEDKKIEGKYSLFNDENFTDKDYYEKFPTIFHLRKALIESDDKEDIRLYFLAINQMMKRRGHFLIDGKLSNVEDITPFKECIQNLINEELDTEIETEFYDKAIKIVSDYSLKKTEKKNLIKDLVKETDSIEDSKKIINIFNLLISGKSKVNGIFDDEEILEKIKEDNKEDFYLTSEKYEENLEYFSQLLDYRFELISSLKSIYDYIILQEVLKGKKYLSYAQVERYKNHKEDLRKLKQLIKKYDKNGKIYYQIFRDENFKKGYVAYLGYYKKNKKNVPVKKCDYDTFSKNIKSTLDKICDKEDPLYIELIDKIEKGGFLLKQIVSTNSVIPHQVHELELDKILENLEKNYPSFKEISDGVSKIDKIKMIFNFRIPYYVGPLNDYHKDKVNSNTWIVKNEGFENENIRPWNFSKIVDEHACEEEFIKRMINECSYIPGEKVLPKSSLLYSEYMVLNELNNLRVNGDKLNPKIKKEIVENIYKKERKVTLKKIRNFLIINNYVDSKVEFSGLSDGIKANMSSYIDFAEILDDNFDNNMVEDLIEQITIHVGNVKLLTEKISNKYPNLEKKQINKIVNLKFKDWARFSRKLLVGIEGTEKETGEINTIIGFLRETNENFMELMSNRYTFSEEISEIKKKYIPNKLSKQIVDDLYVSPAVKKMIWQVLNINDELIKVLGKQPKKIFIEMARGKEEKPEVKDSRKNKLIELYKNLGKEGKEWLNRIEDKTEADFRNRALYLYYTQMGRCMYTGEIIDIERLYDKELYDLDHIIPRKMKKDDSIHKNLVLVTRNSNQYEKKDNYPVPEVIKSRENVRHLWYALKKKGLITEEKYNRLTRINPLSDKELSEFIERQLVETRQTTKVVKDLFENYYTDSKIVTVKAGLVSELRRDFEVLKCREINDLNHAHDAFLNIIVGDVWSKKFTSNPYNFVKKNREKYTLNNIFTKNQKDLRGNEIWNCAEGKKRIIKTLNKPSVLFSVENFEQTGQLFDQNIIGKQDYKEKTSYVPIKGDERLQDISKYGGYRGISGAYFFIVEHTEKNKRVKTIESLPIYMKSYVEENGLLDFCTNEMKLVDPKIIVKKLNYKSEIIVDGFKYLISGKTENRLSLETNEYLYWNHTQTTDIKKILNINEKIELEKYNGDIESERENIIKYIQIILEKFKLKPFIKRRNLPNIEINFADYETEKLLQLLVNLIPLTTKYVSPVDLTVISGSKYAGKVLIPKKISNLNEVIFISKSITGIYESRRRII

SEQ ID NO: 253 - protein, 1007 aa, Helicobacter canadensis
  REGION 1..1007: note = Helicobacter canadensis MIT 98-5491
MKVLGFDIGINSIGWAFVENNELKDCGVRLFTKAENPKTKESLALPRRNARSSRVRLRRRRSRLLSLKHIISKEFGLHYEDYIALDGNLPKAYTGKIESIYKLRYEALSQAISKEDLARVILHIAKHRGYMNKNQKTSQDSEKGAILSAIKENSNKIKHYQTAGEYFYKELFENLRDGTKEFKNIRNKAMKNEKTGNMESTYYNTILASDLEKELKLILEKQQAYHNYSDTFIKEVLEIAFYQRPLKDFSHLVGSCTFYENEKRACKNSYSAWEFIALGKIINTLESIKKDTGEIFSNEIITQILKEVLDKGSLSYTKLRKMINLDEKVKFKGLKYDKEGVEKTNLIEFKKLKEFKKALGEHNLERKTLDEIATHITLTKDENQLKKQLEQYALSQNQIDALAELDFNDHINLSFKALYEILPLMEKGKRYDEACNELGLKAKTSNQKSEFLPAFCDSIFAQELTNPIVNRAISEYRKVLNRLLKKYGKMHKIHIELARDAGLSKEARNKIEKEQKENKDINDKAEKTCKEFGLKPNAKNILKIKLWREQGEICAYSGKKITIDDLKEDKALEVDHIYPYSRSYDDSYNNKVLVFIKENQLKLNQTPYEAFGSNQEKWSKIQVLAQKLPYKKKNRILDENFKNKDQIEFISRNLNDTRYATSLIAKYTKEYLEFLPLSDDEDISLKSGEKGSKTHVQTMNGMLTSVLRHAWGFSQKDRNNHLHHALDAIIIAYSTNSIIKAFSDFKKNQEILKAKLYAKKLTSEEYKNQSKFTGFEKYRSKILEKLDSIFVSKPPNKNTKGALHEQTFYSYQDILEEYKTQEGLKRALECGKVRKIGTKYVVNDRMVRLDIFKKDNKFYGIPIYTMDFALGVLPNKVVTIGTDKDKIKKEWKTIDETYEFCFSLYKGDLVLIQKKEMQESEFAYYNGFDISSASISLEKHDNKFENLTENQKLLFPKAKEGDVEVRGIGIQGLKVFKKYMVTPLGEIQETRTEARQNIQPRKKHGLR

SEQ ID NO: 254 - protein, 1023 aa, Helicobacter cinaedi
  REGION 1..1023: note = Helicobacter cinaedi CCUG 18818 = ATCC BAA-847
MKIYSFDIGVASIGWAFIENEVLQDCGIRIFTKAENPKNGASLALPRREARGVRKRLARRRGRLNTIKQLLCKEFGLQLEDYLSNDGELPKAYTASKANPLKSPYELRTLALSQKLDSKDLVRVILHIAKHRGYGNKHAKDSKDTESGKVKKAIEFNRKTLAEKGYRSVGEYLYREFFQQSRISQNNGATEFINVRNKAGNYEHCVAQDMLKEELESILNAQRQFGFSLKQDFESKLLTKIFEQRPLKSFADKVGNCCFIAGEKRAPKDSPSAIEFIALSRTINTLINLSKESGEIYNRAIILQIVESTLKKGEISYKELREIIRLDERLRFKDPRLDYSREIKEAEKVKFLEFKQLKGFKKALGESFTTLAISQLDEIAEHIALIKDRVKLNEKLESYALTKEQREALSNLSFSAHINLSLQALKQILPFMRGDNGEQCLDYDESVEKAGLKALSKDTLKGQMLPPLNEFEPYLSNPVVARALAEYRKVLNVLLKQYGSPHKIHIEYAREAKLSSTERQKYEKEQKDNYAANQAAHKKCQELGLEPSSTNLLKLKLWQEQGGLCLYSGAKITISYLQDPTALQVDHIYPYSRSFDDSYMNKCLVLTKANQEKGNRTPFEAFGTDSAKWGVITTLAQKLPHKKRRRILNTAFNDKEAGFKLRNLNDTSYIARLVADYTETYLEFLPLVESENTTLSKGQKGSKKHIAIVNGVLTSTMRYYLGFASKDRDNHLHHALDAVIIGFMNDSVIKAFSDFKKTQETSKAAYYAHTLSKQEYKKQRAFIQLPSGENFRVSVLEKVESVFVSKPPRKRVRGALHEATFYSPNDPKLLKNYGGTKGVERALALGKMRKVGAKIVSNGAMVRVDIFRHKSSGKFYGVPVYTMDFALGILPNKAVVVGKDQNGVIKDWLEMDSSYEFIFSLYKDDVILVQKKEMQRPELCYFVSFDTSGASIKVAKHDNNFSTLTENQKLLFSNATKEEVVGKSIGIQNLKVFEKWQVSVLGEVKRTQSYPRENISLASKAKK

SEQ ID NO: 255 - protein, 1023 aa, Helicobacter cinaedi
  REGION 1..1023: note = Helicobacter cinaedi CCUG 18818
MKIYSFDIGVASIGWAFIENEVLQDCGIRIFTKAENPKNGASLALPRREARGVRKRLARRRGRLNTIKQLLCKEFGLQLEDYLSNDGELPKAYTASKANPLKSPYELRTLALSQKLDSKDLVRVILHIAKHRGYGNKHAKDSKDTESGKVKKAIEFNRKTLAEKGYRSVGEYLYREFFQQSRISQNNGATEFINVRNKAGNYEHCVAQDMLKEELESILNAQRQFGFSLKQDFENKLLTKIFEQRPLKSFADKVGNCCFIAGEKRAPKDSPSAIEFIALSRTINTLINLSKESGEIYNRAIILQIVESTLKKGEISYKELREIIRLDERLRFKDPRLDYSREIKEAEKVKFLEFKQLKGFKKALGESFTTLAISQLDEIAEHIALIKDRVKLNEKLESYALTKEQREALSNLSFSAHINLSLQALKQILPFMRGDNGEQCLDYDESVEKAGLKALSKDTLKGQMLPPLNEFEPYLSNPVVARALAEYRKVLNVLLKQYGSPHKIHIEYAREAKLSSTERQKYEKEQKDNYAANQAAHKKCQELGLEPSSTNLLKLKLWQEQGGLCLYSGAKITISYLQDPTALQVDHIYPYSRSFDDSYMNKCLVLTKANQEKGNRTPFEAFGTDSAKWGVITTLAQKLPHKKRRRILNTAFNDKEAGFKLRNLNDTSYIARLVADYTETYLEFLPLVESENTTLSKGQKGSKKHIAIVNGVLTSTMRYYLGFASKDRDNHLHHALDAVIIGFMNDSVIKAFSDFKKTQETSKAAYYAHTLSKQEYKKQRAFIQLPSGENFRVSVLEKVESVFVSKPPRKRVRGALHEATFYSPNDPKLLKNYGGTKGVERALALGKMRKVGAKIVSNGAMVRVDIFRHKSSGKFYGVPVYTMDFALGILPNKAVVVGKDQNGVIKDWLEMDSSYEFIFSLYKDDVILVQKKEMQRPELCYFVSFDTSGASIKVAKHDNNFSTLTENQKLLFSNATKEEVVGKSIGIQNLKVFEKWQVSVLGEVKRTQSYPRENISLASKAKK

SEQ ID NO: 256 - protein, 1023 aa, Helicobacter cinaedi
MKIYSFDIGVASIGWAFIENEVLQDCGIRIFTKAENPKNGASLALPRREARGVRKRLARRRGRLNTIKQLLCKEFGLQLEDYLSNDGELPKAYTASKANPLKSPYELRTLALSQKLDSKDLVRVILHIAKHRGYGNKHAKDSKDTESGKVKKAIEFNRKTLAEKGYRSVGEYLYREFFQQSRISQNNGATEFINVRNKAGNYEHCVAQDMLKEELESILNAQRQFGFSLKQDFENKLLTKIFEQRPLKSFADKVGNCCFIAGEKRTPKDSLSAIEFIALSRTINTLINLSKESGEIYNRAIILQIVESTLKKGEISYKELREIIRLDERLRFKDPRLDYSREIKEAEKVKFLEFKQLKGFKKALGESFTTLARSQLDEIAEHIALIKDRVKLNEKLESYALTKEQREALSNLSFSAHINLSLQALKQILPFMRGDNGEQCLDYDESVEKAGLKALSKDTLKGQMLPPLNEFEPYLSNPVVARALAEYRKVLNALLKQYGSPHKIHIEYAREAKLSSTERQKYEKEQKDNYAANQAAHKKCQELGLEPSSTNLLKLKLWQEQGGLCLYSGAKITISYLQDPTALQVDHIYPYSRSFDDSYMNKCLVLTKANQEKGNRTPFEAFGTDSAKWGVITTLAQKLPHKKRRRILNTAFNDKEAGFKLRNLNDTSYIARLVADYTETYLEFLPLVESENTTLGKGQKGSKKHIAIVNGALTSTMRYYLGFASKDRDNHLHHALDAVIIGFMNDSVIKAFSDFKKTQETSKAAYYAHTLSKQEYKKQRAFIQLPSGENFRASVLEKVESVFVSKPPRKRVRGALHEATFYSPNDPKLLKNYGGTKGVERALALGKMRKVGAKIVSNGAMVRVDIFRHKSSGKFYGVPVYTMDFALGILPNKAVVVGKDKNGVIKDWLEMDSSYEFIFSLYKDDLLLVQKKEMAEPELCYFMSFNSSIAQISVAKHDNNFSTLTKNQKLLFSNATQEDVSGKSIGIQNLQVFEKWQVSVLGEVKRTQSYPRENISLASKAKK

SEQ ID NO: 257 - protein, 1024 aa, Helicobacter mustelae
MIRTLGIDIGIASIGWAVIEGEYTDKGLENKEIVASGVRVFTKAENPKNKESLALPRTLARSARRRNARKKGRIQQVKHYLSKALGLDLECFVQGEKLATLFQTSKDFLSPWELRERALYRVLDKEELARVILHIAKRRGYDDITYGVEDNDSGKIKKAIAENSKRIKEEQCKTIGEMMYKLYFQKSLNVRNKKESYNRCVGRSELREELKTIFQIQQELKSPWVNEELIYKLLGNPDAQSKQEREGLIFYQRPLKGFGDKIGKCSHIKKGENSPYRACKHAPSAEEFVALTKSINFLKNLTNRHGLCFSQEDMCVYLGKILQEAQKNEKGLTYSKLKLLLDLPSDFEFLGLDYSGKNPEKAVFLSLPSTFKLNKITQDRKTQDKIANILGANKDWEAILKELESLQLSKEQIQTIKDAKLNFSKHINLSLEALYHLLPLMREGKRYDEGVEILQERGIFSKPQPKNRQLLPPLSELAKEESYFDIPNPVLRRALSEFRKVVNALLEKYGGFHYFHIELTRDVCKAKSARMQLEKINKKNKSENDAASQLLEVLGLPNTYNNRLKCKLWKQQEEYCLYSGEKITIDHLKDQRALQIDHAFPLSRSLDDSQSNKVLCLTSSNQEKSNKTPYEWLGSDEKKWDMYVGRVYSSNFSPSKKRKLTQKNFKERNEEDFLARNLVDTGYIGRVTKEYIKHSLSFLPLPDGKKEHIRIISGSMTSTMRSFWGVQEKNRDHHLHHAQDAIIIACIEPSMIQKYTTYLKDKETHRLKSHQKAQILREGDHKLSLRWPMSNFKDKIQESIQNIIPSHHVSHKVTGELHQETVRTKEFYYQAFGGEEGVKKALKFGKIREINQGIVDNGAMVRVDIFKSKDKGKFYAVPIYTYDFAIGKLPNKAIVQGKKNGIIKDWLEMDENYEFCFSLFKNDCIKIQTKEMQEAVLAIYKSTNSAKATIELEHLSKYALKNEDEEKMFTDTDKEKNKTMTRESCGIQGLKVFQKVKLSVLGEVLEHKPRNRQNIALKTTPKHV

SEQ ID NO: 258 - protein, 1688 aa, Ignavibacterium album
MEFKKVLGLDIGTNSIGCALLSLPKSIQDYGKGGRLEWLTSRVIPLDADYMKAFIDGKNGLPQVITPAGKRRQKRGSRRLKHRYKLRRSRLIRVFKTLNWLPEDFPLDNPKRIKETISTEGKFSFRISDYVPISDESYREFYREFGYPENEIEQVIEEINFRRKTKGKNKNPMIKLLPEDWVVYYLRKKALIKPTTKEELIRIIYLFNQRRGFKSSRKDLTETAILDYDEFAKRLAEKEKYSAENYETKFVSITKVKEVVELKTDGRKGKKRFKVILEDSRIEPYEIERKEKPDWEGKEYTFLVTQKLEKGKFKQNKPDLPKEEDWALCTTALDNRMGSKHPGEFFFDELLKAFKEKRGYKIRQYPVNRWRYKKELEFIWTKQCQLNPELNNLNINKEILRKLATVLYPSQSKFFGPKIKEFENSDVLHIISEDIIYYQRDLKSQKSLISECRYEKRKGIDGEIYGLKCIPKSSPLYQEFRIWQDIHNIKVIRKESEVNGKKKINIDETQLYINENIKEKLFELFNSKDSLSEKDILELISLNIINSGIKISKKEEETTHRINLFANRKELKGNETKSRYRKVFKKLGFDGEYILNHPSKLNRLWHSDYSNDYADKEKTEKSILSSLGWKNRNGKWEKSKNYDVFNLPLEVAKAIANLPPLKKEYGSYSALAIRKMLVVMRDGKYWQHPDQIAKDQENTSLMLFDKNLIQLTNNQRKVLNKYLLTLAEVQKRSTLIKQKLNEIEHNPYKLELVSDQDLEKQVLKSFLEKKNESDYLKGLKTYQAGYLIYGKHSEKDVPIVNSPDELGEYIRKKLPNNSLRNPIVEQVIRETIFIVRDVWKSFGIIDEIHIELGRELKNNSEERKKTSESQEKNFQEKERARKLLKELLNSSNFEHYDENGNKIFSSFTVNPNPDSPLDIEKFRIWKNQSGLTDEELNKKLKDEKIPTEIEVKKYILWLTQKCRSPYTGKIIPLSKLFDSNVYEIEHIIPRSKMKNDSTNNLVICELGVNKAKGDRLAANFISESNGKCKFGEVEYTLLKYGDYLQYCKDTFKYQKAKYKNLLATEPPEDFIERQINDTRYIGRKLAELLTPVVKDSKNIIFTIGSITSELKITWGLNGVWKDILRPRFKRLESIINKKLIFQDEDDPNKYHFDLSINPQLDKEGLKRLDHRHHALDATIIAATTREHVRYLNSLNAADNDEEKREYFLSLCNHKIRDFKLPWENFTSEVKSKLLSCVVSYKESKPILSDPFNKYLKWEYKNGKWQKVFAIQIKNDRWKAVRRSMFKEPIGTVWIKKIKEVSLKEAIKIQAIWEEVKNDPVRKKKEKYIYDDYAQKVIAKIVQELGLSSSMRKQDDEKLNKFINEAKVSAGVNKNLNTTNKTIYNLEGRFYEKIKVAEYVLYKAKRMPLNKKEYIEKLSLQKMFNDLPNFILEKSILDNYPEILKELESDNKYIIEPHKKNNPVNRLLLEHILEYHNNPKEAFSTEGLEKLNKKAINKIGKPIKYITRLDGDINEEEIFRGAVFETDKGSNVYFVMYENNQTKDREFLKPNPSISVLKAIEHKNKIDFFAPNRLGFSRIILSPGDLVYVPTNDQYVLIKDNSSNETIINWDDNEFISNRIYQVKKFTGNSCYFLKNDIASLILSYSASNGVGEFGSQNISEYSVDDPPIRIKDVCIKIRVDRLGNVRPL

SEQ ID NO: 259 - protein, 1092 aa, Ilyobacter polytropus
MKYSIGLDIGIASVGWSVINKDKERIEDMGVRIFQKAENPKDGSSLASSRREKRGSRRRNRRKKHRLDRIKNILCESGLVKKNEIEKIYKNAYLKSPWELRAKSLEAKISNKEIAQILLHIAKRRGFKSFRKTDRNADDTGKLLSGIQENKKIMEEKGYLTIGDMVAKDPKFNTHVRNKAGSYLFSFSRKLLEDEVRKIQAKQKELGNTHFTDDVLEKYIEVFNSQRNFDEGPSKPSPYYSEIGQIAKMIGNCTFESSEKRTAKNTWSGERFVFLQKLNNFRIVGLSGKRPLTEEERDIVEKEVYLKKEVRYEKLRKILYLKEEERFGDLNYSKDEKQDKKTEKTKFISLIGNYTIKKLNLSEKLKSEIEEDKSKLDKIIEILTFNKSDKTIESNLKKLELSREDIEILLSEEFSGTLNLSLKAIKKILPYLEKGLSYNEACEKADYDYKNNGIKFKRGELLPVVDKDLIANPVVLRAISQTRKVVNAIIRKYGTPHTIHVEVARDLAKSYDDRQTIIKENKKRELENEKTKKFISEEFGIKNVKGKLLLKYRLYQEQEGRCAYSRKELSLSEVILDESMTDIDHIIPYSRSMDDSYSNKVLVLSGENRKKSNLLPKEYFDRQGRDWDTFVLNVKAMKIHPRKKSNLLKEKFTREDNKDWKSRALNDTRYISRFVANYLENALEYRDDSPKKRVFMIPGQLTAQLRARWRLNKVRENGDLHHALDAAVVAVTDQKAINNISNISRYKELKNCKDVIPSIEYHADEETGEVYFEEVKDTRFPMPWSGFDLELQKRLESENPREEFYNLLSDKRYLGWFNYEEGFIEKLRPVFVSRMPNRGVKGQAHQETIRSSKKISNQIAVSKKPLNSIKLKDLEKMQGRDTDRKLYEALKNRLEEYDDKPEKAFAEPFYKPTNSGKRGPLVRGIKVEEKQNVGVYVNGGQASNGSMVRIDVFRKNGKFYTVPIYVHQTLLKELPNRAINGKPYKDWDLIDGSFEFLYSFYPNDLIEIEFGKSKSIKNDNKLTKTEIPEVNLSEVLGYYRGMDTSTGAATIDTQDGKIQMRIGIKTVKNIKKYQVDVLGNVYKVKREKRQTF

SEQ ID NO: 260 - protein, 1354 aa, Indibacter alkaliphilus
  REGION 1..1354: note = Indibacter alkaliphilus LW1
MKKILGLDLGTTSIGWAFIKEPEKDVVGSEIVDMGVRIVPLSSDEENDFAKGNTISINADRTLKRGARRNLQRFKQRRNALLETFKEKNLIPSNFQYAEDGPSSTFSTLKLRDKAAKEKIELDDFVKVLLQINKKRGYKSSRKAMSEEDEGTAIDSMGIAKELYENDLTPGQWVYEALKNGRKNVPDFYRSDLQEEFKKIVNYQSEFYPDILNTSFVEDWMGKASTPTKQYFNKRGVQLAENKGKREERRLQEYKWRAEAVNFKIDLSEIALILSQINSQISNSSGYLGAISDRSKELYFKNLTVGQYLYQQVKKNPHTRLKGQVFYRQDYLDEFEKIWSVQSSFYPQLNDELKQEVRDVTIFFQRRLKSQKHLISNCEFEEHHKVVPKSHPIFQEFRIWQNLNNLTLIKKDNLNEKCELALEDKTALANELAFKKELSVKDALKVLGLKPSDWEFNFTKIEGNRTNHAFFEAFAKIIELEDGEPIDLGNLKADDILDQFSEAFLRIGIDTELLQVNSDIEGAEYEKQSYIQFWHLLYSSEDDQKLKQNLIRKFGFKPEHAKILASISLQDDHASLSSRAIKKILPHLQSGLIYDKACTYAGYNHSSSFTKDENEKRELRAELELLKKNSLRNPVVEKILNQMINVVNAILKDPNLGRPDEIRVEMARELKANAEQRKNMTSNIASATRDHEKYREILKKEFGLKRVTKNDLLRYKLWLETDGISLYTGKPIEASKLFSKEYDIEHIIPKARLFDDSFSNKTICERQLNIDKANVTAFSFLQNKLSADEFEQYQSRVKSLYGKLSKAKIQKLLMANDKIPEDFIARQLQETRYISKKAKEILFEITMRVSVTTGTITDKLREDWGLVEIMKELNWEKYDKLGLTYTIEGKHGERLNKIKDWNKRNDHRHHAMDALTVALTKPAYIQYLNNLNAKAIGNKKGTEIFAIEQKYLKRENGKLCFIPPIENIRAEAKKHLSKILVSYKAKNKVVTINKNKTKKKAGFNEQTALTPRGQLHKETVYGKSFHYSTKFEKIGASFDAQKINTVAKKEEREALLKRLAENGNDPKKAFTGKNSLNKMPIYLDLGKNIKLSEKVKTVVLEQNYTIRKNIDPDLKVDKVIDVGIKRILESRLEEFGGNAKLAFSNLEENPIWLNKEKGIPIKRVKISGVSNVESLHVKKDHFGEKILDEEGNEIPVDFVSTGNNHHVAIYEDEDGNLQDEVVNFYEAVIRRNQGESIIKYRHEEGWNFLYSIKQNEFFVFPSQDFNPNDFDLLDPKNYDLISPNLYRAQKFSKVMYGNSAVRDYVFRHHLETVLNDVKELKDVAYKQLKSLQYLNGIKKVRLNHLGQIIQVGEY

SEQ ID NO: 261 - protein, 1397 aa, Joostella marina
  REGION 1..1397: note = Joostella marina DSM 19592
MKKVLGLDLGTNSIGWALVNEATKEEKKEGKSSEIIKLGVRVNPLTVDEKTNFEKGRPLSTNADRTLKRSARRNLQRYKLRRRNLIEILIKNGFITKDTPLTETGKDTTHQTLKLRAKSAKEKVDLKDFAKILLTINKKRGYKSSRKVNSDEDGLAIDGMAVAKHLYEQNLTPGQYVLNLLQKNKKYVPDFYRSDLQEEFKNIWNNQKTYYFDILTDTLFEELKDKNKSQTWAICKKPFDIAGIKQIGKASDKRLERYKWRTEGLTQKLNLEYLAIALQEINNDINKSSGYLGAISDRSKELFFNKETVGENLYRQLVKTPHTSLRNQVFYRQDYLDEFETIWETQAKFYPQLTHTLKEEIRDVIIFYQRKLKSQKSLISFCQFESWEQTYIEKETGKSKTRTVGRKVIPKSSPLFQEFKIWQNLNSLEFRNSDEGEIIEFIKLDEDIRQTVFEELNLRGNLKPNDVLKILGNYISLGKVSQWKCNFEEIEGNRTNAALYNVYQIIAENEGYGFDWAKKTASEINKELKNIFPQLGIDASILDFDFTQANFDKQTSYQLWHLLYSAEEDFKISEEDKVLYGNSSVSLKKKLHQKYGFKPEYTKLLTNISLQPDYGNLSAKAICNILPYLKENNVYSEACDLTGYNHSNFLTAEEQAKRPLKPILELLKKNSLRNPVVEKILNQMVNVVNQVIETYGKPDEIRIELTRELKKSAKERANMTKSIADATRRNDDYRKTIIKEFGIPNPTKSDVVRYRLWQELASRGYKDIFTDTEIKPQELFSNKIDIEHIIPKALLFDDSFSNKTLAFKKDNLKKANRTAYDFIANDYAPNLENYIERVESLHKDRKITRAKRNKLLMLQSKLPDGFIERDLRNSQYITKEAKKMLYEVCRTVVSTSGSITDKLREDWDLINVMKELNFPKYKALGLTEKIERYDIGAEKMKEVEIIEDWNKRNDHRHHAIDALTVAFSTHSHIQYLNHLNARRDEGHKKHAAIIAIESTITEKEGNKKRRFIAPLPNFRLQAKEHIESILVSFKNKNKVVTNNINKTKRIKKDKFNTKVQLTPRGQLHKETIYGKIKQPLEKHIKLNKSFTLEQAKLIIDKRQREKVLNHLEKYAHNSDIAFNSKTLKKNPLLISDEPLKEVLCFEEVFTIRKDISYDNFKNEKQLDKVIDEKVKQALKERINQYNGDFREAFSDIERNPIWLNKAKGICVKRATIKGVSNAEPLHTAKNHLGEEVLTENKEQIPVDYVSTGNNHHVAIYEDEDGNLQEKVVSFYEAVIRVNEGLPIIDKEYNKSLGWTFKFTMKQNEMFVFPSEDFNPTEIDLLDQKNASLISPNLFRVQKFTIKDYFFRHHLETTVENNNTLKNTTWRREGLSGIYGIIKIRLNHLGEIVQVGEY

SEQ ID NO: 262 - protein, 1060 aa, Kingella kingae
  REGION 1..1060: note = Kingella kingae PYKK081
MAAKSLNYILGLDLGIASCGWAVVEMDEQENPLRLIDVGVRTFEEAENPKDGSSLAETRRLARAQRRLISRRANRMNKLCRLLKQENVLQANDYDEKGLIIGLPNQAWELRAQGLDRKLEPKEWAAVLIHLVKHRGYLSQRKNESQTADKELGALLSGMNHNHQLLQSQSNQYRTPAELAIKQFATQDGHIRNQRGAYTHTFNRLDLQNELNQLFDAQTRLGNPHVSGSLKTAINDLLMNQKAALSGDAILEMLGRCTFEPSEYKAAKNTYSAERFVWLGKLTNLRIQDNGLESALSREQRELLLNEPYNKTKLTYQQVRKLLRLPETAFFKGLRYGKDNAESATFMEMKSYHAIRKSLENKSLKSEWEKLKTQPKLLDLIGTAFSIYKTDDEIAGCLKNQLPENVIIALQGQLNFSNFMELSLKALEKLLPLMEQGLRYDEACTQIYGNRHEKIADKTEKFLPNIPADKLRNPVVLRTLTQARKVINAIIRRYGSPARVHIETGREVGKSFSDRDKLKKQQEENQEQRRRAIDEWKQFFPNAAHEPKAVDILKLRLYQLQQGKCLYSGLPIDVRRLPEKGYVEIDHALPFSRTWDDSFNNKILVLASENQNKGNQTPYEYLRGADNSESWRLFVENVQNCQFSPNKKQKIMAKQLDEKGFLERNLNDTRYVSRFLCQFISEHLHLTGKGKKRVFASNGQITALLRGRWGLSKNREENDRHHAVDAVVVACSTVAMQQKITQFVRYQKGNVFTGERIDKETGEVISIHFPTPWEHFREEVMIRVFDDNPLRTLPEKLPNRPEALHEYVMPLFVSRMPTRKMTGQGHKETIKSAKRLDEKISVLRVPLTQLKLNDLENMVNREREPALYEALKARLEQFKNDPAKAFAEPFFKQGGQQVKAVRVEIVQKSGMLLRKINGVADNGSMVRVDVFEKSGKFYLVPIYAWQVAEGILPNYAVVAHKDESDWILMDESYHFKFALYKNDLLEVQTKKGGIMGYFASLDRATGAITIREHDRDKKKCKDGEHRSIGVKMASSFKKLQVDELGKNIHETRSRKRPNIG

SEQ ID NO: 263 - protein, 1391 aa, Kordia algicida
  REGION 1..1391: note = Kordia algicida OT-1
MKKILGLDLGTNSIGWALVNEAEHEHEQSSIVKLGVRVNPLSVDEKTNFEKGRPLSINADRTSKRSARRNLQRFKLRRKNLINLLLKHHIISNETILTEVGKNTTHQTLKLRSKATQEKISLEEFARILLSINKKRGYKSSRKEKNEDEGFTIDGMAIAKELYDNQLTPGQYVYNILQDGKNYIPDFYRSDLQAEFDDVWQFQKKFYSSILTDEFYLKLKGQGKENTRKLFLAIHQVYTAENKGKRDAVKLQYYKWRSEAVKKQLSIEEVAYVLVEINNNINKSSGYLGAISDRSKALYFNNETVGEYLYGQLVKNRHNSLRNQVFYRQDYLDEFEKIWETQAKFYDELTNELKQEIRDVVIFYQRKLKSQKHLISDCLFEKHHKAIPKSSPLFQEFKIWQNLNYLEFVHTQSKEKIFFSELDDETRQFVFAELNIRGTLKIKEIKKLIGLETPVYWKSNFDEIEGNRTNQVLYNVYQNIADDLGYGFDWSKKHAFEINAELQAIFKDVGIDTAILNFDASIEENDFDKQKSYQLWHLLYSAEDTDKATEEDKLIYGNINTKLKKQLHQKYGFEAKYGNLLANISLQQDYGNLSAKAIKKILPYLESGNSFYEACTIVGYNPSNSLTKEQQQNRKLKDKLELLPKNSLRNPVVEKILNQKVNLINQLIDEYGKPDEVRIELARELKKSAKQRADLSKHINDATLKNQNIRKTLQKDFGIQNPSKNDVIRYKLYDELKDNGYKTLFTNKYIPKEQLFSKDVDIEHIIPKAILFDDSFSNKTLAYRNVNLAKADATAFDFISSKHLDDLDNYKARVETLFQSKRISKGKYKKLLMTRQNLPEDFIERDLRNSQYIAKKATAMLKEVFRSVVPTSGRITDKLREDWDLVNVMKELNLPKYRTLGLTEFIERKNGNKIEQIIDWTKRNDHRHHAMDALTVAFTTHNHIQYLNNLNVTHGLNGVDTDHEKSRLYAIKQAITKVYIVGKTKKRKFIPPMENFRSHAKNHLEGILISFKNKNKVVTKNKNRTKTKTKGVFNEKIQLTPRGQLHKETIYGHAKKVIVTKEKVSSKFTHEKILQVTKPAYREALLKRLASFKNDPKKAFSGKNALSKNPLYFDITSGKKVPDTVKLSYFENSYVIRKEVNSDNFKNEKSLQKVLDVGIRRILEKRLADYNGNAKEAFSNLEKNPIWKDKEKGVCIKKVRIEALKNAEPLHVKKDHLGKIILDDENKSTPVDFISTGNNHHVAIYEDKDGKLHDKVVSFYEVVSRVNLGLPIIDKSFNSHLDWKFLFSMKQNEMFVFPSEDFNPKEIDIGNPKNNELISKYLFRVQKFSKVTYGNSAVRDYVFRHHLETELIDKKELKGITYYQLKSIGMLEKLVKVRINHIGKIVHIGEY

SEQ ID NO: 264 - protein, 1314 aa, Lactobacillus animalis
  REGION 1..1314: note = Lactobacillus animalis KCTC 3501
MLKKDYSIGLDIGTNSVGHAVVTDDYKVPTKKMKVFGDTSKKTIKKNMLGVLLFNEGQTAADTRLKRGTRRRYTRRKNRLRYLQEIFAPELAKVDPNFLYRLEESSLVAEDKKYDVYPIFGKREEELLYHDTYKTIYHLRSALANNDQPADLRLVYLALAHIIKYRGNFLLEGEIDLRTTDINKVFAEFSETLNENSDENLGKLDVADIFKNNTFSKTKKSEELLKLSGAKKNQLAHQLFKMMVGNMGSFKKVLGTDEEHKLSFGKDTYEDDLNDLLAEAGDQYLDIFVAAKKVYDAAILASILDVKDTQTKTVFSQAMIERYEEHQKDLIELKRVFKKYLPEKCHDFFSEPKISGYAGYIDGKVSEEDFYKYTKKTLKGIPETEEILQKIDANNYLRKQRTFDNGAIPHQVHLKELVAIVENQGKYYPFLRENKDKFEKILNFRIPYYVGPLARGNSKFAWLTRAGEGKITPYNFDEMIDKETSAEDFIKHMTINDLYLPTEPVLPKHSLLYERYTIFNELAGVRYVTENGEAKYFDAQTKRSIFELFKLDRKVSEKMVIKHLKVVMPAIRIQALKGLDNGKFNASYGTYKDLVDMGVAPELLNDEVNSEKWEDIIKTLTIFEGRKLIKRRLENYRDFLGEDILRKLSRKKYTGWGRLSAKLLDGIYDKKTHKTILDCLMTEDYSQNFMQLINDDNYSFKETIKNAQVIEKEETLAKTVQELPGSPAIKKGILQSLEIVDEIIKVMGYKPKSIVVEMARETQKTHGTRKREDRVQQIVENLKDANELPEKLPSNAELSDERKYLYCLQNGRDMYTGAPLDYDHLQFYDVDHIIPQSFLKDDSIENKVLTIKKENVRKTNGLPSEAVIQKMGSFWKKLLDAGAMTNKKYDNLRRNLHGGLNEKLKERFIERQLVETRQITKYVAQLLDQRLNYDGNGVELDEKIAIVTLKAQLASQFRSEFKLRKVRALNNLHHAHDAYLNAIVANLIMAKYPELEPEFVYGKYRKAKFKGLGKATAKNTLYANVLYFLKENEVYPFWDKARDLPTIKRYLYRAQVNKVRKAERQIGGFSDEMLVPKSDSGKLLPRKEGLDPVKYGGYAKAVESYAVLITADEVKKGKTKKVKTLVNIPIIDSKKYEADPTAYLASRGYTNVTNSFILPKYSLLEDPEGRRRYLASFKEFQKANELILPQHLVELLYWVNAKDGEQKLEDHKAEFKELFDKIMEFADKYVVAPKNSEKIRRLYEENQDATPMELGKNFVELLRYTADGAASDFKFFGENIPRKRYNSAGSLLNGTLIYQSKTGLYETRIDLGKL

SEQ ID NO: 265 - protein, 1377 aa, Lactobacillus brevis
  REGION 1..1377: note = Lactobacillus brevis subsp. gravesensis ATCC 27305
MESNHDGEQVKYTLGLDIGTSSIGYAAIDKHQKPIRAKGKHVIGVRLFQEGQTAADRRAFRTTRRRLKRRKWRLNLLNRLFDPYLSEVDPNFLPRLRQSNLSPKDDNKHFNGSTLFPDKTDAAFYRQYPTMYHLRYALMTEKRKFDIREVYLAIHHIVKYRGNFLNSATVDSFKTSNIDFTSQFDRLNELYRQVILDEPFQINMDQVDEMTNKLLDNDALKLDTQKQVAKLLPVIYNDKPIDKQYTRIATEFSKAILGYKTKLDVILNLDTQNAKDWVIRLDDEDIDDKLPALVENLDESRQEIVTIIRDLYAQITLNAIVPKGKSLSESMVDKYNDHKDHLDLLMGLIHELGDDSAKGIKLREAYTQYVGKSDDKTLNQDDFYAAIKKNLDEDSKRSPKIQRLIEQASFMPKQRTSANGVIPHQLHQLELDRIIENQGRYYPFLKKPNPNTHKPNGGKYKLDELVAFRIPYYVGPLITKRDQEKTSGADFAWMIRKPGQEGEITPWNFDQKVDRMASANRFIRRMTTKDSYLVAEDVLPDASLIYEKFKALNELNMLKVNDSRLSPSQKQDLFNNLFKKQKTIRTKKLQTYIRTNWELPSVMISGLADPDKFNSSLSTYIDFRDIFGEKVDDPNRQADYEEIIEWSTVFEDRKIYQAKLNQLDWLTEPQRKALLTKRYTGWGRLSKKLLTGLKDQNGDSILDQLWKTNDNFMQIQSRDEFAKQIHDENAKQFHEANNVDDILDDAFTSPQNKKAIRQVDKVVQDVVKAVGYAPDKIAIEFTRSLENNPQRTVSRQRQLQAAYKNIPREIMKSGLMAELGSVADSKKVLSDKLYLYFTQMGKDMYEDKTINIDNLPNYDIDHILPQAFIKDDSIDNRVLISKEENARKSNRVPLKFFGAKRMGFWKDLLNNGLISNRKFQNLTTDPEKISKYSAKGFIHRQLVETSQVIRLVANILGNEYSQAGTTIIEVSAKMNRQLREDFHLIKNRNVNDYHHAMDAYLTAYVGDYLYLRYPKLRPYFVYGDFKKAEDQDLNIRNFNFLHDLKDNESLDKIVDSETGEIVWEKHGSVKQLKKVYHYKFMLVSQEVYTRQDALFNQTIYPASDADKRKLIPIKNSKPVDVYGGYSGNIDAYMAIVRVHGKKEDNYKVVGIPMRAVTKLKKAEKEGHDSYLNAVHEVLKPQFTKKKKNRKTGEITETVDEFDVLLGKVYYRQLIVDGNKKFMLGSSSYQYNAKQLVLSDKAMQVLSKNGKVKSQDENQNLIDVYDEILEKVDQYFELYDQRHYRESLHKGRGIFVNLPLSNQYDGSKLTSYGKYETIDAILNGLHANATMSNLRYLGISSPFGKMQASNGLTIDPDSIICYQSPTGLFERQIKLSDL

SEQ ID NO: 266 - protein, 1371 aa, Lactobacillus buchneri
MKVNNYHIGLDIGTSSIGWVAIGKDGKPLRVKGKTAIGARLFQEGNPAADRRMFRTTRRRLSRRKWRLKLLEEIFDPYITPVDSTFFARLKQSNLSPKDSRKEFKGSMLFPDLTDMQYHKNYPTIYHLRHALMTQDKKFDIRMVYLAIHHIVKYRGNFLNSTPVDSFKASKVDFVDQFKKLNELYAAINPEESFKINLANSEDIGHQFLDPSIRKFDKKKQIPKIVPVMMNDKVTDRLNGKIASEIIHAILGYKAKLDVVLQCTPVDSKPWALKFDDEDIDAKLEKILPEMDENQQSIVAILQNLYSQVTLNQIVPNGMSLSESMIEKYNDHHDHLKLYKKLIDQLADPKKKAVLKKAYSQYVGDDGKVIEQAEFWSSVKKNLDDSELSKQIMDLIDAEKFMPKQRTSQNGVIPHQLHQRELDEIIEHQSKYYPWLVEINPNKHDLHLAKYKIEQLVAFRVPYYVGPMITPKDQAESAETVFSWMERKGTETGQITPWNFDEKVDRKASANRFIKRMTTKDTYLIGEDVLPDESLLYEKFKVLNELNMVRVNGKLLKVADKQAIFQDLFENYKHVSVKKLQNYIKAKTGLPSDPEISGLSDPEHFNNSLGTYNDFKKLFGSKVDEPDLQDDFEKIVEWSTVFEDKKILREKLNEITWLSDQQKDVLESSRYQGWGRLSKKLLTGIVNDQGERIIDKLWNTNKNFMQIQSDDDFAKRIHEANADQMQAVDVEDVLADAYTSPQNKKAIRQVVKVVDDIQKAMGGVAPKYISIEFTRSEDRNPRRTISRQRQLENTLKDTAKSLAKSINPELLSELDNAAKSKKGLTDRLYLYFTQLGKDIYTGEPINIDELNKYDIDHILPQAFIKDNSLDNRVLVLTAVNNGKSDNVPLRMFGAKMGHFWKQLAEAGLISKRKLKNLQTDPDTISKYAMHGFIRRQLVETSQVIKLVANILGDKYRNDDTKIIEITARMNHQMRDEFGFIKNREINDYHHAFDAYLTAFLGRYLYHRYIKLRPYFVYGDFKKFREDKVTMRNFNFLHDLTDDTQEKIADAETGEVIWDRENSIQQLKDVYHYKFMLISHEVYTLRGAMFNQTVYPASDAGKRKLIPVKADRPVNVYGGYSGSADAYMAIVRIHNKKGDKYRVVGVPMRALDRLDAAKNVSDADFDRALKDVLAPQLTKTKKSRKTGEITQVIEDFEIVLGKVMYRQLMIDGDKKFMLGSSTYQYNAKQLVLSDQSVKTLASKGRLDPLQESMDYNNVYTEILDKVNQYFSLYDMNKFRHKLNLGFSKFISFPNHNVLDGNTKVSSGKREILQEILNGLHANPTFGNLKDVGITTPFGQLQQPNGILLSDETKIRYQSPTGLFERTVSLKDL

SEQ ID NO: 267 - protein, 1371 aa, Lactobacillus buchneri
MKVNNYHIGLDIGTSSIGWVAIGEDGKPLRIKGKTAIGARLFQEGNPAADRRMFRTTRRRLSRRKWRLKLLEEIFDPYITPVDSTFFARLKQSNLSPKDSRKEFKGSMLFPDLTDMQYHKDYPTIYHLRHALMTQDEKFDIRMVYLAIHHIVKYRGNFLNSTPVDSFKASKVNFVDQFKKLNELYTAINPEESFQINLANSEDIGHQFLDPSIRKFDKKKQIPKIVPVSVDDKATDKINGKIASEIINAILGYKSKLDVVVQCTPVDSKSWALKFDEEDIDAKLQKILPEMDENQQSIIAILQNLYSQVTLNQIVPNGMSLSESMIEKYNDHHDHLKLYKKIIDQLADPKKKAALKKAYSQYVGDDGKVIEQADFWSSVKKNLDDSDLSKQIMDLIDAEKFMPKQRTSQNGVIPHQLHQRELDEIIEHQSKYYPWLAEINPNKHDLHLAKYKIEELVAFRVPYYVGPMITPDDQAKSAETVFSWMERKGKEAGQITPWNFDEKVDRNASANRFIKRMTTKDTYLIGEDVLPDESLLYEKFKVLNELNMVRVNGKLLKVADKQAIFQDLFENYKHISVKKLQNYIKSKTGLPSDPEISGLSDPEYFNNSLGTYNDFKKLFGNKVDEPDLQDDFEKIVEWSTVFEDKRILREKLNEITWLSDQQKDVLESSRYQGWGRLSKKLLTGIVNDQGERIIDELWNTNKNFMQIQSDNDFAKRIHEANADQMKAVDVEDVLADAYTSPQNKKAIRQVVKVVDDIQKAMGGVAPKYISIEFTRSEDRNPRRTISRQRQLENTLKDTAKSLAKSINPELLSELDNAAKSKKGLTDRLYLYFTQLGKDIYTGKPINIDEISTYDIDHILPQAFVKDDSLNNRVLVSKAINNGKSDNVPVQLFGAKMGHFWKQLAEAGLISKRKLKNLQTDPDTISKYAMHGFIRRQLVETSQVIKLVANILGDKYRNDNTKIIEITARMNHQMRDEFGFIKNREINDYHHAFDAYLTAFLGRYLYHRYIKLRPYFVYGDFKKFKEDKVTMRNFNFLHDLTDDTQEKIADAETGEVIWDRENSIQQLKDVYHYKFMLISHEVYTLRGAMFNQTVYPASDAGKRKLIPIKADRPINVYGGYSGSADAYMAIVRIHNKKGDKYRVVGVPMRARDRLDAAKKVSDADCDRALKDVLTPQLTKTKKSRKTGEITQVVEDFEIVLGKVMYRQLMIDGDKKFMLGSSTYQYNAKQLVLSDQSVKTLASKGRLDPLQESMDYNNVYTEILDKVNQYFSLYDMNKFRHKLNLGFSKFISFPNHNVFDGNTKASSGKREILEEVLNGLHANPTFGNLKDIGITTPFGQLQQPNGILLSDEAKIRYQSPTGLFERTVSLKDL

SEQ ID NO: 268 - protein, 1361 aa, Lactobacillus casei
  REGION 1..1361: note = Lactobacillus casei BL23
MTKLGKPYGIGVDIGSNSIGFAAVDENSHLIRLKGKTVIGARLFEEGKAAADRRASRTTRRRLSRNRWRLSFLRDFFESHITPTGPNFFMRQKYSEISPKDKARYKYEKRLFNDRTDAEFYQQYPTMYHLRNRLLTDPSKADVREIYFAIHHILKSRGHFLTSGYAKDFNTNKVALNEIFPALQDAYAQVYPDLDITFDENKVNEFKTVLLNEKATPSDTQRALVNLLLAEDGDKDILKQQKQVLTEFAKAVVGLKTKLNVALGTEVDSSEATVWNFSLGQLDDKWAGIESAMTDEGTEILDQIRDLYRARLLNGIVPAGKTLSQAKVDDYAQHHEDLELFKDYLKQLEDDGTAKAIRQLYDRYIDGDDAKPFVREDFVKALTKEVTAHPNAKSPELLERLAQPDFMLKQRNKANGAIPVQMQQRELDQIIKNQSVYYDWLAAPNPVEKHRKSMPYQLDELLNFRIPYYVGPLVTAKEQKAAQGGVFAWMVRKDPDGNITPYNFDEKVDREASANTFIQRMKTTDTYLIGEDVLPKQSLLYQRYEVLNELNNVRVNNEKLSIEQKQQVIRELFERHNSVTIKQFAENLRAHGDYAHIPEIRGLADEKRFLSSLSTYRQLKSLLPDAIDDPAKQADIENIIAWSTVFEDAAIFKTKLKEINWLDSQTITKLSNIRYRGWGQFSHKFLNGLTLGNGHTIIQELFLSNNNLMQILTDETLQKKMTELNADKLKAANINDAIDDAYTSPSNKKALRQVLRVIEDIKRAADGQDPSWLYVETADGGGTPGKRTRARQHQLQEIYANAAHELIDSAVRGELEDKIADKADFNDRLVLYFMQGGRDIYTGTPLNIDQLSSYDIDHILPQSLIKDNSLDNRVLVHAIINREKNATFASTIYAQKMNATWRQWHEAGLISGRKLRNLQMRPDQIDKYASGFVARQLVETRQIIKLTEQIVAAQYPETKIIAVKAGLSHQLREELEFPKNRDVNHYHHAFDAFLAARIGTYLLKRFPNLQAFFTYGKFKKADVKKLRGFNFIRDITHAEDKIVVKDTGEVIWDKKRDVDELDRIYNFKRMLITHEVHFEKADLFKQTVYGAKDSKEAGGKKQLISKKKGYPVDIYGGYTQETGSYLSVVRLTKKAMYAVVKVSTRDAAKLAVAKSISEQKENETLNDIIDEKLSKISKNGKITHELFEVVLPRVGQKTLFKNSKYNLFLVNSDTYMHNYQELWMPREYQKMWKDISLSKYGDAQTEDQLDQIFGFIVSQVNSYFNLYDINQFRKKLNDAADKFATLPMRDTDDMQGKIATIGQLLIGLQANAARSDLRNLDIKTPLGLLQIPNGISLDSDTSVVYQSPTGLLEREVHLSDL

SEQ ID NO: 269 - protein, 1361 aa, Lactobacillus casei
  REGION 1..1361: note = Lactobacillus casei Lc-10
MTKLGKPYGIGVDIGSNSIGFAAVDENSHLIRLKGKTVIGARLFEEGKAAADRRASRTTRRRLSRNRWRLSFLRDFFESHITPTGPNFFMRQKYSEISPKDKARYKYEKRLFNDRTDAEFYQQYPTMYHLRNRLLTDPSKADVREIYFAIHHILKSRGHFLTSGYAKDFNTNKVALNEIFPALQDAYAQVYPDLDITFDENKVNEFKTVLLNEKATPSDTQRALVNLLLAEDGDKDILKQQKQVLTEFAKAVVGLKTKLNVALGTEVDSSEATVWNFSLGQLDDKWAGIESAMTDEGTEILDQIRDLYRARLLNGIVPAGNTLSQAKVDDYAQHHEDLELFKDYLKQLEDDGTAKAIRQLYDRYIDGDDAKPFVREDFVKALTKEVTAHPNAKSPELLERLAQPDFMLKQRNKANGAIPVQMQQRELDQIIKNQSVYYDWLAAPNPVEKHRKSMPYQLDELLNFRIPYYVGPLVTAKEQKAAQGGVFAWMVRKDPDGNITPYNFDEKVDREASANTFIQRMKTTDTYLIGEDVLPKQSLLYQRYEVLNELNNVRVNNEKLSIEQKQQVIRELFERHNSVTIKQFAENLRAHGDYAHIPEIRGLADEKRFLSSLSTYRQLKSLLPDAIDDPAKQADIENIIAWSTVFEDAAIFKTKLKEINWLDSQTITKLSNIRYRGWGQFSHKFLNGLTLGNGHTIIQELFLSNNNLMQILTDETLQKKMTELNADKLKAANINDAIDDAYTSPSNKKALRQVLRVIEDIKRAADGQDPSWLYVETADGGGTPGKRTRARQHQLQEIYANAAHELIDSAVRGELEDKIADKADFNDRLVLYFMQGGRDIYTGTPLNIDQLSSYDIDHILPQSLIKDNSLDNRVLVHAIINREKNATFASTIYAQKMNATWRQWHEAGLISGRKLRNLQMRPDQIDKYASGFVARQLVETRQIIKLTEQIVAAQYPETKIIAVKAGLSHQLREELEFPKNRDVNHYHHAFDAFLAARIGTYLLKRFPNLQAFFTYGKFKKADVKKLRGFNFIRDITHAEDKIVVKDTGEVIWDKKRDVDELDRIYNFKRMLITHEVHFEKADLFKQTVYGAKDSKEAGGKKQLISKKKGYPVDIYGGYTQETGSYLSVVRLTKKAMYAVVKVSTRDAAKLAVAKSISEQKENETLNDIIDEKLSKISKNGKITHELFEVVLPRVGQKTLFKNSKYNLFLVNSDTYMHNYQELWMPREYQKMWKDISLSKYGDAQTEDQLDQIFGFIVSQVNSYFNLYDINQFRKKLNDAADKFATLPMRDTDDMQGKIATIGQLLIGLQANAARSDLRNLDIKTPLGLLQIPNGISLDSDTSVVYQSPTGLLEREVHLSDL

SEQ ID NO: 270 - protein, 1363 aa, Lactobacillus casei
  REGION 1..1363: note = Lactobacillus casei M36
MTKLGKPYGIGVDIGSNSIGFAAVDENSHLIRLKGKTVIGARLFEEGKAAADRRASRTTRRRLSRNRWRLSFLRDFFESHITPTDPNFFMRQKYSEISPKDKARYKYEKRLFNDRTDAEFYQQYPTMYHLRNRLLTDPSKADVREIYFAIHHILKSRGHFLTSGYAKDFNTNKVALNEIFPALQDAYAQVYPDLDITFDENKVNEFKTVLLDEKATPSDTQRALVNLLLAEDGDKDILKQQKQVLTEFAKAVVGLKMKLNVALGTEVDSSEATAWNFSLGQLDDKWAGIESAMTDEGTEILDQIRDLYRARLLNGIVPAGKTLSQAKVDDYEQHHEDLELFKDYLKQLEDDGMAKVIRQLYDRYIDGDDAKPFVREDFVKALTKEVTAHPNAKSPELLERLVQPDFMLKQRNKANGAIPVQMQQRELDQIIKNQSVYYDWLAAPNPVEKHRQSMPYQLDELLNFRIPYYVGPLVTAKEQKAAQGGVFAWMVRKDPDGNITPYNFDEKVDREASANTFIQRMKTTDTYLIGEDVLPKQSLLYQSYEVLNELNNVRVNDNKLSFDQKQQVLGELFERHNTVTIKQFVDNLLAHGDYDRIPEVRGLADEKRFLSSLSTYNQLKGILHEAIDDSDKQTDIEKIIAWSTIFEDKAIFKTKLNEISWLTAGMINSLANIRYRGWGQFSHKLLNELTLSTGRTVFEELLISSHNLMQILTDEVLKQKIAELNAHELKASGIYAAIDDAYTSPSNKKALRQVLSVIDDITNAAGQAPNWLYIETADGDGVPGKRTNSRQRKIQEIYANAAQELITGSVRGELEDKIASRADFTDRLVLYFMQGGRDIYTGEPLNIDNLSSYDIDHILPQSLIKDNSLDNRVLVHPLVNREKDTIFASTRFAKQMNGMWRQWHAAGLISSRKLRNLQMRPDEIDKYASGFVARQLVETRQIIKLTEQIVADQYPDAKIIAVKAGLSSQLRKELDFPKNREVNHYHHAFDAFLAARIGTYLLKRYPNLEPFFTYGKFKKTEVKKLKSLKSFNFIRDMTHAKDKIVAKETGEIVWDNASDINELDRIYNFKRMLITHEVRFETASLFKQTLYAAKNSKNRGGSRQLIPKKKGYLVDIYGGYTQETGSYLSVVRLTKKAMYAVVKVSTRDAAKLAVAKSISEQKENETLKKIIDGKLSKTSKKGKTTHQLFEIVLPRVGQKTLFKNSKYNQFLVNSDTYMHNYQELWMPREYQRMWKDILLSNHGDAQLEGQLDQIFKFIVSQVNSYFNLYDINQFRKKIADATDKFAKLPTHDTDNARGKIATIGQLLIGLQANAMRSDLRNLDIKTPFGLLQIGTGITLDLDTSIIYQSPTGLFEREVPLTDL

SEQ ID NO: 271 - protein, 1361 aa, Lactobacillus casei; identical to SEQ ID NO: 268
  REGION 1..1361: note = Lactobacillus casei group

SEQ ID NO: 272 - protein, 1360 aa, Lactobacillus casei
  REGION 1..1360: note = Lactobacillus casei T71499
MTKLGKPYGIGVDIGSNSIGFAAVDENSHLIRLKGKTVIGARLFEEGKAAADRRASRTTRRRLSRNRWRLSFLRDFFESHITPTDPNFFMRQKYSEISPKDKARYKYEKRLFNDRTDAEFYQQYPTMYHLRTRLLTDPSKADVREIYFAIHHILKSRGHFLTPGYAKDFNTNKVALNEIFPALQDAYAQVYPDLDITFDENKVNEFKTVLLNEKATPSDTQRALVNLLLAEDGDKDILKQQKQVLTEFAKAVVGLKTKLNVALGTEVDSSEATVWNFSLGQLDDKWAGIESAMTDEGTEILDQIRDLYRARLLNGIVPAGKTLSQAKVDDYAQHHEDLELFKDYLKQLEDDGTAKAIRQLYDRYIDGDDAKPFVREDFVKALTKEVTAHPNAKSPELLERLAQPDFMLKQRNKANGAIPVQMQQRELDQIIKNQSVYYDWLAAPNPVEKHRKSMPYQLDELLNFRIPYYVGPLVTAKEQKAAQGGVFAWMVRKDPDGNITPYNFDEKVDREASANTFIQRMKTTDTYLIGEDVLPKQSLLYQSYEVLNELNNVRVNDNKLSFDQKQQVLGELFERHNTVTIKQFVDNLLAHGDYDRIPEVRGLADEKRFLSSLSTYNQLKGILHEAIDDADKQTDIENIIAWSTIFEDKAIFKTKLNEISWLNAGMINSLANIRYRGWGQFSHKLLNELTLSTGRTVFEELLISSRNLMQILTDEVLKQKIAELNAHELKASGIYAAIDDAYTSPSNKKALRQVLSVIDDITNAAGQAPNWLYIETADGDGVPGKRTNSRQRKIQEIYANAAQELITGSVRGELEDKIASRADFTDRLVLYFMQGGRDIYTGEPLNIDNLSSYDIDHILPQSLIKDNSLDNRVLVHPLVNREKDTIFASTRFAKQMNGMWRQWHAAGLISSRKLRNLQMRPDEIDKYASGFVARQLVETRQIIKLTEQIVADQYPDTKIIAVKAGLSSQLRKELDFPKNREVNHYHHAFDAFLAARIGTYLLKRYPNLEPFFTYGKFKKTEVKKLKSFNFIRDMTHAKDKIVAKETGEIVWDNASDINELDRIYNFKRMLITHEVRFETASLFKQTLYAAKNSKNRGGSRQLIPKKKGYLVDIYGGYTQETGSYLSVVRLTKKAMYAVVKVSTRDAAKLAVAKSISEQKENETLKKIIDGKLSKTSKKGKTTHQLFEIVLPRVGQKTLFKNSKYNQFLVNSDTYMHNYQELWMPREYQRMWKDILLSNHGDAQLEGQLDQIFKFIVSQVNSYFNLYDINQFRKKIADATDKFAKLPTHDTDNARGKIATIGQLLIGLQANAMRSDLRNLDIKTPFGLLQIGTGITLDLDTSIIYQSPTGLFEREVPLTDL

SEQ ID NO: 273 - protein, 1366 aa, Lactobacillus casei
  REGION 1..1366: note = Lactobacillus casei UCD174
MTKLGKPYGIGVDIGSNSIGFAAVDENSHLIRLKGKTVIGARLFEEGKAAAYRRASRTTRRRLSRNRWRLSFLRDFFESHITPTDPNFFMRQKYSEISPKDKARYKYEKRLFNDRTDAEFYQQYPTMYHLRTRLLTDPSKADVREIYFAIHHILKSRGHFLTPGYAKDFNTNKVALNEIFPALQDAYAQVYPDLDITFDENKVNEFKTVLLNEKATPSDTQRALVNLLLAKEGDRDILKQQKQVLTEFAKAVVGLKTKLNVALGTEVDSSEATAWNFSLGQLDDKWAGIESAMTDEGTEILDQIRDLYRARLLNGIVPAGKTLSQAKVDDYAQHHEDLELFKDYLKQLEDDGTAKAIRQLYDRYIDGDDAKPFVREDFVKALTKEVTAHPNAKSPELLERLAQPDFMLKQRNKANGAIPVQMQQRELDQIIKNQAVYYDWLAAPNPVEKHRQSMTYQLDELLNFRIPYYVGPLVTAKEQKAAQGGVFAWMVRKDPDGNITPYNFDEKVDREASANTFIQRMKTTDTYLIGEDVLPKQSLLYQSYEVLNELNNVRVNDNKLSFDQKQQVLGELFERHNTVTIKQFVDNLLAHGDYDRIPEVRGLADEKRFLSSLSTYNQLKGILHEAIDDADKQTDIENIIAWSTIFEDKAIFKTKLNEISWLNAGMINSLANIRYRGWGQFSHKLLNELTLSTGRTVFEELLISSRNLMQILTDEVLKQKIAELNAHELKASGIYAAIDDAYTSPSNKKALRQVLSVIDDITNAAGQAPNWLYIETADGDGVPGKRTNSRQRKIQEIYANAAQELITGSVRGEFEDKIASRADFTDRLVLYFMQGGRDIYTGEPLNIDNLSSYDIDHILPQSLIKDNSLDNRVLVHPLVNREKDTIFASTRFAKQMNGMWRQWHAAGLISSRKLRNLQMRPDEIDKYASGFVARQLVETRQIIKLTEQIVADQYPDTKIIAVKAGLSSQLRKELDFPKNREVNHYHHAFDAFLAARIGTYLLKRYPNLEPFFTYGKFKKTEVKKLKSLKSLKSFNFIRDMTHAKDKIVAKETGEIVWDNASDINELDRIYNFKRMLITHEVRFETASLFKQTLYAAKNSKNRGGSRQLIPKKKGYLVDIYGGYTQETGSYLSVVRLTKKAMYAVVKVSTRDAAKLAVAKSISEQKENETLKKIIDGKLSKTSKKGKTTHQLFEIVLPRVGQKTLFKNSKYNQFLVNSDTYMHNYQELWMPREYQRMWKDILLSNHGDAQIEGQLDQIFKFIVSQVNSYFNLYDINQFRKKIADATDKFAKLPTHDTDNARGKIATIGQLLIGLQANAMRSDLRNLDIKTPFGLLQIGTGITLDLDTSIIYQSPTGLFEREVPLTDL

SEQ ID NO: 274 - protein, 1389 aa, Lactobacillus casei
MIIRTYELKTITTIAILKMFQLLTGGLSMTKLGKPYGIGVDIGSNSIGFAAVDENSHLIRLKGKTVIGARLFEEGKAAADRRASRTTRRRLSRNRWRLSFLRDFFESHITPTGPNFFMRQKYSEISPKDKARYKYEKRLFNDRTDAEFYQQYPTMYHLRNRLLTDPSKADVREIYFAIHHILKSRGHFLTSGYAKDFNTNKVALNEIFPALQDAYAQVYPDLDITFDENKVNEFKTVLLNEKATPSDTQRALVNLLLAEDGDKDILKQQKQVLTEFAKAVVGLKTKLNVALGTEVDSSEATVWNFSLGQLDDKWAGIESAMTDEGTEILDQIRDLYRARLLNGIVPAGKTLSQAKVDDYAQHHEDLELFKDYLKQLEDDGTAKAIRQLYDRYIDGDDAKPFVREDFVKALTKEVTAHPNAKSPELLERLAQPDFMLKQRNKANGAIPVQMQQRELDQIIKNQSVYYDWLAAPNPVEKHRKSMPYQLDELLNFRIPYYVGPLVTAKEQKAAQGGVFAWMVRKDPDGNITPYNFDEKVDREASANTFIQRMKTTDTYLIGEDVLPKQSLLYQRYEVLNELNNVRVNNEKLSIEQKQQVIRELFERHNSVTIKQFAENLRAHGDYAHIPEIRGLADEKRFLSSLSTYRQLKSLLPDAIDDPAKQADIENIIAWSTVFEDAAIFKTKLKEINWLDSQTITKLSNIRYRGWGQFSHKFLNGLTLGNGHTIIQELFLSNNNLMQILTDETLQKKMTELNADKLKAANINDAIDDAYTSPSNKKALRQVLRVIEDIKRAADGQDPSWLYVETADGGGTPGKRTRARQHQLQEIYANAAHELIDSAVRGELEDKIADKADFNDRLVLYFMQGGRDIYTGTPLNIDQLSSYDIDHILPQSLIKDNSLDNRVLVHAIINREKNATFASTIYAQKMNATWRQWHEAGLISGRKLRNLQMRPDQIDKYASGFVARQLVETRQIIKLTEQIVAAQYPETKIIAVKAGLSHQLREELEFPKNRDVNHYHHAFDAFLAARIGTYLLKRFPNLQAFFTYGKFKKADVKKLRGFNFIRDITHAEDKIVVKDTGEVIWDKKRDVDELDRIYNFKRMLITHEVHFEKADLFKQTVYGAKDSKEAGGKKQLISKKKGYPVDIYGGYTQETGSYLSVVRLTKKAMYAVVKVSTRDAAKLAVAKSISEQKENETLNDIIDEKLSKISKNGKITHELFEVVLPRVGQKTLFKNSKYNLFLVNSDTYMHNYQELWMPREYQKMWKDISLSKYGDAQTEDQLDQIFGFIVSQVNSYFNLYDINQFRKKLNDAADKFATLPMRDTDDMQGKIATIGQLLIGLQANAARSDLRNLDIKTPLGLLQIPNGISLDSDTSVVYQSPTGLLEREVHLSDL

SEQ ID NO: 275 - protein, 1354 aa, Lactobacillus coryniformis
  REGION 1..1354: note = Lactobacillus coryniformis subsp. coryniformis KCTC 3167
MTLHYNVGLDIGTNSVGYTIVDDNGKILQVKGKNGYGVRVFKEGATAAERRIFRTTHRRLKRRKWRLRLLQDFFEPYILPQDDGFFIRRKESNLVLNDRDEDTASLFNDRSDRDFYQAYPTIYHLRQALMTEKRQFDVREIYLAMHHIIKYRGHFLLNGTVNNFTNNKIDLHSDFEELNALLLNVIPELKFQIDLDHSTMFQTTLLNTTISRSGRQRDLVKSFYNGSDDKQLAKQQKSVATELLKAILGLKAKFHKLFNLDLLETTEWEFSFDAEDIDDKLAKLEPLMTENQQQVMDILQRIFAAITLNGIVPEGKTLSASKVDSYQKHKQDLKLLKAIAQHSDKKTATVLQTAYNEYINGIASKPLKQEDFYKRLTNAVKKSSDPQVADMLALIDQEKFLPKQRTKENGAIPHQLHQLELERIIDNQKDYYPWLAELNPNQARQKVAKYKLSELVAFRVPYYVGPLIEPEVQQATSNAHFAWMARKEAGPITPWNFDQKVDRNVSAERFIKRMTTKDTYLLAEDVLPLHSLLYQRFIVLNELNNVRVNGQKLTKKQKQAVYQDLFKRQPHVTKKQFKSYLVQTGEFAESSKIEGLANETSFNSGLTTENELRKIFGAQLDEARYQVDFEQIIEWATLFEDAKILRTKLAEITWLTTEQIEKLAGIRYRGWGRFSRKLLAGLRDQNGQQIIDLLWDTPNNFMVIVSQAAFSEAITKENEKLIDRRGAQDVITDLYTSPQNKKALRQVLAIVADVQKAMGGVPPQRIFIEFAREDEKNPRRSVERSRQLEKLYQTISNEFLINSEVRQELKEAVDQKVNFKDRLFLYFLQGGVDLYSGKRINIDQLSHYDIDHILPQSFIKDDSLDNRVLVSQKLNRSKSDSVPLSEFANYKFGPAMQAKWLQLKEAGLLSKRKYDNLTLDPTKLSKFAPLGFVNRQLVETRQVIKLAANLLASEETKVVTIKANMTHQVRKELDFPKNRNVNNYHHAFDAYLTAFVGIFLSKRYPKLKPYFTYGDFQKGNKLPDLKNFNFLYELKNKDRSIDSNTGEIIWDKQRDLAYMNKIYNFKKVTVVHEVLTKSGALYNQTLYKASEDKASGRGTKQLIRKKDNMPTELYGGYTGSTSAFMSIVRLWKKDKPYYKVVGIPTRMAAKLANQAQLLDYLTKKFTTRKLVKKTGDYKTTVERFELVVPKVGFNQLVIDGGQPFMLGSATYQYNARELFISKEAVKALNKQLSTHVDLVQVFDEILVQVNRWFPLYDTNGFREKLSHGRDRFMKLNDSFEEKSDTQIDVLNRILIGFHANAARTNLKILGLGTDLGFMTQQAGIRLTEKAILVHQSPSGLFERKVALRDLKGLR

SEQ ID NO: 276 - protein, 1119 aa, Lactobacillus coryniformis
  REGION 1..1119: note = Lactobacillus coryniformis subsp. torquens KCTC 3535
MGYRIGLDVGITSTGYAVLKTDKNGLPYKILTLDSVIYPRAENPQTGASLAEPRRIKRGLRRRTRRTKFRKQRTQQLFIHSGLLSKPEIEQILATPQAKYSVYELRVAGLDRRLTNSELFRVLYFFIGHRGFKSNRKAELNPENEADKKQMGQLLNSIEEIRKAIAEKGYRTVGELYLKDPKYNDHKRNKGYIDGYLSTPNRQMLVDEIKQILDKQRELGNEKLTDEFYATYLLGDENRAGIFQAQRDFDEGPGAGPYAGDQIKKMVGKDIFEPTEDRAAKATYTFQYFNLLQKMTSLNYQNTTGDTWHTLNGLDRQAIIDAVFAKAEKPTKTYKPTDFGELRKLLKLPDDARFNLVNYGSLQTQKEIETVEKKTRFVDFKAYHDLVKVLPEEMWQSRQLLDHIGTALTLYSSDKRRRRYFAEELNLPAELIEKLLPLNFSKFGHLSIKSMQNIIPYLEMGQVYSEATTNTGYDFRKKQISKDTIREEITNPVVRRAVTKTIKIVEQIIRRYGKPDGINIELARELGRNFKERGDIQKRQDKNRQTNDKIAAELTELGIPVNGQNIIRYKLHKEQNGVDPYTGDQIPFERAFSEGYEVDHIIPYSISWDDSYTNKVLTSAKCNREKGNRIPMVYLANNEQRLNALTNIADNIIRNSRKRQKLLKQKLSDEELKDWKQRNINDTRFITRVLYNYFRQAIEFNPELEKKQRVLPLNGEVTSKIRSRWGFLKVREDGDLHHAIDATVIAAITPKFIQQVTKYSQHQEVKNNQALWHDAEIKDAEYAAEAQRMDADLFNKIFNGFPLPWPEFLDELLARISDNPVEMMKSRSWNTYTPIEIAKLKPVFVVRLANHKISGPAHLDTIRSAKLFDEKGIVLSRVSITKLKINKKGQVATGDGIYDPENSNNGDKVVYSAIRQALEAHNGSGELAFPDGYLEYVDHGTKKLVRKVRVAKKVSLPVRLKNKAAADNGSMVRIDVFNTGKKFVFVPIYIKDTVEQVLPNKAIARGKSLWYQITESDQFCFSLYPGDMVHIESKTGIKPKYSNKENNTSVVPIKNFYGYFDGADIATASILVRAHDSSYTARSIGIAGLLKFEKYQVDYFGRYHKVHEKKRQLFVKRDE

SEQ ID NO: 277 - protein, 1368 aa, Lactobacillus curvatus
  REGION 1..1368: note = Lactobacillus curvatus CRL 705
MSRPYNIGLDIGTSSIGWSVVDDQSKLVSVRGKYGYGVRLYDEGQTAAERRSFRTTRRRLKRRKWRLGLLREIFEPYITPIDDTFFLRQKQSNLSPKDQRKLYTQTSLFNDRTDRAFYDDYPTIYHLRYRLMTEKRQFDIREIYLAMHHIVKYRGHFLNEAPVSSFKSSEINLVAHFDRLNTIFADLFSESGFQLETDKLAEVKALLLDNQQSASNRQRQALSLIYTPSTNKAVEKQNKAIATELLKAILGLKAKFNVLTGIEAEDVKAWTLTFNAENFDEEMVKLESSLDDNAHQIIESLQELYSGVLLAGIVPENQSLSQAMITKYDDHQKHLKMLKAVREALAPGDRQRLKQAYDQYVDGQENTKAYSKEDFYGDITKALKNNPDHPIVSEIKKLIELDQFMPKQRTKDNGAIPHQLHQQELDRIIENQQQYYPWLAELNPNSKRQTVAKYKLDELVAFRVPYYVGPLITAEQQRQSSDAKFAWLIRKAEGRITPWNFDDKVDRQASANEFIKRMTTTDTYLLAEDVLPKQSLIYQRFEVLNELNGLKIDDQPITTELKQAIFTDLFMQKISVTVKNIQDYLVSEKRYASRPAITGLSDENKFNSRLSTYHDLKMIVGDAVDDVDKQADLEKCIEWSTIFEDGKIYSAKLNEIDWLTDQQRVQLAAKRYRGWGRLSAKLLTQIVNANGQRIMDLLWDTTDNFMRIVHSEDFDKLITEANQMMLAENDVQDVINDLYTSPQNKKALRQILLVVNDIQKAMKGQAPERILIEFAREDEVNSRLSVQRKRQVEQVYQNISNELLNNTEIRNELKDLSNSALSNTRLFLYFMQGGRDMYTGDSLNIDRLSTYDIDHILPQSFIKDNSLDNRVLVSQKMNRSKADQVPTDFTSVELGQKMQIQWEQMLRAGLITKKKYDNLTLNPDHISKYAMKGFINRQLVETRQVIKLATNLLMEQYGEDNIELITVKSGLTHQMRTEFDFPKNRNLNNHHHAFDAYLTAFVGLYLLKRYPKLKPYFVYGEYQKASQQDKWRNFNFLNGLKKDELVDENTEAVIWDKESGLAYLNKIYQFKKILVTRGVHENSGALFNQTLYAAKDDKASGQGGKQLIPAKQDRSTALYGGYSGKTVAYMCIVRIKNKKGDLYKVCGVETSWLAQLKQLTDEDSQKAFLEQKISPQFTKVKKQKGNIIEAVEEFEVIAPHILINQRFFDNGQELTLGSATYKHNEQELILDKTAVKLLNGALPLTQSEELAEQVYDEILDQVMHYFPLYDTNQFRAKLSTGKAAFMKLPWKSQWDGNKMVQVGQQVILDRILIGLHANAAMSDLKVLKMTTPFGMIQQSTGITLSADTQIIYQSPTGLFERRVALRDL

SEQ ID NO: 278 - protein, 1126 aa, Lactobacillus farciminis
  REGION 1..1126: note = Lactobacillus farciminis KCTC 3681
MADRISLGLDIGVASVGFSVLDIDKGKVIELGARLFSATVAAGNQDRRDMRGARRLLNRNKQRRQDTGKLFKKFGLIDDFDKGSFYDNFNQNLNPYELRVKGLTEQLTKEELAESLYQIVKHRGISYALKDADVDEGGTDYSVSLKINSQELAEKTPAQIQLQRLNDYGKVRGQVVIGDDPDNQKVLLNVFPTSAYEKEAKQIIATQQQFYPESLTDKFTEEYCQILTRKRDYFVGPGNEKSRTDYGIYKTDGRTLDNLFEELIGHDKIYPEELRASAASYTAQLFNVLNDLNNLRILNYEDGKLTKEDKEKIIAEIKNNTTTINMLNVIKKVAGCSKDDIKGFRVNEKDKPEISSMPVYRKIHKDLLKAGVDISDWPVEFIDELSFILTLNTENGEIRKQLNNRLAPKFDFLNADLIQLIIDNKDSFEIKTNNKWHRFSVKTMNKLIPEMMERPVEQMTLLNEMGLVKKDKKRFENNKYLPYKEIAKDIFNPVASKSVREALKIVNAVLKKYGHIDYLVVEMPRDKNLKEEQDNIKEFQNKNKKAKDAAFEAFVKSVGSEQRVKEALSKNRKLQMKMRLWYQQQEIDPYNGKTIDATDLINNPDKFEIDHIIPQSISFYDSINNKTLCFASMNQVKGQKTPYEFMLEGHGQSYDKFKATVMANKNFGKAKRANYLFEENVSDIETRKRFLSRNLVDTRYSSRVVLNSLQDFFREKSADTKVTVIRGKFTSNMRKHWHIDKTRETFHHHAIDASIIAATPFLRMWKKGGTIFPVKVGEESIDIETGEILDDKNFDKAMYEEPYSGFVSEIMNADDRIKFSHQVDKKMNRKVSDATIYSTRTGKLAKDKKDAEYIVAKVKDIYSVDGFKKFKKVYDKDKTKFLLYKYDPRTFSKLERIISDCPDKVEKVQTNGKVKAVDISPFEMYRRDHGMIKKYSKKGNGPAIKQLKYLDKKLGSHIDITPANANGKHVILQSLKPWRTDVYLNHETGEYEIMGIKYSDLKFNKNEGYGIKKDKYLEIKKVEEVSEKSEFMFSLYRKDRVKVQDMKTGESVELLFWSRNFSNKKYAELKPISQAENDKKLPVYGKGRLIKRLIPKNCKIWKVNTTILGDPYYLEKESDSPKDILD

SEQ ID NO: 279 - protein, 1356 aa, Lactobacillus farciminis
  REGION 1..1356: note = Lactobacillus farciminis KCTC 3681
MTKKEQPYNIGLDIGTSSVGWAVTNDNYDLLNIKKKNLWGVRLFEEAQTAKETRLNRSTRRRYRRRKNRINWLNEIFSEELAKTDPSFLIRLQNSWVSKKDPDRKRDKYNLFIDGPYTDKEYYREFPTIFHLRKELILNKDKADIRLIYLALHNILKYRGNFTYEHQKFNISNLNNNLSKELIELNQQLIKYDISFPDDCDWNHISDILIGRGNATQKSSNILKDFTLDKETKKLLKEVINLILGNVAHLNTIFKTSLTKDEEKLNFSGKDIESKLDDLDSILDDDQFTVLDAANRIYSTITLNEILNGESYFSMAKVNQYENHAIDLCKLRDMWHTTKNEEAVEQSRQAYDDYINKPKYGTKELYTSLKKFLKVALPTNLAKEAEEKISKGTYLVKPRNSENGVVPYQLNKIEMEKIIDNQSQYYPFLKENKEKLLSILSFRIPYYVGPLQSAEKNPFAWMERKSNGHARPWNFDEIVDREKSSNKFIRRMTVTDSYLVGEPVLPKNSLIYQRYEVLNELNNIRITENLKTNPIGSRLTVETKQRIYNELFKKYKKVTVKKLTKWLIAQGYYKNPILIGLSQKDEFNSTLTTYLDMKKIFGSSFMEDNKNYDQIEELIEWLTIFEDKQILNEKLHSSKYSYTPDQIKKISNMRYKGWGRLSKKILMDITTETNTPQLLQLSNYSILDLMWATNNNFISIMSNDKYDFKNYIENHNLNKNEDQNISDLVNDIHVSPALKRGITQSIKIVQEIVKFMGHAPKHIFIEVTRETKKSEITTSREKRIKRLQSKLLNKANDFKPQLREYLVPNKKIQEELKKHKNDLSSERIMLYFLQNGKSLYSEESLNINKLSDYQVDHILPRTYIPDDSLENKALVLAKENQRKADDLLLNSNVIDRNLERWTYMLNNNMIGLKKFKNLTRRVITDKDKLGFIHRQLVQTSQMVKGVANILDNMYKNQGTTCIQARANLSTAFRKALSGQDDTYHFKHPELVKNRNVNDFHHAQDAYLASFLGTYRLRRFPTNEMLLMNGEYNKFYGQVKELYSKKKKLPDSRKNGFIISPLVNGTTQYDRNTGEIIWNVGFRDKILKIFNYHQCNVTRKTEIKTGQFYDQTIYSPKNPKYKKLIAQKKDMDPNIYGGFSGDNKSSITIVKIDNNKIKPVAIPIRLINDLKDKKTLQNWLEENVKHKKSIQIIKNNVPIGQIIYSKKVGLLSLNSDREVANRQQLILPPEHSALLRLLQIPDEDLDQILAFYDKNILVEILQELITKMKKFYPFYKGEREFLIANIENFNQATTSEKVNSLEELITLLHANSTSAHLIFNNIEKKAFGRKTHGLTLNNTDFIYQSVTGLYETRIHIE

SEQ ID NO: 280 - protein, 1313 aa, Lactobacillus fermentum
  REGION 1..1313: note = Lactobacillus fermentum 28-3-CHN
MHYLDEIFAPHLQEVDENFLRRLKQSNIHPEDPAKNQAFIGKLLFPDLLKKNERGYPTLIKMRDELPVEQRAHYPVTNIYKLREAMINEDRQFDLREVYLAVHHIMKYRGHFLNNASVDKFKVGRIDFYKSFNVLNEAYEELQNGEGSFTIEPSKVEKIGQLLLDTKMRKLNRQKAVAKLLEVKVADKEETKRNKQIATAMSKLVLGYKADFATVAMANGNEWKIDLSSETSEDEIEKFREELSDAQNDILTEITSLFSQIMLNEIVPNGMSISESMMDRYWTHERQLAEVKEYLATQPASARKEFDQVYNKYIGQAPKERGFDLEKGLKKILSKKENWKEIDELLKAGDFLPKQRTSANGVIPHQMHQQELDRIIEKQAKYYPWLATENPATGERDRHQAKYELDQLVSFRIPYYVGPLVTPEVQKATSGAKFAWAKRKEDGEITPWNLWDKIDRAESAEAFIKRMTVKDTYLLNEDVLPANSLLYQKYNVLNELNNVRVNGRRLSVGIKQDIYTELFKKKKTVKVSDVASLVMAKTRGVNKPSVEGLSDPKKFNSNLATYLDLKSIVGDKVDDNRYQTDLENIIEWRSVFEDGEIFADKLTEVEWLTDQQRSALVKKRYKGWGRLSKKLLTGIVDENGQRIIDLMWNTDQNFMQIVNQPVFKEQIDQLNQKAITNDGMTLREWVESVLDGAYTSPQNKKAIWQVVRVVEDIVKAVGNAPKSISIEFARNEGNKGEITRSRRTQLQKLFEDQAHELVKDTSLTEELEKAPDLSDRYYLYFTQGGKDMYTGDPINFDEISTKYDIDHILPQSFVKDDSLDNRVLVSRAENNKKSDRVPAKLYAAKMKPYWNQLLKQGLITQRKFENLTMDVDQNIKYRSLGFVKRQLVETRQVIKLTANILGSMYQEAGTDIIETRAGLTKQLREEFDLPKVREVNDYHHAVDAYLTTFAGQYLNRRYPKLRSFFVYGEYMKFKHGSDLKLRNFNFFHELMEGDKSQGKVVDQQTGELITTRDEVAKSFDRLLNMKYMLVSKEVHDRSDQLYGATIVTAKESGKLTSPIEIKKKRPVDLYGAYTNGTSAFMTIIKFTGNKPKYKVIGVPTTSAVGLKRVGKPGSESYNQELHRIIKSNPKVKKDFEIVVPHVSYSQLIVDDDCKFTLASDTYQHPATQLVLSKESMEIIADDFKFVKENTATADEQLVRVFDEIVNQMNHYFTIFDQRSNRQKVTKARDKFVSLPTESEYEGAKKTQVGKTEVITNLLMGLHANSAQGDLKVLGLSTFGFFQSSGGLNLSEDAMIVYQSPTGLFERRICLKDI

SEQ ID NO: 281 - protein, 1381 aa, Lactobacillus fermentum
  REGION 1..1381: note = Lactobacillus fermentum ATCC 14931
MDYVKEYHIGLDIGTSSIGWAVTDSQFKLMRIKGKTAIGVRLFEEGKTAAERRTFRTTRRRLKRRKWRLHYLDKIFAPHLQEVDENFLRRLKQSNIHPEDPAKNQAFIGKLLFPDLLKKNERGYPTLIKMRDELPVEQRAHYPVTNIYKLREAMINEDRQFDLREVYLAVHHIVKYRGHFLNNASVDKFKVGRIDFDKSFNVLNEAYEELQNGEGSFTIEPSKVEKIGQLLLDTKMRKLDRQKAVAKLLEVKVADKEETKRNKQIATAMSKLVLGYKADFATVAMANGNEWKIDLSSETSEDEIEKFREELSDAQNDILTEITSLFSQIMLNAIVPNGMSISESMMDRYWTHERQLAEVKEYLATQPASARKEFDQVYNKYIGQVPKEKGFDLEKGLKKILSKKENWKEIDELLKAGDFLPKQRTSANGVIPHQMHQQELDRIIEKQAKYYPWLATENPATGERDRHQAKYELDQLVSFRIPYYVGPLVTPEVQKATSGAKFAWAKRKEDGEITPWNLWDKIDRAESAEAFIKRMTVKDTYLLNEDVLPANSLLYQKYNVLNELNNVRVNGRRLSVGIKQDIYTELFKKKKTVKAGDVASLVMAKTRGVNKPSVEGLSDPKKFNSNLATYLDLKSIMGDKVDDNRYQMDLENIIEWRSVFEDGEIFADKLTEVEWLTDEQRSALVKKRYKGWGRLSKKLLTGIVDENGQRIIDLMWNTDQNFMQIVNQPVFKEQIDQLNQKAITNDGMTLRERVESVLDDAYTSPQNKKAIWQVVRVVEDIVKAVGNAPKSISIEFARNEGNKGEITRSRRTQLQKLFEDQAHELVKDTSLTEELEKAPDLSDRYYFYFTQGGKDMYTGDPINFDEISTKYDIDHILPQSFVKDDSLDNRVLVSRAENNKKSDRVPAKLYAAKMKPYWNQLLKQGLITQRKFENLTMDVDQNIKYRSLGFVKRQLVETRQVIKLTANILGSMYQEAGTDIIETRAGLTKQLREEFDLPKVREVNDYHHAVDAYLTTFAGQYLNRRYPKLRSFFVYGEYMKFKHGSDLKLRNFNFFHELMEGDKSQGKVVDQQTGELITTRDEVAKSFDRLLNMKYMLVSKEVHDRSDQLYGATIVTAKESGKLTSPIEIKKNRPVDLYGAYTNGTSAFMTIIKFTGNKPKYKVIGVPTTSAVGLKRVGKPGSESYNQELHRIIKSNPKVKKDFEIVVPHVSYSQLIVDGDCKFTLASDTYQHPATQLVLSKESMEIIADDFKFVKENPATADEQLVRVFDEIVNQMNHYFTIFDQRSNRQKVTKARDKFVSLPTESEYEGAKKTQVGKTEVITNLLMGLHANAAQGDLKVLGLSTFGFFQSSGGLNLSEDAMIVYQSPTGLFERRICLKDI

SEQ ID NO: 282 - protein, 1327 aa, Lactobacillus florum
  REGION 1..1327: note = Lactobacillus florum 2F
MTEQQQPYNIGLDIGTSSIGWAVTDQNDKLLHIRGHNGIGVRLFKEGESAAERRGFRTTRRRLSRRRWRLRFLDRIFDAELAKVDPNFLARLKQSNISPLDPNKQMFGNILFDDPQFDDQKFHQQYPTIYHLRSALAQPDAPQADVRLIYLALHHMIKFRGHFLNGAAVEKFHGGQLHLESEFQELNQIFSNQQRDHVQLQTSSLDEVATILKDNQRTPSDRQRELSARLFVPVDKTIDKENKKLATELLKAVLGLKAKFDVILGVEATDPQAFKLQFSSDDFDDKIAELASELTDEANEILTVLQRLYFSLNLADILTNRQTKQVADSISTAMINRYDDHKHHLKMLKELEAQVTQEQRDGLKKAYDEYIDGDKPTIDTFYTNIKKNLDDSELANQIKSLIDLQAFMPKQRSKENGSIPHQLHQRELDQLIEVQGKYYPWLLAAKDKLDALIAFRVPYYVGPMIDPNQSDDPQNTKFAWMVRKEAGEITPWNFEEKVDKTSSATNFIKRMTTTDTYLLGEPVLPKNSLLYQQFTVLNELNKLKVNGKALTVDQKKYLYEHVCKKQRRVTLKKLSDCLMARGDFPMGAIFTGTTDQKNMNNTLKTYQDFQEIFGDEIDNPDRQVDFEKMIEWSAIFEDREIFKLKLAELNWLTSEQLERVSKKRYQGWGRLSQKLLTHIVNENGERIIDQLWNTNQNFMEIMGQDSVKQAIQEHNGANVAQTGINETIDELYTSPQNKKAIRQILLVVDDIKKAVGYAPANIMMEFAREDRDDHRLIASRARQLEKTYQEISKNWFDNESVTQELKDQIKNKTKFTDRLYLYFIQGGIDLYTGHPLNIDQLSSYDIDHILPQSFLLDNSLNNRVLTSQAENRVHKEDRLPGETVANKMRPTWKMMREQGLMTQRKYNNLTLKPDQISKFNNRGQFINRQLVETRQVIKLAADIMSQKYQADQTKVVTVKANLTHHMREKFNFYKSRNVNDYHHAFDAYLTLFVGNWLLKEYPKLQPYFVYGDFAKTGTNNLKSFNFLYRFERDHKLNDKGAIDTDKDQQLGYMKRIYRFKKMLVTKQLETNEGALYGQTLYPAPKNDKKTRNLINSKKNRPSDIYGGYSNENGSFLTLVKLKKGSKYDYRLVAVPVSKISEIKESELATIEKAIAPQFLKSSGKYRDFQVVLSKILINQKVIDDGMIFTIGSKSYKHNAKQVVLSDNSIQIVSTLSRISDKEKLITVFDEIVDITSKYLPWYKVNDVEKTKMLFRQMQDIDEMKKIIDNSLIGLHCNASITDLGKVGLSKYWGRFVLTAGISLTVDAQLIYQSPTGLFEHRVKVSDL

SEQ ID NO: 283 - protein, 1391 aa, Lactobacillus gasseri
  REGION 1..1391: note = Lactobacillus gasseri JV-V03
MTKIKNEYIVGLDVGTNSCGWVAMDFQNTILRMHGKTAIGSHLFDAGNSAADRRAFRTTRRRIKRRKWRLKLLEEIFDPYMTEVDPYFFARLKESGLSPLDKRKNVSSIVFPTALEDKKFYCNYPTIYHLRYDLMSEDKKFDLREIYLAIHHIVKYRGNFLYNTPVKDFEASKIDVKDSLEKLNELYERLDSEFTVELDSSNALEIEKIIRDKKVFKINKVKSIHQLLSLKTENKERTKLIKDVSKQIINAILGYKTKFETILLKNISKDEADDWEFKLTDVDADNKFENLIGDLNENEQEILLEIRNLANAITLSNIVEEGKTLSESMIDKYNKHSDDLELLKQVISDHPDRDKAKKLALAYDLYVNNRHGKLLQAKDVLGSKKTLSKEDFYKEVKKNLDDSKASQEILDTIALDSFMPKQRTNENGVIPYQLHQLELDRIIKNQGKYYPFLKEVNPVSSHLKEAPYKLDELIRFRVPYYVGPLISPNESTKNKQTKKNQNFAWMIRKEQGQITPWNFDQKVDRMASANKFIKRMTTKDTYLLGEDVLPANSLLYQKFTVLNELNNIKINGKRISVPLKEELYNNLFKKNSTVTTNKLKSYLKENYNLINVEIKGLADEKKFNSGLTTYNKLRNLKIFDQQLDDLNYDKDFERIIEWSTIFEDKAIYKDKLKTIKWLSDRQIDKLSKIRMQGWGQLSKKLLSQLTDNNGQTIIEQLWDSQNNFMQIVNQSDFKDAIAVANQNLLVNTSVEDILNEAYTSPANKKAIRQVVKVVDDIVKAASGKVPKQIAIEFTRDADDKAKISQTRANKLRKVYKELSNELASETIRNELERVAKDQKLLKDKYYLYFMQLGRDAYTGEPINIDDLGQYDIDHILPQSFIKDDSLENRVLVKKAVNNGKSDNVPVKLYGNRMAADLGMTIRHMWEKWKDQGLITKTKYNNLIIDPDKINKYESSGFIHRQLVETSQIIKLVSTILQSKYPDTEIIVVKARYNHYLRKHLNLYKSREVNDYHHAIDAYLSAICGNLLYQVYPYLRPFFVYGQYKKFSSDPKKEKIIYDKTRKYNFISQIFENKSNDIISLETKKKVFDKKDIIEKLKHAYNYKYMLVSRETETHDQEMFKMTVYPRLSRDTKKSRNLISKKKDMPTEIYGGYTNNSDAYMVIARINKKKGTEYRVFGVPMRELVNLRKAEKNGRYNAYLKQVLEPEIMYSKNGKKNKTISSFEIVKAKVPYKQVILDGDKKFMLASSTYVQNAKQLTLSQNSMQAITDNCENDTEEEKALEEKALIEAYDEILTNIDKYLPLFDINKFREKLHAGREKFINLSLDVKKDTILQVLNGLHDNAVMPKIKSLGLSTPLGFMQFSSGVPLSENAKLIYQSPTGLFEKRVKISDL

SEQ ID NO: 284 - protein, 1386 aa, Lactobacillus hominis
  REGION 1..1386: note = Lactobacillus hominis CRBIP 24.179
MTKITEDYIVGLDIGTNSCGWVAMDSKNTILRMHGKTAIGSHLFDAGNSAADRRAFRTTRRRIKRRKWRLKLLEEIFDSHLAKVDPYFFARLKESGLSPLDTRKNVSSIIYPTSLEDKKFYVDNPTIYHLRYKLMTEDRKFDLREVYLAIHHIVKYRGNFLYNTPVKAFEASKIDVKGSLKKLNELYEGLDSEFNVELDSNNALEIENIIRDKKIFKINKVKEINQLLSLKTEDKERTKLMKDVSKQIVNAILGYKTKFETILLKDVSKDEADDWEFKLTDVDADNKFENLIGDLNENEQEILLVIRKLANAITLSNIVEEGKTLSESMKDKYKKHSDDLKLLKQVISDHPDRDKAKKLALAYDLYVNNRHGKILQAKDILEKKKTLSKEDFYKEIKKNLDDSKESQEILDAISLDSFMPKQRTNENGVIPYQLHQLELDKIIENQGKYYPFLKEVNPVSSHLKQAPYKLDELIRFRVPYYVGPLISPNESTKNKQTKKNQNFAWMIRKEQGQITPWNFDQKVDRMASANKFIKRMTTIDTYLLGEDVLPANSLLYQKFTVLNELNNVKINGKRISVPLKQELYNNLFKKNSTVTTNKLKSYLKENYKLIKVEIKGLSDEKKFNSGLTTYNKLKNLKIFDQQIDDPNYNKDFERIIEWSTIFEDKAIYKEKLKTIDWLSDRQIDKLSKIRMQGWGQLSKKLLSQLTDNNGQTIIEQLWDSQNNFMQIVNQADFKDAIAVANQNLLVDTSVEDILNEAYTSPANKKAIRQVVKVVDDIVKATSGKVPKQIAIEFTRDADDNAKISQSRANKLRKVYKEMSNELASETIRNELERVAKDQKLLKDKHYLYFMQLGRDAYTGELIDIDNLEQYDIDHVLPQSFIKDDSLENRVLVKKAVNNGKSDNVPVKLYGNRMATDLGMTIRHMWEKWKEQGLITKTKYNNLIIDPDKINKYESSGFIHRQLVETSQIIKLVSTILQSKYPDTEIIVVKARYNHYLRKRLNLYKSREVNDYHHAIDAYLSAICGNLLYQVYPYLRPFFVYGQYKKFSSEPEKEKIIYDKTRRYNFISQIFENKDNDIISRETKKKVFDKKDIIEKLKRAYNYKYMLVSRETETHDQEMFKMTVYPRLSRDTKKSRNLIPKKKDMPTEIYGGYTNNSDAYMIIARINKKKGPEYRVFGVPMRELVNLRKAEKNGHYKAYLKQVLEPEIMYSKNGKKNKTISSFEIVKAKVPYKQVILDGDKKFMLASSTYVQNAKQLTLSQYSMQAITDNCENDTEEEKALVEAYDEILTNIDKYLPLFDINKFREKLHAGREKFVDLPLAEKKETILQVLNGLHDNAVMPKIKSLGLSTPLGFMQFHTGVSLSENAKLIYQSPTGLFEKRLKISDL

SEQ ID NO: 285 - protein, 1369 aa, Lactobacillus iners
  REGION 1..1369: note = Lactobacillus iners LactinV 11V1-d
MNNNYYLGLDLGTNSVGWAVTDDHYNIIKFHGKHMWGMRLFEEAETAKDRRLHRQARRRRQRLVERINLLEELFDKEISKVDQGFFARKKESDLHFEDKTTKSEYALFNDKSYTDRDYYKQYPTIFHLIMDLIENDKKRDIRLVYLACHYLIKHRGHFIFDGKNFTVDNSFENLLDKLITYLKDNDDITLSFPKDQLINIFKNSNLNSTEKSDQLKPFFGRTNLEKGIIKLLSGGKQDLSNMFRDETLKNSNYKNLKFSDNRFDDERDGYAADLGDRIDLLILLKQIYDASILESMMSQARVSIDGHKYISSAKVCAYEKHKSDLKRLKSLIKKYLPSEYNNIFRKITEKDNYVAYSKSNITNNKREKALKYVKYVDFTKYLTKKLKTIKTQDAEDDQEIFEIKGELEKQSFLPKQRTLDNSIIPYQLHLMELKKILDNQSKYYDFLLAKDDQEGITVKDKIISLLTFRLPYYIGPVNPAVHGKFAWVKRLANGKVTPWNYKEKIDIDASHEEFIKTKLSKCSFLIGCDVLPKNSLLYQKYMVLSELNTIKFNGVNISEKLKDDIYQNLFKNIQKVTKKRLQNYIKEHENIIGDVIVTGIDNAFKQGLVSYLKFKKIIGDKVDDDRYQKVLEKIIRDITLYDECAGKKIKKEYKDSDLFTEDELNKIVKLTFNDWGRLSAELLDQLEGEDTVSGETGKIIEFMQKHNYNLMQLMSKKFTFKSKIDEINKSYYQHDKFNYKSMIDSLYVSPATKRILWQSLKVVHEISKIMKHDPEKIFIEMARSKEDHPKRKLSRKADLKQVYKDSKKQIISIIGKDKYQDLSNELDNKDDRDLRWDNLYLYYTQLGRSMYSLKPIDISELMNKNLYDQDHIFPKSKKYDDSIENRVLVEKELNVKKSDIYPISDANIIPQKIKGQVESFWKMLYDHKLIGDKKYARLIRSKAFTDDELAGFIARQLVETRQATKETADLLKRLCPKSRIVYAKAQNASIFRQKFDIPKSRTINDLHHAQDAYLNIVVGNIFDTKFTQDPRNFIKNTKDSRNYNLEKIYDYNVERNNYVAWIAPDGETNGTIANVKCNLSTKDFRVTRPSFYKKGALFNQNLSRKGSNLAPIKEHSPKSNPLKYGGYSGKNNSFFVVVAGKDNKGKDIVKLIPVNTLIYNKMLHCDYKAKQELLTSYVANNFAINNFRIVKDDIKMYSLVKIDGAYYYLVGGTDERIEVKNAMQLLLSKDSIKAVKILEKESKDQFANIKNYKDIDIKLGRTFNEVVSKYTNSVFGKSMLISDKYRKDIFKSVEKSILEFNHLDTIGKADNLLKFVTLMRPSGSAHSLKMVGLIERIRKSNVISNFNEFKLINQSVTGLFENEEDLLKL

SEQ ID NO: 286 - protein, 1391 aa, Lactobacillus jensenii
  REGION 1..1391: note = Lactobacillus jensenii 269-3
MKEIKDYIIGLDIGTNSCGYVVTDKQNNILKLKGKTAIGARLFKEGEAAADRRAFRTTRRRLARRRWRLSLLEEIFDEEMNKVDPSFFRRLKESDYSPKDRRKQFNSIVFESSEADKAFYEKYPTIYHLRNALMHDNQKHDLREIFLAVHHIVKYRGNFLREDSVKAFKAAKFTLQGEDGIGPVDKLNDLLKEIYIEAAPELATDNLSKIEDIIKDKKLYKQDKLKQIANLLPKAVDSKDKAKLNKDIAKQVANALMGYMFRLDTLFSFTDVDVKDYKLKFSDANIDESLDALTSLLTDAQIEFVLELQSIYNTIVLNEIVPDGMSLSESMVKKYDDHKKDLKLYKEYIDSLSDQKKAKQLEAAYALYVNYRKADLLAAKKLFEKKKIGDKKFVDVISNFEVFGKFVSDNLDDSELANKIKARLDLGEFLPKQRTNQNGVIPYQLHQVELTQILEKQGKYYPFLITPNPVESHRNNAPYEISELVSFRVPYYVGPLIDNQSIKDKQNKNKFAWMVRQKQGQITPWNFEEMVDTTESANQFIKRMTRKDTYLLAEDVLPKSSLIYQKFMILDELNRIKIDGKKLTSKLKHDIFEKLFKKQKSINLDNLKNYLLAEGNIPGLIEGLSDGINFNNSFSTYIDYRNIFGDEIDNPNKQADFEKMIEWSTVFEDRKIFKRKLKEITWLTPEQIKQVSSKRYSGWGRLSKKLLTQITDENGVNILQRLWNEPETLTEVLANPVIKRKISEANSLFVQINKVENILDDAYTSPQNKKAIRQVIRVVDDIIAAAHGKKPSQIAIEFARSSQNKAKVPDTRKKQLDKIYNKISSEILDSSIKNELKNLKSNKYLSKDKLFLYFKQMGRDAYTGDKLSLDQLQNYDIDHIFPRSFIKDDSLDNRVLTQKPINAKKSDYGIPALEFGNKYVPDLGITVKEMWKLWQENGLISKSKLINLCTNPKKIGSKRASGFINRQLVETSQVIKLVAIILQAEFPDTEIIEVKALQNTTLRESFHLYKNRSVNDYHHAIDAYLTTIVGNYLYQVYPKLRPYFVYGQFKKFNQEKNIDILKRLKNFNFLRQLIFNTDDNIYISGTKEIVFNKKDIIHKLETAYGYKYMNISRECYQETSSLFNQTLYAHNSSVKNSLIPKKKGLPTEIYGGYSGNKDSFFVLVKIVKKRTNLYRIVGIPTRELAKLNSSNNYNQALNKIVESKLCLKETESFKILIKRLLYGTLIVDNGQKFRIGSFKEKHNVQQLVLQLKSMKYIKFYIDGGQNYFTDVERKKLEKQDRDKCLLYVFDDIMNVVNKRFTLFDMSKYEKDGDSLREKFNCLDFNDKVSILSDLLKAFHANSDRTSITKLKITNLGRHQAGKNGITLTTNAQIIYQSPTGLFERRIKIKDL

SEQ ID NO: 287 - protein, 1395 aa, Lactobacillus jensenii
  REGION 1..1395: note = Lactobacillus jensenii 27-2-CHN
MKEIKDYIIGLDIGTNSCGYVVTDKQNNILKLKGKTAIGARLFKEGQAAADRRSFRTTRRRLARRHWRLGLLEEIFDPEMEKIDPNFFRRLKESDYSPKDSRKQFNAIVFKSIKADKRFYKKYPTIYHLRNALMHDNQKHDLREIFMAVHHIVKYRGNFLREDSVNAFKAAKFSLRGEDGIGPVDKLNDLLKEIYSEYSPELATNNLSKIEDIIKDKNLYKQDKLKQVATLLIKEADSKDKAKLNKDIAKQVANSFMGYMFRLDTLFSLTDVDVKDYKLKFSDANIDESLDDLTSLLTDAQIEFVLELQSIYNTIVLNEIVPDGMSLSESMIKKYDDHKEDLKIFKEYIDSLSDQKKAKKLLSAYNLYVNYRKSDLVEAKNLFKNKKVGDKNFADVISNFEVFGKFVSDNLDDSELANKIKARLDLGEFLPKQRTNQNGVIPYQLHQVELTQILEKQGKYYPFLITPNPVESHRNNAPYEISELVSFRVPYYVGPLIDNQSIKDKQNKNKFAWMVRQKQGQITPWNLEEMVDTTESANQFIKRMTRKDTYLLAEDVLPKSSLVYQKFMILDELNRIKIDGKKLTSELKHDIFEKLFKKQKSINLDNLKNYLLVEGNIPGLIEGLSDGINFNNSFSTYIDYRNIFGDEIDNPNKQADFEKMIEWSTVFEDRKIFKRKLKEITWLTSEQIKQVSSKRYSGWGRLSKKLLTQITDENGVNILQRLWNEPETLTEVLANPVIKRKIVEANSSFTKAKDMKDILVEAYTSPQNKKAIRQVMRVVDDIIAAAHGKKPSQIAIEFAREDQDNPQMTKSRKAQLDQIYAKISDEFLDDAVKNELKNMKDNKPLAKDKVFLYFKQMGRDAYSGEKLSLDNLQDYDIDHIYPQSFIKDDSFDNRVLVQRAYNNGKSDNVPVLLFGNKIAAGLGITIRQMWKKWLELGLISKRKFNNLITDPEKISRNMASGFVNRQLVETSQVIKLVANILQAKLPDTEIIEVKASYNSILRKEFNLYKSREVNDYHHAIDAYLTTIVGNYLYQVYPKLRPYFVYGQFKKFGKAENQEDDPVKKIKKFNFIYQLIWGKDDAICISHTNQQVFSKKDIIDKLTTAYNFKYMNISHAVYTRNNNMFKQTLFPIIERTTAKTKSLIPKKLDRPTDIYGGYSNNNDAYLALVKVDKKRGSEYRVVGIPMRAAAMLKASKNYDEDLRKVIEPMVMFDKNGKAKRGIEGFRVLVGKMPFKQAVLDGNKKFMLTGTVDTPNLKQLVLSQQNMKYILDYIEDVDCRKHKFGDKVQNPDKCLLEVFDEIIEIVDKYFELFDSRDFREKLRNSRNKFIKLEASKKADTILAILKGLQAKSTRATIKELNISDFGRIITSSISPEAQLIYQSPTGLFERRVKVKDL

SEQ ID NO: 288 - protein, 1375 aa, Lactobacillus johnsonii
MTKIKDDYIVGLDIGTDSCGWVAMNSNNDILKLQGKTAIGSRLFEGGKSAAERRLFRTTHRRIKRRRWRLKLLEEFFDPYMAEVDPYFFARLKESGLSPLDKRKTVSSIVFPTSAEDKKFYDDYPTIYHLRYKLMTEDEKFDLREVYLAIHHIIKYRGNFLYNTSVKDFKASKIDVKSSIEKLNELYENLGLDLNVEFNISNTAEIEKVLKDKQIFKRDKVKKIAELFAIKTDNKEQSKRIKDISKQVANAVLGYKTRFDTIALKEISKDELSDWNFKLSDIDADSKFEALMGNLDENEQAILLTIKELFNEVTLNGIVEDGNTLSESMINKYNDHRDDLKLLKEVIENHIDRKKAKELALAYDLYVNNRHGQLLQAKKKLGKIKPRSKEDFYKVVNKNLDDSRASKEIKKKIELDSFMPKQRTNANGVIPYQLQQLELDKIIENQSKYYPFLKEINPVSSHLKEAPYKLDELIRFRVPYYVGPLISPNESTKDIQTKKNQNFAWMIRKEEGRITPWNFDQKVDRIESANKFIKRMTTKDTYLFGEDVLPANSLLYQKFTVLNELNNIRINGKRISVDLKQEIYENLFKKHTTVTVKKLENYLKENHNLVKVEIKGLADEKKFNSGLTTYNRFKNLNIFDNQIDDLKYRNDFEKIIEWSTIFEDKSIYKEKLRSIDWLNEKQINALSNIRLQGWGRLSKKLLAQLHDHNGQTIIEQLWDSQNNFMQIVTQADFKDAIAKANQNLLVATSVEDILNNAYTSPANKKAIRQVIKVVDDIVKAASGKVPKQIAIEFTRDADENPKRSQTRGSKLQKVYKDLSTELASKTIAEELNEAIKDKKLVQDKYYLYFMQLGRDAYTGEPINIDEIQKYDIDHILPQSFIKDDALDNRVLVSRAVNNGKSDNVPVKLFGNEMAANLGMTIRKMWEEWKNIGLISKTKYNNLLTDPDHINKYKSAGFIRRQLVETSQIIKLVSTILQSRYPNTEIITVKAKYNHYLREKFDLYKSREVNDYHHAIDAYLSAICGNLLYQNYPNLRPFFVYGQYKKFSSDPDKEKAIFNKTRKFSFISQLLKNKSENSKEIAKKLKRAYQFKYMLVSRETETRDQEMFKMTVYPRFSHDTVKAPRNLIPKKMGMSPDIYGGYTNNSDAYMVIVRIDKKKGTEYKILGIPTRELVNLKKAEKEDHYKSYLKEILTPRILYNKNGKRDKKITSFEIVKSKIPYKQVIQDGDKKFMLGSSTYVYNAKQLTLSTESMKAITNNFDKDSDENDALIKAYDEILDKVDKYLPLFDINKFREKLHSGREKFIKLSLEDKKDTILKVLEGLHDNAVMTKIPTIGLSTPLGFMQFPNGVILSENAKLIYQSPTGLFKKSVKISDL

SEQ ID NO: 289 - protein, 1382 aa, Lactobacillus mucosae
  REGION 1..1382: note = Lactobacillus mucosae LM1
MDIGTNSIGWTAIDDHFSLLRVKGKNAIGVRTFKEGETAADRRGFRTARRRLSRRRWRLQFLDEFFAPYLAEVDPNFLARLKQSDISAKDPAKNQEYMGKLLFPDQEAASDGNGYPTLIQMRKAMPAEKAADFPVFNIYQLRYALMNEKRKFDLREIYLAVHHIVKYRGNFLNNTSVDKFKADQIDFNKSFETLNDLFRQVQPIAPFQIDLTKVDELGKLLLDTKQKKLDRQKAVAKLLPLIEDGTDKEIVKAHQQTAREISKLILGYKAKVGLILQNNLDQTLDMSTENSDDQLMQIAEELDDYQMELINQLSLLYSQIMLNEIVPNGETVSASMLNRYYKHRCQLKELKDYGAAQDKKTREQLDHLYAEYIGQIPKDSKFDFTKDLKKLMDKSDLGQKIKDEIEAGDYLPKQRTSANGVIPHQMHQQELDQIIENQKEYYPWLAEPNPVEKNIKNAKYKLDQLVSFRVPYYVGPMITLADQQKTSKASFAWAVRKKAGKITPWNFYDMIDREKSANNFIKRMTNKDTYLLSEDVLPASSLLYQKFTVLNELNNIRVNGRKLQPALKQAIYTDLFQKRKTVNLKTLTNFLAIHEPTLTKPKIEGLSNGRSFNSSLGTYIDMSKILGDSLDDLNYRDDIEKIIEWSTVFEDSEIYGVKLQEIQWLTNEQREKLVRKRYQGWGRLSKKLLTGITDENGQRIIDLMWDTSKNFMQIVHQPVFEEQIAELNQQLLQDADKAPLEVVDDILADAYTSPQNKKAIRQVVKVVADVVKAVGNAPASISIEFARNEDRNKELKNSRRHSIEKLYHETAEKLVKQTNLLEELGNVKDLNDRYYLYFTQAGRDMYDGTPINIDEISTHYEIDHILPQSFLKDNSLDNRVLVKKSENAAKSDRVPAKLYGAKMRAFWKQLKESQLISNRKYLNLTTDPEQVDKYQMQGFVHRQLVETRQIIKLAANIFGSLYPDSAVIETRAELTKQLREKFSLYKVRDVNDYHHAVDAYLTAFAGHYLYQRYPKLRPMFVYGDYAKIYADDLKRLRSVNLFHDLEKDQYNSGTAVNPETKEKIVDVDWLSDYVSKIQHFKYMLISKAVYTQHGQLYGATILPVAQVDKISAPIGIKDDKPVDIYGAYTNEVAAYMAIVRVNGKKPKYKVVSVPVRMLQRLKMAEQKGHDQYMQTLHDVLLRNFTSLKKNRKTGLKEAVVKDFDVLVPCVRYNQLVIDGDTKFTLGSATYQHNAKQLVLCNHSLETLANNFEYVRKHPDEADERMIMLYDDILDQVNHYFTLYDKNKFREKLNAGRDKYLKLPTFSQFENNKKTAIGKSEAIINILRGLHANAAITNLKCLGVSTPFGQLQSPSGIELSENAKLVYQSPTGLFSREVLLKDL

SEQ ID NO: 290 - protein, 1362 aa, Lactobacillus paracasei
  REGION 1..1362: note = Lactobacillus paracasei subsp. paracasei 8700:2
MTKLGKPYGIGVDIGSNSIGFAAVDENSHLIRLKGKTVIGARLFEEGKAAAKRRAGRTTRRRLSRNRWRLSFLRDFFESHITPTDPNFFMRQKYSEISPKDKARYKYEKRLFNDRTDAEFYQQYSTMYHLRNRLMTDPSRADVREIYFAIHHILKSRGHFLTPGDAKDFNTNDVALDEIFPALQDAYAQVYPDLGITFDEDKANEFKTILLNEIATSIDTQRALVKLLLAEEDDKDILKQQKQVLTEFAKAVVGLKTKLNLALGTEVDSSEATAWNFSLGQLDDKWAGIESAMTDEGTEILDQIRDLYRARLLNGIVPTGKTLSQAKVDDYTQHHEDLQLFKAYLKQLEDDGTAKAIRQLYDRYIDGDDAAPFLRENFVKALTKDVTAHPNTKSPELLERLAQPDFMLKQRNKANGAIPVQMQQRELDQIIKNQAVYYDWLAAPNPVEKHRKSMPYQLDELLNFRIPYYVGPLVTAKEQKAAQGGVFAWMVRKDPEGNITPYNFDEKVDREASANTFIQRMKTTDTYLIGEDVLPKQSLLYQRYEVLNELNNVRVNNEKLSIEQKQQVIRELFERHNSVTIKQFAENLRAHGDYAHIPEIRGLADEKRFLSSLSTYRQLKSLLPEAIDDPAKQADIENIIAWSTVFEDAAIFKTKLKEISWLGSEAITKLSNIRYRGWGQFSRKFLNGLTLGNGHTIIQELLLSTNNLMQILTDETLQKKMTELNADKLKTANINDAIDNAYTSPSNKKALRQVLRVVDDIKRAADGQDPSWLYVETADGGGTPGKRTRARQHQLQEIYANAAHELIDTAVRGELEDKISDKADFNDRLVLYFMQGGRDIYTGAPLNIDQLSSYDIDHILPQSLIKDNSLDNRVLVHAIINREKNATFASTIYAQKMNATWRQWHEAGLISGRKLRNLQMRPDQIDKYASGFVARQLVETRQIIKLTEQIVAAQYPDTKIIAVKAGLSHQLREELEFPKNRDVNHYHHAFDAFLAARIGTYLLKRFPNLQAFFTYGKFTKADVKKLRGFNFIRDITHAEDKIVAKDTGEVVWDKQRDVDELDRIYNFKRMLITHEVRFETADLFKQTVYGARDSKEAGGSKQLIPKKKGYPVDIYGGYFRENTAYLAVVKVTKKTETIFKVVKIATSQVAALNKARSRSTAEELSVLTELLKPKFSKVGKNGKITDTPFEVVLPRVPREQLFYNAKYGFFMVNSDTMFHNFQEIWVSRSDQKILQQIRKAKIDYPNVDQDLDNLFHNLADQIVKYFDLYSIAGFKEKISQSQNTFNDLAVDDTDQSVGKITVINELLKGAQANGMTGSLKVLKISTPFGFTQDKSGVLTKDSSIIYQSPTGLFERSVRLTDL

SEQ ID NO: 291 - protein, 1382 aa, Lactobacillus pentosus
  REGION 1..1382: note = Lactobacillus pentosus IG1
MKKIVNYNLGLDIGTSSIGYAAIDDQGRPVRHQNKTVMGVRLFKEGKTAESTRIFRGTRRRLSHRHWRLGYLDRIFDNEIAKVDENFLPRLKASKRARSDEKRSFRGSLLFPETGDDAYYQKYPTIYHLRYALITQKKQFDIRLIYLALHHMIKYRGNFLDTTPVSAFNIHDIDLTDQFASLNDCYQLLDMDFEFQFDLNNIEQVQKLLLDETLSKTKRQAAVSKVLVMSTGNKAFDDQQNGIASEFIKALLGGPFDLSKILNLSVADVKSWKLHMTDKDVDDTLNSLVEELDENHKQIVNLLQMIYSQVMMLGLLNGQQSISASMIERYDDHAKHWAALKKLLPALGEQEQSTIIHAYTAYTGHSRTKQLSRAEFYTKVNSILKKHENIAEATGLIELIDRNEFMPKQRDAVNGVIPHQLHQRELQLIIQNQQKYYPFLAAKAYPDADETMIEQLLSFRVPYYAGPLVDRDFINESSDQEQAMQNTKFSWLKRREAGEITPWNFEQKVDVQETANRFIKRLTTKDTYLMTEDVLPKESLIYQRFEVLNELNAIRINDRRLTAENKQLAFQQLFMAGNTKNVSIKKFRNFVFDSLKFPEKVKITGFAGQHNFLAKLSTYHDFKKIFGERVDHTDLQPDFERIVEWCTIFEDRHIYREKLKEIQWLSQSEIDQLVLIRNHGWGRLSKRLLTGIRDSDGRTVMDQLWFGTDNFMRIISQSDFAAAIANENRTQLNQHGLEDVLDSAFMSPQNKKAIRQVLKVVDDIEQTLGCPPKKVMIEFTRSPDKKKQRTVTRLEKVQQAYKAVADQLAGQSIVSELDQYANTHSKLSDTYYLYFMQLGRDLYSGKPIDIDSPMLDDDHILPRAFMKDNSLDNRALTEKPINNTKAAKFPSKVFGQQKEVTDFWKLLRRCGLMSNIKEKHLYLDPDNVDKWTRRGFIHRQLVETSQVIKIVANILNDRYQQSQTEVLEVPARLGTELRECFGWYKVREVNDYHHVFDAYLAAFIGNYLYRRYPKLQPYFVYGNFAELNKAQLKNIKSFNFLYNITDNKRVVKDIETGQTLWDDQIRQQIQHIYEYKYMLTSHEAFTQHKELYGQTIYPRREFKPGTLKAIKQDQPQELYGGYKNLTAAYMCIVKIQARKRRAAEYRVVRVATESLSALQQAKRLGVQAYERCLRQELVRNNEILRTNADPNSAPREFEVLLDRVLCHQMIISDGQKYLLGSHAYKINCMQLVLSNNSMKILSTSIVKLKQMTNEPLVQVYREILDVVNKYFTLYDVNSFRENLNQFFDKFRTLPITNEYESSKSGKKLIHRGQLETLTLILRGLHANSDKVQYGDQSTLLGGFQTKDGIKLSKDSVIQYTSPAGLNVRTVKLRDLEQKEAQK

SEQ ID NO: 292 - protein, 1361 aa, Lactobacillus pentosus
  REGION 1..1361: note = Lactobacillus pentosus KCA1
MNEPYGVGLDIGTNSVGWTVVDMNGRVRKVKGKTALGARLFKEGATAEDRRGFRTTRRRLKRVKWRLRLLREFFDQPISKIDPNFFARRKYSDISPRDPNYNGLAKTLFNDRTDKEFYDDYATIYHLRDKLMTSNRKFDIREIYLAIHHIVKYRGNFLRTGPASQYGSASLHLATSFQKLNDLFAQSEETLNLKLVTDEALLQQIQQILVRTDLSRSEQQRQIWPLMAVLTGASAAEKKRQKNVVVELSKALVGLKAKMNVVTLTEVDAAVVKDWTFTMEESQDKLPEIEEQLSEVGQQIMDEVIQLYASVNLAQLIPAGKRFSQHMVEKYKHHEKNLELLKAYIHSQSDSKRGREIRATYDRYIDGVDSKPVTQEMFYKDLMKYVEADATSNHLAAEIKDEIDSEQFMPKLRTKQNGSIPYQVQQYELDQIISHQKKYYPWLGEENPVAERRGKFPYKLDELVGFRVPYYVGPLITKEDQQATSGAGFAWMVRKADGPITPWNFDQKVDRIASATAFIQRMQTTDTYLIGEDVLPARSLIYQRFMVLNELNNMRVEDRKLAPQQKQRLYNQVFKQHQHVSVKNIQQNLMDAGEYRKTPQITGLADPKGFNSSLSTYHDFKKILLEAIADEHKRADIEKIILWSTTFEDSAIFKQKLEEVAWLTDAQRKQLSGLRYRGWGQLSHKLLTAFKDDKGRSIMDGLWETSDNFMQLRKQPAIETQIKEANQANLTDADIQDTINELYTSPQNKKAIREVMLVLDDIKNAMHGQTPSWIFVEAARGGGVAGRRTQSRSSQIVEAYKGTAKEIVSEKVQHELNEKIKAKADFNTRLVLYFLQNGRDLYTNEAINIDRLSEYDIDHILPQSLVKDDSLDNRVLTSARINREKNDTFASEKFGRKMGAQWRELHRNGLMTQRKLKHLLMRPDEISKHATDFINRQLVETRQVIKLVEELISSEYPAASIVAVKANLTHQFRQTFNFPKLREVNDYHHAFDASLTAFIGMYLLKQYPKLERFFVYGKFAKQPINLTRFNIIRKLAVAEKPIANIETGEILWDKTADIKYFEKLYNYKRLLVTHEVRENYGAMFKQTLFKASYNKSKTLVPKKNHMETSVYGGYSNQETAYLAIVRIPFKSGFKFIVVGIPTRMVAKIKHYQSLGATLNQATHKVIEPKFTKISRKTKQTVISDYEVVLPKVYLDQVVRDQVKGQMYRFSLGSDKEYHNVQELYLPLSIQQAFVGHYDESDDQRSNDLVKVYDAALKQLQRYFPLHLSRNFDQVASQAHQSFEGLKNNVQTSDKQLGKKEVLNSLFVGLHANATRSNLSVLGMSKDFGRIKSNGITLTDQAEIIYQSPTGLFERKVALKDL

SEQ ID NO: 293 - protein, 1358 aa, Lactobacillus pentosus
  REGION 1..1358: note = Lactobacillus pentosus MP-10
MNEPYGVGLDIGTNSVGWTVVDMNGRVRKVKGKTALGARLFKEGATAEDRRGFRTTRRRLKRVKWRLRLLREFFDQPISKIDPNFFARRKYSDISPRDPNYNGLAKTLFNDRTDQEFYHDYPTIYHLRDKLMTSDRKFDIREIYLAIHHIVKYRGNFLRTGPASQYGSASLHLATSFQKLNDLFAQSEESLNFKLVTDEAQLQQIQQILVRTDLSRSEQQRQIWPLMVVLMGATAAEKKRQKDFAKELANALVGLKAKLNVVTLTNVDTTVVKDWTFTLEESQDKLPEIEEQLSEVGQQIMDEVIQLYASVNLAQLIPAGKRFSQHMVEKYNHHEKNLELLKAYIHSQSDSKRGREIRATYDRYIDGVKSKPVTQEMFYKDLMKYVEADATSNHLAAEIKDEIDSEQFMPKLRTKQNGSIPYQVQQYELDQIISHQKKYYPWLGEENPVAERRGKFPYKLDELVGFRVPYYVGPLITKEDQQATSGAGFAWMVRKADGPITPWNFDQKVDRIASATAFIQRMQTTDTYLIGEDVLPARSLIYQRFMVLNELNNMRVEDQKLAPRQKQRLYNQVFKQHQHVSVKNIQQNLMDAGEYRETPKITGLADPKGFNSSLSTYHDFKKILPEAIADEHKRADIEKIILWSTTFEDSAIFKQKLEEVAWLTDAQRKQLSGLRYRGWGQLSHKLLTAFKDDNGRSVMDGLWETSDNFMQLRKQPAIETQIKEANQANLTDADIQDTINELYTSPQNKKAIREVMLVLDDIKNAMHGQTPSWIFIEAARGGGVAGRRTQSRSKQIVEAYKSTAKEIVSEKVQHELNEKIKAKADFNTRLVLYFLQNGRDLYTNEAINIDRLSEYDIDHILPQSLVKDDSLDNRVLTSARINREKNDTFASEKFGRKMGAQWRELHRNGLMTQRKLKHLLMRPDEISKHATDFINRQLVETRQVIKLVEELISSEYPSASIVAVKANLTHQFRQTFNFPKLREVNDYHHAFDASLTAFIGMYLLKQYPKLERFFVYGKFAKQPINLTRFNVIRKLAVAEEPIANIETGEILWDKTADIKCFEKLYNYKRLLVTHEVRENYGAMFDQTIFKATDSRKRLIQKKKGFATETYGGYTGRTLAYLAIVKVVTNKDTQYQVVGIPTTMVTQIQQLEASGLTSKQAVTKAIGAMINENNKKLQSYEVLLPKVRFEQVVRDEVKGHIHRFALGTDTYYHNIQELYLPLTIQRAFLGKRNDTDAQTEQNLLTVFETTLAQVNRYFPLYEMNKFKQILNSAQEKFAALPTKNKTVKNKLVTGKDGVLNNLFIGLHANASLGDLKILGMKIGFGKLQVPGGLKLTDQAEIIYQSPTGLFERKVALKDL

SEQ ID NO: 294 - protein, 1358 aa, Lactobacillus plantarum
MKEPYGVGLDIGTNSVGWTVVDASGHVRKIKGQTGIGVRLFKEGAAAADRRGFRTTRRRLKRVKWRLRLLREFFDQPISKVDINFFARRKYSDVSPRDPNYNGLEKTLFNDRSDQDFYHDYPTIYHLREALMTQHRKFDVREIYLAIHHIVKYRGNFLRNDAATAYRSGTLDLQQHFETLNHLFSQADLELNLNLTTDVALLDSIKQTLVRTDISRSDRQKLIMPLLAVLTGATTAEKKRQKAVVTEFAKALVGNKTKIDVLTLTDIDATEAKDWAFSLEENQDKLPGIEDRFSEVGQQIIDEVIRLYASVNLAQLIPEGKRFSQSMVEKYKRHGEDLKLLKAYIRSQSDAKRGRAIRATYDQYIDGVKSKQVTQEAFQKALGKFVDADVDLNSWAAQIKQAIDSEQFMPKLRTKQNGAIPYQVQQNELDQIISNQKEYYPWLGEENPVIKRRGKFPYKLDELFGFRVPYYVGPLITKEMQAATANAGFAWMVRKADGPITPWNFDDKVDRVASATAFIQRMQTTDTYLIGEEVLPARSLIYQRFMVLNELNNIRVDDGQLTPRQKQRLYNQVFKKHKRVTAKNIQDNLVAAREFPTAPRITGLADPKVFNSSLSTYHDLKQVLPEAMSDVRKQADIEKIILWSTIFEDSTIFKQKLTEISWLTAAQLKQLGQLRYRGWGQLLRKLLTGLKDDNNRSIMDGLWETNANFMQLRSQPAIENQIKSANQANLTTADLQDTINELYTSPQNKKAIREVMVVLADIKDAMHGQTPNWIFVEAARGGGVAGRRTQSRSKQIVAAYQGTAQAIVRDQVQRELKEKIKNKANFNTRLVLYFLQNGRDLYTGDAINIDRLSEYDIDHILPQSLVKDDSLDNRVLTNARINREKNDTFASEKFGKKMGAKWKEMHRMGLMTKRKLDHLLMRPDEISKYATGFINRQLVETRQVIKLVEELINAEYPSTAIVSVKANLTHQFRQTFDFPKIREVNDYHHAFDAALTAFIGTYLLKRYPKLERFFVYGKFAKQPVNLTRFNVIRKLAKTDTPITDIDTGEVLWDKLTDIKYFETLYDYKRLLVTREVSENYGAMFDQTLLKASDNGKRLIRKKQSFDTAIYGGYTGKTLAYMAIVKVSTKKDVQYQVVGVPTTMVTQIEQLEQQGMTNKQAVTKVIEPLIAANNKKMLTYEVLLPKVRFEQVVRDRIKGQTHRFALGTDTYYHNIQELYLPLTLQRAFLGKQNESEVQLNQNLLTVFDATLAQVNRYFPLYEMNKFKKILNSARDQIELLEAKNQFVKNKLVLGKQGILTNMFIGLHANASYGDLKVLGVKIDFGKLQVPGGIKLTGDAEIIYQSPTGLFERKIALKDL

SEQ ID NO: 295 - protein, 1363 aa, Lactobacillus rhamnosus
MTKLNQPYGIGLDIGSNSIGFAVVDANSHLLRLKGETAIGARLFREGQSAADRRGSRTTRRRLSRTRWRLSFLRDFFAPHITKIDPDFFLRQKYSEISPKDKDRFKYEKRLFNDRTDAEFYEDYPSMYHLRLHLMTHTHKADPREIFLAIHHILKSRGHFLTPGAAKDFNTDKVDLEDIFPALTEAYAQVYPDLELTFDLAKADDFKAKLLDEQATPSDTQKALVNLLLSSDGEKEIVKKRKQVLTEFAKAITGLKTKFNLALGTEVDEADASNWQFSMGQLDDKWSNIETSMTDQGTEIFEQIQELYRARLLNGIVPAGMSLSQAKVADYGQHKEDLELFKTYLKKLNDHELAKTIRGLYDRYINGDDAKPFLREDFVKALTKEVTAHPNEVSEQLLNRMGQANFMLKQRTKANGAIPIQLQQRELDQIIANQSKYYDWLAAPNPVEAHRWKMPYQLDELLNFHIPYYVGPLITPKQQAESGENVFAWMVRKDPSGNITPYNFDEKVDREASANTFIQRMKTTDTYLIGEDVLPKQSLLYQKYEVLNELNNVRINNECLGTDQKQRLIREVFERHSSVTIKQVADNLVAHGDFARRPEIRGLADEKRFLSSLSTYHQLKEILHEAIDDPTKLLDIENIITWSTVFEDHTIFETKLAEIEWLDPKKINELSGIRYRGWGQFSRKLLDGLKLGNGHTVIQELMLSNHNLMQILADETLKETMTELNQDKLKTDDIEDVINDAYTSPSNKKALRQVLRVVEDIKHAANGQDPSWLFIETADGTGTAGKRTQSRQKQIQTVYANAAQELIDSAVRGELEDKIADKASFTDRLVLYFMQGGRDIYTGAPLNIDQLSHYDIDHILPQSLIKDDSLDNRVLVNATINREKNNVFASTLFAGKMKATWRKWHEAGLISGRKLRNLMLRPDEIDKFAKGFVARQLVETRQIIKLTEQIAAAQYPNTKIIAVKAGLSHQLREELDFPKNRDVNHYHHAFDAFLAARIGTYLLKRYPKLAPFFTYGEFAKVDVKKFREFNFIGALTHAKKNIIAKDTGEIVWDKERDIRELDRIYNFKRMLITHEVYFETADLFKQTIYAAKDSKERGGSKQLIPKKQGYPTQVYGGYTQESGSYNALVRVAEADTTAYQVIKISAQNASKIASANLKSREKGKQLLNEIVVKQLAKRRKNWKPSANSFKIVIPRFGMGTLFQNAKYGLFMVNSDTYYRNYQELWLSRENQKLLKKLFSIKYEKTQMNHDALQVYKAIIDQVEKFFKLYDINQFRAKLSDAIERFEKLPINTDGNKIGKTETLRQILIGLQANGTRSNVKNLGIKTDLGLLQVGSGIKLDKDTQIVYQSPSGLFKRRIPLADL

SEQ ID NO: 296 - protein, 1361 aa, Lactobacillus rhamnosus
  REGION 1..1361: note = Lactobacillus rhamnosus HN001
MTKLNQPYGIGLDIGSNSIGFAVVDANSHLLRLKGETAIGARLFREGQSAAERRESRTTRRRLSRTRWRLSFLRDFFAPHITKIDPDFFLRQKYSEISPKDKDRFKYEKRLFNDRTDAEFYEDYPSMYHLRLHLMTHTHKADPREIFLAIHHILKSRGHFLTPGAAKDFNTDKVDLEDIFPALTEAYAQVYPDLELTFDLAKADDFKAKLLDEQATPSDTQKALVNLLLSSDGEKEIVKKRKQVLTEFAKAITGLKTKFNLALGTEVDEADASNWQFSMGQLDDKWSNIETSMTDQGTEIFEQIQEHYRARLLNGIVPAGMSLSQAKVADYGQHKEDLELFKTYLKKLNDHELAKTIRGLYDRYINGDDAKPFLREDFVKALTKEVTAHPNEVSEQLLNRMGQANFMLKQRTKANGAIPVQLQQRELDQIIANQSKYYDWLAKPNPVEKHRASKPYQLDELLTFRIPYYVGPLITPKEQAESRENVFAWMIRKDPSGNITPYNFDEKVDCPASANMFIQRMKNTDTYLIGEDVLPKRSLLYQKYEVLNELNNVSIDGRRLGADQKQRLIREVFERHSSVTIKQVAENLVAHGDFAKRPEIRGLADEKRFLSSLSTYHQLKKILHEAIDDPTKEHDIENIITWSTVFEDAAIFKTELAKISWLDSDTIKALSNIRYRGWGQFSRKLLDGLKLGNGHTVIQELMLSNHNLMQILTDETLKTTMAELNQDKLKADDIEDVINDAYTSPSNKKALRQVLRVVEDIKHAANGQDPSWLYIETADGPGTAGKRTQSRQKQIQTVYANAAQELIDSAVRGELEDKIADKASFTDRLVLYFMQGGRDIYTGAPLNIDQLSHYDIDHILPQSLIKDDSLDNRVLVNATINREKNNVFASTLFASKMAATWRKWHEAGLISGRKLRNLMLRPDEIDKFAHGFVARQLVETRQIIKLTEQIAAAQYPNTKIIAVKAGLSHQLREELDFPKNRDVNHYHHAFDAFLAARIGTYLLKRYPKLAPFFTYGEFAKVDVKKFREFNFIGALTHAKKNIVAKDTGEIVWDKERDIQELDRIYNFKRMLITHEVYFETADLFKQTIYAAKDSKERGGSKQLIPKKQGYPTQVYGGYTRENTAYLAVVKTVEKKADVYRVVRIATSQVAALKEARAQSTVKERELLKKFLTTKFTKIGKNGKKAITPFDIVIPRVPREQLFHNKRYGFFMVNSDTLMHNYQELWMSRSDQQILSKLVKSAKTVENGQVGRLFENIVEQINKYFPLYDINQFRKKLDQSKDIFSKLPLEGNGTTSGKRETIQNILTGAGTGAKNGDLKNLGIKTPFGFLQVPSGIVLDDDTTLIYQSPTGMLNRIVRLSEL

SEQ ID NO: 297 - protein, 1361 aa, Lactobacillus rhamnosus
  REGION 1..1361: note = Lactobacillus rhamnosus R0011
MTKLNQPYGIGLDIGSNSIGFAVVDANSHLLRLKGETAIGARLFREGQSAAERRESRTTRRRLSRTRWRLSFLRDFFAPHITKIDPDFFLRQKYSEISPKDKDRFKYEKRLFNDRTDAEFYEDYPSMYHLRLHLMTHTHKADPREIFLAIHHILKSRGHFLTPGAAKDFNTDKVDLEDIFPALTEAYAQVYPDLELTFDLAKADDFKAKLLDEQATPSDTQKALVNLLLSSDGEKEIVKKRKQVLTEFAKAITGLKTKFNLALGTEVDEADASNWQFSMGQLDDKWSNIETSMTDQGTEIFEQIQELYRARLLNGIVPAGMSLSQAKVADYGQHKEDLELFKTYLKKLNDHELAKTIRGLYDRYINGDDAKPFLREDFVKALTKEVTAHPNEVSEQLLNRMGQANFMLKQRTKANGAIPVQLQQRELDQIIANQSKYYDWLAKPNPVEKHRASKPYQLDELLTFRIPYYVGPLITPKEQAESRENVFAWMIRKDPSGNITPYNFDEKVDCPASANMFIQRMKNTDTYLIGEDVLPKRSLLYQKYEVLNELNNVSIDGRRLGADQKQRLIREVFERHSSVTIKQVAENLVAHGDFAKRPEIRGLADEKRFLSSLSTYHQLKKILHEAIDDPTKEHDIENIITWSTVFEDAAIFKTELAKISWLDSDTIKALSNIRYRGWGQFSRKLLDGLKLGNGHTVIQELMLSNHNLMQILTDETLKTTMAELNQDKLKADDIEDVINDAYTSPSNKKALRQVLRVVEDIKHAANGQDPSWLYIETADGPGTAGKRTQSRQKQIQTVYANAAQELIDSAVRGELEDKIADKASFTDRLVLYFMQGGRDIYTGAPLNIDQLSHYDIDHILPQSLIKDDSLDNRVLVNATINREKNNVFASTLFASKMAATWRKWHEAGLISGRKLRNLMLRPDEIDKFAHGFVARQLVETRQIIKLTEQIAAAQYPNTKIIAVKAGLSHQLREELDFPKNRDVNHYHHAFDAFLAARIGTYLLKRYPKLAPFFTYGEFAKVDVKKFREFNFIGALTHAKKNIVAKDTGEIVWDKERDIQELDRIYNFKRMLITHEVYFETADLFKQTIYAAKDSKERGGSKQLIPKKQGYPTQVYGGYTRENTAYLAVVKTVEKKADVYRVVRIATSQVAALKEARAQSTVKERELLKKFLTTKFTKIGKNGKKAITPFDIVIPRVPREQLFHNKRYGFFMVNSDTLMHNYQELWMSRSDQQILSKLVKSAKTVENGQVGRLFENIVEQINKYFPLYDINQFRKKLDQSKDIFSKLPLEGNGTTSGKRETIQNILTGAGTGAKNGDLKNLGIKTPFGFLQVPSGIVLDDDTTLIYQSPTGMLNRIVRLSEL

SEQ ID NO: 298 - protein, 1375 aa, Lactobacillus ruminis
  REGION 1..1375: note = Lactobacillus ruminis ATCC 25644
MRKNQEPYNIGLDIGTSSIGWSIMNDNFDLMRVKGKKGIGVRLYNEGQSAAERRMHRTARRRYGRRKWRLRLLEDFFDEHMAEVDDTFFARLKDSNISPKDDKKYRKSLLFPKSKGVTYQDDGEFYKKYPTMYHLRYALMTEHRKFDLREIYLAFHHMVKYRGNFLYDTSVDSFEAKNLDIKGKFDEINDLLSSYTDFYVDNSNAALVESILLEKNTTRKDKSKKIAKLLHVEDKEKGKNKKAKDLATQISNAVLGLKCNFHLIFELQQKYSFDLCSEKTEENIAKLSEVLDENQKMLLMILKEVQDQVMLNAFVPSGMSLSEAMMQKYDDYGEQLKIYHELEHSVSDDSAAKLRGAYRDYNDNIIKRIDGDNKKDTFYKRVKNILTKISKEYVDQDVLESCGKLKKLIDENKLFIRQRTAANGVLPHQLHQIEMRKIIDNQKEYYPWLAEPNPNEKRRVYSKYKVEELIAFRIPYYVGPLVDPNNADKNKEARFSWMVRKKDGEITPWNFYDKVDWAESANNFIERMKSKDTYLLGEDVVPKESMLYQKYEVLNELNNLRINDSGLSDSFEDVKLKQAIYNDLFKKQKIVKITDLQNYLVQNHKYLVKPKISGLADENRFLSSLSTYSDLKTIFGDKVDDRTYFNDFEKMVEYSTVFEDGHDYNQKLDEYTWLTKEEKYKIGKKRYRGWGKLSKKLLTGLRDKNNHTIMDNLWETNRNFMQIQTADEFSKQIAEENERHLKGSVSDAINDMYTSPANKKAIRQVLRVVDDIQKAMGYAPSSISLEFAREDGPSVRTVSRANRMKSIYEKYASEVSEEVMKDLDGVIKDKKGLNDRLYLYFEQQGKDMYSGHPLDFDKVISGQEYDIDHILPQAVIKDDSLDNRVLTTKALNNDVKSKGVPCRMFNGMHSFWKNLYDKGFISRRKFNNLTTNPENIDKYKMKGFVNRQLVETRQIIKLVANVLNDKYQNDDVDIIEVRAELTHDVRKHFKFYKNRNVNDYHHAFDAYLTSFIGHYLFKKYPNLRPLFDYNDFMKVSDNVFKQLRGNNFLGEFLNKTGDIISTDGNFVLNKEEMINKLNKAYAFKKILVTKEVGQRTGAMFNETRYPAPNSRKAALKYRRMPKPDSLISVKDYKNTDIYGGYSGKNDAYMVIVDMGKQYMVVGVPVRYTEKLDKLRIKHSELYRDELRKVLSRDKTLLDSKGNVKRFDIVLDRVLYGQLIEDGNELFTLGSSKYKRNFRQLFLDKQCIEILDSSATPQPTDEELIWVYDQILDKVDKYFELYDINRQRETLRKGRAAFCSLPNISMKKDDVTKKKILNEILVALHANESESNCEKIGKKVFGRLQVPGGIKLSKEAKLIYQSPTGLFERVVYLKDL

SEQ ID NO: 299 - protein, 1339 aa, Lactobacillus salivarius
  REGION 1..1339: note = Lactobacillus salivarius SMXD51
MERYHIGLDIGTSSIGWAVIGDDFKIKKKKGKNLIGTRLFNEGATAAERRGFRTQRRRLNRRKWRLKLLEEIFDPYMAEVDEYFFARLKSSNLSPKDSNKKYLGSLLFPDKSDSNFYDKYPTIYHLRRDLMEKDEKFDLREIYLAIHHIVKYRGNFLEKVPAKNYKNSGASIGFLLEEVNSLYKDIIGDESIAILNSEKFEDVEKIILDEETRNLDKQKSVGKLLVEDKKKKNIVTAFSKAIFGYKFNIEDLLLIENDEKNKLTFNDENIDDIFNELSHSLDDKQMDLLTKTREIYFKFKLNMIVPTGYTLSESMIEKYEMHKAHLKMYKEFINTLNTKDRKILKNAYSDYINTEKAKAANAQENFYKTVKKIIKDNNSDTAKKIIVLIDEGNFMPKQRTGENGVIPHQLHQIELDRIIENQAKYYPWLAEANPVEKNRKFAKYKLDELVTFRVPYYVGPLIDKTESNKNEKETKFAWMVRKAKGTITPWNFENLVDRTESANRFIKRMTSKDTYIIGEDVLPASSLLYEKFKVLNELNNIKVNEKKLDIEQKQDIYLNLFTTAKNVTKKSLATYLNCSADSISGLSDGEKFNSSLSSYIDLKAILGNIVDDCNKNEDLEKIIEYSTVFEDGNIYKEKLSEISWLTDEQIEKLSNIHFKGWGRLSKKLLTQITNENGERIIDALWNTSNNFMQIINDESIQAKLAEINGKYAGKSDLEDILSEAYTSPQNKKAIRQVMKVVEDIEKAMQCEPTSISIEFTRKKQKSRLTNTRYKKISDVYEKIADEVISEYELRKLQSELDSNANNMRDRYYLYFMQLGRDMYTGEKINIDELHQRYDIDHILPQSFIKDDSINNRVLTRKDVNNKEKSDKTAADLYAVEMSDFWRKLRKQGLITEQKYKNLLTKSDSIDKYAKKGFIKRQLVETSQVVKLVANILQDKYSDTKIIEVRAKLNSNLREEYKLIKNRAVNDYHHAIDGYLTTFIGQYLYKTYPKLRSYFVYNDFKKLDSNYLKHMKKFNFLWQLQDDKTIDIYDNVNNKFVLNVPEMKKYIQKIYNYKYMLVSKEVTTKNGAFYDQTKYNAKTVNLIPIKKNKPTNIYGGYKGKVSSYMMLVKIRKKKEVIYKFVGVPRLWTDELDRLKDTTERKILLNEIAKNSLSKTEQDFEVILDKVYYGQLIIDGNQKYTLGSSEYKYNAMQLHLSKHALEVLAKENVKDAEITDKDLVSVYEEILSVVNKYFELYDINKFRQKLNEGLEIFRKLPVYNVYESNKIKQVGKFEVLNRILMGLHANAMITDLKVLGIKTKLGQMQVNGGIKLSPDAKLIYQSPTGIFSRAVRVKDLG

SEQ ID NO: 300 - protein, 1331 aa, Lactobacillus sanfranciscensis
MNKQPYNIGLDIGTSSVGWSATELDNRLLHIKGHNGIGVRLFKEGESAADRRGFRTTRRRLARRKWRLRLLNEIFATEIAKVDPSFFARLKQSNVSPKDPNKTMFENILFDDENLDDQKFHHDYKTIYHLRQAIINHPEQKFDIRLIYLAMHHIIKYRGHFLNQANVQDFKGGKIDLEKSFKALNDIFENQGRDLRLVTDKANQYVKVLSDNAKTRSDRKKELSKLLYVPIDKDTDKNSKKVTGEILKAILGNKAKFDVIFGIEVENPKEWVLTFNSDDFDDKIEGLSSQMTDEDSEILLILKELYFALNLSDILNNSVTDKNAKTLSEAMINRYDDHKNQLAMLKKVIDSSDKKHAKELKEAYSAYIDGENNKKISFEDLKKRIQKNLVDSELSQKINDLLDHDYFLPKQRSKENGAIPHQLQQQELDQIIESQKQYYPFLAELNPNEKRSRQAKYKLDELVAFRVPYYVGPMVEVTDSNQENNGKFAWMIRKEQGEITPWNFDEKVDRTETATKFITRMTTTDTYLIGEPVLPKNSLLYQKFVVLNELNNLKINQEIITPGQKQYLYEHVMKKNKRVTLKKIADALVIKGDYPYAPEVKGTTDQKNLNNGLTTYIDLAKIFGNELDDVDREADFEKIIEWSTIFEDQHIFALKLQELKWLTEKQRNQVVKLRYQGWGKLSKELLAGLVDDNGQRIIDLLWSDNQNFMQIVNQKSFKESIADHNGAHLEEKNLKDVINDLYTSPQNKKAIRQVILVVDDIINAVGYEPANIMMEFAREDSNDHRLTNSRSRQLENVYKDITNSWFDNDSVKDELEDKIKNKDKFTDRLYLYFTQGGKDLYTGEPLNIDDLSSYDIDHILPQSFILDNSLDNRVLTSQRNNRVSKEDQLPGELFGTKMHAFWKRLKAAHLISNKKYYNLTLTPNSISKFNNQGRFINRQLVETRQVIKLAAEILHNRYSEEKGTNIVTIKANLTHHMREKFNFYKNRNVNDYHHAFDAYLTAFVGNWLLQQYPKLKPYFVYGDFAKTEINNLKSFNMLYKFEQAHQLNEKDGKIAKDADALLGYMKNVYHFKKMLVTKKLETNHGALFKQTLYPSPAHDIKKRQLIKPKDNRPTDIYGGYTHEERKYMSLVKVIGKKDNEYRMANVPLLKINKNNDIKEILKSQFSNKKFEIVLPKVLKNQLFSENGALFVIGSKGYKYNANQLVLSDLDMKLLNDLSNNKSIDEVTINQLFKNIVDSTNKYMPLYEIKNLNEVVEKFNNLEFNDKKKTITDFLLATHANPTMSNLKNIGLPSYFGRFTSGNAGIKLSENANVIYQSPTGLFSRKVKISDF

SEQ ID NO: 301 - protein, 1419 aa, unidentified
  REGION 1..1419: note = Lactobacillus sp. 66c
  source 1..1419: note = Lactobacillus sp.
MAKPQNYTIGLDIGTNSVGWTVTDDQNNILRIKSKKAIGARLFEEGKVAAERRSFRTTRRRLSRRKWRIKLLEELFDEEISKVDPNFFARSHESWISPKDKRERYSAIVFPTPEEDKKFHNEYPTIYHLRDRLMKDDQKHDIREIYVAIHHIMKYRGNFLHDESIETYRSGMSSLGGGDERTILNTKILDDLNDAFADNLATQGISVNSASADQINEIVTSGHLNVDSQKAIAKLLLPTTLSSDDKKQDKKIKKLATDAAKNVASAWLGYKANFAAILNIQEVDKDKKKIYSFALQGADEEDKVETLESVLSQDQIEIVDRIIRIRHAIVLGEIIPVGMTLSEAMIEKYDQHAKDLKNLKTVIRNLKDRKNAVKLQAIYDLYVNNRHADTAKAMKLAGVKKRTELLEPEEFNKSIEKLLDDSPVSAEIKKRIAEKDFLPLQRSNSNGVIPNQLHQIELDEIIKKQSKYYPFLGETNEHASADVARKAPTKLDQLLTFRVPYYVGPLITKEEQEEQDGHSFAWMIRKNPKDHEKITPWNFDEKVDRMASATQFIKRMTTKDTYLLGEDVLPSSSLKYQLFTVLNELNNLRINHKKLTREEKEQVIEDLFKKYKTVKADKFKNYWQKGHAGLDVKIQGMADPEKFNSTMSTYIDLQKIFGDQLDDAQRQNDFEKIIEYSTIFEDRKILGEKLRADFVWLSEDQIKRLCRLRLQGWGRLSLKLLTRLTDADGQNVLERLLNSNDNFMQIVKDPVIKAKIEQKNQKLLRADWSENATESILDEAYTSPQNKKAIRQVMRVVHDIVKACDGNLPAKFAIEFARSQDDDPKRTVARADRLQKIYAQISDEVVSQGVKDQLSGMKSLKDRYYLYFMQGGRDAYTGKPLNIDRLSDYDIDHIMPQSFIKDDSLDNRVLVTRAVNNQKSDNVPVLLYGNHLVADLGITIREMWDRWQKSGMISKRKLANLLTDPATLSEYRAEGFINRQLVETSQVIKLTATILQSEFPDSKIIEVPAKYNSILRKQFDLYKSREVNDYHHAIDAYLSTIVGNYLYQVYPNLRRLFVYGEFKKFSHGEEESSHQAVRRVKSMNFLDDLLRGKHGDDIYCRVTGEVIFSRKDIISKLKQAYSFKQMLVTQEVFTKKSALFDQTVYPSPARDSKTRSGLIPRKQGMDTEIYGGYSGNKDAYFVLAQVVKSKGHTLQVVGVPIRALRALANCSNYSEQLLKIVKAQVLFNKKTGKAKKGISDVRILLDKIPYRQPVLDGSAFYMLGSSTYKYNLKQISLSQQSMKYILDYIDDPNFNKHEMTKIDQQNEKECLLSVYDEILDKMDKYLSLYDINGFRKKLHVGRDKFIKLEVEKQAEAIKNVLRGFHANSDMTKLSDLGLSTSLGFMQASDGIKLSDNAVFIYQSPTGLFERRVKVSDLLK

SEQ ID NO: 302 - protein, 1289 aa, Lactobacillus versmoldensis
  REGION 1..1289: note = Lactobacillus versmoldensis KCTC 3814
MRRRYRRRRNRLNWLDELFADELAKIDPSFLLRMKNSWVSKKESTRKRDPYNLFIDEKYNDVDYFNQYPTIFHLRKELITEDKKVDIRLIYLAIHNIIKYRGNFTLENQNFDISQLSSNFSQQISDFFALFSDFGVIMPEDFDPDKISDILLNPNLSPSGKVSEAIATISPKTNVKAKIKIILLLLVGNNGDLKKLFDLETTEKIAVKLSSRHIDSELPIILSELNEQQENIITIANSIFGSIILKDFLGDETSISAAKVISFEDHKQDLQKLKTMWRETSNKEAVKAGKKAYEDYIGHEDSETFYKKIKKFLEKAQPVDLANKALAEIELENYLPKQRNRNNTVIPYQLNENELIAILDHQEKYYPFLKENRDKILSLLTFRIPYYVGPLQDSNNNRFSWMTRKASGAIRPWNFSEKVNVEQSSNDFIKRMRSTDTYLIGEPVLPKKSLIYQCYEVLSELNNTRVKDGSSNPKRLDVTIKQRIYNEIFKNQKSVSVKVLQNWLIKESYFKSPEISGLADKKKYLSSLSTYIDFKKIFGQRFVDDPVNSPQLEELAEWLTLFEDKKILLIKLQNSKYSYDQATINKLSTMRYQGTGKLSKKLLVDLKTTKKSIGKSGAESLSILDLMWSTKDNFMQIIHDADYTFEQQIKEFNYDTEDELTPLEKVANLHGSPALKRGLNQSIKVVADIVKFMGHDPEKIFIEFTRSDDFSKLTISRYRRIKKQYLEIAKAIKKIPAEFKDIKEYQTQLEENKGKLASERLMLYFLQCGHSLYSNKPIDLNMINSSKYHVDHILPQSYIKDDSLENKALVLASENENKIDNMLISHDIIATNLPRWQALKDQNLMGSKKFADLTRTTVTENQKKGFIQRQLVQTSQIVKNITLILNDLYKNTSCIETRATLSSEFRKAFSNFDETTYHYQFPEFVKNRDVNDFHHAQDAFLACVIGEYQLKKYPKDNLRLVYDQYSKFLDSLKKDTRKKNGRMPRYTQNGFIIGSMFNGKTYVDDNGEIIWDQKIKESIRKTFNYHQFNVVRQTIEQHGKLFNDTIQPHSDRYKLIPLKTNRDPAIYGGYNNDNNAYSVVLDVDGKKKINGIPIRIANQLKSDELDLSSWLENNIKHKKPMTILIDKVPKYQRIINEETGDLLITSANEVINNVQLFLPSMYTALISLLDSTKTEMYSKLLSNYEANILIDIYDYLLTKLKNNYPLYRKEWAKLAEHRDDFIESDLVTQASTLQQLIKFMHADPSNVNLKFGNFKGNRFGRKNGNIKLSKTDFIYESPTGLFKSIKHID

SEQ ID NO: 303 - protein, 1372 aa, Legionella pneumophila
  REGION 1..1372: note = Legionella pneumophila 130b
MESSQILSPIGIDLGGKFTGVCLSHLEAFAELPNHANTKYSVILIDHNNFQLSQAQRRATRHRVRNKKRNQFVKRVALQLFQHILSRDLNAKEETALCHYLNNRGYTYVDTDLDEYIKDETTINLLKELLPSESEHNFIDWFLQKMQSSEFRKILVSKVEEKKDDKELKNAVKNIKNFITGFEKNSVEGHRHRKVYFENIKSDITKDNQLDSIKKKIPSVCLSNLLGHLSNLQWKNLHRYLAKNPKQFDEQTFGNEFLRMLKNFRHLKGSQESLAVRNLIQQLEQSQDYISILEKTPPEITIPPYEARTNTGMEKDQSLLLNPEKLNNLYPNWRNLIPGIIDAHPFLEKDLEHTKLRDRKRIISPSKQDEKRDSYILQRYLDLNKKIDKFKIKKQLSFLGQGKQLPANLIETQKEMETHFNSSLVSVLIQIASAYNKEREDAAQGIWFDNAFSLCELSNINPPRKQKILPLLVGAILSEDFINNKDKWAKFKNFWNTHKIGRTSLKSKCKEIEEARKNSGNAFKIDYEEALNHPEHSNNKALIKIIQTIPDIIQAIQSHLGHNDSQALIYHNPFSLSQLYTILETKRDGFHKNCVAVTCENYWRSQKTEIDPEISYASRLPADSVRPFDGVLARMMQRLAYEIAMAKWEQIKHIPDNSSLLIPIYLEQNRFEFEESFKKIKGGSSDKTLEQAIEKQNIQWEEKFQRIINASMNICPYKGASIGGQGEIDHIYPRSLSKKHFGVIFNSEANLIYCSSQGNREKKEEHYLLEHLSPLYLKHQFGTDNVSDIKNFISQNVANIKKYISFHLLTPEQQKAARHALFLDYDDEAFKTITKFLMSQQKARVNGTQKFLGKQIMEFLSTLADSKQLQLEFSIKQITAEEVHDHRELLSKQEPKLVKSRQQSFPSHAIDATLTMSIGLKEFPQFSQELDNSWFINHLMPDEVHLNPVRSKEKYNKPNISSTPLFKDSLYAERFIPVWVKGETFAIGFSEKDLFEIKPSNKEKLFTLLKTYSTKNPGESLQELQAKSKAKWLYFPINKTLALEFLHHYFHKEIVTPDDTTVCHFINSLRYYTKKESITVKILKEPMPVLSVKFESSKKNVLGSFKHTIALPATKDWERLFNHPNFLALKANPAPNPKEFNEFIRKYFLSDNNPNSDIPNNGHNIKPQKHKAVRKVFSLPVIPGNAGTMMRIRRKDNKGQPLYQLQTIDDTPSMGIQINEDRLVKQEVLMDAYKTRNLSTIDGINNSEGQAYATFDNWLTLPVSTFKPEIIKLEMKPHSKTRRYIRITQSLADFIKTIDEALMIKPSDSIDDPLNMPNEIVCKNKLFGNELKPRDGKMKIVSTGKIVTYEFESDSTPQWIQTLYVTQLKKQP

SEQ ID NO: 304 - protein, 1372 aa, Legionella pneumophila
MESSQILSPIGIDLGGKFTGVCLSHLEAFAELPNHANTKYSVILIDHNNFQLSQAQRRATRHRVRNKKRNQFVKRVALQLFQHILSRDLNAKEETALCHYLNNRGYTYVDTDLDEYIKDETTINLLKELLPSESEHNFIDWFLQKMQSSEFRKILVSKVEEKKDDKELKNAVKNIKNFITGFEKNSVEGHRHRKVYFENIKSDITKDNQLDSIKKKIPSVCLSNLLGHLSNLQWKNLHRYLAKNPKQFDEQTFGNEFLRMLKNFRHLKGSQESLAVRNLIQQLEQSQDYISILEKTPPEITIPPYEARTNTGMEKDQSLLLNPEKLNNLYPNWRNLIPGIIDAHPFLEKDLEHTKLRDRKRIISPSKQDEKRDSYILQRYLDLNKKIDKFKIKKQLSFLGQGKQLPANLIETQKEMETHFNSSLVSVLIQIASAYNKEREDAAQGIWFDNAFSLCELSNINPPRKQKILPLLVGAILSEDFINNKDKWAKFKIFWNTHKIGRTSLKSKCKEIEEARKNSGNAFKIDYEEALNHPEHSNNKALIKIIQTIPDIIQAIQSHLGHNDSQALIYHNPFSLSQLYTILETKRDGFHKNCVAVTCENYWRSQKTEIDPEISYASRLPADSVRPFDGVLARMMQRLAYEIAMAKWEQIKHIPDNSSLLIPIYLEQNRFEFEESFKKIKGSSSDKTLEQAIEKQNIQWEEKFQRIINASMNICPYKGASIGGQGEIDHIYPRSLSKKHFGVIFNSEVNLIYCSSQGNREKKEEHYLLEHLSPLYLKHQFGTDNVSDIKNFISQNVANIKKYISFHLLTPEQQKAARHALFLDYDDEAFKTITKFLMSQQKARVNGTQKFLGKQIMEFLSTLADSKQLQLEFSIKQITAEEVHDHRELLSKQEPKLVKSRQQSFPSHAIDATLTMSIGLKEFPQFSQELDNSWFINHLMPDEVHLNPVRSKEKYNKPNISSTPLFKDSLYAERFIPVWVKGETFAIGFSEKDLFEIKPSNKEKLFTLLKTYSTKNPGESLQELQAKSKAKWLYFPINKTLALEFLHHYFHKEIVTPDDTTVCHFINSLRYYTKKESITVKILKEPMPVLSVKFESSKKNVLGSFKHTIALPATKDWERLFNHPNFLALKANPAPNPKEFNEFIRKYFLSDNNPNSDIPNNGHNIKPQKHKAVRKVFSLPVIPGNAGTMMRIRRKDNKGQPLYQLQTIDDTPSMGIQINEDRLVKQEVLMDAYKTRNLSTIDGINNSEGQAYATFDNWLTLPVSTFKPEIIKLEMKPHSKTRRYIRITQSLADFIKTIDEALMIKPSDSIDDPLNMPNEIVCKNKLFGNELKPRDGKMKIVSTGKIVTYEFESDSTPQWIQTLYVTQLKKQP

SEQ ID NO: 305 - protein, 1355 aa, Leuconostoc gelidum
  REGION 1..1355: note = Leuconostoc gelidum KCTC 3527
MTYSIGLDIGTGSVGWAVIGDDYRLKRAKGKNLIGVRLFDSATTAAERRGYRTTRRRLSRRHWRLRLLNDIFASDLAEQDENFLPRLKYSWVNPDDEQNPQLNSDVANGALFGSSETDKAFHKNYPTIYHLRHELMTDTAKHDLREVYLAIHHIVKYRGNFLNTADKINAENSFNVDLFIAALDEYNEFLETPITSIKDAQLFSDKLTDINARNKSVRVENAMSETYDDKSKIFKAILTALVGNTANFQTIFDLSDLEKDEAKNFKFKLDLEDVETKLDVVRAKLSDEQNAFLEAVLIAYDGITLKMILGDYKSISQSMIESYKSHQRDWKYIKNNVRLNEQKIEPDKNSVKFFKLDPKKLIYPSNLAYLQVISSNEDEHRKGLDYFKTAIQDADILQRIENDTFLPRQRTKRNGVLPYQLHLAELEQIIKKQSKYYPFLANIYTQDNKTENKLIGLLKFRVPYYVGPLVEAEKVTGDGKNHWLIKKELQENTPITPFNFDDVVDKDKSGEQFIKRITGTDSYLIGEPTLPENSLLYQKYNVLQELNNVRNERHQRLPIKVKQDIFEHVFKIDKNVNAKKVMAYLKLNGYGDFQIAGLSDTRTGKFNSNLSSYNYFVDLLGREKTEKIREDRLEEIIEIQTVFEDKILVAKRLSNLDFLTPQEKSKLSAKHYTGWGRLSQKLLTTQFIKTALSEAGDIIPQSHSIIDLLYYTDKNLMEILNDKTFNVRNWLTEQNKGTESGNSLYDQIDALAGPKDIKRGITQVFSIIDDIKKAMGSNPETVYLEFARETQTSRLTNSRLNRVQEIYNSPELKTEFAYLAKKLEAETKESIHDDRLYLYYLQEGRDMYTGKEIPFDQISSNYDIDHIIPQAFTKDDSLDNRVLVNRATNARKSNSPTFTNDIIDNRKSWWQSLVKRGLMSKEKFERLTDKRKTFSENQTNHFIARQLVETRQIIKNVADLIKNNYDGTQAVAIRASLTGEMRRYLDWPKNRDMNDYHHAHDALMMATVGKYVDRRGFFDNGSVSDGAGNAYNLYTKDWLVAARVGTRNDSQRVNPYGFIVGSMNSKAVRQQVNKETGEIVWGNENLDYLRHVLSYKKILVTRRLSGSSGRLYAETLFSPNPKAKLIAQKANRSVALYGGFTKAESAYTALVEFNKKGDRSYKLIKVPMAIANRVNDKQITVTAYIASLNLRDFSRVVLEHLPLGTLIRESDGSEFYAASSEYKHNAKELWAPKEILRSSKKLDKATADNLIDIFDFLTNDKTISNFKFYEKDLLHLKNVRDKFVEASDEIKIKVLSDVIYELHNDAGWRDPFKHIQEKPAWTMLQVKGGIKLSEKAAIVYQSPTGLFETITIVGE

SEQ ID NO: 306 - protein, 1337 aa, Listeria innocua
  REGION 1..1337: note = Listeria innocua ATCC 33091
MKNMKKPYTIGLDIGTNSVGWAVLTDQYDLVKRKMKIAGDSEKKQIKKNFWGVRLFDEGQTAADRRMARTARRRIERRRNRISYLQGIFAEEMSKTDANFFCRLSDSFYVDNEKRNSRHPFFATIEEEVEYHKNYPTIYHLREELVNSSEKADLRLVYLALAHIIKYRGNFLIEGALDTQNTSVDGIYKQFIQTYNQVFASGIEDGSLKKLEDNKDVAKILVEKVTRKEKLERILKLYPGEKSAGMFAQFISLIVGSKGNFQKPFDLIEKSDIECAKDSYEEDLESLLALIGDEYAELFVAAKNAYSAVVLSSIITVAETETNAKLSASMIERFDTHEEDLGELKAFIKLHLPKHYEEIFSNTEKHGYAGYIDGKTKQADFYKYMKMTLENIEGADYFIAKIEKENFLRKQRTFDNGAIPHQLHLEELEAILHQQAKYYPFLKENYDKIKSLVTFRIPYFVGPLANGQSEFAWLTRKADGEIRPWNIEEKVDFGKSAVDFIEKMTNKDTYLPKENVLPKHSLCYQKYLVYNELTKVRYINDQGKTSYFSGQEKEQIFNDLFKQKRKVKKKDLELFLRNMSHVESPTIEGLEDSFNSSYSTYHDLLKVGIKQEILDNPVNTEMLENIVKILTVFEDKRMIKEQLQQFSDVLDGVVLKKLERRHYTGWGRLSAKLLMGIRDKQSHLTILDYLMNDDGLNRNLMQLINDSNLSFKSIIEKEQVTTADKDIQSIVADLAGSPAIKKGILQSLKIVDELVSVMGYPPQTIVVEMARENQTTGKGKNNSRPRYKSLEKAIKEFGSQILKEHPTDNQELRNNRLYLYYLQNGKDMYTGQDLDIHNLSNYDIDHIVPQSFITDNSIDNLVLTSSAGNREKGDDVPPLEIVRKRKVFWEKLYQGNLMSKRKFDYLTKAERGGLTEADKARFIHRQLVETRQITKNVANILHQRFNYEKDDHGNTMKQVRIVTLKSALVSQFRKQFQLYKVRDVNDYHHAHDAYLNGVVANTLLKVYPQLEPEFVYGDYHQFDWFKANKATAKKQFYTNIMLFFAQKDRIIDENGEILWDKKYLDTVKKVMSYRQMNIVKKTEIQKGEFSKATIKPKGNSSKLISRKTNWDPMKYGGLDSPNMAYAVVIEYAKGKNKLVFEKKIIRVTIMERKAFEKDEKAFLEEQGYRQPKVLAKLPKYTLYECEEGRRRMLASANEAQKGNQQVLPNHLVTLLHHVANCEVSDGKSLDYIESNREMFAELLAHVSEFAKRYTLAEANLNKINQLFEQNKEGDIKAIAQSFVDLMAFNAMGAPASFKFFETTIERKRYNNLKELLNSTIIYQSITGLYESRKRLDD

SEQ ID NO: 307 - protein, 1334 aa, Listeria innocua
MKKPYTIGLDIGTNSVGWAVLTDQYDLVKRKMKIAGDSEKKQIKKNFWGVRLFDEGQTAADRRMARTARRRIERRRNRISYLQGIFAEEMSKTDANFFCRLSDSFYVDNEKRNSRHPFFATIEEEVEYHKNYPTIYHLREELVNSSEKADLRLVYLALAHIIKYRGNFLIEGALDTQNTSVDGIYKQFIQTYNQVFASGIEDGSLKKLEDNKDVAKILVEKVTRKEKLERILKLYPGEKSAGMFAQFISLIVGSKGNFQKPFDLIEKSDIECAKDSYEEDLESLLALIGDEYAELFVAAKNAYSAVVLSSIITVAETETNAKLSASMIERFDTHEEDLGELKAFIKLHLPKHYEEIFSNTEKHGYAGYIDGKTKQADFYKYMKMTLENIEGADYFIAKIEKENFLRKQRTFDNGAIPHQLHLEELEAILHQQAKYYPFLKENYDKIKSLVTFRIPYFVGPLANGQSEFAWLTRKADGEIRPWNIEEKVDFGKSAVDFIEKMTNKDTYLPKENVLPKHSLCYQKYLVYNELTKVRYINDQGKTSYFSGQEKEQIFNDLFKQKRKVKKKDLELFLRNMSHVESPTIEGLEDSFNSSYSTYHDLLKVGIKQEILDNPVNTEMLENIVKILTVFEDKRMIKEQLQQFSDVLDGVVLKKLERRHYTGWGRLSAKLLMGIRDKQSHLTILDYLMNDDGLNRNLMQLINDSNLSFKSIIEKEQVTTADKDIQSIVADLAGSPAIKKGILQSLKIVDELVSVMGYPPQTIVVEMARENQTTGKGKNNSRPRYKSLEKAIKEFGSQILKEHPTDNQELRNNRLYLYYLQNGKDMYTGQDLDIHNLSNYDIDHIVPQSFITDNSIDNLVLTSSAGNREKGDDVPPLEIVRKRKVFWEKLYQGNLMSKRKFDYLTKAERGGLTEADKARFIHRQLVETRQITKNVANILHQRFNYEKDDHGNTMKQVRIVTLKSALVSQFRKQFQLYKVRDVNDYHHAHDAYLNGVVANTLLKVYPQLEPEFVYGDYHQFDWFKANKATAKKQFYTNIMLFFAQKDRIIDENGEILWDKKYLDTVKKVMSYRQMNIVKKTEIQKGEFSKATIKPKGNSSKLIPRKTNWDPMKYGGLDSPNMAYAVVIEYAKGKNKLVFEKKIIRVTIMERKAFEKDEKAFLEEQGYRQPKVLAKLPKYTLYECEEGRRRMLASANEAQKGNQQVLPNHLVTLLHHAANCEVSDGKSLDYIESNREMFAELLAHVSEFAKRYTLAEANLNKINQLFEQNKEGDIKAIAQSFVDLMAFNAMGAPASFKFFETTIERKRYNNLKELLNSTIIYQSITGLYESRKRLDD

SEQ ID NO: 308 - protein, 1334 aa, Listeria monocytogenes
MKNPYTIGLDIGTNSVGWAVLTNQYDLVKRKMKVAGNSDKKQIKKNFWGVRLFDDGQTAVDRRMNRTARRRIERRRNRISYLQEIFAVEMANIDANFFCRLNDSFYVDSEKRNSRHPFFATIEEEVAYHKNYRTIYHLREELVNSSEKADLRLVYLALAHIIKYRGNFLIEGALDTKNTSVDGVYEQFIQTYNQVFMSNIEEGTLAKVEENIEVANILAGKFTRREKFERILQLYPGEKSTGMFAQFISLIVGSKGNFQKVFDLIEKTDIECAKDSYEEDLEALLAIIGDEYAELFVAAKNTYNAVVLSSIITVTATETNAKLSASMIERFDAHEKDLGELKAFIKLHLPKQYQEIFNNAAIDGYAGYIDGKTKQVDFYKYLKTILENIEGADYFIAKIEEENFLRKQRTFDNGAIPHQLHLEELEAIIHQQAKYYPFLREDYEKIKSLVTFRIPYFVGPLAKGQSEFAWLTRKADGEIRPWNIEEKVDFGKSAVDFIEKMTNKDTYLPKENVLPKHSLCYQKYMVYNELTKVRYIDDQGKTNYFSGQEKQQIFNDLFKQKRKVKKKDLELFLRNINHIESPTIEGLEDSFNASYATYHDLLKVGMKQEILDNPLNTEMLEDIVKILTVFEDKPMIKEQLQQFSDVLDGGVLKKLERRHYTGWGRLSAKLLVGIREKQSHLTILDYLMNDDGLNRNLMQLINDSNLSFKSIIEKEQVSTTDKDLQSIVADLAGSPAIKKGILQSLKIVDELVSIMGYPPQTIVVEMARENQTTGKGKNNSKPRYKSLEKAIKEFGSKILKEHPTDNQELKNNRLYLYYLQNGKDMYTGQELDIHNLSNYDIDHIVPQSFITDNSIDNLVLTSSAGNREKGGDVPPLEIVRKRKVFWEKLYQGNLMSKRKFDYLTKAERGGLTDADKARFIHRQLVETRQITKNVANILHQRFNNETDNHGNTMEQVRIVTLKSALVSQFRKQFQLYKVREVNDYHHAHDAYLNGVVANTLLKVYPQLEPEFVYGEYHQFDWFKANKATAKKQFYTNIMLFFGQKERIIDENGEILWDKKYLETIKKVLDYRQMNIVKKTEIQKGEFSKATIKPKGNSSKLIPRKENWDPMKYGGLDSPNMAYAVIIEHAKGKKKLIFEKKIIRITIMERKMFEKDEEAFLEEKGYRHPKVLTKLPKYTLYECEKGRRRMLASANEAQKGNQLVLSNHLVSLLYHAKNCEASDGKSLKYIEAHRETFSELLAQVSEFATRYTLADANLSKINNLFEQNKEGDIQAIAQSFVDLMAFNAMGAPASFKFFEATIDRKRYTNLKELLSSTIIYQSITGLYESRKRLDD

SEQ ID NO: 309 - protein, 1334 aa, Listeria monocytogenes
  REGION 1..1334: note = Listeria monocytogenes FSL J1-194
MKNPYTIGLDIGTNSVGWAVLTDQYDLVKRKMKVAGNSDKKQIKKNFWGVRLFDDGQTAVDRRMNRTARRRIERRRNRISYLQEIFAVEMANIDANFFCRLNDSFYVDSEKRNSRHPFFATIEEEVAYHKNYRTIYHLREELVNSSEKADLRLVYLALAHIIKYRGNFLIEGALDTKNTSVDEVYKQFIQTYNQVFMSNIEEGALAKVEENTEVASILAGKFTRREKFERILRLYPGEKSTGMFAQFISLIVGNKGNFQKVFNLVEKTDIECAKDSYEEDLEALLAIIGDEYAELFVAAKNTYNAVVLSSIITVTATETNAKLSASMIERFDAHEKELGELKAFIKLHLPKQYQEIFNNAEIDGYAGYIDGKTKQVDFYKYLKTTLENVEGADYFITKIEEENFLRKQRTFDNGVIPHQLHLEELEAILHQQAKYYPFLREGYDKIKSLVTFRIPYFVGPLANGQSEFAWLTRKDDGEIRPWNIEEKVDFGKSAVDFIEKMTNKDTYLPKENVLPKHSLCYQKYMVYNELTKIRYIDDQGKTNYFSGREKQQIFNDLFKQKRKVKKKDLELFLRNINHIESPTIEGLEDSFNASYATYHDLLKVGLKQEILDNPLNTEILEDIVKILTVFEDKRMIKEQLEQFSDVLDGVVLKKLERRHYTGWGRLSAKLLVGIRDKQSHLTILDYLMNDDGLNRNLMQLINDSNLSFKSIIEKEQVSTTDKDLQSIVADLAGSPAIKKGILQSLKIVDELVSIMGYPPQTIVVEMARENQTTGKGKNNSKPRYKSLEKAIKDFGSQILKEHPTDNQELKNNRLYLYYLQNGKDIYTGQELDIHNLSNYDIDHIVPQSFITDNSIDNLVLTSSAGNREKGGDVPPLEIVRKRKVFWEKLYQGNLMSKRKFDYLTKAERGGLTEADKARFIHRQLVETRQITKNVANILHQRFNKETDNHGNTMEQVRIVTLKSALVSQFRKQFQLYKVREVNDYHHAHDAYLNGVVANTLLKVYPQLEPEFVYGEYHQFDWFKANKATAKKQFYTNIMLFFAQKERIIDENGEILWDKKYLETIKKVLDYRQINIVKKTEIQKGEFSKATIKPKGNSSKLIPRKENWDPMKYGGLDSPNMAYAVIIEHAKGKKKIVIEKKLIQINIMERKMFEKDEEAFLEEKGYHQPKVLTKLPKYTLYECEKGRRRMLSSANEAQKGNQLVLSNHLVSLLYHAKNCEASDGKSLKYIEAHRETFSELLAQVSEFATKYTLADANLSKINNLFEQNKEGDIKAIAQSFVDLMAFNAMGAPASFKFFEATIDRKRYTNLKELLSSTIIYQSITGLYESRKRLDD

SEQ ID NO: 310 - protein, 1334 aa, Listeria monocytogenes
  REGION 1..1334: note = Listeria monocytogenes FSL J1-208
MKNPYTIGLDIGTNSVGWAVLTDQYDLVKRKMKVAGNSDKKQIKKNFWGVRLFDEGETAADRRMNRTARRRIERRRNRISYLQEIFALEMANIDANFFCRLNDSFYVDSEKRNSRHPFFATIEEEVAYHKNYRTIYHLREELVNSSEKADLRLVYLALAHIIKYRGNFLIEGALDTKNTSVDGVYKQFIQTYNQVFISNIEEGTLAKMEENTTVADILAGKFTRKEKLERILQLYPGEKSTGMFAQFISLIVGSKGNFQKVFDLVEKTDIECAKDSYEEDLEALLAIIGDEYAELFVAAKNTYNAVVLSSIITVTDTETNAKLSASMIERFDAHEKDLSELKAFIKLHLPKQYEEIFSNVAIDGYAGYIDGKTKQVDFYKYLKTLLENIEGADYFIAKIEEENFLRKQRTFDNGAIPHQLHLEELEAILHQQAKYYPFLKEAYDKIKSLVTFRIPYFVGPLANGQSDFAWLTRKADGEIRPWNIEEKVDFGKSAVDFIEKMTNKDTYLPKENVLPKHSLYYQKYMVYNELTKVRYIDDQGKTNYFSGQEKQQIFNDYFKQKRKVSKKDLEQFLRNMSHIESPTIEGLEDSFNSSYATYHDLLKVGIKQEVLENPLNTEMLEDIVKILTVFEDKRMIKEQLQQFSDVLDGAVLKKLERRHYTGWGRLSAKLLVGIRDKQSHLTILDYLMNDDGLNRNLMQLINDSNLSFKSIIEKEQVSTTDKDLQSIVADLAGSPAIKKGILQSLKIVDELVSIMGYPPQTIVVEMARENQTTVKGKNNSRPRYKSLEKAIKEFGSQILKEHPTDNQELRNNRLYLYYLQNGKDMYTGQELDIHNLSNYDIDHIVPQSFITDNSIDNLVLTSSAGNREKGDDVPPLEIVRKRKVFWEKLFQGNLMSKRKFDYLTKAERGGLTEADKATFIHRQLVETRQITKNVANILHQRFNNETDNHGNNMEQVRIVMLKSALVSQFRKQFQLYKVREVNDYHHAHDAYLNGVVANTLLKVYPQLEPEFVYGEYHQFDWFKANKATAKKQFYTNIMLFFAQKERIIDENGEILWDKKYLETIKKVLDYRQMNIVKKTEIQKGEFSKATIKPKGNSSKLIPRKENWDPMKYGGLDSPNMAYAVIIEHAKGKKKVVFEKKIIRITIMERKAFEKDEKSFLEKQGYRQPKVLTKLPKYTLYECENGRRRMLASANEAQKGNQQVLKGQLITLLHHAKNCEASDGKSLDYIESNREMFGELLAHVSEFAKRYTLADANLSKINQLFEQNKDNDIKVIAQSFVNLMAFNAMGAPASFKFFEATIERKRYTNLKELLSATIIYQSITGLYEARKRLDG

SEQ ID NO: 311 - protein, 1334 aa, Listeria monocytogenes
  REGION 1..1334: note = Listeria monocytogenes FSL N3-165
MKKPYTIGLDIGTNSVGWAVLTDQYDLVKRKMKISGDSEKKQIKKNFWGVRLFEKGETAAKRRMSRTARRRIERRRNRISYLQEIFAIQMNEVDDNFFNRLKESFYAESDKKYNRHPFFGTVEEEVAYYKDFPTIYHLRKELIDSQKKADLRLVYLALAHIIKYRGHFLIEGALDTKNTSIDEMFKQFLQIYNQVFANDIEEASLKKTEKNQEVAQILAEKFTRKDKLDKILSLYPGEKTTGVFAQFVNIIVGSTGKFKKHFNLHEKKDINCAEDTYDTDLESLLAIIGDEFAEVFVAAKNAYNAVVLSNIITVTDSTTRAKLSASLIERFENHKEDLKKMKRFVRTYLPEKYDEIFDDTEKHGYAGYISGKTKQADFYKYMKATLEKIEGADYFIAKIEEENFLRKQRTFDNGVIPHQLHLEELEAILHQQAKYYPFLREDYEKIKSLVTFRIPYFVGPLAKGQSEFAWLTRKADGEIRPWNIEEKVDFGKSAVDFIEKMTNKDTYLPKENVLPKHSLCYQKYMVYNELTKVRYIDDQGKTNYFSGQEKQQIFNDLFKQKRKVKKKDLELFLRNINQIESPTIEGLEDSFNASYATYHDLLKVGMKQEILDNPLNTEMLEDIVKILTVFEDKRMIKEQLQQFSDVLDGTVLKKLERRHYTGWGRLSAKLLVGIRDKQSHLTILDYLMNDDGLNRNLMQLINDSNLSFKSIIEKEQVSTTDKDLQSIVAELAGSPAIKKGILQSLKIVDELVSVMGYPPQTIVVEMARENQTTNKGKNNSKPRYKSLEKAIKEFGSQILKEHPTDNQELKNNRLYLYYLQNGKDMYTGQELDIHNLSNYDIDHIVPQSFITDNSVDNLVLTSSAGNREKGDNVPPLEIVQKRKIFWEKLYQGNLMSKRKFDYLTKAERGGLTEADKARFIHRQLVETRQITKNVANILHQRFNYKTDGNKDTMETVRIVTLKSALVSQFRKQFQFYKVREVNDYHHAHDAYLNGVVANTLLKVYPQLEPEFVYGEYHQFGWFKANKATAKKQFYTNIMLFFAQKDRIIDENGEILWDKRYLETVKKVLGYRQMNIVKKTEIQKGEFSNVTPNPKGKSNKLIPRKKDWDPIKYGGFDGSKMAYAIIIEYEKQKRKVRIEKKLIQINIMEREAFEKDEKTFLEEKGYHQPKVLIKVPKYTLYECKNGRRRMLGSANEAHKGNQMLLPNHLMALLYHAEKYEAIDGESLAYIEVHRALFDELLAYISEFARKYTLSNDRLDEINMLYERNKDGDVKSIAESFVSLKKFNAFGVHQDFSFFGTKIERKRDRKLNELLNSTIIYQSITGLYESRKRLDN

SEQ ID NO: 312 - protein, 1334 aa, Listeria monocytogenes
  REGION 1..1334: note = Listeria monocytogenes FSL R2-503
MKNPYTIGLDIGTNSVGWAVLTDQYDLVKRKMKVAGNSDKKQIKKNFWGVRLFDDGQTAVDRRMNRTARRRIERRRNRISYLQEIFAVEMANIDANFFCRLNDSFYVDSEKRNSRHPFFATIEEEVAYHKNYRTIYHLREELVNSSEKADLRLVYLALAHIIKYRGNFLIEGALDTKNTSVDEVYKQFIQTYNQVFMSNIEEGALAKVEENTEVASILAGKFTRREKFERILRLYPGEKSTGMFAQFISLIVGNKGNFQKVFNLVEKTDIECAKDSYEEDLEALLAIIGDEYAELFVAAKNTYNAVVLSSIITVTATETNAKLSASMIERFDAHEKELGELKAFIKLHLPKQYQEIFNNAEIDGYAGYIDGKTKQVDFYKYLKTTLENVEGADYFITKIEEENFLRKQRTFDNGVIPHQLHLEELEAILHQQAKYYPFLREGYDKIKSLVTFRIPYFVGPLANGQSEFAWLTRKDDGEIRPWNIEEKVDFGKSAVDFIEKMTNKDTYLPKENVLPKHSLCYQKYMVYNELTKIRYIDDQGKTNYFSGREKQQIFNDLFKQKRKVKKKDLELFLRNINHIESPTIEGLEDSFNASYATYHDLLKVGLKQEILDNPLNTEILEDIVKILTVFEDKRMIKEQLEQFSDVLDGVVLKKLERRHYTGWGRLSAKLLVGIRDKQSHLTILDYLMNDDGLNRNLMQLINDSNLSFKSIIEKEQVSTTDKDLQSIVADLAGSPAIKKGILQSLKIVDELVSIMGYPPQTIVVEMARENQTTGKGKNNSKPRYKSLEKAIKDFGSQILKEHPTDNQELKNNRLYLYYLQNGKDIYTGQELDIHNLSNYDIDHIVPQSFITDNSIDNLVLTSSAGNREKGGDVPPLEIVRKRKVFWEKLYQGNLMSKRKFDYLTKAERGGLTEADKARFIHRQLVETRQITKNVANILHQRFNKETDNHGNTMEQVRIVTLKSALVSQFRKQFQLYKVREVNDYHHAHDAYLNGVVANTLLKVYPQLEPEFVYGEYHQFDWFKANKATAKKQFYTNIMLFFAQKERIIDENGEILWDKKYLETIKKVLDYRQINIVKKTEIQKGEFSKATIKPKGNSSKLIPRKENWDPVKYGGLDSPNMAYAVIIEHAKGKKKIVIEKKLIQINIMERKMFEKDEEAFLEEKGYHQPKVLTKLPKYTLYECEKGRRRMLSSANEAQKGNQLVLSNHLVSLLYHAKNCEASDGKSLKYIEAHRETFSELLAQVSEFATKYTLADANLSKINNLFEQNKEGDIKAIAQSFVDLMAFNAMGAPASFKFFEATIDRKRYTNLKELLSSTIIYQSITGLYESRKRLDD

SEQ ID NO: 313 - protein, 1334 aa, Listeria monocytogenes
  REGION 1..1334: note = Listeria monocytogenes serotype 1/2a str. F6854
MKNPYTIGLDIGTNSVGWAVLTNQYDLVKRKMKVAGNSDKKQIKKNFWGVRLFDDGQTAVDRRMNRTARRRIERRRNRISYLQEIFAVEMANIDANFFCRLNDSFYVDSEKRNSRHPFFATIEEEVAYHDNYRTIYHLREKLVNSSEKADLRLVYLALAHIIKYRGNFLIEGALDTKNTSVDEVYKQFIETYNQVFMSNIEEGALAKVEENIEVANILAGKFTRREKFERILQLYPGEKSTGMFAQFISLIVGSKGNFQKVFDLIEKTDIECAKDSYEEDLETLLAIIGDEYAELFVAAKNTYNAVVLSSIITVTDTETNAKLSASMIERFDAHEKDLVELKAFIKLNLPKQYEEIFSNAAIDGYAGYIDGKTKQVDFYKYLKTILENIEGSDYFIAKIEEENFLRKQRTFDNGAIPHQLHLEELEAIIHQQAKYYPFLKEDYDKIKSLVTFRIPYFVGPLANGQSEFAWLTRKADGEIRPWNIEEKVDFGKSAVDFIEKMTNKDTYLPKENVLPKHSLCYQKYMVYNELTKIRYIDDQGKTNYFSGREKQQVFNDLFKQKRKVKKKDLELFLRNINHIESPTIEGLEDSFNASYATYHDLLKVGMKQEILDNPLNTEMLEDIVKILTVFEDKPMIKEQLQQFSDVLDGGVLKKLERRHYTGWGRLSAKLLVGIREKQSHLTILDYLMNDDGLNRNLMQLINDSNLSFKSIIEKEQVSTTDKDLQSIVAELAGSPAIKKGILQSLKIVDELVSIMGYPPQTIVVEMARENQTTGKGKNNSKPRYKSLEKAIKEFGSQILKEHPTDNQELKNNRLYLYYLQNGKDMYTGQELDIHNLSNYDIDHIVPQSFITDNSIDNLVLTSSAGNREKGGDVPPLEIVRKRKVFWEKLYQGNLMSKRKFDYLTKAERGGLTEADKARFIHRQLVETRQITKNVANILYQRFNKETDNHGNTMEQVRIVTLKSALVSQFRKQFQLYKVREVNGYHHAHDAYLNGVVANTLLKVYPQLEPEFVYGEYHQFDWFKANKATAKKQFYTNIMLFFAQKERIIDENGEILWDKKYLETIKKVLDYRQMNIVKKTEIQKGEFSKATIKPKGNSSKLIPRKENWDPMKYGGLDSPNMAYAVIIEHAKGKKKIVIEKKLIQINIMERKMFEKDEEAFLEEKGYRHPKVLTKLPKYTLYECEKGRRRMLASANEAQKGNQLVLSNHLVSLLYHAKNCEASDGKSLKYIEAHRETFSELLAQVSEFATRYTLADANLSKINNLFEQNKEGDIKAIAQSFVDLMAFNAMGAPASFKFFEATIDRKRYTNLKELLSSTIIYQSITGLYESRKRLDD

SEQ ID NO: 314 - protein, 1087 aa, unidentified
  REGION 1..1087: note = Listeriaceae bacterium TTU M1-001
  source 1..1087: note = Listeriaceae bacterium
MKKLVLGLDIGVASVGWGIIDAENGDVVDTGVRLFSSRDASENESRRTSRQSRRLSRRKKHRRERIKQLLLAHDMDICDIVNENPYELRVKGLNEKLEVSEIYVALTHLAKRRGVSYLDDVVEEGGTIKSEHLNKNMEEIKSGKMPCEIQLERFEKYGQVRGMIEINQDTEESSFLVNIFRTSDYIKEAKTILATQQKFHKQITNEFIDEYIHIMASKRDYFIGPGNEKSRTDYGVYRTNGDTWDNLFEILIGKCSVFPEETRAARSSYVAQEFNLLNDLNNLKISNLESGKLSASQKHDIVEKVKNSKKFGTKDLLKYIASVCECKIEDIGGCRVDKNRKPIMHTFENYRKVHNALNEAGVDLRLSETDYDELMKIMTLNSETLEIKKQCKEKLPQLTEDYLNVCLVLNKKGAFSGWHALSLKAMKLMMPELYGTSKNQMQIIHTMQLGKAYLKPLNQQKYLNSEAILEEIYNPIAARSIRQTIKVTNAILKKYGHLDSVIIEMPRDYQTSEDERKMIEKMQKENEKEKKAALKRAREEYPFPDEAFRNHKELATKLRLWYQQDQFCVYSGRKISVVDLVRNPNQFEIDHIIPQSVSLDDSLNNKVLCFSEENQKKGQQTPFYYHKGKSGNWTYEQYKLFVEKLFDKKKISNKKRELLLFEEDINKWDVRRGFIARNLVDTRYASRVILNSYQQYFGNHEMGTKVKVVRGKFTSQLRKKWRIFKDRNESHSHHAIDALIVAATANLRLWKKNTLGVSDEGKVYDKETGEILPFEKLTESEYNEMMNKEPYLNFKTKLQNIETKVKYSYRVSKKVNRKISDATIYSTRERDGIDYIVGKIKNIYDVKTYKDQFLKRYKKNKEQFLMYQHDPQTFAILENIMATYQDAENPFLAYKKEYGVIRKYSKKGGGSPVTSLKFIDKVLGQKIDLTAKNQAALPKNKKVVLQSITPYRADVYYDEIDKRYHLIGVKYSLFSFSKQGYVINPIAYQKLLEKEQIHSEMKFCFSLYREDIIEFGEDPDSLTRYRFWSKNESGKNKIEVKPIEKPNFEKQTVLTITKKIKILNKYQTDVLGNSFKAQEEKDPRNIE

SEQ ID NO: 315 - protein, 1345 aa, unidentified
  REGION 1..1345: note = Marinilabilia sp. AK2
  source 1..1345: note = Marinilabilia sp.
MKKILGLDLGTTSIGWAFIKEPEKDVVGSEIVDMGVRIVALSSDEENDFAKGNTISINADRTLKRGARRNLQRFKLRRDALLEIFKEMKLIPSNFKYAEDGPSSTFSTLKLRDKAAKEKIELDDLVKVLLQINKKRGYRSSRKAKSEEDDGSAIDSMGIAKELYENDLTPGQWVFEALQKGRKNVPDFYRSDLQEEFKKIVNYQSEFYPDVLNSSFVEDWMGKASTPTKQYFNKKGVHLAENKGKREERRLQEYNWRAVAVNSKIDLSEIALILSQINSQISNSSGYLGAISDRSKELYFKNQTVGQYLYQQIKINPHTRLKGQVFYRQDYLDEFEKIWSVQSGFHPQLNDALKKEIRDITIFFQRRLKSQKHLISNCEFEDYHKVVPKSHPIFQEFRIWQNLNNLTLIKKDNLNEKSELALEDKIALANELAFKREQSVKDALNILGLKSSEWEFNFTKIEGNRTNHAFFEAFAKIIEIEDGEPLDLGNLKADDILDQFSEAFLRIGIDPGLLQVNNDIEGPNYEKQPYIQFWHLLYSSEDDQKLKQNLIKKFGFKPDHAKILASISLQDDHASLSSRAIKKILPHLQSGLIYDKACTYAGYNHSSSFTKEENEKRELSSELDLLKKNSLRNPVVEKILNQMINVVNAILKDPNLGKPDEIRVEMARELKANAEQRKNMTSNIASATRDHEKYREILKKEFGLKRVTKNDLLRYKLWLETDGISLYTGKPIEASKLFSKEYDIEHIIPKTRLFDDSFSNKTICERQLNIDKANVTAFSFLQNKLSGDEFEQYQSRVKSLFGKLSKAKIQKLLMANDKIPEDFIARQLQETRYISKKAKEILFEITRRVSVTTGTITDKLREDWGLVEIMKELNWEKYDKLGLTYTIEGKHGERLNKIKDWSKRNDHRHHAMDALTVALTKPAYIQYLNNLNAKELNGKKSTEIFAIEQKYLKRENGKLCFIPPVENIRTEAKKHLSKVLISYKAKNKVVTINKNRTNKKAGFNEQIALTPRGQLHKETVYGKAFHYSTKFEKIGASFDVQKINAVAKKEEREALLKRLAENGDDPKKAFTGKNSLSKMPIYLDLKRNIKLPEKVKTVVLEQNYTIRKNIDPDLKLDKVIDVGVKRILENRLKEFGGNAKLALSNLDENPIWLNKEKGITIKRVKISGVSNVESLHVKKDHFGEPILDQVGNEIPVDFVSTGNNHHVAIYEDEKGNLQEEVVSFFEAVVRQNQGLPIINKNHSLGWKFLFTLKQNEYFVFPSDDFDPTDVDLMDEENYHLISPNLFRVQKFTTKDYFFRHHLETTVEDKSELKGVSFKRLGLPGLNCIKKIRINHLGKIIQVGEY

SEQ ID NO: 316 - protein, 1352 aa, unidentified
  REGION 1..1352: note = Megasphaera sp. UPII 135-E
  source 1..1352: note = Megasphaera sp.
MKKRNREEYYVGLDIGTSSVGWAVATPDYRIPKFRGHKMWGSRLFAEGKRAAERRQFRTNRRRLARRRDRLQILEELFAEEMAKVDNTFFMRLKESKFFLEDKTVKEKHILFSTDKFDADRFYKDNPTIYHVRKRLMEEEPQDIRELFLAVHHILKYRGHFLFAGSLEQNGASIEELVRTLLGKQGLAILDDTIDSNEMVNILKNTGETKSDRKKDVQELWNPLKDKVKKAQAAEMAGLVLGLKSDISKLFANSDYKDLDSSIKNINFSSGDYEEKRDDYANSIGDDIVLLDTMKALYDTLILSQILQGKRSISAAKVEDYNTHKEQLRALKAILKPHKRLYNEMFRENNKKDLSNYVAYISSYSEGKRVNREGFYKYVQAVLKQVDDSDSKQAILEAIRLETFLPLLRVKDNAVIPHQIHQAELEAILETARKKYNFLNDVSDGVSVKDKIIQLFTFRIPYYVGPLNPHSGETVADRKQGTGWVVRKQRGKVYPWNFADMVDVKASAEAFITNLTNKCTYLIGEDVLPKRSLLYSEFMLLNELNMIKYDGHELPVAIKQLYIEQVFKQEHKKQTKGRVLDFLKRNGLITGSATAVITGMDDAIKGDLQSYRDMVRIFGAGFDHSMAERIIRWVTLFGEAKDILENKIREVYGNSISDSQMRAIKKLKYADWGRLSQAFLIAVKGCDKSGVERNIITCLRASSQNLMEILSDQGTYIKQIKAWNHQHTTNMMDTLDYQLVDDLYVAPSVKRSIWQSLCIVEELVKIMGQAPKKIFVEVTRTKQAEKTKKDSRKKRLVELYTAIGKEGAAWKKEIEAHQAGDFRRKKLYLYYTQMGRCMYSNEPIAMDALFTSAYDIDHIYPQSLTKDGSWDNLVLVKSQLNKEKSDQYPLRPAIREKNKAHWQYLCRAGFISEKKYERLMRTTELTAEELSGFIARQLVETSQATKAVTGLLERIYTNTEICFVKAETVSQFRHQHNFIKIRELNNYHHAKDAYLNIVVGNVYHEKFTKNPWEFIARSTERRPYNLNRMYDFDLLKQGRVIWQVPKSLETVQAMMKSNDVRITKKLLVQKGELYDATITKAHKAKEGTYFPLKGADARLRDVHRYGGYEKIKIAYYSVFSCREKASNTIHTLIIPIPVYKAGLLQTEADLTAYAWQTKQKTKPIKDIYSAITPIYKKLCINTVVKIDGFKYFLGGKTGDYMWLDPAIPVVLDEQAAAYLKAISKVGRADDVENTAQAIDLITAEANEAFYDVLLKKMEAKIFAKAYQTIVEKLASETARERFRELSIGAQCSCLLEILNLLANNKTTFTFFKDKMGVTMSRRKQPMDLTKLEECIVYETSITGLYEKAVSLL

SEQ ID NO: 317 - protein, 1080 aa, unidentified
  REGION 1..1080: note = Methylocystis sp. ATCC 49242
  source 1..1080: note = Methylocystis sp.
MRVLGLDGGIASIGWALIEIFEDHEPSDGRIIDTGAWMFDAPEEKSQTGTKLKSELRRIFRGQRRVIRRRRQRMNEVRRILHRHGLLSSDNRDALKQPGLDPWKIRAEGIDRLLSPIEFAVALGHIARHRGFKSNSKGAKTSDLDAESSRMKKAVGETREKLARFGSPAKLLVEDEGFVLRQTKLKSGALETVRRFRNRDGDYSRSLLRDDLAAEVRALFRAQARLQSTFAKVELEAEFTQAAFFQRPLQDSERLVGPCPFEPAEKRSPKRGYSFELFRFLSRLNHLTLREGSEERTLTVEELRTAAADFGGVAKFTFSTLRKRLALPDIAIFVGIKADDEKKLDVVARSGEAATGTARLRRVVIDALGELAWGALISAPERLDKITEIITFRSDLDRIRAGLIEAGFDTPLIEAIVRAAADGKLDAFTGVGHISAKAARNIIPGLMRGMTYDKACAAAGYDHTASRERDAFDVGMHGKEALKKILQEERISRELVGSPSARKALIEAVKQVKAIIEKYGVPDRIHVELARDVGKSIEERRDIHFGIEKRSRQKDKLRELFGKEVGHLPQDGERGKEELLRFELWNEQMGRCLYTDEYINPKQLVASDNSVQVDHILPWSRFGDDSYLNKTLCTAKANQDKKGRTPYEWFRADKPEAEWDAFVARVESIQFMKGLKKRNYKLKNAEEAAEKFRSRNLNDTRWTCRLLAEALKQLYPKGEKDKDGKERRRVFTRPGALTNRLRRAWSLQRRKKSEKGERIADDRHHALDAIIVAATTESLLIRATREVQDIERKGLHYDLTKNITQPWPGFADEALDAVEKVFVARAERRRARGKAHDATIRHIAVRDDEAKVYERKKVGDIKLGDLIRVKDAERNAPLIENLRKWIEAGSPRDNPPLSPKGDPVSKVRLVTKNKVNITLDTGNPERLATVDRGEMARVDVFRKANRKGKYEYYLVPIYPHEIATMETPPMRAVQGGGDDDKWPEIDSTFEFLWSINQLSLLELTKPDGEVIRSYFRSLDRNTGALTVSGIANSTATRKGIGTRTLIDFKKLHVDRLGQIFEVERELRTWRGETWRGKDCI

SEQ ID NO: 318 - protein, 1082 aa, Methylosinus trichosporium
  REGION 1..1082: note = Methylosinus trichosporium OB3b
MRVLGLDAGIASLGWALIEIEESNRGELSQGTIIGAGTWMFDAPEEKTQAGAKLKSEQRRTFRGQRRVVRRRRQRMNEVRRILHSHGLLPSSDRDALKQPGLDPWRIRAEALDRLLGPVELAVALGHIARHRGFKSNSKGAKTNDPADDTSKMKRAVNETREKLARFGSAAKMLVEDESFVLRQTPTKNGASEIVRRFRNREGDYSRSLLRDDLAAEMRALFTAQARFQSAIATADLQTAFTKAAFFQRPLQDSEKLVGPCPFEVDEKRAPKRGYSFELFRFLSRLNHVTLRDGKQERTLTRDELALAAADFGAAAKVSFTALRKKLKLPETTVFVGVKADEESKLDVVARSGKAAEGTARLRSVIVDALGELAWGALLCSPEKLDKIAEVISFRSDIGRISEGLAQAGCNAPLVDALTAAASDGRFDPFTGAGHISSKAARNILSGLRQGMTYDKACCAADYDHTASRERGAFDVGGHGREALKRILQEERISRELVGSPTARKALIESIKQVKAIVERYGVPDRIHVELARDVGKSIEEREEITRGIEKRNRQKDKLRGLFEKEVGRPPQDGARGKEELLRFELWSEQMGRCLYTDDYISPSQLVATDDAVQVDHILPWSRFADDSYANKTLCMAKANQDKKGRTPYEWFKAEKTDTEWDAFIVRVEALADMKGFKKRNYKLRNAEEAAAKFRNRNLNDTRWACRLLAEALKQLYPKGEKDKDGKERRRVFSRPGALTDRLRRAWGLQWMKKSTKGDRIPDDRHHALDAIVIAATTESLLQRATREVQEIEDKGLHYDLVKNVTPPWPGFREQAVEAVEKVFVARAERRRARGKAHDATIRHIAVREGEQRVYERRKVAELKLADLDRVKDAERNARLIEKLRNWIEAGSPKDDPPLSPKGDPIFKVRLVTKSKVNIALDTGNPKRPGTVDRGEMARVDVFRKASKKGKYEYYLVPIYPHDIATMKTPPIRAVQAYKPEDEWPEMDSSYEFCWSLVPMTYLQVISSKGEIFEGYYRGMNRSVGAIQLSAHSNSSDVVQGIGARTLTEFKKFNVDRFGRKHEVERELRTWRGETWRGKAYI

SEQ ID NO: 319 - protein, 1123 aa, Mobiluncus curtisii
  REGION 1..1123: note = Mobiluncus curtisii subsp. holmesii ATCC 35242
MFVYLNSPRGFGPATFLTDLPHFCIIFGNNDFMDNRKYHVGIDVGTNSVGFAAVEVGDSGSPIRFLNTMVVIHDSGVDPEQKKYAITRLASAGTARRTRRLYRTRRQRLRELDDFISNELGYPLVNLENFADPYEPWKVRADLATIKLPADELPEAMSIALRHMARHRGWRSPYQRVEALHLHAEISEEFSALKKRVMEKTGDVFSDDATPAEVLVDLMGRQKIRGADGMLSGKLRQSDNANELRKIASVQGIDDETLNRIIDRVFFSRSPKGKASERVGMDALPGQGSKPRALKAMPSFQKFRIVSVICNLRIKDSGDDNRPLSMEEKEQLIGYLMSSTTDDHVTWTDVAELLHVKRSNLQGTAKEGPDGERPYTRPPVNSAWSKIKDSKIKSLVALWKTGDVDVQSAIVEALSNASVLEDARPGADIVVAYLESLDDKELESLDKVGLPAGRASYSEDSLERLTERMLQDDCDLFEARKREFGVSDDWKPPADPIYAPVGNPGVDRVLKIVNRLLMAAEREWGAPTQINIEHVRSGFSSELMQREFERENERRRAQNEEAVKAILTEKGGNSHVSKYDIIRYYAVKRQNCQCLYCGTPITFSDCELDHIVPRKGVGSTNSRVNLAAACRSCNRDKSNLPFAVWAGKTSNFDVSIDGAVSRVKQWQRSQNEGAREFRAFQNEVISRLLKTTEDPEIDSRSLESVAWMARELHHRVEYYFQSKGAQTQVSVYRGAVTAQARKSSGLEDKVKMIGGGGKTRLDRRHHAMDAATIALMTPGISTTLSEKNNLRDAQKFTGQSETWKDYCGRTETAREHFAVWKSNMERLTDLFNDKLENDAIPVVQPLRLRLSDSKAHDDGIGKLDSKKLGSVWSLADIDRAATPQIWTALTRCDDFDPTKGLPENANRVIRAQGVKYESEDNIPVFPSNVAAIAVRDGYAEIGSTIHHARIYRIDDGKKIFYSMIRVFAVDLLKHQAEDLFTVKLPPSAISIRTCEDSLRRALSNGTAEYLGWLVPGDEIIVDTSDKAFHTGQIGDLLRNFPVNSFRLTGFPSNSRLRLKPVLLAGEGLRDDAEDSIKKILSGQGWRPAINVLFSKGKPRIVRRNSLGIERPSSNNGLPFSWEA

SEQ ID NO: 320 - protein, 1091 aa, Mobiluncus mulieris
  REGION 1..1091: note = Mobiluncus mulieris 28-1
MDSRKYRVGIDVGTNSVGFAAVEEDDSGSPTRFLNTMVVIHDSGVDPEQKKYAITRLASAGTARRTRRLYRTRRQRLRELDDFISNELGYPLVNLENFADPYEPWKVRADLATTKLPNDELPEAMSIALRHMARHRGWRSPYQRVEALHLHAEISKEFAALKERVVEKTGDVFSDDATPAEVLVDLMGRQKVRGADGVLSGKLRQSDNANELRKIASVQGIDDETLNRIIDRVFSSKSPKGKASERVGMDALPGQGSKPRALKAMPSFQKFRVVSVICNLRIKDSGGDARPLSMEEKEKLIDYLMSSTTDDHVTWTDVADLLHVKRSQLQGTAKEGFDGERPYTRPPVNSTWSKIKDSKIKSLVALWKTGDVDVQSAIVEALSNASVLEDSRPGADIVVAYLESLDDKELESLDKVGLPAGRASYSEDSLERLTERMLRDDCDLFEARKREFNVADDWKPPADPIYAPVGNPGVDRVLKIVNRLLMAAEREWGAPTQINIEHVRSGFSSELMQREFERENERRRAQNEEAVKAILTEKGGNSRVSKYDITRYYAVKRQHCQCLYCGTPITFSDCELDHIVPRKGVGSTNTRVNLAAACRSCNRDKSNLPFAVWAGKASNFDVSIDDAVSRVKQWQRSQNEGVREFRAFQNEVISRLLKTTEDPEIDSRSLESVAWMARELHHRVEYYFQSKGAQTQVSVYRGAVTAQARKSSGLEDKVKMIGGGGKTRLDRRHHAMDAATIALMTPGISTTLSEKNNLRDAQKFTGQSETWKDYCGRTETARKHFAVWKSNMERLTDLFNDKLENDAIPVVQPLRLRLSNSKAHDDGIGKLDSKKLGSVWSLADIDRAATPQIWTALTRCDDFDPTKGLPENANRVIRAQGVKYESEDNIPVFPSNVAAIAVRDGYAEIGSTIHHARIYRIDDGKKTFYSMIRVFAVDLLKHQAEDLFTVKLPPSAISIRTCEDSLRRALSNGTAEYLGWLVPGDEIIVDTSDKAFHTGQIGDLLRNFPVNSFRLTGFPSNSRLRLKPVLLAGEGLRDDAEDSIKKILLGQGWRPAINVLFSKGKPRIVRRNSLGIERPSSNNGLPFSWEA

SEQ ID NO: 321 - protein, 1091 aa, Mobiluncus mulieris
  REGION 1..1091: note = Mobiluncus mulieris FB024-16
MDSRKYRVGIDVGTNSVGFAAVEEDDSGSPTRFLNTMVVIHDSGVDSEQKKYAITRLASAGTARRTRRLYRTRRQRLRELDDFISNELGYPLVNLENFADPYEPWKVRADLATTKLPNDELPEAMSIALRHMARHRGWRSPYQRVEALHLHAEISKEFAALKERVVEKTGDVFSDDATPAEVLVDLMGRQKVRGADGVLSGKLRQSDNANELRKIASVQGIDDETLNRIIDRVFSSKSPKGKASERVGMDALPGQGSKPRALKAMPSFQKFRVVSVICNLRIKDSGGDARPLSMEEKEKLIDYLMSSTTDDHVTWTDVADLLHVKRSQLQGTAKEGFDGERPYTRPPVNSTWSKIKDSKIKSLVALWKTGDVDVQSAIVEALSNASVLEDSRPGADIVVAYLESLDDKELESLDKVGLPAGRASYSEDSLERLTERMLRDDCDLFEARKREFNVADDWKPPADPIYAPVGNPGVDRVLKIVNRLLMAAEREWGAPTQINIEHVRSGFSSELMQREFERENERRRAQNEEAVKAILTEKGGNSRVSKYDITRYYAVKRQHCQCLYCGTPITFSDCELDHIVPRKGVGSTNTRVNLAAACRSCNRDKSNLPFAVWAGKASNFDVSIDDAVSRVKQWQRSQNEGVREFRAFQNEVISRLLKTTEDPEIDSRSLESVAWMARELHHRVEYYFQSKGAQTQVSVYRGAVTAQARKSSGLEDKVKMIGGGGKTRLDRRHHAMDAATIALMTPGISTTLSEKNNLRDAQKFTGQSETWKDYCGRTETARKHFAVWKSNMERLTDLFNDKLENDAIPVVQPLRLRLSNSKAHDDGIGKLDSKKLGSVWSLADIDRAATPQIWTALTRCDDFDPTKGLPENANRVIRAQGVKYESEDNIPVFPSNVAAIAVRDGYAEIGSTIHHARIYRIDDGKKTFYSMIRVFAVDLLKHQAEDLFTVKLPPSAISIRTCEDSLRRALSNGTAEYLGWLVPGDEIIVDTSDKAFHTGQIGDLLRNFPVNSFRLTGFPSNSRLRLKPVLLAGEGLRDDAEDSIKKILLGQGWRPAINVLFSKGKPRIVRRNSLGIERPSSNNGLPFSWEA

SEQ ID NO: 322 - protein, 1473 aa, Mucilaginibacter paludis
  REGION 1..1473: note = Mucilaginibacter paludis DSM 18603
MKNILGLDLGTNSIGWALIEKDTDQKNGNILGTGSRIIPMSQDIKDEFGKGNSISQTADRTKFRSVRRLRERHLLRRERLHRVLNVLGFLPKHYADQIDFKKRLGKLVNETEPKLVYDNKNFIFKKSFEAMLSDFNQHQPLLLADGKKVPFDWTIYYLRKKALTEKIEKEELAWLILNFNQKRGYYQLRGEEEEENPNKMVAFHSLKIVEVIADESQKGKAETWYSLILENGWIYRRSSKTPLYDWKGKQRDFIVTTDLNDDGSIKTDKEGLEKRSFRAPVEDDWTLVKKKTEQEINRSHKTVGTYIYENLLQDPKQKIKGKLVRTIEREFYKDELKMILKNQQKFHPELNDEHLYINCVRELYRNNQAHQTILSKKDFVHLFIDDIIFYQRPLRSQKSSISNCTLEFRKYKNENGTDQTDYLKAIPKSHPLFQEFRLWQWIYNLGIYQKEDDTNVTDELIKNIDGYQDLFDFLNNKKEIRQDILIKFLVEQTGLKGKPLSSVVAKYRWNFVEDKIYPCNETGTQIRTRLAKVENTPEDFLTAETEIKLWHIIYSVNDKADYEKALKTFAEKHNLDTHSFVENFKKFPPFKSEYGSFSEKAIKKLLPLIRLGKYWSWENIDKKTQERIEKILTGEFDEAIKSRVRDKAIHLTEEDHFQGLQLWLASYVVYGRHSEADNLDKWHTVADLEDYLAEFRQHSLRNPIVEQVITETLRVVKDIWLQYGQGAKDFFSEIHIELAREMKNTGDERKRLTSLVTDNENTNLRIKVLLSELLNDGNVENVRPYSPMQQEALKIFEDGVLNSDIEIEDDILKISKMAQPTNTELKRYKLWLEQKYRSPYTGQIIPLNRLFTADYEIEHIIPQSRFFDDSFSNKIICESAVNQLKDKQLGLEFIKNHSGTIVKLGMGKTAKILDVESYNEFVKGNYTKNISKRNKLMLEEIPDKMIERQLNDTRYISKFIISALSNIVRSESNDDGFNSKNVLPGNGKITSRLKQDWGMNDIWNELILPRFERMNKITDSAVFTAWNENNQKFLPIVPLEFSKGFQKKRIDHRHHALDALVIAASTREHINLLNNEHAKSDKRFDLNRKLRKFEKVAYNDPKTGKRIEKEVPTIFLKPWETFTVDAKNSLESIIVSFKQNLRVINRATNYSESYNDENGALRLGKDGNPLKEKIKQSKGDSWAIRKPMHKDFVYGKVHLQNVKLPKDKFITAIRKSLDVTFDLKRIETITDTGIQKILKNYLHSKENKVELAFSPEGIEDMNQHIERYNDGKKHQPIHKVRVFEIGSRFSLGESGNKKTKFVEAAKGTNLFFAVYQDDNKGKRNYETIPLNIVIERQKLGLHSVPTEDAKGGKLLFHLSPNDMVYVPTSEELEDNLASVNIKRLNTAQRKRIYKVEKASGVECYFIRQDIAYLIKNYDAKTKIGELESQNKLQTTMTDDRLKITDVCVKLNIDRLGSIAETFLGNQYGASKKT

SEQ ID NO: 323 - protein, 1233 aa, Mycoplasma canis
  REGION 1..1233: note = Mycoplasma canis PG 14
MEKKRKVTLGFDLGIASVGWAIVDSETNQVYKLGSRLFDAPDTNLERRTQRGTRRLLRRRKYRNQKFYNLVKRTEVFGLSSREAIENRFRELSIKYPNIIELKTKALSQEVCPDEIAWILHDYLKNRGYFYDEKETKEDFDQQTVESMPSYKLNEFYKKYGYFKGALSQPTESEMKDNKDLKEAFFFDFSNKEWLKEINYFFNVQKNILSETFIEEFKKIFSFTRDISKGPGSDNMPSPYGIFGEFGDNGQGGRYEHIWDKNIGKCSIFTNEQRAPKYLPSALIFNFLNELANIRLYSTDKKNIQPLWKLSSVDKLNILLNLFNLPISEKKKKLTSTNINDIVKKESIKSIMISVEDIDMIKDEWAGKEPNVYGVGLSGLNIEESAKENKFKFQDLKILNVLINLLDNVGIKFEFKDRNDIIKNLELLDNLYLFLIYQKESNNKDSSIDLFIAKNESLNIENLKLKLKEFLLGAGNEFENHNSKTHSLSKKAIDEILPKLLDNNEGWNLEAIKNYDEEIKSQIEDNSSLMAKQDKKYLNDNFLKDAILPPNVKVTFQQAILIFNKIIQKFSKDFEIDKVVIELAREMTQDQENDALKGIAKAQKSKKSLVEERLEANNIDKSVFNDKYEKLIYKIFLWISQDFKDPYTGAQISVNEIVNNKVEIDHIIPYSLCFDDSSANKVLVHKQSNQEKSNSLPYEYIKQGHSGWNWDEFTKYVKRVFVNNVDSILSKKERLKKSENLLTASYDGYDKLGFLARNLNDTRYATILFRDQLNNYAEHHLIDNKKMFKVIAMNGAVTSFIRKNMSYDNKLRLKDRSDFSHHAYDAAIIALFSNKTKTLYNLIDPSLNGIISKRSEGYWVIEDRYTGEIKELKKEDWTSIKNNVQARKIAKEIEEYLIDLDDEVFFSRKTKRKTNRQLYNETIYGIATKTDEDGITNYYKKEKFSILDDKDIYLRLLREREKFVINQSNPEVIDQIIEIIESYGKENNIPSRDEAINIKYTKNKINYNLYLKQYMRSLTKSLDQFSEEFINQMIANKTFVLYNPTKNTTRKIKFLRLVNDVKINDIRKNQVINKFNGKNNEPKAFYENINSLGAIVFKNSANNFKTLSINTQIAIFGDKNWDIEDFKTYNMEKIEKYKEIYGIDKTYNFHSFIFPGTILLDKQNKEFYYISSIQTVRDIIEIKFLNKIEFKDENKNQDTSKTPKRLMFGIKSIMNNYEQVDISPFGINKKIFE

SEQ ID NO: 324 - protein, 1233 aa, Mycoplasma canis; identical to SEQ ID NO: 323
  REGION 1..1233: note = Mycoplasma canis PG 14

SEQ ID NO: 325 - protein, 1233 aa, Mycoplasma canis
  REGION 1..1233: note = Mycoplasma canis UF31
MEKKRKVTLGFDLGIASIGWAIVDSETNQVYKLGSRLFDAPDTNLERRTQRGTRRLLRRRKYRNQKFYNLVKRTEVFGLSSREAIENRFRELSIKYPNIIELKTKALSQEVCPDEIAWILHDYLKNRGYFYDEKETKEDFDQQTVESMPSYKLNEFYKKYGYFKGALSQPTESEMKDNKDLKEAFFFDFSNKEWLKEINYFFNVQKNILSETFIEEFKKIFSFTRDISKGPGSDNMPSPYGIFGEFGDNGQGGRYEHIWDKNIGKCSIFTNEQRAPKYLPSALIFNFLNELANIRLYSTDKKNIQPLWKLSSIDKLNILLNLFNLPISEKKKKLTNANINDIVKKESTKSIMLSVEDIDMIKDEWAGKEPNVYGVGLSGLNIEESAKENKFKFQDLKILNVLINLLDNVGIKFEFKDRNDIIKNLELLDNLYLFLIYQKESNNKDSSIDLFIAKNELLNIENLKLKLKEFLLGAGNEFENHNSKTHSLSKKAIDAILPKLLDNNEGWNLEAIKNYDEEIKSQIEDNSSLMAKQDKKYLNDNFLKDAILPPNVKVTFQQAILIFNKIIQKFSKDFEIDKVVIELAREMTQDQENDALKGIAKAQKSKKSLVEERLEANNIDKSVFNDKYEKLIYKIFLWISQDFKDPYTGAQISTNEIVNNKVEIDHIIPYSLCFDDSSANKVLVHKQSNQEKSNSLPYEYIKQGHSGWNWDEFTKYVKRVFVNNVDSILSKKERLKKSENLLTTSYDGYDKLGFLARNLNDTRYATILFRDQLNNYAEHHLIDNKKMFKVIAMNGAVTSFIRKNMSYDNKLRLKDRSDFSHHAYDAAIIALFSNKTKTLYNLIDPSLNGIISKRSEGYWVIEDRYTGEIKELKKEDWTSIKNNVQARKIAKEIEEYLIDLDDEVFFSRKTKRKTNRQLYNETIYGIAAKTDEDGITNYYKKEKFSILDDKDIYLRLLREREKFVINQSNPEVIDQIIEIIESYGKENNIPSRDEAINIKYTKNKINYNLYLKQYMRSLTKSLDQFSEEFINQMIANKTFVLYNPTKNTTRKIKFLRLVNDVKINDIRKNQVINKFNGKNNEPKAFYENINSLGAIVFKNSANNFKTLSINTQIAIFGDKNWDIEDFKTYNMEKIEKYKEIYGIDKTYNFHSFIFPGTILLDKQNKEFYYISSIQTVRDIIEIKFLNKIEFKDENKNPDTSKTPKRLMFGIKSIMNNYEQVDISPFGINKKIFE

SEQ ID NO: 326 - protein, 1233 aa, Mycoplasma canis
  REGION 1..1233: note = Mycoplasma canis UF33
MEKKRKVTLGFDLGIASVGWAIVDSETNQVYKLGSRLFDAPDTNLERRTQRGTRRLLRRRKYRNQKFYNLVKRTEVFGLSSREAIENRFRELSIKYPNIIELKTKALSQEVCPDEIAWILHDYLKNRGYFYDEKETKEDFDQQTVESMPSYKLNEFYKKYGYFKGALSQPTESEMKDNKDLKEAFFFDFSNKEWLKEINYFFNVQKNILSETFIEEFKKIFSFTRDISKGPGSDNMPSPYGIFGEFGDNGQGGRYEHIWDKNIGKCSIFTNEQRAPKYLPSALIFNFLNELANIRLYSTDKKNIQPLWKLSSVDKLNILLNLFNLPISEKKKKLTSTNINDIVKKESIKSIMISVEDIDMIKDEWAGKEPNVYGVGLSGLNIEENAKENKFKFQDLKILNVLINLLDNVGIKFEFKDRNDIIKNLELLDNLYLFLIYQKESNNKDSSIDLFIAKNKSLNIENLKLKLKEFLLGAGNEFENHNSKSHSLSKKAIDAILPKLLDNNEGWNLEAIKNYDEEIKSQIEDNSSLMAKQDKKYLNDNFLKDAILPPNVKVTFQQAILIFNKIIQKFSKDFEIDKVVIELAREMTQDQENDALKGMAKAQKSKKSLVEERLEANNIDKSVFNDKYEKLIYKIFLWISQDFKDPYTGAQISVNEIVNNKVEIDHIIPYSLCFDDSSANKVLVHKQSNQEKSNSLPYEYIKQGHSGWNWDEFTKYVKRVFVNNVDSILSKKERLKKSENLLTTSYDGYDKLGFLARNLNDTRYATILFRDQLNNYAEHHLIDNKKMFKVIAMNGAVTSFIRKNMSYDNKLRLKDRSDFSHHAYDAAIIALFSNKTKTLYNLIDPSLNGIISKRSEGYWVIEDRYTGEIKELKKEDWTSIKNNVQARKIAKEIEEYLIDLDDEVFFSRKTKRKTNRQLYNETIYGIAAKTDEDGITNYYKKEKFSILDDKDIYLRLLREREKFVINQSNPEVIDQIIEIIESYGKENNIPSRDEAINIKYTKNKINYNLYLKQYMRSLTKSLDKFSEEFINQMIANKTFVLYNPTKNTTRKIKFLRLVNDVKINDIRKNQVINKFNGKNNEPKAFYENINSLGAIVFKNSANNFKTLSINTQIAIFGDKNWDIEDFKTYNMEKIEKYKEIYGIDKTYNFHSFIFPGTILLDKQNKEFYYISSIQTVRDIIEIKFLNKIEFKDENKNQDTSKTPKRLMFGIKSIMNNYEQVDISPFGINKKIFE

SEQ ID NO: 327 - protein, 1233 aa, Mycoplasma canis
  REGION 1..1233: note = Mycoplasma canis UFG1
MEKKRKVTLGFDLGIASVGWAIVDSETNQVYKLGSRLFDAPDTNLERRTQRGTRRLLRRRKYRNQKFYNLVKRTEVFGLSSREAIENRFRELSIKYPNIIELKTKALSQEVCPDEIAWILHDYLKNRGYFYDEKETKEDFDQQTVESMPSYKLNEFYKKYGYFKGALSQPTESEMKDNKDLKEAFFFDFSNKEWLKEINYFFNVQKNILSETFIEEFKKIFSFTRDISKGPGSDNMPSPYGIFGEFGDNGQGGRYEHIWDKNIGKCSIFTNEQRAPKYLPSALIFNFLNELANIRLYSTDKKNIQPLWKLSSVDKLNILLNLFNLPISEKKKKLTSTNINDIVKKESIKSIMLSVEDIDMIKYEWAGKEPNVYGVGLSGLNIEESAKENKFKFQDLKILNVLINLLDNVGIKFEFKDRNDIIKNLELLDNLYLFLIYQKESNNKDSSIDLFIAKNKSLNIENLKLKLKEFLLGAGNEFENHNSKTHSLSKKAIDAILPKLLDNNEGWNLEAIKNYDEEIKSQIEDNSSLMAKQDKKYLNDNFLKDAILPPNVKVTFQQAILIFNKIIQKFSKDFEIDKVVIELAREMTQDQENDALKGIAKAQKSKKSLVEERLEANNIDKSVFDDKYEKLIYKIFLWISQDFKDPYTGAKISANEIVNNKVEIDHIIPYSLCFDDSSANKVLVHKQSNQEKSNSLPYEYIKQGHSGWNWDEFTKYVKRVFVNNVDSILSKKERLKKSENLLTTSYDGYDKLGFLARNLNDTRYATILFRDQLNNYAEHHLIDNKKMFKVIAMNGAVTSFIRKNMSYDNKLRLKDRSDFSHHAYDAAIIALFSNKTKTLYNLIDPSLNGIISKRSEGYWVIEDRYTGEIKELKKEDWTSIKNNVQARKIAKEIEEYLIDLDDEVFFSRKTKRKTNRQLYNETIYGIAAKTDEDGITNYYKKEKFSILDDKDIYLRLLREREKFVINQSNPEVIDQIIEIIESYGKENNIPSRDEAINIKYTKNKINYNLYLKQYMRSLTKSLDQFSEEFINQMIANKTFVLYNPTKNTTRKIKFLRLVNDVKINDIRKNQVINKFNGKNNEPKAFYENINSLGAIVFKNSANNFKTLSINTQIAIFGDKNWDIEDFKTYNMEKIEKYKEIYGIDKTYNFHSFIFPGTILLDKQNKEFYYISSIQTVRDIIEIKFLNKIEFKDENKNQDTSKTPKRLMFGIKSIMNNYEQVDISPFGINKKIFE

SEQ ID NO: 328 - protein, 1233 aa, Mycoplasma canis
  REGION 1..1233: note = Mycoplasma canis UFG4
MEKKRKVTLGFDLGIASVGWAIVDSETNQVYKLGSRLFDAPDTNLERRTQRGTRRLLRRRKYRNQKFYNLVKRTEVFGLSSREAIENRFRELSIKYPNIIELKTKALSQEVCPDEIAWILHDYLKNRGYFYDEKETKEDFDQQTIESMPSYKLNEFYKKYGYFKGALSQPTESEMKDNKDLKEAFFFDFSNKEWLKEINYFFNVQKNILSETFIEEFKKIFSFTRDISKGPGSDNMPSPYGIFGEFGDNGQGGRYEHIWDKNIGKCSIFTNEQRAPKYLPSALIFNFLNELANIRLYSTDKKNIQPLWKLSSIDKLNILLNLFNLPISEKKKKLTSANINDIVKKESTKSIMLSVEDIDMIKDEWAGKEPNVYGVGLSGLNIEESAKENKFKFQDLKILNVLINLLDNVGIKFEFKDRNDIIKNLELLDNLYLFLIYQKESNNKDSSIDLFIAKNESLNIENLKLKLKEFLLGAGNEFENHNSKTHSLSKKAIDAILPKLLDNNEGWNLEAIKNYDEEIKSQIEDNSFLMAKQDKKYLNDNFLKDAILPPNVKVTFQQAILIFNKIIQKFSKDFEIDKVVIELAREMTQDQENDALKGIAKAQKSKKSLVEERLEANNIDKSVFNEKYEKLIYKIFLWISQDFKDPYTGAKISANEIVDNKVEIDHIIPYSLCFDDSSANKVLVHKQSNQEKSNSLPYEYIKQGHSGWNWDEFTKYVKRVFVNNVDSILSKKERLKKSENLLTTSYDGYDKLGFLARNLNDTRYATILFRDQLNNYAEHHLIDDKKMFKVIAMNGAVTSFIRKNMSYDNKLRLKNRNDFSHHAYDAAIIALFSNKTKTLYNLIDPSLNGIISKRSEGYWVIEDRYTGEIKELKKEDWTSIKNNVQARKIAKEIEEYLIDLDDEVFFSRKTKRKTNRQLYNETIYGIAAKTDEDGITNYYKKEKLSILDDKDIYLRLLREREKFVINQSNPEVIDQIIEIIESYGKENNIPSRDEAINIKYTKNKINYNLYLKQYMRSLTKSLDQFSEEFINQMIANKTFVLYNPTKNTTRKIKFLRLVNDVKINDIRKNQVINKFNGKNNEPKAFYENINSLGAIVFKNSANNFKTLSINTQIAIFGDKNWDIEDFKTYNMEKIEKYKEIYGIDKTYNFHSFIFPGTILLDKQNKEFYYISSIQTVRDIIEIKFLNKIEFKDENKNQDTSKTPKRLMFGIKSIMNNYEQVDISPFGINKKIFE

SEQ ID NO: 329 - protein, 1239 aa, Mycoplasma cynos
MEEKRKVTLGFDLGVASVGWAIVDSETNEVYKLGSRLFDIPDTNIDRRAKRGSRRLVRRRSYRNQKFYNLIKRTKTFGFLDKEAIEKEFVLLSIKYPNIIELKVKGLQEEVSKSEAVWILHDYLKNRGYFYDDKEEKDDLENPSIESMPSYKLYEFYKEYGYFKGALSSPTESEKNKDSDLEKAIFFNFSNKEWTKEINHFFKIQKNIFSEDFKAKFMEFFSFIRDISKGPGSENMPSQYSIFGKYGDDGMGGKYQHIWDKNIGKCSIFKDKVRAPKYLPSALFFNLLNELSNIRLYSVDKREKSVLWRLSSKDKINIILNILQIILFKNDGKISNLDINKIVKNESIKSIILNEIDLDLIKDMWFEKEPNVYGIGLSGLNIEENKKENRFKFQDLKIFSVFIDLLKKSNINIEFNNEKDIIHNLKLLDELYFFLITQKYSRDKYGSIKKFILNNKSFNIDNLDEKLNIFLSISDDEFDNHNSKTHSLSKEAIYFIFPKLLHNNEGWNLEAIKNYDIDVREEISKHSFGIKKQDKKYLDDAFLDDAILPPSVKVTIKQSILIFNKIIKKFSNKFQIDNVVIELAREMTQEKEMDAQKSLNRLKKSRKKIIEERLNANNIDSKMFRDKTGEISPNYIYKIYLWISQNFKDPYTGENISANDILKNNVEIDHIIPYSLCFDDSSSNKVLVFKHSNQSKGNFLPFDMISTFSENSVWNWKEYTQYVEKTFKTNLESILDKKERVKKADNLLTSSYDGYDKLGFLARNLNDTRYATILFRDQLINYSENHLIDSKKMFKVIAMNGGVTSFIRKNMSFDSGLKVKDRSIFSHHAYDAAIIALFSNKTKILYNLINPSLDGIISKRSEGYWVLEDRLTGEIRKLNYNDWQSIKNNVEVKKIAREIESHLSNLDNVVMFSRKSKRKTNKELYNETLYGIATRIDENGIKNYYKKEKFNILEDENIYLRLLNERENFIINRSNPEVIDAIIEIFETIDKNKIPARDVAKNIKYTDNKIKYNLYLKDYMRKLVDEFPDKFRKDFIEQMIAKKIFILFNPIKNTTRKIKSLRSINNNKIEDIRKKQVLEKFNTAKNEPRSFYESLNSLGAIIFKNNLNIYKKMSISSQIATFGDKNWKIDDINTYNKEKLNKYKEIYGIDETYDFYSFIFPGTILLDEKNKEFLYISSIQTLKDKIELKFLDRIEFEKKNVNSNLKPKIKREIISTKKLMSDYKIIKISPLGINKKIFE

SEQ ID NO: 330 - protein, 1269 aa, Mycoplasma gallisepticum
MNNSIKSKPEVTIGLDLGVGSVGWAIVDNETNIIHHLGSRLFSQAKTAEDRRSFRGARRLIRRRKYKLKRFINLIWKYNSYFGFKNKEDILNNYQEQQKLHNTVLNLKLEALNAKIDPKALSWILHDYLKNRGHFYEDNRDFNVYPTEELANYFGEYGYYKGIIDSKEDNDDKLEEGLTKYKFSNQHWLEEIKKVLSNQTGLPEKFKEEYESLFSYVRNYSEGPGSINSVSPYGIYHLDEKEGKVVQKYNNIWDKTIGKCSIFPDEYRAPKNSPIAMIFNEINELSTIRSYSIYLTGWFINQEFKKAYLNKLLDLLIKTNSEKPIDARQFKKLREETIAESIGKETLKDVEREEKLEKEDHKWKLKGLKLNTNGKIQYNDLSSLAKFVHKLKQHLKLDFLLEDQYTTLDKINFLQSLFVYLGKHLRYSNRVDSANLKEFSDSNKLFERVLQEQKDDLFKLFEQTDKDDEKILAQTHSLSTKAMLLAITRMTNLDNDEDNQKNNDKGWNFEAIKNFDQKFIDITKKNNNLSLKQDKRYLDDRFINDAILSPGVKRILREATKVFNAILKQFSEEYDVTKVVIELARELSEEKELENTKNYEKLIKKNSDKISERLEALDIAEDKIEDILKSPTKSYKVLLWLQQDHIDPYSQKEIAFEDILTKTEKTEIDHIIPYSISFDDSSSNKLLVLAESNQAKSNQTPYEFITSGNAGIKWEDYEAYCRKFKDGDTSLLDSTQRSKKFAKMMKTDTSSKYDIGFLARNLNDTRYATIVFRDALKDYANNHLVEDKPMFKVVCINGGVTSFLRKNFDKSWYAKKDRDKNIHHAVDASIISIFSNETKTLFNQLTQFADYKLFKNTDGSWKKIDPKTGVVTEVTDENWKQIRVRNQVSEIAKVINKCIQDSNIERKARYSRKIENKTNISLFNDTVYSAKKVGYEDQIKRKNLKTLDIHESAEENKNSKVKKQFVYRKLVNVSLLNNDKLADLFAEKEDILMYRANPWVINLAEQIFNEYTENKKIKSQNVFEKYMLDLTKEFPEKFSEAFVKSMLRNKTAIIYNVEKKVVHRIKRLKILSSELKENKLSNVIIRSKNESGTKLSYQDTINSIALMIMRSIDPTAKKQYIRVPLNTLNLHLGDQDFDLHNIDAYLKKPKFVKYLKANEIGDEYKPWRVLTSGTLLIHKKDKKLMYISSFQNLKDVIEIKNLIETEYKENDDSDPKKKKKANRFLMTLSTILNDYILLDAKDNFDILGLSKNRIDEILNSKLGLDKITK

SEQ ID NO: 331 - protein, 1224 aa, Mycoplasma gallisepticum
MNNSIKSKPEVTIGLDLGVGSVGWAIVDNETNIIHHLGSRLFSQAKTAEDRRSFRGARRLIRRRKYKLKRFINLIWKYNSYFGFKNKEDILNNYQEQQKLHNTVLNLKLEALNAKIDPKALSWILHDYLKNRGHFYEDNRDFNVYPTEELANYFGEYGYYKGIIDSKEDNDDKLEEGLTKYKFSNQHWLEEIKKVLSNQTGLPEKFKEEYESLFSYVRNYSEGPGSINSVSPYGIYHLDEKEGKVVQKYNNIWDKTIGKCSIFPDEYRAPKNSPIAMIFNEINELSTIRSYSIYLTGWFINQEFKKAYLNKLLDLLIKTNSEKPIDARQFKKLREETIAESIGKETLKDVEREEKLEKEDHKWKLKGLKLNTNGKIQYNDLSSLAKFVHKLKQHLKLDFLLEDQYTTLDKINFLQSLFVYLGKHLRYSNRVDSANLKEFSDSNKLFERVLQEQKDDLFKLFEQTDKDDEKILAQTHSLSTKAMLLAITRMTNLDNDEDNQKNNDKGWNFEAIKNFDQKFIDITKKNNNLSLKQDKRYLDDRFINDAILSPGVKRILREATKVFNAILKQFSEEYDVTKVVIELARELSEEKELENTKNYEKLIKKNSDKISERLEALDIAEDKIEDILKSPTKSYKVLLWLQQDHIDPYSQKEIAFEDILTKTEKTEIDHIIPYSISFDDSSSNKLLVLAESNQAKSNQTPYEFITSGNAGIKWEDYEAYCRKFKDGDTSLLDSTQRSKKFAKMMKTDTSSKYDIGFLARNLNDTRYATIVFRDALKDYANNHLVEDKPMFKVVCINGGVTSFLRKNFDKSWYAKKDRDKNIHHAVDASIISIFSNETKTLFNQLTQFADYKLFKNTDGSWKKIDPKTGVVTEVTDENWKQIRVRNQVSEIAKVINKCIQDSNIERKARYSRKIENKTNISLFNDTVYSAKKVGYEDQIKRKNLKTLDIHESAEENKNSKVKKQFVYRKLVNVSLLNNDKLADLFAEKEDILMYRANPWVINLAEQIFNEYTENKKIKSQNVFEKYMLDLTKEFPEKFSEAFVKSMLRNKTAIIYNVEKKVVHRIKRLKILSSELKENKLSNVIIRSKNESGTKLSYQDTINSIALMIMRSIDPTAKKQYIRVPLNTLNLHLGDQDFDLHNIDAYLKKPKFVKYLKANEIGDEYKPWRVLTSGTLLIHKKDKKLMYISSFQNLKDVIEIKNLIETEYKENDDSDPKKRRKQIGS

SEQ ID NO: 332 - protein, 1269 aa, Mycoplasma gallisepticum
MNNSIKSKPEVTIGLDLGVGSVGWAIVDNETNIIHHLGSRLFSQAKTAEDRRSFRGVRRLIRRRKYKLKRFVNLIWKYNSYFGFKNKEDILNNYQEQQKLHNTVLNLKSEALNAKIDPKALSWILHDYLKNRGHFYEDNRDFNVYPTKELAKYFDKYGYYKGIIDSKEDNDNKLEEELTKYKFSNKHWLEEVKKVLSNQTGLPEKFKEEYESLFSYVRNYSEGPGSINSVSPYGIYHLDEKEGKVVQKYNNIWDKTIGKCNIFPDEYRAPKNSPIAMIFNEINELSTIRSYSIYLTGWFINQEFKKAYLNKLLDLLIKTNGEKPIDARQFKKLREETIAESIGKETLKDVENEEKLEKEDHKWKLKGLKLNTNGKIQYNDLSSLAKFVHKLKQHLKLDFLLEDQYATLDKINFLQSLFVYLGKHLRYSNRVDSANLKEFSDSNKLFERILQKQKDGLFKLFEQTDKDDEKILAQTHSLSTKAMLLAITRMTNLDNDEDNQKNNDKGWNFEAIKNFDQKFIDITKKNNNLSLKQNKRYLDDRFINDAILSPGVKRILREATKVFNAILKQFSEEYDVTKVVIELARELSEEKELENTKNYKKLIKKNGDKISEGLKALGISEDEIKDILKSPTKSYKFLLWLQQDHIDPYSLKEIAFDDIFTKTEKFEIDHIIPYSISFDDSSSNKLLVLAESNQAKSNQTPYEFISSGNAGIKWEDYEAYCRKFKDGDSSLLDSTQRSKKFAKMMKTDTSSKYDIGFLARNLNDTRYATIVFRDALEDYANNHLVEDKPMFKVVCINGSVTSFLRKNFDDSSYAKKDRDKNIHHAVDASIISIFSNETKTLFNQLTQFADYKLFKNTDGSWKKIDPKTGVVTEVTDENWKQIRVRNQVSEIAKVIEKYIQDSNIERKARYSRKIENKTNISLFNDTVYSAKKVGYEDQIKRKNLKTLDIHESAKENKNSKVKRQFVYRKLVNVSLLNNDKLADLFAEKEDILMYRANPWVINLAEQIFNEYTENKKIKSQNVFEKYMLDLTKEFPEKFSEFLVKSMLRNKTAIIYDDKKNIVHRIKRLKMLSSELKENKLSNVIIRSKNQSGTKLSYQDTINSLALMIMRSIDPTAKKQYIRVPLNTLNLHLGDHDFDLHNMDAYLKKPKFVKYLKANEIGDEYKPWRVLTSGTLLIHKKDKKLMYISSFQNLNDVIEIKNLIETEYKENDDSDSKKKKKANRFLMTLSTILNDYILLDAKDNFDILGLSKNRIDEILNSKLGLDKIVK

SEQ ID NO: 333 - protein, 1269 aa, Mycoplasma gallisepticum; identical to SEQ ID NO: 332
  REGION 1..1269: note = Mycoplasma gallisepticum str. F

SEQ ID NO: 334 - protein, 1270 aa, Mycoplasma gallisepticum
MNNSIKSKPEVTIGLDLGVGSVGWAIVDNETNIIHHLGSRLFSQAKTAEDRRSFRGVRRLIRRRKYKLKRFVNLIWKYNSYFGFKNKEDILNNYQEQQKLHNTVLNLKLEALNAKIDPKALSWILHDYLKNRGHFYEDNRDFNVYPTEELANYFDEFGYYKGIIDSKNDDDDKLEEGLTKYKFSNQHWLEEVKKVLSNQTGLPEKFKEEYESLFSYVRNYSEGPGSINSVSPYGIYHLDEKEGKVVQKYNNIWDKTIGKCSIFPDEYRAPKNSPIAMIFNEINELSTIRSYSIYLTGWFINQEFKKAYLNKLLDLLIKTNSEKPIDARQFKKLREETIAESIGKETLKDVESEEKLEKDDHKWKLKGLKLNTNGKIQYNDLSSLAKFVHKLKQHLKLDFLLEDQYTPLDKINFLQSLYVYLGKHLRYSNRVDSANLKEFSDSSRLFERVLQEQKDGLFKLFEQTDKDDEKILTQTHSLSTKAMLLAITRMTNLDNDEDNQKNNDKGWNFEAIKNFDQKFIDITKTNNNLSLKQDKRYLDDQFINDAILSPGVKRILREATKVFNAILKQFSEEYDVTKVVIELARELSEEKELENTKNYKKLIKKNGDKISEGLKALGIAEDKIEEILKSPTKSYKVLLWLQQDHIDPYSQKEIAFDDILTKTEKTEIDHIIPYSISFDDSSSNKLLVLAESNQAKSNQTPYEFINSGKAEITWEVYEAYCHKFKNGDSSLLDSTQRSKKFAKMMKTDTSSKYDIGFLARNLNDTRYATIVFRDALKDYANNHLVEDKPMFKVVCINGGVTSFLRKNFDPKSWYAKKDRDKNIHHAVDASIISIFSNETKTLFNQLTKFADYKLFKNTDGSWKKIDPKTGVVSEVTDENWKQIRVRNQVSEIAKVIDKYIQDSNIERKARYSRKIENKTNISLFNDTVYSAKKVGYEDQIKRKNLKTLDIHESAEENKNSKVKKQFVYRKLVNVSLLNNDKLADLFAEKEDILMYRANPWVINLAEQIFNEYTENKKIKSQNVFEKYMLDLTKEFPEKFSEAFVKSMIRNKTAIIYNVEKDVVHRIKRLKILSSELKENKWSNVIIRSKNESGTKLSYQDTINSIALMIMRSIDPTAKKQYIRVPLNTLNLHLGDQDFDLHNIDAYLKKPKFVKYLKANEIGDEYKPWRVLTSGTLLIHKKDKKLMYISSFQNLNDLIEIKNLIETEYKENVDSDPKKKKKASQILRSLSVILNDYILLDAKYNFDILGLSKNKIDEILNSKLDLDKIAK

SEQ ID NO: 335 - protein, 1236 aa, Mycoplasma mobile
MYFYKNKENKLNKKVVLGLDLGIASVGWCLTDISQKEDNKFPIILHGVRLFETVDDSDDKLLNETRRKKRGQRRRNRRLFTRKRDFIKYLIDNNIIELEFDKNPKILVRNFIEKYINPFSKNLELKYKSVTNLPIGFHNLRKAAINEKYKLDKSELIVLLYFYLSLRGAFFDNPEDTKSKEMNKNEIEIFDKNESIKNAEFPIDKIIEFYKISGKIRSTINLKFGHQDYLKEIKQVFEKQNIDFMNYEKFAMEEKSFFSRIRNYSEGPGNEKSFSKYGLYANENGNPELIINEKGQKIYTKIFKTLWESKIGKCSYDKKLYRAPKNSFSAKVFDITNKLTDWKHKNEYISERLKRKILLSRFLNKDSKSAVEKILKEENIKFENLSEIAYNKDDNKINLPIINAYHSLTTIFKKHLINFENYLISNENDLSKLMSFYKQQSEKLFVPNEKGSYEINQNNNVLHIFDAISNILNKFSTIQDRIRILEGYFEFSNLKKDVKSSEIYSEIAKLREFSGTSSLSFGAYYKFIPNLISEGSKNYSTISYEEKALQNQKNNFSHSNLFEKTWVEDLIASPTVKRSLRQTMNLLKEIFKYSEKNNLEIEKIVVEVTRSSNNKHERKKIEGINKYRKEKYEELKKVYDLPNENTTLLKKLWLLRQQQGYDAYSLRKIEANDVINKPWNYDIDHIVPRSISFDDSFSNLVIVNKLDNAKKSNDLSAKQFIEKIYGIEKLKEAKENWGNWYLRNANGKAFNDKGKFIKLYTIDNLDEFDNSDFINRNLSDTSYITNALVNHLTFSNSKYKYSVVSVNGKQTSNLRNQIAFVGIKNNKETEREWKRPEGFKSINSNDFLIREEGKNDVKDDVLIKDRSFNGHHAEDAYFITIISQYFRSFKRIERLNVNYRKETRELDDLEKNNIKFKEKASFDNFLLINALDELNEKLNQMRFSRMVITKKNTQLFNETLYSGKYDKGKNTIKKVEKLNLLDNRTDKIKKIEEFFDEDKLKENELTKLHIFNHDKNLYETLKIIWNEVKIEIKNKNLNEKNYFKYFVNKKLQEGKISFNEWVPILDNDFKIIRKIRYIKFSSEEKETDEIIFSQSNFLKIDQRQNFSFHNTLYWVQIWVYKNQKDQYCFISIDARNSKFEKDEIKINYEKLKTQKEKLQIINEEPILKINKGDLFENEEKELFYIVGRDEKPQKLEIKYILGKKIKDQKQIQKPVKKYFPNWKKVNLTYMGEIFKK

SEQ ID NO: 336 - protein, 1265 aa, Mycoplasma ovipneumoniae
  REGION 1..1265: note = Mycoplasma ovipneumoniae SC01
MHNKKNITIGFDLGIASIGWAIIDSTTSKILDWGTRTFEERKTANERRAFRSTRRNIRRKAYRNQRFINLILKYKDLFELKNISDIQRANKKDTENYEKIISFFTEIYKKCAAKHSNILEVKVKALDSKIEKLDLIWILHDYLENRGFFYDLEEENVADKYEGIEHPSILLYDFFKKNGFFKSNSSIPKDLGGYSFSNLQWVNEIKKLFEVQEINPEFSEKFLNLFTSVRDYAKGPGSEHSASEYGIFQKDEKGKVFKKYDNIWDKTIGKCSFFVEENRSPVNYPSYEIFNLLNQLINLSTDLKTTNKKIWQLSSNDRNELLDELLKVKEKAKIISISLKKNEIKKIILKDFGFEKSDIDDQDTIEGRKIIKEEPTTKLEVTKHLLATIYSHSSDSNWININNILEFLPYLDAICIILDREKSRGQDEVLKKLTEKNIFEVLKIDREKQLDFVKSIFSNTKFNFKKIGNFSLKAIREFLPKMFEQNKNSEYLKWKDEEIRRKWEEQKSKLGKTDKKTKYLNPRIFQDEIISPGTKNTFEQAVLVLNQIIKKYSKENIIDAIIIESPREKNDKKTIEEIKKRNKKGKGKTLEKLFQILNLENKGYKLSDLETKPAKLLDRLRFYHQQDGIDLYTLDKINIDQLINGSQKYEIEHIIPYSMSYDNSQANKILTEKAENLKKGKLIASEYIKRNGDEFYNKYYEKAKELFINKYKKNKKLDSYVDLDEDSAKNRFRFLTLQDYDEFQVEFLARNLNDTRYSTKLFYHALVEHFENNEFFTYIDENSSKHKVKISTIKGHVTKYFRAKPVQKNNGPNENLNNNKPEKIEKNRENNEHHAVDAAIVAIIGNKNPQIANLLTLADNKTDKKFLLHDENYKENIETGELVKIPKFEVDKLAKVEDLKKIIQEKYEEAKKHTAIKFSRKTRTILNGGLSDETLYGFKYDEKEDKYFKIIKKKLVTSKNEELKKYFENPFGKKADGKSEYTVLMAQSHLSEFNKLKEIFEKYNGFSNKTGNAFVEYMNDLALKEPTLKAEIESAKSVEKLLYYNFKPSDQFTYHDNINNKSFKRFYKNIRIIEYKSIPIKFKILSKHDGGKSFKDTLFSLYSLVYKVYENGKESYKSIPVTSQMRNFGIDEFDFLDENLYNKEKLDIYKSDFAKPIPVNCKPVFVLKKGSILKKKSLDIDDFKETKETEEGNYYFISTISKRFNRDTAYGLKPLKLSVVKPVAEPSTNPIFKEYIPIHLDELGNEYPVKIKEHTDDEKLMCTIK

SEQ ID NO: 337 - protein, 1314 aa, Mycoplasma synoviae
MLRLYCANNLVLNNVQNLWKYLLLLIFDKKIIFLFKIKVILIRRYMENNNKEKIVIGFDLGVASVGWSIVNAETKEVIDLGVRLFSEPEKADYRRAKRTTRRLLRRKKFKREKFHKLILKNAEIFGLQSRNEILNVYKDQSSKYRNILKLKINALKEEIKPSELVWILRDYLQNRGYFYKNEKLTDEFVSNSFPSKKLHEHYEKYGFFRGSVKLDNKLDNKKDKAKEKDEEEESDAKKESEELIFSNKQWINEIVKVFENQSYLTESFKEEYLKLFNYVRPFNKGPGSKNSRTAYGVFSTDIDPETNKFKDYSNIWDKTIGKCSLFEEEIRAPKNLPSALIFNLQNEICTIKNEFTEFKNWWLNAEQKSEILKFVFTELFNWKDKKYSDKKFNKNLQDKIKKYLLNFALENFNLNEEILKNRDLENDTVLGLKGVKYYEKSNATADAALEFSSLKPLYVFIKFLKEKKLDLNYLLGLENTEILYFLDSIYLAISYSSDLKERNEWFKKLLKELYPKIKNNNLEIIENVEDIFEITDQEKFESFSKTHSLSREAFNHIIPLLLSNNEGKNYESLKHSNEELKKRTEKAELKAQQNQKYLKDNFLKEALVPLSVKTSVLQAIKIFNQIIKNFGKKYEISQVVIEMARELTKPNLEKLLNNATNSNIKILKEKLDQTEKFDDFTKKKFIDKIENSVVFRNKLFLWFEQDRKDPYTQLDIKINEIEDETEIDHVIPYSKSADDSWFNKLLVKKSTNQLKKNKTVWEYYQNESDPEAKWNKFVAWAKRIYLVQKSDKESKDNSEKNSIFKNKKPNLKFKNITKKLFDPYKDLGFLARNLNDTRYATKVFRDQLNNYSKHHSKDDENKLFKVVCMNGSITSFLRKSMWRKNEEQVYRFNFWKKDRDQFFHHAVDASIIAIFSLLTKTLYNKLRVYESYDVQRREDGVYLINKETGEVKKADKDYWKDQHNFLKIRENAIEIKNVLNNVDFQNQVRYSRKANTKLNTQLFNETLYGVKEFENNFYKLEKVNLFSRKDLRKFILEDLNEESEKNKKNENGSRKRILTEKYIVDEILQILENEEFKDSKSDINALNKYMDSLPSKFSEFFSQDFINKCKKENSLILTFDAIKHNDPKKVIKIKNLKFFREDATLKNKQAVHKDSKNQIKSFYESYKCVGFIWLKNKNDLEESIFVPINSRVIHFGDKDKDIFDFDSYNKEKLLNEINLKRPENKKFNSINEIEFVKFVKPGALLLNFENQQIYYISTLESSSLRAKIKLLNKMDKGKAVSMKKITNPDEYKIIEHVNPLGINLNWTKKLENNN

SEQ ID NO: 338 - protein, 1304 aa, Mycoplasma synoviae
  REGION 1..1304: note = Mycoplasma synoviae 53
MLNNVQNLWKYLLLLIFDKKIIFLFKIKVILIRRYMENNNKEKIVIGFDLGVASVGWSIVNAETKEVIDLGVRLFSEPEKADYRRAKRTTRRLLRRKKFKREKFHKLILKNAEIFGLQSRNEILNVYKDQSSKYRNILKLKINALKEEIKPSELVWILRDYLQNRGYFYKNEKLTDEFVSNSFPSKKLHEHYEKYGFFRGSVKLDNKLDNKKDKAKEKDEEEESDAKKESEELIFSNKQWINEIVKVFENQSYLTESFKEEYLKLFNYVRPFNKGPGSKNSRTAYGVFSTDIDPETNKFKDYSNIWDKTIGKCSLFEEEIRAPKNLPSALIFNLQNEICTIKNEFTEFKNWWLNAEQKSEILKFVFTELFNWKDKKYSDKKFNKNLQDKIKKYLLNFALENFNLNEEILKNRDLENDTVLGLKGVKYYEKSNATADAALEFSSLKPLYVFIKFLKEKKLDLNYLLGLENTEILYFLDSIYLAISYSSDLKERNEWFKKLLKELYPKIKNNNLEIIENVEDIFEITDQEKFESFSKTHSLSREAFNHIIPLLLSNNEGKNYESLKHSNEELKKRTEKAELKAQQNQKYLKDNFLKEALVPLSVKTSVLQAIKIFNQIIKNFGKKYEISQVVIEMARELTKPNLEKLLNNATNSNIKILKEKLDQTEKFDDFTKKKFIDKIENSVVFRNKLFLWFEQDRKDPYTQLDIKINEIEDETEIDHVIPYSKSADDSWFNKLLVKKSTNQLKKNKTVWEYYQNESDPEAKWNKFVAWAKRIYLVQKSDKESKDNSEKNSIFKNKKPNLKFKNITKKLFDPYKDLGFLARNLNDTRYATKVFRDQLNNYSKHHSKDDENKLFKVVCMNGSITSFLRKSMWRKNEEQVYRFNFWKKDRDQFFHHAVDASIIAIFSLLTKTLYNKLRVYESYDVQRREDGVYLINKETGEVKKADKDYWKDQHNFLKIRENAIEIKNVLNNVDFQNQVRYSRKANTKLNTQLFNETLYGVKEFENNFYKLEKVNLFSRKDLRKFILEDLNEESEKNKKNENGSRKRILTEKYIVDEILQILENEEFKDSKSDINALNKYMDSLPSKFSEFFSQDFINKCKKENSLILTFDAIKHNDPKKVIKIKNLKFFREDATLKNKQAVHKDSKNQIKSFYESYKCVGFIWLKNKNDLEESIFVPINSRVIHFGDKDKDIFDFDSYNKEKLLNEINLKRPENKKFNSINEIEFVKFVKPGALLLNFENQQIYYISTLESSSLRAKIKLLNKMDKGKAVSMKKITNPDEYKIIEHVNPLGINLNWTKKLENNN

SEQ ID NO: 339 - protein, 1401 aa, Myroides injenensis
  REGION 1..1401: note = Myroides injenensis M09-0166
MKRILGLDLGTTSIGWAYVHEAENVNETSSIQKVGVRVNPLTTEEQTNFEKGKPITTNASRTLARSARRNLQRYKLRRDNLIQILKENNWINNTTSLTETGNHSTFETYELRNKAASEKLTLDQLSRVLLMLNKKRGYKSSRKVNSKEEGQLIDGMEVAKKLYHEQLTPGQLSLQLMNQGVKKLPDYYRSDLNQELESIWNFQQQFYPNILTDKFKEEINGKGLTSTSSAFWNIYNFNTAENKGSRDEKKKQALQWRSEALSKQLSKEIVAYIIADLNGQIYNSSGYLGAISDRSKELYFNNLTVGQYLFKQLKSNPHTSLKNQVFYRQDYLNEFEKIWETQSKFYPKELTAALKREIRDVIIFYQRKLKSQKGLISFCEFEQKQKTINGKTKTIGHRVIPKSSPLFQEFKIWQQLHNVVLRNKKTNEIVSLADEQKVHLFEELNLKGKLKSNQVLKLIENKPKDWELNYTELEGNNTNKALYNAYLDILDIEGYDVRNELKVKLNKDDIELSDLDVNASEIKEMIFSVFKHLGINTEILEFDATLEDKVFEKQASYQLWHLLYSYEEDNSPTGLDRLYNLLHKKFGFKLNHAKLIGNVLFQDDYGSLSSKAIKNIFPYITENNYYTACELAGYKHSKHSLTKEENETRELKNRLTILPKNSLRNPVVEKIINQMINVVNTLIDEENNILIAQGKEPNFQFDEIRIELARELKKNAKEREELTKSINKSKTDHEKIIKILQKEDGIKNPTRNDIVRFKLYSELKNNGYKDLYTNEYIERKDIFTKEYDIEHIIPQSKLFDDSFSNKTLVRRNVNLKKGNQTAYDFILCEYGQEKANEFETRITNLYNLGKDEGISKSKFKKLLMQESEIGNGFIERDLRETQYIAKKAKSLLLEITRNVISTSGSITDRLREDWGLINVMKELNLQKYRDAGLTEFVKMKDGNKKEVIIDWTKRNDHRHHAMDALTIAFTKHNHIQYLNHLNARKNVNNELHNNIIAIEKLETTLVSDERGNKKRIFKEPIANFRTIAKSHLEAILVSHKAKNKVVTKNINKISGKKISQQTLTPRGQLHKETIYGKIRQYVSKQEKVGPKFTIEVIEQVSNPTYRNLLLKRLEENNNDPKKAFGGKNSLNKNPIYINLEKNIKVPEVLKLVWLEDNYTIRKEISPDLKIDKVIDQGVKQILQNRLAQYKGDSKLAFSNLDANPIWLNEDKGIAIKRVTISGIATAQPLHRKKDHLGQPILDHNGQEIPVDFISTGNNHHVAIYEDENGKLQESVVSHFEAVERVNQKLPIIDKTFNQHLGWKFLFTMKQNELFLFPSDDFNPNEIDLFDKQNYTVISKHLFRIQKLSTKDYSFRHHLETNVEEIKDLKTITWRREGLNGIQNIIKVRTNHLGEIIHIGEY

SEQ ID NO: 340 - protein, 1466 aa, Myroides odoratus
  REGION 1..1466: note = Myroides odoratus DSM 2801
MKNILGLDLGTNSIGWALVKEDFENKQGEILGLGSRIIPMSQDILGEFGRGNSISQTADRTGYRGVRRLRERHLLRRERLHRVLNILGFLPNHYAKEIDFTKRLGKFINHAEPKLSFDKEFIFKDSFNEMLKDFQQNQPGFIINKHGEEALVPYDWTIYYLRKKALTQKIDKEELAWILLNFNQKRGYYQLRGEEEEENTNKLVEFYSLKIIDVIADNEVNKKGEVWYSLHLENGWIYRRSSKISLVDWKDKVRDFIVTTDVNDDGSEKLDKDGVVKRSFRAPSADDWTLLKKKTEQDIDNSNKTVGAYIYENLLLNPKQKIKGKLVRTIERKFYKDELKQILEKQKEFHQELQNEQLLQDCVRELYKYNEQHQQMLESKDFVHLFLNDIIFYQRPLRSQKSLISNCTLEKRVSRDGVVFPIKVISKSNPYYQEFRLLQWLQNLAIYRKDDDVNVTQEFLNSIESWENLLQFLNAKKEIKQEQLIKFLLEQKGLKGNSLKTAILTYRWNYVTDKVYPMNETRSLIQDKLKKVENVATDFLSFDNEMALWHIIYSVNDKIEYEKALAKFASKHNLDEISFVESFKKFPPFKSDYGSFSEKAIKKLLPLMRFGSVWNKNNIVPSVLDRIDKILTGEYDEKIKIRVREKAEQFQLNQIEDFQNLPLWLAQYVVYDRHSEAEIAGKWNSVKDLENYLKEFKQHSLRNPIVEQIITETLRVVKDIWQQYGNGVQNFFDEIHIELGREMKNTADERKRITNSVTENENTNLRIKALLVELKEDTNIENVRPHSPMQQEILKIYEEGVLNAVENIDEDILKISKTAQPSKSELIRYKLWLEQKYQSPYTGEMIPLSRLFTSDYEIEHVIPQSRYFDDSLSNKVICEAAVNKRKDNQLGLEFIKNHHSEKIELGNGRTAQVLEVEAYESFVKKNYDKNRGKRNKLLLEDVPEKMIERQLNDTRYISKFVTHLLSNIVRKDEVNSKDDGINSKNIIPGNGKITSQLKQDWGLNDVWNELILPRFERMNNLTNSTDFTSTNTNGKIIPTVPLEYSKGFSKKRIDHRHHALDALVIALATRDHVNLLNNESALPKKDRTKEEQKSFRFDLQVNLRNKEKYFNVKEGREKEKFTTFKKPWNTLTQDTRDALENMVVSFKQNLRVINKATNYYESYTDENGNLRLDKYGNPKKELISQKGTNWAIRKSLHKETVSGQIHLDRVKVTKGKIVTATRKSLDSSFNEKSIESITDTGIQKILRNYLKAKDNKPDVAFSPEGIEELNKSISVYNEGKNHQPIIKVRIFEQGSKFPVGETGNKIAKFVEAAKGTNLFFGIYQDKTGKRSYDTIPLNLVIERLKQGLSPVPETNEKGHQLLFHLSPNDLVYVPTIDDNEQLDSNRVYKFTDSSDTTCNFIPSNISAIIFNINSKEQEKRGINYPIQNELGVGSPQSKNQKSFDGFMIKEVCIKLKVDRLGNISKT

SEQ ID NO: 341 - protein, 1077 aa, Neisseria bacilliformis
  REGION 1..1077: note = Neisseria bacilliformis ATCC BAA-1200
MQQKPQRYILGLDLGIASVGWACVWADENEHPTGLLDCGVRTFERAEVPKTGDSLALARRQARSVRRLIRRRAHRLLRLRRLLKREGVLLSADFNENGLVRGLPIDAWALRVAGLDRKLSNKEWAAVLLHLVKHRGYLSQRKNETQSKDKELGRLLAGVNGNREALQNRSDEYRTAAELAVKKFAAENNGSLRNKGGDYSHTFDRKDLQRELHLLFERQRALDNPFTSSEMEAAVDELLMKQRSALQGEAVLKMLGRCTFEPSEYKAAKNTYSAERFVWLTKLNNLRIQYNGEERALSEAERRLLLDEPYQKAKLTYKQVRTILELPESAVFKGLRYGHGEDGLKAESGTLMEMKAYHAVRKALKDAGLEGEWENRIRNPELLDAIGTAFSLYKTDEDIRANLAAFRLSENVLEALLAGLNFDKFVHLSLKALAKILPLMEQGMRYDEACKEAYGDHYGAKEQEDHRLLPPFVADDIRNPVVFRTLTQARKIVNEIVRRYGSPLRVHIETGREVGKSFSDRKEIEKRQEENRKERERAAAHFKELFPNFAGEPKAQDILKLRLYEQQHGKCLYSGKEIDLRRLPEKGYVEIDHALPFSRTWDDSFNNKVLVLGKENQDKRNRTPYEYLDGKGNSGAWRAFAERVSGCRFPYAKKQRLLTQKLDEKTEQGFLERNLNDTRYVARFLCQFIEEKMHLEGAGKKRVFASNGQITALLRGFWGLKKVREENDRHHALDAVVVACSSVSMQQKITRHFRYREELEHIDRETGEVIHGFPQPWEFFRQEVMTRVFSDDPVSELAEKLDSRPEAVHEFVTPLFVSRAPHRKVTGQGHLETIRSAKRLDEKISVVKLPLTQLKTKDIERIVGYPNREPALYDALAARLAAFKDDPAKAFSEPFYKTGKDGKCGVLVKAVRVENVQKSGLLVRKDESGKMQGVADNATMVRVDVFGKNGKNYLVPVYAWQVEKGELPNRAVVAYADEEDWDEMDDSFEFKFSLYPNDLVEVVTKKDKFFGYYSGFNRATGAINIKEHDLSKSKVKNGVYEGIGVKTAQSFQKYQVDTLGKTIRLCKPEKRMGFKKK

SEQ ID NO: 342 - protein, 1082 aa, Neisseria cinerea
  REGION 1..1082: note = Neisseria cinerea ATCC 14685
MAAFKPNPMNYILGLDIGIASVGWAIVEIDEEENPIRLIDLGVRVFERAEVPKTGDSLAAARRLARSVRRLTRRRAHRLLRARRLLKREGVLQAADFDENGLIKSLPNTPWQLRAAALDRKLTPLEWSAVLLHLIKHRGYLSQRKNEGETADKELGALLKGVADNTHALQTGDFRTPAELALNKFEKESGHIRNQRGDYSHTFNRKDLQAELNLLFEKQKEFGNPHVSDGLKEGIETLLMTQRPALSGDAVQKMLGHCTFEPTEPKAAKNTYTAERFVWLTKLNNLRILEQGSERPLTDTERATLMDEPYRKSKLTYAQARKLLDLDDTAFFKGLRYGKDNAEASTLMEMKAYHAISRALEKEGLKDKKSPLNLSPELQDEIGTAFSLFKTDEDITGRLKDRVQPEILEALLKHISFDKFVQISLKALRRIVPLMEQGNRYDEACTEIYGDHYGKKNTEEKIYLPPIPADEIRNPVVLRALSQARKVINGVVRRYGSPARIHIETAREVGKSFKDRKEIEKRQEENRKDREKSAAKFREYFPNFVGEPKSKDILKLRLYEQQHGKCLYSGKEINLGRLNEKGYVEIDHALPFSRTWDDSFNNKVLALGSENQNKGNQTPYEYFNGKDNSREWQEFKARVETSRFPRSKKQRILLQKFDEDGFKERNLNDTRYINRFLCQFVADHMLLTGKGKRRVFASNGQITNLLRGFWGLRKVRAENDRHHALDAVVVACSTIAMQQKITRFVRYKEMNAFDGKTIDKETGEVLHQKAHFPQPWEFFAQEVMIRVFGKPDGKPEFEEADTPEKLRTLLAEKLSSRPEAVHKYVTPLFISRAPNRKMSGQGHMETVKSAKRLDEGISVLRVPLTQLKLKDLEKMVNREREPKLYEALKARLEAHKDDPAKAFAEPFYKYDKAGNRTQQVKAVRVEQVQKTGVWVHNHNGIADNATIVRVDVFEKGGKYYLVPIYSWQVAKGILPDRAVVQGKDEEDWTVMDDSFEFKFVLYANDLIKLTAKKNEFLGYFVSLNRATGAIDIRTHDTDSTKGKNGIFQSVGVKTALSFQKYQIDELGKEIRPCRLKKRPPVR

SEQ ID NO: 343 - protein, 1081 aa, Neisseria flavescens
  REGION 1..1081: note = Neisseria flavescens SK114
MTAFKPNPINYILGLDIGIASVGWAMVEIDEEENPIRLIDLGVRVFERAEVPKTGDSLAAARRLARSVRRLTRRRAHRLLRARRLLKREGVLQAADFDENGLIKSLPNTPWQLRAAALDRKLTPLEWSAVLLHLIKHRGYLSQRKNEGETADKELGALLKGVADNAHALQTGDFRTPAELAVNKFEKESGHIRNQRGDYSHTFSRKDLQAELVLLFEKQKEFGNPHISDGLKEGIETLLMAQRPALSGDAVQKMLGYCTFEPTEPKAAKNTYTAERFIWLTKLNNLRILEQGSERPLTDTERATLIDMPYKNKLTYAKARELLGLDDTAFFKGLRYGKDNAESATLMEMKAYHAIRRALEKEGLKDKKSPLSLSPELQDEIGTAFSLFKTDEDITGRLKGCLQPEILDALLKHINFDKFVQISLKALRRIVPLMEQGKRYDEACAETYGDHYGEKNSEEMLYLPPIPADEIRNPVVLRALSQARKVINGVVRRYGSPARIHIETAREVGKSFKDRKEIEKRQEENRKDREKAAAKFREYFPNFVGEPKSKDILKLRLYEQQHGKCLYSGKAIDIRRLNGKGYVEIDHALPFSRTWDDSFNNKVLVLGSENQNKGNRTPYEYLNGKDNSREWLEFKARVETSRFPHSKKQRVLLQKFDEKGFKERNLNDTRYVNRFLCQFVADHMQLTGKGKRRVFASNGQITNLLRGFWGLHKVRAENDRHHALDAVVVACSTVAMQQKITCFVRYKEMNAFDGKTVDKETGEVLHQKTHFPQPWEFFAQEVMIRVFGKPDGKPEFEEADTPEKLRALLAEKLSSRPEAVHEYVTPLFVSRAPNRKMSGAHKDTLRSAKRFVKHNEKISVKRVWLTEIKLADLENMVNYKNGREIELYEALKARLGAYGGNAKQAFDPKDNPFYKKGGQLVKAVRVEKTQESGVLLNKKNAYTIADNGDMVRVDVFCKVDKKGKNQYFIVPIYAWQVAENILPDIDCKGYRIDDSYTFCFSLHKYDLIAFQKDEKSKVEFAYYINCDSSNGRFYLAWHDKGSKEQQFRISTQNLVLMQKYQIDELGKEIRPCRLKKRPPVR

SEQ ID NO: 344 - protein, 1082 aa, Neisseria lactamica
MAAFKPNPMNYILGLDIGIASVGWAMVEIDKEENPIRLIDLGVRVFERAEVPKTGDSLAMARRLARSVRRLTRRRAHRLLRARRLLKREGVLQDADFDENGLVKSLPNTPWQLRAAALDRKLTCLEWSAVLLHLIKHRGYLSQRKNEGETADKELGALLKGVADNAHALQTGDFRTPAELALNKFEKESGHIRNQRGDYSHTFSRKDLQAELNLLFEKQKEFSNPHVSDSLKEGIETLLMAQRPALSGDAVQKMLGHCTFEPAEPKAAKNTYTAERFIWLTKLNNLRILEQGSERPLTDTERATLMDEPYRKSKLTYAQARKLLGLEDTAFFKGLRYGKDNAEAPTLMEMKAYHAISRALEKEGLKDKKSPLNLSTELQDEIGTAFSLFKTDKDITGRLKDRVQPEILEALLKHISFDKFVQISLKALRRIVPLMEQGKRYDEACAEIYGDHYCKKNAEEKIYLPPIPADEIRNPVVLRALSQARKVINCVVRRYGSPARIHIETAREVGKSFKDRKEIEKRQEENRKDREKAAAKFREYFPNFVGEPKSKDILKLRLYEQQHGKCLYSGKEINLVRLNEKGYVEIDHALPFSRTWDDSFNNKVLVLGSENQNKGNQTPYEYFNGKDNSREWQEFKARVETSRFPRSKKQRILLQKFDEEGFKERNLNDTRYVNRFLCQFVADHILLTGKGKRRVFASNGQITNLLRGFWGLRKVRAENDRHHALDAVVVACSTVAMQQKITRFVRYKEMNAFDGKTIDKETGEVLHQKAHFPQPWEFFAQEVMIRVFGKPDGKPEFEEADTPEKLRTLLAEKLSSRPEAVHEYVTPLFVSRAPNRKMSGQGHMETVKSAKRLDEGISVLRVPLTQLKLKGLEKMVNREREPKLYDALKAQLETHKDNPAKAFAEPFYKYDKAGNRTQQVKAVRIEQVQKTGVWVRNHNGIADNATMVRVDVFEKGGKYYLVPIYSWQVAKGILPDRAVVAFKDEEDWTVMDDSFEFRFVLYANDLIKLTAKKNEFLGYFVSLNRATGAIDIRTHDTDSTKGKNGIFQSVGVKTALSFQKNQIDELGKEIRPCRLKKRPPVR

SEQ ID NO: 345 - protein, 1082 aa, Neisseria meningitidis
MAAFKPNPINYILGLDIGIASVGWAMVEIDEDENPICLIDLGVRVFERAEVPKTGDSLAMARRLARSVRRLTRRRAHRLLRARRLLKREGVLQAADFDENGLIKSLPNTPWQLRAAALDRKLTPLEWSAVLLHLIKHRGYLSQRKNEGETADKELGALLKGVADNAHALQTGDFRTPAELALNKFEKESGHIRNQRGDYSHTFSRKDLQAELNLLFEKQKEFGNPHISDGLKEGIETLLMTQRPALSGDAVQKMLGHCTFEPAEPKAAKNTYTAERFIWLTKLNNLRILEQGSERPLTDTERTTLIDEPYRKSKLTYAQARKLLELDNTAFFKGLRYGKDNAEASTLMEMKAYHAISRALEKEGLKDKKSPLNLSPELQDEIGTAFSLFKTDEDITGRLKDRVQPEILEALLKHISFDKFVQISLKALRRIVPLMEQGKRYDEACAEIYGDHYGKKNTEEKIDLPPIPADEIRNPVVLRALSQARKVINGVVRRYGSPARIHIETAREVGKSFKDRKEIEKRQEENRKDREKAATKFREYFPNFVGEPKSKDILKLRLYEQQHGKCLYSGKEINLGRLNEKGYVEIDHALPFSRTWDDSFNNKVLVLGSENQNKGNQTPYEYFNGKDNSREWQEFKARVETSRFPRSKKQRILLQKFDEEGFKERNLNDTRYVNRFLCQFVADHMLLTGKGKRRVFASNGQITNLLRGFWGLRKVRAENDRHHALDAVVVACSTVAMQQKITRFVRYKEMNAFDGKTIDKETGEVLHQKTHFPQPWEFFAQEVMIRVFGKPDGKPEFEEADTPEKLRTLLAEKLSSRPEAVHEYVTPLFVSRAPNRKMSGQGHMETVKSAKRLDEGVSVLRVPLTQLKLKDLEKMVNREREPKLYEALKARLEAHKDDPAKAFAEPFYKYDKAGNRTQQVKAVRVEQVQKTGVWVRNHNGIADNATMVRVDVFEKGDKYYLVPIYSWQVAKGILPDRAVVQGKDEEDWQLIDDSFNFKFSLHPNDLVEVITKKARMFGYFASCHRGTGNINIRIHDLDHKIGKNGILEGIGVKTALSFQKYQIDELGKEIRPCRLKKRPPVR

SEQ ID NO: 346 - protein, 1082 aa, Neisseria meningitidis
  REGION 1..1082: note = Neisseria meningitidis 2007056
MAAFKPNPINYILGLDIGIASVGWAMVEIDEDENPICLIDLGVRVFERAEVPKTGDSLAMARRLARSVRRLTRRRAHRLLRARRLLKREGVLQAADFDENGLIKSLPNTPWQLRAAALDRKLTPLEWSAVLLHLIKHRGYLSQRKNEGETADKELGALLKGVADNAHALQTGDFRTPAELALNKFEKESGHIRNQRGDYSHTFSRKDLQAELILLFEKQKEFGNPHVSGGLKEGIETLLMTQRPALSGDAVQKMLGHCTFEPAEPKAAKNTYTAERFIWLTKLNNLRILEQGSERPLTDTERATLMDEPYRKSKLTYAQARKLLGLEDTAFFKGLRYGKDNAEASTLMEMKAYHAISRALEKEGLKDKKSPLNLSPELQDEIGTAFSLFKTDEDITGRLKDRIQPEILEALLKHISFDKFVQISLKALRRIVPLMEQGKRYDEACAEIYGDHYGKKNTEEKIYLPPIPADEIRNPVVLRALSQARKVINGVVRRYGSPARIHIETAREVGKSFKDRKEIEKRQEENRKDREKAAAKFREYFPNFVGEPKSKDILKLRLYEQQHGKCLYSGKEINLGRLNEKGYVEIDHALPFSRTWDDSFNNKVLVLGSENQNKGNQTPYEYFNGKDNSREWQEFKARVETSRFPRSKKQRILLQKFDEDGFKERNLNDTRYVNRFLCQFVADRMRLTGKGKKRVFASNGQITNLLRGFWGLRKVRAENDRHHALDAVVVACSTVAMQQKITRFVRYKEMNAFDGKTIDKETGEVLHQKTHFPQPWEFFAQEVMIRVFGKPDGKPEFEEADTPEKLRTLLAEKLSSRPEAVHEYVTPLFVSRAPNRKMSGQGHMETVKSAKRLDEGVSVLRVPLTQLKLKDLEKMVNREREPKLYEALKARLEAHKDDPAKAFAEPFYKYDKAGNRTQQVKAVRVEQVQKTGVWVRNHNGIADNATMVRVDVFEKGDKYYLVPIYSWQVAKGILPDRAVVQGKDEEDWQLIDDSFNFKFSLHPNDLVEVITKKARMFGYFASCHRGTGNINIRIHDLDHKIGKNGILEGIGVKTALSFQKYQIDELGEEIRPCRLKKRPPVR

SEQ ID NO: 347 - protein, 1082 aa, Neisseria meningitidis
  REGION 1..1082: note = Neisseria meningitidis 63049
MAAFKPNPINYILGLDIGIASVGWAMVEIDEEENPIRLIDLSVRVFERAEVPKTGDSLAMARRLARSVRRLTRRRAHRLLRARRLLKREGVLQAADFDENGLIKSLPNTPWQLRAAALDRKLTPLEWSAVLLHLIKHRGYLSQRKNEGETADKELGALLKGVADNAHALQTGDFRTPAELALNKFEKESGHIRNQRGDYSHTFSRKDLQAELILLFEKQKEFGNPHVSGGLKEGIETLLMTQRPALSGDAVQKMLGHCTFEPAEPKAAKNTYTAERFVWLTKLNNLRILEQGSERPLTDTERATLMDEPYRKSKLTYAQARKLLGLEDTAFFKGLRYGKDNAEASTLMEMKAYHAISRALEKEGLKDKKSPLRLSPELQDEIGTAFSLFKTDEDITGRLKDRVQPEILEALLKHISFDKFVQISLKALRRIVPLMEQGKRYDEACAEIYGDHYGKKNAEEKIYLPPIPADEIRNPVVLRALSQARKVINGVVRRYGSPARIHIETAREVGKSFKDRKEIEKRQEENRKDREKAAAKFREYFPNFVGEPKSKDILKLRLYEQQHGKCLYSGKEINLGRLNEKGYVEIDHALPFSRTWDDSFNNKVLVLGSENQNKGNQTPYEYFNGKDNSREWQEFKARVETSRFPRSKKQRILLQKFDEDGFKERNLNDTRYVNRFLCQFVADRMRLTGKGKKRVFASNGQITNLLRGFWGLRKVRAENDRHHALDAVVVACSTVAMQQKITRFVRYKEMNAFDGKTIDKETGEVLHQKTHFPQPWEFFAQEVMIRVFGKPDGKPEFEEADTPEKLRTLLAEKLSSRPEAVHEYVTPLFVSRAPNRKMSGQGHMETVKSAKRLDEGVSVLRVPLTQLKLKDLEKMVNREREPKLYEALKARLEAHKDDPAKAFAEPFYKYDKAGNRTQQVKAVRVEQVQKTGVWVRNHNGIADNATMVRVDVFEKGDKYYLVPIYSWQVAKGILPDRAVVQGKDEEDWQLIDDSFNFKFSLHPNDLVEVITKKARMFGYFASCHRGTGNINIRIHDLDHKIGKNGILEGIGVKTALSFQKYQIDELGKEIRPCRLKKRPPVR

SEQ ID NO: 348 - protein, 1082 aa, Neisseria meningitidis
MAAFKPNSINYILGLDIGIASVGWAMVEIDEEENPIRLIDLGVRVFERAEVPKTGDSLAMARRLARSVRRLTRRRAHRLLRTRRLLKREGVLQAANFDENGLIKSLPNTPWQLRAAALDRKLTPLEWSAVLLHLIKHRGYLSQRKNEGETADKELGALLKGVAGNAHALQTGDFRTPAELALNKFEKESGHIRNQRSDYSHTFSRKDLQAELILLFEKQKEFGNPHVSGGLKEGIETLLMTQRPALSGDAVQKMLGHCTFEPAEPKAAKNTYTAERFIWLTKLNNLRILEQGSERPLTDTERATLMDEPYRKSKLTYAQARKLLGLEDTAFFKGLRYGKDNAEASTLMEMKAYHAISRALEKEGLKDKKSPLNLSPELQDEIGTAFSLFKTDEDITGRLKDRIQPEILEALLKHISFDKFVQISLKALRRIVPLMEQGKRYDEACAEIYGDHYGKKNTEEKIYLPPIPADEIRNPVVLRALSQARKVINGVVRRYGSPARIHIETAREVGKSFKDRKEIEKRQEENRKDREKAAAKFREYFPNFVGEPKSKDILKLRLYEQQHGKCLYSGKEINLGRLNEKGYVEIDHALPFSRTWDDSFNNKVLVLGSENQNKGNQTPYEYFNGKDNSREWQEFKARVETSRFPRSKKQRILLQKFDEDGFKERNLNDTRYVNRFLCQFVADRMRLTGKGKKRVFASNGQITNLLRGFWGLRKVRAENDRHHALDAVVVACSTVAMQQKITRFVRYKEMNAFDGKTIDKETGEVLHQKTHFPQPWEFFAQEVMIRVFGKPDGKPEFEEADTLEKLRTLLAEKLSSRPEAVHEYVTPLFVSRAPNRKMSGQGHMETVKSAKRLDEGVSVLRVPLTQLKLKDLEKMVNREREPKLYEALKARLEAHKDDPAKAFAEPFYKYDKAGNRTQQVKAVRVEQVQKTGVWVRNHNGIADNATMVRVDVFEKGDKYYLVPIYSWQVAKGILPDRAVVQGKDEEDWQLIDDSFNFKFSLHPNDLVEVITKKARMFGYFASCHRGTGNINIRIHDLDHKIGKNGILEGIGVKTALSFQKYQIDELGKEIRPCRLKKRPPVR

SEQ ID NO: 349 - protein, 1082 aa, Neisseria meningitidis
  REGION 1..1082: note = Neisseria meningitidis 92045
MAAFKPNPINYILGLDIGIASVGWAMVEIDEEENPIRLIDLGVRVFERAEVPKTGDSLAMARRLARSVRRLTRRRAHRLLRARRLLKREGVLQAADFDENGLIKSLPNTPWQLRAAALDRKLTPLEWSAVLLHLIKHRGYLSQRKNEGETADKELGALLKGVADNAHALQTGDFRTPAELALNKFEKECGHIRNQRGDYSHTFSRKDLQAELNLLFEKQKEFGNPHVSGGLKEGIETLLMTQRPALSGDAVQKMLGHCTFEPAEPKAAKNTYTAERFIWLTKLNNLRILEQGSERPLTDTERATLMDEPYRKSKLTYAQARKLLGLEDTAFFKGLRYGKDNAEASTLMEMKAYHAISRALEKEGLKDKKSPLNLSPELQDEIGTAFSLFKTDEDITGRLKDRIQPEILEALLKHISFDKFVQISLKALRRIVPLMEQGKRYDEACAEIYGDHYGKKNTEEKIYLPPIPADEIRNPVVLRALSQARKVINGVVRRYGSPARIHIETAREVGKSFKDRKEIEKRQEENRKDREKAAAKFREYFPNFVGEPKSKDILKLRLYEQQHGKCLYSGKEINLVRLNEKGYVEIDHALPFSRTWDDSFNNKVLVLGSENQNKGNQTPYEYFNGKDNSREWQEFKARVETSRFPRSKKQRILLQKFDEEGFKERNLNDTRYVNRFLCQFVADHILLTGKGKRRVFASNGQITNLLRGFWGLRKVRAENDRHHALDAVVVACSTVAMQQKITRFVRYKEMNAFDGKTIDKETGEVLHQKTHFPQPWEFFAQEVMIRVFGKPDGKPEFEEADTPEKLRTLLAEKLSSRPEAVHEYVTPLFVSRAPNRKMSGQGHMETVKSAKRLDEGVSVLRVPLTQLKLKDLEKMVNREREPKLYEALKARLEAHKDDPAKAFAEPFYKYDKAGNRTQQVKAVRVEQVQKTGVWVRNHNGIADNATMVRVDVFEKGGKYYLVPIYSWQVAKGILPDRAVVQGKDEEDWQLIDDSFNFKFSLHPNDLVEVITKKARMFGYFASCHRGTGNINIRIHDLDHKIGKNGILEGIGVKTALSFQKYQIDELGKEIRPCRLKKRPPVR

SEQ ID NO: 350 - protein, 1081 aa, Neisseria meningitidis
  REGION 1..1081: note = Neisseria meningitidis 93003
MAAFKPNPINYILGLDIGIASVGWAMVEIDEEENPIRLIDLGVRVFERAEVPKTGDSLAMARRLARSVRRLTRRRAHRLLRARRLLKREGVLQAADFDENGLIKSLPNTPWQLRAAALDRKLTPLEWSAVLLHLIKHRGYLSQRKNEGETADKELGALLKGVADNAHALQTGDFRTPAELALNKFEKESGHIRNQRGDYSHTFSRKDLQAELILLFEKQKEFGNPHVSGGLKEGIETLLMTQRPALSGDAVQKMLGHCTFEPAEPKAAKNTYTAERFIWLTKLNNLRILEQGSERPLTDTERATLMDEPYRKSKLTYAQARKLLGLEDTAFFKGLRYGKDNAEASTLMEMKAYHAISRALEKEGLKDKKSPLNLSPELQDEIGTAFSLFKTDEDITGRLKDRVQPEILEALLKHISFDKFVQISLKALRRIVPLMEQGKRYDEACAEIYGDHYGKKNTEEEIYLPPITADEIRNPVVLRALSQARKVINAVVRRYGSPARIHIETAREVGKSFKDRKEIEKRQEENRKDREKAAAKFREYFPNFVGEPKSKDILKLRLYEQQHGKCLYSGKEINLVRLNEKGYVEIDHALPFSRTWDDSFNNKVLVLGSENQNKGNQTPYEYFNGKENSREWQEFKARVETSRFPRSKKQRILLQKFDEDGFKERNLNDTRYVNRFLCQFVADRMRLTGKGKKRVFASNGQITNLLRGFWGLHKVRAENDRHHALDAVVVACSTIAMQQKITRFVRYKEMNAFDGKTIDKETGEVLHQKAHFPQPWEFFAQEVMIRVFGKPDGKPEFEEADTPEKLRTLLAEKLSSRPEAVHEYVTPLFVSRAPNRKMSGQGHMETVKSAKRLDEGISVLRVPLTQLKLKDLEKMVNRAREPKLYEALKARLEAHKDDPAKAFAEPFYKYDKAGNRTQQVKAVRVEQVQKTGVWVRNHNGIADNATMVRVDVFEKAGKYYLVPIYSWQVAKGILPDRAVVAYADEEDWTVIDESFRFKFVLYSNDLIKVQLKKDSFLGYFSGLDRATGAISLREHDLEKSKGKDGMHRIGVKTALSFQKYQIDEMGKEIRPCRLKKRPPVR

SEQ ID NO: 351 - protein, 1081 aa, Neisseria meningitidis
  REGION 1..1081: note = Neisseria meningitidis 93004
MAAFKPNPINYILGLDIGIASVGWAMVEIDEDENPICLIDLGVRVFERAEVPKTGDSLAMARRLARSVRRLTRRRAHRLLRARRLLKREGVLQAADFDENGLIKSLPNTPWQLRAAALDRKLTPLEWSAVLLHLIKHRGYLSQRKNEGETADKELGALLKGVADNAHALQTGDFRTPAKLALNKFEKESGHIRNQRGDYSHTFSRKDLQAELNLLFEKQKEFGNPHISDGLKEGIETLLMTQRPALSGDAVQKMLGHCTFEPTEPKAAKNTYTAERFVWLTKLNNLRILEQGSEQPLTDTQRAKLMDEPYRKSKLTYAQARKLLGLEDTAFFKGLRYGKDNAEASTLMEMKAYHAISRALEKEGLKDKKSPLNLSPELQDEIGTAFSLFKTDEDITGRLKDRVQPEILEALLKHISFDKFVQISLKALRRIVPLMEQGKRYNEACAEIYGDHYGKKNTEEKIYLPPIPADEIRNPVVLRALSQARKVINGVVRRYGSPARIHIETAREVGKSFKDRKEIEKRQEENRKDREKAAAKFQEYFPNFVGEPKSKDILKLRLYEQQHGKCLYSGKEINLGRLNEKGYVEIDHALPFSRTWDDSFNNKVLVLGSENQNKGNQTPYEYFNGKDNSREWQEFKARVETSRFPRSKKQRILLQKFDEDGFKERNLNDTRYVNRFLCQFVADRMRLTGKGKKRVFASNGQITNLLRGFWGLRKVRAENDRHHALDAVVVACSTVAMQQKITRFVRYKEMNAFDGKTIDKETGEVLHQKTHFPQPWEFFAQEVMIRVFGKPDGKPEFEEADTPEKLRTLLAEKLSSRPEAVHEYVTPLFVSRAPNRKMSGQGHMETVKSAKRLDEGVSVLRVPLTQLKLKDLEKMVNREREPKLYEALKARLEAHKDDPAKAFAEPFYKYDKAGNRTQQVKAVRVEQVQKTGVWVRNHNGIADNATMVRVDVFEKGDKYYLVPIYSWQVAKGILPDRAVVAYADEEDWTVIDESFRFKFVLYSNDLIKVQLKKDSFLGYFSGLDRATGAISLREHDLEKSKGKDGMHRIGVKTALSFQKYQIDEMGKEIRPCRLKKRPPVR

SEQ ID NO: 352 - protein, 1082 aa, Neisseria meningitidis
  REGION 1..1082: note = Neisseria meningitidis 96023
MAAFKPNPINYILGLDIGIASVGWAMVEIDEDENPICLIDLGVRVFERAEVPKTGDSLAMARRLARSVRRLTRRRAHRLLRARRLLKREGVLQAADFDENGLIKSLPNTPWQLRAAALDRKLTPLEWSAVLLHLIKHRGYLSQRKNEGETADKELGALLKGVADNAHALQTGDFRTPAELALNKFEKESGHIRNQRGDYSHTFSRKDLQAELILLFEKQKEFGNPHVSGGLKEGIETLLMTQRPALSSDAVQKMLGHCTFEPAEPKAAKNTYTAERFIWLTKLNNLRILEQGSERPLTDTERATLMDEPYRKSKLTYAQARKLLGLEDTAFFKGLRYGKDNAEASTLMEMKAYHAISRALEKEGLKDKKSPLNLSPELQDEIGTAFSLFKTDEDITGRLKDRIQPEILEALLKHISFDKFVQISLKALRRIVPLMEQGKRYDEACAEIYGDHYGKKNTEEKIYLPPIPADEIRNPVVLRALSQARKVINGVVRRYGSPARIHIETAREVGKSFKDRKEIEKRQEENRKDREKAAAKFREYFPNFVGEPKSKDILKLRLYEQQHGKCLYSGKEINLGRLNEKGYVEIDHALPFSRTWDDSFNNKVLVLGSENQNKGNQTPYEYFNGKDNSREWQEFKARVETSRFPRSKKQRILLQKFDEDGFKERNLNDTRYVNRFLYQFVADRMRLTGKGKKRVFASNGQITNLLRGFWGLRKVRAENDRHHALDAVVVACSTVAMQQKITRFVRYKEMNAFDGKTIDKETGEVLHQKTHFPQPWEFFAQEVMIRVFGKPDGKPEFEEADTPEKLRTLLAEKLSSRPEAVHEYVTPLFVSRAPNRKMSGQGHMETVKSAKRLDEGVSVLRVPLTQLKLKDLEKMVNREREPKLYEALKARLEAHKDDPAKAFAEPFYKYDKAGNRTQQVKAVRVEQVQKTGVWVRNHNGIADNATMVRVDVFEKGDKYYLVPIYSWQVAKGILPDRAVVQGKDEEDWQLIDDSFNFKFSLHPNDLVEVITKKARMFGYFASCHRGTGNINIRIHDLDHKIGKNGILEGIGVKTALSFQKYQIDELGKEIRPCRLKKRPPVR

SEQ ID NO: 353 - protein, 1081 aa, Neisseria meningitidis
  REGION 1..1081: note = Neisseria meningitidis 98008
MAAFKPNPINYILGLDIGIASVGWAMVEIDEDENPICLIDLGVRVFERAEVPKTGDSLAAARRLARSVRRLTRRRAHRLLRARRLLKREGVLQAADFDENGLIKSLPNTPWQLRSAALDRKLTPLEWSAVLLHLIKHRGYLSQRKNEGETADKELGALLKGVANNAHALQTGDFRTPAELALNKFEKESGHIRNQRGDYSHTFSRKDLQAELILLFEKQKEFGNPHVSGGLKEGIETLLMTQRPALSGDAVQKMLGHCTFEPAEPKAAKNTYTAERFIWLTKLNNLRILEQGSERPLTDTERATLMDEPYRKSKLTYAQARKLLGLEDTAFFKGLRYGKDNAEASTLMEMKAYHAISRALEKEGLKDKKSPLNLSPELQDEIGTAFSLFKTDEDITGRLKDRIQPEILEALLKHISFDKFVQISLKALRRIVPLMEQGKRYDEACAEIYGDHYGKKNTEEKIYLPPIPADEIRNPVVLRALSQARKVINGVVRRYGSPARIHIETAREVGKSFKDRKEIEKRQEENRKDREKAAAKFREYFPNFVGEPKSKDILKLRLYEQQHGKCLYSGKEINLGRLNEKGYVEIDHALPFSRTWDDSFNNKVLVLGSENQNKGNQTPYEYFNGKDNSREWQEFKARVETSRFPRSKKQRILLQKFDEDGFKERNLNDTRYVNRFLCQFVADRMRLTGKGKKRVFASNGQITNLLRGFWGLRKVRAENDRHHALDAVVVACSTVAMQQKITRFVRYKEMNAFDGKTIDKETGEVLHQKTHFPQPWEFFAQEVMIRVFGKPDGKPEFEEADTPEKLRTLLAEKLSSRPEAVHEYVTPLFVSRAPNRKMSGQGHMETVKSAKRLDEGVSVLRVPLTQLKLKDLEKMVNREREPKLYEALKARLEAHKDDPAKAFAEPFYKYDKAGNRTQQVKAVRVEQVQKTGVWVRNHNGIADNATMVRVDVFEKAGKYYLVPIYSWQVAKGILPDRAVVAYADEEGWTVIDESFRFKFVLYSNDLIKVQLKKDSFLGYFSGLDRATGAISLREHDLEKSKGKDGMHRIGVKTALSFQKYQIDEMGKEIRLCRLKKRPPVR

SEQ ID NO: 354 - protein, 1082 aa, Neisseria meningitidis
MAAFKPNPINYILGLDIGIASVGWAMVEIDEEENPIRLIDLGVRVFERAEVPKTGDSLAMVRRLARSVRRLTRRRAHRLLRARRLLKREGVLQAADFDENGLIKSLPNTPWQLRAAALDRKLTPLEWSAVLLHLIKHRGYLSQRKNEGETADKELGALLKGVADNAHALQTGDFRTPAELALNKFEKESGHIRNQRGDYSHTFSRKDLQAELILLFEKQKEFGNPHISGGLKEGIETLLMTQRPALSGDAVQKMLGHCTFEPAEPKAAKNTYTAERFIWLTKLNNLRILEQGSERPLTDTERATLMDEPYRKSKLTYAQARKLLGLEDTAFFKGLRYGKDNAEASTLMEMKAYHAISRALEKEGLKDKKSPLNLSPELQDEIGTAFSLFKTDEDITGRLKDRIQPEILEALLKHISFDKFVQISLKALRRIVPLMEQGKRYDEACAEIYGDHYGKKNTEEKIYLPPIPADEIRNPVVLRALSQARKVINGVVRRYGSPARIHIETAREVGKSFKDRKEIEKRQEENRKDREKAAAKFREYFPNFVGEPKSKDILKLRLYEQQHGKCLYSGKEINLGRLNEKGYVEIDHALPFSRTWDDSFNNKVLVLGSENQNKGNQTPYEYFNGKDNSREWQEFKARVETSRFPRSKKQRILLQKFDEDGFKERNLNDTRYVNRFLCQFVADRMRLTGKGKKRVFASNGQITNLLRGFWGLRKVRAENDRHHALDAVVVACSTVAMQQKITRFVRYKEMNAFDGKTIDKETGEVLHQKTHFPQPWEFFAQEVMIRVFGKPDGKPEFEEADTPEKLRTLLAEKLSSRPEAVHEYVTPLFVSRAPNRKMSGQGHMETVKSAKRLDEGVSVLRVPLTQLKLKDLEKMVNREREPKLYEALKARLEAHKDDPAKAFAEPFYKYDKAGNRTQQVKAVRVEQVQKTGVWVRNHNGIADNATMVRVDVFEKGDKYYLVPIYSWQVAKGILPDRAVVQGKDEEDWQLIDDSFNFKFSLHPNDLVEVITKKARMFGYFASCHRGTGNINIRIHDLDHKIGKNGILEGIGVKTALSFQKYQIDELGKEIRPCRLKKRPPVR

SEQ ID NO: 355 - protein, 1082 aa, Neisseria meningitidis
  REGION 1..1082: note = Neisseria meningitidis alpha275
MAAFKPNPINYILGLDIGIASVGWAMVEIDEDENPICLIDLGVRVFERAEVPKTGDSLAAARRLARSVRRLTRRRAHRLLRARRLLKREGVLQAADFDENGLIKSLPNTPWQLRAAALDRKLTPLEWSAVLLHLIKHRGYLSQRKNEGETADKELGALLKGVADNAHALQTGDFRTPAELALNKFEKESGHIRNQRGDYSHTFSRKDLQAELILLFEKQKEFGNPHVSGGLKEGIETLLMTQRPALSGDAVQKMLGHCTFEPAEPKAAKNTYTAERFIWLTKLNNLRILEQGSERPLTDTERATLMDEPYRKSKLTYAQARKLLGLEDTAFFKGLRYGKDNAEASTLMEMKAYHAISRALEKEGLKDKKSPLNLSPELQDEIGTAFSLFKTDEDITGRLKDRVQPEILEALLKHISFDKFVQISLKALRRIVPLMEQGKRYDEACAEIYGDHYGKKNTEEKIYLPPIPADEIRNPVVLRALSQARKVINGVVRRYGSPARIHIETAREVGKSFKDRKEIEKRQEENRKDREKAAAKFREYFPNFVGEPKSKDILKLRLYEQQHGKCLYSGKEINLGRLNEKGYVEIDHALPFSRTWDDSFNNKVLVLGSENQNKGNQTPYEYFNGKDNSREWQEFKARVETSRFPRSKKQRILLQKFDEDGFKERNLNDTRYVNRFLCQFVADRMRLTGKGKKRVFASNGQITNLLRGFWGLRKVRAENDRHHALDAVVVACSTVAMQQKITRFVRYKEMNAFDGKTIDKETGEVLHQKTHFPQPWEFFAQEVMIRVFGKPDGKPEFEEADTPEKLRTLLAEKLSSRPEAVHEYVTPLFVSRAPNRKMSGQGHMETVKSAKRLDEGVSVLRVPLTQLKLKDLEKMVNREREPKLYEALKARLEAHKDDPAKAFAEPFYKYDKAGNRTQQVKAVRVEQVQKTGVWVRNHNGIADNATMVRVDVFEKGDKYYLVPIYSWQVAKGILPDRAVVQGKDEEDWQLIDDSFNFKFSLHPNDLVEVITKKARMFGYFASCHRGTGNINIRIHDLDHKIGKNGILEGIGVKTALSFQKYQIDELGKEIRPCRLKKRPPVR

SEQ ID NO: 356 - protein, 1082 aa, Neisseria meningitidis
  REGION 1..1082: note = Neisseria meningitidis ATCC 13091
MAAFKPNPINYILGLDIGIASVGWAMVEIDEEENPIRLIDLGVRVFERAEVPKTGDSLAMARRLARSVRRLTRRRAHRLLRTRRLLKREGVLQAANFDENGLIKSLPNTLWQLRAAALDRKLTPLEWSAVLLHLIKHRGYLSQRKNEGETADKELGALLKGVAGNAHALQTGDFRTPAELALNKFEKESGHIRNQRGDYSHTFSRKDLQAELNLLFEKQKEFGNPHISDGLKEGIETLLMTQRPALSGDAVQKMLGHCTFEPTEPKAAKNTYTTERFIWLTKLNNLRILEQGSERPLTDTERATLMDEPYRKSKLTYAQARKLLELDDIAFFKGLRYGKDNAEASTLMEMKAYHAISRALEKEGLKDKKSPLNLSPELQDEIGTAFSLFKTDEDITGRLKDRIQPEILEALLKHINFDKFVQISLKALRRIVPLMEQGKRYDEACAEIYGDHYGKKNTEEKIDLPPIPADEIHNPVVLRALSQARKVINGVVRRYGSPARIHIETAREVGKSFKDRKEIEKRQEENRKDREKAAAKFREYFPNFVGEPKSKDILKLRLYEQQHGKCLYSGKEINLGRLNEKGYVEIDHALPFSRTWDDSFNNKVLVLGSENQNKGNQTPYEYFNGKDNSREWQEFKARVETSRFPRSKKQRILLQKFDEDGFKERNLNDTRYVNRFLCQFVADRMRLTGKGKKRVFASNGQITNLLRGFWGLRKVRAENDRHHALDAVVVACSTVAMQQKITRFVRYKEMNAFDGKTIDKETGEVLHQKTHFPQPWEFFAQEVMIRVFGKPDGKPEFEEADTPEKLRTLLTEKLSSRPEAVHEYVTPLFVSRAPNRKMSGQGHMETVKSAKRLDEGISVLRVPLTQLKLKDLEKMVNREREPKLYEALKARLEAHKDDPAKAFAEPFYKYDKAGNRTQQVKAMRVEQVQKTGVWVRNHNGIADNATMVRVDVFEKGDKYYLVPIYSWQVAKGILPDRAVVQGKDEEDWQLIDDSFNFKFSLHPNDLVEVITKKARMFGYFASCHRGTGNINIRIHDLDHKIGKNGILEGIGVKTALSFQKYQIDELGKEIRPCRLKKRPPVR

SEQ ID NO: 357 - protein, 1081 aa, Neisseria meningitidis
  REGION 1..1081: note = Neisseria meningitidis N1568
MAAFKPNPINYILGLDIGIASVGWAMVEIDEEENPIRLIDLGVRVFERAEVPKTGDSLAMARRLARSVRRLTRRRAHRLLRARRLLKREGVLQAADFDENGLIKSLPNTPWQLRAAALDRKLTPLEWSAVLLHLIKHRGYLSQRKNEGETADKELGALLKGVADNAHALQTGDFRTPAELALNKFEKECGHIRNQRGDYSHTFSRKDLQAELNLLFEKQKEFGNPHVSGGLKEGIETLLMTQRPALSGDAVQKMLGHCTFEPAEPKAAKNTYTAERFIWLTKLNNLRILEQGSERPLTDTERATLMDEPYRKSKLTYAQARKLLSLEDTAFFKGLRYGKDNAEASTLMEMKAYHTISRALEKEGLKDKKSPLNLSPELQDEIGTAFSLFKTDEDITGRLKDRIQPEILEALLKHISFDKFVQISLKALRRIVPLMEQGKRYDEACAEIYGDHYGKKNTEEKIYLPPIPADEIRNPVVLRALSQARKVINGVVRRYGSPARIHIETAREVGKSFKDRKEIEKRQEENRKDREKAAAKFREYFPNFVGEPKSKDILKLRLYEQQHGKCLYSGKEINLGRLNEKGYVEIDHALPFSRTWDDSFNNKVLVLGSENQNKGNQTPYEYFNGKDNSREWQEFKARVETSRFPRSKKQRILLQKFDEDGFKERNLNDTRYVNRFLCQFVADRMRLTGKGKKRVFASNGQITNLLRGFWGLRKVRAENDRHHALDAVVVACSTVAMQQKITRFVRYKEMNAFDGKTIDKETGEVLHQKTHFPQPWEFFAQEVMIRVFGKPDGKPEFEEADTPEKLRTLLAEKLSSRPEAVHEYVTPLFVSRAPNRKMSGQGHMETVKSAKRLDEGVSVLRVPLTQLKLKDLEKMVNREREPKLYEALKARLEAHKDDPAKAFAEPFYKYDKAGNRTQQVKAVRVEQVQKTGVWVRNHNGIADNATMVRVDVFEKGDKYYLVPIYSWQVAKGILPDRAVVAYADEEDWTVIDESFRFKFVLYSNDLIKVQLKKDSFLGYFSGLDRATGAISLREHDLEKSKGKDGMHRIGVKTALSFQKYQIDEMGKEIRPCRLKKRPPVR

SEQ ID NO: 358 - protein, 1081 aa, Neisseria meningitidis
  REGION 1..1081: note = Neisseria meningitidis NM140
MAAFKPNPINYILGLDIGIASVGWAMVEIDEDENPICLIDLGVRVFERAEVPKTGDSLAAARRLARSVRRLTRRRAHRLLRARRLLKREGVLQAADFDENGLIKSLPNTPWQLRSAALDRKLTPLEWSAVLLHLIKHRGYLSQRKNEGETADKELGALLKGVADNAHALQTGDFRTPAELALNKFEKESGHIRNRRGDYSHTFSRKDLQAELDLLFEKQKEFGNPHISDDLKEGIETLLMTQRPALSGDAVQKMLGHCTFEPTEPKAAKNTYTAERFVWLTKLNNLRILEQGSERPLTDTERATLMDEPYRKSKLTYAQARKLLELDDTAFFKGLRYGKDNAEASTLMEMKAYHAISRALEKEGLKDKKSPLNLSPELQDEIGTAFSLFKTDEDITGRLKDRVQPEILEVLLKHISFDKFVQISLKALRRIVPLMEQGKRYDEACAEIYGDHDGKKNTEEKIYLPPIPADEIRNPVVLRALSQARKVINAVVRRYGSPARIHIETAREVGKSFKDRKEIEKRQEENRKDREKAAAKFREYFPNFVGEPKSKDILKLRLYEQQHGKCLYSGKEINLGRLNEKGYVEIDHALPFSRTWDDSFNNKVLVLGSENQNKGNQTPYEYFNGKDNSREWQEFKARVETSRFPRSKKQRILLQKFDEEGFKERNLNDTRYVNRFLCQFVADHMLLTGKGKRRVFASNGQITNLLRGFWGLRKVRAENNRHHALDAVVVACSTVAMQQKITRFVRYKEMNAFDGKTIDKETGEVLHQKTHFPQPWEFFAQEVMIRVFGKPDGKPEFEEADTPEKLRTLLAEKLSSRPEAVHEYVTPLFVSRAPNRKMSGQGHMETVKSAKRLDEGVSVLRVPLTQLKLKDLEKMVNREREPKLYEALKARLEAHKDDPAKAFAEPFYKYDKAGNRTQQVKAVRVEQVQKTGVWVRNHNGIADNATMVRVDVFEKAGKYYLVPIYSWQVAKGILPDRAVVAYADEEGWTVIDESFRFKFVLYSNDLIKVQLKKDSFLGYFSGLDRATGAISLREHDLEKSKGKDGMHRIGVKTALSFQKYQIDEMGKEIRLCRLKKRPPVR

SEQ ID NO: 359 - protein, 1082 aa, Neisseria meningitidis
  REGION 1..1082: note = Neisseria meningitidis NM220
MAAFKPNPINYILGLDIGIASVGWAMVEIDEEENPIRLIDLGVRVFERAEVPKTGDSLAMARRLARSVRRLTRRRAHRLLRARRLLKREGVLQAADFDENGLIKSLPNTPWQLRAAALDRKLTPLEWSAVLLHLIKHRGYLSQRKNEGETADKELGALLKGVANNAHALQTGDFRTPAELALNKFEKESGHIRNQRGDYSHTFSRKDLQAELILLFEKQKEFGNPHVSGGLKEGIETLLMTQRPALSGDAVQKMLGHCTFEPAEPKAAKNTYTAERFIWLTKLNNLRILEQGSERPLTDTERATLMDEPYRKSKLTYAQARKLLGLEDTAFFKGLRYGKDNAEASTLMEMKAYHAISRALEKEGLKDKKSPLNLSSELQDEIGTAFSLFKTDEDITGRLKDRVQPEILEALLKHISFDKFVQISLKALRRIVPLMEQGKRYDEACAEIYGDHYGKKNTEEKIYLPPIPADEIRNPVVLRALSQARKVINGVVRRYGSPARIHIETAREVGKSFKDRKEIEKRQEENRKDREKAAAKFREYFPNFVGEPKSKDILKLRLYEQQHGKCLYSGKEINLVRLNEKGYVEIDHALPFSRTWDDSFNNKVLVLGSENQNKGNQTPYEYFNGKDNSREWQEFKARVETSRFPRSKKQRILLQKFDEDGFKECNLNDTRYVNRFLCQFVADHILLTGKGKRRVFASNGQITNLLRGFWGLRKVRAENDRHHALDAVVVACSTVAMQQKITRFVRYKEMNAFDGKTIDKETGKVLHQKTHFPQPWEFFAQEVMIRVFGKPDGKPEFEEADTPEKLRTLLAEKLSSRPEAVHEYVTPLFVSRAPNRKMSGAHKDTLRSAKRFVKHNEKISVKRVWLTEIKLADLENMVNYKNGREIELYEALKARLEAYGGNAKQAFDPKDNPFYKKGGQLVKAVRVEKTQESGVLLNKKNAYTIADNGDMVRVDVFCKVDKKGKNQYFIVPIYAWQVAENILPDIDCKGYRIDDSYTFCFSLHKYDLIAFQKDEKSKVEFAYYINCDSSNGRFYLAWHDKGSKEQQFRISTQNLVLIQKYQVNELGKEIRPCRLKKRPPVR

SEQ ID NO: 360 - protein, 1082 aa, Neisseria meningitidis
  REGION 1..1082: note = Neisseria meningitidis NM233
MAAFKPNPINYILGLDIGIASVGWAMVEIDEEENPIRLIDLGVRVFERAEVPKTGDSLAMARRLARSVRRLTRRRAHRLLRARRLLKREGVLQAADFDENGLIKSLPNTPWQLRAAALDRKLTPLEWSAVLLHLIKHRGYLSQRKNEGETADKELGALLKGVANNAHALQTGDFRTPAELALNKFEKESGHIRNQRGDYSHTFSRKDLQAELILLFEKQKEFGNPHVSGGLKEGIETLLMTQRPALSGDAVQKMLGHCTFEPAEPKAAKNTYTAERFIWLTKLNNLRILEQGSERPLTDTERATLMDEPYRKSKLTYAQARKLLGLEDTAFFKGLRYGKDNAEASTLMEMKAYHAISRALEKEGLKDKKSPLNLSSELQDEIGTAFSLFKTDEDITGRLKDRVQPEILEALLKHISFDKFVQISLKALRRIVPLMEQGKRYDEACAEIYGDHYGKKNTEEKIYLPPIPADKIRNPVVLRALSQARKVINGVVRRYGSPARIHIETAREVGKSFKDRKEIEKRQEENRKDREKAAAKFREYFPNFVGEPKSKDILKLRLYEQQHGKCLYSGKEINLVRLNEKGYVEIDHALPFSRTWDDSFNNKVLVLGSENQNKGNQTPYEYFNGKDNSREWQEFKARVETSRFPRSKKQRILLQKFDEDGFKECNLNDTRYVNRFLCQFVADHILLTGKGKRRVFASNGQITNLLRGFWGLRKVRAENDRHHALDAVVVACSTVAMQQKITRFVRYKEMNAFDGKTIDKETGKVLHQKTHFPQPWEFFAQEVMIRVFGKPDGKPEFEEADTPEKLRTLLAEKLSSRPEAVHEYVTPLFVSRAPNRKMSGAHKDTLRSAKRFVKHNEKISVKRVWLTEIKLADLENMVNYKNGREIELYEALKARLEAYGGNAKQAFDPKDNPFYKKGGQLVKAVRVEKTQESGVLLNKKNAYTIADNGDMVRVDVFCKVDKKGKNQYFIVPIYAWQVAENILPDIDCKGYRIDDSYTFCFSLHKYDLIAFQKDEKSKVEFAYYINCDSSNGRFYLAWHDKGSKEQQFRISTQNLVLIQKYQVNELGKEIRPCRLKKRPPVR

SEQ ID NO: 361 - protein, 1082 aa, Neisseria meningitidis
MAAFKPNPINYILGLDIGIASVGWAMVEIDEDENPICLIDLGVRVFERAEVPKTGDSLAMARRLARSVRRLTRRRAHRLLRARRLLKREGVLQAADFDENGLIKSLPNTPWQLRAAALDRKLTPLEWSAVLLHLIKHRGYLSQRKNEGETADKELGALLKGVADNAHALQTGDFRTPAELALNKFEKESGHIRNQRGDYSHTFSRKDLQAELILLFEKQKEFGNPHVSGGLKEGIETLLMTQRPALSSDAVQKMLGHCTFEPAEPKAAKNTYTAERFIWLTKLNNLRILEQGSERPLTDTERATLMDEPYRKSKLTYAQARKLLGLEDTAFFKGLRYGKDNAEASTLMEMKAYHAISRALEKEGLKDKKSPLNLSPELQDEIGTAFSLFKTDEDITGRLKDRIQPEILEALLKHISFDKFVQISLKALRRIVPLMEQGKRYDEACAEIYGDHYGKKNTEEKIYLPPIPADEIRNPVVLRALSQARKVINGVVRRYGSPARIHIETAREVGKSFKDRKEIEKRQEENRKDREKAAAKFREYFPNFVGEPKSKDILKLRLYEQQHGKCLYSGKEINLGRLNEKGYVEIDHALPFSRTWDDSFNNKVLVLGSENQNKGNQTPYEYFNGKDNSREWQEFKARVETSRFPRSKKQRILLQKFDEDGFKERNLNDTRYVNRFLCQFVADRMRLTGKGKKRVFASNGQITNLLRGFWGLRKVRAENDRHHALDAVVVACSTVAMQQKITRFVRYKEMNAFDGKTIDKETGEVLHQKTHFPQPWEFFAQEVMIRVFGKPDGKPEFEEADTPEKLRTLLAEKLSSRPEAVHEYVTPLFVSRAPNRKMSGQGHMETVKSAKRLDEGVSVLRVPLTQLKLKDLEKMVNREREPKLYEALKARLEAHKDDPAKAFAEPFYKYDKAGNRTQQVKAVRVEQVQKTGVWVRNHNGIADNATMVRVDVFEKGDKYYLVPIYSWQVAKGILPDRAVVQGKDEEDWQLIDDSFNFKFSLHPNDLVEVITKKARMFGYFASCHRGTGNINIRIHDLDHKIGKNGILEGIGVKTALSFQKYQIDELGKEIRPCRLKKRPPVR

SEQ ID NO: 362 - protein, 1082 aa, Neisseria meningitidis
MAAFKPNPINYILGLDIGIASVGWAMVEIDEDENPICLIDLGVRVFERAEVPKTGDSLAMARRLARSVRRLTRRRAHRLLRARRLLKREGVLQAADFDENGLIKSLPNTPWQLRAAALDRKLTPLEWSAVLLHLIKHRGYLSQRKNEGETADKELGALLKGVADNAHALQTGDFRTPAELALNKFEKESGHIRNQRGDYSHTFSRKDLQAELILLFEKQKEFGNPHVSGGLKEGIETLLMTQRPALSGDAVQKMLGHCTFEPAEPKAAKNTYTAERFIWLTKLNNLRILEQGSERPLTDTERATLMDEPYRKSKLTYAQARKLLGLEDTAFFKGLRYGKDNAEASTLMEMKAYHAISRALEKEGLKDKKSPLNLSPELQDEIGTAFSLFKTDEDITGRLKDRIQPEILEALLKHISFDKFVQISLKALRRIVPLMEQGKRYDEACAEIYGDHYGKKNTEEKIYLPPIPADEIRNPVVLRALSQARKVINGVVRRYGSPARIHIETAREVGKSFKDRKEIEKRQEENRKDREKAAAKFREYFPNFVGEPKSKDILKLRLYEQQHGKCLYSGKEINLGRLNEKGYVEIDHALPFSRTWDDSFNNKVLVLGSENQNKGNQTPYEYFNGKDNSREWQEFKARVETSRFPRSKKQRILLQKFDEDGFKERNLNDTRYVNRFLCQFVADRMRLTGKGKKRVFASNGQITNLLRGFWGLRKVRAENDRHHALDAVVVACSTVAMQQKITRFVRYKEMNAFDGKTIDKETGEVLHQKTHFPQPWEFFAQEVMIRVFGKPDGKPEFEEADTPEKLRTLLAEKLSSRPEAVHEYVTPLFVSRAPNRKMSGQGHMETVKSAKRLDEGVSVLRVPLTQLKLKDLEKMVNREREPKLYEALKARLEAHKDDPAKAFAEPFYKYDKAGNRTQQVKAVRVEQVQKTGVWVRNHNGIADNATMVRVDVFEKGDKYYLVPIYSWQVAKGILPDRAVVQGKDEEDWQLIDDSFNFKFSLHPNDLVEVITKKARMFGYFASCHRGTGNINIRIHDLDHKIGKNGILEGIGVKTALSFQKYQIDELGKEIRPCRLKKRPPVR

SEQ ID NO: 363 - protein, 1089 aa, unidentified
  REGION 1..1089: note = Neisseria sp. oral taxon 014 str. F0314
  source 1..1089: note = Neisseria sp.
MTAFKPNPLNYILGLDIGIASVGWAMVEIDDKENPVRLIDLGVRVFERAEMPKTGDSLAAARRLARSVRRLTRRRAHRLLRARRLLKHEGVLKPEDFDENGLVKPLPYIPKQPRNTPWQLRAAALDRKLTPLEWAAVLLHLVKHRGYLSQRKNEGETDDKELGALLKGVADNTHALQAGNFRTPAELALNKFEKESGHIRNQRGDYSHTFSRKDLQAELVLLFEKQKEFGNPYVSDDLKNGIENLLMTQRPALSGDAIQKMLGHCTFEPAEPKAAKNTYTAERFIWLTKLNNLRILNQGNERPLTDAERTTLMDEPYKKSKLTYAQARKLLDLDDTAFFKGLRYGKDNAESATLMEMKAYHAISRALEKEGLKDKKSPLSLSPELQDEIGTAFSLFKTDEEITGRLKGCLQPEILDALLKHISFDKFVQISLKALRRIVPLMEQGKRYDEACAEIYGDHHGRRNSEETLYLPPIPADEIRNPVVLRALSQARKVINGVGRRYGSPARIHIETAREVGKSFKDRKEIEKRQEENRKDREKAAAEFQEYFPNFVGEPKSKDILKLRLYRQQNCKCLYSGKEINLGRLNEKGYVEIDHALPFSRTWDDSFNNKVLVLGSENQNKGNRTPYEYLNGKDNSREWQEFKARVETSRFPHSKKQRILLQKFDEEGFKERNLNDTRYVNRFLCKFVADHMQLTGKGKRRVFASNGQITNLLRGFWGLRKVRAENDRHHALDAVVVACSTVAMQQRITRFVRYKEMNAFDGKTVDKETGEVLHQKTHFPQPWEFFAQEVMIRVFGKPDGKPELEEADTPEKLRALLAEKLSSRPEAVHEYVAPLFVSRAPNRKMSGQGHMETIKSPKRLDEGISVVRVPLTQLKLKDLEKMVNREREPKLYEALKARLEAHKDDPAKAFAEPFYKQDKAGNRTQQVKAVRIEQVQKTGVWVRNQNGIADNATMVRVDVFEKGGKYYLVPIYSWQVAKGILPDKAIIAFKDEEEWQLIDDSFNFKFPLHPNDLVEVITKKARIFGYFASCHRGTGNINIRIHDLDNKVGKNGILEGIGVKTALSFQKYQIDELGKEIRPCRLKKRPPVR

SEQ ID NO: 364 - protein, 1097 aa, Neisseria wadsworthii
  REGION 1..1097: note = Neisseria wadsworthii 9715
MKKQPQRYILGLDLGIASVGWALILVDGAENPVGLLDCGVRTFERAEVPKTGDSLALARRQARSVRRLIRRRAHRLLRLRRLLKREGILSAADFNSDGLPNLPIDAWQLRVAGLERKLTNQEWAAVLLHLVKHRGYLSQRKSETQTENKELGRLLAGVAENSKLLSESSEQYRTPAELAVKLFAEQSGHLRNKGGEYTHTFNRLDLQKELHLLFERQYALGNPFASAELQSKVDELLMTQRSALQGEAVLKMLGKCTFEPSEYKAAKNTYSAERFIWLTKLNNLRILYNGEERALDEGDRKKLLDEPYKKAKLTYKQVRSILNLPESAVFKGLRYGKDSDGLKAENGTLMEMKAYHKIRTILDKAGLKGEWENRIRNPEILDKIGTAFSLYKTDEDIQAALADLRLPENVLDALLAGLNFDKFIQLSLKALRNILPLMERGIRYDEACKEVYGDHRALAESKNQVLLPPIPADEIRNPVVLRTLTQARKVINAIIRRYGSPQRVHIETARELGKSKQERDKIDRKNKENQNDRNRLASDIRKHFNFEPTPKDILKLRLYEQQHGKCLYSDLREEKGECLYTGNVIELHRLFEDGYVEIDHALPLSRTWDNSLNNKVLVLKSSNQNKGNKTPYEWLDGANNSRRWREFQARVQGCHFPYVKKQRIQTAKLDSKAEQGFLERNLNDTRYISKFMCQFITANLRLAETSNALMEEVAGENPYWKERKRQRVFAPSGSIIALLRGLWGLKKVREDNDRHHALDAIVVACSTVSMQQKITKAMQRRETLETVDSETGEVKTRIPQPWDFFRQEVMIRVFSDSPREELAEKLNSRPEALHDFVSPLFVSRAPNRKMTGQGHLETVKSAKRLSENISVVRKPLTALKLKDIENIVGYPDREPALYQALRERLLAHKDDPVKAFADKPFYKPAKDGGQGSLVKAVRIIENTKHGLKIRNGITDTNGDMVRTDVYQKTDKKGKRQYFIVPVYAWQVEKNELPTVDCKGYEIDDNYEFCFSLYKYDLIEIQNPNDINQELRAYYINCDSSDGRFWLAYHDKSAKEQQFRISTQNQPIIKKYQVDTLGKEIRLCKAEKRTALNGKKKK

SEQ ID NO: 365 - protein, 1426 aa, Niabella soli
  REGION 1..1426: note = Niabella soli DSM 19437
MPRKNILGLDLGTTSIGFAKIIEDDDYQCSSVELIGVRVNPLTTDEQTNFEKGKPVSVNADRTLKRGMRRNLDRYQLRRDYLIEILRTHHIITADTKLAEDGKNTTHTTYALRALAATAEIPLEAFVRVLLAINKKRGYKSSRKAKNEDEGQLIDGMAIARRLYEESLTPGQFSYQLLKEGKKYLPDFYRSDLNTELNKVWNFQKQFYPEILTDEFKRHLEGKGQRATAVAFWGQHGFSMAENKGSREEKKLHAYKWRSEAAHKQLTKEEVAFVITEINNDLNKSSGYLGAISDRSKELFFNKQTVGQYLHQQLKENPHTRLKGQVFYRQDYLDEFETIWEMQAKFYSALTLELKEEVRDVVIFYQRKLKSQMGLISLCEFESKEIEIEKNGEKAKKRIGLRVAPKSSPLFQEFKIWQVLNNLEFRNKKTKEVFVPEMAAKQQLFDELNIKGNLLASEAIKILGYKTKDWEANYHTLEGNRTNKSLYDAWLKILELEGYDENLLKLSGSDDIDVSKIEKPALEIRQMVLAVFEVLGISGAILDFDAEADGKAFEQQPAYQLWHLLYSAEDDGKKYSQEDIFTYGHDNIGLKKKLCEKFGFRPEHTKILVNVVFSDDYGNLSSKAMRRIYPFIKELTYDKACAEAGYRHSAASLTKEEIAARPLQNRLDLLKKNELRSPVVEKILNQMVNVVNTLVDDENQNRKARGLSEDFHFDEIRIELARELKKNAKERAEMTTNINTAKQSHEKIIRILQTEFGVPNPSRNDIVRYKLYEELKNNGYKDLYTNTYISRDILFSKQIDVDHIIPQMSLFDDSFSNKTVVFRKDNQDKGNKTAYDYILGKYGEQALEEYISRITSLFELGKKNKEEGIGKAKFQKLQKRLVDIGDGFIERDLRESQYIAKKANNMLYAICRSVVSTSGEITARLREDWDLVNVMQEINLPKFRALGLTEMVEKKDGAQKERITDWTKRNDHRHHAMDALAIAFTRHSHIQYLNHLNARKDEANKWHPVVSKIEEKETVLIYDDLGNRKRKFKAPMPNFREVVKEHLENVLISHKAKNKVVTKNKNKIKTVRGEKVKTELTPRGQLHKETIYGRYRYYESKEEKIGPKFDAEMIGMVTNPQYKKLLLERLAANGNDPKKAFWGKNALNKNPLYVDEARQELLPEKILLRWLNDDYSIRKDVTPENLKDIKTIEKILDKGVKKILLKRLADFGNDPKKAFSDLDKNPIWQNEAKRIAIKRVTISGIKNAAPLHHKKDHLGNDILDEKGKQIPSSFVSTGNNHHVAIYRDAEGNLQERVVSLFDAVQLVNGGEPVIDKEYNKGIGWQFLFTMKQNEMFVFPDEKTGFNPREVDLLSSGNRKLISPNLFRVQKLASKNYFFRHHLETSVEEKKELKNIAYKPQLGLNALSNIVKVRINHIGEIVSVGEY

SEQ ID NO: 366 - protein, 1132 aa, Nitratifractor salsuginis
MKKILGVDLGITSFGYAILQETGKDLYRCLDNSVVMRNNPYDEKSGESSQSIRSTQKSMRRLIEKRKKRIRCVAQTMERYGILDYSETMKINDPKNNPIKNRWQLRAVDAWKRPLSPQELFAIFAHMAKHRGYKSIATEDLIYELELELGLNDPEKESEKKADERRQVYNALRHLEELRKKYGGETIAQTIHRAVEAGDLRSYRNHDDYEKMIRREDIEEEIEKVLLRQAELGALGLPEEQVSELIDELKACITDQEMPTIDESLFGKCTFYKDELAAPAYSYLYDLYRLYKKLADLNIDGYEVTQEDREKVIEWVEKKIAQGKNLKKITHKDLRKILGLAPEQKIFGVEDERIVKGKKEPRTFVPFFFLADIAKFKELFASIQKHPDALQIFRELAEILQRSKTPQEALDRLRALMAGKGIDTDDRELLELFKNKRSGTRELSHRYILEALPLFLEGYDEKEVQRILGFDDREDYSRYPKSLRHLHLREGNLFEKEENPINNHAVKSLASWALGLIADLSWRYGPFDEIILETTRDALPEKIRKEIDKAMREREKALDKIIGKYKKEFPSIDKRLARKIQLWERQKGLDLYSGKVINLSQLLDGSADIEHIVPQSLGGLSTDYNTIVTLKSVNAAKGNRLPGDWLAGNPDYRERIGMLSEKGLIDWKKRKNLLAQSLDEIYTENTHSKGIRATSYLEALVAQVLKRYYPFPDPELRKNGIGVRMIPGKVTSKTRSLLGIKSKSRETNFHHAEDALILSTLTRGWQNRLHRMLRDNYGKSEAELKELWKKYMPHIEGLTLADYIDEAFRRFMSKGEESLFYRDMFDTIRSISYWVDKKPLSASSHKETVYSSRHEVPTLRKNILEAFDSLNVIKDRHKLTTEEFMKRYDKEIRQKLWLHRIGNTNDESYRAVEERATQIAQILTRYQLMDAQNDKEIDEKFQQALKELITSPIEVTGKLLRKMRFVYDKLNAMQIDRGLVETDKNMLGIHISKGPNEKLIFRRMDVNNAHELQKERSGILCYLNEMLFIFNKKGLIHYGCLRSYLEKGQGSKYIALFNPRFPANPKAQPSKFTSDSKIKQVGIGSATGIIKAHLDLDGHVRSYEVFGTLPEGSIEWFKEESGYGRVEDDPHH

SEQ ID NO: 367 - protein, 1166 aa, Nitrobacter hamburgensis
MHVEIDFPHFSRGDSHLAMNKNEILRGSSVLYRLGLDLGSNSLGWFVTHLEKRGDRHEPVALGPGGVRIFPDGRDPQSGTSNAVDRRMARGARKRRDRFVERRKELIAALIKYNLLPDDARERRALEVLDPYALRKTALTDTLPAHHVGRALFHLNQRRGFQSNRKTDSKQSEDGAIKQAASRLATDKGNETLGVFFADMHLRKSYEDRQTAIRAELVRLGKDHLTGNARKKIWAKVRKRLFGDEVLPRADAPHGVRARATITGTKASYDYYPTRDMLRDEFNAIWAGQSAHHATITDEARTEIEHIIFYQRPLKPAIVGKCTLDPATRPFKEDPEGYRAPWSHPLAQRFRILSEARNLEIRDTGKGSRRLTKEQSDLVVAALLANREVKFDKLRTLLKLPAEARFNLESDRRAALDGDQTAARLSDKKGFNKAWRGFPPERQIAIVARLEETEDENELIAWLEKECALDGAAAARVANTTLPDGHCRLGLRAIKKIVPIMQDGLDEDGVAGAGYHIAAKRAGYDHAKLPTGEQLGRLPYYGQWLQDAVVGSGDARDQKEKQYGQFPNPTVHIGLGQLRRVVNDLIDKYGPPTEISIEFTRALKLSEQQKAERQREQRRNQDKNKARAEELAKFGRPANPRNLLKMRLWEELAHDPLDRKCVYTGEQISIERLLSDEVDIDHILPVAMTLDDSPANKIICMRYANRHKRKQTPSEAFGSSPTLQGHRYNWDDIAARATGLPRNKRWRFDANAREEFDKRGGFLARQLNETGWLARLAKQYLGAVTDPNQIWVVPGRLTSMLRGKWGLNGLLPSDNYAGVQDKAEEFLASTDDMEFSGVKNRADHRHHAIDGLVTALTDRSLLWKMANAYDEEHEKFVIEPPWPTMRDDLKAALEKMVVSHKPDHGIEGKLHEDSAYGFVKPLDATGLKEEEAGNLVYRKAIESLNENEVDRIRDIQLRTIVRDHVNVEKTKGVALADALRQLQAPSDDYPQFKHGLRHVRILKKEKGDYLVPIANRASGVAYKAYSAGENFCVEVFETAGGKWDGEAVRRFDANKKNAGPKIAHAPQWRDANEGAKLVMRIHKGDLIRLDHEGRARIMVVHRLDAAAGRFKLADHNETGNLDKRHATNNDIDPFRWLMASYNTLKKLAAVPVRVDELGRVWRVMPN

SEQ ID NO: 368 - protein, 1044 aa, unidentified
  REGION 1..1044: note = Nitrosomonas sp. AL212
  source 1..1044: note = Nitrosomonas sp.
MLHKMRYRLALDLGSTSLGWAMVRLNANQQPCAVIKAGVRIFSNGRNPKDGSSLAVTRREARSMRRRRDRLLKRKARMMRTLIEYGFFPANETQRKALENLNPYALRAKGLDEALTPSEFARALFHINQRRGFKSNRKTDKKDSDSGALKTAIKQLHSVLDPQGNDGKPRTVGELLYKRFTDLSKLPKDRTVRARYRQDKIVKDDGKTKIDKYYDLYIDRAMIEQEFDALWKKQSELNPILFTENARADLKDVLLYQRSLKPVKPGRCTFMSEEERAPLALPSTQRFRMYQEVNNLRILREGLKEESLTLQQRDDLINALEKNNRRTFTQIKKLLGVGGSVQFNFEDPKREELKGNTTSAILGKSEHFGEAWFAFNEAKQDAIVLQLIKEENEAKLVRWLQDETGIDEKRAEVIANAGLPEGYGSLCIEALARILPELRRDVVTYDKAVQAAGFEHHSKLNRNEEIPDITFKIESIDRNSGEIKQFHLHKELPYYGEYLQRHVGFGSGKPEDSIEKRYGKIANPTVHIGLNQVRVVVNALIKRYGHPSEIIVEVARDLKQSKDRRDEENKRQAENQKRNERLRKDIADILGISEERVRRDDIEKMILWEELSFDPADRRCPYSGVQVSTVMLLSDEVEVEHILPFSQTLDDSLNNKTVALRQANRIKGNRTPWEAFGTSNISGFDYSGILTRAELMPKAKRYRFAEDGYQRWLKDDAGFLARALNDTRHLSKIAREYMSLICPNTRVIPGQMTAMLRRNFGLNDVLGLNGEKNRNDHRHHAVDACVIAVTDQGLLQRFAAASASARERQLNRLVENMPLPWESYREHVRRAIDGIWVSHRPDHSHEGAMHNDTAYGLRGNGRVSFHKMVEGKREYIEDNLKVIEITDTKAIDRHGLLPTGKPRPYKGYKGDSNYCIEIVRNEKGRWEGEIISTFDAYQLVRKYGIVQLRYPVLSVSGKPLVMRLIRNDFVRLEHEGITRTLRVCKMREDGQVALADVTEANVDARTRTKEICYVFKTGGSLQKAKARRITISPIGELRDPGFKE

SEQ ID NO: 369 - protein, 1498 aa, Odoribacter laneus
  REGION 1..1498: note = Odoribacter laneus YIT 12061
METTLGIDLGTNSIGLALVDQEEHQILYSGVRIFPEGINKDTIGLGEKEESRNATRRAKRQMRRQYFRKKLRKAKLLELLIAYDMCPLKPEDVRRWKNWDKQQKSTVRQFPDTPAFREWLKQNPYELRKQAVTEDVTRPELGRILYQMIQRRGFLSSRKGKEEGKIFTGKDRMVGIDETRKNLQKQTLGAYLYDIAPKNGEKYRFRTERVRARYTLRDMYIREFEIIWQRQAGHLGLAHEQATRKKNIFLEGSATNVRNSKLITHLQAKYGRGHVLIEDTRITVTFQLPLKEVLGGKIEIEEEQLKFKSNESVLFWQRPLRSQKSLLSKCVFEGRNFYDPVHQKWIIAGPTPAPLSHPEFEEFRAYQFINNIIYGKNEHLTAIQREAVFELMCTESKDFNFEKIPKHLKLFEKFNFDDTTKVPACTTISQLRKLFPHPVWEEKREEIWHCFYFYDDNTLLFEKLQKDYALQTNDLEKIKKIRLSESYGNVSLKAIRRINPYLKKGYAYSTAVLLGGIRNSFGKRFEYFKEYEPEIEKAVCRILKEKNAEGEVIRKIKDYLVHNRFGFAKNDRAFQKLYHHSQAITTQAQKERLPETGNLRNPIVQQGLNELRRTVNKLLATCREKYGPSFKFDHIHVEMGRELRSSKTEREKQSRQIRENEKKNEAAKVKLAEYGLKAYRDNIQKYLLYKEIEEKGGTVCCPYTGKTLNISHTLGSDNSVQIEHIIPYSISLDDSLANKTLCDATFNREKGELTPYDFYQKDPSPEKWGASSWEEIEDRAFRLLPYAKAQRFIRRKPQESNEFISRQLNDTRYISKKAVEYLSAICSDVKAFPGQLTAELRHLWGLNNILQSAPDITFPLPVSATENHREYYVITNEQNEVIRLFPKQGETPRTEKGELLLTGEVERKVFRCKGMQEFQTDVSDGKYWRRIKLSSSVTWSPLFAPKPISADGQIVLKGRIEKGVFVCNQLKQKLKTGLPDGSYWISLPVISQTFKEGESVNNSKLTSQQVQLFGRVREGIFRCHNYQCPASGADGNFWCTLDTDTAQPAFTPIKNAPPGVGGGQIILTGDVDDKGIFHADDDLHYELPASLPKGKYYGIFTVESCDPTLIPIELSAPKTSKGENLIEGNIWVDEHTGEVRFDPKKNREDQRHHAIDAIVIALSSQSLFQRLSTYNARRENKKRGLDSTEHFPSPWPGFAQDVRQSVVPLLVSYKQNPKTLCKISKTLYKDGKKIHSCGNAVRGQLHKETVYGQRTAPGATEKSYHIRKDIRELKTSKHIGKVVDITIRQMLLKHLQENYHIDITQEFNIPSNAFFKEGVYRIFLPNKHGEPVPIKKIRMKEELGNAERLKDNINQYVNPRNNHHVMIYQDADGNLKEEIVSFWSVIERQNQGQPIYQLPREGRNIVSILQINDTFLIGLKEEEPEVYRNDLSTLSKHLYRVQKLSGMYYTFRHHLASTLNNEREEFRIQSLEAWKRANPVKVQIDEIGRITFLNGPLC

SEQ ID NO: 370 - protein, 1389 aa, Oenococcus kitaharae
  REGION 1..1389: note = Oenococcus kitaharae DSM 17330
MARDYSVGLDIGTSSVGWAAIDNKYHLIRAKSKNLIGVRLFDSAVTAEKRRGYRTTRRRLSRRHWRLRLLNDIFAGPLTDFGDENFLARLKYSWVHPQDQSNQAHFAAGLLFDSKEQDKDFYRKYPTIYHLRLALMNDDQKHDLREVYLAIHHLVKYRGHFLIEGDVKADSAFDVHTFADAIQRYAESNNSDENLLGKIDEKKLSAALTDKHGSKSQRAETAETAFDILDLQSKKQIQAILKSVVGNQANLMAIFGLDSSAISKDEQKNYKFSFDDADIDEKIADSEALLSDTEFEFLCDLKAAFDGLTLKMLLGDDKTVSAAMVRRFNEHQKDWEYIKSHIRNAKNAGNGLYEKSKKFDGINAAYLALQSDNEDDRKKAKKIFQDEISSADIPDDVKADFLKKIDDDQFLPIQRTKNNGTIPHQLHRNELEQIIEKQGIYYPFLKDTYQENSHELNKITALINFRVPYYVGPLVEEEQKIADDGKNIPDPTNHWMVRKSNDTITPWNLSQVVDLDKSGRRFIERLTGTDTYLIGEPTLPKNSLLYQKFDVLQELNNIRVSGRRLDIRAKQDAFEHLFKVQKTVSATNLKDFLVQAGYISEDTQIEGLADVNGKNFNNALTTYNYLVSVLGREFVENPSNEELLEEITELQTVFEDKKVLRRQLDQLDGLSDHNREKLSRKHYTGWGRISKKLLTTKIVQNADKIDNQTFDVPRMNQSIIDTLYNTKMNLMEIINNAEDDFGVRAWIDKQNTTDGDEQDVYSLIDELAGPKEIKRGIVQSFRILDDITKAVGYAPKRVYLEFARKTQESHLTNSRKNQLSTLLKNAGLSELVTQVSQYDAAALQNDRLYLYFLQQGKDMYSGEKLNLDNLSNYDIDHIIPQAYTKDNSLDNRVLVSNITNRRKSDSSNYLPALIDKMRPFWSVLSKQGLLSKHKFANLTRTRDFDDMEKERFIARSLVETRQIIKNVASLIDSHFGGETKAVAIRSSLTADMRRYVDIPKNRDINDYHHAFDALLFSTVGQYTENSGLMKKGQLSDSAGNQYNRYIKEWIHAARLNAQSQRVNPFGFVVGSMRNAAPGKLNPETGEITPEENADWSIADLDYLHKVMNFRKITVTRRLKDQKGQLYDESRYPSVLHDAKSKASINFDKHKPVDLYGGFSSAKPAYAALIKFKNKFRLVNVLRQWTYSDKNSEDYILEQIRGKYPKAEMVLSHIPYGQLVKKDGALVTISSATELHNFEQLWLPLADYKLINTLLKTKEDNLVDILHNRLDLPEMTIESAFYKAFDSILSFAFNRYALHQNALVKLQAHRDDFNALNYEDKQQTLERILDALHASPASSDLKKINLSSGFGRLFSPSHFTLADTDEFIFQSVTGLFSTQKTVAQLYQETK

SEQ ID NO: 371 - protein, 1389 aa, Oenococcus kitaharae; identical to SEQ ID NO: 370
  REGION 1..1389: note = Oenococcus kitaharae DSM 17330

SEQ ID NO: 372 - protein, 1399 aa, Olsenella uli
MNLRNTTDEYNIGLDMGTNSVGWAVTDKAGAIAHFKGKPTLGSRLFDAAQTAAGARIHRSQRRRYVRRRWRLDLLQSLFQDEVSKVDSEFFCRLRQSRLYVGDREKGHADYTWPIFNDSDFNEVDYYKRFPTIYHLRKWLMETDEKADIRLIYLATHNIVKHRGNFLRENNKSLSSRDANPAQAVKSLRLALNDWCSERDYECAWKGEEDDGAIDEAILNVLADGEKGRSDQAKEIAKLTGVDCGDAKQSKQCNEAIAKAIVGLKVEMKNIFGEFPAEKTSYIYLSSDEDVEAVRESCPDDSGELFQALCKLYSAYILQELLSYADPSGQTISANMVAKYKQYGRDLRLLKELTRTYAPQKYDLFFRGETYAGSSDYVVDEARGYTRYNLGTTKANYDDFQKSVKELFKGTDALQDERYQEMMVAFGEQKFLRRLKTSDNGSIYYQLHLEELHTILENQGKHYPFLLSEEDKIESLVSFRIPYYVGPLTRKNAAIGHDGKERFAWSSRKDGMEHAVITPWNWEEIIDRDKSAEDFIMRMTGDCTYLQGEPVLPKCSLLYEEFCALNEFNGAHWTVDGDDERRFDAAQRERIMCDLFRRTRSVTYNKVSDWLERKYNFTGARVRGGQGEHGFESKLGSYIFFCKDVFKTDGLDEADYTMIEQIILWSTLFEDRDILKRKIEEAYGGDRLTSEQIKVICKKRFTGWGRLSKRLLTDIKVNTDTGRKSIMDVLREGNPNNGQRSRTMVFMEVLRDEDLGFQKAIDGLNRDYFREHNNGLMDVNDLPGSPAIRRSINQAVRIVDEIASIARKEPTNIFIEVTREEDDPRKKGKRTKRRYDAIKSALEKFKKDDPSLWKELCEKAPGDMDERLSLYFMQRGKCMYSGRPIKIEELHTGKYEVDHIIPRSYIKDDSFENKVLVYREENQHKTDALLIDSSIRQKMGGYWRMLHDAKLVGDKKFRNLFRNHIDDKAMKGFVARQIVETSQMVKLVQTLFEARYPNTRIVPVKAGISHDLREAAGLVKCREANDFHHAHDAFLACRIGLFIQKRHPSVYDNPIGLARIMRDYARMQAREYKKSHCLAHTQGFIVNSFLSSGFDEETGEIFKDDWDAKAEVEGIRRVLNCRQCFISRMPVEGDTRYGGRYWGETIYSPKGKHKHEIPLKQGLDPNLYGGYSDLLYSYFLIYEASDVSSGERVLRFIGIPTSIAARMANQKRLEEYVSRLALQENLEHVRMVRKIMKKQLIEVDNCRLLVTAADAVTNATELAFSLDEMKIISTCAKCINGADPSAIDKIGNAQDSFFDNLKRRGSDRCALLFSQLKLDKLSQNFYMISSDDKSKILISILDRIRAKSNSVDLSLVGGAKHAAQMKFDFNAKLNNPASSFVLIDQSVTGMFERRTRIGL

SEQ ID NO: 373 - protein, 1535 aa, Ornithobacterium rhinotracheale
MNTILGLDLGTNSIGWALIKVLNDKTRLPLEIIDLGVVVIPTDQRTLDKFSKGESISKTAERTKQKGVRKLYERKKLRRERLHRVLNILGFLPEHYSKKIDFKKHLGQFFGNSQPKISYVENDHGKHEFIFMDSYREMLKEFSKHNIKNVPYDWTIYYLRKKALSQKISKEELAWVILNFNKKRGYYQFRDDNADENKENKIEKYYALKVTNVKKEDAQNYTITLENGWIYKNKSKISLLDWVGSTKEFISTEKFDNKGNIIKKKNGEDDRTLKLVDSEKDWIAIKKSTEDRIENYGKTVGTYLYEHLLKDPNQKLNGELINIIDRKFYKNELKQILEKQKEFHPELLNEDLFQKSIIELYPKNSTRQKELKNKDLCYLLIDDVIYYQRDLKKKNSTINKCSFESREYYLNGEKQIQKINCIAKSKPLYQEFRTLQFIKNLKVYEIIDGLEKDITSKLLPDFETKEHFFEWLNDKEKIDQLQLLSYKCFDLHDNVKNDLIAKGIKRPTEKAIRTELLEKYRWNYSKDNDRNFLLNETRFKILKYLKKVDKKLTLTNEQIESLWLLLYSAKDERELKNGLQKFSEKNKLPKKFSDIFISFPPFKKEYGAYSEKALKKLLSLVRFGKYWSFNKIDNNIQNKIMNILNGEVDDSISDRVREKTILLQDKNDFQDLPLWLASYVAYNRFSEVSEIKYWDSPDKIEFLKQHSIGNPIVEKIINETLKLIKDIWVIHGKSCKNFFSEIHIELSREIKSSSKKRAQITNNNTKNQKLNNLIKSLLIEMASDTKYENVTPYSPSQQEILKIYDEGIYSKEENSEKIKEINKIRNNNKISKSDITKYKLWLEQGYISPYTGKIIPLTKLFTAKYQKEHIIPQTKFFDDSFNNKVICEAEVNKLKDNSLAMNFIKAKGGKAVKLSDGETVTILNQEEYKQLVRTSFKKNSIKLRNLLLEEIPDTFTKRQLNDTKYISKLVLSLLSNIVREKGELESTAKRIVSTNGQITSILRNDWGLNNIWNKLITPRFERLNNINKNKIYGNWENKKGKNVFQINYLNDNLSTLNTKRIDHRHHALDALIVACTTRNHINFLNNQYAKSRNQRHDLRAKLKRRETITTEGSKKQVFKDFIKPWESFTQDALKKLETTIVNFKVNKRIINKTINWYKKWEKQKDGTYKKIQKKQTKGDAWAIRKPLHIDTIYGIVCKKLPLKSALENYKNIIDENLKHKIKELKEVNKFDNNQIINFFKECNFIFEDNNIQKVEVYDFKDNRDKTILSSSRQLIDESFTPKKIGKVLDPTIRNILLKHLNSTKYNNKFDSDGNPIKPEKLAFSPEGLKDLNKNIKHLNNNKEHQPIKRVKLFETLGNKIKVGYTQQKNKKFAETATGTNLFLGIYSDNNKRDFKTIPLILAIQREKEGLNPCPDTDEKGNQLLFSLSPNELVFVPNNEERKNPNLVDFENLSKDQIDRIYKFVSCTGSEAYFVPSRTAKPIIENENGTNNKSQRIIEFNEKTSIKNEKNEPVLIKTICWKIEVNRLGKIIKVIK

SEQ ID NO: 374 - protein, 1443 aa, Parabacteroides johnsonii
  REGION 1..1443: note = Parabacteroides johnsonii DSM 18315
MIKLLYLEKLKQYTMKKILGLDLGTSSIGWALVNEAENSDEVSSIIKLGVRVNPLTVDEMQNFEKGKSITTNADRTLKRSMRRNLQRYKLRRDALIELLKKVGFITDKTILSEQGNRTTFETYRLRAKAAEEEISLKELARVLLMINKKRGYKSSRKAKGEEEGALIDGMEIAKKLYDEDLTPGQLCLQLLESGKKFFPDFYRSDLQEEFNKIWDFQKQFNLFSFCDVAKEEVKGKNKSQTWAILAKYFVETKKVNVWNEHEAQTENREEVYKLVGLKRTVKGEELKKENYRWRVQALTEQLDLEKIAVVLQEINGQISASSGYLGAISDRSKVLYFNRQTVGQYQMAELNKNPNMSLRNMVFYRQDYLDEFNVIWEKQAEFHKELTPELKKEIRDIIIFYQRRLKSQKGLISFCEFENREVVVEKEGKKQTKIIGCKVIPRSHPLFQEFKIWQTLNNIEVFVGEKKGKRKKSNVSSDLFGDTEDALITEGRRFLYQEEKKILAKELSIKKGLTKAEILRLLFENPQELDINFKQIDGNQTGFALFSAYSNMIEKYGYEPLDFKKPAEDLISQLKTVFTDLGWNTDLLFIDLDKENKEWEKQPYFRLWHLLYSFEGDNTPTGNGKLIEKIMQLCGIEKEYAIELANVSLQDDYGSLSAKAIKKILLYLKEGNQYDMACEYAGYRHSKSSLTKEEIENKVLKDKLEILPKNSLRNPVVEKILNQMVNVINTVMEVYGRPDEIRVELARELKKSAKEREELTKAVAKNTREHEEIRKVLQSEFGMINVSRNDIIRYKLYEELKDNGYKTLYSNQYIPREKLFSKEIDIEHIIPQSRLFDDSLSNKTLEYKSINIEKGNKTAYDFVKEKYGEEGLQQYLNRCENLCKDKKAKLRKLKMELNEIPDGFIDRDLRNTQYIAKKALSMLTEICRRVVATTGSITDKLREDWQLVDVMKELNLPKYEALGLVEVYEDKDGRKIKRIKDWTKRNDHRHHAMDALTVAFTKDVFIQYFNNKNAAWESDSKEHTNIVGIKTRYFESGKAVPPIPLGQFRVEAKCHLENLLVSIKAKNKVVTTNVNCIKKKGGTYKNTQQTPRGQLHLETIYGSHNQYVTKIEKVNASFDAVKIATVSKQDYRNALLKRLEVFGNDPKKAFTGKNSLEKNPIYLDRAQTIQVPDKVQTVELETAYTIRKPVDPTLNVDKVVDKKIRLILEQRLKEYGGDAKKAFVNLDENPIWLNEEKGISIKRVTIRGISKAQALHDKKDKDGNFILDETGKRIPVDFVNTGNNHHVAIYRKPVLDKKGQVIFDDEGNPMYELDEDVVPFFEAVTRANLGIPIIDKDYKKSEGWQFLFSMKQNEYFVFPNEKTGFNPKEVDLLDPDNYAMISPNLFRVQKIGLNDYTFRHHLETTIQNDLKFITWIRCGKSGIKDIVKVRINHIGQIVSVGEY

SEQ ID NO: 375 - protein, 1424 aa, unidentified
  REGION 1..1424: note = Parabacteroides sp. D13
  source 1..1424: note = Parabacteroides sp.
MKRILGLDLGTNSIGWALVNEAETDEEVSSIIRLGVRVNPLTVDETQNFEKGKSITTNAERTLKRSMRRNLQRYKLRRDALVEFLKELGFITDETILSEQGNRTTFETCRLRAKAAEEEISLEELSRVLLMINKKRGYKSSRKVKKEEDGVLIDGMEIAKKLYEEDLTPGQLCSQLLESGKKVLPDFYRSDLQEELDRIWSVQKQFHPDVFCDAAKEEIKGKNRSQTWAILANYFVWKEEVVGWNDREAKNETIEKECKLVGLKRTTKGYELKKENYRWRAQALTEQLGLEEIAVVLQEINGQINASSGYLGAISDRSKVLYFNHQTVGQYQMAELDKNPHASLRNMVFYRQDYLDEFDRIWEKQAEFHKELTAELKKEIRDMIIFYQRRLKSQKGLISFCEFERLEIVVEKDGKKQTKVIGCKVIPRSHPLFQEFKVWQTLNDIKVLGREKKRNALSASESRALYPEEKEILARELAIKENMKKADVLKLLFENPQELDLNFKQIDGNRTGFSLFSAYSKMIEKYGYEPLDFKKPADEIIGQLRTIFTDLGWNTNLFTIDLTKEGKELEMQPYFRLWHLLYSFEGDNTSTGNGKLIEKIMQLCGVEKEYAVELASLSFQDDYGSLSAKAIKRILPYLKEGNLYDVACEYAGYRHSKSSLTKEEIENKVLKGKLEVLPKNSLRNPVVEKILSQMVNVINTIIDTYGKPDEIRVELARELKKSAKEREELTKAIAKSTREHEEIRKLLQDEFGMMNVSRNDIIRYKLYEELKDNGYKTLYSNQYIPKEKIFSKEIDIEHIIPQSRLFDDSLSNKTLEYKAINIEKGNKTAYDFVKEKYGEEGLQQYINRCESLFNDKKAKLRKLKMEQKDIPDGFIDRDLRNTQYIAKKALAMLNEICRRVVATTGSITDQLREDWQLVDVMKELNLPKYEALGFVETYEDKDGRKIKRIKDWTKRNDHRHHAMDALTVAFTKDAFIQYFNNKNAAQDSGNRNHTNIIGIKTRYFDKGRALPPIPLEQFRIEAKQHLEKLLVSIKAKNKVVTVNVNRTKKRKGENTKIQQTPRGQLHLETVYGSHKQYVTKIEKVNASFDAAKIATVSKRAYRNALLKRLETFGNDPKKAFTGKNALEKNPLYADKYQTIRVPEKVQTVEFETIYTIRKPVDPALNVDKVVDVKVRAILERRLKEYGGDPKKAFVNFWENPIWLNKEKGISIKRVSIRGINNAQSIHVKKDKNGNPIWDENGKQIPVDFVNTGNNHHVAIYRKPVLDKKGQVTFDEDGNLMYELDEVVVPFFEAVTRANLGLPIIDKDYRKSEGWQFLFSMKQNEYFVFPNEKTGFNPKEVDLLNPDNYAMISPNLFRVQTMSKVMYGNNVVRDYKFRHHLETTVKDMKELKDIAYKQYKTLSFGNSVVKIRINHIGQIVSVGEY

SEQ ID NO: 376 - protein, 1428 aa, Parasutterella excrementihominis
  REGION 1..1428: note = Parasutterella excrementihominis YIT 11859
MGKTHIIGVGLDLGGTYTGTFITSHPSDEAEHRDHSSAFTVVNSEKLSFSSKSRTAVRHRVRSYKGFDLRRRLLLLVAEYQLLQKKQTLAPEERENLRIALSGYLKRRGYARTEAETDTSVLESLDPSVFSSAPSFTNFFNDSEPLNIQWEAIANSPETTKALNKELSGQKEADFKKYIKTSFPEYSAKEILANYVEGRRAILDASKYIANLQSLGHKHRSKYLSDILQDMKRDSRITRLSEAFGSTDNLWRIIGNISNLQERAVRWYFNDAKFEQGQEQLDAVKLKNVLVRALKYLRSDDKEWSASQKQIIQSLEQSGDVLDVLAGLDPDRTIPPYEDQNNRRPPEDQTLYLNPKALSSEYGEKWKSWANKFAGAYPLLTEDLTEILKNTDRKSRIKIRSDVLPDSDYRLAYILQRAFDRSIALDECSIRRTAEDFENGVVIKNEKLEDVLSGHQLEEFLEFANRYYQETAKAKNGLWFPENALLERADLHPPMKNKILNVIVGQALGVSPAEGTDFIEEIWNSKVKGRSTVRSICNAIENERKTYGPYFSEDYKFVKTALKEGKTEKELSKKFAAVIKVLKMVSEVVPFIGKELRLSDEAQSKFDNLYSLAQLYNLIETERNGFSKVSLAAHLENAWRMTMTDGSAQCCRLPADCVRPFDGFIRKAIDRNSWEVAKRIAEEVKKSVDFTNGTVKIPVAIEANSFNFTASLTDLKYIQLKEQKLKKKLEDIQRNEENQEKRWLSKEERIRADSHGICAYTGRPLDDVGEIDHIIPRSLTLKKSESIYNSEVNLIFVSAQGNQEKKNNIYLLSNLAKNYLAAVFGTSDLSQITNEIESTVLQLKAAGRLGYFDLLSEKERACARHALFLNSDSEARRAVIDVLGSRRKASVNGTQAWFVRSIFSKVRQALAAWTQETGNELIFDAISVPAADSSEMRKRFAEYRPEFRKPKVQPVASHSIDAMCIYLAACSDPFKTKRMGSQLAIYEPINFDNLFTGSCQVIQNTPRNFSDKTNIANSPIFKETIYAERFLDIIVSRGEIFIGYPSNMPFEEKPNRISIGGKDPFSILSVLGAYLDKAPSSEKEKLTIYRVVKNKAFELFSKVAGSKFTAEEDKAAKILEALHFVTVKQDVAATVSDLIKSKKELSKDSIENLAKQKGCLKKVEYSSKEFKFKGSLIIPAAVEWGKVLWNVFKENTAEELKDENALRKALEAAWPSSFGTRNLHSKAKRVFSLPVVATQSGAVRIRRKTAFGDFVYQSQDTNNLYSSFPVKNGKLDWSSPIIHPALQNRNLTAYGYRFVDHDRSISMSEFREVYNKDDLMRIELAQGTSSRRYLRVEMPGEKFLAWFGENSISLGSSFKFSVSEVFDNKIYTENAEFTKFLPKPREDNKHNGTIFFELVGPRVIFNYIVGGAASSLKEIFSEAGKERS

SEQ ID NO: 377 - protein, 1037 aa, Parvibaculum lavamentivorans
MERIFGFDIGTTSIGFSVIDYSSTQSAGNIQRLGVRIFPEARDPDGTPLNQQRRQKRMMRRQLRRRRIRRKALNETLHEAGFLPAYGSADWPVVMADEPYELRRRGLEEGLSAYEFGRAIYHLAQHRHFKGRELEESDTPDPDVDDEKEAANERAATLKALKNEQTTLGAWLARRPPSDRKRGIHAHRNVVAEEFERLWEVQSKFHPALKSEEMRARISDTIFAQRPVFWRKNTLGECRFMPGEPLCPKGSWLSQQRRMLEKLNNLAIAGGNARPLDAEERDAILSKLQQQASMSWPGVRSALKALYKQRGEPGAEKSLKFNLELGGESKLLGNALEAKLADMFGPDWPAHPRKQEIRHAVHERLWAADYGETPDKKRVIILSEKDRKAHREAAANSFVADFGITGEQAAQLQALKLPTGWEPYSIPALNLFLAELEKGERFGALVNGPDWEGWRRTNFPHRNQPTGEILDKLPSPASKEERERISQLRNPTVVRTQNELRKVVNNLIGLYGKPDRIRIEVGRDVGKSKREREEIQSGIRRNEKQRKKATEDLIKNGIANPSRDDVEKWILWKEGQERCPYTGDQIGFNALFREGRYEVEHIWPRSRSFDNSPRNKTLCRKDVNIEKGNRMPFEAFGHDEDRWSAIQIRLQGMVSAKGGTGMSPGKVKRFLAKTMPEDFAARQLNDTRYAAKQILAQLKRLWPDMGPEAPVKVEAVTGQVTAQLRKLWTLNNILADDGEKTRADHRHHAIDALTVACTHPGMTNKLSRYWQLRDDPRAEKPALTPPWDTIRADAEKAVSEIVVSHRVRKKVSGPLHKETTYGDTGTDIKTKSGTYRQFVTRKKIESLSKGELDEIRDPRIKEIVAAHVAGRGGDPKKAFPPYPCVSPGGPEIRKVRLTSKQQLNLMAQTGNGYADLGSNHHIAIYRLPDGKADFEIVSLFDASRRLAQRNPIVQRTRADGASFVMSLAAGEAIMIPEGSKKGIWIVQGVWASGQVVLERDTDADHSTTTRPMPNPILKDDAKKVSIDPIGRVRPSND

SEQ ID NO: 378 - protein, 1058 aa, Pasteurella multocida
  REGION 1..1058: note = Pasteurella multocida subsp. gallicida X73
MQTTNLSYILGLDLGIASVGWAVVEINENEDPIGLIDVGVRIFERAEVPKTGESLALSRRLARSTRRLIRRRAHRLLLAKRFLKREGILSTTDLEKGLPNQAWELRVAGLERRLSAIEWGAVLLHLIKHRGYLSKRKNESQTNNKELGALLSGVAQNHQLLQSDDYRTPAELALKKFAKEEGHIRNQRGAYTHTFNRLDLLAELNLLFAQQHQFGNPHCKEHIQQYMTELLMWQKPALSGEAILKMLGKCTHEKNEFKAAKHTYSAERFVWLTKLNNLRILEDGAERALNEEERQLLINHPYEKSKLTYAQVRKLLGLSEQAIFKHLRYSKESAESATFMELKAWHAIRKALENQGLKDTWQDLAKKPDLLDEIGTAFSLYKTDEDIQQYLEGKLPDSVINALLVSLNFDKFIELSLKSLRKILPLMEQGKRYDQACHEIYGHHYGEKNQQISQLLPVIPTQEIRNPVVLRTLSQARKVINAIIRQYGSPARVHIETGRELGKSFKERREIQKQQEDNRTKRESAVQKFKELFSDFSSEPKSKDILKFRLYEQQHGKCLYSGKEINIHRLNEKGYVEIDHALPFSRTWDDSFNNKVLVLASENQNKGNQTPYEWLQGKINSERWKNFVALVLGSQCSAAKKQRLLTQVIDDNKFIDRNLNDTRYIARFLSNYIQENLLLVGKNKKNVFTPNGQITALLRSRWGLIKVRENNDRHHALDAIVVACATPSMQQKITRFIRFKEVHPYKIENRYEMVDQESGEIISPHFPEPWAYFRQEVNIRVFDNHPDTVLKEMLPDRPQANHQFVQPLFVSRAPTRKMSGQGHMETIKSAKRLAEGISVLRIPLTQLKPNLLENMVNKEREPALYVGLKARLAEFNQDPAKAFATPFYKQGGQQVKAIRVELVQKSGVLVRQGNGVADNAPGSIVRTDVFIKNNKFFLVPIYTWQVAKGILPNKAIVAHKNEDEWEEMDEGAKFKFSIFPNDLIELRTKTECFLGYYIGPDRHNGSISLREHDSEISKGNAGVYRVGVKLALSLEKYHIDELGKNRRICRPHQRRPVR

SEQ ID NO: 379 - protein, 1056 aa, Pasteurella multocida
  REGION 1..1056: note = Pasteurella multocida subsp. multocida str. P52VAC
MQTTNLSYILGLDLGIASVGWAVVEINENEDPIGLIDVGVRIFERAEVPKTGESLALSRRLARSTRRLIRRRARRLLLAKRFLKREGILSTTDLEKGLPNQAWELRVAGLERRLSAIEWGAVLLHLIKHRGYLSKRKNESQTNNKELGALLSGVAQNHQLLQSDDYRTPAELALKKFAKEEGHIRNQRGAYTHTFNRLDLLAELNLLFAQQHQFGNPHCKEHIQQYMTELLMWQKPALSGEAILKMLGKCTHEKNEFKAAKHTYSAERFVWLTKLNNLRILEDGAERALNEEERQLLINHPYEKSKLTYAQVRKLLGLSEQAIFKHLRYSKENAESATFMELKAWHAIRKALENQGLKDTWQDLAKKPDLLDEIGTAFSLYKTDEDIQQYLTNKVPNSVINALLVFLNFDKFIELALKSLRKILPLMEQGKRYDQACREIYGHHYGEANQKTSQLLPAIPAQEIRNPVVLRTLSQARKVINAIIRQYGSPARVHIETGRELGKSFKERREIQKQQEDNRTKRESAVQKFKELFSDFSSEPKSKDILKFRLYEQQHGKCLYSGKEINIHRLNEKGYVEIDHALPFSRTWDDSFNNKVLVLASENQNKGNQTPYEWLQGKINSERWKNFVALVLGSQCSAAKKQRLLTQVIDDNKFIDRNLNDTRYIARFLSNYIQENLLLVGKNKKNVFTPNGQITALLRSRWGLIKIRENNDRHHALDAIVVACATPSMQQKITRFIRFKEVHPYKIENRYEMVDQESGEIISPHFPEPWAYFRQEVNIRVFDNHPDTVLKEMLPDRPQANHQFVQPLFVSRAPTRKMSGQGHMETIKSAKRLAEGISVLRIPLTQLKPNLLENMVNKEREPALYAGLKARLAEFNQDPAKAFTTPFYKQGGQQVKAIRVEQVQKSGVLVRENNGVADNASIVRTDVFIKNNKFFLVPIYTWQVAKGILPNKAIVAHKNEDEWEEMDEGAKFKFSLFPNDLVELKTKKEYFFGYYIGLDRATGNISLKEHDGEISKGKDGVYRVGVKLALSFEKYQVDELGKNRQICRPQQRQPVR

SEQ ID NO: 380 - protein, 1056 aa, Pasteurella multocida
MQTTNLSYILGLDLGIASVGWAVVEINENEDPIGLIDVGVRIFERAEVPKTGESLALSRRLARSTRRLIRRRAHRLLLAKRFLKREGILSTIDLEKGLPNQAWELRVAGLERRLSAIEWGAVLLHLIKHRGYLSKRKNESQTNNKELGALLSGVAQNHQLLQSDDYRTPAELALKKFAKEEGHIRNQRGAYTHTFNRLDLLAELNLLFAQQHQFGNPHCKEHIQQYMTELLMWQKPALSGEAILKMLGKCTHEKNEFKAAKHTYSAERFVWLTKLNNLRILEDGAERALNEEERQLLINHPYEKSKLTYAQVRKLLGLSEQAIFKHLRYSKENAESATFMELKAWHAIRKALENQGLKDTWQDLAKKPDLLDEIGTAFSLYKTDEDIQQYLTNKVPNSVINALLVSLNFDKFIELSLKSLRKILPLMEQGKRYDQACREIYGHHYGEANQKTSQLLPAIPAQEIRNPVVLRTLSQARKVINAIIRQYGSPARVHIETGRELGKSFKERREIQKQQEDNRTKRESAVQKFKELFSDFSSEPKSKDILKFRLYEQQHGKCLYSGKEINIHRLNEKGYVEIDHALPFSRTWDDSFNNKVLVLASENQNKGNQTPYEWLQGKINSERWKNFVALVLGSQCSAAKKQRLLTQVIDDNKFIDRNLNDTRYIARFLSNYIQENLLLVGKNKKNVFTPNGQITALLRSRWGLIKARENNNRHHALDAIVVACATPSMQQKITRFIRFKEVHPYKIENRYEMVDQESGEIISPHFPEPWAYFRQEVNIRVFDNHPDTVLKEMLPDRPQANHQFVQPLFVSRAPTRKMSGQGHMETIKSAKRLAEGISVLRIPLTQLKPNLLENMVNKEREPALYAGLKARLAEFNQDPAKAFATPFYKQGGQQVKAIRVEQVQKSGVLVRENNGVADNASIVRTDVFIKNNKFFLVPIYTWQVAKGILPNKAIVAHKNEDEWEEMDEGAKFKFSLFPNDLVELKTKKEYFFGYYIGLDRATGNISLKEHDGEISKGKDGVYRVGVKLALSFEKYQVDELGKNRQICRPQQRQPVR

SEQ ID NO: 381 - protein, 1364 aa, Pediococcus acidilactici
  REGION 1..1364: note = Pediococcus acidilactici DSM 20284
MGDRKYNLGLDIGTSSIGFAAVDENNQPIRVKGKTAIGVRLFEEGKTAADRRGFRTTRRRLSRRRWRINLLNEIFDAHLAEVDPTFLARLKESNRSNLDPKKSFQGSLLFPERKDYQFYEEYPTIYHLRKALMEKDRKFDFREIYLAVHHIIKYRGNFLNGTPMRSFKVENIELDTLFDQLNQLYAEIVPDNELAFDLAQVADVKDVLSSTTIYKMDKKKQLVKMMLLPASNKALQSENKKIVTQFVNAILNYKFKLDVLLQVETDADWSLKLNDEGADDKLEEFTGDLDENRLEIIDLLQRLHNWFSLNEITKDGNSLSAAMVEKYENHHHHLGLLKKVIENHPDAKKAKALKETYTAYVGKTDDKTQNQDDFYKAVEKNLDDSPDAKEIKRLIQLDQFMPKQRTGQNGAIPHQLHQQELDQIIEKQSKYYPFLAEPNPNVKRRKDAPYKLDELIAFKIPYYVGPLVTPEEQAQNGENVFAWMKRKAAGPITPWNFDEKVDRMESANRFIRRMTTKDTYLFGEDVLPAESMIYQKFVVLNELNNLKINGRHLSLKDKQDVYNDLFKQQKTVSIKALQNYYVTKKKAATAPTVGGLADPKKFLSSLSTYIDFKNMFGERVNDPQFQEDLEQIVEWSTIFEDRGIFKAKLQALGWLSEKQIQQLVAKRYKGWGRLSKKLLTGLKNAEGYSILDEMWRSTGNFMQIQSRPEFAALIQQANEKQFEGNDPDNVWENIENILGDAYTSPQNKKAIRQVVKVVQDIEKAVGNPPEKIAIEFTREAAANPQRTQSRLRTLEKLYESAEEVVDAGLTAELAEFKENKHVLSDKYYLYFTQLGRDVYTGDTISLDKLNDYDVDHILPQSFIKDDSLDNRVLTIRAVNNGKSDNVPAKMFGKKMGSFWRYLLDNGMISKRKYNNLITDPDNISKYAQKGFINRQLVETSQVIKLTANILNGIYDKDTEIIEVPAKMNSQMRKMFDLVKVREVNDYHHAFDAYLTIFIGNYLYKCYPKLQPYFVYDNFKKFGNKEDIGHKRFNFLGKIEREKKVVAPETGEILWSNVAPNETIKQIKKVYDYKFMIVSREITTRRAELFNQTVYPKNYHGKLIPIKEDRPTDLYGGYSGNTDAYLAIVALEDKKKGKYFKVVGIPTRVAAKLEKLKQQDSQQYLQALHKVIAPQFTKSTKKGIKKTEFEIVLDKVHYRQLVQDGPVKMMLGSSTYKYNAKQLVLSEKALQVIADDRKFDETQKDDNLIAVYDEILSIVNQSFDLYDINGFRKKLNDNRDQFIDLPAETKYEGRKVVAHGKREMILEILKGLHANAAFGNLKPIGFSTAFGQLQVPNGIILSKNAILIHQSPSGLFERKIKLSDL

SEQ ID NO: 382 - protein, 1366 aa, Pediococcus acidilactici
  REGION 1..1366: note = Pediococcus acidilactici MA18/5M
MGDRKYNLGLDIGTSSIGFAAVDENNQPIRVKGKTAIGVRLFEEGKTAADRRGFRTTRRRLSRRRWRINLLNEIFDAHLAEVDPTFLARLKESNRSNLDPKKSFQGSLLFPERKDYQFYEEYPTIYHLRKALMEEDRKFDIREIYLAVHHIIKYRGNFLNGTPMRSFKVENIELDTLFDQLNQLYAEIVPDNELAFDLAQVADVKDVLSSTTIYKMDKKKQLVKMMLLPASNKALQSENKKIVTQFVNAILNYKFKLDVLLQVETDADWSLKLNDEGADDKLEEFTGDLDENRLEIIDLLQRLHNWFSLNEITKDGNSLSAAMVEKYENHHHHLGLLKKVIENHPDAKKAKALKETYTAYVGKTDDKTQNQDDFYKAVEKNLDDSPDAKEIKRLIQLDQFMPKQRTGQNGAIPHQLHQQELDQIIEKQSKYYPFLAEPNPNVKRRKDAPYKLDELIAFKIPYYVGPLVTPEEQAQNKENVFAWMKRKAAGPITPWNFDEKVDRMESANRFIRRMTTKDTYLFGEDVLPAESMIYQKFVVLNELNNLKINGRHLSLKDKQDVYNDLFKQQKTVSIKALQNYYVTKKKAATAPTVGGLADPKKFLSSLSTYIDFKNMFGERVNDPQFQEDLEQIVEWSTIFEDRGIFKAKLQALGWLSEKQIQQLVAKRYKGWGRLSKKLLTGLKNAEGYSILDEMWRSTENFMQIQTRPEFAALIQQANEKQFEGNDPNNVWENIESILGDAYTSPQNKKAIRQVVKVVQDIEKAVGNPPEKIAIEFTREAAANPQRTQSRLRTLEKLYESAEEVVDAGLTAELAEFKENKHVLSDKYYLYFTQLGRDVYTGDTISLDKLNDYDVDHILPQSFIKDDSLDNRVLTIRAVNNGKSDNVPAKMFGKKMGSFWRYLLDNGMISKRKYNNLITDPDNISKYAQKGFINRQLVETSQVIKLTANILNGIYDKDTEIIEVPAKMNSQMRKMFDLVKVREVNDYHHAFDAYLTIFIGKYLYKCYPKLRPYFVYGKFKKFGDNEDIEVGDGRFNFLNRIERLKNVTDPETGEILWSNVAPNETIKQIKKVYNYKFMLVSRETTTRRAELFNQTVYPKNYRGKLIPIKEDRPTDLYGGYSGNTDAYLAIVALEDKKKGKYFKVVGIPTRAAAKLEKLKQQDSQQYLQALHKVIAPQFTKSTKKGIKKTEFEIVLDKVHYRQLVQDGPVKMMLGSSTYKYNAKQLVLSEKALQVIADDRKFDETQKDDNLIAVYDEILSIVNQSFDLYDINGFRKKLNDNRDQFIDLPAETKYEGRKVVAHGKREMILEILKGLHANAAFGNLKPIGFSTAFGQLQVPNGIILSKNAILIHQSPSGLFERKIKLSDL

SEQ ID NO: 383 - protein, 1364 aa, Peptoniphilus duerdenii
  REGION 1..1364: note = Peptoniphilus duerdenii ATCC BAA-1640
MKNLKEYYIGLDIGTASVGWAVTDESYNIPKFNGKKMWGVRLFDDAKTAEERRTQRGSRRRLNRRKERINLLQDLFATEISKVDPNFFLRLDNSDLYREDKDEKLKSKYTLFNDKDFKDRDYHKKYPTIHHLIMDLIEDEGKKDIRLLYLACHYLLKNRGHFIFEGQKFDTKNSFDKSINDLKIHLRDEYNIDLEFNNEDLIEIITDTTLNKTNKKKELKNIVGDTKFLKAISAIMIGSSQKLVDLFEDGEFEETTVKSVDFSTTAFDDKYSEYEEALGDTISLLNILKSIYDSSILENLLKDADKSKDGNKYISKAFVKKFNKHGKDLKTLKRIIKKYLPSEYANIFRNKSINDNYVAYTKSNITSNKRTKASKFTKQEDFYKFIKKHLDTIKETKLNSSENEDLKLIDEMLTDIEFKTFIPKLKSSDNGVIPYQLKLMELKKILDNQSKYYDFLNESDEYGTVKDKVESIMEFRIPYYVGPLNPDSKYAWIKRENTKITPWNFKDIVDLDSSREEFIDRLIGRCTYLKEEKVLPKASLIYNEFMVLNELNNLKLNEFLITEEMKKAIFEELFKTKKKVTLKAVSNLLKKEFNLTGDILLSGTDGDFKQGLNSYIDFKNIIGDKVDRDDYRIKIEEIIKLIVLYEDDKTYLKKKIKSAYKNDFTDDEIKKIAALNYKDWGRLSKRFLTGIEGVDKTTGEKGSIIYFMREYNLNLMELMSGHYTFTEEVEKLNPVENRELCYEMVDELYLSPSVKRMLWQSLRVVDEIKRIIGKDPKKIFIEMARAKEAKNSRKESRKNKLLEFYKFGKKAFINEIGEERYNYLLNEINSEEESKFRWDNLYLYYTQLGRCMYSLEPIDLADLKSNNIYDQDHIYPKSKIYDDSLENRVLVKKNLNHEKGNQYPIPEKVLNKNAYGFWKILFDKGLIGQKKYTRLTRRTPFEERELAEFIERQIVETRQATKETANLLKNICQDSEIVYSKAENASRFRQEFDIIKCRTVNDLHHMHDAYLNIVVGNVYNTKFTKNPLNFIKDKDNVRSYNLENMFKYDVVRGSYTAWIADDSEGNVKAATIKKVKRELEGKNYRFTRMSYIGTGGLYDQNLMRKGKGQIPQKENTNKSNIEKYGGYNKASSAYFALIESDGKAGRERTLETIPIMVYNQEKYGNTEAVDKYLKDNLELQDPKILKDKIKINSLIKLDGFLYNIKGKTGDSLSIAGSVQLIVNKEEQKLIKKMDKFLVKKKDNKDIKVTSFDNIKEEELIKLYKTLSDKLNNGIYSNKRNNQAKNISEALDKFKEISIEEKIDVLNQIILLFQSYNNGCNLKSIGLSAKTGVVFIPKKLNYKECKLINQSITGLFENEVDLLNL

SEQ ID NO: 384 - protein, 1087 aa, Phascolarctobacterium succinatutens
  REGION 1..1087: note = Phascolarctobacterium succinatutens YIT 12067
MLRMKYAIGLDIGIASVGYAVLALDHEENPWGIIRLGSRIFDVAENPKDGASLALPRREARSVRRRLRRHHHRLERIKNLLINTEFITKDELLHLYDGNLSDVYELRVKALDYSVTNAELTRILLHLAQRRGFKSNRKSDANDKEAGQLLEAVSANAKRMQENHYRTVGEMFYKDDLFSKYKRNKGGTYLTTVHRDMIAAEARTILEKQFALGNNICTQDFIDKYLSILLSQRQFDEGPGEPSPYAGNQIANMIGKCTFEPNEYRAAKASYSFERFNLLQKVNHLRLLLEGKSIALDNEQRKKIIALAHDKADLRYSHIRKALGLDEKVLFNTITYNDDVSVIEKKTKFNFLQAYHQIKKVLAEDMQKLTTEQLDNIGQILSTYKSDNKRTEELSALGLEKKIIDALLGINGLSKFAHLSLKALRKINPYLEEGKIYNEACTAAGYDFKAHANTQKTELLPAYKEEMDDITSPVARRAIAQSIKVINAIIREQKGSPLYINIELAREMAKGFDERTQIDKANKENQAKNERIMERIRTEFHKANPTGMDLIKLKLWEEQDGRSPYSQKAISINRLFEPGYVDIDHIVPYSISFDDSFKNKVLVFSDENRDKGNRLPIAYLQSKFGAKAAENFMIWVQSNIKDYKKRQKLLKREITEEDINKFKERNLQDTKTISRFLYNYINDYLLFAPSDTGKKKRVTAVNGTITAYLRKRWGINKIRANGDKHHAVDAVVIACTTDKMIKDLSSFSRYHELEYTHTDTESFLVNSLTGEILKRFPYPWEDFRPELMARLSDNPADALRKLNLIFYHGIDLSTIKPIFVSRMPRHKVTGAAHKATIKSARCLDNGIVICKTSLQNLKLDKEGEIANYYAPESDTILYNALKERLRSYDNKPAKAFAEPFYKPKADGTPGPLVKKVKVYEKSTLNVAVQQNTAVADNDSMVRVDVFHVKGNGYYLVPIYIADTLKKELPNKAIVAYKPYADWPVMDDSNFIFSLYPNDLIKFEHKNSVKFAKVNKESTLNDFYSTKSEIVYFKGCNINTGAITIINHENTYVVSSLGVKTLPSLEKYQADVLGNYTKVKKEVRKPFR

SEQ ID NO: 385 - protein, 1333 aa, Planococcus antarcticus
  REGION 1..1333: note = Planococcus antarcticus DSM 14505
MKNYTIGLDIGVASVGWVCIDENYKILNYNNRHAFGVHEFESAESAAGRRLKRGMRRRYNRRKKRLQLLQSLFDSYITDSGFFSKTDSQHFWKNNNEFENRSLTEVLSSLRISSRKYPTIYHLRSDLIESNKKMDLRLVYLALHNLVKYRGHFLQEGNWSEAASAEGMDDQLLELVTRYAELENLSPLDLSESQWKAAETLLLNRNLTKTDQSKELTAMFGKEYEPFCKLVAGLGVSLHQLFPSSEQALAYKETKTKVQLSNENVEEVMELLLEEESALLEAVQPFYQQVVLYELLKGETYVAKAKVSAFKQYQKDMASLKNLLDKTFGEKVYRSYFISDKNSQREYQKSHKVEVLCKLDQFNKEAKFAETFYKDLKKLLEDKSKTSIGTTEKDEMLRIIKAIDSNQFLQKQKGIQNAAIPHQNSLYEAEKILRNQQAHYPFITTEWIEKVKQILAFRIPYYIGPLVKDTTQSPFSWVERKGDAPITPWNFDEQIDKAASAEAFISRMRKTCTYLKGQEVLPKSSLTYERFEVLNELNGIQLRTTGAESDFRHRLSYEMKCWIIDNVFKQYKTVSTKRLLQELKKSPYADELYDEHTGEIKEVFGTQKENAFATSLSGYISMKSILGAVVDDNPAMTEELIYWIAVFEDREILHLKIQEKYPSITDVQRQKLALVKLPGWGRFSRLLIDGLPLDEQGQSVLDHMEQYSSVFMEVLKNKGFGLEKKIQKMNQHQVDGTKKIRYEDIEELAGSPALKRGIWRSVKIVEELVSIFGEPANIVLEVAREDGEKKRTKSRKDQWEELTKTTLKNDPDLKSFIGEIKSQGDQRFNEQRFWLYVTQQGKCLYTGKALDIQNLSMYEVDHILPQNFVKDDSLDNLALVMPEANQRKNQVGQNKMPLEIIEANQQYAMRTLWERLHELKLISSGKLGRLKKPSFDEVDKDKFIARQLVETRQIIKHVRDLLDERFSKSDIHLVKAGIVSKFRRFSEIPKIRDYNNKHHAMDALFAAALIQSILGKYGKNFLAFDLSKKDRQKQWRSVKGSNKEFFLFKNFGNLRLQSPVTGEEVSGVEYMKHVYFELPWQTTKMTQTGDGMFYKESIFSPKVKQAKYVSPKTEKFVHDEVKNHSICLVEFTFMKKEKEVQETKFIDLKVIEHHQFLKEPESQLAKFLAEKETNSPIIHARIIRTIPKYQKIWIEHFPYYFISTRELHNARQFEISYELMEKVKQLSERSSVEELKIVFGLLIDQMNDNYPIYTKSSIQDRVQKFVDTQLYDFKSFEIGFEELKKAVAANAQRSDTFGSRISKKPKPEEVAIGYESITGLKYRKPRSVVGTKR

SEQ ID NO: 386 - protein, 1197 aa, unidentified
  REGION 1..1197: note = Porphyromonas sp. oral taxon 279 str. F0450
  source 1..1197: note = Porphyromonas sp.
MLMSKHVLGLDLGVGSIGWCLIALDAQGDPAEILGMGSRVVPLNNATKAIEAFNAGAAFTASQERTARRTMRRGFARYQLRRYRLRRELEKVGMLPDAALIQLPLLELWELRERAATAGRRLTLPELGRVLCHINQKRGYRHVKSDAAAIVGDEGEKKKDSNSAYLAGIRANDEKLQAEHKTVGQYFAEQLRQNQSESPTGGISYRIKDQIFSRQCYIDEYDQIMAVQRVHYPDILTDEFIRMLRDEVIFMQRPLKSCKHLVSLCEFEKQERVMRVQQDDGKGGWQLVERRVKFGPKVAPKSSPLFQLCCIYEAVNNIRLTRPNGSPCDITPEERAKIVAHLQSSASLSFAALKKLLKEKALIADQLTSKSGLKGNSTRVALASALQPYPQYHHLLDMELETRMMTVQLTDEETGEVTEREVAVVTDSYVRKPLYRLWHILYSIEEREAMRRALITQLGMKEEDLDGGLLDQLYRLDFVKPGYGNKSAKFICKLLPQLQQGLGYSEACAAVGYRHSNSPTSEEITERTLLEKIPLLQRNELRQPLVEKILNQMINLVNALKAEYGIDEVRVELARELKMSREERERMARNNKDREERNKGVAAKIRECGLYPTKPRIQKYMLWKEAGRQCLYCGRSIEEEQCLREGGMEVEHIIPKSVLYDDSYGNKTCACRRCNKEKGNRTALEYIRAKGREAEYMKRINDLLKEKKISYSKHQRLRWLKEDIPSDFLERQLRLTQYISRQAMAILQQGIRRVSASEGGVTARLRSLWGYGKILHTLNLDRYDSMGETERVSREGEATEELHITNWSKRMDHRHHAIDALVVACTRQSYIQRLNRLSSEFGREDKKKEDQEAQEQQATETGRLSNLERWLTQRPHFSVRTVSDKVAEILISYRPGQRVVTRGRNIYRKKMADGREVSCVQRGVLVPRGELMEASFYGKILSQGRVRIVKRYPLHDLKGEVVDPHLRELITTYNQELKSREKGAPIPPLCLDKDKKQEVRSVRCYAKTLSLDKAIPMCFDEKGEPTAFVKSASNHHLALYRTPKGKLVESIVTFWDAVDRARYGIPLVITHPREVMEQVLQRGDIPEQVLSLLPPSDWVFVDSLQQDEMVVIGLSDEELQRALEAQNYRKISEHLYRVQKMSSSYYVFRYHLETSVADDKNTSGRIPKFHRVQSLKAYEERNIRKVRVDLLGRISLL

SEQ ID NO: 387 - protein, 1485 aa, Prevotella bivia
  REGION 1..1485: note = Prevotella bivia JCVIHMP010
MKNILGLDLGTNSIGWAKISIDDNGKYIKDSIKLGSRIIPMSQDVLSNFSKGVTLSQTSERTSFRGARRLRERTLLRRERLHRILHLLGFLPKHYEKAIGWDRNDNKTYGKFINHAEPKLAWCKDNNGKMRFLFMDSFHDMLSEFSEKHPELLANGKKIPLDWTIYYLRKKALYKAITKEELAWILLNFNQKRGYYQLRGEEDRDSEANKKEYLELKVIGVEATGEKKGNDIWYNIHLENGWIYRRSSKNPLNDWLGKVKSFIVTTDLDADGNPKKDKDGNIKRSFRAPSEGDWTLIKKRTESLLENSGQTVGQFIYNHILEEPSAKIRGNFIRTIERKYYKDELKAILEKQKEFHHELSSESLLTECAKELYKRNIAHQEVLLKKGIIHLLLNDILFYQRPLKIKKSLIDNCPYENYKYVDKKSGDIKVKSIKCIAKSNPFFQEFRLWQFVSNLRLYRKSDDKDVTSEHLVTTDDYANLFTYLNNRKDIKQSVLLKEYFKIKKVKTINGAEYPVRWNYIDDDNKTYPCNETRYDILHALSKTELKSEWLTPERTYRLWHLLYSIESKEETKKALNKLNLSDDFTEAFLTIKPFKKEYGSYSEKAIKKLLSLMRMGYLWSEDEAIKQVGAEIEKTIEGELPDYVLQRLEKSQHNYNKISDFSGLPLWLASYIIYGRHSEAKEIIHWDNPESMMAYIKDFRQHSMRNPIVEQCVLETLRTVHDIWKEIGHIDEIHIELGREMKSTSEQRKAITQNVLHNQNTNIRIKLLLQELKNDNNITGVRPYSPMQQEILRIYEEGALQGLTKEDKDYNDILKISQTAQPTSNELTRYKLWLEQKYRSPYTGKAISLSKLFTSAYQIEHVIPQSRYFDDSLSNKVICESEVNTLKKAMLGMEFIKTCGGQKVHCTLLGDVEIYNEEDYKAFVNEHYSNNRTKRNKLLMEDIPQEFINRQLNDSRYISKMVKQLLSAIVRGQEEVEATSKFVIPCTGGITDRLKKDWGLNDIWNNLVSPRFQRMNALTGSEYFGHWENKEGKRVFQTTMPIQLQQGFSKKRIDHRHHAMDALVIACASRNIISYLNNETAQDTERRRDLRQKLCDKGGSVRKPWDSFTQDTQYALKDIIVTFKNYVRIINKATNYYEHYKTDGKKGMISQKGDELWAIRKPMHKETVFGKVNLRRPKRVSLSKAIDSVDIICNRKLKKYIKARLNEGLQKKQILNIFKELNNVWEGIDVNKIDIWEMSNDKEPMVATRKQLDTSFDEKKIRSISDTGIQKILLNYLITKNNNPELAFTPEGIQEMNSNISEYNDHKKHQPIYKVRVTEPLGAKYPIGTMGNNPKKFVEAQAGTNLYFAIYEDKEGKRNYDTIPLNIAAERLNQQLSPVPETNENNTPLKFYLSPNDLVYVPSEEERHSGNNIQLDKNRIYKMVSSTSKRCFFIHHRVAISLVDKKEFSAQNKMERSIDNEQVMIKSVCWKLITDRLGNIIKVIK

SEQ ID NO: 388 - protein, 1457 aa, Prevotella buccae
  REGION 1..1457: note = Prevotella buccae ATCC 33574
MKTILGLDLGTNSIGWAKVSVDDYGNYLHDIKLGSRIIPMSQDVLGNFDSGVTVSQTAQRTEFRSKRRLVQRNLQRRERLHRVLHVLDFLPAHYDAAIGWDRTEAVTYGKFLNHAEPKLAWEELGNGKRRFLFMDSFHEMVADFARCQPALVADGKKIPLDWTIYYLRKKALTQAITKEELAWILLNFNQKRGYYQLRGEEEEENPTKQEEYYELKVVSVEATDSRKGNDTWYNVHLENGWIYRRSSKISLDDWVGKVKQFIVTTEYEKDGATLKTDKEGYVKRSFRAPNENDWGLRKKRTETLLEMSGKTVGAFIYDHLLQEPADKIRGNFIRTIERHYYKAELEAILAEQCKYHIELRDKEMLEACARELYLNNLPHQRSLMKKDMTYLLLYDLIFYQRPLKSKKALIANCPYEYYEYVDKETGEIKRQNIKCIAKSNPYFQEFRLWQFVLNLRLFDRVEDKEVTANYLPTADDHARLFTYLNDRKEINQETLLKDYFKLKKVKIGNEKEYPIRWNYIEDKEKKYPCNETRYELLMALDRAGIEHKWLDDNNLEYRLWHLLYSVEVKSESETALRKLKNDDAFVNSFLKVKPFKKEYGAYSEKAIKRLLAVMRKGFLWNEQDICDETRKRIEIIIKGDVDEKVKERMGHAAYSFDRVSDFQGLPEWLACYVVYGRHSEAMDIQHWDSPERLMAYINNFKQYSLRNPIVEQCILETLRTVHDIWKETGQIDEIHVELGREMKSTSEERARRTQNVLRNENTNLRIKSLLIELKNDTDICNVHPYSPMQQEILRIYEEGALQELNREDEDFEEISKISQMSQPSGKELNRYKLWLEQKYRSPYTGKAISLAKLFTPAYQIEHVIPQSRYFDDSFTNKVICEAEVNTLKSNLLGYEFIKKHGGEIIHCTTLGDVRIFSESEYKAFVMDHYANNKSKKDKLLMEDIPQEFLSRQMNDSRYISKVVKTLLSNIVRMADESEATSKSVIVCTGGVTDRLKKDWGLNDVWNSIVYSRFERLNRLTGTEAFGHWENKDGKRVFQTSMPLELQRGFRKKRIDHRHHAMDALVIACASRNIVNYLNNESANNPKKREDLRRQLCDKNRVIRKPWETFTQDAYNALENVVVSFKNYVRVINKATNRYEHYDENGKKRFVQQKGSELWAIRKPMHKETYYGHVNLRRKELVTLQKALDDIPSICDKKLRDYISALVEKHFNKRQLLAHFKSTDYYWQKQYVNKVYVWTFSDDIKPLVATRKLLDTSFDAKRIGTITDTGIQKILRNYLEAKGGNATLAFTPEGIAEMNQNISKYNDGKPHQPILKVRITEPMGAKYRVGQTGNKMAKYVEAQSGTNLYFAIYEDSEGKRSYTTVPLDEVAERLKQRLSPVPEKDENDVPLKFYLSPNDLVYVPTEEELQLRECKLNKDRIYKMVSSTGNECHFIPYYVANVIYNKGGFNMQMHRPQS

SEQ ID NO: 389 - protein, 1218 aa, Prevotella buccalis
  REGION 1..1218: note = Prevotella buccalis ATCC 35310
MNKRILGLDTGTNSLGWAVVDWDEHAQSYELIKYGDVIFQEGVKIEKGIESSKAAERSGYKAIRKQYFRRRLRKIQVLKVLVKYHLCPYLSDDDLRQWHLQKQYPKSDELMLWQRTSDEEGKNPYYDRHRCLHEKLDLTVEADRYTLGRALYHLTQRRGFLSNRLDTSADNKEDGVVKSGISQLSTEMEEAGCEYLGDYFYKLYHEQGNKVRIRQRYTDRKKHYQHEFDAICEKQELSSELIEDLQRAIFFQLPLKSQRHGVGRCTFERGKPRCADSHPDYEEFRMLCFVNNIQVKGPHDLELRPLTYEEREKIEHLFFRKSKPNFDFEDIAKELAGKKNYAWIHDKEERAYKFNYRMTQGVPGCPTTAQLKSIFGDDWKTGIAETYTLIQKKNGSKSLQEMVDDVWNVLYSFSSVEKLKEFAHHKLQLDEENAEKFAKIKLSHSFAALSLKAIRKFLPFLRKGMYYTHASFFANIPTIVGKEIWNNEQSRKYIMENVGELVFNYQPKHRDVQGTIEMLIKDFLANNFELPAGATDKLYHPSMIETYPHALRNEFGILQLGSPRTNAIRNPMAMRSLHVLRRVVNQLLKESIIDENTEVHVEYARELNDANKRRAIADRQKEQDKQHKKYGDEIRKLYKEETGKDIEPTQTDVLKFQLWEEQNHYCLYTGEQIGITDFIGSNPKFDIEHTIPQSVGGDSTQMNLTLCDNRFNREVKKAKLPTELANHEEILTRIEPWKNKYEQLVKERDKQRTFAGMDKAVKDIRIQKRHKLQMEIDYWRGKYERFTMTEVPEGFSRRQGTGIGLISRYAGLYLKSLFHQADSRNKSNVYVVKGVATAEFRKMWGLQSEYEKKCRDNHSHHCMDAITIACIGKREYDLMAEYYHMEETFRQGRGSKPKFSKPWATFTEDVLNIYKNLLVVHDTPNNMPKHTKKYVQTSKGKVLAQGDTARGSLHLDTYYGAIERDGEIRYVVRRPLSSFTNPKELENIVDETVKRTIKEAIADKNFKQAIAEPIYMNEDKGILIKKVRCFANSVKQPINIRQHRDLSKKEYKQQYHVMNENNYLLAIYEGLVKNKVVREFEIVSYIEAAKYYKRSQDRNIFSSIVPTHSTKYGLPLKTKLLMGQQVLMFEENPDEIQVDNTKDLVKRLYKVVGIEKDGRIKFKHHQEARKEGLTIYSTPYKNNDDYVPIFRQSIKNINILVDGIDFNIDILGKVTLKE

SEQ ID NO: 390 - protein, 1422 aa, Prevotella denticola
  REGION 1..1422: note = Prevotella denticola CRIS 18C-A
MTQKVLGLDLGTNSIGSSVRNLDLSDDLKGQLEFFSSDIFRSSVNKESNGREYSLAAQRSAHSRSRGLNEARRRKLWATLDLLIKYGFCPMSPESLMRWRTYDKQRGLFREYPIDDKNFNAWILLDFDGDGKPDYSSPYQLRRELVIRQFDFDQPIERYKLGRALYHIAQHRGFKSSKGETLSQQETNSKQSLTDDTADVAGEMKASEEKLSKGLSTYMKENNLLTVGAAFAQLEDEGVRVRNNNDYRAIRSQFQREIETIFKFQQGLSVENELYERLVSEKKNIGTIFYKRPLRSQRGNVGKCTLERTKPRCAIGHPLFEKFRAWTLINNIKVRMSEEEQAEQLPMKLRFELYNDCFLAFVRAEFKFEDIRKYLEKRLGVHFSYNDKTINYKDSTSVAGCPITARFRKLLGEDWESFHVDGQKQRQAHGKNNASFHTVSYSTNDIWHFCYDAEEPEAVLSFAQDNLKWEKKKAEELVRIWSAIPQGYAMLSQKAIRNINKMLILGLKYSDAVLLAKVPEIVEITDGEILSVTEDYHRVEAQVGYEKQINNIVNALIAKYKSASEEYRFADHNYEYQLDKSDEKDIIKQIESNIGTRKWSLLDADEQTDILQKVRDKYQNFFRSHERKFVESPKLGECFEEYLMKKFPMVEGERWKKLYHPSQIAIYRPVPANKDRSALRLGNPDIGAIKNPTVLRVLNTLRKRVNQLLDDGIISPDETRVVVETARELNDANRKWALDTYNRIRHDENEKIKKILAEFYPKRDNISTVDIDKARYVIDQREMDYFTEAKTYHKDIKKYKLWLEQGGQCMYTGRTINLSNLFDPNSFDVEHTIPESISFDSSDMNLTLCDAHYNRFIKKNHIPADLPNYDKSVVIDGKEYSPIKPRLQRWADRVERLNRNVEYWRGQARRAQNKDRKDQCMREMHLWKMELEYWTKKLERFTITEVTDEFKNSQLVDTRVITRHAVLYLKSIFPHVDVQRGDVTAKFRKILGIQSVDEKKDRSLHSHHAIDATTLTIIPGAAKRERMLELFAKIEEVNKMLSFSGNEDRTGLKQELDGLKNQLNKEVKACRIGHNVSEIGTFINDNIIINHHVKNQALTPVRRRLRKRGHIVGGMDNPRWQTGDALRGEIHKASYYGAITQYAKDKEGKVLMKEGRPQINPTIKFVIRRELKYKKSSTDSGFASWDDLGKAIVDKELFALMKGQFPEGTSFKDACEQGIYMIKKGKNGEVDTKLYRIRHIRCKTKQKNALKIKEQAYKSEKEYKRYFYAAVGDLYAMCCYTNGKTREFKIYSLYDISCHRKVGVEDIPEFITDKKGNRLMLDYKLHTGDMILLYKENPEELYDLDNVSLSKLLYKINGFENDGLRIRMVNHLVAKEAMGESVKDYAKLPDIIRCGVKTIKFLVMGENRDFVIKNGKISFNHR

SEQ ID NO: 391 - protein, 1375 aa, Prevotella histicola
  REGION 1..1375: note = Prevotella histicola F0411
MKKILGLDLGTTSIGWALVYESENTDEKSSIVRLGVRVNPLSVDEKGNFEKGKAITTNADRQQTHGARINLQRYKLRRENLKDCLQKQGWIGTEALCEEGKTSTFETYMLRAKAAEEEISLHELCRVLFMMNKKRGYKSNRKANNKEDGKLFDGMTVAKKLYEEHLTPAEYSFQLLSSGKKFKQEYYRSDLKEEFDRIWNEQQKYYPEILTDDFKQQLQGKSKGNTSKIFLGKYGIYSADLKGLDRKLQPLKWRVEALKQQVDKEVLAFVISDLNGQIASTSGLLGAISDRSKELYFNKQTVGQYLWTSLKETPHVSIKNKPFYRQDYLDEFEKIWETQATYHKELTPELKQEIRDIIIFYQRPLKSKKGLISVCELEQRKVKVTIDGKEKEISIGPKVAPKSSPMFQEFRIWQNLNNILLIDKGNNSIHPLYEEEKNLLYEELSVKEKLSKAEALKVLNKNSKQWDLNYKEIEGNRTQAVLYDCYNRIIVMTGHEEYNFKKLKASEIRSYVKTTFTGLGFNTDILEFDSSLTGHELEKQPMYQLWHLLYSYESDNSRTGNDALLRKLETAFGFPKEYAAVLSDVVFEDSYGNLSVKAMRKILPHLQAGLNYSQACEEAGYKHSRRSLTKNELDQKEYKEKLELLPKNSLHNPVVEKILNQMINVINAVIDEYGKPDEIRIELARELKIGAAERENMTRSINQGNAENKRIREILEKEFALSYISRNDIIKYKLYEELKSNGFKTLYSDTYISKDKLFSKDFDIEHIIPKARLFDDSLSNKTIEARDVNIAKSNKTAFDFISEKYDQQGIEAYKKKLDILLQDGSISKAKYNRLLMKEADIPSGFIDRDLRDTQYIAKKAYEILSDLVRNVTPTTGAVTSRLREDWQLVDVMKELNFEKYQKLGLVEVIEDRDGRKIKRIKDWTKRNDHRHHAMDALTIAFTKPSYIQYLNNLNARSDKNSSIYGIENKELHREDNKLRFNAPLPINEFRAEARRHLKSILVSVKAKNKVMTQNVNVIKTKHGVIKKVQLTPRGELHNATFYGTKKRPIIKMVKVGAALDEVTIKKVSSSFIREALLDRLHEYNGDAKKAFTGRNSIDKNPIYIDEEHKKTVPALVKTIEWEMYHPTRKLISPDLKIDKVIDKGIREILKTRLAKFNGDAQKAFSNLDENPIYKDEAKKITLKRVSLEGVSSVIPLHTLKDREGKLVVGKDGKPVLGDYVQTSNNHHIAFYMDENGNLQDNVVSFFEAAERKSQGVPVIDKNYNHDKGWNFLFTMKQNEYFVFPNEVTGFNPSEVDLMDEANYSIISPNLYRVQKMSKASGRDYWFRHHLEAMLNDDPKLRNSMFKRITSLKALEGIVKVRINCIGKIVAVGEYD

SEQ ID NO: 392 - protein, 1380 aa, Prevotella intermedia
MKRILGLDLGTTSIGWALVNEAENNNEASSIVRLGVRVNPLTVDEKSNFEKGKAITTNADRQLRHGARINLQRYKLRRQNLHDCLQKQGWLGTEAMYEEGKASTFETYKLRAKAAEEEISLHEFARVLFMLNKKRGYKSNRKANNKEDGQLFDGMTIAKKLYEEHLTPAEYSLQLLNKGKKFTQGYYRSDLNAELERIWDEQKKYYPEILTDEFKQQLEGKTKTNTSKIFLAKYGIYSADLKGLDRKFQPLKWRVEALQQQVDKEVLAFVISDLKGQIANTSGLLGAISDRSKELYFNKQTVGQYLWASLEENPHISIKNKPFYRQDYLDEFEKIWETQAAFHKQLTPELKQEIRDIIIFYQRPLKSKKSLISVCELEQRKVKATIDGKEKEITIGPKVAPKSSPVFQEFRIWQNLNNVLLIDNDTNEKRPLDEVERNLLYKELSIKAKLSKTEALKILNKKGKQWDLNYRELEGNRTQAILFDCYNRIITLTGHEECDFKKIKASEIRHYVSTIFKNLGFSTEILDFDPSLKKHELEKQPMYQLWHLLYSYESDNSRTGNESLLRKLETTFGFPEEYATVLCDVVFEEDYGNLSVKAMREILPYLQAGNDYSQACAYAGYNHSRHSLTKEELDQKVYKERLELLPKNSLRNPVVEKILNQMINVINAIIDEYGKPDEIRIEMARELKSSAADRKKTTHAISQGNAENQRIREILEKEFSLSYISRNDIIKYKLYEELEPNYYKTLYSDTYITKDKLFSKDFDIEHIIPKARLFDDSFSNKTLEARNINLEKSNKTAFDFIKEKYGEDGAEAYKKKLDMLLENDAISRPKYNNLLRAEADIPSDFINRDLRNTQYIAKKACEILGELVKTVTPTTGKITNRLREDWQLVDVMKELNFEKYEKLGLTEIVEDRDGRKIKRIKDWTKRNDHRHHAMDALAIAFTKPSFIQYLNNLNARSNKGDSIYAIENKELHYEEGKLRFNAPIPVNEFRAEAKRHLSAILVSIKAKNKVMTQNVNKIKTKHGIIKKIQLTPRGPLHNETIYGTKMRPIIKMVKVGAALDEATINKVSSPAIREALLKRLNEYSGNAKKAFTGKNTLEKNPIYLNAGRTKTVPSLVKTVEWESFHPTRKLIDKDLNVDKVVDKGIREILKARLEEFNGDAKKAFSNLEENPIYLDEAKKIALKRVSIEGVLSAIPLHTLKNQAGKPITGKDGKPVLGNYVQTSNNHHIAFYYDEDGNLQDNAVSFFEAAERKSQGIPVIDKDYNRDKGWRFLFTMKQNEYFVFPNEATGFIPSEVDLTDEANYGIISPNLYRVQKVSRIDKGTSASRDYWFRHHLETILNDDAKLKNLAFKRIRGLLELKDIIKVRINSTGKIVAVGEYD

SEQ ID NO: 393 - protein, 1425 aa, Prevotella micans
  REGION 1..1425: note = Prevotella micans F0438
MIQKIFGLDLGTNSIGSSVRNLELGENLTEQLEFFSSDIFGSSVSKNSNGREYSLAGNRSAHRRSRGLNEARRRKLWATLDLLIEHGLCPMSPDSLMQWRTYDKQKGLYRQYPIEDKDFNAWIMLDFNGDGKPDYSSPYQLRRELVVRQFDFDQPIERYKLGRALYHIAQHRGFKSSKGETIADQEKNEKKPIAEEGADIANEMKASETKLSKGLVAYMQENHLKTVGEAFAKLEDERVRIRNNESYRAIRSQYQDEIKEIFTYQKKLSVESELYERLTSEKKGVGTIFYKRPLRSQRGNVGKCTLERNKPRCPIGRPEFEEFRAWTLINNIKIRETAGEPYKQLPIKLRQELLKDCFLSKVKADFKFEDIRKYIEKRLGLSFSNDDKTINYKDSVSIAACPVTVRMKKLLGENWANCRIDGEKRRQAHGKNNNNEHIVSYTEEDIWHVCYNAEDPEEVSNFARKALHWDENKIKELVRLWTSIPQGYAMLSLKAIRNINRMLLLGLKYSDAVLLAKLPDIVPVSDEDILAITKEFLQLEDKLNQEKQINNIVNSLIANYKSKLEENRFADHNYQYQLGEGDDEDINTQIKSHIGAKLWVQIGADEQTKIFQAVRSKYQDFFKSYKRKFVESPKLGELLVAFLTEKFPNVKSKQWERLYHPSQIAIYRPIPVDNDRSKLRLGNPNIGAIKNPTVMRVLNTLRRRVNQLLDDGVISPDETRVVVETARELNDANTKWALDRYNRIRRDENEKIRKILKELNPTTNSISEQDIDKARYIFEQCETDFYTDGKVPYYNKDIKKYKLWLEQGGQCLYTGQTINLTNLFNPNAFDMEHTIPKSISFDNSDQNLTLCESYYNRFIKKNNIPTDMPNYDKDVTINGKEYTAIKPRLQRWKERVDRLSRNVDFWKGQARRAQDKDRKDECIREKHLWDMELAYWKGKLERFTMTDVTDGFKNSQLVDTRVITRHAVLYLKSIFNHVEVQRGETTAEFRKILGLQSIDEKKDRSLHSHHAIDATMLTVIPSAAKRDRMLELFYKIEETKKALKNYNDNNKTGLNLELKGLEEKLDKEKKDCRVGRRVNDLDRFINENIIVSHHTKDQALTPAHRRLRKRGKIVGGKEHPRWQTGDSLRGEIHKASYYGAITQFAKDANGKVLMKDGQAQIDPTIYYVIRRELKYKRSTQDSGFTNWEDLEKVIVDTDLFGLMKGQFPEGTSFKDACEQGFYMIKKGKNGEGDVKTHRIRHVRCKAVKTALRIKEQTYKSSKDYKQFFYAAVGDLYVMCYYTDGKKRDFKIYSLYDISNHRKSGTEDIPKFITDKKGNHLPLDYKLRTGDMVLLYKDNPEELKDLDQVNLKRRLYKVNRFESEGLIILLTHHLSTTTERGCSIGKIENYQNLPTAIRCGIKTIKFLIMGKHRDFVIRNGNIEFKH

SEQ ID NO: 394 - protein, 1506 aa, Prevotella nigrescens
  REGION 1..1506: note = Prevotella nigrescens ATCC 33563
MKTILGLDLGPNSIGWAKVEVDDEGNYLRNIKLGSRIIPMTQDMLGDFDKGVKVSQTAIRTDFRGNRRLIERHLLRRERLHRVLHALKFLPKHYEDAIGWDRNEPATYGKFVNNSEPKLAWERQEDGSMRFLFMESFNEMVADFAQNQPSLVSDGKKIPLDWTIYYLRKKALTRPIKKEELAWILLNFNQKRGYYQLRGEEEEDNLTKRKEYYKLKVVGVEADGAPKGGKTWYNIHLENGWTARCQSKIPLDDWVGKVKEYIVTTEYEDDGKTPKCDKEGKVKRSFKSPEKDDWQLIKTRTEKFIDDSNKTVGAFIYDYLLEKPFDKIRGKYIRTIERKYYKNELREILREQTKYHEGLHSLEALKICAEELYKNNQQHQEYLLKKDMTFLLLNDLIFYQRPLKSKKSLIADCPYEVYKYDDKLTGKKGQKKIKCIAKSNPYYQEFRLWQFIANLRLFSVTDGKEVTAEYLKTEEDYVRLFSFLNDRKDIKQETFLRSFLKLKKESIGSEKIYPIRWNYIEDANKSYPCNATRHELLLAFDRADIPRELLDVEEREYRLWHLLYSIEAKEETESALRKLKANKAFGDLNIDDAFVNSFLKIKPFEKEYGAYSEKAIKKLLAVMRRGSLWKEADICEATKQNIAKILQNDIDEKLKKKIEAAVSSFNKLSDFQGLPTWLACYVVYGRHSEAAQIQCWQSPEDLKTYINKFKQHSLRNPIVEQCLLETLRTVYDIWKDAGQIDEIHIELGRNMKSTAEQRARKTKDILRNENTNLRIKNLLVELKNDDKIENVRPYSPSQQEILRIYEEGALQELSKEDEMFEDISKISKMAQPSPTELSRYKLWLEQKYRSPYTGRVIPLSKLFTTAYQIEHIIPQSRYFDDSFNNKVICESEVNSLKDNMLGYEFIKECGGRIVHCTLLGDVKIFTKEEYKDFVTKHYIDNTYKRDKLLLEDIPQEFSARQLNDSRYISKMVQTVLSNIVRAENEQEATSKFVVSCNGAITNRLKKDWGLNDVWSSIVCPRFKRLNEITKTNAFGHWEDKAGKHVFQTTVPLELQRGFSKKRIDHRHHAMDALVIACASRNIVNYLNNESANSPEKREDLRKKLCDEKRKIRKPWKTFTQDAREALSDVVVSFKNYVRVINKATNYYEHYSSSGNKVMISQKGNDMWAIRKPLHKESVFGRVNLCRKVIVSLKKALENIPAICDKTLRDYINALVEKHFNTRQLLAHFKSINYRLNRQCVEKVEVWQFSDEKIEMVARRKSLDTSFDDKQISSITDTGIQKILLNYLQTKDGNAEIAFTPEGIEEMNKNISLYNDGKAHQPILKVRVATPKGMKYPVGQTGNKATKFVVAEKGTNLYFAIYENELGVRSYDTIPLNIVVERLKEGLSPVPQANEADIPLKFYLSPNDLVYVPTKENEDELCRDRIYKFVDSSGTTANFVPHTSANTIYNVDKEYAEKCCNGAVFLNEYGLGSPQSKNQRALTGEMIKEICWKLKVDRLGNIIKVIK

SEQ ID NO: 395 - protein, 1380 aa, Prevotella nigrescens
  REGION 1..1380: note = Prevotella nigrescens F0103
MKRILGLDLGTTSIGWALVNEAESNNEASSIVRLGVRVNPLTVDEKSNFEKGKAITTNADRQLRHGARINLQRYKLRRQNLHDCLQKQGWLGTEAMYEEGKASTFETYKLRAKAAEEEISLHEFARVLFMLNKKRGYKSNRKANNKEDGQLFDGMTIAKKLYEEHLTPAEYSLQLLNKGKKFTQGYYRSDLNAELERIWDEQKKYYPEILTDEFKQQLEGKTKTNTSKIFLAKYGIYSADLKGLDRKLQPLKWRVEALKQQVDKEVLAFVISDLKGQIANTSGLLGAISDRSKELYFNKQTVGQYLWASLEENPHISIKNKPFYRQDYLDEFEKIWETQATFHKQLTPELKQEIRDIIIFYQRPLKSKKSLISVCELEQRKVKATIDGKEKEITIGPKVAPKSSPVFQEFRIWQNLNNVLLIDNDTNEKRPLDEDERYLLYKELSIKAKLSKTEALKILNKKGKQWDLNYKELEGNRTQAILFDCYNRIITLTGHEECDFKKIKASEIRHYVSTIFKNLGFSTEILDFDPSLEKHELEKQPMYQLWHLLYSYESDNSRTGNESLLRKLETTFGFPEEYATVLCDVVFEEDYGNLSVKAMRKILPYLQAGNDYSQACAYAGYNHSRHSLTKEELDQKVYKERLELLPKNSLRNPVVEKILNQMINVINAIIDEYGKPDEIRIEMARELKSSAADRKKTTHAINQGNDENQCIREILEKEFALSYISRNDIIKYKLYEELKPNGFKTLYSDTYIPKDKLFSKDFDIEHIIPKARLFDDSYSNKTLEARDINLAKSNKTAFDFVKEKYGEQGAEAYKKKLDMLLGNNVISKPKYNKLLMTEADIPSDFINRDLRNTQYIARKACEILGELVRTVTPTTGKITNRLREDWQLVDVMKELNFEKYEKLGLTEIVEDRDGRKIKRIKDWTKRNDHRHHAMDALAIAFTKPSYIQYLNNLNARSNKGDSIYAIENKELHYEEGKLRFNAPIPVNVFRAEAKRHLSAILVSIKAKNKVMTQNVNKIKTKHGIIKKIQLTPRGPLHNETIYGTKMRPIIKKVKVGAALDEATINKVSSPAIREVLLKRLNEYSGNAKKAFTGKNTLDKNPIYLNAERTKTVPASVKTVEWENYHPIRKPITPDLKVDKVIDKGIGEILKARLEEFNGDAKKAFSNLEENPIYLDQTKKIALKRVSIEGVLSTIPLHTLKNQAGKPIMGKDGKPVLGNYVQTSNNHHIAFYYDEDGNLQDNAVSFFEAAERKSQGISVIDKDYNRDKGWRFLFTMKQNEYFVFPNEATGFIPSEVDLTDEANYGIISPNLYRVQKMSRIEKGTSVSRDYWFRHHLETILNDDSRLKNSAFKRINSLKPLEGIIKVRINSIGKIVAVGEYD

SEQ ID NO: 396 - protein, 1391 aa, Prevotella oralis
  REGION 1..1391: note = Prevotella oralis ATCC 33269
MKKILGLDLGTTSIGWALVNEKENNEELSSIIRLGVRVNPLTVDEKSNFEKGKDITTNADRTKCRSARRNLQRFKLRREALADCLKRHGLMTDETPLCETNNSIIFKTYSNRAKAVCEKIALDDFVRVLFMINKKRGYKSSRKLNTDDEGTLVDGMDVAKLLYNEQITPGEYLLRLFKKGKKTRPDFYLSDLKAELERIWDFQRTFYPEILCNALKEDLKGKSRTQSSAIFYAKYKVSTAKIAGKDKRLQELTWRTDALRKQLTIDEVAYVICSINGEVNGSSQRLSMISDRSKLLYFNHQTIGQYLMQRLEENPNAGLKNIIFYRQDYEDEFNDIWNSQATYHKELTPELKKEVKDIIFYQRGLKSCKWLINYCELEHEEIEVKTPEGKLRKITIGSKTCPKSSPLFQEFKIWQVLNNLQVSPLNSRRKAKRKKDEEPSLFSDEDMNTACRYLNEEEKLTLFKELSIKKELKKKDALKLLFENYKELDLNYKVISGNVTMANLYRAFQDIISLTGNGEFDFQAMPAEEAEKTVEEIFGGLGYKTAFLHFDASLHDKEFERQPAYRLWHLLYSYAGDQSKTGIEALVKRIQELCGFEPEYARILANISFIPDYGNLSSKAMRKILPYMQDGYEYSEACSKAGYRHSASSLTKEEINKKNYKTHLDEIKRNSLRNPIVEKILNQMVNVVNSVIDTYSNIDEIRIEMARELKKSKPEREDMSFAISKATKETERIKGILEQEFKIQHVTRNDIIRYRLYEELKPNGYKTLYSNTYIPREDLFSKKFDIEHIIPKARLFDDSYSNKTLELRDINIEKGNQTAYDFVLSKYGEEGLYKYEQRVEEFKKNNEQAGTKCRKLLMREADIPSDFLNRDLNDSQYIAKKAHELLREIVPTVTATTGSITNRLREDWKLVNVMKELNWEKYDKLGLTEEYKDKDGNTVRHIKDWTKRNDHRHHAMDALTIAFTKPSFIQYLNNLNARSNRGGSIYGIEQKELERENNKLVFIPPIDPKIFRKQAKEHLSNILISIKAKNKVVTKNVNKTKSKSGTNRKVQLTPRGQLHLETVYGKIRTYKTEEIKVGTKLTEELIAKVADKKIREALMQRLSEYGGNIKKAFQNISKHPIWLNGSHTKHVPEKVKIVFFEDVFTIRKAITPDIKIDKVIDSKIRRILQERLNEFGGEASKAFSNLDENPIWFNRDKGIAIKSVKIRGIAKGTAIRVKKDIHGKTIIGNNGYPVANDYVNTGNNHHVAIFRDKDGNLQEHIVSFYEATARAIQNLPIVDRNYNSEKDWKFLFSMKQNEYFVFPNPNTGFNPSEISLKDEKNYALISPNLFRVQKLSHYYYVFRHHLETNVDTNLQLKDITWKRITAVNNLTGAVKVRIDHLGRIVDVGEYK

SEQ ID NO: 397 - protein, 1204 aa, Prevotella ruminicola
MERILGIDTGTNSLGWAIVDKDENQYHLVAKGTNIFSEGVKIEKGIESSKAAERTEHRSVRKHYWRRKIRKIRLLTILSDNDLCPRLKHEQLRQWRLKKVYPTDDTFMEWQRTEDKAQVNPYKFRYICLTQKLDLSDITQRFILGRALYHLNQRRGFLSNRKEATKESEGTVKEGISSLSKDMKDSGCEYLGEYFYQLYQQGKKIRNHYTARKEHYLKEFKAICSKQELDDALIEKLEKAIFDQRPLKSQKGQVGTCTFEKGKSRCPSSHPLYEDFRMYSFINNIKVQVDTLYDKGERSLTDEEKQLIIPLFKRKSKRTFPFEDIAKKIAGKNNYCYIKSNEEKAYKFNYQMDTQVSGSPVNAQLEEIFGEDWLSSVCEVYTLANNKSRFQIMNDVWHVLFFYDDEDKLKEFAKDRLQLDDELAEKFSKISIPNDYAALSLKAIRKIMPYLRDYGLIYSEAVFLANLVDVLPQHVWGIKEMREAAIENVIDVMHSYDKNNIDGITLEGCVKTFLKERYQVSDDNLKKLYHPSMLDPYPRQRPNDEGVFQLGSPRISSVKNPMAMHSLFRLRKVVNLMLKKGYITPDTKVHIEFSRDLNDANKRWAIQTWQRENEKERERCRKEIEKYIASPSDTDILKYQLWEEQNHKCLYTGDEIRITDFLGDNPKYDIEHTIPRSAGGDSTKMNLTLCSSRFNRDEKKTKLPAELVNHDEILERISNWKEKYEDIDKQIRKISTKGATSKEDKDSKIRRRHYLILQRDYWRGKYQRFTMTEVPEGFSRRQGTDISVISRYARMYLKSVFKQVYIVKGIATSDFRKMWGIQDEYAKKERVNHVHHCIDAITIACIGKAEYDKLADYRHQYDDYLFQGKTKPTFDKPWPSFVIDIKHIQDELLIAHYAKDNLEKFTKKNLRGKDGRIIRDKFGNKLQMKGDTSRNSLHNDKFYGAINHEGEIKYVYRTNIEALDAKSIGNIVDPTVRSIIESAIAIHGSLKAAINKGIWMNEEKHIPIKKVRVFRNDVKKPIELKDQRDLSDKDYKQHYYVTNDGNYMMLIFSKLNNKGREIRQHVVINSLEATEVIKSHKRSQVGKVVWESYYSKEGFDLIYKLKSGTMILLYENNRDEVWDLDIRNLQKRLYIITKMKYDGRIYMMHHQEAREKKDLEEKSGSFKINEDYRPLIVNSYNQFNALVQDLDFEINDLGEIRRLI

SEQ ID NO: 398 - protein, 1424 aa, unidentified
  REGION 1..1424: note = Prevotella sp. C561
  source 1..1424: note = Prevotella sp.
MTQKVLGLDLGTNSIGSAVRNLDLSDDLQWQLEFFSSDIFRSSVNKESNGREYSLAAQRSAHRRSRGLNEVRRRRLWATLNLLIKHGFCPMSSESLMRWCTYDKRKGLFREYPIDDKDFNAWILLDFNGDGRPDYSSPYQLRRELVTRQFDFEQPIERYKLGRALYHIAQHRGFKSSKGETLSQQETNSKPSSTDEIPDVAGAMKASEEKLSKGLSTYMKEHNLLTVGAAFAQLEDEGVRVRNNNDYRAIRSQFQHEIETIFKFQQGLSVESELYERLISEKKNVGTIFYKRPLRSQRGNVGKCTLERSKPRCAIGHPLFEKFRAWTLINNIKVRMSVDTLDEQLPMKLRLDLYNECFLAFVRTEFKFEDIRKYLEKRLGIHFSYNDKTINYKDSTSVAGCPITARFRKMLGEEWESFRVEGQKERQAHSKNNISFHRVSYSIEDIWHFCYDAEEPEAVLAFAQETLRLERKKAEELVRIWSAMPQGYAMLSQKAIRNINKILMLGLKYSDAVILAKVPELVDVSDEELLSIAKDYYLVEAQVNYDKRINSIVNGLIAKYKSVSEEYRFADHNYEYLLDESDEKDIIRQIENSLGARRWSLMDANEQTDILQKVRDRYQDFFRSHERKFVESPKLGESFENYLTKKFPMVEREQWKKLYHPSQITIYRPVSVGKDRSVLRLGNPDIGAIKNPTVLRVLNTLRRRVNQLLDDGVISPDETRVVVETARELNDANRKWALDTYNRIRHDENEKIKKILEEFYPKRDGISTDDIDKARYVIDQREVDYFTGSKTYNKDIKKYKFWLEQGGQCMYTGRTINLSNLFDPNAFDIEHTIPESLSFDSSDMNLTLCDAHYNRFIKKNHIPTDMPNYDKAITIDGKEYPAITSQLQRWVERVERLNRNVEYWKGQARRAQNKDRKDQCMREMHLWKMELEYWKKKLERFTVTEVTDGFKNSQLVDTRVITRHAVLYLKSIFPHVDVQRGDVTAKFRKILGIQSVDEKKDRSLHSHHAIDATTLTIIPVSAKRDRMLELFAKIEEINKMLSFSGSEDRTGLIQELEGLKNKLQMEVKVCRIGHNVSEIGTFINDNIIVNHHIKNQALTPVRRRLRKKGYIVGGVDNPRWQTGDALRGEIHKASYYGAITQFAKDDEGKVLMKEGRPQVNPTIKFVIRRELKYKKSAADSGFASWDDLGKAIVDKELFALMKGQFPAETSFKDACEQGIYMIKKGKNGMPDIKLHHIRHVRCEAPQSGLKIKEQTYKSEKEYKRYFYAAVGDLYAMCCYTNGKIREFRIYSLYDVSCHRKSDIEDIPEFITDKKGNRLMLDYKLRTGDMILLYKDNPAELYDLDNVNLSRRLYKINRFESQSNLVLMTHHLSTSKERGRSLGKTVDYQNLPESIRSSVKSLNFLIMGENRDFVIKNGKIIFNHR

SEQ ID NO: 399 - protein, 1483 aa, unidentified
  REGION 1..1483: note = Prevotella sp. MSX73
  source 1..1483: note = Prevotella sp.
MKTILGLDLGTNSIGWAKVSVDDYGNYLHDIKLGSRIIPMSQDVLGNFDSGVTVSQTAQRTEFRSKRRLVQRNLQRRERLHRVLHVLDFLPAHYDAAIGWDRTEAVTYGKFLNHAEPKLAWEELGNGKRRFLFMDSFHEMVADFARCQPALVADGKKIPLDWTIYYLRKKALTQAITKEELAWILLNFNQKRGYYQLRGEEEEENPTKQEEYYELKVVSVEATDSRKGNDTWYNVHLENGWIYRRSSKISLDDWVGKVKQFIVTTEYEKDGTTLKTDKEGNVKRSFRAPNENDWGLRKKRTETLLEMSGKTVGAFIYDHLLQEPADKIRGNFIRTIERHYYKAELEAILAEQCKYHIELRDKEMLEACARELYLNNLPHQRSLMKKDMTYLLLYDLIFYQRPLKSKKALIANCPYEYYEYVDKETGEIKRQNIKCIAKSNPYFQEFRLWQFVLNLRLFDRVEDKEVTANYLPTADDHARLFTYLNDRKEINQETLLKDYFKLKKVKIGNEKEYPIRWNYIEDKEKKYPCNETRYELLMALDRAGIEHKWLDDNNLEYRLWHLLYSVEVKSESETALRKLKNDDAFVNSFLKVKPFKKEYGAYSEKAIKRLLAVMRKGFLWNEQDICDETRKRIEIIIKGDVDEKVKERMGHAAYSFDRVSDFQGLPEWLACYVVYGRHSEAMDIQRWDSPERLMAYINNFKQYSLRNPIVEQCILETLRTVHDIWKETGQIDEIHVELGREMKSTSEERARRTQNVLRNENTNLRIKSLLIELKNDTDICNVHPYSPMQQEILRIYEEGALQELNREDEDFEEISKISQMSQPSGKELNRYKLWLEQKYRSPYTGKAISLAKLFTPAYQIEHVIPQSRYFDDSFTNKVICEAEVNTLKSNLLGYEFIKKHGGEIIHCTTLGDVRIFSESEYKAFVMDHYANNKSKKDKLLMEDIPQEFLSRQMNDSRYISKVVKTLLSNIVRMADESEATSKSVIVCTGGVTDRLKKDWGLNDVWNSIVYSRFERLNRLTGTEAFGHWENKDGKRVFQTSMPLELQRGFRKKRIDHRHHAMDALVIACASRNIVNYLNNESANNPKKREDLRRQLCDKNRVIRKPWETFTQDAYNALENVVVSFKNYVRVINKATNRYEHYDENGKKRFVQQKGSELWAIRKPMHKETYYGHVNLRRKELVTLQKALDDIPSICDKKLRDYISALVEKHFNKRQLLAHFKSTDYYWQKQYVNKVYVWTFSDDIKPLVATRKLLDTSFDAKRIGTITDTGIQKILRNYLEAKGGNATLAFTPEGIVEMNQNISKYNDGKPHQPILKVRITEPMGAKYRVGQTENKMAKYVEAQSGTNLYFAIYEDSEGKRSYTTVPLDEVAERLKQRLSPVPEKDENDVPLKFYLSPNDLVYVPTEEELQLRECKLNKDRIYKMVSSTGSECHFIPYYVANVIYNKVEFEAKNKIGRALTGEMIKAVCWKLEIDRLGNILKVIK

SEQ ID NO: 400 - protein, 1375 aa, unidentified
  REGION 1..1375: note = Prevotella sp. oral taxon 306 str. F0472
  source 1..1375: note = Prevotella sp.
MKKILGLDLGTTSIGWALVNESENKDEQSSIVRLGVRVIPLTVDEKGNFEKGKAITTNADRQQVHAARINLQRYKLRRENLRDCLQKQGWIGSEPMCEDGKSSTFETYKLRAKAAVEEVSLHEFARVLFMLNKKRGYKSNRKANDKEEGKLFDGMTIAKKLYEEHLTPAEYSLQLLNTGRKFTPEYYRSDLIEEFEKIWNEQQKYYPEILTDEFKQQLEGKAKSNTSKLFLGKYGIYSADTKGLDRRLQPLKWRVEAMKQQVDKDVLAFVISDLKGQIANTSGLLGAISDRSKELYFSKQTIGQYLWASLQENPHISIKNQPFYRQDYLDEFEKIWETQATYHKELTSELKQEIRDIIIFYQRPLKSKKNLIAVCELEQRKVKVTVDGKEKEITIGPKIAPKSSPMFQEFRIWQNLNNILLLDHETNSKRPLYEEERNLLYEELSVKEKLSKTEALKVLGKKSKQWDLNYKELEGNRTQAVLYDCYNRIIVMSGHEECNFKKLKASDIRHYVKMIFKNLAFNTDILCFDSSLKGHELERQPMCQLWHLLYSYEGDNSRTGNDALLRKLETSFGFPKEYAAVLADVIFEDSYGNLSVKAMRNILPHLQAGKDYSQACEEAGYKHSRRSLTKEELNQKVYKEKLELLPKNSLHNPVVEKILNQMVNVINAVIEEYGKPDEIRIELARDLKIGAAERENMTRSINQGNAENKRIREILEKEFALSYLSRNDIIKYKLYEELKSNGFKTLYSDTYISKDKLFSKDFDIEHIIPKARLFDDSLSNKTIEARDVNIAKSNKTAFDFILERYGEQGVKTYKTKLLRLLEDGAISNKKYNNLLKTEADIPSGFIDRDLRNTQYIAKKAYEILSELVKIVTPTTGSVTNRLREDWQLVDVMKELNFEKYQKLGLADVIEDRDGRKVKRIKDWTKRNDHRHHAMDALTIAFTKPSYIQYLNNLNARSDKSSSIYGIEVKELHREEGKFRFNAPLPINEFRAEAKRHLKSVLVSIKAKKKVMTQNVNKIKTKHGIIKKVQLTPRGELHNATYYGTKKRPLVRMVKVGAALDEATIKRVCSPAIRAALLKRLNAYNGDAKEAFTGRNSIDKNPIYLDIEQTKLVPVLVKTIEWGMYHPIRKRITPDLKIDKVIDKGIREKLKARLAEFNGDAQKAFSNLDENPIYMDEAKRITLKRVSIEGVLSAIPLHTLKDKAGKPVIGSDGKPVFGDYVQTSNNHHIAFYIDDKGNLQDNPVSFFEAAERKSQGVPVIDRRYNCDKGWHFVFTMKQNEYFVFPNEATGFIPSEVDLLDEANYCIISPNLYRVQKLSKASGRDYWFRHHLETMLNDDLRLKNSTFKRIQSLKGLEDIVKVRINSIGKIVAVGKYD

SEQ ID NO: 401 - protein, 1216 aa, Prevotella stercorea
  REGION 1..1216: note = Prevotella stercorea DSM 18206
MTKILGIDTGTNSLGWAIVDKTADNYNLLDKGVNIFQEGVKIEKGIESSKAAERTEHRATRVRYYRIKLRKIRLLRILSDNHLCPPLSQEELSTWRLKKVYPKNELFMQWQRTDDDTEKTPYAYRHKCIHEKLDLSDVTDRYILGRAFYHIIQRRGFLSNRKEQGGEDSGKVKEGISTLTHEMNEAGYEYLGDYFYALYNKGEKIRKHYTARNEHFLSEFKAICEKQDLEKELGSEVVRNIEKAIFDQRPLKSQKGQVGKCVFEKNKTKCPSSHPMYEEFRMLTFINNIKIKTPNDDVLRPLNTGEREKIMPLFFRKSKKQFDFEDITKKLAPKKMYGFYKKEEDAEMPFLFNYPMDTSVSGCPVTAALKDVFGDDWITAICETYTLGEGKSRFDIVNDIWHALYFYSDKDKLAEFAINRLQLSEDEAKIFSEISLPADYASLSLKAICKILPYLRRGLIYSHAVFLGNLCEVMPKYEWSIKEMRETIIDNIIMEMDKCDTKDKRTFEVCIKDYLKGQYNVSDNSLKKLYHPSMIETYPRVQYTNEHGVYQLGSPRIDSVRNPMAMRSMFRLRKLVNRLLVEGKIDQNTEVHIEFARELNDANKRNAIALFVKENQSANDEARKQIITLFKKETGTDIEPTDKDILKYVLWEEQNHICLYTGKQIRISDFIGANPKFDIEHTIPRSVGGDSTKMNLTLCDSRFNREVKKTKLPVELPNHDEIMERIKEWKKNYELLDIQIRKNKKLSKGATTKEQKDTIIRKRHLLELRRDYWRGKYERFTMESVPEGFSRRQGTDISVISKYARLYLKSLFNRVYTVKGIATSDFRKIWGIQDIYSKKERINHVHHCIDAIVIACIGLDEYNKLGAYYHDEENNKWYGMSKASFKKPWATFVEDIKKIQDEILVYHYTPDNMPKQGRRRIKIDGKKILCKGDAARGSLHNDTYYGAIENDGAVKYVKRIDLASLEEKDVKNIVDDTVRSIIEAAIKEKGFKDAMASTIWMNEEKRVPIKKVRCFTPSITKPLNIRKQRDVSIKEYKQQYHVANDSNYLLALYIGTDNKGKEKREFEIVNILQAAQYYRTSNDKEVVDRHIVPIKSEHDYPFAYTLKIGTMVLLYEKSPNEVWDATIKERNRRLYKVTGLSTMRMKGRNGEYAYATVKLIHNEEARPSKDIKAKNGEYEQGEEFRPAIIMLHTQLNALVQGYDFEINELGEIRRLR

SEQ ID NO: 402 - protein, 1234 aa, Prevotella tannerae
  REGION 1..1234: note = Prevotella tannerae ATCC 51259
MPNFWSIFTENLQTYLMKTRILGLDTGTNSLGWAVVDRDENNQYTPICRGDLIFTEGVKQEKGIEFSLAAERTSYRASRRHYFRRRLRKVEVLKVLVKHKLCPPLSDEALNRWHTKKEYPLDEDFILWQRTNEADNKNPYHDRHICLHRKLNLKDSQTDRYTLGRALYHLTQRRGFLSNRLDQNEEAEETGKVKSAISELSKEMKEAGCEFLGDYFYLLYRTEGNRVRIRSRYTDREKHYLQEFKEICRVQELDEDLAKALEKTIFFQRPLKSQRQGVGKCTMEKGHSRCAVSHPLYEEYRLLCYLNNIRIKTPSDDRLRPLNAEEREKITPLFYKEKNFDFEKIAKKLAGKTPFGWIRDAEDWPYQFNYRMTQEAPACPTTAQLIKVFGEDWKAALAETYTMSAKQDGTLKTEDEICTDIWNVLYSFSSKEKLKEFGLKKLQLDEVQAKAFSEIRLTRDFASLSLKAIRKILFFLRTGEDYSKAIFLANIPTIVGEEIWNDIERRSRLLYKVDLALRPQEERDAEEHRTIAERIKAAVAAEVPDAPIDLLYHPSMIEAYPDAKRNERFDCYQLGSPKTNAVRNPMAMRSLHMVRKVINHLLRKHIIDEKTEIHIEYARELNDANKRQAIADWQRELSKRHTAYAQNIRQLYKAETGLVIEPTKADILKYQLWEEQQHVCLYTGKKIGIADFLGANPKFDIEHTIPRSRGGDSTQENLTLCESKFNRDIKRDKLPTELANYEEILARIEHWKKQCYALKLKRDGIRTHSGLEKSIKDSRIRRRHLVGLEYGYLKGKYDRFTMKEVPEGFSRRQGAGIGLISKYAGLFLKSLFKDPKNPNRSNVYVVKGAITAEFRKLWGLQQADEAKSRENHTHHCIDAYTIACIGPCEYAALAAYYRSDEEFKYGRRREKPQFEKPWPTFTEDLLKLQEELLIVHQTTDKLGKRDRRKVKTPRGKFLTGGDSARGRLHQETYYGAINYDGNIKYVVRKPLDSLTEKDLDKIVDETVMGIVKGAVEAKGSLKEALADGIYMNKEKGILIKRVRIFSDVSEPINLKQLRDVSTKEYKRHIHLRKDENYLFAIYEGIDKKKNKKQTETATVDYLDAAKFYKDSKRRDKANSLVGDYSKKNKLPLKCILKKRQMVLFYEHSPEEIRFKDKKDLSRRLYIVTSIAKDGRVKFLHHQAATATGIQSSPSPFTNDGEHQPYYRLSASNIKVLVAGIDFDINILGEITPKL

SEQ ID NO: 403 - protein, 1487 aa, Prevotella timonensis
  REGION 1..1487: note = Prevotella timonensis CRIS 5C-B1
MKNILGLDLGSNSVGWALVKVEENGNPIGSIKMGSRIIPMSQDILGSFEKGDTVSQTAQRTLYRGKRRLIERHVLRRERLCRVLHIMNFLPAHFDRLLGWDKTDNKTYGKFIDDSEPKLAWRQNKNEMGKMEFVFMDSFHEMLSDFAKHQPQLIANGKKVPLDWTIYYLRKKALTQLISKEELAWILLNFNKKRGYYQLRGEEEEEQPTKKEEYKVLKVISVDADEGQKGNGIWYNIHLEDGGIYKKKSDIPLYDWVGKTLQLIVVTTYEKDGKTPKIFDSGKQNPSYRLPKEDDWGLVKKRTESQLQSSGKTVGAFIYDNILSKPDDKIRGNLVRTIERKYYKKELIEILQQQAKYHDELHNQNLLESCAKELYAHNDVHYNEVIKSNMINLLVNDIIFYQRPLKSKKSLIANCKYESYEYVDKETGEIKEMPIKCIAKSNPYYQEFRLWQFIHNLRLSDVVTREDVTAQYLSTPQDYCNLFTYLNDRKEIKQDILLKDFFKIKKVQIDKEKVFPIEWNYIKDATKSYPCNETRYELLSALKRAGMDKQWLDDTPNMQYRLWHLLYSVEEKEESAKALRKLYDDDKFVTSFLKIKPFNKCYGAYSEKAIKRLLTLMRMGKAWNEQAIDAKTLKCIQQIITDNVDSKLKEKIDDSRYVLHHVSDFQGLPTYLASYVIYGRHSEVTDIQCWDSPEDLLKFIRDFKQHSLRNPIVEQVILETLRVVYDIWKAEKHIDEIHVEVAREMKLTAQQRNEANLRNLNNEATNLRIKYLLEELKNDTFIKDVRPLSPIHQEKMRIYEQAVLGNLNKQDKDYDDIIKISKKEHPTNAELIRYKLWLEQRYCSPYTGKAISLSKLFTTAYEIEHIIPQSRYFDNSFNNKVICEAEVNKAKGNMLGYEFIKKQGGQKIYCTQLGKAVTILKEEAYKQFVNEHYAHNKRKRDNLLAENIPESFSSRQLNDTRYITKTIMSLLSNVVRQQSEEEATAKNLLPSSGSVTDRLKNDWGLKDVWNTIVTPRFERLNKLSGTNDFGEMKEENGNRYFQTNVPLEYEKGFKKKRIDHRHHAMDALVIACTTRNMVNYISNANANSPKQREDLRQLLCDKNRIINKPWDTFTQDALKALNDIVVSFKNNVRIINRATNRYQRYDKNGKKIIFSQKGDDMWAIRKSMHKETVFGRVNLIRKEVLPIAKALDNISAICNAQLRAYVNDLVDKHFNKKQLVAHFKSLNYKWNRQDVSKVEVWISSDNKTPMVAVRKPLDTSFDKKKIASITDTGIQTILLNYLESKGGDASVAFAPEGIQEMNSNIELYNNGKAHKPIKNVRLSEPLGAKYQVGERGAKTKKYVEADKGTNLFFAIYEDEEGKRYYYSVPLREAIERQKQKLSPVPEYNEKGVALKFYLSPNDLVYVPTEEERTMGTCHIDKARIYKMVSSTGCSCYFVPSTFAKVIVDKVELQSLNKMEKAITDECIKEVCWKLKVDRLGNIINVIK

SEQ ID NO: 404 - protein, 1218 aa, Prevotella timonensis
  REGION 1..1218: note = Prevotella timonensis CRIS 5C-B1
MNKRILGLDTGTNSLGWAVVDWDEHAQSYELIKYGDVIFQEGVKIEKGIESSKAAERSGYKAIRKQYFRRRLRKIQVLKVLVKYHLCPYLSDDDLRQWHLQKQYPKSDELMLWQRTSDEEGKNPYYDRHRCLHEKLDLTVEADRYTLGRALYHLTQRRGFLSNRLDTSADNKEDGVVKSGISQLSTEMEEAGCEYLGDYFYKLYDAQGNKVRIRQRYTDRNKHYQHEFDAICEKQELSSELIEDLQRAIFFQLPLKSQRHGVGRCTFERGKPRCADSHPDYEEFRMLCFVNNIQVKGPHDLELRPLTYEEREKIEPLFFRKSKPNFDFEDIAKALAGKKNYAWIHDKEERAYKFNYRMTQGVPGCPTIAQLKSIFGDDWKTGIAETYTLIQKKNGSKSLQEMVDDVWNVLYSFSSVEKLKEFAHHKLQLDEESAEKFAKIKLSHSFAALSLKAIRKFLPFLRKGMYYTHASFFANIPTIVGKEIWNKEQNRKYIMENVGELVFNYQPKHREVQGTIEMLIKDFLANNFELPAGATDKLYHPSMIETYPNAQRNEFGILQLGSPRTNAIRNPMAMRSLHILRRVVNQLLKESIIDENTEVHVEYARELNDANKRRAIADRQKEQDKQHKKYGDEIRKLYKEETGKDIEPTQTDVLKFQLWEEQNHHCLYTGEQIGITDFIGSNPKFDIEHTIPQSVGGDSTQMNLTLCDNRFNREVKKAKLPTELANHEEILTRIEPWKNKYEQLVKERDKQRTFAGMDKAVKDIRIQKRHKLQMEIDYWRGKYERFTMTEVPEGFSRRQGTGIGLISRYAGLYLKSLFHQADSRNKSNVYVVKGVATAEFRKMWGLQSEYEKKCRDNHSHHCMDAITIACIGKREYDLMAEYYRMEETFKQGRGSKPKFSKPWATFTEDVLNIYKNLLVVHDTPNNMPKHTKKYVQTSIGKVLAQGDTARGSLHLDTYYGAIERDGEIRYVVRRPLSSFTKPEELENIVDETVKRTIKEAIADKNFKQAIAEPIYMNEEKGILIKKVRCFAKSVKQPINIRQHRDLSKKEYKQQYHVMNENNYLLAIYEGLVKNKVVREFEIVSYIEAAKYYKRSQDRNIFSSIVPTHSTKYGLPLKTKLLMGQLVLMFEENPDEIQVDNTKDLVKRLYKVVGIEKDGRIKFKYHQEARKEGLPIFSTPYKNNDDYAPIFRQSINNINILVDGIDFTIDILGKVTLKE

SEQ ID NO: 405 - protein, 1496 aa, Prevotella veroralis
  REGION 1..1496: note = Prevotella veroralis F0319
MKTILGLDLGTNSIGWAKVCVDDNGNYLRDIKLGSRIIPMSQDVLGNFDKGVTESQTSVRTGFRGVRRIRERSLLRRERLHRVLHVLGYLPPHYDSAIGWNKNEPSTYGKFLNHGEPKLAWEHKEDGSMRFLFMESFHEMMADFAKSQPSLVSDGKKIPLDWTIYYLRKKALSQPIRKEELAWLLLNFNQKRGYYQLRGEEDDDNPTKCEEYYELKVVGIEADEEGKNGNTWYNVKLENGWIYRRQSKIPLDDWIGKVREFIVTTEYEKDGITLKKDKNGDVKRSFRSPSEDDWGLRKKRTEKLLDSSKMTVGAFVYDHLLAEPSDKIRGKFIRTIERKYYKKELYAILCEQSKYHEELRSGDYLNKCAEELYKNNQPHRNSLLTKDLAYLLLEDLIFYQRPLKTKKSLIAECPYEAYKYVDKETGEIKRQGIKCIAKSNPYYQEFRLWQFISNLRLFNKADDKEVTADYLPTQDDYVRLFAYLNDRKEINQETLLKEFFKLKKITVNSEKVFPIRWNYIEDKEKKYPCNETRHELLLALDRARIDHSWLEKPGQEYRLWHLLYSVESKEETKEALRKLKDDDAFVESFLKVKPFKREYGAYSEKAIKKLLAVMRMGSLWRETDICDTTKGNITKILQGEIDEKLKEKISASVSSYNQLSDFQGLPVWLACYVVYGRHSEAAEIQHWKTPESLLAYINGFKQHSLRNPIVEQCILETLRTVHDIWKEVGHIDEIHVELGRNMKSTADQRARISENVLRNENTNLRIKSLLLELKNDPNIKDVRPYSPMQQEKLRIYEEGVLQELTKDDKDFTEITKISTMAQPSAKELQRYKLWLEQKYRSPYTGKSISLTKLFTSAYQIEHVIPQSRYFDDSFSNKVICESEVNSLKDNMLGYEFIKNHGGEIIHCTMLGDVKVLSESEYKAFVNDHYAHNKRKRENLLLEDIPQEFLNRQMNDSRYISKVVKALLSNIVRAEGEEEATSKFVVSCSGGITDRLKKDWGLNDVWNKIVYPRFERLNRLTGTEAFGQWENKDGKRVFQTAVPLELQRGFNKKRIDHRHHAMDALVIACTSRNIINYLNNESANNPKKREDLRQKLCDKNRTIRKPWETFTQDATAALEDVIVSFKNYVRIINKATNYYERYDVEGKKVIAEQRGDDMWAIRKPMHEATYYGRVNLRRKKKVNLRVALENISSICDNKLRIYINGLVEKGFNTKQILDKFKNTNDHFSMQKIDKVEIWQFTNEEEKLVATRKPLDTSFDTKKIASITDTGIQTILLNYLETKGGDSTIAFTPEGIVEMNQNISKYNNGKEHMPILKVRLYTKLGKKIPVGQTGCKAKQFVIAEAGTNLYFAIYEDEEGKRSYRTIPLNEVVERLKQGLSPVPEKNDKDVHLKFYLSPNDLVYVPIEDEHESLAKDHIYKFVDSSGTTANFIPHRSANVIFELNKKDAEKFCSGSIIQNEYGVGSSQSKNQKAITGEMIKAVCRKLEVDRLGNVIKVI

SEQ ID NO: 406 - protein, 1062 aa, Ralstonia syzygii
  REGION 1..1062: note = Ralstonia syzygii R24
MAEKQHRWGLDIGTNSIGWAVIALIEGRPAGLVATGSRIFSDGRNPKDGSSLAVERRGPRQMRRRRDRYLRRRDRFMQALINVGLMPGDAAARKALVTENPYVLRQRGLDQALTLPEFGRALFHLNQRRGFQSNRKTDRATAKESGKVKNAIAAFRAGMGNARTVGEALARRLEDGRPVRARMVGQGKDEHYELYIAREWIAQEFDALWASQQRFHAEVLADAARDRLRAILLFQRKLLPVPVGKCFLEPNQPRVAAALPSAQRFRLMQELNHLRVMTLADKRERPLSFQERNDLLAQLVARPKCGFDMLRKIVFGANKEAYRFTIESERRKELKGCDTAAKLAKVNALGTRWQALSLDEQDRLVCLLLDGENDAVLADALREHYGLTDAQIDTLLGLSFEDGHMRLGRSALLRVLDALESGRDEQGLPLSYDKAVVAAGYPAHTADLENGERDALPYYGELLWRYTQDAPTAKNDAERKFGKIANPTVHIGLNQLRKLVNALIQRYGKPAQIVVELARNLKAGLEEKERIKKQQTANLERNERIRQKLQDAGVPDNRENRLRMRLFEELGQGNGLGTPCIYSGRQISLQRLFSNDVQVDHILPFSKTLDDSFANKVLAQHDANRYKGNRGPFEAFGANRDGYAWDDIRARAAVLPRNKRNRFAETAMQDWLHNETDFLARQLTDTAYLSRVARQYLTAICSKDDVYVSPGRLTAMLRAKWGLNRVLDGVMEEQGRPAVKNRDDHRHHAIDAVVIGATDRAMLQQVATLAARAREQDAERLIGDMPTPWPNFLEDVRAAVARCVVSHKPDHGPEGGLHNDTAYGIVAGPFEDGRYRVRHRVSLFDLKPGDLSNVRCDAPLQAELEPIFEQDDARAREVALTALAERYRQRKVWLEELMSVLPIRPRGEDGKTLPDSAPYKAYKGDSNYCYELFINERGRWDGELISTFRANQAAYRRFRNDPARFRRYTAGGRPLLMRLCINDYIAVGTAAERTIFRVVKMSENKITLAEHFEGGTLKQRDADKDDPFKYLTKSPGALRDLGARRIFVDLIGRVLDPGIKGD

SEQ ID NO: 407 - protein, 1066 aa, Rhodopseudomonas palustris
MSERVVRRILGIDLGIASCGWGVVDISGAGGGIIATGVRCFDAPLIDKTGEPKSATRRTARGQRRIVRRRRQRMNGVRRLLCEFGLLPDPRPDALNQAMRRISTASAAAQVTPWTLRAAAHQRLLSNEELAVVLGHIARHRGFRSNAKNEAGANAADETSKMKKAMEATREGLAKYHAFGDMIANDPKFANRKRNRDKDYSHTAKRSDLEDEVRAILRAQLRFGSAAATETLAQTFADVAFFQRPLQDSEDRVGDCPFEPGQKRAARRAPSFELFRFLSRLANLKLAVGRSPERRLTAEEIALAAKGFGETKKTITFKSLREALDLDPNARFSGIGKDKEASLDVVARTGGAAYGTKTLKDALGDAPWRSLSRTPETLDRIAEILSFREDITSIRNGLEDLGLDSLVVEALMQAAANGDFKEFTRAGHISARAARNIIPGLREGLVYSEACARVGYDHAARLSVPLDQVGSPVTRKALSEALKQVRAVAREYGPIDYFHIELARSVGKSAEERKQLTDGIEARNVEKAKRRKQAEEHLGRAPSDDELLRYELAKEQNFKCIYSGDAIDPAGVAANDTRYQVDHILPWSRFGDDSYLNKTLCTARSNQNKRGRTPFEWFEADKTDVEWMEYVARVENLQEVKGRKKRNYSIKDAAAIEDKFKARNLTDTQWATRLLADELSRMFPPRECERAICGRADGGNDGLTIVEERRVFTRPGAITSKLRRAWGLEGLKKQDGKRVEDDRHHAVDALVLAATTESLLQRLTVEVQRREREGRPDDIFHCAEPWRGFRADVRRTVYGSETMPGIFVSRAERRRARGKAHDATIKQIREIEGERLVFERKPVEKLTDKDLEKIPIPKPYGQVSDPKRLRDELVESLRAWIAAGKPKDRPPLSPKGDVIRKVRIQTNDKVSVEINGGTVDRGDMARVDVFRKKNKKAVWEYYVVPIYPHQIVALNDPPDRAVIAYAEDKDWKEIDSSYEFLWSLFGLSYVEISKANGECIDGYFRGLHRGTGAASVCKHISLGKDATVSGIGLKTLASFKKFTIDRLGRKFEIPREVRTWRGEACT

SEQ ID NO: 408 - protein, 1064 aa, Rhodopseudomonas palustris
MSECVTRRILGIDLGIASCGWGVIEVGEASGSIIASGVRCFDAPLIDKTGEPKSATRRTARGQRRIIRRRRQRMNAVRRLLAEFGVLTGRSPDALHQALLRLSQSVAGSQVTPWTLRAAAHERKLTNDELAVVLGHIARHRGFRSNSKNDGGANAADETSKMKKAMETTREGLARYHSFGAMIASDPKFADRKRNRDKDYSHTAKRSDLEDEVRTIFRSQTRFGSLVASEKLSQAFADAAFFQRPLQDSEDMVGSCPFEPGQKRTARRAPSFELFRFLSRLANLKLTVGRAPERRLTPDEIALAAKGFGETKKSITFKSLREALDLDPNARFSGVAKEKESTLDVAARTGGAAYGTKTLKDALGDAPWRSLSRMPEKLDRIAEILSFREDMKAIRNGLEEVGLDGLVVDALMQATANGDFKDFTRAAHISALAARNIIPGLREGLVYSDACTRVGYDHAARPAVPLSQIGSPVTRKALSEALKQVRAVAREYGPIDYFHIELARSIGKSAEERKKLTDGIEARNVEKEKRRKEAAEHLGRAPSDDELLRYELAKEQNFKCIYSGDPIDPAGISANDTRYQVDHILPWSRFGDDSYVNKTLCTARSNQNKRGRTPFEWFDADKTEAEWMEYSARVEDLKEVKGRKKRNYSIKDAASVEDKFKARNLTDTQWATRLLADELKRMFPPRECERVVTVRADGGNDGLSIVEERRVFTRPGAITSKLRRAWGLEGLKKQDGKRVEDDRHHAVDALVLAATTESLLNRLTVEVQQREREGRQDDIFHCSQPWPGFRVDVQRTVYGSETMPGIFVSRAERRRARGKAHDATVKQIRDIDGERIVFERKPIEKLTDKDLERIPVPEPYGKAADPKKLRDELVENLRAWIAAGKPKDKPPRSPKGDIIRKVRIETKDKVAVEINGGTVDRGDMARVDVFRKKNKKGVWEFYVIPIYPHQIVASALPPNRAVIAYKAESEWTAIDGCFEFAWSLNPMSYLELVKSNGELIEGYFRSMDRTTGAINLSPMSTNSETIRSIGVKTLSSFRKFTVDRLGRKFEIPREVRTWRGEACT

SEQ ID NO: 409 - protein, 1173 aa, Rhodospirillum rubrum
  REGION 1..1173: note = Rhodospirillum rubrum ATCC 11170
MRPIEPWILGLDIGTDSLGWAVFSCEEKGPPTAKELLGGGVRLFDSGRDAKDHTSRQAERGAFRRARRQTRTWPWRRDRLIALFQAAGLTPPAAETRQIALALRREAVSRPLAPDALWAALLHLAHHRGFRSNRIDKRERAAAKALAKAKPAKATAKATAPAKEADDEAGFWEGAEAALRQRMAASGAPTVGALLADDLDRGQPVRMRYNQSDRDGVVAPTRALIAEELAEIVARQSSAYPGLDWPAVTRLVLDQRPLRSKGAGPCAFLPGEDRALRALPTVQDFIIRQTLANLRLPSTSADEPRPLTDEEHAKALALLSTARFVEWPALRRALGLKRGVKFTAETERNGAKQAARGTAGNLTEAILAPLIPGWSGWDLDRKDRVFSDLWAARQDRSALLALIGDPRGPTRVTEDETAEAVADAIQIVLPTGRASLSAKAARAIAQAMAPGIGYDEAVTLALGLHHSHRPRQERLARLPYYAAALPDVGLDGDPVGPPPAEDDGAAAEAYYGRIGNISVHIALNETRKIVNALLHRHGPILRLVMVETTRELKAGADERKRMIAEQAERERENAEIDVELRKSDRWMANARERRQRVRLARRQNNLCPYTSTPIGHADLLGDAYDIDHVIPLARGGRDSLDNMVLCQSDANKTKGDKTPWEAFHDKPGWIAQRDDFLARLDPQTAKALAWRFADDAGERVARKSAEDEDQGFLPRQLTDTGYIARVALRYLSLVTNEPNAVVATNGRLTGLLRLAWDITPGPAPRDLLPTPRDALRDDTAARRFLDGLTPPPLAKAVEGAVQARLAALGRSRVADAGLADALGLTLASLGGGGKNRADHRHHFIDAAMIAVTTRGLINQINQASGAGRILDLRKWPRTNFEPPYPTFRAEVMKQWDHIHPSIRPAHRDGGSLHAATVFGVRNRPDARVLVQRKPVEKLFLDANAKPLPADKIAEIIDGFASPRMAKRFKALLARYQAAHPEVPPALAALAVARDPAFGPRGMTANTVIAGRSDGDGEDAGLITPFRANPKAAVRTMGNAVYEVWEIQVKGRPRWTHRVLTRFDRTQPAPPPPPENARLVMRLRRGDLVYWPLESGDRLFLVKKMAVDGRLALWPARLATGKATALYAQLSCPNINLNGDQGYCVQSAEGIRKEKIRTTSCTALGRLRLSKKAT

SEQ ID NO: 410 - protein, 1059 aa, unidentified
  REGION 1..1059: note = Rhodovulum sp. PH10
  source 1..1059: note = Rhodovulum sp.
MGIRFAFDLGTNSIGWAVWRTGPGVFGEDTAASLDGSGVLIFKDGRNPKDGQSLATMRRVPRQSRKRRDRFVLRRRDLLAALRKAGLFPVDVEEGRRLAATDPYHLRAKALDESLTPHEMGRVIFHLNQRRGFRSNRKADRQDREKGKIAEGSKRLAETLAATNCRTLGEFLWSRHRGTPRTRSPTRIRMEGEGAKALYAFYPTREMVRAEFERLWTAQSRFAPDLLTPERHEEIAGILFRQRDLAPPKIGCCTFEPSERRLPRALPSVEARGIYERLAHLRITTGPVSDRGLTRPERDVLASALLAGKSLTFKAVRKTLKILPHALVNFEEAGEKGLDGALTAKLLSKPDHYGAAWHGLSFAEKDTFVGKLLDEADEERLIRRLVTENRLSEDAARRCASIPLADGYGRLGRTANTEILAALVEETDETGTVVTYAEAVRRAGERTGRNWHHSDERDGVILDRLPYYGEILQRHVVPGSGEPEEKNEAARWGRLANPTVHIGLNQLRKVVNRLIAAHGRPDQIVVELARELKLNREQKERLDRENRKNREENERRTAILAEHGQRDTAENKIRLRLFEEQARANAGIALCPYTGRAIGIAELFTSEVEIDHILPVSLTLDDSLANRVLCRREANREKRRQTPFQAFGATPAWNDIVARAAKLPPNKRWRFDPAALERFEREGGFLGRQLNETKYLSRLAKIYLGKICDPDRVYVTPGTLTGLLRARWGLNSILSDSNFKNRSDHRHHAVDAVVIGVLTRGMIQRIAHDAARAEDQDLDRVFRDVPVPFEDFRDHVRERVSTITVAVKPEHGKGGALHEDTSYGLVPDTDPNAALGNLVVRKPIRSLTAGEVDRVRDRALRARLGALAAPFRDESGRVRDAKGLAQALEAFGAENGIRRVRILKPDASVVTIADRRTGVPYRAVAPGENHHVDIVQMRDGSWRGFAASVFEVNRPGWRPEWEVKKLGGKLVMRLHKGDMVELSDKDGQRRVKVVQQIEISANRVRLSPHNDGGKLQDRHADADDPFRWDLATIPLLKDRGCVAVRVDPIGVVTLRRSNV

SEQ ID NO: 411 - protein, 1405 aa, Riemerella anatipestifer
MKTILGLDLGTNSIGWALVKEAENSNEKSEIIKLGVRVNPLTVDEKTNFEAGRPLSTNADRTAKRSARRNLQRYKLRRKNLIDLLIKNQLIDKDTPLTEIGKNTTHQTLELRAKAARERIELEDLARVFLAINKKRGYRSSRKVNNEEEGQAVDGMAVAKKLYDENLTPGQYAYELLSKGKKYVPDFYRSDLQAEFNAIWEYQKQFYADILDDELYNALKGQGQQNSRKRFLAIKGVYTAENKGKRDDVKLRHYKWRSEAISKKINIEEVAYVLVEINNDLNKSSGYLGAISDRSKELYFNKETVGENLWKQIQKNPHTSLKNQVFYRQDYLDEFEQIWETQAQFHPQLTLALKEQIRDVIIFYQRKLKSQKGLLSFCQFESWEIERKDENGNVILNKTTQLPKRQTVGRRVAPKSSPLFQEFKIWQNINNLEVTKISEGASKNKKETETLSDDERKLLFEELNLRGNLSQKEVLQILGLKDKEYKTNFSEGLEGNRTNAALFNIYQQIAENEGYGFDWSKKSAQEIKEELKAVFPQIGIQADILDFNANLDGKEFENQASYQLWHLLYSAEEDDKINEEDQIIYGNSAVSLKKKLCEKFGFTPEYAKWIANVSLQDDYGNLSTKAMRKIIPYLIDGNDYSEACALAGYNHSNSLTKEENDNRELLDKLELLPKNSLRNPVVEKILNQMVNVVNQVIETYGKPDEVRIELARELKKSAEKRAEMTKSINEATRRNEDIKKLITKDFGIPNPTKSDVVRYRLWEELAPLAYKDVFTGKQIKKEDLFSSKIDIEHIIPKALLFDDSFSNKTLVFRETNLKKADRTAYDFIESDYNATLDDYIQRVETLYNNTKGTISKGKRNKLLMAQKNLPDGFIERDLRNSQYIAKKAKAMLYQVFKDVNVTSGSITDRLREDWDLINVMKELNFPKYKALGLTEIEERYDIGQEKTKRVEVITDWTKRNDHRHHAMNALTVAFTTSSHIQYLNYLNARKNESHKEHKNIKGIENKITHKQKDKRKFIPPMPNFREEAKKHIETILVSIKNKNKVYTKNINKTKKKSGHNTKEQLTPRGQLHKETVYGKSKRPMSKPTKINKNFSLEQAQLIINVQEKELVLRHLAQFDNNPAVAFDTKTLKKMPLLKNGEPLKEVLCFEEIFTIRKDITPDLKIEKVVDEKIKAILEQRKKDFGGNAKEAFSDLDKNPIWLNKKKGICIKRVTITGVSNAEALHHQKDHLGREILDDNGNPIPADFVSTGNNHHLAVYLDSEGKLQDNIVSFYEAVVRTSQGLPVVDKGLNKDLGWKFLFSLKQNEMFVFPNDDFDINDFDLLDDKKAELISKHLYRVQKISKVSAGNSFVRDIVFRHHLETTVKEVKELKDISYIQLKSLEGLRNIKKVRINHIGKIVQVGEY

SEQ ID NO: 412 - protein, 1400 aa, Riemerella anatipestifer
MKTILGLDLGTNSIGWALVKETENSNEKSEIIKLGVRVNPLTVDEKTNFEAGRPLSTNADRTAKRSARRNLQRYKLRRKNLIDLLIKHRLIDKDTPLTEIGKNTTHQTLELRAKAARERIELEDLARVFLAINKKRGYRSSRKVNNEEEGQVVDGMAVAKKLYDENLTPGQYAYELLSKGKKYVPDFYRSDLQAEFDSIWEYQKQFYADILDDELYNALKGQGQQNSRKRFLAIKGVYTAENKGKRDEVKLQHYKWRSEAITQKLSIEEVAYVLVEINNDLNKSSGYLGAISDRSKELYFNKETVGENLWKQIQKNPHTSLKNQVFYRQDYLDEFEQIWETQAQFHPQLTLALKEQIRDVVIFYQRKLKSQKGLLSFCQFESWEIERKDENGNVILNKTTQLPKRQTVGRRVAPKSSPLFQEFKIWQNINNLEIAKISDGNSKNKKETEALSDDERKLLFEELNLRGNLSQKEVLQILGLKDKEYKTNFPEGLEGNRTNAALFNIYQQIAENEGYGDWTKKSAQEIKEELKAVFPQIGIQADILDFNAELDGKEFENQASYQLWHLLYSAEEDDKINEEDQIIYGNSAVSLKKKLCEKFGFTPEYAKWIANVSLQDDYGNLSTKAMRKIIPYLIDGNDYSEACALAGYNHSNSLTKEENDNRERLNKLELLPKNSLRNPVVEKILNQMVNVVNQVIETYGKPDEVRIELARELKKSAEERAEMTKGINEATRRNEDIKKLITKNFGIPNPTKNDVVRYRLWEELAPLAYKDVFTGRQIKKEDLFSSKIDIEHIIPKALLFDDSFSNKTLAFRETNLKKADRTAYGFIESDYNATLDDYIQRVETLYNNAKGTISKGKRNKLLMAQKNLPDGFIERDLRNSQYIAKKAKSMIEKVFNDVNVTSGSITDRLREDWDLINVMKELNFPKYKALGLTEIEERYDIGQEKTKKVEVITDWTKRNDHRHHAMDALTVAFTTKSHVQYLNNLNTIHSLKGDEVDLELSKLYGLKNTITEVVNKKRKFIPPMPNFREEAKKHIETILVSIKNKNKVYTKNINKTKKESGYHTKEQLTPRGQLHKETVYGKSKRPMNKPTKINKNFSLEQAQLIINVQEKELVLRHLAQFDNNPAVAFDTKTLKKMPLLKNGEPLKEVLCFEEIFTIRKDITPDLKIEKVVDEKIKAILEQRKKDFGGNAKEAFSDLDKNPIWLNKEKGICIKRVTITGVSNAEALHHQKDHLGREILDDNGNPIPADFVSTGNNHHVAIYEDEKGKLQEKVVSLYEAVARANQGLPVVDKGLNEDLGWKFLFTMKQNEMFVFPNDDFDVNDIDLLDENNAKIISQHLFRVQKLATKNYMFRHHLETNVQEVKELNDIAYKSIRSTEPLKNIKKVRINHIGKIVQVGEY

SEQ ID NO: 413 - protein, 1140 aa, Roseburia intestinalis
  REGION 1..1140: note = Roseburia intestinalis L1-82
MRENGSDERRRNMDEKMDYRIGLDIGIASVGWAVLQNNSDDEPVRIVDLGVRIFDTAEIPKTGESLAGPRRAARTTRRRLRRRKHRLDRIKWLFENQGLINIDDFLKRYNMAGLPDVYQLRYEALDRKLTDEELAQVLLHIAKHRGFRSTRKAETAAKENGAVLKATDENQKRMQEKGYRTVGEMIYLDEAFRTGCSWSEKGYILTPRNKAENYQHTMLRAMLVEEVKEIFSSQRRLGNEKATEELEEKYLEIMTSQRSFDLGPGMQPDGKPSPYAMEGFSDRVGKCTFLGDQGELRGAKGTYTAEYFVALQKINHTKLVNQDGETRNFTEEERRALTLLLFTQKEVKYAAVRKKLGLPEDILFYNLNYKKAATKEEQQKENQNTEKAKFIGMPYYHDYKKCLEERVKYLTENEVRDLFDEIGMILTCYKNDDSRTERLAKLGLVPIEMEGLLAYTPTKFQHLSMKAMRNIIPFLEKGMTYDKACEEAGYDFKADSKGTKQKLLTGENVNQTINEITNPVVKRSVSQTVKVINAIIRTYGSPQAINIELAREMSKTFEERRKIKGDMEKRQKNNEDVKKQIQELGKLSPTGQDILKYRLWQEQQGICMYSGKTIPLEELFKPGYDIDHILPYSITFDDSFRNKVLVTSQENRQKGNRTPYEYMGNDEQRWNEFETRVKTTIRDYKKQQKLLKKHFSEEERSEFKERNLTDTKYITTVIYNMIRQNLEMAPLNRPEKKKQVRAVNGAITAYLRKRWGLPQKNRETDTHHAMDAVVIACCTDGMIQKISRYTKVRERCYSKGTEFVDAETGEIFRPEDYSRAEWDEIFGVHIPKPWETFRAELDVRMGDDPKGFLDTHSDVALELDYPEYIYENLRPIFVSRMPNHKVTGAAHADTIRSPRHFKDEGIVLTKTALTDLKLDKDGEIDGYYNPQSDLLLYEALKKQLLLYGNDAKKAFAQDFHKPKADGTEGPVVRKVKIQKKQTMGVFVDSGNGIAENGGMVRIDVFRVNGKYYFVPVYTADVVKKVLPNRASTAHKPYGEWKVMEDKDFLFSLYSRDLIHIKSKKDIPIKMVNGGMEGIKETYAYYIGADISAANIQGIAHDSRYKFRGLGIQSLDVLEKCQIDVLGHVSVVRSEKRMGFS

SEQ ID NO: 414 - protein, 1128 aa, Roseburia intestinalis
  REGION 1..1128: note = Roseburia intestinalis M50/1
MDEKMDYRIGLDIGIASVGWAVLQNNSDDEPVRIVDLGVRIFDTAEIPKTGESLAGPRRAARTTRRRLRRRKHRLDRIKWLFENQGLINIDDFLKRYNMAGLPDVYQLRYEALDRKLTDEELAQVLLHIAKHRGFRSTRKAETAAKENGAVLKATDENQKRMQEKGYRTVGEMIYLDEAFRIGCSWSEKGYILTPRNKAENYQHTMLRAMLVEEVKEIFSSQRRLGNKKATEELEEKYLEIMTSQRSFDLGPGMQPDGKPSPYAMEGFSDRVGKCTFLGDQGELRGAKGTYTAEYFVALQKINHTKLVNQDGETRNFTEEERRALTLLLFTQKEVKYAAVRKKLGLPEDILFYNLNYKKAATKEEQQKENQNTEKAKFIGMPYYHDYKKCLEERVKYLTENEVRDLFDEIGMILTCYKNDDSRTERLAKLGLVPIEMEGLLAYTPTKFQHLSMKAMRNIIPFLEKGMTYDKACEEAGYDFKADSKGTKQKLLTGENVNQTINEITNPVVKRSVSQTVKVINAIIRTYGSPQAINIELAREMSKTFEERRKIKGDMEKRQKNNEDVKKQIQELGKLSPTGQDILKYRLWQEQQGICMYSGKTIPLEELFKPGYDIDHILPYSITFDDSFRNKVLVTSQENRQKGNRTPYEYMGNDEQRWNEFETRVKTTIRDYKKQQKLLKKHFSEEERSEFKERNLTDTKYITTVIYNMIRQNLEMAPLNRPEKKKQVRAVNGAITAYLRKRWGLPQKNRETDTHHAMDAVVIACCTDGMIQKISRYTKVRERCYSKGTEFVDAETGEIFRPEDYSRAEWDEIFGVHIPKPWETFRAELDVRMGDDPKGFLDTHSDVALELDYPEYIYENLRPIFVSRMPNHKVTGAAHADTIRSPRHFKDEGIVLTKTALTDLKLDKDGEIDGYYNPQSDLLLYEALKKQLLLYGNDAKKAFAQDFHKPKADGTEGPVVRKVKIQKKQTMGVFVDSGNGIAENGGMVRIDVFRVNGKYYFVPVYTADVVKKVLPNRASTANKPYSEWRTMEDKDFLFSLYSRDLVHIKSKKGIPIKNVDGSLGESKEVYAYYIGADISGAKIEGKAHDSRYTFRGIGVQKLELIEKCQVDILGHISTVKNEKRMGFS

SEQ ID NO: 415 - protein, 1152 aa, Roseburia inulinivorans
  REGION 1..1152: note = Roseburia inulinivorans DSM 16841
MNAEHGKEGLLIMEENFQYRIGLDIGITSVGWAVLQNNSQDEPVRITDLGVRIFDVAENPKNGDALAAPRRDARTTRRRLRRRRHRLERIKFLLQENGLIEMDSFMERYYKGNLPDVYQLRYEGLDRKLKDEELAQVLIHIAKHRGFRSTRKAETKEKEGGAVLKATTENQKIMQEKGYRTVGEMLYLDEAFHTECLWNEKGYVLTPRNRPDDYKHTILRSMLVEEVHAIFAAQRAHGNQKATEGLEEAYVEIMTSQRSFDMGPGLQPDGKPSPYAMEGFGDRVGKCTFEKDEYRAPKATYTAELFVALQKINHTKLIDEFGTGRFFSEEERKTIIGLLLSSKELKYGTIRKKLNIDPSLKFNSLNYSAKKEGETEEERVLDTEKAKFASMFWTYEYSKCLKDRTEEMPVGEKADLFDRIGEILTAYKNDDSRSSRLKELGLSGEEIDGLLDLSPAKYQRVSLKAMRKMQPYLEDGLIYDKACEAAGYDFRALNDGNKKHLLKGEEINAIVNDITNPVVKRSVSQTIKVINAIIQKYGSPQAVNIELAREMSKNFQDRTNLEKEMKKRQQENERAKQQIIELGKQNPTGQDILKYRLWNDQGGYCLYSGKKIPLEELFDGGYDIDHILPYSITFDDSYRNKVLVTAQENRQKGNRTPYEYFGADEKRWEDYEASVRLLVRDYKKQQKLLKKNFTEEERKEFKERNLNDTKYITRVVYNMIRQNLELEPFNHPEKKKQVWAVNGAVTSYLRKRWGLMQKDRSTDRHHAMDAVVIACCTDGMIHKISRYMQGRELAYSRNFKFPDEETGEILNRDNFTREQWDEKFGVKVPLPWNSFRDELDIRLLNEDPKNFLLTHADVQRELDYPGWMYGEEESPIEEGRYINYIRPLFVSRMPNHKVTGSAHDATIRSARDYETRGVVITKVPLTDLKLNKDNEIEGYYDKDSDRLLYQALVRQLLLHGNDGKKAFAEDFHKPKADGTEGPVVRKVKIEKKQTSGVMVRGGTGIAANGEMVRIDVFRENGKYYFVPVYTADVVRKVLPNRAATHTKPYSEWRVMDDANFVFSLYSRDLIHVKSKKDIKTNLVNGGLLLQKEIFAYYTGADIATASIAGFANDSNFKFRGLGIQSLEIFEKCQVDILGNISVVRHENRQEFH

SEQ ID NO: 416 - protein, 1156 aa, Ruminococcus albus
  REGION 1..1156: note = Ruminococcus albus 8
MGNYYLGLDVGIGSIGWAVINIEKKRIEDFNVRIFKSGEIQEKNRNSRASQQCRRSRGLRRLYRRKSHRKLRLKNYLSIIGLTTSEKIDYYYETADNNVIQLRNKGLSEKLTPEEIAACLIHICNNRGYKDFYEVNVEDIEDPDERNEYKEEHDSIVLISNLMNEGGYCTPAEMICNCREFDEPNSVYRKFHNSAASKNHYLITRHMLVKEVDLILENQSKYYGILDDKTIAKIKDIIFAQRDFEIGPGKNERFRRFTGYLDSIGKCQFFKDQERGSRFTVIADIYAFVNVLSQYTYTNNRGESVFDTSFANDLINSALKNGSMDKRELKAIAKSYHIDISDKNSDTSLTKCFKYIKVVKPLFEKYGYDWDKLIENYTDTDNNVLNRIGIVLSQAQTPKRRREKLKALNIGLDDGLINELTKLKLSGTANVSYKYMQGSIEAFCEGDLYGKYQAKFNKEIPDIDENAKPQKLPPFKNEDDCEFFKNPVVFRSINETRKLINAIIDKYGYPAAVNIETADELNKTFEDRAIDTKRNNDNQKENDRIVKEIIECIKCDEVHARHLIEKYKLWEAQEGKCLYSGETITKEDMLRDKDKLFEVDHIVPYSLILDNTINNKALVYAEENQKKGQRTPLMYMNEAQAADYRVRVNTMFKSKKCSKKKYQYLMLPDLNDQELLGGWRSRNLNDTRYICKYLVNYLRKNLRFDRSYESSDEDDLKIRDHYRVFPVKSRFTSMFRRWWLNEKTWGRYDKAELKKLTYLDHAADAIIIANCRPEYVVLAGEKLKLNKMYHQAGKRITPEYEQSKKACIDNLYKLFRMDRRTAEKLLSGHGRLTPIIPNLSEEVDKRLWDKNIYEQFWKDDKDKKSCEELYRENVASLYKGDPKFASSLSMPVISLKPDHKYRGTITGEEAIRVKEIDGKLIKLKRKSISEITAESINSIYTDDKILIDSLKTIFEQADYKDVGDYLKKTNQHFFTTSSGKRVNKVTVIEKVPSRWLRKEIDDNNFSLLNDSSYYCIELYKDSKGDNNLQGIAMSDIVHDRKTKKLYLKPDFNYPDDYYTHVMYIFPGDYLRIKSTSKKSGEQLKFEGYFISVKNVNENSFRFISDNKPCAKDKRVSITKKDIVIKLAVDLMGKVQGENNGKGISCGEPLSLLKEKN

SEQ ID NO: 417 - protein, 1341 aa, Ruminococcus lactaris
  REGION 1..1341: note = Ruminococcus lactaris ATCC 29176
MGKGYYVGLDMGTGSVGWAVTDESYQILRRHGKAMWGVRLFESAKTAEERRMFRTGRRRLDRRGWRIEILQEIFAEEISRVDPGFFLRMKESKYYPEDKRDIQGNCPELPYTLFVDKTFTDKDFHKKYPTIYHLRKMLMETEDTPDMRLVYLALHHMMKHRGHFLLSGDISQVTEFKNTFNQFIENIRNEEMDFEIELDESAVQMIEETLKDKNLTRSAKKSKLVKGLNAKNVRDKAFLTLLSGGTVKLSDLFGMEELNEGERPKISFADNGYEEYAAVVEMELGELYYIVESAKAVYDWAILSDILGGSTSVSDAKVRAYEKHKADLKYLKAVVKEYFPKEVYNAVFVESSDKLNNYPAYIGMTKKNGKKVSLEGKRCSREEFMDFLKKNIVVKLPDEEAKMYLQSELEKDSFLPKQVNKDNGVIPYQVHKYELKKILDNLGDKIPFLKENAEKIEKLFSFRIPYYVGPLRTGNGENSKFAWAERKSTEKIYPWNFENVIDVEQSAENFIRRMTNKCTYLIGEDVLPKDSLLYSKFMVLNELNNLRLDGQKISVELKQKIYRDVFCRSRKVTQKKLKSYLIREGIAGKNVELTGIDGDFKGSLTAYHDFKEKLIDVELTQKEKEEIILNIVLFGDDKKLLKQRLKKKFPQLTEKQINTVTALSYKGWGRLSKKLLEEVTVPAPETGEVWNIITALWETNDNFMQLLSKEYQFSDRIEEFNEEKADPEVSYQTIEDLYVSPAVKRQIWQTLQIIQEIEKVMGEKPKRVFVEMAREKQENKRTESRKKTLSDLYTKCKKEEPEWIEALCTSLEKHEEHQLRSDKLYLYYTQKGRCMYSGEPIDLEDLWDNTKYDIDHIYPQSKTMDDSLKNRVLVKKEYNAKKSDTYPIAADIQKKMMPFWKSLLTGGFIPKEKYDRLVRNNPLDANELAGFIERQIVETRQSTKAVAEILKKILPDTEIVYVKAKTVSKFRQDFDFIKVRDMNDLHHAKDAYLNIVVGNVYFVKFTKNAAWFVKENPGRTYNLEKMFIWDVARDGEIAWKAGKSGSIVQVRAMMEKNHILVTRRSYEVKGGLFDQQILKKGKGQVPVKESDERLRDIGKYGGYNKAAGVYFMLVSSKDKKGKEQRTIEFVPIYLKDRVEKDMESARNYLMEERGLREPKILIKKIKIDTLFKVDGFYMWLSGRTSNQLIFKGANQLILSKEDMKTLKKVVKYIQRQKEDKNVKISMRDGITEEELLKLYETFLDKIRHSIYGARLSSQEKTLVNGKEKFIDLSVEAKCQVLYEILHLFQCQSGAANLKMIGGPASAGILVMNNNISKCKNISIVNQSPTGIYEKEIDLLRV

SEQ ID NO: 418 - protein, 1471 aa, Scardovia wiggsiae
  REGION 1..1471: note = Scardovia wiggsiae F0424
MGYKAPRNDKGEIDYGVGLDLGNGSVGWVAMDKDYHLIRARGHELIGARLFDPANSAENRRESRTTRRRLSRRRWRLRMLDSLFASELAKIDPNFLARRKYSWVHPKDEQNHENWYGSIIFGSKEQDKQFYKDYPTIYHLRKKLTEDTERHDIREIYVAIHHIVKYRGHFLREGEINSENLFDPEGFVELIKDVIKLNNSYDESTPIFEASPADVSEALLNEHTSRSGRIEDTLDKLDFSVSRVDKHELKGMRDAAKAVIGAIVGNTADFSKIFNLDNLDKDSKDNLKLKFADSNFDEKYGGVVGSGLLDETQIELVDRIHAVYDAVALKGILGDAHTISEAKVESYEKHRKNWKLIKEELRTKENKDEVDLWYGDLSGRQYKNPPDPEKGPDEGSKKDSPIRDSDQKQNLIKKANDYFTELIDDSQLSEEQKNCLKNDINNGQLFPVQRSSDNGVIPYQIHLNELRRIIENQKQYYPFLAETFIRKTAEGKSYEENKIVALLKFRVPYYVGPLVSKEDMEEHSSGNSAYHWMARNPGRGEAITPWNFDEVVDKDESGARFISRLTGTDTYLLGEPTLPQHSLLYEEYMVLSELNNVRLNVRQGNHWSDKNRQRLSYKQKEFLIENLFKEHKTVTRKRAEDCLSSMGCGEVQLFGLSDEKKFASSLSSYITLKKILGKAFVDDSGNSAILERIIEVQTVFEDREPLTHQLSLIDSLTVEQRKQLAKIHYTGWGKLSRKLLTSKKGSYKIHSQNEIMRTQHSIIDIMRGDSLNLIEIIRDKKIGIGEWIDNENLDRETGESDVSRLESVFEGIVMSPRVKRGVVQAVRVIDDLAKAIGNPPQRIFIEMADEVQASQRTVSRLSRLKALYGSPSLQKEFNDLKDLRKSLNETKDADLQEDRLYLYYIQLGKDLYTGKEISIDSLSSAYDIDHIVPQALTQDDSIDNRVLVSRKENARKTDSYLYTPDLIKNMRPLWGKLLAAGLMSQKKYDALTRVDDFKDREKQRFVQRSLVETRQIMKNVSTILRTYYGEDTNVVTLKSSITHDMRKYLGFPYKNRDINDYHHAQDALCISAAGQFMLNRHFVSGGEVTDGASNAYNMYLAEYLQEFRDAKARGERKRSTAFGFVVGSMSSKDDEKRTDHRTGEIVWSETNAEYLRKVMNYKKMLITQKVGDVKTRALYDETRYGHKESSAKSIKFDNLRRDTSLYGGFSGASTAYMMLVEYKKKNKLVSITAQEASLLAVADQKNDTVSVMDGILASHGLSGAKILLPKIVTGQLLDYSDALVTLQSASELNTARQMWLPRNDYNDIDIILKSKDIEDAAHKLGYDSDTVHVLRRIQKLFEAVFRVAESQFPLHQLSKDQQEEILRDPQNYGFGSAVKLLGGLLKALHANAENTNLAGLVKVLHGDKEYSDDGKAKEFKKFGFSPRWRRISNPTGFTLSDSDTFIYQSPSGIFEQRVTVKELKEKADKQK

SEQ ID NO: 419 - protein, 1178 aa, Scardovia inopinata
  REGION 1..1178: note = Scardovia inopinata F0304
MGKRHNSNMAKKKISYRIGIDVGLNSTGLAAIEVDDDGAPIRILNTMSVIHDGGVDPDAAKVRGTRLAISGIARRTRRMRRRRAKRLDRLEQILEKYGYTDTEPVLEEPYGPWICRAELADGFINDDEQRRMMIGIAIRHIARHRGWRNPYQNVRALLNIDDSDLSEEYKNLKEKVQDQINDGKDLPNFTPSQLVRDYLDNFSGQPAARIRTGKAGPRGNRRDAVGILPQRMRQSDYAYELQRIFDMQKIGRDEAQELLMAVFEAKSPKGSAEKRIGKDPLTGKKRALKASLAFQKYRIVATITNLRIKTGTGSERMLSPTELNDIYTYLLRVQDDNHLPTWEDICEEVLHIGRYQLAGIGKTFEGGERISNMPPVIQTSLAIHGLSEGTLAEKLTKWWDKADDDSRESMIKLLSNTVDIDRVNEVDENFASALDFIDSLDDEELTKLDKIALPRGRAAYSEEALNKLTADMLNTGDDLFSARQRIYHVNNSWRPPQPPIGEPLGNPAVDRVLKITNRYLMNCLNRWGQPRRVTIEHTRSGFTSVKQATEHQKISDKRAEYRRDIVKQLEEAGVESVHEYDIRRWEAVQRQNGQCLYCGRDITFKTCEMDHIVPRKGPGSTNTRTNFAAVCPECNRMKSNIPFASWAETKEAKDRGVSLDKAIKQVRFFNFTKNEYSPQAQRNFKKSMIERLKQKTSDEPLDNRSIESVSWMADELYKRIDWYFNHEQYETSKKAINDDKDNLSGTQVVVYPGSITAEARNAAGLGGNIHFIGGRYKTRLDRRHHAVDACVIAMMEPGIARILTERNQLRQAQRLTARIEDDEVNWKDYPTENTAGYNKYQAWSDRMHALLEYMNNALDYDKIPVVRWERLQLGNRSAHEDTIHPLKKLPLSHEISAIDINHASTPALYEALVSLPDFSEQDGLPADPSRQINVNGERYSGDDLVSFFNSNAAQIAIQGGSAELGTAFHHARIYRCWTVGKNGKKKIFFGMIRVYQHDLLHAKNEDLFTYPLKRSSVSMRYAKKEVVHAILSGNAEYVGYLCVGDELVLDLKGDKSNDEGGSRLSGQVGEFVQKFEEDSKVNSQIVNRWTVDGFPDEAKLRLRPSMFAGEGLKNMKSELVENAAIKNILSKTGWRVSVDVISKKSPVVLRRNAFGEPRWKTNAGLPVSYRWQDTETKE

SEQ ID NO: 420 - protein, 1063 aa, Simonsiella muelleri
  REGION 1..1063: note = Simonsiella muelleri ATCC 29453
MEKFHYVLGLDLGIASVGWAAIEIDKETETSIGLLDCGVRTFERAEVPKTGDSLAKARREARSTRRLIRRRSHRLLRLKRLLKREIFRQPETFKDLPINAWQLRVKGLDSRLNEYEWAAVLLHLVKHRGYLSQRKSEMSETDSKSEMGRLLAGVAENHQLLQQEQYRTPAELALKKFVKHFRNKGGDYAHTFNRLDLQAELHLLFQKQRELGNPFTSPELERQVDDLLMTQRSALQGDAILKMLGHCGFEPEQFKAAKNTFSAERFIWLTKLNNLRIQDQGKERALTADERTKLLDEPYKKSKLTYAQVRKLLSLPQTAIFKGLRYDLEHDKKAENSTLMEMKSYHNIRQTLEKSGLKTEWQSIATQPEILDAIGTAFSIYKTDEDISHELKTCRLPENVLNELLKNINFDGFIQLSLTALRKILPLMEQGYRYDEACTQIYGNHHSGSLQQESKQFLPHIPIDDVRNPVVFRTLTQARKVVNAIIRRYGSPARVHIEMARELGKSKSDRDRIEKQQQKNKKERENAVAKFKEDFPDFVGEPRGKDILKMRLYEQQHGKCLYSGHDIDINRLNEKGYVEIDHALPFSRTWDDSQNNKVLVLGSENQNKRNQTPDEYLDGANNSQRWLEFQARVQTCHFSYGKKQRIQLAKLDDETEKGFLERNLNDTRYIARFMCQFVQENLYLTGKGKRLVFASNGGMTATLRNLWGLRKVREDNDRHHALDAIVVACSTASMQQKITKAFQRHESIEYVDTETGEVKFRIPQPWDFFRQEVMIRVFSDQPCEDLVEKLSARPEALHDNVTPLFVSRAPNRKMSGQGHLETIKSAKRLSEENSMVKKPLTTLKLKDIPEIVGYPSREPQLYAALKTRLETHDDDPIKAFAKPFYKPNKNGELGALVRSVRVKGVQNTGVMVHDGKGIADNATMVRVDVYTKAGKNYLVPVYVWQVAQGILPNRAVTSGKSEADWDLIDESFEFKFSLSRGDLVEMISNKGRIFGYYNGLDRANGSIGIREHDLEKSKGKDGVHRVGVKTATAFNKYHVDPLGKEIHRCSSEPRPTLKIKSKK

SEQ ID NO: 421 - protein, 1327 aa, Solobacterium moorei
  REGION 1..1327: note = Solobacterium moorei F0204
MEGQMKNNGNNLQQGNYYLGLDVGTSSVGWAVTDTDYNVLKFRGKSMWGARLFDEASTAEERRTHRGNRRRLARRKYRLLLLEQLFEKEIRKIDDNFFVRLHESNLWADDKSKPSKFLLFNDTNFTDKDYLKKYPTIYHLRSDLIHNSTEHDIRLVFLALHHLIKYRGHFIYDNSANGDVKTLDEAVSDFEEYLNENDIEFNIENKKEFINVLSDKHLTKKEKKISLKKLYGDITDSENINISVLIEMLSGSSISLSNLFKDIEFDGKQNLSLDSDIEETLNDVVDILGDNIDLLIHAKEVYDIAVLTSSLGKHKYLCDAKVELFEKNKKDLMILKKYIKKNHPEDYKKIFSSPTEKKNYAAYSQTNSKNVCSQEEFCLFIKPYIRDMVKSENEDEVRIAKEVEDKSFLTKLKGTNNSVVPYQIHERELNQILKNIVAYLPFMNDEQEDISVVDKIKLIFKFKIPYYVGPLNTKSTRSWVYRSDEKIYPWNFSNVIDLDKTAHEFMNRLIGRCTYTNDPVLPMDSLLYSKYNVLNEINPIKVNGKAIPVEVKQAIYTDLFENSKKKVTRKSIYIYLLKNGYIEKEDIVSGIDIEIKSKLKSHHDFTQIVQENKCTPEEIERIIKGILVYSDDKSMLRRWLKNNIKGLSENDVKYLAKLNYKEWGRLSKTLLTDIYTINPEDGEACSILDIMWNTNATLMEILSNEKYQFKQNIENYKAENYDEKQNLHEELDDMYISPAARRSIWQALRIVDEIVDIKKSAPKKIFIEMAREKKSAMKKKRTESRKDTLLELYKSCKSQADGFYDEELFEKLSNESNSRLRRDQLYLYYTQMGRSMYTGKRIDFDKLINDKNTYDIDHIYPRSKIKDDSITNRVLVEKDINGEKTDIYPISEDIRQKMQPFWKILKEKGLINEEKYKRLTRNYELTDEELSSFVARQLVETQQSTKALATLLKKEYPSAKIVYSKAGNVSEFRNRKDKELPKFREINDLHHAKDAYLNIVVGNVYDTKFTEKFFNNIRNENYSLKRVFDFSVPGAWDAKGSTFNTIKKYMAKNNPIIAFAPYEVKGELFDQQIVPKGKGQFPIKQGKDIEKYGGYNKLSSAFLFAVEYKGKKARERSLETVYIKDVELYLQDPIKYCESVLGLKEPQIIKPKILMGSLFSINNKKLVVTGRSGKQYVCHHIYQLSINDEDSQYLKNIAKYLQEEPDGNIERQNILNITSVNNIKLFDVLCTKFNSNTYEIILNSLKNDVNEGREKFSELDILEQCNILLQLLKAFKCNRESSNLEKLNNKKQAGVIVIPHLFTKCSVFKVIHQSITGLFEKEMDLLK

SEQ ID NO: 422 - protein, 1179 aa, Sphaerochaeta globosa
MSKKVSRRYEEQAQEICQRLGSRPYSIGLDLGVGSIGVAVAAYDPIKKQPSDLVFVSSRIFIPSTGAAERRQKRGQRNSLRHRANRLKFLWKLLAERNLMLSYSEQDVPDPARLRFEDAVVRANPYELRLKGLNEQLTLSELGYALYHIANHRGSSSVRTFLDEEKSSDDKKLEEQQAMTEQLAKEKGISTFIEVLTAFNTNGLIGYRNSESVKSKGVPVPTRDIISNEIDVLLQTQKQFYQEILSDEYCDRIVSAILFENEKIVPEAGCCPYFPDEKKLPRCHFLNEERRLWEAINNARIKMPMQEGAAKRYQSASFSDEQRHILFHIARSGTDITPKLVQKEFPALKTSIIVLQGKEKAIQKIAGFRFRRLEEKSFWKRLSEEQKDDFFSAWTNTPDDKRLSKYLMKHLLLTENEVVDALKTVSLIGDYGPIGKTATQLLMKHLEDGLTYTEALERGMETGEFQELSVWEQQSLLPYYGQILTGSTQALMGKYWHSAFKEKRDSEGFFKPNTNSDEEKYGRIANPVVHQTLNELRKLMNELITILGAKPQEITVELARELKVGAEKREDIIKQQTKQEKEAVLAYSKYCEPNNLDKRYIERFRLLEDQAFVCPYCLEHISVADIAAGRADVDHIFPRDDTADNSYGNKVVAHRQCNDIKGKRTPYAAFSNTSAWGPIMHYLDETPGMWRKRRKFETNEEEYAKYLQSKGFVSRFESDNSYIAKAAKEYLRCLFNPNNVTAVGSLKGMETSILRKAWNLQGIDDLLGSRHWSKDADTSPTMRKNRDDNRHHGLDAIVALYCSRSLVQMINTMSEQGKRAVEIEAMIPIPGYASEPNLSFEAQRELFRKKILEFMDLHAFVSMKTDNDANGALLKDTVYSILGADTQGEDLVFVVKKKIKDIGVKIGDYEEVASAIRGRITDKQPKWYPMEMKDKIEQLQSKNEAALQKYKESLVQAAAVLEESNRKLIESGKKPIQLSEKTISKKALELVGGYYYLISNNKRTKTFVVKEPSNEVKGFAFDTGSNLCLDFYHDAQGKLCGEIIRKIQAMNPSYKPAYMKQGYSLYVRLYQGDVCELRASDLTEAESNLAKTTHVRLPNAKPGRTFVIIITFTEMGSGYQIYFSNLAKSKKGQDTSFTLTTIKNYDVRKVQLSSAGLVRYVSPLLVDKIEKDEVALCGE

SEQ ID NO: 423 - protein, 1426 aa, Sphingobacterium spiritivorum
  REGION 1..1426: note = Sphingobacterium spiritivorum ATCC 33861
MKHILGLDLGTNSIGWALIKQDFENKQGEILGMGSRIIPMSQDILGDFGKGNSVSQTAERTKYRSVRRLRERFLLRRERLHRILNVLGFLPEHYASQIDFTKRFGKFKEETEPKLVYSNEGFIFKKSFEEMLSDFKTHQPQLLEDNKKIPYDWTIYYLRKKALSRKIEKEELAWILLNFNQKRGYYQLRGEEEEENPNKLIEFYSLKIVDVLADEPQKGKSDIWYSLILENGWIYRRSSKTPLFDWKEKTRDFIVTIDLNDDGSVKTDKEGNEKRSFRAPGENDWTLVKKKTEQEIDSSRKTVGTYIYETLLKNPKQKIKGKLVRTIERKFYKTELKQILEKQKEFHPELRQDDLYSDCVRELYKNNEAHQLTLSKKDFVHLFMEDIIFYQRPLGSQKSSISNCTLEFRKYKDENGTEHTQYLKAIPKSNPYYQEFRIWQWMYNLNIYKKEDDTNVTKDFLNTKADFESLFEFLNNRKEVDQKALLKHFKLNDKTHRWNYVEDKKYPCNETKTMILSRLDKVENISDDFLTREMEQKIWHIIYSVNDKVEYEKALKSFAGKNNLEDNSFFEAFKKFPPFKSEYGAFSEKAIKKLLPLMRMGKFWNYNNISEQSKSRIQKIITGEYDENIKDKVREKAIHLTTETDFQGLQLWLVQYIVYGRHSEAAMLGKWNSADDLEEFLKEFKQHSLRNPIVEQVITETLRVVKDIWQKYGNGAKDFFREIHIELGREMKLPAEERERLTRQISENENTNFRIKALLAEMMDDNSVENVRPFSPMQQEILKIYEEGVLNSDIEIEDDILKISKTAQPSSSDLKRYKLWLEQKYKSPYTGQIIPLNKLFTPEYEIEHIIPQSRYFDDSFTNKIICESAVNKLKDNYIGLEFIKKLGGSIVECGNGKSVAILKHDAYEDFIKKHYANNRSKRNKLLLEDIPEKMIERQMNDTRYISKYISGVLSNIVRVEDGTDEGVNSKNIVPGNGKITTQLKQDWGLNDVWNDLILPRFERMNHLTNSTDFTAWNENHQKFLPTVPVEFSKGFSKKRIDHRHHALDALVIACATKDHVNLLNNQSAKSDTKRYDLKKKLMKFEKVAYNHPQTGERIEREAPKQFLKPWETFTIDAKNHLETIIVSFKQNLRVINKATNYYEKYVEKEGTKVKERVEQKGTNWAIRKPMHKETVSGKIDLPRIKVPKGKILTATRKSLDTSFNLKTIGSITDTGIQKILKNYLQYKDNNPELAFSPEGIEDMNKNIEKFNNGKAHQSISKVRVFELGSKFPLGQSGNKKEKYVEAAKGTNLFFAIYQDKNGKRSYETIPLNEVIERQKQGLSVVDLKGVDDFYLSPNDLVYVPSEDELENISMIDFNKMSSERIYKVVSFTGNQIFFVRQDIATSVVNKAEFSTLNKMERAIDGTMIKETCVKLQIDRLGNISKI

SEQ ID NO: 424 - protein, 1110 aa, unidentified
  REGION 1..1110: note = Sphingobium sp. AP49
  source 1..1110: note = Sphingobium sp.
MAEGKKRIWRLGADLGANSLGWAAIELSAPVNGKPIAILAAGSRIFSDGRDPKSGASLAVDRRDARAMRRRRDRFKQRQKALIKYLIADGLFPADEAARNAMAAIDPYAVRARALDEALSLPELGRALFHLNQRRGFKSNRKADRKADDDAGKIAIGIDRTRDAIAEDEADAGAEPGSWTFGKWLHERRLKGQSVRTRLRPESGEDAKGDGYDFYPDRALMEEEFDAIWAAQAPHHPDVLTNDVHDRLHEIIFYQRPLKAPQVGMCSLIPGDRRLPKAHPLFQRRRLLEELNALMIVRPGEVAQRLTREERDILLLKLKDKNKVSFATLRKALKLDPDARFNKESEDRTDLKGDEVAAVMGSKTRFGNLWVHLSIEAQWDVLARLDAVESDAEDAAFCAWLVETYALTPEQARAVANAPLPPGYGRFGETATRKLIEALRDGKKDDRVLVYSEAVTEAGLGHHSDRRTGEVFEDAKGRPQLPYYGVALERHIMPGTGDPSDPEEMRVGRLTNPTVHIGLNQLRRILNVLIRAYGPPAEIAIELARELKLTDEDKKRINRENNDNRIAAERRSEKLLAIGQADSGANRALLKLWEELNPANVLDRRCIYSGRQISIDMLFSAAVEVDHILPFAATLDDSNGNKIVCLREANREKRKRSPHDAWGHSARWDEIAARAAQLPRNKRWRFEPDAMDKFRDEGGFQARHLVDTQYLARLSREYLATLYPEKGEGSGHIWVSPGRLTEMVRRKLGLNDLLPDHNFGGGADQAKNRLDHRHHAIDAVVVAIVDRGMLNAIARASGQEGAEGRERIIIPEPWDGFRDALRETVNRITVSHRTDHGTASKAGLPKGKDATAGRLHNDTAYGFTGDTDAKGNSIVVRRVPLSSFKKLADLDRIRDADLKAALYQHLNGLEGKAFEKALAEFHKLEWHNFGGVRRVRVTEPLTVIPIKDRNGRIYKGYKGDSNYRYDVWELPDGKWVTNWKNEAGEAMSSVISMFDAHQSSEPPRPHPAARKILSLHQNDLLAIEREGEDRKLMRVVKFGQSGQITLAEHQQAGDLKKRDAVSNDDDPFKYFAPTSGGLKKVKARQVRIDEIGRVLDPGFPARTARRKTRG

SEQ ID NO: 425 - protein, 1090 aa, unidentified
  REGION 1..1090: note = Sphingomonas sp. S17
  source 1..1090: note = Sphingomonas sp.
MDWRLGLDLGANSLGWAALRLDRAGDPIGILAMGSRIFSDGRDPKSGASLAVDRRAARAMRRRRDRFKQRQAALLKYLIRDGLFPADQADRQRLADEDPYALRARALDEELSLFEIGRALFHLNQRRGFQSNRKADRGQDDEAGKIAVGVDRLNQQMEEQGARTLGEFLHQRRRAATDANHIPSVRTRLRPETGEGAKGDGYDFYPSRALIAEEFEEIWAAQAPHYPDTLTQQVHDRLYEIIFHQRPLRAPQVGQCTLVAGETRLPKAHPLFQKRRLLEEINALMIVRPGEIAQRLTPEERDTLYLKLKDKRTVSFATLRKTLKLDSAARFNKESENRTELKGDEVAAELGAKTRLGTRWQHLSGDQQWEVVHRLMALESQADEAAFRDWISQTYDLLPEQAAAVLGARLPQGHGRFGPTATTTLIDSLLHDRTEDGRVVVYSEAVQRSGLGHHSDLRHDRDDEDVTELPYYGVALERHIMPGTAEPTDPEEMRIGRLTNPTVHIGLNQLRHVVNRLIRAYGPPKEIAIELARELKLSEDEKKKRNSENRDNRLAAEGRSKKLEEIRQRDTGANRALLKLWEELNPGNVLDRRCIYTGEQISIDMLFSDRVEVDHILPFAQTLDDSNGNKLLCLREANREKRRRSPYEAWGHTDRWPDIAERASRLPKPKRWRFEPDAMQRFATEDGFLARHLVDTQYLGRLAREYLSWLYPGRGEGSGHVWVSPGRLTEMVRRKLGLNDLLPDHNFGGGADQPKNRLDHRHHAIDALVVAIVDRGMLQAIARASGQDGSEGRERIHIPAPWDGFRDDLRVAVNGIIVSHRPDHGTVAKAGLARGRDQTAGRLHNDTAYGLTGETDAKGNSIVVRRIPLSAIKKPADIARVRDPLLRNALAEFTKGLDGKAFEARIGRFHELGPLLYRGIRRVRVVETLTVIPIRDAEGRAYKGYKGDSNYRYDVWEMPDGKWRCQVVSMFDAHQSTEQARPHPAARKILSLQRNDILAIERTEGDRELVRVVKFSEKQFAVAPPHEGGSLKTRDGNADDPFRYLYPSPNTLKGWRARQVRIDELGRVLDPGFPARKSVRRTRPRAAPVD

SEQ ID NO: 426 - protein, 1084 aa, Sporolactobacillus vineae
  REGION 1..1084: note = Sporolactobacillus vineae DSM 21990 = SL153
MKYSIGLDIGISSVGWSVINLDRERIELMGARLFDAAENPKNGSSLAAPRRDARSARRRLRRRRYRVGRVRHFIIDRGLVTRGQADQLFDWKDGDLDIWLVRVNALERLLTDREFARVLIHIAKNRGYRSNRKSEAKSGENGQVLSAIKANKELMEEKGYQTVAEMLVNEPETFAGRKRNRGGEYTHVIARSELEHEIRLIFTKQRAFGNRFATEENENTYVKIWAAQRPVATKDDILKKIGDCTFEKGEKRAPKASYAFQYFRALDKLNRLRILSVREPSRNLTDDERNLIVPALFNHDKQKYSDLRKILQLRDDQKFNELFYDPGKSLKENENKTFLSLAEQYKIRKVIRDVQGKDGLLQYRPLDIDTIAYALTVFKDDQDTRDYLSNTFVNGNGKQVLNLANRAFDAELIDGLLSLSFAKFGHLSLKALHKLIPHMEQGLSYYDACKKVGYHDNEQVGKSKQHLLPVIPADEIRNPVVVRSLSQTRKVINAIIKRYGSPTFMYIELAREMGRPYNERRDLEKQYNKNRTVNDSAIEQIHELYPEIGAPRGHDILKYKLWQQQDCKCAYSLEKIPAEKIFEPGYAEVDHIIPYSRSFDDSNSNKVLVLSRMNQEKKNRTPYEWFGGDEHRWNKFESYVNALKVNRKKKSLLTKKNMDTEEEDTFKSRHLNDTRYITRFIKSFVEDNLLFREIEGAKQHVFTVNGAYTSLMRKRWGFNKNREESDLHHSVDAVIIAVSQPFRNEVSRYFKHREISLPQLLKRTWDYFPEPWEGFVKELRARTLQDPEKLKLALESLDLDSYDPEFIDEVKPIFISRMPKRSIKGQIHDETLRRNRGKTKDGFVKIVTRTRLENIKFDKNGDFPMYGRESDPKTYQAIKQRYLENNKDKKKAFIEPLYKPAKNPNNASLIRSVKIEDKANQIVPLRDEAVAYNASIVRTEVYRNKETGKFYLAPVYVSDVFAGREPRRFIRANVPYEQWVNITDKFTFLFNLYPNDVIYIKMKKVKTTKSNINKTISWQESYFYFKGTDIHTGAITIIDHMNSFTDRVGTQGLQLFEKYQVDPLGNLSRVHGETQYGVPALSHS

SEQ ID NO: 427 - protein, 1053 aa, Staphylococcus aureus; identical to SEQ ID NO: 28
  REGION 1..1053: note = Staphylococcus aureus subsp. aureus

SEQ ID NO: 428 - protein, 1054 aa, Staphylococcus lugdunensis
  REGION 1..1054: note = Staphylococcus lugdunensis M23590
MNQKFILGLDIGITSVGYGLIDYETKNIIDAGVRLFPEANVENNEGRRSKRGSRRLKRRRIHRLERVKKLLEDYNLLDQSQIPQSTNPYAIRVKGLSEALSKDELVIALLHIAKRRGIHKIDVIDSNDDVGNELSTKEQLNKNSKLLKDKFVCQIQLERMNEGQVRGEKNRFKTADIIKEIIQLLNVQKNFHQLDENFINKYIELVEMRREYFEGPGKGSPYGWEGDPKAWYETLMGHCTYFPDELRSVKYAYSADLFNALNDLNNLVIQRDGLSKLEYHEKYHIIENVFKQKKKPTLKQIANEINVNPEDIKGYRITKSGKPQFTEFKLYHDLKSVLFDQSILENEDVLDQIAEILTIYQDKDSIKSKLTELDILLNEEDKENIAQLTGYTGTHRLSLKCIRLVLEEQWYSSRNQMEIFTHLNIKPKKINLTAANKIPKAMIDEFILSPVVKRTFGQAINLINKIIEKYGVPEDIIIELARENNSKDKQKFINEMQKKNENTRKRINEIIGKYGNQNAKRLVEKIRLHDEQEGKCLYSLESIPLEDLLNNPNHYEVDHIIPRSVSFDNSYHNKVLVKQSENSKKSNLTPYQYFNSGKSKLSYNQFKQHILNLSKSQDRISKKKKEYLLEERDINKFEVQKEFINRNLVDTRYATRELTNYLKAYFSANNMNVKVKTINGSFTDYLRKVWKFKKERNHGYKHHAEDALIIANADFLFKENKKLKAVNSVLEKPEIESKQLDIQVDSEDNYSEMFIIPKQVQDIKDFRNFKYSHRVDKKPNRQLINDTLYSTRKKDNSTYIVQTIKDIYAKDNTTLKKQFDKSPEKFLMYQHDPRTFEKLEVIMKQYANEKNPLAKYHEETGEYLTKYSKKNNGPIVKSLKYIGNKLGSHLDVTHQFKSSTKKLVKLSIKPYRFDVYLTDKGYKFITISYLDVLKKDNYYYIPEQKYDKLKLGKAIDKNAKFIASFYKNDLIKLDGEIYKIIGVNSDTRNMIELDLPDIRYKEYCELNNIKGEPRIKKTIGKKVNSIEKLTTDVLGNVFTNTQYTKPQLLFKRGN

SEQ ID NO: 429 - protein, 1334 aa, Staphylococcus pseudintermedius
MGRKPYILSLDIGTGSVGYACMDKGFNVLKYHDKDALGVYLFDGALTAQERRQFRTSRRRKNRRIKRLGLLQELLAPLVQNPNFYQFQRQFAWKNDNMDFKNKSLSEVLSFLGYESKKYPTIYHLQEALLLKDEKFDPELIYMALYHLVKYRGHFLFDHLKIENLTNNDNMHDFVELIETYENLNNIKLNLDYEKTKVIYEILKDNEMTKNDRAKRVKNMEKKLEQFSIMLLGLKFNEGKLFNHADNAEELKGANQSHTFADNYEENLTPFLTVEQSEFIERANKIYLSLTLQDILKGKKSMAMSKVAAYDKFRNELKQVKDIVYKADSTRTQFKKIFVSSKKSLKQYDATPNDQTFSSLCLFDQYLIRPKKQYSLLIKELKKIIPQDSELYFEAENDTLLKVLNTTDNASIPMQINLYEAETILRNQQKYHAEITDEMIEKVLSLIQFRIPYYVGPLVNDHTASKFGWMERKSNESIKPWNFDEVVDRSKSATQFIRRMTNKCSYLINEDVLPKNSLLYQEMEVLNELNATQIRLQTDPKNRKYRMMPQIKLFAVEHIFKKYKTVSHSKFLEIMLNSNHRENFMNHGEKLSIFGTQDDKKFASKLSSYQDMTKIFGDIEGKRAQIEEIIQWITIFEDKKILVQKLKECYPELTSKQINQLKKLNYSGWGRLSEKLLTHAYQGHSIIELLRHSDENFMEILTNDVYGFQNFIKEENQVQSNKIQHQDIANLTTSPALKKGIWSTIKLVRELTSIFGEPEKIIMEFATEDQQKGKKQKSRKQLWDDNIKKNKLKSVDEYKYIIDVANKLNNEQLQQEKLWLYLSQNGKCMYSGQSIDLDALLSPNATKHYEVDHIFPRSFIKDDSIDNKVLVIKKMNQTKGDQVPLQFIQQPYERIAYWKSLNKAGLISDSKLHKLMKPEFTAMDKEGFIQRQLVETRQISVHVRDFLKEEYPNTKVIPMKAKMVSEFRKKFDIPKIRQMNDAHHAIDAYLNGVVYHGAQLAYPNVDLFDFNFKWEKVREKWKALGEFNTKQKSRELFFFKKLEKMEVSQGERLISKIKLDMNHFKINYSRKLANIPQQFYNQTAVSPKTAELKYESNKSNEVVYKGLTPYQTYVVAIKSVNKKGKEKMEYQMIDHYVFDFYKFQNGNEKELALYLAQRENKDEVLDAQIVYSLNKGDLLYINNHPCYFVSRKEVINAKQFELTVEQQLSLYNVMNNKETNVEKLLIEYDFIAEKVINEYHHYLNSKLKEKRVRTFFSESNQTHEDFIKALDELFKVVTASATRSDKIGSRKNSMTHRAFLGKGKDVKIAYTSISGLKTTKPKSLFKLAESRNEL

SEQ ID NO: 430 - protein, 1334 aa, Staphylococcus pseudintermedius; identical to SEQ ID NO: 429
  REGION 1..1334: note = Staphylococcus pseudintermedius ED99

SEQ ID NO: 431 - protein, 1112 aa, Staphylococcus simulans
  REGION 1..1112: note = Staphylococcus simulans ACS-120-V-Sch1
MLVGLKFKQSILFENMENAEDIKESATGSDAISLSDDYYENLSEFLTDEQLNFIESANTFFMGIMLDRILKGATSISAAKVRDYKIFKSQLKLIKDIVYQNKYDKYHEFFVTSKEDMRAYQENPDAKNFGKLSKFDQYLIHSKDQYAKLMKDLKGLVPKEYTEVLNLIDEQKFLVVQNTTDNASIPYQNNVFEAENILRNQQKYYPEITEEMIGKVINLISFRIPYYVGPLTNKNGQSDFAWMIRKSDEQTLPWNFDKVIDKSKSAEKFIRRMTSKCTYLLEEDVLPKHSLLYQEMEVLNELNNVQLRGENEPKHRIHRLDPKVKQFIYHNLFQKKKNVTHKDLITLLQNSEHRNTLNKTSGQKLKVFGTQNDSKFASKLSTYNDMKAILGSVENKRQMIEELVLWITIFEDKAILKQKIGEKYPNITEKQLNQIVKLNYSGWGRLSEKLLTKEVNGRSLIDLMYSTENNFMEIITDKTLGFDCFIKNSNKVKNAKISYKDVAELRTSPALKKGIWNAIKMVREISNLFGAPEKIIIEFATEDQAKGKRQKSRSELWDDLVKKNNLKRNKEFEGLFEELKAYPDLDFSNPKLWLYIHQNGKCMYTKKPIDLERLMSDTNNQLYEIDHILPRTFVKDDSINNKVLVIQSANQKKSGDKMPLEIFDNHVLVPFWKMLYENDLISSSKLSKLMKKEFNDLDKEGFIQRQLVETRQIISHVSDFLTEEYPSTTVVPMKANVVSELRRKFDIPKIRQLNDWHHAVDAYLNGFVYQAARVFYPKVNLFEFNFKWEKVREKWRQLGEFTENNKKREFFLFKRMENYVNEYGEGMISKLIFDLDNFKFNYSRKVESTESAFYKQSAFSPKNTTAQYDSDKNKTAIYKEMKNKRGIVVSYTYVKKDQELIGYGVFNETVFEYVNNADVDMNTRALKIVRKAFPKLDIKKAQYLFSINKGDALLVNGHPFLFVSAYERINGKQLEFDIAMQRKIKQALSPYNNMTEQEKVEFYNQFAEKVIEEFRNSIGLQSRDRKVNLIKNLFNNTEKSNDSMTQSILEVLKMTKVSAERSKELKIRWNGQTPNTFIDTKNNAEIQYKSITGLKTTKPKSIFKLAESKNEL

SEQ ID NO: 432 - protein, 1370 aa, Streptococcus agalactiae
  REGION 1..1370: note = Streptococcus agalactiae 2603V/R
MNKPYSIGLDIGTNSVGWSIITDDYKVPAKKMRVLGNTDKEYIKKNLIGALLFDGGNTAADRRLKRTARRRYTRRRNRILYLQEIFAEEMSKVDDSFFHRLEDSFLVEEDKRGSKYPIFATLQEEKDYHEKFSTIYHLRKELADKKEKADLRLIYIALAHIIKFRGHFLIEDDSFDVRNTDISKQYQDFLEIFNTTFENNDLLSQNVDVEAILTDKISKSAKKDRILAQYPNQKSTGIFAEFLKLIVGNQADFKKYFNLEDKTPLQFAKDSYDEDLENLLGQIGDEFADLFSAAKKLYDSVLLSGILTVIDLSTKAPLSASMIQRYDEHREDLKQLKQFVKASLPEKYQEIFADSSKDGYAGYIEGKTNQEAFYKYLSKLLTKQEDSENFLEKIKNEDFLRKQRTFDNGSIPHQVHLTELKAIIRRQSEYYPFLKENQDRIEKILTFRIPYYIGPLAREKSDFAWMTRKTDDSIRPWNFEDLVDKEKSAEAFIHRMTNNDFYLPEEKVLPKHSLIYEKFTVYNELTKVRYKNEQGETYFFDSNIKQEIFDGVFKEHRKVSKKKLLDFLAKEYEEFRIVDVIGLDKENKAFNASLGTYHDLEKILDKDFLDNPDNESILEDIVQTLTLFEDREMIKKRLENYKDLFTESQLKKLYRRHYTGWGRLSAKLINGIRDKESQKTILDYLIDDGRSNRNFMQLINDDGLSFKSIISKAQAGSHSDNLKEVVGELAGSPAIKKGILQSLKIVDELVKVMGYEPEQIVVEMARENQTTNQGRRNSRQRYKLLDDGVKNLASDLNGNILKEYPTDNQALQNERLFLYYLQNGRDMYTGEALDIDNLSQYDIDHIIPQAFIKDDSIDNRVLVSSAKNRGKSDDVPSLEIVKDCKVFWKKLLDAKLMSQRKYDNLTKAERGGLTSDDKARFIQRQLVETRQITKHVARILDERFNNELDSKGRRIRKVKIVTLKSNLVSNFRKEFGFYKIREVNNYHHAHDAYLNAVVAKAILTKYPQLEPEFVYGDYPKYNSYKTRKSATEKLFFYSNIMNFFKTKVTLADGTVVVKDDIEVNNDTGEIVWDKKKHFATVRKVLSYPQNNIVKKTEIQTGGFSKESILAHGNSDKLIPRKTKDIYLDPKKYGGFDSPIVAYSVLVVADIKKGKAQKLKTVTELLGITIMERSRFEKNPSAFLESKGYLNIRADKLIILPKYSLFELENGRRRLLASAGELQKGNELALPTQFMKFLYLASRYNESKGKPEEIEKKQEFVNQHVSYFDDILQLINDFSKRVILADANLEKINKLYQDNKENISVDELANNIINLFTFTSLGAPAAFKFFDKIVDRKRYTSTKEVLNSTLIHQSITGLYETRIDLGKLGED

SEQ ID NO: 433 - protein, 1377 aa, Streptococcus agalactiae
  REGION 1..1377: note = Streptococcus agalactiae 515
MNKPYSIGLDIGTNSVGWSIITDDYKVPAKKMRVLGNTDKEYIKKNLIGALLFDGGNTAADRRLKRTARRRYTRRRNRILYLQEIFAEEMSKVDDSFFHRLEDSFLVEEDKRGSKYPIFATMQEEKYYHEKFPTIYHLRKELADKKEKADLRLVYLALAHIIKFRGHFLIEDDRFDVRNTDIQKQYQAFLEIFDTTFENNHLLSQNVDVEAILTDKISKSAKKDRILAQYPNQKSTGIFAEFLKLIVGNQADFKKHFNLEDKTPLQFAKDSYDEDLENLLGQIGDEFADLFSVAKKLYDSVLLSGILTVTDLSTKAPLSASMIQRYDEHHEDLKHLKQFVKASLPENYREVFADSSKDGYAGYIEGKTNQEAFYKYLLKLLTKQEGSEYFLEKIKNEDFLRKQRTFDNGSIPHQVHLTELRAIIRRQSEYYPFLKENQDRIEKILTFRIPYYVGPLAREKSDFAWMTRKTDDSIRPWNFEDLVDKEKSAEAFIHRMTNNDLYLPEEKVLPKHSLIYEKFTVYNELTKVRFLAEGFKDFQFLNRKQKETIFNSLFKEKRKVTEKDIISFLNKVDGYEGIAIKGIEKQFNASLSTYHDLKKILGKDFLDNTDNELILEDIVQTLTLFEDREMIKKCLDIYKDFFTESQLKKLYRRHYTGWGRLSAKLINGIRNKENQKTILDYLIDDGSANRNFMQLINDDDLSFKPIIDKARTGSHSDNLKEVVGELAGSPAIKKGILQSLKIVDELVKVMGYEPEQIVVEMARENQTTAKGLSRSRQRLTTLRESLANLKSNILEEKKPKYVKDQVENHHLSDDRLFLYYLQNGRDMYTKKALDIDNLSQYDIDHIIPQAFIKDDSIDNRVLVSSAKNRGKSDDVPSIEIVKARKMFWKNLLDAKLMSQRKYDNLTKAERGGLTSDDKARFIQRQLVETRQITKHVARILDERFNNEVDNGKKICKVKIVTLKSNLVSNFRKEFGFYKIREVNDYHHAHDAYLNAVVAKAILTKYPQLEPEFVYGMYRQKKLSKIVHEDKEEKYSEATRKMFFYSNLMNMFKRVVRLADGSIVVRPVIETGRYMGKTAWDKKKHFATVRKVLSYPQNNIVKKTEIQTGGFSKESILAHGNSDKLIPRKTKDIYLDPKKYGGFDSPIVAYSVLVVADIKKGKAQKLKTVTELLGITIMERSRFEKNPSAFLESKGYLNIRDDKLMILPKYSLFELENGRRRLLASAGELQKGNELALPTQFMKFLYLASRYNESKGKPEEIEKKQEFVNQHVSYFDDILQLINDFSKRVILADANLEKINKLYQDNKENIPVDELANNIINLFTFTSLGAPAAFKFFDKIVDRKRYTSTKEVLNSTLIHQSITGLYETRIDLGKLGED

SEQ ID NO: 434 - protein, 1370 aa, Streptococcus agalactiae; identical to SEQ ID NO: 432

SEQ ID NO: 435 - protein, 1378 aa, Streptococcus agalactiae
  REGION 1..1378: note = Streptococcus agalactiae ATCC 13813
MNKPYSIGLDIGTNSVGWSIITDDYKVPAKKMRVLGNTDKEYIKKNLIGALLFDGGNTAADRRLKRTARRRYTRRRNRILYLQEIFAEEMSKVDDSFFHRLEDSFLVEEDKRGSKYPIFATMQEEKYYHEKFPTIYHLRKELADKKEKADLRLIYLALAHIIKFRGHFLIEDDRFDVRNTDIQKQYQAFLEIFDTTFENNDLLSQNVDVEAILTDKISKSAKKDRILARYPNQKSTGIFAEFLKLIVGNQADFKKHFNLEDKTPLQFAKDSYDEDLENLLGQIGDEFADLFSAAKKLYDSVLLSGILTVIDLSTKAPLSASMIQRYDEHHEDLKHLKQFVKASLPENYREVFADSSKDGYAGYIEGKTSQEAFYKYLLKLLTKQEGSEYLLEKIKNEDFLRKQRTFDNGSIPHQVHLTELRAIIRRQSEYYPFLKENLDRIEKILTFRIPYYVGPLAREKSDFAWMTRKTDDSIRPWNFEDLVDKEKSAEAFIHRMTNNDLYLPEEKVLPKHSLIYEKFTVYNELTKVRFLAEGFKDFQFLNRKQKETIFNSLFKEKRKVTEKDIISFLNKVDGYEGIAIKGIEKQFNASLSTYHDLKKILGKDFLDNTDNELILEDIIQTLTLFEDREMIKKRLDIYKDFFTESQLKKLYRRHYTGWGRLSAKLINGIRNKENQKTILDYLIDDGSANRNFMQLIKDAGLSFKPIIDKARTGSHSDNLKEVVGELAGSPAIKKGILQSLKIVDELVKVMGYEPEQIVVEMARENQTTAKGLSRSRQRLTTLRESLGNLKSNILEEKKPKYVKDQVENHHLSDDRLFLYYLQNGKDMYTDDELDIDNLSQYDIDHIIPQAFIKDDSIDNRVLVSSAKNRGKSDDVPSIEIVKARKMFWKNLLDAKLMSQRKYDNLTKAERGGLTSDDKARFIQRQLVETRQITKHVARILDERFNNELDSKGRRIRKVKIVTLKSNLVSNFRKEFGFYKIREVNNYHHAHDAYLNAVVAKAILTKYPQLEPEFVYGLYRRKKLSKIVREDKEEKYSEATRKMFFYSNLMNMFKRVVRLADGSIVVRPVIETGRYMGKTAWDKKKHFATVRKVLSYPQNNIVKKTEIQTGGFSKESILAHGNSDKLIPRKTKDIYLDPKKYGGFDSPIVAYSVLVVADIKKGKAQKLKTVTELLGITIMERSRFEKNTSAFLESKGYLNIRDDKLMILPKYSLFELENGRRRLLASAGELQKGNELALPTQFMKFLYLASRYNESKGKPEEIEKKQEFVNQHVSYFDDILQLINDFSNRVILADANLEKINKLYQDNKENIPVDELANNIINLFTFTSLGAPAAFKFFDKIVDRKRYTSTKEVLNSTLIHQSITGLYETRIDLGKLGEG

SEQ ID NO: 436 - protein, 1370 aa, Streptococcus agalactiae
  REGION 1..1370: note = Streptococcus agalactiae CJB111
  MOD_RES 117: note = Any amino acid
MNKPYSIGLDIGTNSVGWSIITDDYKVPAKKMRVLGNTDKEYIKKNLIGALLFDGGNTAADRRLKRTARRRYTRRRNRILYLQEIFAEEMSKVDDSFFHRLEDSFLVEEDKRGSKYXIFATLQEEKDYHEKFSTIYHLRKELADKKEKADLRLIYIALAHIIKFRGHFLIEDDSFDVRNTDISKQYQDFLEIFNTTFENNDLLSQNVDVEAILTDKISKSAKKDRILAQYPNQKSTGIFAEFLKLIVGNQADFKKYFNLEDKTPLQFAKDSYDEDLENLLGQIGDEFADLFSAAKKLYDSVLLSGILTVIDLSTKAPLSASMIQRYDEHREDLKQLKQFVKASLPEKYQEIFADSSKDGYAGYIEGKTNQEAFYKYLSKLLTKQEDSENFLEKIKNEDFLRKQRTFDNGSIPHQVHLTELKAIIRRQSEYYPFLKENQDRIEKILTFRIPYYIGPLAREKSDFAWMTRKTDDSIRPWNFEDLVDKEKSAEAFIHRMTNNDFYLPEEKVLPKHSLIYEKFTVYNELTKVRYKNEQGETYFFDSNIKQEIFDGVFKEHRKVSKKKLLDFLAKEYEEFRIVDVIGLDKENKAFNASLGTYHDLEKILDKDFLDNPDNESILEDIVQTLTLFEDREMIKKRLENYKDLFTESQLKKLYRRHYTGWGRLSAKLINGIRDKESQKTILDYLIDDGRSNRNFMQLINDDGLSFKSIISKAQAGSHSDNLKEVVGELAGSPAIKKGILQSLKIVDELVKVMGYEPEQIVVEMARENQTTNQGRRNSRQRYKLLDDGVKNLASDLNGNILKEYPTDNQALQNERLFLYYLQNGRDMYTGEALDIDNLSQYDIDHIIPQAFIKDDSIDNRVLVSSAKNRGKSDDVPSLEIVKDCKVFWKKLLDAKLMSQRKYDNLTKAERGGLTSDDKARFIQRQLVETRQITKHVARILDERFNNELDSKGRRIRKVKIVTLKSNLVSNFRKEFGFYKIREVNNYHHAHDAYLNAVVAKAILTKYPQLEPEFVYGDYPKYNSYKTRKSATEKLFFYSNIMNFFKTKVTLADGTVVVKDDIEVNNDTGEIVWDKKKHFATVRKVLSYPQNNIVKKTEIQTGGFSKESILAHGNSDKLIPRKTKDIYLDPKKYGGFDSPIVAYSVLVVADIKKGKAQKLKTVTELLGITIMERSRFEKNPSAFLESKGYLNIRADKLIILPKYSLFELENGRRRLLASAGELQKGNELALPTQFMKFLYLASRYNESKGKPEEIEKKQEFVNQHVSYFDDILQLINDFSKRVILADANLEKINKLYQDNKENISVDELANNIINLFTFTSLGAPAAFKFFDKIVDRKRYTSTKEVLNSTLIHQSITGLYETRIDLGKLGED

SEQ ID NO: 437 - protein, 1370 aa, Streptococcus agalactiae
  REGION 1..1370: note = Streptococcus agalactiae COH1
MNKPYSIGLDIGTNSVGYSVVTDDYKVPAKKMRVLGNTDKEYIKKNLIGALLFDGGNTASDRRLKRTARRRYTRRRNRILYLQEIFAEEMSKVDDSFFHRLEDSFLVEDDKRGSKYPIFATMQEEKDYHEKFPTIYHLRKELADKKEKANLRLVYLALAHIIKFRGHFLIEDDSFDVRNTDIQRQYQAFLEIFDTTFENNHLLSQNIDVEGILTDKISKSAKKDRILAQYPNQKSTGIFAEFLKLIVGNQADFKKHFNLEDKTPLQFAKDSYDEDLENLLGQIGDEFADLFSVAKKLYDSVLLSGILTVTDLSTKAPLSASMIQRYDEHREDLKQLKQFVKASLPEKYQEIFTDSSKDGYAGYIEGKTNQGAFYKYLSKLLTKQEGSEYFLEKIKNEDFLRKQRTFDNGSIPHQVHLTELKAIIRRQSEYYPFLKENLDRIEKILTFRIPYYVGPLAREKSDFAWMTRKTDDSIRPWNFEELVDKEASAEAFIHRMTNNDLYLPEEKVLPKHSLIYEKFTVYNELTKVRYKNEQGETYFFDSNIKQEIFDGVFKEHRKVSKKKLLDFLAKEYEEFRIVDVIGLDKENKAFNASLGTYHDLKKILDKDFLDNPDNESILEDIVQTLTLFEDREMIKKRLENYKDLFTESQLKKLYRRHYTGWGRLSAKLINGIRDKESQKTILDYLISDGRANRNFMQLIHDDGLSFKPIIDKAQAGSHSDNLKEVVGELAGSPAIKKGILQSLKIVDELVKVMGYEPEQVVVEMARENQTTNQGRRNTRQRYKLLEEGVKNLASDLNGNILKEYPTDNQALQNERLFLYYLQNGRDMYTGEALDIDNLSQYDIDHIVPQAFIKDDSIDNRVLVSSAKNRGKSDNVPSIDIVKARKAFWKKLLDAKLMSQRKYDNLTKAERGGLTSDDKARFIQRQLVETRQITKHVARILDERFNNELDSKGRRIRKVKIVTLKSNLVSNFRKEFGFYKIREVNDYHHAHDAYLNAVVAKAILTKYPQLEPEFVYGDYPKYNSYKTRKSATEKLFFYSNIMNFFKTKVTLADGTVVVKDDIEVNNDTGEIVWDKKKHFATVRKVLSYPQVNIVKKTEIQTGGFSKESILAHGNSDKLIPRKTKDIYLDPKKYGGFDSPIVAYSVLVVADIKKGKAQKLKTVTELLGITIMERFRFEKNPSAFLESKGYLNIRDDKLMILPKYSLFELENGRRRLLASAGELQKGNELALPTQYMKFLYLASRYNELKGKPEEIEQKQEFVVQHVSYFDDILQIINDFSNRVILADANLEKINKLYQDNKENISVDELANNIINLFTFTSLGAPAAFKFFDKIVDRKRYTSTKEVLNSTLIHQSITGLYETRIDLGKLGED

SEQ ID NO: 438 - protein, 1370 aa, Streptococcus agalactiae
  REGION 1..1370: note = Streptococcus agalactiae FSL S3-026
MNKPYSIGLDIGTNSVGWSIITDDYKVPAKKMRVLGNTDKEYIKKNLIGALLFDGGNTAADRRLKRTARRRYTRRRNRILYLQEIFAEEMSKVDDSFFHRLEDSFLVEEDKRGSKYPIFATMQEEKYYHEKFPTIYHLRKELADKKEKADLRLIYLALAHIIKFRGHFLIEDDRFDVRNTDIQKQYQAFLEIFDTTFENNDLLSQNVDVEAILTDKISKSAKKDRILARYPNQKSTGIFAEFLKLIVGNQADFKKHFNLEDKTPLQFAKDSYDEDLENLLGQIGDEFADLFSAAKKLYDSVLLSGILTVTDLSTKAPLSASMIQRYDEHREDLKQLKQFVKASLPEKYQEIFADSSKDGYAGYIEGKTNQEAFYKYLSKLLTKQEGSEYLLEKIKNEDFLRKQRTFDNGSIPHQVHLTELRAIIRRQSEYYPFLKENLDRIEKILTFRIPYYVGPLAREKSDFAWMTRKTDDSIRPWNFEDLVDKEKSAEAFIHRMTNNDLYLPEEKVLPKHSLIYEKFTVYNELTKVRFLAEGFKDFQFLNRKQKETIFNSLFKEKRKVTEKDIISFLNKVDGYEGIAIKGIEKQFNASLSTYHDLKKILGKDFLDNTDNELILEDIVQTLTLFEDREMIRKRLDIYKDFFTESQLKKLYRRHYTGWGRLSAKLINGIRNKENQKTILDYLIDDGSANRNFMQLIKDAGLSFKPIIDKARTGSHSDNLKEVVGELAGSPAIKKGILQSLKIVDELVKVMGYEPEQIVVEMARENQTTAKGLSRLRQRLTTLRESLANLKSNILEEKKPKYVKDQVENHHLSDDRLFLYYLQNGKDMYTDDELDIDNLSQYDIDHIIPQAFIKDDSIDNRVLVSSAKNRGKSDDVPSVEIVKDCKVFWKKLLDAKLMSQRKYDNLTKAERGGLTSDDKARFIQRQLVETRQITKHVARILDERFNNELDSKGRRIRKVKIVTLKSNLVSNFRKEFGFYKIREVNNYHHAHDAYLNAVVAKAILTKYPQLEPEFVYGDYPKYNSYKTRKSATEKLFFYSNIMNFFKTKVTLADGTVVVKDDIEVNNDTGEIVWDKKKHFATVRKVLSYPQVNIVKKTEIQTGGFSKESILAHGNSDKLIPRKTKDIYLDPKKYGGFDSPIVAYSVLVVADIKKGKAQKLKTVTELLGITIMERSRFEKNPSAFLESKGYLNIRDDKLMILPKYSLFELENGRRRLLASADELQKGNELALPTQFMKFLYLASRYNELKGKPEEIEQKQEFVVQHVSYFDDILQIINDFSNRVILADANLEKINKLYQDNKENIPVDELANNIINLFTFTSLGAPAAFKFFDKIVDRKRYTSTKEVLNSTLIHQSITGLYETRIDLGKLGED

SEQ ID NO: 439 - protein, 1370 aa, Streptococcus agalactiae
  REGION 1..1370: note = Streptococcus agalactiae GB00112
MNKPYSIGLDIGTNSVGYSVVTDDYKVPAKKMRVLGNTDKEYIKKNLIGALLFDGGNTASDRRLKRTARRRYTRRRNRILYLQEIFAEEMSKVDDSFFHRLEDSFLVEDDKRGSKYPIFATMQEEKDYHEKFPTIYHLRKELADKKEKADLRLVYLALAHIIKFRGHFLIEDDSFDVRNTDIQRQYQAFLEIFDTTFENNHLLSQNIDVEGILTDKISKSAKKDRILAQYPNQKSTGIFAEFLKLIVGNQADFKKHFNLEDKTPLQFAKDSYDEDLENLLGQIGDEFADLFSVAKKLYDSVLLSGILTVTDLSTKAPLSASMIQRYDEHREDLKQLKQFVKASLPEKYQEIFTDSSKDGYAGYIEGKTNQGAFYKYLSKLLTKQEGSEYFLEKIKNEDFLRKQRTFDNGSIPHQVHLTELKAIIRRQSEYYPFLKENLDRIEKILTFRIPYYVGPLAREKSDFAWMTRKTDDSIRPWNFEELVDKEASAEAFIHRMTNNDLYLPEEKVLPKHSLIYEKFTVYNELTKVRYKNEQGETYFFDSNIKQEIFDGVFKEHRKVSKKKLLDFLAKEYEEFRIVDVIGLDKENKAFNASLGTYHDLKKILDKDFLDNPDNESILEDIVQTLTLFEDREMIKKRLENYKDLFTESQLKKLYRRHYTGWGRLSAKLINGIRDKESQKTILDYLISDGRANRNFMQLIHDDGLSFKPIIDKAQAGSHSDNLKEVVGELAGSPAIKKGILQSLKIVDELVKVMGYEPEQVVVEMARENQTTNQGRRNTRQRYKLLEEGVKNLASDLNGNILKEYPTDNQALQNERLFLYYLQNGRDMYTGEALDIDNLSQYDIDHIVPQAFIKDDSIDNRVLVSSAKNRGKSDNVPSIDIVKARKAFWKKLLDAKLMSQRKYDNLTKAERGGLTSDDKARFIQRQLVETRQITKHVARILDERFNNELDSKGRRIRKVKIVTLKSNLVSNFRKEFGFYKIREVNDYHHAHDAYLNAVVAKAILTKYPQLEPEFVYGDYPKYNSYKTRKSATEKLFFYSNIMNFFKTKVTLADGTVVVKDDIEVNNDTGEIVWDKKKHFATVRKVLSYPQVNIVKKTEIQTGGFSKESILAHGNSDKLIPRKTKDIYLDPKKYGGFDSPIVAYSVLVVADIKKGKAQKLKTVTELLGITIMERFRFEKNPSAFLESKGYLNIRDDKLMILPKYSLFELENGRRRLLASAGELQKGNELALPTQYMKFLYLASRYNELKGKPEEIEQKQEFVVQHVSYFDDILQIINDFSNRVILADANLEKINKLYQDNKENISVDELANNIINLFTFTSLGAPAAFKFFDKIVDRKRYTSTKEVLNSTLIHQSITGLYETRIDLGKLGED

SEQ ID NO: 440 - protein, 1370 aa, Streptococcus agalactiae
  REGION 1..1370: note = Streptococcus agalactiae H36B
  MOD_RES 9: note = Any amino acid
MNKPYSIGXDIGTNSVGWSIITDDYKVPAKKMRVLGNTDKEYIKKNLIGALLFDGGNTAADRRLKRTARRRYTRRRNRILYLQEIFAEEMSKVDDSFFHRLEDSFLVEEDKRGSKYPIFATLQEEKDYHEKFSTIYHLRKELADKKEKADLRLIYIALAHIIKFRGHFLIEDDSFDVRNTDISKQYQDFLEIFNTTFENNDLLSQNVDVEAILTDKISKSAKKDRILAQYPNQKSTGIFAEFLKLIVGNQADFKKYFNLEDKTPLQFAKDSYDEDLENLLGQIGDEFADLFSAAKKLYDSVLLSGILTVIDLSTKAPLSASMIQRYDEHREDLKQLKQFVKASLPEKYQEIFADSSKDGYAGYIEGKTNQEAFYKYLSKLLTKQEDSENFLEKIKNEDFLRKQRTFDNGSIPHQVHLTELKAIIRRQSEYYPFLKENQDRIEKILTFRIPYYIGPLAREKSDFAWMTRKTDDSIRPWNFEDLVDKEKSAEAFIHRMTNNDFYLPEEKVLPKHSLIYEKFTVYNELTKVRYKNEQGETYFFDSNIKQEIFDGVFKEHRKVSKKKLLDFLAKEYEEFRIVDVIGLDKENKAFNASLGTYHDLEKILDKDFLDNPDNESILEDIVQTLTLFEDREMIKKRLENYKDLFTESQLKKLYRRHYTGWGRLSAKLINGIRDKESQKTILDYLIDDGRSNRNFMQLINDDGLSFKSIISKAQAGSHSDNLKEVVGELAGSPAIKKGILQSLKIVDELVKVMGYEPEQIVVEMARENQTTNQGRRNSRQRYKLLDDGVKNLASDLNGNILKEYPTDNQALQNERLFLYYLQNGRDMYTGEALDIDNLSQYDIDHIIPQAFIKDDSIDNRVLVSSAKNRGKSDDVPSLEIVKDCKVFWKKLLDAKLMSQRKYDNLTKAERGGLTSDDKARFIQRQLVETRQITKHVARILDERFNNELDSKGRRIRKVKIVTLKSNLVSNFRKEFGFYKIREVNNYHHAHDAYLNAVVAKAILTKYPQLEPEFVYGDYPKYNSYKTRKSATEKLFFYSNIMNFFKTKVTLADGTVVVKDDIEVNNDTGEIVWDKKKHFATVRKVLSYPQNNIVKKTEIQTGGFSKESILAHGNSDKLIPRKTKDIYLDPKKYGGFDSPIVAYSVLVVADIKKGKAQKLKTVTELLGITIMERSRFEKNPSAFLESKGYLNIRADKLIILPKYSLFELENGRRRLLASAGELQKGNELALPTQFMKFLYLASRYNESKGKPEEIEKKQEFVNQHVSYFDDILQLINDFSKRVILADANLEKINKLYQDNKENISVDELANNIINLFTFTSLGAPAAFKFFDKIVDRKRYTSTKEVLNSTLIHQSITGLYETRIDLGKLGED

SEQ ID NO: 441 - protein, 1377 aa, Streptococcus agalactiae
MNKPYSIGLDIGTNSVGWSIITDDYKVPAKKMRVLGNTDKEYIKKNLIGALLFDGGNTAADRRLKRTARRRYTRRRNRILYLQEIFAEEMSKVDDSFFHRLEDSFLVEEDKRGSKYPIFATMQEEKYYHEKFPTIYHLRKELADKKEKADLRLVYLALAHIIKFRGHFLIEDDRFDVRNTDIQKQYQAFLEIFDTTFENNHLLSQNVDVEAILTDKISKSAKKDRILAQYPNQKSTGIFAEFLKLIVGNQADFKKHFNLEDKTPLQFAKDSYDEDLENLLGQIGDEFADLFSVAKKLYDSVLLSGILTVTDLSTKAPLSASMIQRYDEHHEDLKHLKQFVKASLPENYREVFADSSKDGYAGYIEGKTNQEAFYKYLLKLLTKQEGSEYFLEKIKNEDFLRKQRTFDNGSIPHQVHLTELRAIIRRQSEYYPFLKENQDRIEKILTFRIPYYVGPLAREKSDFAWMTRKTDDSIRPWNFEDLVDKEKSAEAFIHRMTNNDLYLPEEKVLPKHSLIYEKFTVYNELTKVRFLAEGFKDFQFLNRKQKETIFNSLFKEKRKVTEKDIISFLNKVDGYEGIAIKGIEKQFNASLSTYHDLKKILGKDFLDNTDNELILEDIVQTLTLFEDREMIKKCLDIYKDFFTESQLKKLYRRHYTGWGRLSAKLINGIRNKENQKTILDYLIDDGSANRNFMQLINDDDLSFKPIIDKARTGSHSDNLKEVVGELAGSPAIKKGILQSLKIVDELVKVMGYEPEQIVVEMARENQTTAKGLSRSRQRLTTLRESLANLKSNILEEKKPKYVKDQVENHHLSDDRLFLYYLQNGRDMYTKKALDIDNLSQYDIDHIIPQAFIKDDSIDNRVLVSSAKNRGKSDDVPSIEIVKARKMFWKNLLDAKLMSQRKYDNLTKAERGGLTSDDKARFIQRQLVETRQITKHVARILDERFNNEVDNGKKICKVKIVTLKSNLVSNFRKEFGFYKIREVNDYHHAHDAYLNAVVAKAILTKYPQLEPEFVYGMYRQKKLSKIVHEDKEEKYSEATRKMFFYSNLMNMFKRVVRLADGSIVVRPVIETGRYMRKTAWDKKKHFATVRKVLSYPQNNIVKKTEIQTGGFSKESILAHGNSDKLIPRKTKDIYLDPKKYGGFDSPIVAYSVLVVADIKKGKAQKLKTVTELLGITIMERSRFEKNPSAFLESKGYLNIRDDKLMILPKYSLFELENGRRRLLASAGELQKGNELALPTQFMKFLYLASRYNESKGKPEEIEKKQEFVNQHVSYFDDILQLINDFSKRVILADANLEKINKLYQDNKENIPVDELANNIINLFTFTSLGAPAAFKFFDKIVDRKRYTSTKEVLNSTLIHQSITGLYETRIDLGKLGED

SEQ ID NO: 442 - protein, 1370 aa, Streptococcus agalactiae
MNKPYSIGLDIGTNSVGWSIITDDYKVPAKKMRVLGNTDKEYIKKNLIGALLFDGGNTAADRRLKRTARRRYTRRRNRILYLQEIFAEEMSKVDDSFFHRLEDSFLVEEDKRGSKYPIFATMQEEKDYHEKFPTIYHLRKELADKKEKADLRLVYLALAHIIKFRGHFLIEDDRFDVRNTDIQKQYQAFLEIFDTSFENNHLLSQNVDVEAILTDKISKSAKKDRILAQYPNQKSTGIFAEFLKLIVGNQADFKKHFNLEDKTPLQFAKDSYDEDLENLLGQIGDEFADLFSAAKKLYDSVLLSGILTVTDLSTKAPLSASMIQRYDEHREDLKQLKQFVKASLPEKYQEIFADSSKDGYAGYIEGKTNQEAFYKYLSKLLTKQEDSEYFLEKIKNEDFLRKQRTFDNGSIPHQVHLTELKAIIRRQSEYYPFLKENQDKIEKILTFRIPYYVGPLARGNSDFAWMTRKTDDSIRPWNFEDLVDKEKSAEAFIHRMTNNDLYLPEEKVLPKHSLIYEKFTVYNELTKVRYKNEQGETYFFDSNVKQEIFDGVFKEHRKVSKKQLLDFLAKEFEEFRIVDVTGLDKENKAFNASLGTYHDLKKILDKDFLDNPDNESILEDIVQTITLFEDREMIKKRLENYKDLFTESQLKKLYRRHYTGWGRLSAKLINGIRDRESQKTILDYLISDGRANRNFMQLINDDGLSFKSIISKAQSGSHSDNLKEVVGELAGSPAIKKGILQSLKIVDELVKVMGYEPEQIVVEMARENQTTNQGRRNSRQRYKLLEDGVKNLASDLNGDILKEYPTDNQALQNERLFLYYLQNGRDMYTGEALDIDNLSQYDIDHIVPQAFIKDDSIDNRVLVSSAKNRGKSDDVPSIDIVKARKAFWKKLLDAKLISQRKYDNLTKAERGGLTPDDKAGFIQRQLVETRQITKHVARILDERFNNKVDDNNKPIRKVKIVTLKSNLVSNFRKEFGFYKIREVNNYHHAHDAYLNAVVAKAILTKYPQLEPEFVYGDYPKYNSYKTRKSATEKLFFYSNIMNFFKTKVTLADETVVVKDDIEVNNETGEIAWDKKKHFATVRKVLSYPQVNIVKKTEVQTGGFSKESILAHSNSDKLIPRKTKDIYLDPKKYGGFDSPIVAYSVLVLADIKKGKAQKLKTVKELIGITIMERERFEKNPSAFLESKGYLNIRTDKLIILPKYSLFELENGRRRLLASAGELQKGNELALPTQYMKFLYLASRYNESKGKPEEIEKKQEFVNQHVSYFDDILQLINDFSKRVILADANLEKINKLYSDNKDNTPVDELAKNIINLFTFTSLGAPAAFKFFDKSVDRKRYTSTKEVLDSTLIHQSITGLYETRIDLGKLGED

SEQ ID NO: 443 - protein, 1370 aa, Streptococcus agalactiae
  REGION 1..1370: note = Streptococcus agalactiae STIR-CD-17
MNKPYSIGLDIGTNSVGWSIITDDYKVPAKKMRVLGNTDKEYIKKNLIGALLFDGGNTAADRRLKRTARRRYTRRRNRILYLQEIFAEEMSKVDDSFFHRLEDSFLVEEDKRGSKYPIFATMQEEKDYHEKFPTIYHLRKELADKKEKADLRLVYLALAHIIKFRGHFLIEDDRFDVRNTDIQKQYQAFLEIFDTSFENNHLLSQNVDVEAILTDKISKSAKKDRILAQYPNQKSTGIFAEFLKLIVGNQADFKKHFNLEDKTPLQFAKDSYDEDLENLLGQIGDEFADLFSAAKKLYDSVLLSGILTVTDLSTKAPLSAYMIQRYDEHREDLKQLKQFVKASLPEKYQEIFADSSKDGYAGYIEGKTNQEAFYKYLSKLLTKQEDSEYFLEKIKNEDFLRKQRTFDNGSIPHQVHLTELKAIIRRQSEYYPFLKENQDKIEKILTFRIPYYVGPLARGNSDFAWMTRKTDDSIRPWNFEDLVDKEKSAEAFIHRMTNNDLYLPEEKVLPKHSLIYEKFTVYNELTKVRYKNEQGETYFFDSNVKQEIFDGVFKEHRKVSKKQLLDFLAKEFEEFRIVDVTGLDKENKAFNASLGTYHDLKKILDKDFLDNPDNESILEDIVQTITLFEDREMIKKRLENYKDLFTESQLKKLYRRHYTGWGRLSAKLINGIRDRESQKTILDYLISDGRANRNFMQLINDDGLSFKSIISKAQSGSHSDNLKEVVGELAGSPAIKKGILQSLKIVDELVKVMGYEPEQIVVEMARENQTTNQGRRNSRQRYKLLEDGVKNLASDLNGDILKEYPTDNQALQNERLFLYYLQNGRDMYTGEALDIDNLSQYDIDHIVPQAFIKDDSIDNRVLVSSAKNRGKSDDVPSIDIVKARKAFWKKLLDAKLISQRKYDNLTKAERGGLTPDDKAGFIQRQLVETRQITKHVARILDERFNNKVDDNNKPIRKVKIVTLKSNLVSNFRKEFGFYKIREVNNYHHAHDAYLNAVVAKAILTKYPQLEPEFVYGDYPKYNSYKTRKSATEKLFFYSNIMNFFKTKVTLADETVVVKDDIEVNNETGEIAWDKKKHFATVRKVLSYPQVNIVKKTEVQTGGFSKESILAHSNSDKLIPRKTKDIYLDPKKYGGFDSPIVAYSVLVLADIKKGKAQKLKTVKELIGITIMERERFEKNPSAFLESKGYLNIRTDKLIILPKYSLFELENGRRRLLASAGELQKGNELALPTQYMKFLYLASRYNESKGKPEEIEKKQEFVNQHISYFDDILQLINDFSKRVILADANLEKINKLYSDNKDNTPVDELAKNIINLFTFTSLGAPAAFKFFDKSVDRKRYTSTKEVLDSTLIHQSITGLYETRIDLGKLGED

SEQ ID NO: 444 - protein, 1125 aa, Streptococcus anginosus
  REGION 1..1125: note = Streptococcus anginosus 1_2_62CV
MNGLVLGLDIGIASVGVGILNKETGEIIHANSRIFPAATADSNVERRGFRQGRRLGRRKKHRSARLNNLFEEFGFITDFSAIPLNLNPYALRVKGLSEELTNEELFIALKNIIKRRGISYLDDASEDGETASNEYGKAVEENRKLLADKTPGQIQLERFEKYGQVRGDFTVVENGENHRLINVFSTSAYKKEAERILRRQQEFNVRISDEFIEAYLTILTGKRKYYHGPGNEKSRTDYGRFRTDGTTLDNIFGILIGKCTFYPDEYRAAKASYTAQEFNLLNDLNNLTVPTETKKLSPEQKRQIVEYARTAKTLGTPTLLKYIAKLVDGSIDDIKGYRIDKSDKPEMHTFDAYRKMRTLDLVNIDALSRETLDDLAHILTLNTESEGILEALNSKMPSTFTKEQIDELIQFRKKNSAVFGKGWHNFSLKLMNELISELYETSEEQMTILTRLGKQRSREISKRTKYIDEKELTEEIYNPVVAKSVRQAIKIINEATKRYGIFDNIVIEMARENNEEDAKKDYIKRQKANQDEKNASMEKAAFQYNGKKELPDSIFHGHKELATKIRLWHQQGERCLYTGKNISIRDLIHNPHQYEIDHILPLSLSFDDGLANKVLVLATANQEKGQRTPFQAIDSMDDAWSYREFKQYVRNSKSLSNKKKDYLLTEEDISKIEVKQKFIERNLVDTRYSSRVVLNTLQEFYKTNDFDTKISVVRGQFTSQLRRKWKIEKSRDTYHHHAVDALIIAASSQLRLWKKQNNPLISYKEGQFVDPETGEILSLTDDEYKELVFRPPYDYFVDTLKSKSFEDSILFSYQVDSKYNRKISDATIYGTRKAQLGKDKQEETYVLGKIKDIYSQKGYEDFIKRYNKDETQFLIYHKDPQTFEKVIEEILKTYPDKELNEKGKEIPCNPFEKYRQENGPIRKYSKKGKGPEIKSLKYYDNKLGNHIDITPVNSQNQVVLQSLKPWRTDVYFNPRTSKYELMGLKYSDLRFEKGSGSYGISPEKYNKVKAKEGVNEDSEFKFTLYKNDLILIKDTETGEQQLFRYGSRNDTSKHYVELKPYEKAKFEGNQQLMNLLGTVAKGGQCLKGINKPNLSIYKVKTDVLGNKYFIKKEGDQPQLNFKKKF

SEQ ID NO: 445 - protein, 1345 aa, Streptococcus anginosus
  REGION 1..1345: note = Streptococcus anginosus F0211
MDQKYSIGLDIGTNSVGWAVVTDDYKVPAKKMKVLGNTDKQSIKKNLLGALLFDSGETAEATRLKRTARRRYTRRRNRLRYLQEIFAEEMNKVDENFFQRLDDSFLVDEDKRGERHPIFGNIAAEVKYHDDFPTIYHLRKHLADISQKADLRLVYLALAHMIKFRGHFLIEGQLKAENTNVQALFKDFVEVYDKTVEESHLSEMTVDALSILTEKVSKSRRLENLIAHYPAEKKNTLFGNLIALSLGLQPNFKTNFQLSEDAKLQFSKDTYEEDLEGLLGEIGDEYADLFASAKNLYDAILLSGILTVDDNSTKAPLSASMVKRYEEHQKDLKKLKDFIKVNAPDQYNAIFKDKNKKGYAGYIENGVKQDEFYKYLKGILLQINGSGDFLDKIDREDFLRKQRTFDNGSIPHQIHLQEMHAILRRQEEHYPFLKENQDKIEKILTFRIPYYVGPLARKGSRFAWAEYKADEKITPWNFDDILDKEKSAEKFITRMTLNDLYLPEEKVLPKHSLLYETFTVYNELTKVKYVNEQGEAKFFDANMKQEIFDHVFKENRKVTKDKLLNYLNKEFEEFRIVNLTGLDKENKAFNSSLGTYHDLRKILDKSFLDDKANEKTIEDIIQTLTLFEDREMIRQRLQKYSDIFTKAQLKKLERRHYTGWGRLSYKLINGIRNKENKKTILDYLIDDGYANRNFMQLINDDALSFKEEIARAQIIGDVDDIANVVHDLPGSPAIKKGILQSVKIVDELVKVMGHNPANIIIEMARENQMTDKGRRNSQQRLKLLQDSLKNLDNPVNIKNVENQQLQNDRLFLYYIQNGKDMYTGETLDINNLSQYDIDHIIPQAFIKDNSLDNRVLTRSDKNRGKSDDVPSIEVVHEMKSFWSKLLSVKLITQRKFDNLTKAERGGLTEEDKAGFIKRQLVETRQITKHVAQILDERFNTEFDGNKRRIRNVKIITLKSNLVSNFRKEFELYKVREINDYHHAHDAYLNAVVGNALLLKYPQLEPEFVYGEYPKYNSYRSRKSATEKFLFYSNILRFFKKEDIQTNEDGEIAWNKEKHIKILRKVLSYPQVNIVKKTEEQTGGFSKESILPKGESDKLIPRKTKNSYWNPKKYGGFDSPVVAYSILVFADVEKGKSKKLRKVQDMVGITIMEKKRFEKHPVDFLEQRGYRNVRLEKIIKLPKYSLFELENKRRRLLASARELQKGNELVIPQRFTTLLYHSYQIEKNYEPEHREYVEKHKDEFKELLEYISVFSRKYVLADNNLTKIEMLFSKNKDAEVSSLAKSFISLLTFTAFGAPAAFNFFGENIDRKRYTSVTECLNATLIHQSITGLYETRIDLSKLGED

SEQ ID NO: 446 - protein, 1386 aa, Streptococcus anginosus
  REGION 1..1386: note = Streptococcus anginosus SK1138
MNQKYSIGLDIGTNSVGWAVITDDYKVPAKKMKVLGNTDKQSIKKNLLGALLFDSGETAEATRLKRTARRRYTRRRNRLRYLQEIFAEEMMQVDESFFQRLDDSFLVDEDKRGERHPIFGNIAAEVKYHDEFPTIYHLRKHLADISQKADLRLVYLALAHMIKFRGHFLIEGQLKAENTNVQALFKDFVEVYDKTVEESHLSEITVDALSILTEKVSKSRRLENLIAHYPAEKKNTLFGNLIALFLGLQPNFKTNFQLSEDAKLQFSKDTYEEDLEGLLGEVGDEYADLFASAKNLYDAILLSGILTVDDNSTKAPLSASMVKRYEEHQKDLKKFEDFIKVNALDQYNAIFKDKNKKGYAGYIESGVKQDEFYKYLKGILLQINGSGDFLDKIDREDFLRKQRTFDNGSIPHQIHLQEMHAILRRQGEHYPFLKENQDKIEKILTFRIPYYVGPLARKGSRFAWAEYKADEKITPWNFDDILDKEKSAEKFITRMTLNDLYLPEEKVLPKHSLLYETFTVYNELTKVKYVNEQGEAKFFDANMKQEIFDHVFKENRKVTKDKLLNYLNKEFEEFRIVNLTGLDKENKVFNSSLGTYHDLRKILNKSFLDNKENAQIIEDIIQTLTLFEDREMIRQRLQKYSDIFTKAQLKKLERRHYTGWGRLSYKLINGIRNKENKKTILDYLIDDGYANRNFMQLINDDALSFKEEIAKAQIIGDVDDIANVVHDLPGSPAIKKGILQSVKIVDELVKVMGHNPANIIIEMARENQTTDRGRRNSQQRLKLLQDSLKNLDNPVNIKNVENQQLQNDRLFLYYIQNGKDMYTGETLDINNLSQYDIDHIIPQAYIKDDSFDNRVLTSSSENRGKSDNVPSIEVVCARKADWMRLRKAGLISQRKFDNLTKAERGGLTENDKAGFIKRQLVETRQITKHVAQVLDARFNAKHDENKKVIRDVKIITLKSNLVSQFRKDFKFYKVREINDYHHAHDAYLNAVIGTALLKKYPKLASEFVYGEFKKYDVRKFIAKSDKEIGKATAKYFFYSNLMNFFKKEVKFADGTVVERPDIETSEDGEIAWNKQTDFKIVRKVLSYPQVNIVKKTEVQTHGLDRGKPRGLFNANPSPKPKPDSSENLVGVKRNLDPKKYGGYAGISNSYAVLVKAIIEKGVKKKETMVLEFQGISILDRITFEKDKRAFLLGKGYKDIKKIIELPKYSLFELKDGSRRMLASILSTNNKRGEIHKGNELFVPQKFTTLLYHAKRINNPINKDHIEYVKKHRDDFKELLNYVLEFNEKYVGATKNGERLKEAVADFDSKSNEEICTSFLGAVNSKNAGLFELTSLGSASDFEFLGVKIPRYRDYTPSSLLKDSTLIHQSITGLYETRIDLSKLGED

SEQ ID NO: 447 - protein, 1396 aa, Streptococcus anginosus
  REGION 1..1396: note = Streptococcus anginosus SK52 = DSM 20563
MTKPYSIGLDIGTNSVGWAVITDDYKVPAKKMKVLGNTNRDYIKKNLLGALLFDGGETAEGRRLKRTARRRYTRRKNRLRYLQEIFAEEMMQVDESFFQRLDDSFLVEEDKQGSKYPIFGTLKEEKEYHKKFKTIYHLREELANSKEKADLRLVYLALAHMIKFRGHFLYEGDLKAENTDVQALFKDFVEEYDKTIEESHLSEITVDALSILTEKVSKSSRLENLIAHYPTEKKNTLFGNLIALSLGLQANFKTNFQLSEDAKLQFSKDTYEEDLEGLLGEVGDEYADLFVSAKNLYDAILLSGILTVDDNSTKAPLSASMVKRYKEHKEELAAFKRFIKEKLPKKYEEIFKDDTKNGYAGYVGADKKLRKRSGKLATEEEFYKYVKGILNKVEGADYFLDKIDREDFLRKQRTFDNGSIPHQIHLQEMHAILRRQGEHYPFLKENQDKIEKILTFRIPYYVGPLARKGSRFAWAEYKADEKITPWNFDDILDKEKSAEKFITRMTLNDLYLPEEKVLPKHSPLYETFTVYNELTKVKYVNEQGEAKFFDTNMKQEIFDHVFKENRKVTKDKLLNYLNKEFEEFRIVNLTGLDKENKAFNASLGTYHDLRKILDKSFLDDKVNEKIIEDIIQTLTLFEDREMIRQRLQKYSDIFTTQQLKELERRHYTGWGRLSYKLINGIRNKENKKTILDYLIDDGYANRNFMQLINDDALSFKEEIARAQIIGDVDDIANVVHDLPGSPAIKKGILQSVKIVDELVKVMGHNPTNIIIEMARENQTTDKGRRNSQQRLKLLQDSLKNLDNPVNIKNVENQQLQNDRLFLYYIQNGKDMYTGETLDINNLSQYDIDHIIPQAFIKDNSLDNRVLTRSDKNRGKSDDVPSIEVVHEMKSFWSKLLSVKLITQRKFDNLTKAERGGLTENDKAGFIKRQLVETRQITKHVAQVLDARFNAKHDENKKVIRDVKIITLKSNLVSQFRKDFKFYKVREINDYHHAHDAYLNAVIGTALLKKYPKLASEFVYGEFKKYDVRKFIAKSDKEIGKATAKYFFYSNLMNFFKKEVKFADGTVVERPDIETSEDGEIAWNKQTDFKIVRKVLSYPQVNIVKKTEVQTHGLDRGKPRGLFNANPSPKPKPDSSENLVGIKRNLDPKKYGGYAGISNSYAVLVKAIIEKGVKKKETMVLEFQGISILDRITFEKDKRAFLLGKGYKDIKKIIELPKYSLFELKDGSRRMLASILSTNNKRGEIHKGNELFVPQKFTTLLYHAKRINNPINKDHIEYVKKHRDDFKELLNYVLEFNEKYVGATKNGERLKEAVADFDSKSNEEICTSFLGAVNSKNAGLFELTSLGSASDFEFLGVKIPRYRDYTPSSLLKDSILIHQSITGLYETRIDLSKLGED

SEQ ID NO: 448 - protein, 1373 aa, Streptococcus bovis
  REGION 1..1373: note = Streptococcus bovis ATCC 700338
MTKKNYSIGLDIGTNSVGWAVITDDYKVPAKKMKVLGNTDKKYIKKNLLGALLFDSGETAEATRLKRTARRRYTRRKNRLRYLQEIFAEEMTKVDESFFQRLDESFLRWDDDNKKLGRYPIFGNKADVVKYHQEFPTIYHLRKHLADSSEKADLRLVYLALAHMIKFRGHFLIEGELNAENTDVQKIFADFVGVYDRTFDDSHLSEITVDAASILTEKISKSRRLENLIKYYPTEKKNTLFGNLIALALGLQPNFKMNFKLSEDAKLQFSKDSYEEDLGELLGKIGDDYADLFTSAKNLYDAILLSGILIVDDNSTKAPLSASMIKRYVEHQEDLEKLKEFIKANKSELYHDIFKDKNKNGYAGYIENGVKQDEFYKYLKNTLSKIAGSDYFLDKIEREDFLRKQRTFDNGSIPHQIHLQEMHAILRRQGDYYPFLKENQDRIEKILTFRIPYYVGPLARKDSRFSWAEYHSDEKITPWNFDKVIDKEKSAEKFITRMTLNDLYLPEEKVLPKHSHVYETYAVYNELTKIKYVNEQGKDSFFDSNMKQEIFDHVFKENRKVTKEKLLNYLNKEFPEYRIKDLIGLDKENKSFNASLGTYHDLKKILDKAFLDDKVNEEVIEDIIKTLTLFEDKDMIHERLQKYSDIFTADQLKKLERRHYTGWGRLSYKLINGIRNKENNKTILDYLIDDGSANRNFMQLINDDTLPFKQIIQKSQVVGDVDDIEAVVHDLPGSPAIKKGILQSVKIVDELVKVMGDNPDNIVIEMARENQTTNRGRSQSQQRLKKLQNSLKELGSNILNEEKPSYIEDKVENSHLQNDQLFLYYIQNGKDMYTGDELDIDHLSDYDIDHIIPQAFIKDDSIDNRVLTSSAKNRGKSDDVPSLDIVRARKAEWVRLYKSGLISKRKFDNLTKAERGGLTEADKAGFIKRQLVETRQITKHVAQILDARFNTESDENDKVIRDVKVITLKSNLVSQFRKDFEFYKVREINDYHHAHDAYLNAVVGTALLKKYPKLASEFVYGEYKKYDIRKFITNSSDKATAKYFFYSNLMNFFKRVIRYSNGKVIVRPVVEYSKDTEDIAWDKKSNFRTICKVLSYPQVNIVKKVETQTGGFSKESILPKGDSDKLIPRKTKKAYWDTKKYGGFDSPTVAYSVFVVADVEKGKAKKLKTVKELVGISIMERSFFEENPVEFLENKGYHNIREDKLIKLPKYSLFEFEGGKRRLLASASELQKGNEMVIPGHLVKLLYHAQRINSFNSTKYLDYVSAHKKEFEKVLSCVEDFANLYVDVEKNLSKIRAVADSMDNFSIEEISNSFINLLTLTALGAPADFNFLGEKIPRKRYTSTKECLNATLIHQSITGLYETRIDLSKIGEE

SEQ ID NO: 449 - protein, 1375 aa, Streptococcus canis
  REGION 1..1375: note = Streptococcus canis FSL Z3-227
MEKKYSIGLDIGTNSVGWAVITDDYKVPSKKFKVLGNTNRKSIKKNLMGALLFDSGETAEATRLKRTARRRYTRRKNRIRYLQEIFANEMAKLDDSFFQRLEESFLVEEDKKNERHPIFGNLADEVAYHRNYPTIYHLRKKLADSPEKADLRLIYLALAHIIKFRGHFLIEGKLNAENSDVAKLFYQLIQTYNQLFEESPLDEIEVDAKGILSARLSKSKRLEKLIAVFPNEKKNGLFGNIIALALGLTPNFKSNFDLTEDAKLQLSKDTYDDDLDELLGQIGDQYADLFSAAKNLSDAILLSDILRSNSEVTKAPLSASMVKRYDEHHQDLALLKTLVRQQFPEKYAEIFKDDTKNGYAGYVGIGIKHRKRTTKLATQEEFYKFIKPILEKMDGAEELLAKLNRDDLLRKQRTFDNGSIPHQIHLKELHAILRRQEEFYPFLKENREKIEKILTFRIPYYVGPLARGNSRFAWLTRKSEEAITPWNFEEVVDKGASAQSFIERMTNFDEQLPNKKVLPKHSLLYEYFTVYNELTKVKYVTERMRKPEFLSGEQKKAIVDLLFKTNRKVTVKQLKEDYFKKIECFDSVEIIGVEDRFNASLGTYHDLLKIIKDKDFLDNEENEDILEDIVLTLTLFEDREMIEERLKTYAHLFDDKVMKQLKRRHYTGWGRLSRKMINGIRDKQSGKTILDFLKSDGFSNRNFMQLIHDDSLTFKEEIEKAQVSGQGDSLHEQIADLAGSPAIKKGILQTVKIVDELVKVMGHKPENIVIEMARENQTTTKGLQQSRERKKRIEEGIKELESQILKENPVENTQLQNEKLYLYYLQNGRDMYVDQELDINRLSDYDVDHIVPQSFIKDDSIDNKVLTRSVENRGKSDNVPSEEVVKKMKNYWRQLLNAKLITQRKFDNLTKAERGGLSEADKAGFIKRQLVETRQITKHVARILDSRMNTKRDKNDKPIREVKVITLKSKLVSDFRKDFQLYKVRDINNYHHAHDAYLNAVVGTALIKKYPKLESEFVYGDYKVYDVRKMIAKSEQEIGKATAKRFFYSNIMNFFKTEVKLANGEIRKRPLIETNGETGEVVWNKEKDFATVRKVLAMPQVNIVKKTEVQTGGFSKESILSKRESAKLIPRKKGWDTRKYGGFGSPTVAYSILVVAKVEKGKAKKLKSVKVLVGITIMEKGSYEKDPIGFLEAKGYKDIKKELIFKLPKYSLFELENGRRRMLASATELQKANELVLPQHLVRLLYYTQNISATTGSNNLGYIEQHREEFKEIFEKIIDFSEKYILKNKVNSNLKSSFDEQFAVSDSILLSNSFVSLLKYTSFGASGGFTFLDLDVKQGRLRYQTVTEVLDATLIYQSITGLYETRTDLSQLGGD

SEQ ID NO: 450 - protein, 1345 aa, Streptococcus constellatus
  REGION 1..1345: note = Streptococcus constellatus subsp. constellatus SK53
MGKPYSIGLDIGTNSVGWAVVTDDYKVPAKKMKVLGNTDKQSIKKNLLGALLFDSGETAEATRLKRTARRRYTRRKNRLRYLQEIFTGEMNKVDENFFQRLDDSFLVDEDKRGEHHPIFGNIAAEVKYHDDFPTIYHLRRHLADTSKKADLRLVYLALAHMIKFRGHFLYEGDLKAENTDVQALFKDFVEEYDKTIEESHLSEITVDALSILTEKVSKSSRLENLIAHYPTEKKNTLFGNLIALSLDLHPNFKTNFQLSEDAKLQFSKDTYEEDLEGFLGEVGDEYADLFASAKNLYDAILLSGILTVDDNSTKAPLSASMVKRYEEHQKDLKKLKDFIKVNAPDQYNAIFKDKNKKGYASYIESGVKQDEFYKYLKGILLKINGSGDFLDKIDREDFLRKQRTFDNGSIPHQIHLQEMHAILRRQGEHYPFLKENQDKIEKILTFRIPYYVGPLARKGSRFAWAEYKADEKITPWNFDDILDKEKSAEKFITRMTLNDLYLPEEKVLPKHSPLYEAFTVYNELTKVKYVNEQGEAKFFDTNMKQEIFDHVFKENRKVTKDKLLNYLNKEFEEFRIVNLTGLDKENKAFNSSLGTYHDLRKILDKSFLDDKANEKTIEDIIQTLTLFEDREMIRQRLQKYSDIFTKAQLKKLERRHYTGWGRLSYKLINGIRNKENKKTILDYLIDDGYANRNFMQLINDDALSFKEEIARAQIIDDVDDIANVVHDLPGSPAIKKGILQSVKIVDELVKVMGHNPANIIIEMARENQTTDKGRRNSQQRLKLLQDSLKNLDNPVNIKNVENQQLQNDRLFLYYIQNGKDMYTGETLDINNLSQYDIDHIIPQAFIKDNSLDNRVLTRSDKNRGKSDDVPSIEVVHEMKSFWSKLLSVKLITQRKFDNLTKAERGGLTEEDKAGFIKRQLVETRQITKHVAQILDERFNTEFDGNKRRIRNVKIITLKSNLVSNFRKEFELYKVREINDYHHAHDAYLNAVVGNALLLKYPQLEPEFVYGEYPKYNSYRSRKSATEKFLFYSNILRFFKKEDIQTNEDGEIAWNKEKHIKILRKVLSYPQVNIVKKTEEQTGGFSKESILPKGESDKLIPRKTKNSYWDPKKYGGFDSPVVAYSILVFADVEKGKSKKLRKVQDMVGITIMEKKRFEKNPVDFLEQRGYRNVRLEKIIKLPKYSLFELENKRRRLLASAKELQKGNELVIPQRFTTLLYHSYRIEKDYEPEHREYVEKHKDEFKELLEYISVFSRKYVLADNNLTKIEMLFSKNKDAEVSSLAKSFISLLTFTAFGAPAAFNFFGENIDRKRYTSVTECLNATLIHQSITGLYETRIDLSKLGED

SEQ ID NO: 451 - protein, 1371 aa, Streptococcus dysgalactiae
MDKKYSIGLDIGTNSVGWAVITDDYKVPSKKFKVLGNTDRHSIKKNLIGALLFDSGETAEATRLKRTARRRYTRRKNRIRYLQEIFSSEMSKVDDSFFHRLEESFLVEEDKKHERHPIFGNIVDEVAYHEKYPTIYHLRKKLADSTDKADLRLIYLALAHMIKFRGHFLIEGDLNPDNSDMDKLFIQLVQTYNQLFEENPINASRVDAKAILSARLSKSRRLENLIAQLPGEKRNGLFGNLIALSLGLTPNFKSNFDLAEDAKLQLSKDTYDDDLDNLLAQIGDQYADLFLAAKNLSDAILLSDILRVNSEITKAPLSASMIKRYDEHHQDLTLLKALVRQQLPEKYKEIFFDQSKNGYAGYIDGGASQEEFYKFIKPILEKMDGTEELLAKLNREDLLRKQRTFDNGSIPHQIHLGELHAILRRQEDFYPFLKDNREKIEKILTFRIPYYVGPLARGNSRFAWMTRKSEETITPWNFEEVVDKGASAQSFIERMTNFDKNLPNEKVLPKHSLLYEYFTVYNELTKVKYVTEGMRKPEFLSGKQKEAIVDLLFKTNRKVTVKQLKEDYFKKIECFDSVEISGVEDRFNASLGTYHDLLKIIKDKDFLDNEENEDILEDIVLTLTLFEDKEMIEERLKKYANLFDDKVMKQLKRRHYTGWGRLSRKLINGIRDKQSGKTILDFLKSDGFANRNFMQLINDDSLTFKEAIQKAQVSGQGHSLHEQIANLAGSPAIKKGILQSVKVVDELVKVMGHKPENIVIEMARENQTTQKGQKNSRERMKRIEEGIKELGSQILKEHPVENTQLQNEKLYLYYLQNGRDMYVDQELDINRLSDYDVDHIVPQSFIKDDSIDNKVLTRSDKNRGKSDNVPSEEVVKKMKNYWRQLLNAKLITQRKFDNLTKAERGGLSELDKAGFIKRQLVETRQITKHVAQILDSRMNTKYDENDKLIREVKVITLKSKLVSDFRKDFQFYKVREINNYHHAHDAYLNAVVGTALIKKYPKLESEFVYGDYKVYDVRKMIAKSEQEIGKATAKRFFYSNIMNFFKTEITLANGEIRKRPLIETNEETGEIVWDKGRDFATVRKVLSMPQVNIVKKTEVQTGALTNESIYARGSFDKLISRKHRFESSKYGGFGSPTVTYSVLVVAKSKVQDGKVKKIKTGKELIGITLLDKLVFEKNPLKFIEDKGYGNVQIDKCIKLPKYSLFEFENGTRRMLASVMANNNSRGDLQKANEMFLPAKLVTLLYHAHKIESSKELEHEAYILDHYNDLYQLLSYIERFASLYVDVEKNISKVKELFSNIESYSISEICSSVINLLTLTASGAPADFKFLGTTIPRKRYGSPQSILSSTLIHQSITGLYETRIDLSQLGGD

SEQ ID NO: 452 - protein, 1371 aa, Streptococcus dysgalactiae
MDKKYSIGLDIGTNSVGWAVITDDYKVPSKKFKVLGNTDRHSIKKNLIGALLFDSGETAEATRLKRTARRRYTRRKNRIRYLQEIFSSEMSKVDDSFFHRLEESFLVEEDKKHERHPIFGNIVDEVAYHEKYPTIYHLRKKLADSTDKADLRLIYLALAHMIKFRGHFLIEGDLNPDNSDVDKLFIQLVQTYNQLFEEKPINASGVDAKAILSARLSKSKRLENLIAQLPGEKKNGLFGNLIALSLGLTPNFKSNFDLAEDAKLQLSKDTYDDDLDNLLAQIGNQYADLFLAAKNLSDAILLSDILRVNSEITKAPLSASMIKRYDEHHQDLTLLKALVRQQLPEKYKEIFFDQSKNGYAGYIDGGASQEEFYKFIKPILEKMDGTEELLAKLNREDLLRKQRTFDNGSIPHQIHLGELHAILRRQEDFYPFLKDNREKIEKILTFRIPYYVGPLARGNSRFAWMTRKSEETITPWNFEEVVDKGASAQSFIERMTNFDKNLPNEKVLPKHSLLYEYFTVYNELTKVKYVTEGMRKPEFLSGKQKEAIVDLLFKTNRKVTVKQLKEDYFKKIECFDSVEISGVEDRFNASLGTYHDLLKIIKDKDFLDNEENEDILEDIVLTLTLFEDKEMIEERLKKYANLFDDKVMKQLKRRHYTGWGRLSRKLINGIRDKQSGKTILDFLKSDGFANRNFMQLINDDSLTFKEAIQKAQVSGQGHSLHEQIANLAGSPAIKKGILQSVKVVDELVKVMGHKPENIVIEMARENQTTQKGQKNSRERMKRIEEGIKELGSQILKEHPVENTQLQNEKLYLYYLQNGRDMYVDQELDINRLSDYDVDHIVPQSFIKDDSIDNKVLTRSDKNRGKSDNVPSEEVVKKMKNYWRQLLNAKLITQRKFDNLTKAERGGLSELDKAGFIKRQLVETRQITKHVAQILDSRMNTKYDENDKLIREVKVITLKSKLVSDFRKDFQFYKVREINNYHHAHDAYLNAVVGTALIKKYPKLESEFVYGDYKVYDVRKMIAKSEQEIGKATAKRFFYSNIMNFFKTEITLANGEIRKRPLIETNEETGEIVWDKGRDFATVRKVLSMPQVNIVKKTEVQTGALTNESIYARGSFDKLISRKHRFESSKYGGFGSPTVTYSVLVVAKSKVQDGKVKKIKTGKELIGITLLDKLVFEKNPLKFIEDKGYGNVQIDKCIKLPKYSLFEFENGTRRMLASVMANNNSRGDLQKANEMFLPAKLVTLLYHAHKIESSKELEHEAYILDHYNDLYQLLSYIERFASLYVDVEKNISKVKELFSNIESYSISEICSSVINLLTLTASGAPADFKFLGTTIPRKRYGSPQSILSSTLIHQSITGLYETRIDLSQLGGD

SEQ ID NO: 453 - protein, 1371 aa, Streptococcus dysgalactiae
MDKKYSIGLDIGTNSVGWAVITDDYKVPSKKFKVLGNTDRHSIKKNLIGALLFDSGETAEATRLKRTARRRYTRRKNRIRYLQEIFSSEMSKVDDSFFHRLEESFLVEEDKKHERHPIFGNIVDEVAYHEKYPTIYHLRKKLADSTDKADLRLIYLALAHMIKFRGHFLIEGDLNPDNSDMDKLFIQLVQTYNQLFEENPINASRVDAKAILSARLSKSRRLENLIAQLPGEKRNGLFGNLIALSLGLTPNFKSNFDLAEDAKLQLSKDTYDDDLDNLLAQIGDQYADLFLAAKNLSDAILLSDILRVNSEITKAPLSASMIKRYDEHHQDLTLLKALVRQQLPEKYKEIFFDQSKNGYAGYIDGGASQEEFYKFIKPILEKMDGTEELLAKLNREDLLRKQRTFDNGSIPHQIHLGELHAILRRQEDFYPFLKDNREKIEKILTFRIPYYVGPLARGNSRFAWMTRKSEETITPWNFEEVVDKGASAQSFIERMTNFDKNLPNEKVLPKHSLLYEYFTVYNELTKVKYVTEGMRKPEFLSGKQKEAIVDLLFKTNRKVTVKQLKEDYFKKIECFDSVEISGVEDRFNASLGTYHDLLKIIKDKDFLDNEENEDILEDIVLTLTLFEDKEMIEERLKKYANLFDDKVMKQLKRRHYTGWGRLSRKLINGIRDKQSGKTILDFLKSDGFANRNFMQLINDDSLTFKEAIQKAQVSGQGHSLHEQIANLAGSPAIKKGILQSVKVVDELVKVMGHKPENIVIEMARENQTTQKGQKNSRERMKRIEEGIKELGSQILKEHPVENTQLQNEKLYLYYLQNGRDMYVDQELDINRLSDYDVDHIVPQSFIKDDSIDNKILTRSDKNRGKSDNVPSEEVVKKMKNYWRQLLNAKLITQRKFDNLTKAERGGLSELDKAGFIKRQLVETRQITKHVAQILDSRMNTKYDENDKLIREVKVITLKSKLVSDFRKDFQFYKVREINNYHHAHDAYLNAVVGTALIKKYTKLESEFVYGDYKVYDVRKMIAKSEQEIGKATAKRFFYSNIMNFFKTEITLANGEIRKRPLIETNEETGEIVWDKGRDFATVRKVLSMPQVNIVKKTEVQTGALTNESIYARGSFDKLISRKHRFESSKYGGFGSPTVTYSVLVVAKSKVQDGKVKKIKTGKELIGMTLLDKLVFEKNPLKFIEDKGYGNVQIDKCIKLPKYSLFEFENGTRRMLASVMANNNSRGDLQKANEMFLPAKLVTLLYHAHKIESSKELEHEAYILDHYNDLYQLLSYIERFASLYVDVEKNISKVKELFSNIESYSISEICSSVINLLTLTASGAPADFKFLGTTIPRKRYGSPQSILSSTLIHQSITGLYETRIDLSQLGGD

SEQ ID NO: 454 - protein, 1371 aa, Streptococcus dysgalactiae
MDKKYSIGLDIGTNSVGWAVITDDYKVPSKKFKVLGNTDRHSIKKNLIGALLFDSGETAEATRLKRTARRRYTRRKNRIRYLQEIFSSEMSKVDDSFFHRLEESFLVEEDKKHERHPIFGNIVDEVAYHEKYPTIYHLRKKLADSTDKADLRLIYLALAHMIKFRGHFLIEGDLNPDNSDMDKLFIQLVQTYNQLFEENPINASRVDAKAILSARLSKSRRLENLIAQLPGEKRNGLFGNLIALSLGLTPNFKSNFDLAEDAKLQLSKDTYDDDLDNLLAQIGDQYADLFLAAKNLSDAILLSDILRVNSEITKAPLSASMIKRYDEHHQDLTLLKALVRQQLPEKYKEIFFDQSKNGYAGYIDGGASQEEFYKFIKPILEKMDGTEELLAKLNREDLLRKQRTFDNGSIPHQIHLGELHAILRRQEDFYPFLKDNREKIEKILTFRIPYYVGPLARGNSRFAWMTRKSEETITPWNFEEVVDKGASAQSFIERMTNFDKNLPNEKVLPKHSLLYEYFTVYNELTKVKYVTEGMRKPEFLSGKQKEAIVDLLFKTNRKVTVKQLKEDYFKKIECFDSVEISGVEDRFNASLGTYHDLLKIIKDKDFLDNEENEDILEDIVLTLTLFEDKEMIEERLKTYAHLFDDKVMKQLKRRHYTGWGRLSRKLINGIRDKQSGKTILDFLKSDGFANRNFIQLIHDDSLTFKEAIQKAQVSGQGHSLHEQIANLAGSPAIKKGILQSVKVVDELVKVMGHKPENIVIEMARENQTTQKGQKNSRERMKRIEEGIKELGSQILKEHPVENTQLQNEKLYLYYLQNGRDMYVDQELDINRLSDYDVDHIVPQSFIKDDSIDNKVLTRSDKNRGKSDDVPSEEVVKKMKNYWRQLLNAKLITQRKFDNLTKAERGGLSELDKAGFIKRQLVETRQITKHVAQILDSRMNTKYDENDKLIREVKVITLKSKLVSDFRKDFQFYKVREINNYHHAHDAYLNAVVGTALIKKYPKLESEFVYGDYKVYDVRKMIAKSEQEIGKATAKRFFYSNIMNFFKTEITLANGEIRKRPLIETNEETGEIVWNKGRDFATVRKVLSMPQVNIVKKTEVQTGALTNESIYARGSFDKLISRKHRFESSKYGGFGSPTVTYSVLVVAKSKVQDGKVKKIKTGKELIGITLLDKLVFEKNPLKFIEDKGYGNVQIDKCIKLPKYSLFEFENGTRRMLASVMANNNSRGDLQKANEMFLPAKLVTLLYHAHKIESSKELEHEAYILDHYNDLYQLLSYIERFASLYVDVEKNISKVKELFSNIESYSISEICSSVINLLTLTASGAPADFKFLGTTIPRKRYGSPQSILSSTLIHQSITGLYETRIDLSQLGGD

SEQ ID NO: 455 - protein, 1348 aa, Streptococcus equi
MKKPYTIALDIGTNSVGWVVVTDDYRVPTKKMKVLGNTERKTIKKNLIGALLFDSGDTAEGTRLKRTARRRYTRRKNRLRYLKEIFTEEMAKVDDGFFQRLEDSFYVLEDKEGNKHPIFANLADEVAYHKKYPTIYHLRKELVDNPQKADLRLIYLAVAHIIKFRGHFLIEGTLSSKNNNLQKSFDHLVDTYNLLFEEQRLLTEGINAKELLSAALSKSKRLENLISLIPGQKKTGIFGNIIALSLGLTPNFKANFGLSKDVKLQLAKDTYADDLDSLLAQIGDQYADLFLAAKNLSDAILLSDILTESDEITRAPLSASMVKRYREHHKDLVTLKTLIKDQLPEKYQEIFLDKTKNGYAGYIEGQVSQEEFYKYLKPILARLDGSEPLLLKIDREDFLRKQRTFDNGSIPHQIHLEELHAILRRQEVFYPFLKDNRKKIESLLTFRIPYYVGPLARGHSRFAWVKRKFDGAIRPWNFEEIVDEEASAQIFIEKMTKNDLYLPNEKVLPKHSLLYETFTVYNELTKVKYATEGMTRPQFLSADQKQAIVDLLFKTNRKVTVKQLKENYFKKIECWDSVEITGVEDSFNASLGTYHDLLKIIQDKDFLDNPDNQKIIEDIILTLTLFEDKKMISKRLDQYAHLFDKVVLNKLERHHYTGWGRLSGKLINGIRDKQSGKTILDFLKADGFANRNFMQLIHDSELSFIDEIAKAQVIGKTEYSKDLVGNLAGSPAIKKGISQTIKIVDELVKIMGYLPQQIVIEMARENQTTAQGIKNARQRMRKLEETAKKLGSNILKEHPVDNSQLQNDKRYLYYLQNGKDMYTGDDLDIDYLSSYDIDHIIPQSFIKNNSIDNKVLTSQGANRGKLDNVPSEAIVRKMKGYWQSLLRAGAISKQKFDNLTKAERGGLTQVDKAGFIQRQLVETRQITKHVAQILDSRFNTEFDDHNKRIRKVHIITLKSKLVSDFRKEFGLYKIRDINHYHHAHDAYLNAVVAKAILGKYPQLAPEFVYGDYPKYNSFKERQKATQKMLFYSNILKFFKDQESLHVNSDGEEIWNANKHLPIIKNVLSIPQVNIVKKTEVQTGGFYKESILSKGNSDKLIPRKNNWDTRKYGGFDSPTVAYSVLVIAKMEKGKAKVLKPVKEMVGITIMERTAFEENPVVFLEARGYREIQEHLIIKLPKYSLFELENGRRRLLASASELQKGNELFLPVDYMTFLYLAAHYHELTGSSEDVLRKKYFVDRHLHYFDDIIQMINDFAERHILASSNLEKINHTYHNNSDLPVNERAENIINVFTFVALGAPAAFKFFDATIDRKRYTSTKEVLNATLIHQSVTGLYETRIDLSQLGEN

SEQ ID NO: 456 - protein, 1377 aa, Streptococcus equinus
  REGION 1..1377: note = Streptococcus equinus ATCC 9812
MEKTYSIGLDIGTNSVGWAVITDDYKVPAKKMKVLGNTDKKYIKKNLLGALLFDSGETAEATRLKRAARRRYTRRKNRLRYLQEIFAKEMAKVDESFFQRLEESFLTDDDKTFDSHPIFGNKAEEDTYHQEFPTIYHLRKHLADSPEKVDLRLVYLALAHMIKFRGHFLIEGQLNAENTDVQKIFADFVGVYDRTFDDSHLSEITVDAASILTEKISKSRRLENLIKQYPTEKKNTLFGNLVALALGLQPNFKTNFKLSEDAKLQFSKDTYDEDLEELLGKIGDDYADLFTAAKNLYDAILLSGILTVDDNSTKAPLSASMIKRYEEHHEDLEKLKTFIKVNNFDKYHEIFKDKSKNGYAGYIENGVKQDIFYKHLKSIISEKNGGQYFLDKIEREDFLRKQRTFDNGSIPYQIHLQEMRTILRRQGEYYPFLKENQAKIEKILTFRIPYYVGPLARKNSRFAWAKYHSDEPITPWNFDEVVDKEKSAEKFITRMTLNDLYLPEEKVLPKHSYVYETFAVYNELTKIKYVNEQGKSFFFDANMKQEIFDHVFKENRKVTKAKLLSYLNNEFEEFRINDLIGLDKDSKSFNASLGTYHDLKKILDKSFLDDKTNEQIIEDIVLTLTLFEDRDMIHERLQKYSDIFTSQQLKKLERRHYTGWGRLSYKLINGIRNKENNKTILDFLIDDGDANRNFMQLINDDSLSFKTTIQEAQVVGDVDDIEAVVHDLPGSPAIKKGILQSVKIVDELVKVMGHNPQNIVIEMARENQITGYGRNRSNQRLKRLQDSLKEFGSDILSKKKPSYVDSKVENSHLQNDRLFLYYIQNGKDMYTGEELDIDHLSDYDIDHIIPQAFIKDNSIDNRVLTSSAKNRGKSDDVPSIEIVRNRKSYWYKLYKSGLISKRKFDNLTKAERGGLTETDKAGFIKRQLVETRQITKHVAQILDARFNTKCDENDKVIRDVKVITLKSSLVSQFRKEFKFYKVREINDYHHAHDAYLNAVVGTALLKKYPKLAPEFVYGEYKKYDVRKLVAKSSDNHSELGKATAKYFFYSNLMNFFKTEVKYADGRVFERPDIETNADGEVVWNKQRDFNIVRKVLSYPQVNIVKKVEVQTGGFSKESILPKGDSDKLIPRKTKKLQWETQKYGGFDSPTVAYSVLVVADVEKGKTRKLKTVKELVGISIMERSSFEENPVSFLEKKGYHNVQEDKLIKLPKYSLFEFEGGRRRLLASATELQKGNEVVLPQYMVNLLYHSQHVNNSHKPEHLNYVKQHKDEFKDIFNLIISIARINILKPKVVDNLINEFTEYGQEDISSLSESFINLLKFISFGAPGAFKFLKLDVKQSNLRYKSTTEALSATLIHQSVTGLYETRIDLSKLGEE

SEQ ID NO: 457 - protein, 1370 aa, Streptococcus gallolyticus
MTKKNYSIGLDIGTNSVGWAVITDDYKVPAKKMKVLGNTDKKYIKKNLLGALLFDSGETAEATRLKRTARRRYTRRKNRLRYLQEIFAEEMTKVDESFFYRLDESFLTTDEKDFERHPIFGNKAEEDAYHQKFPTIYHLRNYLADSSEKADLRLVYLALAHMIKYRGHFLIEGKLNAENTDVQKLFTDFVGVYDRTFDDSHLSEITVDVASTLTEKISKSRRLENLIKYYPTEKKNTLFGNLIALALGLQPNFKMNFKLSEDAKLQFSKDTYEEDLEELLGKIGDDYADLFTSAKNLYDAILLSGILTVDDNSTKAPLSASMIKRYVEHHEDLEKLKEFIKANKSELYHDIFKDKNKNGYAGYIENGVKQDEFYKYLKNTLSKIDGSDYFLDKIEREDFLRKQRTFDNGSIPHQIHLQEMHAILRRQGDYYPFLKEKQDRIEKILTFRIPYYVGPLVRKDSRFAWAEYRSDEKITPWNFDKVIDKEKSAEKFITRMTLNDLYLPEEKVLPKHSHVYETYAVYNELTKIKYVNEQGKESFFDSNMKQEIFDHVFKENRKVTKEKLLNYLNKEFPEYRIKDLIGLDKENKSFNASLGTYHDLKKILDKAFLDDKVNEEVIEDIIKTLTLFEDKDMIHERLQKYSDIFTANQLKKLERRHYTGWGRLSYKLINGIRNKENNKTILDYLIDDGSANRNFMQLINDDTLPFKQIIQKSQVVGDVDDIEAVVHDLPGSPAIKKGILQSVKIVDELVKVMGDNPDNIVIEMARENQTTNRGRSQSQQRLKKLQSSLKELGSNILNEEKPSYIEDKVENSHLQNDQLFLYYIQNGKDMYTGDELDIDHLSDYDIDHIIPQAFIKDDSIDNRVLTSSAKNRGKSDDVPSLDIVRARKAEWVRLYKSGLISKRKFDNLTKAERGGLTEADKAGFIKRQLVETRQITKHVAQILDARFNTEHDENDKVIRDVKVITLKSNLVSQFRKDFEFYKVREINDYHHAHDAYLNAVVGTALLKKYPKLASEFVYGEYKKYDIRKFITNSSDKATAKYFFYSNLMNFFKTKVKYADGTVFERPIIETNADGEIAWNKQIDFEKVRKVLSYPQVNIVKKVETQTGGFSKESILPKGDSDKLIPRKTKKVYWDTKKYGGFDSPTVAYSVFVVADVEKGKAKKLKTVKELVGISIMERSFFEENPVEFLENKGYHNIREDKLIKLPKYSLFEFEGGRRRLLASASELQKGNEMVLPGYLVELLYHAHRADNFNSTEYLNYVSEHKKEFEKVLSCVEDFANLYVDVEKNLSKIRAVADSMDNFSIEEISNSFINLLTLTALGAPADFNFLGEKIPRKRYTSTKECLTATLIHQSITGLYETRIDLSKLGEE

SEQ ID NO: 458 - protein, 1370 aa, Streptococcus gallolyticus; identical to SEQ ID NO: 457
  REGION 1..1370: note = Streptococcus gallolyticus subsp. gallolyticus TX20005

SEQ ID NO: 459 - protein, 1371 aa, Streptococcus gallolyticus
MTEKNYSIGLDIGTNSVGWAVITDDYKVPAKKMKVLGNTDKKYIKKNLLGALLFDNGETAEATRLKRTARRRYTRRKNRLRYLQEIFAEEMAKVDESFFYRLDESFLTTDDKDFERHPIFGNKADEIKYHQEFPTIYHLRKHLADSHEKADLRLIYLALAHMIKFRGHFLIEGELNAENTDVQKLFEAFVEVYDRTFDDSNLSEITVDASSILTEKFSKSRRLENLIKHYPTEKKNTLFGNLVALALGLQPNFKTSFKLSEDAKLQFSKDTYEEDLEELIGKIGDEYADLFTSAKNLYDAILLSGILTVADNTTKAPLSASMIKRYNEHQVDLKKLKEFIKNNASDKYDEIFNDKDKNGYAGYIENGVKQDEFYKYLKTTLSKIDGSDYFLDKIEREDFLRKQRTFDNGSIPHQIHLQEMHAILRRQGEHYAFLKENQAKIEKILTFRIPYYVGPLARKNSRFAWAEYHSDEKITPWNFDEIIDKEKSAEKFITRMTLNDLYLPEEKVLPKHSLVYETYTVYNELTKVKYVNEQGKSNFFDANMKQEIFEHVFKENRKVTKDKFLNYLNKEFPEYRIQDLIGLDKENKSFNASLGTYHDLKKILDKSFLDDKTNETIIEDIIQTLTLFEDRDMIRQRLQKYSDIFTPQQLKKLERRHYTGWGRLSYKLINGIRNKENGKSILDYLIDDGYANRNFMQLISDDTLPFKQIIKDAQIIGDIDDVTSVVRELPGSPAIKKGILQSVKIVDELVKVMGHNPDNIVIEMARENQTTNRGRNQSQQRLKKLQDSLKELGSNILNEEKPSYIEGKVENNHLQDDRLFLYYIQNGKDMYTGDELDIDHLSDYDIDHIIPQAFIKDDSIDNRVLTSSAKNRGKSDDVPSLDIVHDRKADWIRLYKSGLISKRKFDNLTKAERGGLTENDKAGFIKRQLVETRQITKHVAQILDSRFNTERDENDKVIRNVKVITLKSNLVSQFRKDFKFYKVREINDYHHAHDAYLNAVVGTALLKKYPKLAPEFVYGEYKKYDIRKFITSSGDKATAKYFFYSNLMNFFKRVIRYSNGKVVVRPVIECSKDTGEIAWNKQTDFEKVRRVLSYPQVNIVKKVETQTGGFSKESILPKGNSDKLIPRKTKKFRWDTPKYGGFDSPNIAYSVFVIADVEKGKAKKLKTVKELVGISIMERSSFEENPVVFLEKKGYQNVQEDNLIKLPKYSLFEFEGGRRRLLASASELQKGNEVVLSRHLVELLYHAHRVNSFNNSEHLKYVSEHKKEFGEVLSCVENFAKSYVDVEKNLGKIRAVADKIDTFSIEDISISFVNLLTLTALGAPADFNFLGEKIPRKRYTSTKECLNATLIHQSITGLYETRIDLSKLGEE

SEQ ID NO: 460 - protein, 1130 aa, Streptococcus gallolyticus
MTNGKILGLDIGIASVGVGIIEAKTGKVVHANSRLFSAANAENNAERRGFRGSRRLNRRKKHRVKRVRDLFEKYEIVTDFRNLNLNPYELRVKGLTEQLTNEELFAALRTISKRRGISYLDDAEDDSTGSTDYAKSIDENRRLLKTKTPGQIQLERLEKYGQLRGNFTVYDENGEAHRLINVFSTSDYEKEARKILETQADYNKKITAEFIDDYVEILTQKRKYYHGPGNEKSRTDYGRFRTDGTTLENIFGILIGKCSFYPDEYRASKASYTAQEYNFLNDLNNLKVPTETGKLSTEQKEALVEFAKSTATLGPAKLLKEIAKILDCKVDEIKGYREDDKGKPDLHTFEPYRKLKFNLDSVNIDDLSREVLDKLADILTLNTEREGIEDAIRHNLPNQFTEGQISEIIKVRKSQSTAFNKGWHSFSAKLMNELIPELYATSDEQMTILTRLEKFKVNKKSSKNTKTIDEKEVTDEIYNPVVAKSVRQTIKIINAAVKKYGDFDKIVIEMPRDKNADDEKKFIDKRNKENKKEKDDALKRAAYLYNGTDKLPDEVFHGNKQLETKIRLWYQQGERCLYSGKPIPIQELVHNSNNFEIDHILPLSLSFDDSLANKVLVYAWTNQEKGQKTPYQVIDSMDAAWSFREMKDYVLKQKGLGKKKRDYLLTTENIDKIEVKKKFIERNLVDTRYASRVVLNSLQSALRELGKDTKISVIRGQFTSQLRRKWKIDKSRETYHHHAVDALIIAASSQLKLWEKQDNPMFVDYGNNQVVDKQTGEILSVSDDEYKELVFQPPYQGFVNMISSKGFEDEILFSYQVDSKYNRKVSDATIYSTRKAKIGKDKKEETYVLGKIKDIYSQNGFDTFIKKYNKDKTQFLMYQKDPLTWENVIEVILRDYPTTKKSEDGKNDVKCNPFEEYRRENGLVCKYSKKGKGTPIKSLKYYDKKLGNCIDITPEGSKNEVVLQSLNPWRADVYFNPETLKYELLGLKYSDLSFEKGTGKYHISQEKYDVIKEKEGIGKKSEFKFTLYRNDLILIKDTASGEQEIYRFLSRTMPNVKHYAELKPYDKEKFDNVQELVEALGEADKVGRCIKGLNKSNLSIYKVRTDVLGNKYFVKKEGDKPKLDFKNNKK

SEQ ID NO: 461 - protein, 1136 aa, Streptococcus gordonii
MNGLVLGLDIGIASVGVGILEKDTGKIIHASSRLFPAATADNNVERRSNRQGRRLNRRKKHRSVRLQDLFEGYGLLTDFSKVSMNLNPYQLRVQGMENQLTNEELFVALKNIVKRRGISYLDDASEDGGTVSSDYGKAVEENRKLLAEKTPGQIQLERFEKYGQLRGDFTVEENGEKHRLINVFSTSAYRKEAERILRKQQEFNSKITDEFIEDYLIILTGKRKYYHGPGNEKSRTDYGRFRTDGTTLDNIFGILIGKCTFYTEEYRASKASYTAQEFNLLNDLNNLTVPTETKKLSEEQKKLIIEYAKSAKTLGASTLLKYIAKMIDASVDQIRGYRVDVNNKPEMHTFEVYRKMQSLETIKVEELPRKVLDELAHILTLNTEREGIEEAINSKLKDIFNRDQVLELVQFRKNNSSLFSKGWHNFSIKLMMELIPELYETSEEQMTILTRLGKQRSKETSKRTKYIDEKELTEEIYNPVVAKSVRQAIKIINEATKKYGIFDNIVIEMARENNEEDAKKDYIKRQKANQDEKNAAMEKAAFQYNGKKELPDNIFHGHKELTTKIRLWHQQGEKCLYTGKNIPISDLIHNQYKYEIDHILPLSLSFDDSLSNKVLVLATANQEKGQRTPFQALDSMDDAWSYREFKSYVKDSKLLSNKKKDYLLTEEDISKIEVKQKFIERNLVDTRYSSRVVLNALQDFYKSHQLDTTISVVRGQFTSQLRRKWGIEKSRETYHHHAVDALIIAASSQLRLWKKHSNPLIAYKEGQFVDSETGEIVSLSDEEYKELVFKAPYDHFVDTLRSKKFEDSILFSYQVDSKYNRKISDATIYATRKAKLDKEKKEYTYTLGKIKDIYALGTKTPSKTGFYKFLDLYKTDKSQFLMYQKDRKTWDEVIEKIIEQYRPFKEYDKNGKEVDFNPFEKYRIGNGPIRKYSKKGNGPEIKSLKYYDILLGKHKNITPDGSRNTVALLSLNPWRTDVYYNSETKKYEFLGLKYADLCFEEGGAYGISEVKYKKIREKEGIGKNSEFKFTLYKNDLILIKDTETNCQQFFRFWSRTGKDNPKSFEKHKIELKPYEKAKFEKGEELKVLGKVPPSSNQFQKNMQIENLSIYKVKTDILGNKHFIKKEGDEPKLKFKK

SEQ ID NO: 462 - protein, 1129 aa, Streptococcus infantarius
  REGION 1..1129: note = Streptococcus infantarius subsp. infantarius ATCC BAA-102
MSNGKILGLDIGVASVGVGIIDSKTGNVIHANSRLFSAANAENNAERRGFRGARRLTRRKKHRVKRVRDLFEKYDISTDFRNLNLNPYELRVKGLTEQLTNEELFAALRTIAKRRGISYLDDAEDDSTGSSDYAKSIDENRRLLKTKTPGQIQLERLEKYGQLRGNFTVYDENGEAHRLINVFSTSDYKNEARKILETQSNYNKQITDEFIEDYIEILTQKRKYYHGPGNEKSRTDYGRFRTDGTTLENIFGILIGKCSFYPEEYRASKASYTAQEFNFLNDLNNLKVPTETGKLSTEQKEYLVDFAKKSKALGASKLLKEIAKIVDCSVDDIKGYRVDNKDKPDLHTFEPYRKLKFNLSSIDIDELSRETLDKLADILTLNTEREGIEDAIKRNLPSQFTEEQISEIVQIRKNQSSAFNKGWHSFSAKLMNELIPELYVTSEEQMTILTRLEKFKVNKKSSKNTKTIDEKEITDEIYNPVVAKSVRQTIKIINAAVKKYGDFDKIVIEMPRDKNAEDEKKFIDKKQKENKKEKDDSLKRAAFLYNGTDNLPDGVFHGNKELKTKIRLWYQQGERCLYSGKLISIHDLVHNSNKFEIDHILPLSLSFDDSLANKVLVYAWTNQEKGQKTPYQVIDSMDTAWSFREMKDYVLKQKGLGKKKCEYLLTTENIDKIEVKKKFIERNLVDTRYASRVVLNSLQTALKELGKDTKVSVVRGQFTSQLRRKWNIDKSRETYHHHAVDALIIAASSQLKLWQKQENPMFESYGENQVVNKETGEILSISDDKYKELVFQPPYQGFVNTISSKGFEDEILFSYQVDSKFNRKVSDATIYSTRKAKLGKDKKDETYVLGKIKDIYSQDGFDTFIKRYKKDKTQFLMYQKDPLTWENVIEVILRDYPSEKLSEDGKKTVKCNPFEEYRRENGLICKYSKKGNGTPIKSLKYYDKKLGNCIDITPEKSKNRVVLRQISPWRADIYFNLETLKYELMGLKYSDLSFEKGTGKYHISQEKYDAIREKEGIGKKSEFKFTLYRNDLILIKDTLNNCERMLRFGSKNDTSKHYVELKPLEKGTFDSEEEILPVLGKVAKSGQFIKGLNKPNISIYKVRTDVLGNKFFIKKEGDKPKLDFKNNNK

SEQ ID NO: 463 - protein, 1375 aa, Streptococcus infantarius
MEKSYSIGLDIGTNSVGWAVITDDYKVPAKKMKVLGNTDKKYIKKNLLGALLFDSGETAEVTRLKRTARRRYTRRKNRLRYLQEIFAKEMTKVDESFFQRLEESFLTDDDKTFDSHPIFGNKAEEDAYHQKFPTIYHLRKYLADSQEKADLRLVYLALAHMIKYRGHFLIEGELNAENTDVQKLFNVFVETYDKIVDESHLSEIEVDASSILTEKVSKSRRLENLIKQYPTEKKNTLFGNLIALALGLQPNFKTNFKLSEDAKLQFSKDTYEEDLEELLGKVGDDYADLFISAKNLYDAILLSGILTVDDNSTKAPLSASMIKRYVEHHEDLEKLKEFIKINKLKLYHDIFKDKTKNGYAGYIDNGVKQDEFYKYLKTILTKIDDSDYFLDKIERDDFLRKQRTFDNGSIPHQIHLQEMHSILRRQGDYYPFLKENQAKIEKILTFRIPYYVGPLARKDSRFAWANYHSDEPITPWNFDEVVDKEKSAEKFITRMTLNDLYLPEEKVLPKHSHVYETFTVYNELTKIKYVNEQGESFFFDANMKQEIFDHVFKENRKVTKAKLLSYLNNEFEEFRINDLIGLDKDSKSFNASLGTYHDLKKILDKSFLDDKTNGQIIEDIVLTLTLFEDRDMIHERLQKYSDFFTSQQLKKLERRHYTGWGRLSYKLINGIRNKENNKTILDFLIDDGHANRNFMQLINDESLSFKTIIQEAQVVGDVDDIEAVVHDLPGSPAIKKGILQSVKIVDELVKVMGDNPDNIVIEMARENQTTGYGRNKSNQRLKRLQDSLKEFGSDILSKKKPSYVDSKVENSHLQNDRLFLYYIQNGKDMYTGEELDIDRLSDYDIDHIIPQAFIKDNSIDNKVLTSSAKNRGKSDDVPSIEIVRNRRSYWYKLYKSGLISKRKFDNLTKAERGGLTEADKAGFIKRQLVETRQITKHVAQILDARFNTKRDENDKVIRDVKVITLKSNLVSQFRKEFKFYKVREINDYHHAHDAYLNAVVGTALLKKYPKLTPEFVYGEYKKYDVRKLIAKSSDDYSEMGKATAKYFFYSNLMNFFKTEVKYADGRVFERPDIETNADGEVVWNKQKDFDIVRKVLSYPQVNIVKKVEAQTGGFSKESILSKGDSDKLIPRKTKKVYWNTKKYGGFDSPTVAYSVLVVADIEKGKAKKLKTVKELVGISIMERSFFEENPVSFLEKKGYHNVQEDKLIKLPKYSLFEFEGGRRRLLASATELQKGNEVMLPAHLVELLYHAHRIDSFNSTEHLKYVSEHKKEFEKVLSCVENFSNLYVDVEKNLSKVRAAAESMTNFSLEEISASFINLLTLTALGAPADFNFLGEKIPRKRYTSTKECLSATLIHQSVTGLYETRIDLSKLGEE

SEQ ID NO: 464 - protein, 1368 aa, Streptococcus iniae
  REGION 1..1368: note = Streptococcus iniae 9117
MRKPYSIGLDIGTNSVGWAVITDDYKVPSKKMRIQGTTDRTSIKKNLIGALLFDNGETAEATRLKRTTRRRYTRRKYRIKELQKIFSSEMNELDIAFFPRLSESFLVSDDKEFENHPIFGNLKDEITYHNDYPTIYHLRQTLADSDQKADLRLIYLALAHIIKFRGHFLIEGNLDSENTDVHVLFLNLVNIYNNLFEEDIVETASIDAEKILTSKTSKSRRLENLIAEIPNQKRNMLFGNLVSLALGLTPNFKTNFELLEDAKLQISKDSYEEDLDNLLAQIGDQYADLFIAAKKLSDAILLSDIITVKGASTKAPLSASMVQRYEEHQQDLALLKNLVKKQIPEKYKEIFDNKEKNGYAGYIDGKTSQEEFYKYIKPILLKLDGTEKLISKLEREDFLRKQRTFDNGSIPHQIHLNELKAIIRRQEKFYPFLKENQKKIEKLFTFKIPYYVGPLANGQSSFAWLKRQSNESITPWNFEEVVDQEASARAFIERMTNFDTYLPEEKVLPKHSPLYEMFMVYNELTKVKYQTEGMKRPVFLSSEDKEEIVNLLFKKERKVTVKQLKEEYFSKMKCFHTVTILGVEDRFNASLGTYHDLLKIFKDKAFLDDEANQDILEEIVWTLTLFEDQAMIERRLVKYADVFEKSVLKKLKKRHYTGWGRLSQKLINGIKDKQTGKTILGFLKDDGVANRNFMQLINDSSLDFAKIIKNEQEKTIKNESLEETIANLAGSPAIKKGILQSIKIVDEIVKIMGQNPDNIVIEMARENQSTMQGIKNSRQRLRKLEEVHKNTGSKILKEYNVSNTQLQSDRLYLYLLQDGKDMYTGKELDYDNLSQYDIDHIIPQSFIKDNSIDNTVLTTQASNRGKSDNVPNIETVNKMKSFWYKQLKSGAISQRKFDHLTKAERGALSDFDKAGFIKRQLVETRQITKHVAQILDSRFNSNLTEDSKSNRNVKIITLKSKMVSDFRKDFGFYKLREVNDYHHAQDAYLNAVVGTALLKKYPKLEAEFVYGDYKHYDLAKLMIQPDSSLGKATTRMFFYSNLMNFFKKEIKLADDTIFTRPQIEVNTETGEIVWDKVKDMQTIRKVMSYPQVNIVMKTEVQTGGFSKESIWPKGDSDKLIARKKSWDPKKYGGFDSPIIAYSVLVVAKIAKGKTQKLKTIKELVGIKIMEQDEFEKDPIAFLEKKGYQDIQTSSIIKLPKYSLFELENGRKRLLASAKELQKGNELALPNKYVKFLYLASHYTKFTGKEEDREKKRSYVESHLYYFDEIMQIIVEYSNRYILADSNLIKIQNLYKEKDNFSIEEQAINMLNLFTFTDLGAPSAFKFFNGDIDRKRYSSTNEIINSTLIYQSPTGLYETRIDLSKLGGK

SEQ ID NO: 465 - protein, 1338 aa, Streptococcus macacae
  REGION 1..1338: note = Streptococcus macacae NCTC 11558
MTKPYSIGLDIGTNSVGWAVVTDGYKVPAKKMKVLGNTDKSHIKKNLLGALLFDSGNTAKDRRLKRTARRRYTRRRNRILYLQEIFAEEMAKADESFFQRLNESFLTNDDKEFDSHPIFGNKAEEEAHHHKFPTIFHLRKHLADSTEKSDLRLIYLALAHMIKFRGHFLIEGQLKAENTNVQTLFDDFVEVYDKTVEESHLSEISVSSILTEKISKSRRLENLIKYYPTEKKNTLFGNLIALSLGLQPNFKTNFKLSEDAKLQFSKDTYEEDLGELLGKIGDNYADLFISAKNLYDAILLSGILTIDDNTTKAPLSASMIKRYEEHQEDLAQLKKFIRQNLPDQYSEVFSDKTKDGYAGYIDGKTNQEAFYKYIKNMLSKTEGADYFLDKIDREDFLRKQRTFDNGSVPHQIHLQEMHAILRRQGEYYPFLKENQDKIEKILTFRIPYYVGPLARKGSRFAWAEYKADKKVTPWNFDDILDKEKSAEEFITRMTLNDLYLPEEKVLPKHSLVYETFNVYNELTKVKYVNEQGKAIFFDANMKQEIFDHVFKENRKVTKDKLLNYLNKEFEEFRIVNLTGLDKENKAFNSSLGTYHDLRKILDKSFLDDKVNEKIIEDIIQTLTLFEDREMIRQRLQKYSDIFTTQQLKKLERRHYTGWGRLSAKLINGIRDKQSNKTILGYLIDDGYSNRNFMQLINDDSLPFKEEIARAQVIGETDDLNQLVSDIAGSPAIKKGILQSLKIVDELVKVMGHNPANIVIEMARENQTTAKGRRSSQQRYKRLEEAIKNLDHDLNHKILKEHPTDNQALQNDRLFLYYLQNGRDMYTEDPLDINRLSDYDIDHIIPQSFIKDDSIDNKVLVSSAKNRGKSDNVPSEDVVNRMRPFWNKLLSCGLISQRKYSNLTKKELKPDDKAGFIKRQLVETRQITKHVAQILDARFNTKRDENKKVIRDVKIITLKSNLVSQFRKDFKFYKVREINDYHHAHDAYLNAVIGKALLDVYPQLEPEFVYGEYPHFHGYKENKATAKKFFYSNIMNFFKKDDIRTDENGEIVWKKDEHISNIKRVLSYPQVNIVKKVEIQTVGQNGGLFDDNPKSPLEVTPSKLVPLKKELNPKKYGGYQKPTTAYPVLLITDTKQLIPISVMNKKQFEQNPVKFLRDRGYQQVGKNDFIKLPKYTLVDIGDGIKRLWASSKEIHKGNQLVVSKKSQILLYHAHHLDSDLSNDYLQNHNQQFDVLFNEIISFSKKCKLGKEHIQKIENVYSNKKNSASIEELAESFIKLLGFTQLGATSPFNFLGVKLNQKQYKGKKDYILPCTEGTLIRQSITGLYETRVDLSKIGED

SEQ ID NO: 466 - protein, 1130 aa, Streptococcus macedonicus
MTNGKILGLDIGIASVGVGIIEAKTGKVVHANSRLFSAANAENNAERRGFRGSRRLNRRKKHRVKRVRDLFEKYGIVTDFRNLNLNPYELRVKGLTEQLTNEELFAALRTISKRRGISYLDDAEDDSTGSTDYAKSIDENRRLLKTKTPGQIQLERLEKYGQLRGNFTVYDENGEAHRLINVFSTSDYEKEARKILETQADYNKKITAEFIDDYVEILTQKRKYYHGPGNEKSRTDYGRFRTDGTTLENIFGILIGKCNFYPDEYRASKASYTAQEYNFLNDLNNLKVPTETGKLSTEQKESLVEFAKNTAILGPAKLLKEIAKILDCKVDEIKGYREDDKGKPDLHTFEPYRKLKFNLDSVNIDYLSREVLDKLADILTLNTEREGIEDAIKRNLPNQFTEEQISEIINVRKSQSTAFNKGWHSFSAKLMNELIPELYATSDEQMTILTRLEKFKVKKKSSKNIKTIDEKEITDEIYNPVVAKSVRQTIKIINAAVKKYGDFDKIVIEMPRDKNADDEKKFINKRNKENKKEKDDALKRAAYLYNGTDKLPDEVFHGNKQLETKIRLWYQQGERCLYSGKPIPIQELVHNSNNFEIDHILPLSLSFDDSLANKVLVYSWTNQEKGQKTPYQVIDSMDAAWSFREMKEYVLKQKGLGKKKRDYLLTTENIDKIEVKKKFIERNLVDTRYASRVVLNSLQSALRELGKDTKVSVVRGQFTSQLRRKWKIDKSRETYHHHAVDALIIAASSQLKLWEKQDNPMFVDYGNNQVVDKQTGEILSVSDNEYKELVFQPPYQGFVNTISSKGFEDEILFSYQVDSKYNRKVSDATIYSTRKAKIGKDKKEETYVLGKIKDIYSQNGFDTFVKKYNKDKTQFLMYQKDPLTWENVIEVILGDYPTTKKSEDGKNDVKCNPFEEYRRENGLICKYSKKGKGTPIKSLKYYDKKLGNCIDITPEESRNKVILQSINPWRADVYFNPETLKYELMGLKYSDLSFEKGTGNYHISQEKYDAIKEKEGIGKKSEFKFTLYRNDLILIKDIASGEQEIYRFLSRTMPNVNHYVELKPYDKEKFDNVQELVEALGEADKVGRCIKSLNKPNISIYKVRTDVLGNKYFVKKEGDKPKLDFKNNKK

SEQ ID NO: 467 - protein, 1134 aa, Streptococcus mitis
  REGION 1..1134: note = Streptococcus mitis ATCC 6249
MNGLVLGLDIGIASEGVGILEKNSGKIIHANSRLFPAATADNNVERRKNRQARRLNRRKKHRGVRFQDLFEDYGLLTDFSKVSINLNPYRLRVDGLNQQLTNEELFIALKNIVKRRGISYLDDASEDGGAVSSDYGKAVEENRKLLAEQTPGQIQLERFEKYGQVRGDFTVVENGEKLRLINVFSTSAYKKEAERILRKQQEFNNQITDEFIEDYLKILTGKRKYYHGPGNEKSRTDYGRFRTDGTTLDNIFGILIGKCTFYPEEYRASKASYTAQEFNLLNDLNNLTVPTETKKLSEEQKKVIVEYAKEAKTLGASTLLKYIAKMIDASVDQIRGYRVDVNNKPEMHTFEVYRKMQSLETISVGELSRNVLDELAHILTLNTEREGMEEAINTKLKDSFSQDQVLELVQFRKNNSSLFSKGWHNFSLKLMMELIPELYETSEEQMTILTRLGKQKSKETSKRTKYIDEKELTEEIYNPVVAKSVRQAIKIINEATKKHGIFDNIVIEMARENNEEDAKKDYIKRQKANQDEKNAAMEKAAFQYNGKKELPDNIFHGHKELATKIRLWHQQGEKCLYTGKTIPISDLIYNQYKYEIDHILPLSLSFDDSLSNKVLALATANQEKGQRTPFQALDSMDDAWSYREFKSYVKDLKSLSNKKKDYLLTEEDISKIEVKQKFIERNLVDTRYSSRVVLNALQDFYKSHQFDTTISVVRGQFTSQLRRKWGLEKSRETYHHHAVDALIIAASSQLRLWKKQNNPLITYKEGQFVDSQTGEIISLTDDEYKELVFKAPYDHFVDTLSSKTFEDSILFSYQVDSKFNRKISDATIYATRKAKLDKEKKEYTYTLGKIKDIYSLGTKTPSKTGFYKFLDLYNKDKSQFLMFQKDRKTWDEVIEKIMEQYRPFKEYDKTGKLVDFNPFEKYRQENEPIRKYSKKGNGPEIKSLKYYDILLGKHKNITPEGSRNTVALLSLNPWRTDVYYNMETKKYEFLGLKYADLPFEEGGAYGISTETYNELREKEGIGKNSEFKFTLYKNDLILIKDTETNCQQIFRFWSRTGKDNPKSFEKHKIELKPYEKARFEKGEELEVLGKVPPSSNQLQKNMQIENLSIYKVKTDVLGNKHFIKKEGDKPKLKF

SEQ ID NO: 468 - protein, 1392 aa, Streptococcus mitis
  REGION 1..1392: note = Streptococcus mitis SK321
MNNNNYSIGLDIGTNSVGWAVITDDYKVPSKKMKVLGNTDKHFIKKNLIGALLFDEGATAEDRRFKRTARRRYTRRKNRLRYLQEIFSEEMSKVDSSFFHRLDDSFLVPEDKRGSKYPIFATLAEEKEYHKKFPTIYHLRKHLADSKEKTDLRLIYLALAHMIKYRGHFLYEESFDIKNNDIQKIFSEFISIYDNTFEGSSLSGQNAQVEAIFTDKISKSAKRERILKLFAYEKSTDLFSEFLKLIVGNQADFKKHFDLEEKAPLQFSKDTYDEDLENLLGQIGDDFADLFLVAKKLYDAILLSGILTVTDSSTKAPLSASMIERYENHQKDLAALKQFIQNNLQEKYDEVFSDQSKDGYARYINGKTTQEAFYKYIKNLLSKFEGSDYFLDKIEREDFLRKQRTFDNGSIPHQIHLQEMNAIIRRQGEHYPFLKEYKEKIETILTFRIPYYVGPLARGNRNFAWLTRNSDQAIRPWNFEEIVDQASSAEEFINKMTNYDLYLPEEKVLPKHSLLYETFAVYNELTKVKFISEGLRDYQFLDSGQKKQIVNQLFKEKRKVTEKDIIQYLHNVDGYDGIELKGIEKQFNASLSTYHDLLKIIKDKEFMDDPKNEEILENIVHTLTIFEDREMIKQRLAQYASIFDKKVIKALTRRHYTGWGKLSAKLINGICDKKTGKTILDYLIDDGYSNRNFMQLINDDGLSFKDIIQKAQVVGKTNDVKQVVQELPGSPAIKKGILQSIKLVDELVKVMGHAPESIVIEIARENQTTARGKKNSQQRYKRIEDALKNLAPGLDSNILKEHPTDNIQLQNDRLFLYYLQNGKDMYTGEALDINQLSSYDIDHIVPQAFIKDDSLDNRVLTSSKDNRGKSDNVPSLEVVQKRKAFWQQLLDSKLISEHKFNNLTKAERGGLDERDKVGFIRRQLVETRQITKHVAQILDARFNTEVNEKDKKNRTVKIITLKSNLVSNFRKEFKLYKVREINDYHHAHDAYLNAVVAKAILKKYPKLEPGFVYGDYQKYDIKRYISRSKDPKEVEKATEKYFFYSNLLNFFKEEVHYADGTIVKRENIEYSKDTGEIAWNKEKDFATIKKVLSLPQVNIVKKTEIQTHGLDRGKPRGLFNSNPSPKPSEDRKENLVPIKQGLDPRKYGGYAGISNSYAVLVKAIIEKGAKKQQKTVLEFQGISILDKINFEKNKENYLLEKGYIKILSTITLPKYSLFEFPDGTRRRLASILSTNNKRGEIHKGNELVIPEKYTTLLYHAKNINKTLEPEHLEYVEKHRNDFAKLLEYVLNFNDKYVGALKNGERIRQAFIDWETVDIEKLCFSFIGPRNSKNAGLFELTSQGSASDFEFLGVKIPRYRDYTPSSLLNATLIHQSITGLYETRIDLSKLGED

SEQ ID NO: 469 - protein, 1345 aa, Streptococcus mutans
  REGION 1..1345: note = Streptococcus mutans 11SSST2
MKKPYSIGLDIGTNSVGWAVVTDDYKVPAKKMKVLGNTDKSHIKKNLLGALLFDSGNTAADRRLKRTARRRYTRRRNRILYLQEIFAEEMSKVDDSFFHRLEDSFLVTEDKRGERHPIFGNLEEEVKYHENFPTIYHLRQYLADNPEKVDLRLVYLALAHIIKFRGHFLIEGKFDTRNNDVQRLFQEFLAVYDNTFENSSLQEQNVQVEEILTDKISKSAKKDRVLKLFPNEKSNGRFAEFLKLIVGNQADFKKHFELEEKAPLQFSKDTYEEELEVLLTQIGDNYAELFLSAKKLYDSILLSGILTVTDVSTKAPLSASMIQRYNEHQMDLAQLKQFIRQKLSDKYNEVFSDVSKDGYAGYIDGKTNQEAFYKYLKGLLNKIEGSGYFLDKIEREDFLRKQRTFDNGSIPHQIHLQEMRAIIRRQAEFYPFLADNQDRIEKILTFRIPYYVGPLARGKSDFAWLSRKSADKITPWNFDEIVDKESSAEAFINRMTNYDLYLPNQKVLPKHSLLYEKFTVYNELTKVKYKTEQGKTAFFDANMKQEIFDGVFKVYRKVTKDKLMDFLEKEFDEFRIVDLTGLDKENKAFNASYGTYHDLRKILDKDFLDNSKNEKILEDIVLTLTLFEDREMIRKRLENYSDLLTKEQVKKLERRHYTGWGRLSAELIHGIRNKESRKTLLDYLIDDGNSNRNFMQLINDDALSFKEEIAKAQVIGETDNLNQVVSDIAGSPAIKKGILQSLKIVDELVKIMGHQPENIVVEMARENQFTNQGRRNSQQRLKGLTDSIKEFGSQILKEHPVENSQLQNDRLFLYYLQNGRDMYTGEELDIDYLSQYDIDHIIPQAFIKDNSIDNRVLTSSKENRGKSDDVPSKDVVRKMKPYWSKLLSAKLITQRKFDNLTKAERGGLTDDDKAGFIKRQLVETRQITKHVARILDERFNTETDENNKKIRQVKIVTLKSNLVSNFRKEFELYKVREINDYHHAHDAYLNAVIGKALLGVYPQLEPEFVYGDYPHFHGHEENKATAKKFFYSNIMNFFKKDDVRTDKNGEIIWKKDEHISNIKKVLSYPQVNIVKKVEEQTGGFSKESILPKGNSDKLIPRKTKKFYWDTKKYGGFDSPIVAYSILVIADIEKGKSKKLKTVKALVGVTIMEKMTFERDPVAFLERKGYRNVQEENIIKLPKYSLFKLENGRKRLLASARELQKGNEIVLPNHLGTLLYHAKNIHKVDEPKHLDYVDKHKDEFKELLDVVSNFSKKYTLAEGNLEKIKELYAQNNGEDLKELSSSFINLLTFTAIGAPAAFKFFDKNIDRKRYTSTTEILNATLIHQSITGLYETRIDLSKLGGD

SEQ ID NO: 470 - protein, 1345 aa, Streptococcus mutans; identical to SEQ ID NO: 469
  REGION 1..1345: note = Streptococcus mutans 11SSST2

SEQ ID NO: 471 - protein, 1345 aa, Streptococcus mutans
  REGION 1..1345: note = Streptococcus mutans 11VS1
MKKPYSIGLDIGTNSVGWAVVTDDYKVPAKKMKVLGNTDKSHIKKNLLGALLFDSGNTAEDRRLKRTARRRYTRRRNRILYLQEIFSEEMGKVDDSFFHRLEDSFLVTEDKRGERHPIFGNLEEEVKYHENFPTIYHLRQYLADNPEKVDLRLVYLALAHIIKFRGHFLIEGKFDTRNNDVQRLFQEFLAVYDNTFENSSLQEQNVQVEEILTDKISKSAKKDRVLKLFPNEKSNGRFAEFLKLIVGNQADFKKHFELEEKAPLQFSKDTYEEELEVLLAQIGDNYAELFLSAKKLYDSILLSGILTVTDVSTKAPLSASMIQRYNEHQMDLAQLKQFIRQKLSDKYNEVFSDVSKDGYAGYIDGKTNQEAFYKYLKGLLNKIEGSGYFLDKIEREDFLRKQRTFDNGSIPHQIHLQEMRAIIRRQAEFYPFLADNQDRIEKILTFRIPYYVGPLARGKSDFAWLSRKSADKITPWNFDEIVDKESSAEAFINRMTNYDLYLPNQKVLPKHSLLYEKFTVYNELTKVKYKTEQGKTAFFDANMKQEIFDGVFKVYRKVTKDKLMDFLEKEFDEFRIVDLTGLDKENKVFNASYGTYHDLCKILDKDFLDNSKNEKILEDIVLTLTLFEDREMIRKRLENYSDLLTKEQVKKLERRHYTGWGRLSAELIHGIRNKESRKTILDYLIDDGNSNRNFMQLINDDALSFKEEIAKAQVIGETDNLNQVVSDIAGSPAIKKGILQSLKIVDELVKIMGHQPENIVVEMARENQFTKQGRRNSQQRLKGLTDSIKEFGSQILKEHPVENSQLQNDRLFLYYLQNGRDMYTGEELDIDYLSQYDIDHIIPQAFIKDNSIDNRVLTSSKENRGKSDDVPSKDVVRKMKSYWSKLLSAKLITQRKFDNLTKAERGGLTDDDKAGFIKRQLVETRQITKHVARILDERFYTETDENNKKIRQVKIVTLKSNLVSNFRKEFELYKVREINDYHHAHDAYLNAVIGKALLGVYPQLEPEFVYGDYPHFHGHKENKATAKKFFYSNIMNFFKKDDVRTDKNGEIIWKKDEHISNIKKVLSYPQVNIVKKVEEQTGGFSKESILPKGNSDKLIPRKTKKFYWDTKKYGGFDSPIVAYSILVIADIEKGKSKKLKTVKALVGVTIMEKMTFERDPVAFLERKGYRNVQEENIIKLPKYSLFKLENGRKRLLASARELQKGNEIVLPNHLGTLLYHAKNIHKVDEPKHLDYVDKHKDEFKELLDVVSNFSKKYTLAEGNLEKIKELYAQNNGEDLKELASSFINLLTFTAIGAPATFKFFDKNIDRKRYTSTTEILNATLIHQSITGLYETRIDLSKLGGD

SEQ ID NO: 472 - protein, 1345 aa, Streptococcus mutans
  REGION 1..1345: note = Streptococcus mutans 14D
MKKPYSIGLDIGTNSVGWAVVTDDYKVPAKKMKVLGNTDKSHIKKNLLGALLFDSGNTAADRRLKRTARRRYTRRRNRILYLQEIFAEEMSKVDDSFFHRLEDSFLVTEDKRGERHPIFGNLEEEVKYHENFPTIYHLRQYLADNPEKVDLRLVYLALAHIIKFRGHFLIEGKFDTRNNDVQRLFQEFLAVYDNTFENSSLQEQNVQVEEILTDKISKSAKKDRVLKLFPNEKSNGRFAEFLKLIVGNQADFKKHFELEEKAPLQFSKDTYEEELEVLLAQIGDNYAELFLSAKKLYDSILLSGILTVTDVSTKAPLSASMIQRYNEHQMDLAQLKQFIRQKLSDKYNEVFSDVSKDGYAGYIDGKTNQEAFYKYLKGLLNKIEGSGYFLDKIEREDFLRKQRTFDNGSIPHQIHLQEMRAIIRRQAEFYPFLADNQDRIEKILTFRIPYYVGPLARGKSDFAWLSRKSADKITPWNFDEIVDKESSAEAFINRMTNYDLYLPNQKVLPKHSLLYEKFTVYNELTKVKYKTEQGKTAFFDANMKQEIFDGVFKVYRKVTKDKLMDFLEKEFDEFRIVDLTGLDKENKAFNASYGTYHDLRKILDKDFLDNSKNEKILEDIVLTLTLFEDREMIRKRLENYSDLLTKEQVKKLERRHYTGWGRLSAELIHGIRNKESRKTILDYLIDDGNSNRNFMQLINDDALSFKEEIAKAQVIGETDNLNQVVSDIAGSPAIKKGILQSLKIVDELVKIMGHQPENIVVEMARENQFTNQGRRNSQQRLKGLTDSIKEFGSQILKEHPVEHSQLQNDRLFLYYLQNGRDMYTGEELDIDYLSQYDIDHIIPQAFIKDNSIDNRVLTSSKENRGKSDDVPSKNVVRKMKSYWSKLLSAKLITQRKFDNLTKAERGGLTDDDKAGFIKRQLVETRQITKHVARILDERFHTETDENNKKIRQVKIVTLKSNLVSNFRKEFELYKVREINDYHHAHDAYLNAVIGKALLGVYPQLEPEFVYGDYPHFHGHKENKATAKKFFYSNIMNFFKKDDVRTDKNGEIIWKKDEHISNIKKVLSYPQVNIVKKVEEQTGGFSKESILPKGNSDKLIPRKTKKFYWDTKKYGGFDSPIVAYSILVIADIEKGKSKKLKTVKALVGVTIMEKMTFERDPVAFLERKGYRNVQEENIIKLPKYSLFKLENGRKRLLASARELQKGNEIVLPNHLGTLLYHAKNIHKVDEPKHLDYVDKHKDEFKELLDVVSNFSKKYTLAEGNLEKIKELYAQNNGEDLKELASSFINLLTFTAIGAPATFKFFDKNIDRKRYTSTTEILNATLIHQSITGLYETRIDLSKLGGD

SEQ ID NO: 473 - protein, 1355 aa, Streptococcus mutans
  REGION 1..1355: note = Streptococcus mutans 15VF2
MKKSYSIGLDIGTNSVGWAVVTDDYKVPAKKMKVLGNTDKSHIKKNLLGALLFDSGNTAEDRRLKRTARRRYTRRRNRILYLQEIFSEEMGKVDDSFFHRLDESFLTDDDKNFDSHPIFGNKAEEDAYHQKFPTIYHLRKHLADSTEKADLRLVYLALAHMIKFRGHFLIEGELNAENTDVQKLFADFVGVYDRTFDDSHLSEITVDASSILTEKISKSRRLEKLINNYPKEKKNTLFGNLIALSLGLQPNFKTNFKLSEDAKLQFSKDTYEEDLEELLGKIGDDYADLFTLAKNLYDAILLSGILTADDSSTKAPLSASMIKRYAEHHEDLEKLKEFIKANKPELYHDIFKDETKNGYAGYIENGVKQDEFYKYLKNTLSKIAGSDYFLDKIEREDFLRKQRTFDNGSIPHQIHLQEMHAILRRQGDYYPFLKENQDRIEKILTFRIPYYVGPLARKNSRFAWAEYHSDEAVMPWNFDQVIDKESSAQAFIEHMTNNDLYLPNEKVLPKHSPLYEKYTVYNELTKIKYVTEIGEAKFFDANLKQEIFDGLFKHERKVTKKKLRTFLDKNFDEFRIVDIQGLDKETETFNASYATYQDLLKVIKDKVFMDNPENAEILENIVLTLTLFEDREMIKQRLAKYADVFDKKVIDQLARRHYTGWGRLSAKLLNGIRDKQSCKTIMDYLIDDAQSNRNLMQLITDDNLTFKDDIVKAQYVDNSDDLHQVVQSLAGSPAIKKGILQSLKIVDELVKVMGKEPEQIVVEMARENQTTAKGRRNSQQRYKRLKEAIKSLDRDLNHKILKEHPTDNQALQNNRLFLYYLQNGRDMYTGESLDINRLSDYDIDHVIPQAFIKDNSIDNRVLTSSKANRGKSDDVPSEDVVNRMRPFWNKLLSSGLISQRKYNNLTKKELTPDDKAGFIKRQLVETRQITKHVARMLDERFNKEFDDNNKRIRRVKIVTLKSNLVSSFRKEFELYKVREINDYHHAHDAYLNAVVVKALLVKYPKLEPEFVYGEYPKYNSYRERKTATQKMFFYSNIMNMFKSKVKLADDQIVERPMIEVNDETGEIAWDKTKHITTVKKVLSYPQVNIVKKVEEQTIGQNGGLFDDNPKSPLEVIPSKLVPLKKALNPEKYGGYQKPTTAYPILLIVDTKQLIPISVMDKKRFEQNPVKFLKDKGYQQIEKNNFVKLPKYTLVDIGNGIKRLWASSKEVHKGNQLVVSKKSQDLLYHAHHLDNDYSNEYVKNHYQQFDILFNEITSFSKKCKLGKEHIQKIEEAYSKERDSASIEELADGFIKLLGFTQLGATSPFSFLGIKLNQKQYTGKKDYLLPCMEATLIHQSITGLYETRIDLNKLGGD

SEQ ID NO: 474 - protein, 1355 aa, Streptococcus mutans; identical to SEQ ID NO: 473
  REGION 1..1355: note = Streptococcus mutans 15VF2

SEQ ID NO: 475 - protein, 1345 aa, Streptococcus mutans
  REGION 1..1345: note = Streptococcus mutans 1SM1
MKKPYSIGLDIGTNSVGWAVVTDDYKVPAKKMKVLGNTDKSHIKKNLLGALLFDSGNTAEDRRLKRTARRRYTRRRNRILYLQEIFSEEMGKVDDSFFHRLEDSFLVTEDKRGERHPIFGNLEEEVKYHENFPTIYHLRQYLADNPEKVDLRLVYLALAHIIKFRGHFLIEGKFDTRNNDVQRLFQEFLAVYDNTFENSSLQEQNVQVEEILTDKISKSAKKDRVLKLFPNEKSNGRFAEFLKLIVGNQADFKKHFELEEKAPLQFSKDTYEEDLEELLGKIGDDYADLFTLAKNLYDAILLSGILTADDSSTKAPLSASMIQRYNEHQMDLAQLKQFIRQKLSDKYNEVFSDVSKDGYAGYIDGKTNQEAFYKYLKGLLNKIEGSGYFLDKIEREDFLRKQRTFDNGSIPHQIHLQEMRAIIRRQAEFYPFLADNQDRIEKILTFRIPYYVGPLARGKSDFAWLSRKSADKITPWNFDEIVDKESSAEAFINRMTNYDLYLPNQKVLPKHSLLYEKFTVYNELTKVKYKTEQGKTAFFDANMKQEIFDGVFKVYRKVTKDKLMDFLEKEFDEFRIVDLTGLDKENKVFNASYGTYHDLCKILDKDFLDNSKNEKILEDIVLTLTLFEDREMIRKRLENYSDLLTKEQVKKLERRHYTGWGRLSAELIHGIRNKESRKTILDYLIDDGNSNRNFMQLINDDALSFKEEIAKAQVIGETDNLNQVVSDIAGSPAIKKGILQSLKIVDELVKIMGHQPENIVVEMARENQFTNQGRRNSQQRLKGLTDSIKEFGSQILKEHPVENSQLQNDRLFLYYLQNGRDMYTGEELDIDYLSQYDIDHIIPQAFIKDNSIDNRVLTSSKENRGKSDDVPSKDVVRKMKSYWSKLLSAKLITQRKFDNLTKAERGGLTDDDKAGFIKRQLVETRQITKHVARILDERFYTETDENNKKIRQVKIVTLKSNLVSNFRKEFELYKVREINDYHHAHDAYLNAVIGKALLGVYPQLEPEFVYGDYPHFHGHKENKATAKKFFYSNIMNFFKKDDVRTDKNGEIIWKKDEHISNIKKVLSYPQVNIVKKVEEQTGGFSKESILPKGNSDKLIPRKTKKFYWDTKKYGGFDSPIVAYSILVIADIEKGKSKKLKTVKALVGVTIMEKMTFERDPVAFLERKGYRNVQEENIIKLPKYSLFKLENGRKRLLASARELQKGNEIVLPNHLGTLLYHAKNIHKVDEPKHLDYVDKHKDEFKELLDVVSNFSKKYTLAEGNLEKIKELYAQNNGEDLKELASSFINLLTFTAIGAPATFKFFDKNIDRKRYTSTTEILNATLIHQSITGLYETRIDLSKLGGD

SEQ ID NO: 476 - protein, 1345 aa, Streptococcus mutans; identical to SEQ ID NO: 475
  REGION 1..1345: note = Streptococcus mutans 1SM1

SEQ ID NO: 477 - protein, 1350 aa, Streptococcus mutans
  REGION 1..1350: note = Streptococcus mutans 24
MKKPYSIGLDIGTNSVGWAVVTDDYKVPAKKMKVLGNTDKSHIEKNLLGALLFDSGNTAEDRRLKRTARRRYTRRRNRILYLQEIFSEEMGKVDDSFFHRLEDSFLVTEDKRGERHPIFGNLEEEVKYHENFPTIYHLRQYLADNPEKVDLRLVYLALAHIIKFRGHFLIEGKFDTRNNDVQRLFQEFLAVYDNTFENSSLQEQNVQVEEILTDKISKSAKKDRVLKLFPNEKSNGRFAEFLKLIVGNQADFKKHFELEEKAPLQFSKDTYEEELEVLLAQIGDNYAELFLSAKKLYDSILLSGILTVTDVSTKAPLSASMIQRYNEHQMDLTQLKQFIRQKLSDKYNEVFSDVSKDGYAGYIDGKTNQEAFYKYLKGLLNKIEGSGYFLDKIEREDFLRKQRTFDNGSIPHQIHLQEMRAIIRRQAEFYPFLADNQDRIEKILTFRIPYYVGPLARGKSDFAWLSRKSADKITPWNFDEIVDKESSAEAFINRMTNYDLYLPNQKVLPKHSLLYEKFTVYNELTKVKYKTEQGKTAFFDANMKQEIFDGVFKVYRKVTKDKLMDFLEKEFDEFRIVDLTGLDKENKAFNASYGTYHDLRKILDKDFLDNSKNEKILEDIVLTLTLFEDREMIRKRLKNYSDLLTKEQLKKLERRHYTGWGRLSAELIHGIRNKESRKTILDYLIDDGNSNRNFMQLINDDALSFKEEIAKAQVIGETDNLNQVVSDIAGSPAIKKGILQSLKIVDELVKIMGHQPENIVVEMARENQFTNQGRQNSQQRLKGLTDSIKEFGSQILKEHPVENSQLQNDRLFLYYLQNGRDMYTGEELDIDYLSQYDIDHIIPQAFIKDNSIDNRVLTSSKENRGKSDDVPSEDVVNRMRPFWNKLLSSGLISQRKYNNLTKKELTLDDKAGFIKRQLVETRQITKHVARMLDERFNKEFDDNNKRICKVKIVTLKSNLVSSFRKEFELYKVREINDYHHAHDAYLNAVVVKALLVKYSKLEPEFVYGEYPKYNSYRERKTATQKMFFYSNIMNMFKSKVKLADDQIVERPMIEVNDETGEIAWDKTKHITTVKKVLSYPQVNIVKKVEEQTIGQNGGLFDDNPKSPLEVIPSKLVPLKKALNPEKYGGYQKPTTAYPILLIVDTKQLIPISVMDKKRFEQNPVKFLKDKGYQQIEKNNFVKLPKYTLVDIGNGIKRLWASSKEVHKGNQLVVSKKSQDLLYHAHHLDNDYSNEYVKNHYQQFDILFNEITSFSKKCKLGKEHIQKIEEAYSKERDSASIEELADGFIKLLGFTQLGATSPFSFLGIKLNQKQYTGKKDYLLPCMEATLIHQSITGLYETRIDLSKLGGD

SEQ ID NO: 478 - protein, 1350 aa, Streptococcus mutans; identical to SEQ ID NO: 477
  REGION 1..1350: note = Streptococcus mutans 24

SEQ ID NO: 479 - protein, 1345 aa, Streptococcus mutans; identical to SEQ ID NO: 472
  REGION 1..1345: note = Streptococcus mutans 2VS1

SEQ ID NO: 480 - protein, 1345 aa, Streptococcus mutans; identical to SEQ ID NO: 472
  REGION 1..1345: note = Streptococcus mutans 2VS1

SEQ ID NO: 481 - protein, 1345 aa, Streptococcus mutans; identical to SEQ ID NO: 471
  REGION 1..1345: note = Streptococcus mutans 3SN1

SEQ ID NO: 482 - protein, 1345 aa, Streptococcus mutans; identical to SEQ ID NO: 471
  REGION 1..1345: note = Streptococcus mutans 3SN1

SEQ ID NO: 483 - protein, 1345 aa, Streptococcus mutans
  REGION 1..1345: note = Streptococcus mutans 4SM1
MKKPYSIGLDIGTNSVGWAVVTDDYKVPAKKMKVLGNTDKSHIKKNLLGALLFDSGNTAEDRRLKRTARRRYTRRRNRILYLQEIFSEEMGKVDDSFFHRLEDSFLVTEDKRGERHPIFGNLEEEVKYHENFPTIYHLRQYLADNPEKVDLRLVYLALAHIIKFRGHFLIEGKFDTRNNDVQRLFQEFLAVYDNTFENSSLQEQNVQVEEILTDKISKSAKKDRVLKLFPNEKSNGRFAEFLKLIVGNQADFKKHFELEEKAPLQFSKDTYEEDLEELLGKIGDDYADLFTLAKNLYDAILLSGILTADDSSTKAPLSASMIQRYNEHQMDLAQLKQFIRQKLSDKYNEVFSDVSKDGYAGYIDGKTNQEAFYKYLKGLLNKIEGSGYFLDKIEREDFLRKQRTFDNGSIPHQIHLQEMRAIIRRQAEFYPFLADNQDRIEKILTFRIPYYVGPLARGKSDFAWLSRKSADKITPWNFDEIVDKESSAEAFINRMTNYDLYLPNQKVLPKHSLLYEKFTVYNELTKVKYKTEQGKTAFFDANMKQEIFDGVFKVYRKVTKDKLMDFLEKEFDEFRIVDLTGLDKENKVFNASYGTYHDLCKILDKDFLDNSKNEKILEDIVLTLTLFEDREMIRKRLENYSDLLTKEQVKKLERRHYTGWGRLSAELIHGIRNKESRKTILDYLIDDGNSNRNFMQLINDDALSFKEEIAKAQVIGETDNLNQVVSDIAGSPAIKKGILQSLKIVDELVKIMGHQPENIVVEMARENQFTNQGRRNSQQRLKGLTDSIKEFGSQILKEHPVENSQLQNDRLFLYYLQNGRDMYTGEELDIDYLSQYDIDHIIPQAFIKDNSIDNRVLTSSKENRGKSDDVPSKDVVRKMKPYWSKLLSAKLITQRKFDNLTKAERGGLTDDDKAGFIKRQLVETRQITKHVARILDERFNTETDENNKKIRQVKIVTLKSNLVSNFRKEFELYKVREINDYHHAHDAYLNAVIGKALLGVYPQLEPEFVYGDYPHFHGHEENKATAKKFFYSNIMNFFKKDDVRTDKNGEIIWKKDEHISNIKKVLSYPQVNIVKKVEEQTGGFSKESILPKGNSDKLIPRKTKKFYWDTKKYGGFDSPIVAYSILVIADIEKGKSKKLKTVKALVGVTIMEKMTFERDPVAFLERKGYRNVQEENIIKLPKYSLFKLENGRKRLLASARELQKGNEIVLPNHLGTLLYHAKNIHKVDEPKHLDYVDKHKDEFKELLDVVSNFSKKYTLAEGNLEKIKELYAQNNGEDLKELASSFINLLTFTAIGAPATFKFFDKNIDRKRYTSTTEILNATLIHQSITGLYETRIDLSKLGGD

SEQ ID NO: 484 - protein, 1345 aa, Streptococcus mutans; identical to SEQ ID NO: 483
  REGION 1..1345: note = Streptococcus mutans 4SM1

SEQ ID NO: 485 - protein, 1345 aa, Streptococcus mutans
  REGION 1..1345: note = Streptococcus mutans 4VF1
MKKPYSIGLDIGTNSVGWAVVTDDYKVPAKKMKVLGNTDKSHIKKNLLGALLFDSGNTAEDRRLKRTARRRYTRRRNRILYLQEIFSEEMGKVDDSFFHRLEDSFLVTEDKRGERHPIFGNLEEEVKYHENFPTIYHLRQYLADNPEKVDLRLVYLALAHIIKFRGHFLIEGKFDTRNNDVQRLFQEFLAVYDNTFENSSLQEQNVQVEEILTDKISKSAKKDRVLKLFPNEKSNGRFAEFLKLIVGNQADFKKHFELEEKAPLQFSKDTYEEELEVLLAQIGDNYAELFLSAKKLYDSILLSGILTVTDVSTKAPLSASMIQRYNEHQMDLAQLKQFIRQKLSDKYNEVFSDVSKDGYAGYIDGKTNQEAFYKYLKGLLNKIEGSGYFLDKIEREDFLRKQRTFDNGSIPHQIHLQEMRAIIRRQAEFYPFLADNQDRIEKILTFRIPYYVGPLARGKSDFAWLSRKSADKITPWNFDEIVDKESSAEAFINRMTNYDLYLPNQKVLPKHSLLYEKFTVYNELTKVKYKTEQGKTAFFDANMKQEIFDGVFKVYRKVTKDKLMDFLEKEFDEFRIVDLTGLDKENKVFNASYGTYHDLCKILDKDFLDNSKNEKILEDIVLTLTLFEDREMIRKRLENYSDLLTKEQVKKLERRHYTGWGRLSAELIHGIRNKESRKTILDYLIDDGNSNRNFMQLINDDALSFKEEIAKAQVIGETDNLNQVVSDIAGSPAIKKGILQSLKIVDELVKIMGHQPENIVVEMARENQFTKQGRRNSQQRLKGLTDSIKEFGSQILKEHPVENSQLQNDRLFLYYLQNGRDMYTGEELDIDYLSQYDIDHIIPQAFIKDNSIDNRVLTSSKENRGKSDDVPSKDVVRKMKSYWSKLLSAKLITQRKFDNLTKAERGGLTDDDKAGFIKRQLVETRQITKHVARILDERFYTETDENNKKIRQVKIVTLKSNLVSNFRKEFELYKVREINDYHHAHDAYLNAVIGKALLGVYPQLEPEFVYGDYPHFHGHKENKATAKKFFYSNIMNFFKKDDVRTDRNGEIIWKKDEHISNIKKVLSYPQVNIVKKVEEQTGGFSKESILPKGNSDKLIPRKTKKFYWDTKKYGGFDSPIVAYSILVIADIEKGKSKKLKTVKALVGVTIMEKMTFERDPVAFLERKGYRNVQEENIIKLPKYSLFKLENGRKRLLASARELQKGNEIVLPNHLGTLLYHAKNIHKVDEPKHLDYVDKHKDEFKELLDVVSNFSKKYTLAEGNLEKIKELYAQNNGEDLKELASSFINLLTFTAIGAPATFKFFDKNIDRKRYTSTTEILNATLIHQSITGLYETRIDLSKLGGD

SEQ ID NO: 486 - protein, 1345 aa, Streptococcus mutans; identical to SEQ ID NO: 485
  REGION 1..1345: note = Streptococcus mutans 4VF1

SEQ ID NO: 487 - protein, 1345 aa, Streptococcus mutans
  REGION 1..1345: note = Streptococcus mutans 5SM3
MKKPYSIGLDIGTNSVGWAVVTDDYKVPAKKMKVLGNTDKSHIEKNLLGALLFDSGNTAEDRRLKRTARRRYTRRRNRILYLQEIFSEEMGKVDDSFFHRLEDFFLVTEDKRGERHPIFGNLEEEVKYHENFPTIYHLRQYLADNPEKVDLRLVYLALAHIIKFRGHFLIEGKFDTRNNDVQRLFQEFLAVYDNTFENSSLQEQNVQVEEILTDKISKSAKKDRVLKLFPNEKSNGRFAEFLKLIVGNQADFKKHFELEEKAPLQFSKDTYEEELEVLLAQIGDNYAELFLSAKKLYDSILLSGILTADDSSTKAPLSASMIQRYNEHQMDLAQLKQFIRQKLSDKYNEVFSDVSKDGYAGYIDGKTNQEAFYKYLKGLLNKIEGSGYFLDKIEREDFLRKQRTFDNGSIPHQIHLQEMRAIIRRQSEFYPFLADNQDRIEKILTFRIPYYVGPLARGKSDFAWLSRKSADKITPWNFDEIVDKESSAEAFINRMTNYDLYLPNQKVLPKHSLLYEKFTVYNELTKVKYKTEQGETAFFDANMKQEIFDGVFKVYRKVTKDKLMDFLEKEFDEFRIVDLTGLDKENKAFNASYGTYHDLRKILDKDFLDNSKNEKILEDIVLTLTLFEDREMIRKRLKNYSDLLTKEQLKKLERRHYTGWGRLSAELIHGIRNKESRKTILDYLIDDGNSNRNFMQLINDDALSFKEEIAKAQVIGETDNLNQVVSDIAGSPAIKKGILQSLKIVDELVKIMGHQPENIVVEMARENQFTNQGRRNSQQRLKGLTDSIKEFGSQILKEHPVENSQLQNDRLFLYYLQNGRDMYTGEELDIDYLSQYDIDHIIPQAFIKDNSIDNRVLTSSKENRGKSDDVPSKDVVRKMKPYWSKLLSAKLITQRKFDNLTKAERGGLTDDDKAGFIKRQLVETRQITKHVARILDERFNTETDENNKKIRQVKIVTLKSNLVSNFRKEFELYKVREINDYHHAHDAYLNAVIGKALLGVYPQLEPEFVYGDYPHFHGHEENKATAKKFFYSNIMNFFKKDDVRTDKNGEIIWKKDEHISNIKKVLSYPQVNIVKKVEEQTGGFSKESILPKGNSDKLIPRKTKKFYWDTKKYGGFDSPIVAYSILVIADIEKGKSKKLKTVKALVGVTIMEKMTFERDPVAFLERKGYRNVQEENIIKLPKYSLFKLENGRKRLLASARELQKGNEIVLPNHLGTLLYHAKNIHKVDEPKHLDYVDKHKDEFKELLDVVSNFSKKYTLAEGNLEKIKELYAQNNGEDLKELASSFINLLTFTAIGAPATFKFFDKNIDRKRYTSTTEILNATLIHQSITGLYETRIDLSKLGGD

SEQ ID NO: 488 - protein, 1345 aa, Streptococcus mutans; identical to SEQ ID NO: 487
  REGION 1..1345: note = Streptococcus mutans 5SM3

SEQ ID NO: 489 - protein, 1359 aa, Streptococcus mutans
  REGION 1..1359: note = Streptococcus mutans 66-2A
MKKPYSIGLDIGTNSVGWAVVTDDYKVPAKKMKVLGNTDKSHIKKNLLGALLFDSGNTAEDRRLKRTARRRYTRRRNRILYLQEIFAEEMMQVDESFFQRLDDSFLVEEDKRGSRYPIFGTLKEEKKYHKEFKTIYHLREKLANSTEKADLRLVYLSLAHMIKFRGHFLIEGQLKAENTNVQALFKDFVEVYDKTVEESHLSEMTVDALSILTEKVSKSRRLENLVECYPTEKKNTLFGNLIALSLGLQPNFKTNFQLSEDAKLQFSKDTYEEDLEGLLGEIGDEYADLFASAKNLYDAILLSGILAVDDNTTKAPLSASMVKRYKEHKEELAAFKRFIKEKLPKKYEEIFKDDTKNGYAGYVGADKKLRKRSGKLATEEEFYKYVKGILNKVEGADVWLDKIDREDFLRKQRTFDNGSIPHQIHLQEMHAILRRQGEHYPFLKENQDKIEKILTFRIPYYVGPLVRKGSRFAWAEYKADEKITPWNFDDILDKEKSAEKFITRMTLNDLYLPEEKVLPKHSLLYETFTVYNELTKVKYVNEQGEAKFFDANMKQEIFDHVFKENRKVTKDKLLNYLNKEFEEFRIVNLTGLDKENKVFNSSLGTYHDLRKILNKSFLDNKENEQIIEDIIQTLTLFEDREMIRQRLQKYSDIFTKAQLKKLERRHYTGWGRLSYKLINGIRDKQSNKTILGYLIDDGYSNRNFMQLINDDALSFKEEIAKAQVIGEMDGLNQVVSDIAGSPAIKKGILQSLKIVDELVKVMGHNPANIVIEMARENQTTAKGRRSSQKRYKRLEEAIKNLDHDLNHKILKEHPTDNQALQNDRLFLYYLQNGRDMYTEDPLDINRLSDYDIDHIIPQAFIKDNSIDNRVLTRSDKNRGKSDDVPSEEVVHKMKPFWSKLLSAKLITQRKFDNLTKAERGGLTDDDKAGFIKRQLVETRQITKHVARILDERFNTETDENNKKIRQVKIVTLKSNLVSNFRKEFELYKVREINDYHHAHDAYLNAVIGKALLGVYPQLEPEFVYGDYPHFHGHKENKATAKKFFYSNIMNFFKKGDVRTDKNGEIIWKKDEHISNIKKVLSYPQVNIVKKVEEQTGGFSKESILPKGNSDKLIPRKTKKFYWDTKKYGGFDSPIVAYSILVIADIEKGKSKKLKTVKALVGVTIMEKMTFERDPVAFLERKGYRNVQEENIIKLPKYSLFKLENGRKRLLASARELQKGNEIVLPNHLETLLYHAKNIHKVDEPKHLDYVDKHKDEFKELLDVVSNFSKKYTLAEGNLEKIKELYAQNNGEDLKELASSFINLLTFTAIGAPAAFKFFDKNIDRKRYTSTTEILNATLIHQSITGLYETRIDLNKLGGD

SEQ ID NO: 490 - protein, 1359 aa, Streptococcus mutans; identical to SEQ ID NO: 489
  REGION 1..1359: note = Streptococcus mutans 66-2A

SEQ ID NO: 491 - protein, 1345 aa, Streptococcus mutans
  REGION 1..1345: note = Streptococcus mutans 8ID3
MKKPYSIGLDIGTNSVGWAVVTDDYKVPAKKMKVLGNTDKSHIEKNLLGALLFDSGNTAEDRRLKRTARRRYTRRRNRILYLQEIFSEEMGKVDDSFFHRLEDSFLVTEDKRGERHPIFGNLEEEVKYHENFPTIYHLRQYLADNPEKVDLRLVYLALAHIIKFRGHFLIEGKFDTRNNDVQRLFQEFLAVYDNTFENSSLQEQNVQVEEILTDKISKSAKKDRVLKLFPNEKSNGRFAEFLKLIVGNQADFKKHFELEEKAPLQFSKDTYEEELEVLLAQIGDNYAELFLSAKKLYDSILLSGILTVTDVGTKAPLSASMIQRYNEHQMDLAQLKQFIRQKLSDKYNEVFSDVSKDGYAGYIDGKTNQEAFYKYLKGLLNKIEGSGYFLDKIEREDFLRKQRTFDNGSIPHQIHLQEMRAIIRRQAEFYPFLADNQDRIEKLLTFRIPYYVGPLARGKSDFAWLSRKSADKITPWNFDEIVDKESSAEAFINRMTNYDLYLPNQKVLPKHSLLYEKFTVYNELIKVKYKTEQGKTAFFDANMKQEIFDGVFKVYRKVTKDKLMDFLEKEFDEFRIVDLTGLDKENKVFNASYGTYHDLCKILDKDFLDNSKNEKILEDIVLTLTLFEDREMIRKRLENYSDLLTKEQVKKLERRHYTGWGRLSAELIHGIRNKESRKTILDYLIDDGNSNRNFMQLINDDALSFKEEIAKAQVIGETDNLNQVVSDIAGSPAIKKGILQSLKIVDELVKIMGHQPENIVVEMARENQFTNQGRRNSQQRLKGLTDSIKEFGSQILKEHPVENSQLQNDRLFLYYLQNGRDMYTGEELDIDYLSQYDIDHIIPQAFIKDNSIDNRVLTSSKENRGKSDDVPSKDVVRKMKSYWSKLLSAKLITQRKFDNLTKAERGGLTDDDKAGFIKRQLVETRQITKHVARILDERFNTETDENNKKIRQVKIVTLKSNLVSNFRKEFELYKVREINDYHHAHDAYLNAVIGKALLGVYPQLEPEFVYGDYPHFHGHKENKATAKKFFYSNIMNFFKKDDVRTDKNGEIIWKKDEHISNIKKVLSYPQVNIVKKVEEQTGGFSKESILPKGNSDKLIPRKTKKFYWDTKKYGGFDSPIVAYSILVIADIEKGKSKKLKTVKALVGVTIMEKMTFERDPVAFLERKGYRNVQEENIIKLPKYSLFKLENGRKRLLASARELQKGNEIVLPNHLGTLLYHAKNIHKVDEPKHLDYVDKHKDEFKELLDVVSNFSKKYTLAEGNLEKIKELYAQNNGEDLKELASSFINLLTFTAIGAPATFKFFDKNIDRKRYTSTTEILNATLIHQSITGLYETRIDLNKLGGD

SEQ ID NO: 492 - protein, 1345 aa, Streptococcus mutans; identical to SEQ ID NO: 491
  REGION 1..1345: note = Streptococcus mutans 8ID3

SEQ ID NO: 493 - protein, 1345 aa, Streptococcus mutans
  REGION 1..1345: note = Streptococcus mutans A19
MKKPYSIGLDIGTNSVGWSVVTDDYKVPAKKMKVLGNTDKSHIEKNLLGALLFDSGNTAEDRRLKRTARRRYTRRRNRILYLQEIFSEEMGKVDDSFFHRLEDSFLVTEDKRGERHPIFGNLEEEVKYHENFPTIYHLRQYLADNPEKVDLRLVYLALAHIIKFRGHFLIEGKFDTRNNDVQRLFQEFLAVYDNTFENSSLQEQNVQVEEILTDKISKSAKKDRVLKLFPNEKSNGRFAEFLKLIVGNQADFKKHFELEEKAPLQFSKDTYEEELEVLLAQIGDNYAELFLSAKKLYDSILLSGILTVTDVGTKAPLSASMIQRYNEHQMDLAQLKQFIRQKLSDKYNEVFSDVSKDGYAGYIDGKTNQEAFYKYLKGLLNKIEGSGYFLDKIEREDFLRKQRTFDNGSIPHQIHLQEMRAIIRRQAEFYPFLADNQDRIEKLLTFRIPYYVGPLARGKSDFAWLSRKSADKITPWNFDEIVDKESSAEAFINRMTNYDLYLPNQKVLPKHSLLYEKFTVYNELTKVKYKTEQGKTAFFDANMKQEIFDGVFKVYRKVTKDKLMDFLEKEFDEFRIVDLTGLDKENKVFNASYGTYHDLCKILDKDFLDNSKNEKILEDIVLTLTLFEDREMIRKRLENYSDLLTKEQVKKLERRHYTGWGRLSAELIHGIRNKESRKTILDYLIDDGNSNRNFMQLINDDALSFKEEIAKAQVIGETDNLNQVVSDIAGSPAIKKGILQSLKIVDELVKIMGHQPENIVVEMARENQFTNQGRRNSQQRLKGLTDSIKEFGSQILKEHPVENSQLQNDRLFLYYLQNGRDMYTGEELDIDYLSQYDIDHIIPQAFIKDNSIDNRVLTSSKENRGKSDDVPSKDVVRKMKSYWSKLLSAKLITQRKFDNLTKAERGGLTDDDKAGFIKRQLVETRQITKHVARILDERFNTETDENNKKIRQVKIVTLKSNLVSNFRKEFELYKVREINDYHHAHDAYLNAVIGKALLGVYPQLEPEFVYGDYPHFHGHKENKATAKKFFYSNIMNFFKKDDVRIDKNGEIIWKKDEHISNIKKVLSYPQVNIVKKVEEQTGGFSKESILPKGNSDKLIPRKTKKFYWDTKKYGGFDSPIVAYSILVIADIEKGKSKKLKTVKALVGVTIMEKMTFERDPVAFLERKGYRNVQEENIIKLPKYSLFKLENGRKRLLASARELQKGNEIVLPNHLGTLLYHAKNIHKVDEPKHLDYVDKHKDEFKELLDVVSNFSKKYTLAEGNLEKIKELYAQNNGEDLKELASSFINLLTFTAIGAPATFKFFDKNIDRKRYTSTTEILNATLIHQSITGLYETRIDLSKLGGD

SEQ ID NO: 494 - protein, 1345 aa, Streptococcus mutans; identical to SEQ ID NO: 493
  REGION 1..1345: note = Streptococcus mutans A19

SEQ ID NO: 495 - protein, 1345 aa, Streptococcus mutans; identical to SEQ ID NO: 472
  REGION 1..1345: note = Streptococcus mutans B

SEQ ID NO: 496 - protein, 1345 aa, Streptococcus mutans; identical to SEQ ID NO: 472
  REGION 1..1345: note = Streptococcus mutans G123

SEQ ID NO: 497 - protein, 1345 aa, Streptococcus mutans
MKKPYSIGLDIGTNSVGWAVVTDDYKVPAKKMKVLGNTDKSHIKKNLLGALLFDSGNTAEDRRLKRTARRRYTRRRNRILYLQEIFSEEMGKVDDSFFHRLDESFLTDDDKNFDSHPIFGNKAEEDAYHQKFPTIYHLRKHLADSTEKADLRLVYLALAHMIKFRGHFLIEGELNAENTDVQKLFADFVGVYDRTFDDSHLSEITVDASSILTEKISKSRRLEKLINNYPKEKKNTLFGNLIALSLGLQPNFKTNFKLSEDAKLQFSKDTYEEELEVLLAQIGDNYAELFLSAKKLYDSILLSGILTVTDVSTKAPLSASMIQRYNEHQMDLAQLKQFIRQKLSDKYNEVFSDVSKDGYAGYIDGKTNQEAFYKYLKGLLNKIEGSGYFLDKIEREDFLRKQRTFDNGSIPHQIHLQEMRAIIRRQAEFYPFLADNQDRIEKILTFRIPYYVGPLARGKSDFAWLSRKSADKITPWNFDEIVDKESSVEAFINRMTNYDLYLPNQKVLPKHSLLYEKFTVYNELTKVKYKTEQGKTAFFDANMKQEIFDGVFKVYRKVTKDKLMDFLEKEFDEFRIVDLTGLDKENKAFNASYGTYHDLRKILDKDFLDNSKNEKILEDIVLTLTLFEDREMIRKRLKNYSDLLTKEQLKKLERRHYTGWGRLSAELIHGIRNKESRKTILDYLIDDGNSNRNFMQLINDDALSFKEEIAKAQVIGETDNLNQVVSDIAGSPAIKKGILQSLKIVDELVKIMGHQPENIVVEMARENQFTNQGRRNSQQRLKGLTDSIKEFGSQILKEHPVENSQLQNDRLFLYYLQNGRDMYTGEELDIDYLSQYDIDHIIPQAFIKDNSIDNRVLTSSKENRGKSDDVPSKDVVRKMKSYWSKLLSAKLITQRKFDNLTKGERGGLTDDDKAGFIKRQLVETRQITKHVARILDERFNTETDENNKKIRQVKIVTLKSNLVSNFRKEFELYKVREINDYHHAHDAYLNAVIGKALLGVYPQLEPEFVYGDYPHFHGHKENKATAKKFFYSNIMNFFKKDDVRTDKNGEIIWKKDEYISNIKKVLSYPQVNIVKKVEEQTGGFSKESILPKGDSDKLIPRKTKKFYWDTKKYGGFDSPIVAYSILVIADIEKGKSKKLKTVKALVGVTIMEKMTFERDPVAFLERKGYRNVQEENIIKLPKYSLFKLENGRKRLLASARELQKGNEIVLPNHLGTLLYHAKNIHKVDEPKHLDYVDKHKDEFKELLDVVSNFSKKYTLAEGNLEKIKELYAQNNGEDLKELASSFINLLTFTAIGAPATFKFFDKNIDRKRYTSTTEILNATLIHQSITGLYETRIDLSKLGGD

SEQ ID NO: 498 - protein, 1345 aa, Streptococcus mutans
MKKPYSIGLDIGTNSVGWAVVTDDYKVPDKKMKVLGNTDKSHIKKNLLGALLFDSGNTAEDRRLKRTARRRYTRRRNRILYLQEIFSEEMGKVDDSFFHRLEDSFLVTEDKRGERHPIFGNLEEEVKYHENFPTIYHLRQYLADNPEKTDLRLVYLALAHIIKFRGHFLIEGKFDTRNNDVQRLFQEFLAVYDNTFENSSLQEQNVQVEEILTDKISKSAKKDRVLKLFPNEKSNGRFAEFLKLIVGNQADFKKHFELEEKAPLQFSKDIYEEELEVLLAQIGDNYAELFLSAKKLYDSILLSGILTVTDVSTKAPLSASMIQRYNEHQMDLAQLKQFIRQKLSDKYNEVFSDVSKDGYAGYIDGKTNQEAFYKYLKGLLNKIEGSGYFLDKIEREDFLRKQRTFDNGSIPHQIHLQEMRAIIRRQAEFYPFLADNQDRIEKILTFRIPYYVGPLARGKSDFAWLSRKSADKITPWNFDEIVDKESSVEAFINRMTNYDLYLPNQKVLPKHSLLYEKFTVYNELTKVKYKTEQGKTAFFDANMKQEIFDGVFKVYRKVTKDKLMDFLEKEFDEFRIVDLTGLDKENKAFNASYGTYHDLRKILDKDFLDNSKNEKILEDIVLTLTLFEDREMIRKRLKNYSDLLTKEQLKKLERRHYTGWGRLSAELIHGIRNKESRKTILDYLIDDGNSNRNFMQLINDDALSFKEEIAKAQVIGETDNLNQVVSDIAGSPAIKKGILQSLKIVDELVKIMGHQPENIVVEMARENQFTNQGRRNSQQRLKGLTDSIKEFGSQILKEHPVENSQLQNDRLFLYYLQNGRDMYTGEELDIDYLSQYDIDHIIPQAFIKDNSIDNRVLTSSKENRGKSDDVPSKDVVRKMKSYWSKLLSAKLITQRKFDNLTKAERGGLTDDDKAGFIKRQLVETRQITKHVARILDERFYTETDENNKKIRQVKIVTLKSNLVSNFRKEFELYKVREINDYHHAHDAYLNAVIGKALLGVYPQLEPEFVYGDYPHFHGHKENKATAKKFFYSNIMNFFKKDDVRTDKNGEIIWKKDEHISNIKKVLSYPQVNIVKKVEEQTGGFSKESILPKGNSDKLIPRKTKKFYWDTKKYGGFDSPIVAYSILVIADIEKGKSKKLKTVKALVGVTIMEKMTFERDPVAFLERKGYRNVQEENIIKLPKYSLFKLENGRKRLLASARELQKGNEIVLPNHLGTLLYHAKNIHKVDEPKHLDYVDKHKDEFKELLDVVSNFSKKYTLAEGNLEKIKELYAQNNGEDLKELASSFINLLTFTAIGAPATFKFFDKNIDRKRYTSTTEILNATLIHQSITGLYETRIDLSKLGGD

SEQ ID NO: 499 - protein, 1345 aa, Streptococcus mutans
  REGION 1..1345: note = Streptococcus mutans M21
MKKPYSIGLDIGTNSVGWAVVTDDYKVPAKKMKVLGNTDKSHIKKNLLGALLFDSGNTAEDRRLKRTARRRYTRRRNRILYLQEIFSEEMGKVDDSFFHRLEDSFLVTEDKRGERHPIFGNLEEEVKYHENFPTIYHLRQYLADNPEKTDLRLVYLALAHIIKFRGHFLIEGKFDTRNNDVQRLFQEFLAVYDNTFENSSLQEQNVQVEEILTDKISKSAKKDRVLKLFPNEKSNGRFAEFLKLIVGNQADFKKHFELEEKAPLQFSKDIYEEELEVLLAQIGDNYAELFLSAKKLYDSILLSGILTVTDVSTKAPLSASMIQRYNEHQMDLAQLKQFIRQKLSDKYNEVFSDVSKDGYAGYIDGKTNQEAFYKYLKGLLNKIEGSGYFLDKIEREDFLRKQRTFDNGSIPHQIHLQEMRAIIRRQAEFYPFLADNQDRIEKILTFRIPYYVGPLARGKSDFAWLSRKSADKITPWNFDEIVDKESSVEAFINRMTNYDLYLPNQKVLPKHSLLYEKFTVYNELTKVKYKTEQGKTAFFDANMKQEIFDGVFKVYRKVTKDKLMDFLEKEFDEFRIVDLTGLDKENKAFNASYGTYHDLRKILDKDFLDNSKNEKILEDIVLTLTLFEDREMIRKRLKNYSDLLTKEQLKKLERRHYTGWGRLSAELIHGIRNKESRKTILDYLIDDGNSNRNFMQLINDDALSFKEEIAKAQVIGETDNLNQVVSDIAGSPAIKKGILQSLKIVDELVKIMGHQPENIVVEMARENQFTNQGRRNSQQRLKGLTDSIKEFGSQILKEHPVENSQLQNDRLFLYYLQNGRDMYTGEELDIDYLSQYDIDHIIPQAFIKDNSIDNRVLTSSKENRGKSDDVPSKNVVRKMKSYWSKLLSAKLITQRKFDNLTKAERGGLTDDDKAGFIKRQLVETRQITKHVARILDERFHTETDENNKKIRQVKIVTLKSNLVSNFRKEFELYKVREINDYHHAHDAYLNAVIGKALLGVYPQLEPEFVYGDYPHFHGHKENKATAKKFFYSNIMNFFKKDDVRTDKNGEIIWKKDEHISNIKKVLSYPQVNIVKKVEEQTGGFSKESILPKGNSDKLIPRKTKKFYWDTKKYGGFDSPIVAYSILVIADIEKGKSKKLKTVKALVGVTIMEKMTFERDPVAFLERKGYRNVQEENIIKLPKYSLFKLENGRKRLLASARELQKGNEIVLPNHLGTLLYHAKNIHKVDEPKHLDYVDKHKDEFKELLDVVSNFSKKYTLAEGNLEKIKELYAQNNGEDLKELASSFINLLTFTAIGAPATFKFFDKNIDRKRYTSTTEILNATLIHQSITGLYETRIDLSKLGGD

SEQ ID NO: 500 - protein, 1345 aa, Streptococcus mutans; identical to SEQ ID NO: 499
  REGION 1..1345: note = Streptococcus mutans M21

SEQ ID NO: 501 - protein, 1345 aa, Streptococcus mutans
  REGION 1..1345: note = Streptococcus mutans M230
MKKPYSIGLDIGTNSVGWAVVTDDYKVPAKKMKVLGNTDKSHIKKNLLGALLFDSGNTAEDRRLKRTARRRYTRRRNRILYLQEIFSEEMGKVDDSFFHRLEDSFLVTEDKRGERHPIFGNLEEEVKYHENFPTIYHLRQYLADNPEKVDLRLVYLALAHIIKFRGHFLIEGKFDTRNNDVQRLFQEFLAVYDNTFENSSLQEQNVQVEEILTDKISKSAKKDRVLKLFPNEKSNGRFAEFLKLIVGNQADFKKHFELEEKAPLQFSKDTYEEELEVLLAQIGDNYAELFLSAKKLYDSILLSGILTVTDVSTKAPLSASMIQRYNEHQMDLAQLKQFIRQKLSDKYNEVFSDVSKDGYAGYIDGKTNQEAFYKYLKGLLNKIEGSGYFLDKIEREDFLRKQRTFDNGSIPHQIHLQEMRAIIRRQAEFYPFLADNQDRIEKILTFRIPYYVGPLARGKSDFAWLSRKSADKITPWNFDEIVDKESSAEAFINRMTNYDLYLPNQKVLPKHSLLYEKFTVYNELTKVKYKTEQGKTAFFDANMKQEIFDGVFKVYRKVTKDKLMDFLEKEFDEFRIVDLTGLDKENKVFNASYGTYHDLCKILDKDFLDNSKNEKILEDIVLTLTLFEDREMIRKRLENYSDLLTKEQVKKLERRHYTGWGRLSAELIHGIRNKESRKTILDYLIDDGNSNRNFMQLINDDALSFKEEIAKAQVIGETDNLNQVVSDIAGSPAIKKGILQSLKIVDELVKIMGHQPENIVVEMARENQFTNQGRQNSQQRLKGLTDSIKEFGSQILKEHPVENSQLQNDRLFLYYLQNGRDMYTGEELDIDYLSQYDIDHIIPQAFIKDNSIDNRVLTSSKENRGKSDDVPSEDVVRKMKSYWSKLLSAKLITQRKFDNLTKAERGGLTDDDKAGFIKRQLVETRQITKHVARILDERFYTETDENNKKIRQVKIVTLKSNLVSNFRKEFELYKVREINDYHHAHDAYLNAVIGKALLGVYPQLEPEFVYGDYPHFHGHKENKATAKKFFYSNIMNFFKKDDVRTDKNGEIIWKKDEHISNIKKVLSYPQVNIVKKVEEQTGGFSKESILPKGNSDKLIPRKTKKFYWDTKKYGGFDSPIVAYSILVIADIEKGKSKKLKTVKALVGVTIMEKMTFERDPVAFLERKGYRNVQEENIIKLPKYSLFKLENGRKRLLASARELQKGNEIVLPNHLGTLLYHAKNIHKVDEPKHLDYVDKHKDEFKELLDVVSNFSKKYTLAEGNLEKIKELYAQNNGEDLKELASSFINLLTFTAIGAPATFKFFDKNIDRKRYTSTTEILNATLIHQSITGLYETRIDLSKLGGD

SEQ ID NO: 502 - protein, 1345 aa, Streptococcus mutans; identical to SEQ ID NO: 501
  REGION 1..1345: note = Streptococcus mutans M230

SEQ ID NO: 503 - protein, 1345 aa, Streptococcus mutans
  REGION 1..1345: note = Streptococcus mutans M2A
MKKPYSIGLDIGTNSVGWAVVTDDYKVPAKKMKVLGNTDKSHIKKNLLGALLFDSGNTAEDRRLKRTARRRYTRRRNRILYLQEIFSEEMGKVDDSFFHRLEDSFLVTEDKRGERHPIFGNLEEEVKYHENFPTIYHLRQYLADNPEKTDLRLVYLALAHIIKFRGHFLIEGKFDTRNNDVQRLFQEFLAVYDNTFENSSLQEQNVQVEEILTDKISKSAKKDRVLKLFPNEKSNGRFAEFLKLIVGNQADFKKHFELEEKAPLQFSKDIYEEELEVLLAQIGDNYAELFLSAKKLYDSILLSGILTVTDVSTKAPLSASMIQRYNEHQMDLAQLKQFIRQKLSDKYNEVFSDVSKDGYAGYIDGKTNQEAFYKYLKGLLNKIEGSGYFLDKIEREDFLRKQRTFDNGSIPHQIHLQEMRAIIRRQAEFYPFLADNQDRIEKILTFRIPYYVGPLARGKSDFAWLSRKSADKITPWNFDEIVDKESSVEAFINRMTNYDLYLPNQKVLPKHSLLYEKFTVYNELTKVKYKTEQGKTAFFDANMKQEIFDGVFKVYRKVTKDKLMDFLEKEFDEFRIVDLTGLDKENKAFNASYGTYHDLRKILDKDFLDNSKNEKILEDIVLTLTLFEDREMIRKRLKNYSDLLTKEQLKKLERRHYTGWGRLSAELIHGIRNKESRKTILDYLIDDGNSNRNFMQLINDDALSFKEEIAKAQVIGETDNLNQVVSDIAGSPAIKKGILQSLKIVDELVKIMGHQPENIVVEMARENQFTNQGRRNSQQRLKGLTDSIKEFGSQILKEHPVENSQLQNDRLFLYYLQNGRDMYTGEELDIDYLSQYDIDHIIPQAFIKDNSIDNRVLTSSKENRGKSDDVPSKDVVRKMKSYWSKLLSAKLITQRKFDNLTKAERGGLTDDDKAGFIKRQLVETRQITKHVARILDERFNTETDENNKKIRQVKIVTLKSNLVSNFRKEFELYKVREINDYHHAHDAYLNAVIGKALLGVYPQLEPEFVYGDYPHFHGHKENKATAKKFFYSNIMNFFKKDDVRTDKNGEIIWKKDEHISNIKKVLSYPQVNIVKKVEEQTGGFSKESILPKGNSYKLIPRKTKKFYWDTKKYGGFDSPIVAYSILVIADIEKGKSKKLKTVKALVGVTIMEKMTFERDPVAFLERKGYRNVQEENIIKLPKYSLFKLENGRKRLLASARELQKGNEIVLPNHLGTLLYHAKNIHKVDEPKHLDYVDKHKDEFKELLDVVSNFSKKYTLAEGNLEKIKELYAQNNGEDLKELASSFINLLTFTAIGAPAAFKFFDKNIDRKRYTSTTEILNATLIHQSITGLYETRIDLSKLGGD

SEQ ID NO: 504 - protein, 1345 aa, Streptococcus mutans; identical to SEQ ID NO: 503
  REGION 1..1345: note = Streptococcus mutans M2A

SEQ ID NO: 505 - protein, 1345 aa, Streptococcus mutans
  REGION 1..1345: note = Streptococcus mutans N29
MKKPYSIGLDIGTNSVGWAVVTDDYKVPAKKMKVLGNTDKSHIKKNLLGALLFDSGNTAADRRLKRTARRRYTRRRNRILYLQEIFAEEMSKVDDSFFHRLEDSFLVTEDKRGERHPIFGNLEEEVKYHENFPTIYHLRQYLADNPEKVDLRLVYLALAHIIKFRGHFLIEGKFDTRNNDVQRLFQEFLAVYDNTFENSSLQEQNVQVEEILTDKISKSAKKDRVLKLFPNEKSNGRFAEFLKLIVGNQADFKKHFELEEKAPLQFSKDTYEEELEVLLAQIGDNYAELFLSAKKLYDSILLSGILTVTDVSTKAPLSASMIQRYNEHQMDLAQLKQFIRQKLSDKYNEVFSDVSKDGYAGYIDGKTNQEAFYKYLKGLLNKIEGSGYFLDKIEREDFLRKQRTFDNGSIPHQIHLQEMRAIIRRQAEFYPFLADNQDRIEKILTFRIPYYVGPLARGKSDFAWLSRKSADKITPWNFDEIVDKESSAEAFINRMTNYDLYLPNQKVLPKHSLLYEKFTVYNELTKVKYKTEQGKTAFFDANMKQEIFDGVFKVYRKVTKDKLMDFLEKEFDEFRIVDLTGLDKENKAFNASYGTYHDLRKILDKDFLDNSKNEKILEDIVLTLTLFEDREMIRKRLENYSDLLTKEQVKKLERRHYTGWGRLSAELIHGIRNKESRKTILDYLIDDGNSNRNFMQLINDDALSFKEEIAKAQVIGETDNLNQVVSDIAGSPAIKKGILQSLKIVDELVKIMGHQPENIVVEMARENQFTNQGRRNSQQRLKGLTDSIKEFGSQILKEHPVENSQLQNDRLFLYYLQNGRDMYTGEELDIDYLSQYDIDHIIPQAFIKDNSIDNRVLTSSKENRGKSDDVPSKNVVRKMKSYWSKLLSAKLITQRKFDNLTKAERGGLTDDDKAGFIKRQLVETRQITKHVARILDERFHTETDENNKKIRQVKIVTLKSNLVSNFRKEFELYKVREINDYHHAHDAYLNAVIGKALLGVYPQLEPEFVYGDYPHFHGHKENKATAKKFFYSNIMNFFKKDDVRTDKNGEIIWKKDEHISNIKKVLSYPQVNIVKKVEEQTGGFSKESILPKGNSDKLIPRKTKKFYWDTKKYGGFDSPIVAYSILVIADIEKGKSKKLKTVKALVGVTIMEKMTFERDPVAFLERKGYRNVQEENIIKLPKYSLFKLENGRKRLLASARELQKGNEIVLPNHLGTLLYHAKNIHKVDEPKHLDYVDKHKDEFKELLDVVSNFSKKYTLAEGNLEKIKELYAQNNGEDLKELSSSFINLLTFTAIGAPAAFKFFDKNIDRKRYTSTTEILNATLIHQSITGLYETRIDLSKLGGD

SEQ ID NO: 506 - protein, 1345 aa, Streptococcus mutans; identical to SEQ ID NO: 505
  REGION 1..1345: note = Streptococcus mutans N29

SEQ ID NO: 507 - protein, 1345 aa, Streptococcus mutans
  REGION 1..1345: note = Streptococcus mutans N3209
MKKPYSIGLDIGTNSVGWAVVTDDYKVPAKKMKVLGNTDKSHIKKNLLGALLFDSGNTAEDRRLKRTTRRRYTRRRNRILYLQEIFSEEMGKVDDSFFHRLEDSFLVTEDKRGERHPIFGNLEEEVKYHENFPTIYHLRQYLADNPEKTDLRLVYLALAHIIKFRGHFLIEGKFDTRNNDVQRLFQEFLAVYDNTFENSSLQEQNVQVEEILTDKISKSAKKDRVLKLFPNEKSNGCFAEFLKLIVGNQADFKKHFELEEKAPLQFSKDTYEEELEVLLAQIGDNYAELFLSAKKLYDSILLSGILTVTDVSTKAPLSASMIQRYNEHQMDLTQLKQFIRQKLSDKYNEVFSDVSKDGYAGYIDGKTNQEAFYKYLKGLLNKIEGSGYFLDKIEREDFLRKQRTFDNGSIPHQIHLQEMRAIIRRQAEFYPFLADNQDRIEKLLTFRIPYYVGPLASGKSDFAWLSRKSADKITPWNFDEIVDKESSAEAFINRMTNYDLYLPNQKVLPKHSLLYEKFTVYNELTKVKYKTEQGKTAFFDANMKQEIFDGVFKVYRKVTKDKLMDFLEKEFDEFRIVDLTGLDKENKVFNASYGTYHDLCKILDKDFLDNSKNEKILEDIVLTLTLFEDREMIRKRLENYSDLLTKEQVKKLERRHYTGWGRLSAELIHGIRNKESRKTILDYLIDDGNSNRNFMQLINDDALSFKEEIAKAQVIGETDNLNQVVSDIAGSPAIKKGILQSLKIVDELVKIMGHQPENIVVEMARENQFTNQGRRNSQQRLKGLTDSIKEFGSQILKEHPVENSQLQNDRLFLYYLQNGRDMYTGEELDIDYLSQYDIDHIIPQAFIKDNSIDNRVLTSSKENRGKSDDVPSKDVVRKMKSYWSKLLSAKLITQRKFDNLTKAERGGLTDDDKAGFIKRQLVETRQITKHVARILDERFNTETDENNKKIRQVKIVTLKSNLVSNFRKEFELYKVREINDYHHAHDAYLNAVIGKALLGVYPQLEPEFVYGDYPHFHGHKENKATAKKFFYSNIMNFFKKDDVRTDKNGEIIWKKDEHISNIKKVLSYPQVNIVKKVEEQTGGFSKESILPKGNSDKLIPRKTKKFYWDTKKYGGFDSPIVAYSILVIADIEKGKSKKLKTVKALVGVTIMEKMTFERDPVAFLERKGYRNVQEENIIKLPKYSLFKLENGRKRLLASARELQKGNEIVLPNHLGTLLYHAKNIHKVDEPKHLDYVDKHKDEFKELLDVVSNFSKKYTLAEGNLEKIKELYAQNNGEDLKELASSFINLLTFTAIGAPATFKFFDKNIDRKRYTSTTEILNATLIHQSITGLYETRIDLSKLGGD

SEQ ID NO: 508 - protein, 1345 aa, Streptococcus mutans; identical to SEQ ID NO: 507
  REGION 1..1345: note = Streptococcus mutans N3209

SEQ ID NO: 509 - protein, 1345 aa, Streptococcus mutans
  REGION 1..1345: note = Streptococcus mutans N66
MKKPYSIGLDIGTNSVGWAVVTDDYKVPAKKMKVLGNTDKSHIKKNLLGALLFDSGNTAEDRRLKRTARRRYTRRRNRILYLQEIFSEEMGKVDDSFFHRLEDSFLVTEDKRGERHPIFGNLEEEVKYHENFPTIYHLRQYLADNPEKTDLRLVYLALAHIIKFRGHFLIEGKFDTRNNDVQRLFQEFLAVYDNTFENSSLQEQNVQVEEILTDKISKSAKKDRVLKLFPNEKSNGRFAEFLKLIVGNQADFKKHFELEEKAPLQFSKDIYEEELEVLLAQIGDNYAELFLSAKKLYDSILLSGILTVTDVSTKAPLSASMIQRYNEHQMDLAQLKQFIRQKLSDKYNEVFSDVSKDGYAGYIDGKTNQEAFYKYLKGLLNKIEGSGYFLDKIEREDFLRKQRTFDNGSIPHQIHLQEMRAIIRRQAEFYPFLADNQDRIEKILTFRIPYYVGPLARGKSDFAWLSRKSADKITPWNFDEIVDKESSAEAFINRMTNYDLYLPNQKVLPKHSLLYEKFTVYNELTKVKYKTEQGKTAFFDANMKQEIFDGVFKVYRKVTKDKLMDFLEKEFDEFRIVDLTGLDKENKAFNASYGTYHDLRKILDKDFLDNSKNEKILEDIVLTLTLFEDREMIRKRLKNYSDLLTKEQLKKLERRHYTGWGRLSAELIHGIRNKESRKTILDYLIDDGNSNRNFMQLINDDALSFKEEIAKAQVIGETDNLNQVVSDIAGSLAIKKGILQSLKIVDELVKIMGHQPENIVVEMARENQFTNQGRRNSQQRLKGLTDSIKEFGSQILKEHPVENSQLQNDRLFLYYLQNGRDMYTGEELDIDYLSQYDIDHIIPQAFIKDNSIDNRVLTSSKENRGKSDDVPSKDVVRKMKSYWSKLLSAKLITQRKFDNLTKGERGGLTDDDKAGFIKRQLVETRQITKHVARILDERFNTETDENNKKIRQVKIVTLKSNLVSNFRKEFELYKVREINDYHHAHDAYLNAVIGKALLGVYPQLEPEFVYGDYPHFHGHKENKATAKKFFYSNIMNFFKKDDVRTDKNGEIIWKKDEYISNIKKVLSYPQVNIVKKVEEQTGGFFKESILPKGDSDKLIPRKTKKFYWDTKKYGGFDSPIVAYSILVIADIEKGKSKKLKTVKALVGVTIMEKMTFERDPVAFLERKGYRNVQEENIIKLPKYSLFKLENGRKRLLASARELQKGNEIVLPNHLGTLLYHAKNIHKVDEPKHLDYVDKHKDEFKELLDVVSNFSKKYTLAEGNLEKIKELYAQNNGEDLKELASSFINLLTFTAIGAPATFKFFDKNIDRKRYTSTTEILNATLIHQSITGLYETRIDLSKLGGD

SEQ ID NO: 510 - protein, 1345 aa, Streptococcus mutans; identical to SEQ ID NO: 509
  REGION 1..1345: note = Streptococcus mutans N66

SEQ ID NO: 511 - protein, 1350 aa, Streptococcus mutans
  REGION 1..1350: note = Streptococcus mutans NFSM1
MKKPYSIGLDIGTNSVGWAVVTDDYKVPAKKMTVLGNTDKSHIKKNLLGALLFDSGNTAADRRLKRTARRRYTRRRNRILYLQEIFAEEMSKVDDSFFHRLEDSFLVTEDKRGERHPIFGNLEEEVKYHENFPTIYHLRQYLADNPEKVDLRLVYLALAHIIKFRGHFLIEGKFDTRNNDVQRLFQEFLAVYDNTFENSSLQEQNVQVEEILTDKISKSAKKDRVLKLFPNEKSNGRFAEFLKLIVGNQADFKKHFELEEKTPLQFSKDTYEEELEVLLAQIGDNYAELFLSAKKLYDSILLSGILTVTDVSTKAPLSASMIQRYNEHQMDLAQLKQFIRQKLSDKYNEVFSDVSKDGYAGYIDGKTNQEAFYKYLKGLLNKIEGSGYFLDKIEREDFLRKQRTFDNGSIPHQIHLQEMRAIIRRQAEFYPFLADNQDRIEKILTFRIPYYVGPLARGKSDFAWLSRKSADKITPWNFDEIVDKESSAEAFINRMTNYDLYLPNQKVLPKHSLLYEKFTVYNELTKVKYKTEQGKTAFFDANMKQEIFDGVFKVYRKVTKDKLMDFLEKEFDEFRIVDLTGLDKENKAFNASYGTYHDLRKILDKDFLDNSKNEKILEDIVLTLTLFEDREMIRKRLENYSDLLTKEQVKKLERRHYTGWGRLSAELIHGIRNKESRKTILDYLIDDGNSNRNFMQLINDDALSFKEEIAKAQVIGETDNLNQVVSDIAGSPAIKKGILQSLKIVDELVKIMGHQPENIVVEMARENQFTNQGRRNSQQRLKGLTDSIKEFGSQILKEHPVENSQLQNDRLFLYYLQNGRDMYTGEELDIDYLSQYDIDHIIPQAFIKDNSIDNRVLTSSKENRGKSDDVPSEDVVNRMRPFWNKLLSSGLISQRKYNNLTKKELTPDDKAGFIKRQLVETRQITKHVARMLDERFNKEFDDNNKRIRRVKIVTLKSNLVSSFRKEFELYKVREINDYHHAHDAYLNAVVVKALLVKYPKLEPEFVYGEYPKYNSYRERKTATQKMFFYSNIMNMFKSKVKLADDQIVERPMIEVNDETGEIAWDKTKHITTVKKVLSYPQVNIVKKVEEQTIGQNGGLFDDNPKSPLEVIPSKLVPLKKALNPEKYGGYQKPTTAYPILLIVDTKQLIPISVMDKKRFEQNPVKFLKDKGYQQIEKNNFVKLPKYTLVDIGNGIKRLWASSKEVHKGNQLVVSKKSQDLLYHAHHLDNDYSNEYVKNHYQQFDILFNEITSFSKKCKLGKEHIQKIEEAYSKERDSASIEELADGFIKLLGFTQLGATSPFSFLGIKLNQKQYTGKKDYLLPCMEATLIHQSITGLYETRIDLSKLGGD

SEQ ID NO: 512 - protein, 1350 aa, Streptococcus mutans; identical to SEQ ID NO: 511
  REGION 1..1350: note = Streptococcus mutans NFSM1

SEQ ID NO: 513 - protein, 1345 aa, Streptococcus mutans; identical to SEQ ID NO: 485
  REGION 1..1345: note = Streptococcus mutans NLML1

SEQ ID NO: 514 - protein, 1338 aa, Streptococcus mutans
  REGION 1..1338: note = Streptococcus mutans NLML4
MDLIGTNSVGWAVVTDDYKVPAKKMKVLGNTDKSHIKKNLLGALLFDSGNTAADRRLKRTARRRYTRRRNRILYLQEIFAEEMSKVDDSFFHRLEDSFLVTEDKRGERHPIFGNLEEEVKYHENFPTIYHLRQYLADNPEKVDLRLVYLALAHIIKFRGHFLIEGKFDTRNNDVQRLFQEFLAVYDNTFENSSLQEQNVQVEEILTDKISKSAKKDRVLKLFPNEKSNGRFAEFLKLIVGNQADFKKHFELEEKAPLQFSKDTYEEELEVLLAQIGDNYAELFLSAKKLYDSILLSGILTVTDVSTKAPLSASMIQRYNEHQMDLAQLKQFIRQKLSDKYNEVFSDVSKDGYAGYIDGKTNQEAFYKYLKGLLNKIEGSGYFLDKIEREDFLRKQRTFDNGSIPHQIHLQEMRAIIRRQAEFYPFLADNQDRIEKILTFRIPYYVGPLARGKSDFAWLSRKSADKITPWNFDEIVDKESSAEAFINRMTNYDLYLPNQKVLPKHSLLYEKFTVYNELTKVKYKTEQGKTAFFDANMKQEIFDGVFKVYRKVTKDKLMDFLEKEFDEFRIVDLTGLDKENKAFNASYGTYHDLRKILDKDFLDNSKNEKILEDIVLTLTLFEDREMIRKRLENYSDLLTKEQVKKLERRHYTGWGRLSAELIHGIRNKESRKTILDYLIDDGNSNRNFMQLINDDALSFKEEIAKAQVIGETDNLNQVVSDIAGSPAIKKGILQSLKIVDELVKIMGHQPENIVVEMARENQFTNQGRRNSQQRLKGLTDSIKEFGSQILKEHPVEHSQLQNDRLFLYYLQNGRDMYTGEELDIDYLSQYDIDHIIPQAFIKDNSIDNRVLTSSKENRGKSDDVPSKNVVRKMKSYWSKLLSAKLITQRKFDNLTKAERGGLTDDDKAGFIKRQLVETRQITKHVARILDERFHTETDENNKKIRQVKIVTLKSNLVSNFRKEFELYKVREINDYHHAHDAYLNAVIGKALLGVYPQLEPEFVYGDYPHFHGHKENKATAKKFFYSNIMNFFKKDDVRTDKNGEIIWKKDEHISNIKKVLSYPQVNIVKKVEEQTGGFSKESILPKGNSDKLIPRKTKKFYWDTKKYGGFDSPIVAYSILVIADIEKGKSKKLKTVKALVGVTIMEKMTFERDPVAFLERKGYRNVQEENIIKLPKYSLFKLENGRKRLLASARELQKGNEIVLPNHLGTLLYHAKNIHKVDEPKHLDYVDKHKDEFKELLDVVSNFSKKYTLAEGNLEKIKELYAQNNGEDLKELASSFINLLTFTAIGAPATFKFFDKNIDRKRYTSTTEILNATLIHQSITGLYETRIDLSKLGGD

SEQ ID NO: 515 - protein, 1338 aa, Streptococcus mutans; identical to SEQ ID NO: 514
  REGION 1..1338: note = Streptococcus mutans NLML4

SEQ ID NO: 516 - protein, 1128 aa, Streptococcus mutans
  REGION 1..1128: note = Streptococcus mutans NLML5
MANSKILGLDIGIASVGVGIIDKETGKIIHVNSRIFPAATADSNVERRGFRQGRRLVRRKKHRKVRLADLFLDSNLLTDFSKVSLNLNPYQLRVKGLNEELSNEELFIALKSIVSRRGISYLDDASEDSGANSSEYGKAVEENRKLLEDRTPGQIQLERFEKYGKVRGDFTVVENGENHRLINVFSTSAYKKEAERILRRQQEFNIRIADEFIEAYLTILTGKRKYYHGPGNEKSRTDYGRFRTDGTTLDNIFGILIGKCTFYPDEYRAAKASYTAQEFNLLNDLNNLTVPTETKKLSEEQKRQIIEHAKTVKTLGAPTLLKYIAKLVGCSADDIKGYRIDKSDKPEIHTFEAYRKMRTMELIKVADLSRESLDALAHILTLNTEREGIEEAIRDRFTNKEFNQEQINELVLFRKNNSSLFGKGWHNFSLKLMKELIPELYETSEEQMTILTRLGKQRVKKSSNRTNYIDEKELTEEIYNPVVAKSVRQAIKIINLATKKYGVFDNIVIEMARESNEDDEKKAIQNAQKANEDEKEAALLKAAHQFNGKEELPDSIFHGHKELLTKIRLWHQQGEKCLYTGKTIFINDLIHNPYKYEIDHILPLSLSFDDSLANKVLVLSTANQEKGQRTPFQSLDSMDGAWTYREFKAYVKGLKTLSNKKKDYLLNEEDINKNEVKQKFIERNLVDTRYSSRVVLNTLQDFYKKREFDTKISVVRGQFTSQIRRKWRIEKTRETYHHHAVDALIIAASSQLNLWKKQNNPLISYKEDQFVDPETGEILSLSDDEYKELVFKAPYDHFVDTLKSKKFEDSILFSYQVDSKYNRKISDATIYGTRKARLGKDSQEETYVLGKIKDIYSQKGYEDFIKKYKKDKTQFLMYHKDPQTFEKVIEEILKTYSDKELNEKGKEVPCNPFEKYRQENGPVRKYSKKGNGPEIKSIKYYDNKLGNHIDITPNNSHHQVVLQSLKPWRTDVYFNPKSGKYELMGLKYSDLRFEKVSGDYGISVKKYNEIKSKEGVDENSEFKFTLYKNDLILIKDTESGEQELFRFLSRTMPNQKHYVELKPYDKSKFEGHQKLMDIFGEVAKGGQCLKGLNKSNISIYKVKTDVLGNKYFIKKEGDQPQLNFKKKI

SEQ ID NO: 517 - protein, 1128 aa, Streptococcus mutans; identical to SEQ ID NO: 516
  REGION 1..1128: note = Streptococcus mutans NLML5

SEQ ID NO: 518 - protein, 1125 aa, Streptococcus mutans
  REGION 1..1125: note = Streptococcus mutans NLML8
MTNGKILGLDIGIASVGVGIINAKTGNVEHASSRIFPAANADNNVERRSARGGRRLIRRKKHRLKRVEDLFEKYNIDTDFSNLNLNPYQLRVKGLNEQLSNEELFAILKNIAKRRGISYLDDAEDDSVGSSDYAKAIDENRKLLKKQTPGEIQLKRLEKYGQLRGNFTIQDENGEYHRLINVFSTSDYVKEARRILETQSYYNKFITESFVEDYIKILQGKRKYYVGPGNEKSRTDYGIYRTDGETLDNLFGILIGKCGFYPEEYRAAKASYTAQEYNFLNDLNNLTVPTETKKLSTEQKYQLVDFAKTASTLEAAKLLKEIAKLVGCQVEEIKGYRLDNKDKPDLHTFEPFRKLKSNLTTIAVENLSITTLDTLAHILTLNTEREGIEEAIQKELPNIFSDEQITGIIAVRKKNSQIFGKGWHSFSIKLMKELIPELYETSEEQMTILIRLKKVKTNSKITNRTKYINEQEVTDEIYNPVVSKSIRQTVKIINAAIKKYGAFDQIVIEMPRESNEEDERKFIADLQKSNAKEKDDAMKQAALLYNGKAELPHGVFHGHKELATKIRLWYQQGERCLYSGKHIDIHDLIHNQHMFEIDHVLPLSLSFDDSLANKVLVYSWANQEKGQRTPFQALPQMASAWSFRELRDYISKQKGISKKKRDYLLTEQDINKVEVKQKFIERNLVDTRYVSRVVLNTLQDALKVMNKETKISVIRGQFTSQLRRQWRIDKSRETYHHHAVDALIIAASSQLRLWKKQNNPMFAEDKHGQKINLDTGEVLSDDAYKELVYQAPYQGFVNTISSKSFEDEILFSYQVDSKVNRKISDATIYATRQAQLGKDKKEETYVLGKIKDIYSQAGYDAFRKKYDKDKAVFLMYQKDPETWEKVIEVILRDYKELDDKGKEIGNPFERYKVKHGFVRKYSRKNKGTEIKSLKYYDNKLGNHIDITPNNSKHSVVLQSINPWRADLYFNPETTKYELMGLKYADLSFEKGTGKYSISREKYDEIKEREGISSKSEFKFTLYKNDLILVKDIGNHKELIARFNSKNDTSKHYVELKPWNKAKFDSEEELIPAFGKVAKSGQFIKGLNKPDLSIYKVKTDILGHKYYIKKEGDKPKLNFENKIKNK

SEQ ID NO: 519 - protein, 1125 aa, Streptococcus mutans; identical to SEQ ID NO: 518
  REGION 1..1125: note = Streptococcus mutans NLML8

SEQ ID NO: 520 - protein, 1345 aa, Streptococcus mutans
  REGION 1..1345: note = Streptococcus mutans NLML9
MKKPYSIGLDIGTNSVGWAVVTDDYKVSAKKMKVLGNTDKSHIKKNLLGALLFDSGNTAEDRRLKRTARRRYTRRRNRILYLQEIFAEEMSKVDDSFFHRLEDSFLVTEDKRGERHPIFGNLEEEVKYHENFPTIYHLRQYLADNPEKVDLRLVYLALAHIIKFRGHFLIEGKFDTRNNDVQRLFQEFLAVYDNTFENSSLQEQNVQVEEILTDKISKSAKKDRVLKLFPNEKSNGRFAEFLKLIVGNQADFKKHFELEEKAPLQFSKDTYEEELEVLLAQIGDNYAELFLSAKKLYDSILLSGILTVTDVSTKAPLSASMIQRYNEHQMDLAQLKQFIRQKLSDKYNEVFSDVSKDGYAGYIDGKTNQEAFYKYLKGLLNKIEGSGYFLDKIEREDFLRKQRTFDNGSIPHQIHLQEMRAIIRRQAEFYPFLADNQDRIEKILTFRIPYYVGPLARGKSDFAWLSRKSADKITPWNFDEIVDKESSAEAFINRMTNYDLYLPNQKVLPKHSLLYEKFTVYNELTKVKYKTEQGKTAFFDANMKQEIFDGVFKVYRKVTKDKLMDFLEKEFDEFRIVDLTGLDKENKAFNASYGTYHDLRKILDKDFLDNSKNEKILEDIVLTLTLFEDREMIRKRLENYSDLLTKEQVKKLERRHYTGWGRLSAELIHGIRNKESRKTILDYLIDDGNSNRNFMQLINDDALSFKEEIAKAQVIGETDNLNQVVSDIAGSPAIKKGILQSLKIVDELVKIMGHQPENIVVEMARENQFTNQGRRNSQQRLKGLTDSIKEFGSQILKEHPVEHSQLQNDRLFLYYLQNGRDMYTGEELDIDYLSQYDIDHIIPQAFIKDNSIDNRVLTSSKENRGKSDDVPSKNVVRKMKSYWSKLLSAKLITQRKFDNLTKAERGGLTDDDKAGFIKRQLVETRQITKHVARILDERFHTETDENNKKIRQVKIVTLKSNLVSNFRKEFELYKVREINDYHHTHDAYLNAVIGKALLGVYPQLEPEFVYGDYPHFHGHKENKATAKKFFYSNIMNFFKKDDVRTDKNGEIIWKKDEHISNIKKVLSYPQVNIVKKVEEQTGGFSKESILPKGNSDKLIPRKTKKFYWDTKKYGGFDSPIVAYSILVIADIEKGKSKKLKTVKALVGVTIMEKMTFERDPVAFLERKGYRNVQEENIIKLPKYSLFKLENGRKRLLASARELQKGNEIVLPNHLGTLLYHAKNIHKVDEPKHLDYVDKHKDEFKELLDVVSNFSKKYTLAEGNLEKIKELYAQNNGEDLKELASSFINLLTFTAIGAPATFKFFDKNIDRKRYTSTTEILNATLIHQSITGLYETRIDLSKLGGD

SEQ ID NO: 521 - protein, 1345 aa, Streptococcus mutans; identical to SEQ ID NO: 520
  REGION 1..1345: note = Streptococcus mutans NLML9

SEQ ID NO: 522 - protein, 1355 aa, Streptococcus mutans
  REGION 1..1355: note = Streptococcus mutans NMT4863
MKKPYSIGLDIGTNSVGWAVVTDDYKVPAKKMKVLGNTDKSHIKKNLLGALLFDSGNTAEDRRLKRTARRRYTRRRNRILYLQEIFAEEMSKVDDSFFHRLDESFLTDDDKNFDSHPIFGNKAEEDAYHQKFPTIYHLRKHLADSTEKADLRLVYLALAHMIKFRGHFLIEGELNAENTDVQKLFADFVGVYDRTFDDSHLSEITVDASSILTEKISKSRRLEKLINNYPKEKKNTLFGNLIALSLGLQPNFKTNFKLSEDAKLQFSKDTYEEDLEELLGKIGDDYADLFTLAKNLYDAILLSGILTADDSSTKAPLSASMIKRYAEHHEDLEKLKEFIKANKPELYHDIFKDETKNGYAGYIENGVKQDEFYKYLKNTLSKITGSDYFLDQIEREDFLRKQRTFDNGSIPHQIHLQEMHAILRRQGDYYPFLKENQDRIEKILTFRIPYYVGPLARKNSRFAWAEYHSDEAVTPWNFDQVIDKESSAQAFIEHMTNNDLYLPNEKVLPKHSPLYEKYTVYNELTKIKYVTEIGEAKFFDANLKQEIFDGLFKHERKVTKKKLRTFLDKNFDEFRIVDIQGLDKETETFNASYATYQDLLKVIKDKVFMDNPENAEILENIVLTLTLFEDREMIKQRLAKYADVFDKKVIDQLARRHYTGWGRLSAKLLNGIRDKQSCKTIMDYLIDDAQSNRNLMQLITDDNLTFKDDIVKAQYVDNSDDLHQVVQSLAGSPAIKKGILQSLKIVDELVKVMGKEPEQIVVEMARENQTTAKGRRNSQQRYKRLKEAIKSLDRDLNHKILKEHPTDNQALQNNRLFLYYLQNGRDMYTGESLDINRLSDYDIDHVIPQAFIKDNSIDNRVLTSSKANRGKSDDVPSEDVVNRMRPFWNKLLSSGLISQRKYNNLTKKELTLDDKAGFIKRQLVETRQITKHVARMLDERFNKEFDDNNKRIRRVKIVTLKSNLVSSFRKEFELYKVREINDYHHAHDAYLNAVVVKALLVKYPKLEPEFVYGEYPKYNSYRERKTATQKMFFYSNIMNMFKSKVKLADDQIVERPMIEVNDETGEIAWDKTKHITTVKKVLSYPQVNIVKKVEEQTIGQNGGLFDDNPKSPLEVIPSKLVPLKKALNPEKYGGYQKPTTAYPILLIVDTKQLIPISVMDKKRFEQNPVKFLKDKGYQQIEKNNFVKLPKYTLVDIGNGIKRLWASSKEVHKGNQLVVSKKSQDLLYHAHHLDNDYSNEYVKNHYQQFDILFNEITSFSKKCKLGKEHIQKIEEAYSKERDFASIEELADGFIKLLGFTQLGATSPFSFLGIKLNQKQYTGKKDYLLPCMEATLIHQSITGLYETRIDLSKLGGD

SEQ ID NO: 523 - protein, 1355 aa, Streptococcus mutans; identical to SEQ ID NO: 522
  REGION 1..1355: note = Streptococcus mutans NMT4863

SEQ ID NO: 524 - protein, 1345 aa, Streptococcus mutans
MKKPYSIGLDIGTNSVGWAVVTDDYKVPAKKMKVLGNTDKSHIKKNLLGALLFDSGNTAADRRLKRTARRRYTRRRNRILYLQEIFAEEMSKVDDSFFHRLEDSFLVTEDKRGERHPIFGNLEEEVKYHENFPTIYHLRQYLADNPEKVDLRLVYLALAHIIKFRGHFLIEGKFDTRNNDVQRLFQEFLAVYDNTFENSSLQEQNVQVEEILTDKISKSAKKDRVLKLFPNEKSNGRFAEFLKLIVGNQADFKKHFELEEKAPLQFSKDTYEEELEVLLAQIGDNYAELFLSAKKLYDSILLSGILTVTDVSTKAPLSASMIQRYNEHQMDLAQLKQFIRQKLSDKYNEVFSDVSKDGYAGYIDGKTNQEAFYKYLKGLLNKIEGSGYFLDKIEREDFLRKQRTFDNGSIPHQIHLQEMRAIIRRQAEFYPFLADNQDRIEKILTFRIPYYVGPLARGKSDFAWLSRKSADKITPWNFDEIVDKESSAEAFINRMTNYDLYLPNQKVLPKHSLLYEKFTVYNELTKVKYKTEQGKTAFFDANMKQEIFDGVFKVYRKVTKDKLMDFLEKEFDEFRIVDLTGLDKENKAFNASYGTYHDLRKILDKDFLDNSKNEKILEDIVLTLTLFEDREMIRKRLENYSDLLTKEQVKKLERRHYTGWGRLSAELIHGIRNKESRKTILDYLIDDGNSNRNFMQLINDDALSFKEEIAKAQVIGETDNLNQVVSDIAGSPAIKKGILQSLKIVDELVKIMGHQPENIVVEMARENQFTNQGRRNSQQRLKGLTDSIKEFGSQILKEHPVKHSQLQNDRLFLYYLQNGRDMYTGEELDIDYLSQYDIDHIIPQAFIKDNSIDNRVLTSSKENRGKSDDVPSKNVVRKMKSYWSKLLSAKLITQRKFDNLTKAERGGLTDDDKAGFIKRQLVETRQITKHVARILDERFHTETDENNKKIRQVKIVTLKSNLVSNFRKEFELYKVREINDYHHAHDAYLNAVIGKALLGVYPQLEPEFVYGDYPHFHGHKENKATAKKFFYSNIMNFFKKDDVRTDKNGEIIWKKDEHISNIKKVLSYPQVNIVKKVEEQTGGFSKESILPKGNSDKLIPRKTKKFYWDTKKYGGFDSPIVAYSILVIADIEKGKSKKLKTVKALVGVTIMEKMTFERDPVAFLERKGYRNVQEENIIKLPKYSLFKLENGRKRLLASARELQKGNEIVLPNHLGTLLYHAKNIHKVDEPKHLDYVDKHKDEFKELLDVVSNFSKKYTLAEGNLEKIKELYAQNNGEDLKELASSFINLLTFTAIGAPATFKFFDKNIDRKRYTSTTEILNATLIHQSITGLYETRIDLSKLGGD

SEQ ID NO: 525 - protein, 1345 aa, Streptococcus mutans; identical to SEQ ID NO: 471
  REGION 1..1345: note = Streptococcus mutans NV1996

SEQ ID NO: 526 - protein, 1345 aa, Streptococcus mutans
  REGION 1..1345: note = Streptococcus mutans NVAB
MKKPYSIGLDIGTNSVGWAVVTDDYKVPAKKMKVLGNTDKSHIKKNLLGALLFDSGNTAADRRLKRTARRRYTRRRNRILYLQEIFAEEMSKVDDSFFHRLEDSFLVTEDKRGERHPIFGNLEEEVKYHENFPTIYHLRQYLADNPEKVDLRLVYLALAHIIKFRGHFLIEGKFDTRNNDVQRLFQEFLAVYDNTFENSSLQEQNVQVEEILTDKISKSAKKDRVLKLFPNEKSNGRFAEFLKLIVGNQADFKKHFELEEKAPLQFSKDTYEEELEVLLAQIGDNYAELFLSAKKLYDSILLSGILTVTDVSTKAPLSASMIQRYNEHQMDLAQLKQFIRQKLSDKYNEVFSDVSKDGYAGYIDGKTNQEAFYKYLKGLLNKIEGSGYFLDKIEREDFLRKQRTFDNGSIPHQIHLQEMRAIIRRQAEFYPFLADNQDRIEKILTFRIPYYVGPLARGKSDFAWLSRKSADKITPWNFDEIVDKESSAEAFINRMTNYDLYLPNQKVLPKHSLLYEKFTVYNELTKVKYKTEQGKTAFFDANMKQEIFDGVFKVYRKVTKDKLMDFLEKEFDEFRIVDLTGLDKENKVFNASYGTYHDLCKILDKDFLDNSKNEKILEDIVLTLTLFEDREMIRKRLENYSDLLTKEQVKKLERRHYTGWGRLSAELIHGIRNKESRKTILDYLIDDGNSNRNFMQLINDDALSFKEEIAKAQVIGETDNLNQVVSDIAGSPAIKKGILQSLKIVDELVKIMGHQPENIVVEMARENQFTKQGRRNSQQRLKGLTDSIKEFGSQILKEHPVENSQLQNDRLFLYYLQNGRDMYTGEELDIDYLSQYDIDHIIPQAFIKDNSIDNRVLTSSKENRGKSDDVPSKDVVRKMKSYWSKLLSAKLITQRKFDNLTKAERGGLTDDDKAGFIKRQLVETRQITKHVARILDERFYTETDENNKKIRQVKIVTLKSNLVSNFRKEFELYKVREINDYHHAHDAYLNAVIGKALLGVYPQLEPEFVYGDYPHFHGHKENKATAKKFFYSNIMNFFKKDDVRTDKNGEIIWKKDEHISNIKKVLSYPQVNIVKKVEEQTGGFSKESILPKGNSDKLIPRKTKKFYWDTKKYGGFDSPIVAYSILVIADIEKGKSKKLKTVKALVGVTIMEKMTFERDPVAFLERKGYRNVQEENIIKLPKYSLFKLENGRKRLLASARELQKGNEIVLPNHLGTLLYHAKNIHKVDEPKHLDYVDKHKDEFKELLDVVSNFSKKYTLAEGNLEKIKELYAQNNGEDLKELASSFINLLTFTAIGAPATFKFFDKNIDRKRYTSTTEILNATLIHQSITGLYETRIDLSKLGGD

SEQ ID NO: 527 - protein, 1345 aa, Streptococcus mutans; identical to SEQ ID NO: 526
  REGION 1..1345: note = Streptococcus mutans NVAB

SEQ ID NO: 528 - protein, 1345 aa, Streptococcus mutans
  REGION 1..1345: note = Streptococcus mutans R221
MKKPYSIGLDIGTNSVGWAVVTDDYKVPAKKMKVLGNTDKSHIKKNLLGALLFDSGNTAEDRRLKRTARRRYTRRRNRILYLQEIFSEEMGKVDDSFFHRLEDSFLVTEDKRGERHPIFGNLEEEVKYHENFPTIYHLRQYLADNPEKTDLRLVYLALAHIIKFRGHFLIEGKFDTRNNDVQRLFQEFLAVYDNTFENSSLQEQNVQVEEILTDKISKSAKKDRVLKLFPNEKSNGRFAEFLKLIVGNQADFKKHFELEEKAPLQFSKDIYEEELEVLLAQIGDNYAELFLSAKKLYDSILLSGILTVTDVSTKAPLSASMIQRYNEHQMDLAQLKQFIRQKLSDKYNEVFSDVSKDGYAGYIDGKTNQEAFYKYLKGLLNKIEGSGYFLDKIEREDFLRKQRTFDNGSIPHQIHLQEMRAIIRRQAEFYPFLADNQDRIEKILTFRIPYYVGPLARGKSDFAWLSRKSADKITPWNFDEIVDKESSVEAFINRMTNYDLYLPNQKVLPKHSLLYEKFTVYNELTKVKYKTEQGKTAFFDANMKQEIFDGVFKVYRKVTKDKLMDFLEKEFDEFRIVDLTGLDKENKAFNASYGTYHDLRKILDKDFLDNSKNEKILEDIVLTLTLFEDREMIRKRLKNYSDLLTKEQLKKLERRHYTGWGRLSAELIHGIRNKESRKTILDYLIDDGNSNRNFMQLINDDALSFKEEIAKAQVIGETDNLNQVVSDIAGSPAIKKGILQSLKIVDELVKIMGHQPENIVVEMARENQFTNQGRRNSQQRLKGLTDSIKEFGSQILKEHPVENSQLQNDRLFLYYLQNGRDMYTGEELDIDYLSQYDIDHIIPQAFIKDNSIDNRVLTSSKENRGKSDDVPSKDVVRKMKSYWSKLLSAKLITQRKFDNLTKAERGGLTDDDKAGFIKRQLVETRQITKHVARILDERFNTETDENNKKIRQVKIVTLKSNLVSNFRKEFELYKVREINDYHHAHDAYLNAVIGKALLGVYPQLEPEFVYGDYPHFHGHKENKATAKKFFYSNIMNFFKKDDVRTDKNGEIIWKKDEHISNIKKVLSYPQVNIVKKVEEQTGGFSKESILPKGNSDKLIPRKTKKFYWDTKKYGGFDSPIVAYSILVIADIEKGKSKKLKTVKALVGVTIMEKMTFERDPVAFLERKGYRNVQEENIIKLPKYSLFKLENGRKRLLASARELQKGNEIVLPNHLGTLLYHAKNIHKVDEPKHLDYVDKHKDEFKELLDVVSNFSKKYTLAEGNLEKIKELYAQNNGEDLKELASSFINLLTFTAIGAPATFKFFDKNIDRKRYTSTTEILNATLIHQSITGLYETRIDLNKLGGD

SEQ ID NO: 529 - protein, 1345 aa, Streptococcus mutans; identical to SEQ ID NO: 528
  REGION 1..1345: note = Streptococcus mutans R221

SEQ ID NO: 530 - protein, 1345 aa, Streptococcus mutans
  REGION 1..1345: note = Streptococcus mutans S1B
MKKPYSIGLDIGTNSVGWAVVTDDYKVPAKKMKVLGNTDKSHIKKNLLGALLFDSGNTAEDRRLKRTARRRYTRRRNRILYLQEIFSEEMGKVDDSFFHRLDESFLTDDDKNFDSYPIFGNKAEEDAYHQKFPTIYHLRKHLADSTEKADLRLVYLALAHMIKFRGHFLIEGELNAENTDVQKLFADFVGVYDRTFDDSHLSEITVDASSILTEKISKSRRLEKLINNYPKEKKNTLFRNLVALSLGLQPNFKTNFKLSEDAKLQFSKDTYEEDLEELLGKIGDDYADLFTLAKNLYDAILLSGILTADDSSTKAPLSASMIKRYAEHHEDLEKLKEFIKANKPELYHDIFKDETKNGYAGYIENGVKQDEFYKYLKNTLSKIAGSDYFLDKIEREDFLRKQRTFDNGSIPHQIHLQEMHAILRRQGDYYPFLKENQDRIEKILTFRIPYYVGPLARGKSDFAWLSRKSADKITPWNFDEIVDKESSVEAFINRMTNYDLYLPNQKVLPKHSLLYEKFTVYNELTKVKYKTEQGKTAFFDANMKQEIFDGVFKVYRKVTKDKLMDFLEKEFDEFRIVDLTGLDKENKAFNASYGTYHDLRKILDKDFLDNSKNEKILEDIVLTLTLFEDREMIRKRLKNYSDLLTKEQLKKLERRHYTGWGRLSAELIHGIRNKESRKTILDYLIDDGNSNRNFMQLINDDALSFKEEIAKAQVIGETDNLNQVVSDIAGSPAIKKGILQSLKIVDELVKIMGHQPENIVVEMARENQFTNQGRRNSQQRLKGLTDSIKEFGSQILKEHPVENSQLQNDRLFLYYLQNGRDMYTGEELDIDYLSQYDIDHIIPQAFIKDNSIDNRVLTSSKENRGKSDDVPSKDVVRKMKSYWSKLLSAKLITQRKFDNLTKGERGGLTDDDKAGFIKRQLVETRQITKHVARILDERFNTETDENNKKIRQVKIVTLKSNLVSNFRKEFELYKVREINDYHHAHDAYLNAVIGKALLGVYPQLEPEFVYGDYPHFHGHKENKATAKKFFYSNIMNFFKKDDVRTDKNGEIIWKKDEYISNIKKVLSYPQVNIVKKVEEQTGGFSKESILPKGDSDKLIPRKTKKFYWDTKKYGGFDSPIVAYSILVIADIEKGKSKKLKTVKALVGVTIMEKMTFERDPVAFLERKGYRNVQEENIIKLPKYSLFKLENGRKRLLASARELQKGNEIVLPNHLGTLLYHAKNIHKVDEPKHLDYVDKHKDEFKELLDVVSNFSKKYTLAEGNLEKIKELYAQNNGEDLKELASSFINLLTFTAIGAPATFKFFDKNIDRKRYTSTTEILNATLIHQSITGLYETRIDLSKLGGD

SEQ ID NO: 531 - protein, 1345 aa, Streptococcus mutans; identical to SEQ ID NO: 530
  REGION 1..1345: note = Streptococcus mutans S1B

SEQ ID NO: 532 - protein, 1345 aa, Streptococcus mutans; identical to SEQ ID NO: 471
  REGION 1..1345: note = Streptococcus mutans SF1

SEQ ID NO: 533 - protein, 1345 aa, Streptococcus mutans
  REGION 1..1345: note = Streptococcus mutans SF14
MKKPYSIGLDIGTNSVGWAVVTDDYKVPAKKMKVLGNTDKSHIKKNLLGALLFDSGNTAEDRRLKRTARRRYTRRRNRILYLQEIFSEEMGKVNDSFFHRLEDSFLVTEDKRGERHPIFGNLEEEVKYHENFPTIYHLRQYLADNPEKVDLRLVYLALAHIIKFRGHFLIEGKFDTRNNDVQRLFQEFLAVYDNTFENSSLQEQNVQVEEILTDKISKSAKKDRVLKLFPNEKSNGRFAEFLKLIVGNQADFKKHFELEEKAPLQFSKDTYEEELEVLLAQIGDNYAELFLSAKKLYDSILLSGILTVTDVSTKAPLSASMIQRYNEHQMDLAQLKQFIRQKLSDKYNEVFSDVSKDGYAGYIDGKTNQEAFYKYLKGLLNKIEGSGYFLDKIEREDFLRKQRTFDNGSIPHQIHLQEMRAIIRRQAEFYPFLADNQDRIEKILTFRIPYYVGPLARGKSDFAWLSRKSADKITPWNFDEIVDKESSAEAFINRMTNYDLYLPNQKVLPKHSLLYEKFTVYNELTKVKYKTEQGKTAFFDANMKQEIFDGVFKVYRKVTKDKLMDFLEKEFDEFRIVDLTGLDKENKVFNASYGTYHDLCKILDKDFLDNSKNEKILEDIVLTLTLFEDREMIRKRLENYSDLLTKEQVKKLERRHYTGWGRLSAELIHGIRNKESRKTILDYLIDDGNSNRNFMQLINDDALSFKEEIAKAQVIGETDNLNQVVSDIAGSPAIKKGILQSLKIVDELVKIMGHQPENIVVEMARENQFTKQGRRNSQQRLKGLTDSIKEFGSQILKEHPVENSQLQNDRLFLYYLQNGRDMYTGEELDIDYLSQYDIDHIIPQAFIKDNSIDNRVLTSSKENRGKSDDVPSKDVVRKMKSYWSKLLSAKLITQRKFDNLTKAERGGLTDDDKAGFIKRQLVETRQITKHVARILDERFYTETDENNKKIRQVKIVTLKSNLVSNFRKEFELYKVREINDYHHAHDAYLNAVIGKALLGVYPQLEPEFVYGDYPHFHGHKENKATAKKFFYSNIMNFFKKDDVRTDKNGEIIWKKDEYISNIKKVLSYPQVNIVKKVEEQTGGFSKESILPKGNSDKLIPRKTKKFYWDTKKYGGFDSPIVAYSILVIADIEKGKSKKLKTVKALVGVTIMEKMTFERDPIAFLERKGYRNVQEENIIKLPKYSLFKLENGRKRLLASARELQKGNEIVLPNHLGTLLYHAKNIHKVDEPKHLDYVDKHKDEFKELLDVVSNFSKKYTLAEGNLEKIKELYAQNNGEDLKELASSFINLLTFTAIGAPAAFKFFDKNIDRKRYTSTTEILNATLIHQSITGLYETRIDLSKLGGD

SEQ ID NO: 534 - protein, 1345 aa, Streptococcus mutans; identical to SEQ ID NO: 533
  REGION 1..1345: note = Streptococcus mutans SF14

SEQ ID NO: 535 - protein, 1345 aa, Streptococcus mutans
  REGION 1..1345: note = Streptococcus mutans SM1
MKKPYSIGLDIGTNSVGWAVVTDDYKVPAKKMKVLGNTDKSHIKKNLLGALLFDSGNTAEDRRLKRTARRRYTRRRNRILYLQEIFSEEMGKVDDSFFHRLEDSFLVTEDKRGERHPIFGNLEEEVKYHENFPTIYHLRQYLADNPEKVDLRLVYLALAHIIKFRGHFLIEGKFDTRNNDVQKLFQEFLAVYDNTFENSSLQEQNVQVEEILTDKISKSAKKDRVLKLFPNEKSNGRFAEFLKLIVGNQADFKKHFELEEKAPLQLSKDTYEEELEVLLAQIGDNYAELFLSAKKLYDSILLSGILTVTDVSTKAPLSASMIQRYNEHQMDLAQLKQFIRQKLSDKYNEVFSDVSKDGYAGYIDGKTNQEAFYKYLKGLLNKIEGSGYFLDKIEREDFLRKQRTFDNGSIPHQIHLQEMRAIIRRQAEFYPFLADNQDRIEKILTFRIPYYVGPLARGKSDFAWLSRKSADKITPWNFDEIVDKESSVEAFINRMTNYDLYLPNQKVLPKHSLLYEKFTVYNELTKVKYKTEQGKTAFFDANMKQEIFDGVFKVYRKVTKDKLMDFLEKEFDEFRIVDLTGLDKENKAFNASYGTYHDLRKILDKDFLDNSKNEKILEDIVLTLTLFEDREMIRKRLENYSDLLTKEQVKKLERRHYTGWGRLSAELIHGIRNKESRKTLLDYLIDDGNSNRNFMQLINDDALSFKEEIAKAQVIGETDNLNQVVSDIAGSPAIKKGILQSLKIVDELVKIMGHQPENIVVEMARENQFTNQGRRNSQQRLKGLTDSIKEFGSQILKEHPVENSQLQNDRLFLYYLQNGRDMYTGEELDIDYLSQYDIDHIIPQAFIKDNSIDNRVLTSSKENRGKSDDVPSKDVVRKMKSYWSKLLSAKLITQRKFDNLTKAERGGLTDDDKAGFIKRQLVETRQITKHVARILDERFNTETDENNKKIRQVKIVTLKSNLVSNFRKEFELYKVREINDYHHAHDAYLNAVIGKALLGVYPQLEPEFVYGDYPHFHGHKENKATAKKFFYSNIMNFFKKDDVRTDKNGEIIWKKDEYISNIKKVLSYPQVNIVKKVEEQTGGFSKESILPKGNSDKLIPRKTKKFYWDTKKYGGFDSPIVAYSILVIADIEKGKSKKLKTVKALVGVTIMEKMTFERDPIAFLERKGYRNVQEENIIKLPKYSLFKLENGRKRLLASARELQKGNEIVLPNHLGTLLYHAKNIHKVDEPKHLDYVDKHKDEFKELLDVVSNFSKKYTLAEGNLEKIKELYAQNNGEDLKELASSFINLLTFTAIGAPATFKFFDKNIDRKRYTSTTEILNATLIHQSITGLYETRIDLSKLGGD

SEQ ID NO: 536 - protein, 1345 aa, Streptococcus mutans; identical to SEQ ID NO: 535
  REGION 1..1345: note = Streptococcus mutans SM1

SEQ ID NO: 537 - protein, 1345 aa, Streptococcus mutans
  REGION 1..1345: note = Streptococcus mutans SM4
MKKPYSIGLDIGTNSVGWAVVTDDYKVPAKKMKVLGNTDKSHIKKNLLGALLFDSGNTAEDRRLKRTARRRYTRRRNRILYLQEIFSEEMDKVDDSFFHRLEDSFLVTEDKRGERHPIFGNLEEEVKYHENFPTIYHLRQYLADNPEKVDLRLVYLALAHIIKFRGHFLIEGKFDTRNNDVQRLFQEFLAVYDNTFENSSLQEQNVQVEEILTDKISKSAKKDRVLKLFPNEKSNGRFAEFLKLIVGNQADFKKHFELEEKAPLQFSKDTYEEELEVLLAQIGDNYAELFLSAKKLYDSILLSGILTVTDVSTKAPLSASMIQRYNEHQMDLAQLKQFIRQKLSDKYNEVFSDVSKDGYAGYIDGKTNQEAFYKYLKGLLNKIEGSGYFLDKIEREDFLRKQRTFDNGSIPHQIHLQEMRAIIRRQAEFYPFLADNQDRIEKILTFRIPYYVGPLARGKSDFAWLSRKSADKITPWNFDEIVDKESSAEAFINRMTNYDLYLPNQKVLPKHSLLYEKFTVYNELTKVKYKTEQGKTAFFDANMKQEIFDGVFKVYRKVTKDKLMDFLEKEFDEFRIVDLTGLDKENKVFNASYGTYHDLCKILDKDFLDNSKNEKILEDIVLTLTLFEDREMIRKRLENYSDLLTKEQVKKLERRHYTGWGRLSAELIHGIRNKESRKTILDYLIDDGNSNRNFMQLINDDALSFKEEIAKAQVIGETDNLNQVVSDIAGSPAIKKGILQSLKIVDELVKIMGHQPENIVVEMARENQFTKQGRRNSQQRLKGLTDSIKEFGSQILKEHPVENSQLQNDRLFLYYLQNGRDMYTGEELDIDYLSQYDIDHIIPQAFIKDNSIDNRVLTSSKENRGKSDDVPSKDVVRKMKSYWSKLLSAKLITQRKFDNLTKAERGGLTDDDKAGFIKRQLVETRQITKHVARILDERFYTETDENNKKIRQVKIVTLKSNLVSNFRKEFELYKVREINDYHHAHDAYLNAVIGKALLGVYPQLEPEFVYGDYPHFHGHKENKATAKKFFYSNIMNFFKKDDVRTDKNGEIIWKKDEHISNIKKVLSYPQVNIVKKVEEQTGGFSKESILPKGNSDKLIPRKTKKFYWDTKKYGGFDSPIVAYSILVIADIEKGKSKKLKTVKALVGVTIMEKMTFERDPVAFLERKGYRNVQEENIIKLPKYSLFKLENGRKRLLASARELQKGNEIVLPNHLGTLLYHAKNIHKVDEPKHLDYVDKHKDEFKELLDVVSNFSKKYTLAEGNLEKIKELYAQNNGEDLKELASSFINLLTFTAIGAPATFKFFDKNIDRKRYTSTTEILNATLIHQSITGLYETRIDLSKLGGD

SEQ ID NO: 538 - protein, 1345 aa, Streptococcus mutans; identical to SEQ ID NO: 537
  REGION 1..1345: note = Streptococcus mutans SM4

SEQ ID NO: 539 - protein, 1345 aa, Streptococcus mutans
  REGION 1..1345: note = Streptococcus mutans SM6
MKKPYSIGLDIGTNSVGWAVVTDDYKVPAKKMKVLGNTDKSHIKKNLLGALLFDSGNTAEDRRLKRTARRRYTRRRNRILYLQEIFSEEMGKVDDSFFHRLEDSFLVTEDKRGERHPIFGNLEEEVKYHENFPTIYHLRQYLADNPEKTDLRLVYLALAHIIKFGGHFLIEGKFDTRNNDVQRLFQEFLAVYDNTFENSSLQEQNVQVEEILTDKISKSAKKDRVLKLFPNEKSNGRFAEFLKLIVGNQADFKKHFELEEKAPLQFSKDIYEEELEVLLAQIGDNYAELFLSAKKLYDSILLSGILTVTDVSTKAPLSASMIQRYNEHQMDLAQLKQFIRQKLSDKYNEVFSDVSKDGYAGYIDGKTNQEAFYKYLKGLLNKIEGSGYFLDKIEREDFLRKQRTFDNGSIPHQIHLQEMRAIIRRQAEFYPFLADNQDRIEKILTFRIPYYVGPLARGKSDFAWLSRKSADKITPWNFDEIVDKESSVEAFINRMTNYDLYLPNQKVLPKHSLLYEKFTVYNELTKVKYKTEQGKTAFFDANMKQEIFDGVFKVYRKVTKDKLMDFLEKEFDEFRIVDLTGLDKENKAFNASYGTYHDLRKILDKDFLDNSKNEKILEDIVLTLTLFEDREMIRKRLKNYSDLLTKEQLKKLERRHYTGWGRLSAELIHGIRNKESRKTILDYLIDDGNSNRNFMQLINDDALSFKEEIAKAQVIGETDNLNQVVSDIAGSPAIKKGILQSLKIVDELVKIMGHQPENIVVEMARENQFTNQGRRNSQQRLKGLTDSIKEFGSQILKEHPVENSQLQNDRLFLYYLQNGRDMYTGEELDIDYLSQYDIDHIIPQAFIKDNSIDNRVLTSSKENRGKSDDVPSKNVVRKMKSYWSKLLSAKLITQRKFDNLTKAERGGLTDDDKAGFIKRQLVETRQITKHVARILDERFHTETDENNKKIRQVKIVTLKSNLVSNFRKEFELYKVREINDYHHAHDAYLNAVIGKALLGVYPQLEPEFVYGDYPHFHGHKENKATAKKFFYSNIMNFFKKDDVRTDKNGEIIWKKDEHISNIKKVLSYPQVNIVKKVEEQTGGFSKESILPKGNSDKLIPRKTKKFYWDTKKYGGFDSPIVAYSILVIADIEKGKSKKLKTVKALVGVTIMEKMTFERDPVAFLERKGYRNVQEENIIKLPKYSLFKLENGRKRLLASARELQKGNEIVLPNHLGTLLYHAKNIHKVDEPKHLDYVDKHKDEFKELLDVVSNFSKKYTLAEGNLEKIKELYAQNNGEDLKELASSFINLLTFTAIGAPATFKFFDKNIDRKRYTSTTEILNATLIHQSITGLYETRIDLSKLGGD

SEQ ID NO: 540 - protein, 1345 aa, Streptococcus mutans; identical to SEQ ID NO: 539
  REGION 1..1345: note = Streptococcus mutans SM6

SEQ ID NO: 541 - protein, 1134 aa, Streptococcus mutans
  REGION 1..1134: note = Streptococcus mutans ST1
MANGKILGLDIGIASVGVGIIDKETGKIIHVNSRIFPAATADSNVERRGFRQGRRLVRRKKHRKVRLADLFLDSNLLTDFSKVSLNLNPYQLRVKGLNEELSNEELFIALKSIVSRRGISYLDDASEDSGANSSEYGKAVEENRKLLEDRTPGQIQLERFEKYGKVRGDFTVVENGENHRLINVFSTSAYKKEAERILRRQQEFNMRIADEFIEAYLTILTGKRKYYHGPGNEKSRTDYGRFRTDGTTLDNIFGILIGKCTFYPDEYRAAKASYTAQEFNLLNDLNNLTVPTETKKLSEEQKRQIIEHAKTVKTLGAPTLLKYIVKLVGCSADDIKGYRIDKSDKPEIHTFEAYRKMRTMELIKVDDLSRESLDALAHILTLNTEREGIEEAIRDRFTNKEFNQEQINELVLFRKNNSSLFGKGWHNFSLKLMKELIPELYETSEEQMTILTRLGKQRVKKSSNRTNYIDEKELTEEIYNPVVAKSVRQAIKIINLATKKYGVFDNIVIEMARESNEDDEKKAIQNAQKANEDEKKAALLKAAHQFNGKEELPDSIFHGHKELLTKIRLWHQQGEKCLYTGKTIFINDLIHNPYKYEIDHILPLSLSFDDSLANKVLVLSTANQEKGQRTPFQSLDSMDGAWTYREFKSYVKGLKTLSNKKKDYLLTEENIDKIEVKQKFIERNLVDTRYSSRVVLNALQDFYKERKFDTKISVVRGQFTSQLRRKWRIEKTRETYHHHAVDALIIAASSQLNLWKKQNNPLISYKEDQFVDPETGEILSLSDDEYKKLVFKAPYEHFVDTLKSKKFEDSILFSYQVDSKYNRKISGATICGTRKAQLGKDTQEETYVLGKIKDIYSQKGYEDFIKKYKKDKTQFLMYHKDPQTFEKVIEEILKTYPDKELNEKGKEVSCNPFEKYRQENGPVRKYSKKGNGPEIKSLKYYDEVLGKNIDITPKNSLNKVVLRSLNPWRTDVYFNHETRKYEFLGLKYSDLRYLKGEHRYGILIGDYKKIKDKEGIEKESEFKFTLYKNDLILIKDTAKGKEELFRFWSRTGKDNAKTFEKNKIELKPYSKSQFEKGEDTNVLGKLYASSNQLQKSFGTLENLSIYKVRTDVLGNKYFIKKEGDKPQLNFKKKL

SEQ ID NO: 542 - protein, 1134 aa, Streptococcus mutans; identical to SEQ ID NO: 541
  REGION 1..1134: note = Streptococcus mutans ST1

SEQ ID NO: 543 - protein, 1350 aa, Streptococcus mutans
  REGION 1..1350: note = Streptococcus mutans ST6
MKKPYSIGLDIGTNSVGWAVVTDDYKVPAKKMKVLGNTDKSHIEKNLLGALLFDSGNTAEDRRLKRTARRRYTRRRNRILYLQEIFSEEMGKVDDSFFHRLEDSFLVTEDKRGERHPIFGNLEEEVKYHENFPTIYHLRQYLADNPEKVDLRLVYLALAHIIKFRGHFLIEGKFDTRNNDVQRLFQEFLAVYDNTFENSSLQEQNVQVEEILTDKISKSAKKDRVLKLFPNEKSNGRFAEFLKLIVGNQADFKKHFELEEKAPLQFSKDTYEEELEVLLAQIGDNYAELFLSAKKLYDSILLSGILTVTDVSTKAPLSASMIQRYNEHQMDLTQLKQFIRQKLSDKYNEVFSDVSKDGYAGYIDGKTNQEAFYKYLKGLLNKIEGSGYFLDKIEREDFLRKQRTFDNGSIPHQIHLQEMRAIIRRQAEFYSFLADNQDRIEKILTFRIPYYVGPLARGKSDFAWLSRKSADKITPWNFDEIVDKESSAEAFINRMTNYDLYLPNQKVLPKHSLLYEKFTVYNELTKVKYKTEQGKTAFFDANMKQEIFDGVFKVYRKVTKDKLMDFLEKEFDEFRIVDLTGLDKENKAFNASYGTYHDLRKILDKDFLDNSKNEKILEDIVLTLTLFEDREMIRKRLENYSDLLTKEQVKKLERRHYTGWGRLSAELIHGIRNKESRKTILDYLIDDGNSNRNFMQLINDDALSFKEEIAKAQVIGETDNLNQVVSDIAGSPAIKKGILQSLKIVDELVKIMGHQPENIVVEMARENQFTNQGRRNSQQRLKGLTDSIKEFGSQILKEHPVENSQLQNDRLFLYYLQNGRDMYTGEELDIDYLSQYDIDHIIPQAFIKDNSIDNRVLTSSKENRGKSDDVPSEDVVNRMRPFWNKLLSSGLISQRKYNNLTKKELTLDDKAGFIKRQLVETRQITKHVARMLDERFNKEFDDNNKRIRKVKIVTLKSNLVSSFRKEFELYKVREINDYHHAHDAYLNAVVVKALLVKYSKLEPEFVYGEYPKYNSYRERKTATQKMFFYSNIMNMFKSKVKLADDQIVERPMIEVNDETGEIAWDKTKHITTVKKVLSYPQVNIVKKVEEQTIGQNGGLFDDNPKSPLEVIPSKLVPLKKALNPEKYGGYQKPTTAYPILLIVDTKQLIPISVMDKKRFEQNPVKFLKDKGYQQIEKNNFVKLPKYTLVDIGNGIKRLWASSKEVHKGNQLVVSKKSQDLLYHAHHLDNDYSNEYVKNHYQQFDILFNEITSFSKKCKLGKEHIQKIEEAYSKERDSASIEELADGFIKLLGFTQLGATSPFSFLGIKLNQKQYTGKKDYLLPCMEATLIHQSITGLYETRIDLSKLGGD

SEQ ID NO: 544 - protein, 1350 aa, Streptococcus mutans; identical to SEQ ID NO: 543
  REGION 1..1350: note = Streptococcus mutans ST6

SEQ ID NO: 545 - protein, 1125 aa, Streptococcus mutans
  REGION 1..1125: note = Streptococcus mutans U2A
MTNGKILGLDIGIASVGVGIINAKTGNVEHASSRIFPAANADNNVERRSARGGRRLIRRKKHRLKRVEDLFEKYNIDTDFSNLNLNPYQLRVKGLNEQLSNEELFAILKNIAKRRGISYLDDAEDDSVGSSDYAKAIDENRKLLKKQTPGEIQLKRLEKYGQLRGNFTIQDENGEYHRLINVFSTSDYVKEARRILETQSYYNKFITESFVEDYIKILQGKRKYYVGPGNEKSRTDYGIYRTDGETLDNLFGILIGKCGFYPEEYRAAKASYTAQEYNFLNDLNNLTVPTETKKLSTEQKYQLVDFAKTASTLGAAKLLKEIAKLVGCQVEEIKGYRLDNKDKPDLHTFEPFRKLKSNLTTIAVENLSITTLDTLAHILTLNTEREGIEEAIQKELPNIFSDEQITEIIAVRKKNSQIFGKGWHSFSIKLMKELIPELYETSEEQMTILTRLKKVKTNSKITNRTKYINEEEITDEIYNPVVSKSIRQTVKIINATIKKYGAFDQIIIEMPRESNEEDERKFIADLQKSNAKEKDDAMKQAALLYNGKDELPHDVFHGHKELATKIRLWYQQGERCLYSGKHIDIHDLIHNQHMFEIDHVLPLSLSFDDSLANKVLVYSWANQEKGQRTPFQALPQMASAWSFRELRDYISKQKGISKKKRDYLLTEQDINKVEVKQKFIERNLVDTRYVSRVVLNTLQDALKVMNKETKISVIRGQFTSQLRRQWRIDKSRETYHHHAVDALIIAASSQLRLWKKQNNPMFAEDKHGQKINLDTGEVLSDDAYKELVYQAPYQGFVNTISSKSFEDEILFSYQVDSKVNRKISDATIYATRQAQLGKDKKEETYVLGKIKDIYSQAGYDAFRKKYDKDKAVFLMYQKDPETWEKVIEVILRDYKELDDKGKEIGNPFERYKVKHGFVRKYSRKNKGTEIKSLKYYDNKLGNHIDITPNNSKHSVVLQSINPWRADLYFNPETTKYELMGLKYADLSFEKGTGKYSISREKYDEIKEREGISSKSEFKFTLYKNDLILVKDIGNHKELIARFNSKNDTSKHYVELKPWNKAKFDSEEELIPAFGKVAKSGQFIKGLNKPDLSIYKVKTDILGHKYYIKKEGDKPKLNFENKIKNK

SEQ ID NO: 546 - protein, 1125 aa, Streptococcus mutans; identical to SEQ ID NO: 545
  REGION 1..1125: note = Streptococcus mutans U2A

SEQ ID NO: 547 - protein, 1345 aa, Streptococcus mutans
  REGION 1..1345: note = Streptococcus mutans UA159
MKKPYSIGLDIGTNSVGWAVVTDDYKVPAKKMKVLGNTDKSHIEKNLLGALLFDSGNTAEDRRLKRTARRRYTRRRNRILYLQEIFSEEMGKVDDSFFHRLEDSFLVTEDKRGERHPIFGNLEEEVKYHENFPTIYHLRQYLADNPEKVDLRLVYLALAHIIKFRGHFLIEGKFDTRNNDVQRLFQEFLAVYDNTFENSSLQEQNVQVEEILTDKISKSAKKDRVLKLFPNEKSNGRFAEFLKLIVGNQADFKKHFELEEKAPLQFSKDTYEEELEVLLAQIGDNYAELFLSAKKLYDSILLSGILTVTDVGTKAPLSASMIQRYNEHQMDLAQLKQFIRQKLSDKYNEVFSDVSKDGYAGYIDGKTNQEAFYKYLKGLLNKIEGSGYFLDKIEREDFLRKQRTFDNGSIPHQIHLQEMRAIIRRQAEFYPFLADNQDRIEKLLTFRIPYYVGPLARGKSDFAWLSRKSADKITPWNFDEIVDKESSAEAFINRMTNYDLYLPNQKVLPKHSLLYEKFTVYNELTKVKYKTEQGKTAFFDANMKQEIFDGVFKVYRKVTKDKLMDFLEKEFDEFRIVDLTGLDKENKVFNASYGTYHDLCKILDKDFLDNSKNEKILEDIVLTLTLFEDREMIRKRLENYSDLLTKEQVKKLERRHYTGWGRLSAELIHGIRNKESRKTILDYLIDDGNSNRNFMQLINDDALSFKEEIAKAQVIGETDNLNQVVSDIAGSPAIKKGILQSLKIVDELVKIMGHQPENIVVEMARENQFTNQGRRNSQQRLKGLTDSIKEFGSQILKEHPVENSQLQNDRLFLYYLQNGRDMYTGEELDIDYLSQYDIDHIIPQAFIKDNSIDNRVLTSSKENRGKSDDVPSKDVVRKMKSYWSKLLSAKLITQRKFDNLTKAERGGLTDDDKAGFIKRQLVETRQITKHVARILDERFNTETDENNKKIRQVKIVTLKSNLVSNFRKEFELYKVREINDYHHAHDAYLNAVIGKALLGVYPQLEPEFVYGDYPHFHGHKENKATAKKFFYSNIMNFFKKDDVRTDKNGEIIWKKDEHISNIKKVLSYPQVNIVKKVEEQTGGFSKESILPKGNSDKLIPRKTKKFYWDTKKYGGFDSPIVAYSILVIADIEKGKSKKLKTVKALVGVTIMEKMTFERDPVAFLERKGYRNVQEENIIKLPKYSLFKLENGRKRLLASARELQKGNEIVLPNHLGTLLYHAKNIHKVDEPKHLDYVDKHKDEFKELLDVVSNFSKKYTLAEGNLEKIKELYAQNNGEDLKELASSFINLLTFTAIGAPATFKFFDKNIDRKRYTSTTEILNATLIHQSITGLYETRIDLNKLGGD

SEQ ID NO: 548 - protein, 1345 aa, Streptococcus mutans; identical to SEQ ID NO: 472
  REGION 1..1345: note = Streptococcus mutans W6

SEQ ID NO: 549 - protein, 1121 aa, Streptococcus oralis
  REGION 1..1121: note = Streptococcus oralis SK1074
MNGLVLGLDIGIASVGVGILEKNSGKIIHANSRLFPAATADNNVERRKNRQARRLNRRKKHRGVRFQDLFEDYGLLTDFSKVSINLNPYRLRVDGLNQQLTNEELFIALKNIVKRRGISYLDDASEDGGAVSSDYGKAVEENRKLLAEQTPGQIQLERFEKYGQVRGDFTVVENGEKCRLINVFSTSAYRKEAEKILRKQQEFNNQITDEFIEDYLKILTGKRKYYHGPGNEKSRTDYGRFRTDGTTLDNIFGVLIGKCTFYPNEYRASKSSYTAQEFNLLNDLNNLTVPTETKKLSEEQKKVIVEYAKEAKTLGASTLLKYIVKMIDASVDQISGYRVDVNNKPEMHTFEVYRKMQSLETISVGELSRNVLDELAHILTLNTEREGIEEAINSKLMGVFSQDQVLELVQFRKNNSSLFSKGWHNFSLKLMMELIPELYETSEEQMTILTRLGKQKSKETSKRTKYIDEKELTEEIYNPVVAKSVRQAIKIINEATKKHGIFDNIVIEMARENNEEDAKKDYIKRQKANQDEKNAAMEKAAFQYNGKKELPGNIFNGHKELATKIRLWHQQGEKCLYTGKTIPISDLIHNQYKYEIDHILPLSLSFDDSLSNKVLVHATANQEKGQRTPFQALDSMDDAWSYREFKSYVKDLKSLSNKKKDYLLTEEDISKIEVKQKFIERNLVDTRYSSRVVLNALQDFYKSHQFDTTISVVRGQFTSQLRRKWGLEKSRETYHHHAVDALIIAASSQLRLWKKQNNPLITYKEGQFVDSQTGEIISLTDDEYKELVFKAPYDHFVDTLHSKTFEDGILFSYQVDSKYNRKISDATIYATRKAKLDKDKSEETYVLGKIKDIYSQAGYDAFIKIYNKDKRKFLMYHKDPQTFEKVIEEILRTYPSKERNDKNKEVPCNPFEKYRQENGPIRKYSKKGNGPEIKCLKYYDNKLGNYIDISPDGSDNQVVLQSLKPWRTDVYFNHQTKEYELMGLKYSDLSFEKGSGKYSISNEKYNSIKRIEGVNEQSEFKFTLYKNDLILIKDSENNEQKLFRFNSRNDTAKHYVELKPYDKARFDGQQELITILGNVAKGGQCLKGLNKSNISIFKVKTDVLGKKHIIKKEGDEPKLKF

SEQ ID NO: 550 - protein, 1373 aa, Streptococcus oralis
  REGION 1..1373: note = Streptococcus oralis SK304
MENKNYSIGLDIGTNSVGWAVITDDYKVPSKKMKVLGNTDKRFIKKNLIGALLFDEGTTAEARRLKRTARRRYTRRKNRLRYLQEIFAEEMSKVDSSFFHRLDDSFLIPEDKKGSKYPIFATLIEEKEYHKQFPTIYHLRKQLADSKEKTDLRLIYLALAHMIKYRGHFLYEDTFDIKNNDIQKIFNEFISIYNNTFEGNSLSGQNVQVEAIFTDKISKSAKRERVLKLFPDEKSTGLFSEFLKLIVGNQADFKKHFDLEEKAPLQFSRDTYDEDLENLLGQIGDDFADLFVAAKKLYDAILLSGILTVTDPSTKAPLSASMIERYENHQKDLATLKQFIKTNLPEKYDEVFSDQSKDGYAGYIDGKTTQESFYKYIKNLLSKFEGADYFLEKIEREDFLRKQRTFDNGSIPHQIHLQEMNAILRRQGEHYPFLKENKEKIEKILTFRIPYYVGPLARGNRDFAWLTRNSDQAIRPWNFEEIVDKASSAESFINKMTNYDLYLPEEKVLPKHSLLYETFAVYNELTKVKFIAEGLRDYQFLDSRQKKDIFYTLFKAEDKRKVTEKDIIQYLHTVDGYDGIELKGIEKQFNASLSTYHDLLKIIKDKEFMDDPNNEEILENIVHTLTIFEDREMIKQRLAQYDSLFDEKVIKALTRRHYTGWGKLSSKLINGIRDKQTGKTILDYLMDDGYNNRNFMQLINDDELSFKEIIKKAQVVGKTDDVKQVVQELPGSPAIKKGILQSIKLVDELVKVMGHEPESIVIEMARENQTTARGKKNSQQRYKRIEDSLKILASGLNAKILKEHPTDNIQLQNDRLFLYYLQNGRDMYTGKPLDINQLSSYDIDHIVPQAFIKDDSLDNRVLTSLKDNRGKSDNVPSLEVVEKMKTFWQQLLDSKLISYRKFNNLTKAERGGLDERDKVGFIKRQLVETRQITKHVAQILDARYNTEVNEKDKKNRTVKIITLKSNLVSNFRKEFRLYKIREINDYHHAHDAYLNAVVAKAILKKYPKLEPEFVYGDYQKYDLKRYISRSKDPKEIEKATEKYFFYSNLLNFFKEEVHYADGTIVKRENIEYSKDTGEIAWNKEKDFATIKKVLSLPQVNIVKKREVQTGGFSKESILPKGNSDKLIPRKTKDILWDTTKYGGFDSPVIAYSILLIADIEKGKAKRLKTVKTLVGITIMEKATFEKSPIAFLENKGYHNVRKENILCLPKYSLFELKNGRRRMLASAKELQKGNEIVLPVHLTTLLYHAKNIHRLDEPEHLEYIQKHRNEFKGLLNLVSEFSQKYVLADANLEKIKNLYADNEQADIEILANSFINLLTFTALGAPAAFKFFGKDVDRKRYTTVSEILNATLIHQSITGLYETRIDLSKLGED

SEQ ID NO: 551 - protein, 1134 aa, Streptococcus oralis
  REGION 1..1134: note = Streptococcus oralis SK313
MNGLVLGLDIGIASVGVGILEKNSGKIVHASSRIFPAATADNNVERRKNRQARRLHRRKKHRGARLKDLFEYYGLLTDFSKVSINLNPYRLRVDGLDQQLTNEELFIALKNIVKRRGISYLDDASEDGGTVSSDYGKAVEENRKLLAEQTPGQIQLERFEKYGQLRGDFTVVENSEKCRLINVFSTSAYKKEAERILRKQQEFNNQITDEFIEDYLKILTGKRKYYHGPGNEKSRTDYGRFRTDGATLDNIFGILIGKCTFYPNEYRASKASYTAQEFNLLNDLNNLTVPTETKKLSEEQKKTIIEYAKSAKTLGASTLLKYIAKMIDASVDQIRGYRVDVNNKPEMHTFEVYRKMQSLETISVGELSRNILDELAHILTLNTEREGIEEAINTKLRDSFSQDQVLELVQFRKNNSSLFSKGWHNFSLKLMMELIPELYETSEEQMTILTRLGKQKSKETSKRTKYIDEKEVTEEIYNPVVAKSVRQAIKIINEATKKHGIFDNIVIEMARENNEEDAKKDYIKRQKANQDEKYAAMEKAAFQYNGKKELPDNIFHGHKELATKIRLWHQQGEKCLYTGKSIPISDLIHNQYKYEIDHILPLSLSFDDSLSNKVLVLATANQEKGQRTPFQALDSMDDAWSYREFKSYVKESKLLGNKKKEYLLTEEDISKIEVKQKFIERNLVDTRYSSRVVLNALQDFYKNHNFDTTISVVRGQFTSQLRRKWGLEKSRETYHHHAVDALIIAASSQLRLWKKQNNPLIAYKEGQFVDSQTGEIISLTDDEYKELVFKAPYDHFVDTLSSKTFEDSILFSYQVDSKFNRKISDATIYATRKAKLDKEKKEYTYTLGKIKDIYSLGTKTPSKTGFYKFLDLYNKDKSQFLMFQKDRKTWDEVIEKIMEQYRPFKEYDKAGKLVDFNPFEKYRQENGPIRKYSKKGNGPEIKSLKYYDILLGKHKNITPEGSRNTVALLSLNPWRTDVYYNMETKKYEFLGLKYADLPFEEGGAYGISTETYNELREKEGIGKNSEFKFTLYKNDLILIKDTETNCQQFFRFWSRTGKDNPKSFEKHKIELKPYEKAKFEKGEELEVLGKVPPSSNQFQKNMQIENLSIYKVKTDVLGNKHFIKKEGDKPKLKF

SEQ ID NO: 552 - protein, 1371 aa, Streptococcus oralis
  REGION 1..1371: note = Streptococcus oralis SK610
MENKNYSIGLDIGTNSVGWSVITDDYKVPSKKMKVLGNTDKRFIKKNLIGALLFDEGTTAEARRLKRTARRRYTRRKNRLRYLQEIFAEEMSKVDSSFFHRLDDSFLIPEDKRGSKYPIFATLAEEKEYHKQFPTIYHLRKQLADSKEKTDLRLIYLALAHMIKYRGHFLYEDTFDIKNNDIQKIFSEFISIYDNTFEGSSLSGQNAQVEAIFTDKISKSAKRERVLKLFPDEKSTGLFSEFLKLIVGNQADFKKHFDLGEKAPLQFSKDTYDEDLENLLGQIGDDFADLFLVAKKLYDAILLSGILTVTDPSTKAPLSASMIERYENHQKDLAVLKQFIKNNLPEKYDEVFSDQSKDGYAGYIDGKTTQEAFYKYIKNLLSKFEGTDYFLEKIEREDFLRKQRTFDNGSIPHQIHLQEMNAILRRQGEHYPFLKDNKEKIEKILTFRIPYYVGPLARGNRDFAWLTRNSDEAIRPWNFEEIVDKASSAEDFINKMTNYDLYLPEEKVLPKHSLLYETFAVYNELTKVKFIAEGLRDYQFLDSGQKKQIVTQLFKEKRKVTEKDIIQFLHNVDGYDGIELKGIEKQFNASLSTYHDLLKIIKDKEFMDDSKNEEILENIVHTLTIFEDREMIKQRLAQYDSLFDEKVIKALIRRHYTGWGKLSAKLIDGICDKQTGNTILDYLIDDGKNNRNFMQLINDDGLSFKEITQKAQVVGKTDDVKQVVQELPGSPAIKKGILQSIKIVDELVKVMGHTPESIVIEMARENQTTARGKKNSQQRYKRIEDALKNLASGLDSNILKEHPTNNIQLQNDRLFLYYLQNGRDMYTGKPLDINQLSSYDIDHIVPQAFIKDDSLDNRVLTSLKDNRGKSDNVPSIEVVQKRKAFWQQLLDSKLISERKFNNLTKAERGGLDERDKVGFIKRQLVETRQITKHVAQILDARFNKEVNEKDKKNRTVKIITLKSNLVSNFRKEFRLYKVREINDYHHAHDAYLNAVVAKAILKKYPKLEPEFVYGDYQKYDLKRYISRSRNPKEVEKATEKYFFYSNLLNFFKEEVHYADGTIVKRENIEYSKDTGEIAWNKEKDFATIKKVLSYPQVNIVKKREVQTGGFSKESILPKGNSDKLIPRKTKDILWETTKYGGFDSPVIAYSILLIADIEKGKAKKLKTVKTLVGITIMEKAAFEENPITFLENKGYHNVRKENILCLPKYSLFELENGRRRLLASAKELQKGNEIVLPVYLTTLLYHSKNVHKLDEPEHLEYIQKHRNEFKDLLNLVSEFSQKYVLADANLEKIQNLYADNEQADIEILANSFINLLTFTALGAPAAFKFFGKDIDRKRYTTVSEILNATLIHQSITGLYETRIDLSKLGED

SEQ ID NO: 553 - protein, 1140 aa, Streptococcus parasanguinis
  REGION 1..1140: note = Streptococcus parasanguinis F0449
MNGLVLGLDIGIASVGVGILKKDIGEIIHTNSRLFSAATADSNIERRGHRGGKRLTRRKKHRSIRLHDLFEDFGLLTDFSKVSINLNPYQLRVQGLDNQLTNEELFIALKNIVKRRGISYLDDASEDGGTVSSDYGKAVEENRKLLAEQTPGQIQLDRFEKYGQVRGDFNVVENGEKRRLINVFTTSAYSKEAERILRKQQEFNKKITDEFIEDYLTILTGKRKYYHGPGNEKSRTDYGRYTTKKDPEGKYITLDNIFGILIGKCTFYPDEYRASKASYTAQEFNLLNDLNNLTVPTETKKLSEEQKKTIIKYAKTAKTLGASTLLKYIAKLIGASVDQIHGYRIDPNKKPEMHTFETYRKMQSLETISVEELPRKVLDELAHILTLNTEREGIEEAINATLKDTFSQDQVLELVQFRKNNSSLFSKGWHSFSLKLMMELIPELYETSEEQMTILTRLGKQKSKETSKRTKYIDEKELTEEIYNPVVAKSVRQAIKIINEATKKYGIFDNIVIEMARENNEEDAKKEYIKRQKANLDEKNAAMEKAAFQYNGKKELPDNVFHGHKELATKIRLWHQQGEKCLYTGKNIPISDLIQNQYKYEIDHILPLSLSFDDSLSNKVLVLATANQEKGQRTPFQALDSMDDAWSYREFKSYVKDSKLLGNKKKEYLLTEEDISKIEVKQKFIERNLVDTRYSSRVVLNALQDFYKEHQFDTTISVVRGQFTSQLRRKWGLEKSRETYHHHAVDALIIAASSQLRLWKKQNNPLISYTEGQFVDQVTGEIISLSDDEYKELVFKAPYDHFVDTLKSKKFEDSILFSYQVDSKYNRKISDATIYATRKAKLDKENKEYTYTLGKIKDIYALGTKSPSKTGFYKFLDLYNKDKSQFLMFQKDRKTWDEVIEKIIEQYRPFKEYDENGKEVDFNPFEKYRIENGPIRKYSKKGNGPEIKSLKYYDNLLGKFVDITPSESKNPVALLSLNPWRTDVYYNTETSKYEFLGLKYADLCFEKGGAYGISEVKYNKIREKEGIGKESEFKFTLYKNDLILIKDTETNCQQIFRFWSRTGKDNPKSFEKHKIELKPYEKARFEKGEELEVLGKVPPSSNQLQKNMQIENLSIYKVKTDVLGNKHFIKKEGEEPKLKF

SEQ ID NO: 554 - protein, 1130 aa, Streptococcus pasteurianus
MTNGKILGLDIGIASVGVGIIEAKTGKVVHANSRLFSAANAENNAERRGFRGSRRLNRRKKHRVKRVRDLFEKYGIVTDFRNLNLNPYELRVKGLTEQLKNEELFAALRTISKRRGISYLDDAEDDSTGSTDYAKSIDENRRLLKNKTPGQIQLERLEKYGQLRGNFTVYDENGEAHRLINVFSTSDYEKEARKILETQADYNKKITAEFIDDYVEILTQKRKYYHGPGNEKSRTDYGRFRTDGTTLENIFGILIGKCNFYPDEYRASKASYTAQEYNFLNDLNNLKVSTETGKLSTEQKESLVEFAKNTATLGPAKLLKEIAKILDCKVDEIKGYREDDKGKPDLHTFEPYRKLKFNLESINIDDLSREVIDKLADILTLNTEREGIEDAIKRNLPNQFTEEQISEIIKVRKSQSTAFNKGWHSFSAKLMNELIPELYATSDEQMTILTRLEKFKVNKKSSKNTKTIDEKEVTDEIYNPVVAKSVRQTIKIINAAVKKYGDFDKIVIEMPRDKNADDEKKFIDKRNKENKKEKDDALKRAAYLYNSSDKLPDEVFHGNKQLETKIRLWYQQGERCLYSGKPISIQELVHNSNNFEIDHILPLSLSFDDSLANKVLVYAWTNQEKGQKTPYQVIDSMDAAWSFREMKDYVLKQKGLGKKKRDYLLTTENIDKIEVKKKFIERNLVDTRYASRVVLNSLQSALRELGKDTKVSVVRGQFTSQLRRKWKIDKSRETYHHHAVDALIIAASSQLKLWEKQDNPMFVDYGKNQVVDKQTGEILSVSDDEYKELVFQPPYQGFVNTISSKGFEDEILFSYQVDSKYNRKVSDATIYSTRKAKIGKDKKEETYVLGKIKDIYSQNGFDTFIKKYNKDKTQFLMYQKDSLTWENVIEVILRDYPTTKKSEDGKNDVKCNPFEEYRRENGLICKYSKKGKGTPIKSLKYYDKKLGNCIDITPEESRNKVILQSINPWRADVYFNPETLKYELMGLKYSDLSFEKGTGNYHISQEKYDAIKEKEGIGKKSEFKFTLYRNDLILIKDIASGEQEIYRFLSRTMPNVNHYVELKPYDKEKFDNVQELVEALGEADKVGRCIKGLNKPNISIYKVRTDVLGNKYFVKKKGDKPKLDFKNNKK

SEQ ID NO: 555 - protein, 1374 aa, Streptococcus pseudoporcinus
  REGION 1..1374: note = Streptococcus pseudoporcinus LQ 940-04
MKKRYSYSIGLDIGTNSVGWAVINEDYKVPAKKMTVFGNTDRKTIKKNLLGTVLFDSGETAQARRLKRTNRRRYTRRRYRLCQLQNIFATEMVKVDDTFFQRLSESFFYYQDKAFDKHPIFGNSKEERAYHKTYPTIYHLRKDLADRDQKADLRLIYLALSHIIKFRGHFLIEGKLNSENTDVQKLFIALVTVYNLLFEEEPIAGETCDAKALLTAKTSKSKRLESLISEFPGQKKNGLFGNLLALALGLRPNFKSNFGLSEDAKLQITKDTYEEELDNLLAEIGDHYADLFLAAKNLSDAILLSDILTLSDENTRAPLSASMIKRYEEHQEDLALLKKLVKEQMPEKYWEIFSNAKKNGYAGYIEGKVSQEDFYRYIKPILSRLKGGDEFLAKIDRDDFLRKQRTFDNGSIPHQIHLKELHAILRRQEKYYPFLAEQKEKIEQLLCFRIPYYVGPLAKGGNSSFAWLKRRSDEPITPWNFKDVVDEEASAQAFIEGMTNYDTYLPEEKVLPKHSPLYEMFTVYNELTKVKYIAENMTKPLYLSAEQKEAIIDHLFKQTRKVTVKDLKEKYFSQIEGLENVDVTGVEGAFNASLGTYNDLLKIIKDKAFLDDEANAEILEEIVLILTLFQDEKLIEKRLAKYANLFEKSVLKKLRKRHYRGWGRLSRQLIDGMKDKASGKTILDFLKADDFANRNFIQLINDSSLDFEKLIDDAQKKAIKRESLTEAVANLAGSPAIKKGILQSLKVVDEIVKVMGHNPDNIVIEMSRENQTTAQGLKNARQRLKKIKEVHKKTGSRILEDNSERITNLTLQDNRLYLYLLQDGKDMYTGQDLDINNLSQYDIDHIIPQSFIKDNSIDNLVLTTQKANRGKSDNVPSIEVVRDMKDRVWRRQLANGAISRQKFDHLTKAERGGLADSDKARFLRRQLVETRQITKHVAQLLDSRFNSKSNQNKKLARNVKIITLKSKIVSDFRKDFGLYKLREVNNYHHAHDAYLNAVVGTALLKKYPKLEAEFVYGDYKHFDLVKLISKSDPSLGKATAKVFFYSNIMNFFKEELSLADGTLMKRPVIETNTETGEVVWDKVKDFKTIRKVLSYPQVNIVKKTEIQSGAFSKESVLSKGNSDKLIERKKGWDPKKYGGFDSPNTAYSIFVVAKVAKRKAQKLKTVKEIVGITIMEQAEYEKDNIAFLEKKGYQDIQEKLLIKLPKYSLFELENGRRRLLASANEFQKGNELALSGKYMKFLYLASRYDKLSSKIESEQQKKLFVEQHLHYFDEILDIVVKHATCYIKAENNLKKIISLYKKKEAYSINEQALNMLNLFIFTSLGAPSTFVFFDETIDRKRYTTSSDVLNGILIQQSITGLYETRIDLSRFGGD

SEQ ID NO: 556 - protein, 1368 aa, Streptococcus pyogenes
  REGION 1..1368: note = Streptococcus pyogenes MGAS10270
MDKKYSIGLDIGTNSVGWAVITDDYKVPSKKFKVLGNTDRHSIKKNLIGALLFDSGETAEATRLKRTARRRYTRRKNRICYLQEIFSNEMAKVDDSFFHRLEESFLVEEDKKHERHPIFGNIVDEVAYHEKYPTIYHLRKKLVDSTDKADLRLIYLALAHMIKFRGHFLIEGDLNPDNSDVDKLFIQLVQTYNQLFEENPINASGVDAKAILSARLSKSRRLENLIAQLPGEKKNGLFGNLIALSLGLTPNFKSNFDLAEDAKLQLSKDTYDDDLDNLLAQIGDQYADLFLAAKNLSDAILLSDILRLNSEITKAPLSASMIKRYDEHHQDLTLLKALVRQQLPEKYKEIFFDQSKNGYAGYIDGGASQEEFYKFIKPILEKMDGTEELLAKLNREDLLRKQRTFDNGSIPHQIHLGELHAILRRQEDFYPFLKDNREKIEKILTFRIPYYVGPLARGNSRFAWMTRKSEETITPWNFEEVVDKGASAQSFIERMTNFDKNLPNEKVLPKHSLLYEYFTVYNELTKVKYVTEGMRKPAFLSGEQKKAIVDLLFKTNRKVTVKQLKEDYFKKIECFDSVEISGVEDRFNASLGTYHDLLKIIKDKDFLDNEENEDILEDIVLTLTLFEDREMIEERLKTYAHLFDDKVMKQLKRRRYTGWGRLSRKLINGIRDKQSGKTILDFLKSDGFANRNFMQLIHDDSLTFKEDIQKAQVSGQGDSLHEHIANLAGSPAIKKGILQTVKVVDELVKVMGRHKPENIVIEMARENQTTQKGQKNSRERMKRIEEGIKELGSQILKEHPVENTQLQNEKLYLYYLQNGRDMYVDQELDINRLSDYDVDHIVPQSFIKDDSIDNKVLTRSDKNRGKSDNVPSEEVVKKMKNYWRQLLNAKLITQRKFDNLTKAERGGLSELDKAGFIKRQLVETRQITKHVAQILDSRMNTKYDENDKLIREVKVITLKSKLVSDFRKDFQFYKVREINNYHHAHDAYLNAVVGTALIKKYPKLESEFVYGDYKVYDVRKMIAKSEQEIGKATAKYFFYSNIMNFFKTEITLANGEIRKRPLIETNGETGEIVWDKGRDFATVRKVLSMPQVNIVKKTEVQTGGFSKESILPKRNSDKLIARKKDWDPKKYGGFDSPTVAYSVLVVAKVEKGKSKKLKSVKELLGLTIMERSSFEKNPIDFLEAKGYKEVKKDLIIKLPKYSLFELENGRKRMLASAGELQKGNELALPSKYVNFLYLASHYEKLKGSPEDNEQKQLFVEQHKHYLDEIIEQISEFSKRVILADANLDKVLSAYNKHRDKPIREQAENIIHLFTLTNLGAPAAFKYFDTTIDRKRYTSTKEVLDATLIHQSITGLYETRIDLSQLGGD

SEQ ID NO: 557 - protein, 1371 aa, Streptococcus pyogenes
MDKKYSIGLDIGTNSVGWAVITDDYKVPSKKFKVLGNTDRHSIKKNLIGALLFDSGETAEATRLKRTARRRYTRRKNRICYLQEIFSNEMAKVDDSFFHRLEESFLVEEDKKHERHPIFGNIVDEVAYHEKYPTIYHLRKKLADSTDKADLRLIYLALAHMIKFRGHFLIEGDLNPDNSDVDKLFIQLVQTYNQLFEENPINASRVDAKAILSARLSKSRRLENLIAQLPGEKKNGLFGNLIALSLGLTPNFKSNFDLAEDAKLQLSKDTYDDDLDNLLAQIGDQYADLFLAAKNLSDATLLSDILRVNSEITKAPLSASMIKRYDEHHQDLTLLKALVRQQLPEKYKEIFFDQSKNGYAGYIDGGASQEEFYKFIKPILEKMDGTEELLAKLNREDLLRKQRTFDNGSIPHQIHLGELHAILRRQEDFYPFLKDNREKIEKILTFRIPYYVGPLARGNSRFAWMTRKSEETITPWNFEEVVDKGASAQSFIERMTNFDKNLPNEKVLPKHSLLYEYFTVYNELTKVKYVTEGMRKPAFLSGEQKKAIVDLLFKTNRKVTVKQLKEDYFKKIECFDSVEISGVEDRFNASLGTYHDLLKIIKDKDFLDNEENEDILEDIVLTLTLFEDKEMIEERLKTYAHLFDDKVMKQLKRRHYTGWGRLSRKLINGIRDKQSGKTILDFLKSDGFANRNFIQLIHDDSLTFKEAIQKAQVSGQGHSLHEQIANLAGSPAIKKGILQSVKVVDELVKVMGHKPENIVIEMARENQTTQKGQKNSRERMKRIEEGIKELGSQILKEHPVENTQLQNEKLYLYYLQNGRDMYVDQELDINRLSDYDVDHIVPQSFIKDDSIDNKVLTRSDKNRGKSDDVPSEEVVKKMKNYWRQLLNAKLITQRKFDNLTKAERGGLSELDKAGFIKRQLVETRQITKHVAQILDSRMNTKYDENDKLIREVKVITLKSKLVSDFRKDFQFYKVREINNYHHAHDAYLNAVVGTALIKKYPKLESEFVYGDYKVYDVRKMIAKSEQEIGKATAKRFFYSNIMNFFKTEITLANGEIRKRPLIETNEETGEIVWDKGRDFATVRKVLSMPQVNIVKKTEVQTGALTNESIYARGSFDKLISRKHRFESSKYGGFGSPTVTYSVLVVAKSKVQDGKVKKIKTGKELIGITLLDKLVFEKNPLKFIEDKGYGNVQIDKCIKLPKYSLFEFENGTRRMLASVMANNNSRGDLQKANEMFLPAKLVTLLYHAHKIESSKELEHEAYILDHYNDLYQLLSYIERFASLYVDVEKNISKVKELFSNIESYSISEICSSVINLLTLTASGAPADFKFLGTTIPRKRYGSPQSILSSTLIHQSITGLYETRIDLSQLGSD

SEQ ID NO: 558 - protein, 1367 aa, Streptococcus pyogenes
MDKKYSIGLDIGTNSVGWAVITDDYKVPSKKFKVLGNTDRHSIKKNLIGALLFGSGETAEATRLKRTARRRYTRRKNRICYLQEIFSNEMAKVDDSFFHRLEESFLVEEDKKHERHPIFGNIVDEVAYHEKYPTIYHLRKKLADSTDKADLRLIYLALAHMIKFRGHFLIEGDLNPDNSDVDKLFIQLVQIYNQLFEENPINASRVDAKAILSARLSKSRRLENLIAQLPGEKRNGLFGNLIALSLGLTPNFKSNFDLAEDAKLQLSKDTYDDDLDNLLAQIGDQYADLFLAAKNLSDAILLSDILRVNSEITKAPLSASMIKRYDEHHQDLTLLKALVRQQLPEKYKEIFFDQSKNGYAGYIDGGASQEEFYKFIKPILEKMDGTEELLVKLNREDLLRKQRTFDNGSIPHQIHLGELHAILRRQEDFYPFLKDNREKIEKILTFRIPYYVGPLARGNSRFAWMTRKSEETITPWNFEEVVDKGASAQSFIERMTNFDKNLPNEKVLPKHSLLYEYFTVYNELTKVKYVTEGMRKPAFLSGEQKKAIVDLLFKTNRKVTVKQLKEDYFKKIECFDSVEISGVEDRFNASLGAYHDLLKIIKDKDFLDNEENEDILEDIVLTLTLFEDRGMIEERLKTYAHLFDDKVMKQLKRRRYTGWGRLSRKLINGIRDKQSGKTILDFLKSDGFANRNFMQLIHDDSLTFKEDIQKAQVSGQGHSLHEQIANLAGSPAIKKGILQTVKIVDELVKVMGHKPENIVIEMARENQTTQKGQKNSRERMKRIEEGIKELGSQILKEHPVENTQLQNEKLYLYYLQNGRDMYVDQELDINRLSDYDVDHIVPQSFIKDDSIDNKVLTRSDKNRGKSDNVPSEEVVKKMKNYWRQLLNAKLITQRKFDNLTKAERGGLSELDKAGFIKRQLVETRQITKHVAQILDSRMNTKYDENDKLIREVKVITLKSKLVSDFRKDFQFYKVREINNYHHAHDAYLNAVVGTALIKKYPKLESEFVYGDYKVYDVRKMIAKSEQEIGKATAKYFFYSNIMNFFKTEITLANGEIRKRPLIETNGETGEIVWDKGRDFATVRKVLSMPQVNIVKKTEVQTGGFSKESILPKRNSDKLIARKKDWDPKKYGGFDSPTVAYSVLVVAKVEKGKSKKLKSVKELLGITIMERSSFEKNPIDFLEAKGYKEVKKDLIIKLPKYSLFELENGRKRMLASAGELQKGNELALPSKYVNFLYLASHYEKLKGSPEDNEQKQLFVEQHKHYLDEIIEQISEFSKRVILADANLDKVLSAYNKHRDKPIREQAENIIHLFTLTNLGAPAAFKYFDTTIDRKRYTSTKEVLDATLIHQSITGLYETRIDLSQLGGD

SEQ ID NO: 559 - protein, 1368 aa, unidentified
  source 1..1368: note = Streptococcus sp.
MDKKYSIGLDIGTNSVGWAVITDDYKVPSKKFKVLGNTDRHSIKKNLIGALLFDSGEIAEATRLKRTARRRYTRRKNRICYLQEIFSNEMAKVDDSFFHRLEESFLVEEDKKHERHPIFGNIVDEVAYHEKYPTIYHLRKKLVDSTDKADLRLIYLALAHMIKFRGHFLIEGDLNPDNSDVDKLFIQLVQTYNQLFEENPINASGVDAKAILSARLSKSRRLENLIAQLPGEKKNGLFGNLIALSLGLTPNFKSNFDLAEDAKLQLSKDTYDDDLDNLLAQIGDQYADLFLAAKNLSDAILLSDILRLNSEITKAPLSASMIKRYDEHHQDLTLLKALVRQQLPEKYKEIFFDQSKNGYAGYIDGGASQEEFYKFIKPILEKMDGTEELLAKLNREDLLRKQRTFDNGSIPHQIHLGELHAILRRQEDFYPFLKDNREKIEKILTFRIPYYVGPLARGNSRFAWMTRKSEETITPWNFEEVVDKGASAQSFIERMTNFDKNLPNEKVLPKHSLLYEYFTVYNELTKVKYVTEGMRKPAFLSGEQKKAIVDLLFKTNRKVTVKQLKEDYFKKIECFDSVEISGVEDRFNASLGTYHDLLKIIKDKDFLDNEENEDILEDIVLTLTLFEDREMIEERLKTYAHLFDDKVMKQLKRRRYTGWGRLSRKLINGIRDKQSGKTILDFLKSDGFANRNFMQLIHDDSLTFKEDIQKAQVSGQGDSLHEHIANLAGSPAIKKGILQTVKVVDELVKVMGRHKPENIVIEMARENQTTQKGQKNSRERMKRIEEGIKELGSQILKEHPVENTQLQNEKLYLYYLQNGRDMYVDQELDINRLSDYDVDHIVPQSFIKDDSIDNKVLTRSDKNRGKSDNVPSEEVVKKMKNYWRQLLNAKLITQRKFDNLTKAERGGLSELDKAGFIKRQLVETRQITKHVAQILDSRMNTKYDENDKLIREVKVITLKSKLVSDFRKDFQFYKVREINNYHHAHDAYLNAVVGTALIKKYPKLESEFVYGDYKVYDVRKMLAKSEQEIGKATAKYFFYSNIMNFFKTEITLANGEIRKRPLIETNGETGEIVWDKGRDFATVRKVLSMPQVNIVKKTEVQTGGFSKESILPKRNSDKLIARKKDWDPKKYGGFDSPTVAYSVLVVAKVEKGKSKKLKSVKELLGITIMERSSFEKNPIDFLEAKGYKEVRKDLIIKLPKYSLFELENGRKRMLASAGELQKGNELALPSKYVNFLYLASHYEKLKGSPEDNEQKQLFVEQHKHYLDEIIEQISEFSKRVILADANLDKVLSAYNKHRDKPIREQAENIIHLFTLTNLGAPTAFKYFDTTIDRKRYTSTKEVLDATFIHQSITGLYETRIDLSQLGGD

SEQ ID NO: 560 - protein, 1368 aa, Streptococcus pyogenes
MDKKYSIGLDIGTNSVGWAVITDDYKVPSKKLKGLGNTDRHGIKKNLIGALLFDSGETAEATRLKRTARRRYTRRKNRICYLQEIFSNEMAKVDDSFFHRLEESFLVEEDKKHERHPIFGNIVDEVAYHEKYPTIYHLRKKLADSTDKVDLRLIYLALAHMIKFRGHFLIEGDLNPDNSDVDKLFIQLVQTYNQLFEENPINASRVDAKAILSARLSKSRRLENLIAQLPGEKKNGLFGNLIALSLGLTPNFKSNFDLAEDAKLQLSKDTYDDDLDNLLAQIGDQYADLFLAAKNLSDATLLSDILRVNSEITKAPLSASMIKRYDEHHQDLTLLKALVRQQLPEKYKEIFFDQSKNGYAGYIDGGASQEEFYKFIKPILEKMDGTEELLAKLNREDLLRKQRTFDNGSIPYQIHLGELHAILRRQEDFYPFLKDNREKIEKILTFRIPYYVGPLARGNSRFAWMTRKSEETITPWNFEEVVDKGASAQSFIERMTNFDKNLPNEKVLPKHSLLYEYFTVYNELTKVKYVTEGMRKPAFLSGEQKKAIVDLLFKTNRKVTVKQLKEDYFKKIECFDSVEISGVEDRFNASLGTYHDLLKIIKDKDFLDNEENEDILEDIVLTLTLFEDREMIEERLKTYAHLFDDKVMKQLKRRRYTGWGRLSRKLINGIRDKQSGKTILDFLKSDGFANRNFMQLIHDDSLTFKEDIQKAQVSGQGDSLHEHIANLAGSPAIKKGILQTVKVVDELVKVMGRHKPENIVIEMARENQTTQKGQKNSRERMKRIEEGIKELGSDILKEYPVENTQLQNEKLYLYYLQNGRDMYVDQELDINRLSDYDVDHIVPQSFLKDDSIDNKVLTRSDKNRGKSDNVPSEEVVKKMKNYWRQLLNAKLITQRKFDNLTKAERGGLSELDKVGFIKRQLVETRQITKHVAQILDSRMNTKYDENDKLIREVRVITLKSKLVSDFRKDFQFYKVREINNYHHAHDAYLNAVVGTALIKKYPKLESEFVYGDYKVYDVRKMIAKSEQEIGKATAKYFFYSNIMNFFKTEITLANGEIRKRPLIETNGETGEIVWDKGRDFATVRKVLSMPQVNIVKKTEVQTGGFSKESILPKRNSDKLIARKKDWDPKKYGGFDSPTVAYSVLVVAKVEKGKSKKLKSVKELLGITIMERSSFEKDPIDFLEAKGYKEVRKDLIIKLPKYSLFELENGRKRMLASAGELQKGNELALPSKYVNFLYLASHYEKLKGSPEDNEQKQLFVEQHKHYLDEIIEQISEFSKRVILADANLDKVLSAYNKHRDKPIREQAENIIHLFTLTNLGAPAAFKYFDTTIDRKRYTSTKEVLDATLIHQSITGLYETRIDLSQLGGD

SEQ ID NO: 561 - protein, 1368 aa, Streptococcus pyogenes
MDKKYSIGLDIGTNSVGWAVITDDYKVPSKKFKVLGNTDRHSIKKNLIGALLFDSGETAEATRLKRTARRRYTRRKNRICYLQEIFSNEMAKVDDSFFHRLEESFLVEEDKKHERHPIFGNIVDEVAYHEKYPTIYHLRKKLVDSTDKADLRLIYLALAHMIKFRGHFLIEGDLNPDNSDVDKLFIQLVQTYNQLFEENPINASGVDAKAILSARLSKSRRLENLIAQLPGEKKNGLFGNLIALSLGLTPNFKSNFDLAEDAKLQLSKDTYDDDLDNLLAQIGDQYADLFLAAKNLSDAILLSDILRVNTEITKAPLSASMIKRYDEHHQDLTLLKALVRQQLPEKYKEIFFDQSKNGYAGYIDGGASQEEFYKFIKPILEKMDGTEELLVKLNREDLLRKQRTFDNGSIPHQIHLGELHAILRRQEDFYPFLKDNREKIEKILTFRIPYYVGPLARGNSRFAWMTRKSEETITPWNFEEVVDKGASAQSFIERMTNFDKNLPNEKVLPKHSLLYEYFTVYNELTKVKYVTEGMRKPAFLSGEQKKAIVDLLFKTNRKVTVKQLKEDYFKKIECFDSVEISGVEDRFNASLGTYHDLLKIIKDKDFLDNEENEDILEDIVLTLTLFEDREMIEERLKTYAHLFDDKVMKQLKRRRYTGWGRLSRKLINGIRDKQSGKTILDFLKSDGFANRNFMQLIHDDSLTFKEDIQKAQVSGQGDSLHEHIANLAGSPAIKKGILQTVKVVDELVKVMGRHKPENIVIEMARENQTTQKGQKNSRERMKRIEEGIKELGSQILKEHPVENTQLQNEKLYLYYLQNGRDMYVDQELDINRLSDYDVDHIVPQSFLKDDSIDNKVLTRSDKNRGKSDNVPSEEVVKKMKNYWRQLLNAKLITQRKFDNLTKAERGGLSELDKAGFIKRQLVETRQITKHVAQILDSRMNTKYDENDKLIREVKVITLKSKLVSDFRKDFQFYKVREINNYHHAHDAYLNAVVGTALIKKYPKLESEFVYGDYKVYDVRKMIAKSEQEIGKATAKYFFYSNIMNFFKTEITLANGEIRKRPLIETNGETGEIVWDKGRDFATVRKVLSMPQVNIVKKTEVQTGGFSKESILPKRNSDKLIARKKDWDPKKYGGFDSPTVAYSVLVVAKVEKGKSKKLKSVKELLGITIMERSSFEKNPIDFLEAKGYKEVKKDLIIKLPKYSLFELENGRKRMLASAGELQKGNELALPSKYVNFLYLASHYEKLKGSPEDNEQKQLFVEQHKHYLDEIIEQISEFSKRVILADANLDKVLSAYNKHRDKPIREQAENIIHLFTLTNLGAPAAFKYFDTTIDRKRYTSTKEVLDATLIHQSITGLYETRIDLSQLGGD

SEQ ID NO: 562 - protein, 1368 aa, Streptococcus pyogenes
MDKKYSIGLDIGTNSVGWAVITDDYKVPSKKFKVLGNTDRHSIKKNLIGALLFDSGETAEATRLKRTARRRYTRRKNRICYLQEIFSNEMAKVDDSFFHRLEESFLVEEDKKHERHPIFGNIVDEVAYHEKYPTIYHLRKKLVDSTDKADLRLIYLALAHMIKFRGHFLIEGDLNPDNSDVDKLFIQLVQTYNQLFEENPINASGVDAKAILSARLSKSRRLENLIAQLPGEKKNGLFGNLIALSLGLTPNFKSNFDLAEDAKLQLSKDTYDDDLDNLLAQIGDQYADLFLAAKNLSDAILLSDILRLNSEITKAPLSASMIKRYDEHHQDLTLLKALVRQQLPEKYKEIFFDQSKNGYAGYIDGGASQEEFYKFIKPILEKMDGTEELLAKLNREDLLRKQRTFDNGSIPHQIHLGELHAILRRQEDFYPFLKDNREKIEKILTFRIPYYVGPLARGNSRFAWMTRKSEETITPWNFEEVVDKGASAQSFIERMTNFDKNLPNEKVLPKHSLLYEYFTVYNELTKVKYVTEGMRKPAFLSGEQKKAIVDLLFKTNRKVTVKQLKEDYFKKIECFDSVEISGVEDRFNASLGTYHDLLKIIKDKDFLDNEENEDILEDIVLTLTLFEDREMIEERLKTYAHLFDDKVMKQLKRRRYTGWGRLSRKLINGIRDKQSGKTILDFLKSDGFANRNFMQLIHDDSLTFKEDIQKAQVSGQGDSLHEHIANLAGSPAIKKGILQTVKVVDELVKVMGRHKPENIVIEMARENQTTQKGQKNSRERMKRIEEGIKELGSQILKEHPVENTQLQNEKLYLYYLQNGRDMYVDQELDINRLSDYDVDHIVPQSFIKDDSIDNKVLTRSDKNRGKSNNVPSEEVVKKMKNYWRQLLNAKLITQRKFDNLTKAERGGLSELDKAGFIKRQLVETRQITKHVAQILDSRMNTKYDENDKLIREVKVITLKSKLVSDFRKDFQFYKVREINNYHHAHDAYLNAVVGTALIKKYPKLESEFVYGDYKVYDVRKMIAKSEQEIGKATAKYFFYSNIMNFFKTEITLANGEIRKRPLIETNGETGEIVWDKGRDFATVRKVLSMPQVNIVKKTEVQTGGFSKESILPKRNSDKLIARKKDWDPKKYGGFDSPTVAYSVLVVAKVEKGKSKKLKSVKELLGITIMERSSFEKNPIDFLEAKGYKEVRKDLIVKLPKYSLFELENGRKRMLASAGELQKGNELALPSKYVNFLYLASHYEKLKGSPEDNEQKQLFVEQHKHYLDEIIEQISEFSKRVILADANLDKVLSAYNKHRDKPIREQAENIIHLFTLTNLGAPAAFKYFDTTIDRKRYTSTKEVLDATFIHQSITGLYETRIDLSQLGGD

SEQ ID NO: 563 - protein, 1368 aa, Streptococcus pyogenes
MDKKYSIGLDIGTNSVGWAVITDDYKVPSKKFKVLGNTDRHSIKKNLIGALLFDSGEIAEATRLKRTARRRYTRRKNRICYLQEIFSNEMAKVDDSFFHRLEESFLVEEDKKHERHPIFGNIVDEVAYHEKYPTIYHLRKKLVDSTDKADLRLIYLALAHMIKFRGHFLIEGDLNPDNSDVDKLFIQLVQTYNQLFEENPINASGVDAKAILSARLSKSRRLENLIAQLPGEKKNGLFGNLIALSLGLTPNFKSNFDLAEDAKLQLSKDTYDDDLDNLLAQIGDQYADLFLAAKNLSDAILLSDILRLNSEITKAPLSASMIKRYDEHHQDLTLLKALVRQQLPEKYKEIFFDQSKNGYAGYIDGGASQEEFYKFIKPILEKMDGTEELLAKLNREDLLRKQRTFDNGSIPHQIHLGELHAILRRQEDFYPFLKDNREKIEKILTFRIPYYVGPLARGNSRFAWMTRKSEETITPWNFEEVVDKGASAQSFIERMTNFDKNLPNEKVLPKHSLLYEYFTVYNELTKVKYVTEGMRKPAFLSGEQKKAIVDLLFKTNRKVTVKQLKEDYFKKIECFDSVEISGVEDRFNASLGTYHDLLKIIKDKDFLDNEENEDILEDIVLTLTLFEDREMIEERLKTYAHLFDDKVMKQLKRRRYTVWGRLSRKLINGIRDKQSGKTILDFLKSDGFANRNFMQLIHDDSLTFKEDIQKAQVSGQGDSLHEHIANLAGSPAIKKGILQTVKVVDELVKVMGRHKPENIVIEMARENQTTQKGQKNSRERMKRIEEGIKELGSQILKEHPVENTQLQNEKLYLYYLQNGRDMYVDQELDINRLSDYDVDHIVPQSFIKDDSIDNKVLTRSDKNRGKSDNVPSEEVVKKMKNYWRQLLNAKLITQRKFDNLTKAERGGLSELDKAGFIKRQLVETRQITKHVAQILDSRMNTKYDENDKLIREVKVITLKSKLVSDFRKDFQFYKVREINNYHHAHDAYLNAVVGTALIKKYPKLESEFVYGDYKVYDVRKMLAKSEQEIGKATAKYFFYSNIMNFFKTEITLANGEIRKRPLIETNGETGEIVWDKGRDFATVRKVLSMPQVNIVKKTEVQTGGFSKESILPKRNSDKLIARKKDWDPKKYGGFDSPTVAYSVLVVAKVEKGKSKKLKSVKELLGITIMERSSFEKNPIDFLEAKGYKEVRKDLIIKLPKYSLFELENGRKRMLASAGELQKGNELALPSKYVNFLYLASHYEKLKGSPEDNEQKQLFVEQHKHYLDEIIEQISEFSKRVILADANLDKVLSAYNKHRDKPIREQAENIIHLFTLTNLGAPTAFKYFDTTIDRKRYTSTKEVLDATFIHQSITGLYETRIDLSQLGGD

SEQ ID NO: 564 - protein, 1368 aa, Streptococcus pyogenes
MDKKYSIGLDIGTNSVGWAVITDDYKVPSKKFKVLGNTDRHSIKKNLIGALLFDSGETAEATRLKRTARRRYTRRKNRICYLQEIFSNEIAKVDDSFFHRLEESFLVEEDKKHERHPIFGNIVDEVAYHEKYPTIYHLRKKLADSTDKADLRLIYLALAHMIKFRGHFLIEGDLNPDNSDVDKLFIQLVQTYNQLFEENPINASRVDAKAILSARLSKSRRLENLIAQLPGEKRNGLFGNLIALSLGLTPNFKSNFDLAEDAKLQLSKDTYDDDLDNLLAQIGDQYADLFLAAKNLSDAILLSDILRVNTEITKAPLSASMIKRYDEHHQDLTLLKALVRQQLPEKYKEIFFDQSKNGYAGYIDGGASQEEFYKFIKPILEKMDGTEELLAKLNREDLLRKQRTFDNGSIPHQIHLGELHAILRRQEDFYPFLKDNREKIEKILTFRIPYYVGPLARGNSRFAWMTRKSEETITPWNFEEVVDKGASAQSFIERMTNFDKNLPNEKVLPKHSLLYEYFTVYNELTKVKYVTEGMRKPAFLSGEQKKAIVDLLFKTNRKVTVKQLKEDYFKKIECFDSVEISGVEDRFNASLGTYHDLLKIIKDKDFLDNEENEDILEDIVLTLTLFEDREMIEERLKTYAHLFDDKVMKQLKRRRYTGWGRLSRKLINGIRDKQSGKTILDFLKSDGFANRNFMQLIHDDSLTFKEDLQKAQVSGQGDSLHEHIANLAGSPAIKKGILQTVKVVDELVKVMGRHKPENIVIEMARENQTTQKGQKNSRERMKRIEEGIKELGSDILKEYPVETTQLQNEKLYLYYLQNGRDMYVDQELDINRLSDYDVDHIVPQSFLKDDSIDNKVLTRSDKNRGKSDNVPSEEVVKKMKNYWKQLLNAKLITQRKFDNLTKAERGGLSELDKAGFIKRQLVETRQITKHVAQILDSRMNTKYDENDKLIREVRVITLKSKLVSDFRKDFQFYKVREINNYHHAHDAYLNAVVGTALIKKYPKLESEFVYGDYKVYDIRKMIAKSEQEIGKATAKYFFYSNIMNFFKTEITLANGEIRKRPLIETNGETGEIVWDKGRDFATVRKVLSMPQVNIVKKTEVQTGGFSKESILPKRNSDKLIARKKDWDPKKYGGFDSPTVAYSVLVVAKVEKGKSKKLKSVKELVGITIMERSSFEKDPVDFLEAKGYKEVRKDLIIKLPKYSLFELENGRKRMLASAGELQKGNELALPSKYVNFLYLASHYEKLKGSPEDNEQKQLFVEQHKHYLDEIIEQISEFSKRVILADANLDKVLSAYNKHRDKPIREQAENIIHLFTLTNLGAPAAFKCFDTTIGRNRYKSIKEVLDATLIHQSITGLYETRIDLSQLGGD

SEQ ID NO: 565 - protein, 1368 aa, Streptococcus pyogenes [sequence omitted]

SEQ ID NO: 566 - protein, 1368 aa, Streptococcus pyogenes; identical to SEQ ID NO: 560

SEQ ID NO: 567 - protein, 1370 aa, Streptococcus ratti
  REGION 1..1370: note = Streptococcus ratti FA-1 = DSM 20564
MKKPYSIGLDIGTNSVGWAVITDDYKVPAKKMKVLGNTDKNYIKKNLLGALLFDSGNTAEDRRLKRTARRRYTRRRNRLLYLQDIFSDEMNKVDESFFHRLEDSFLVSEDKRGDHHPIFGNVVDEVKYHEQFPTIYHLRKYLADTPEKADLRLVYLALAHMIKFRGHFLIDDPKLDVKNTDSQELFSQFLTAYDVTQEDSHLADVKINISDIITEKMNKSRKVEALLFHFPSQKKNSFFGNLVSLVFGLLPNFKTNFNLAEDAKLQLSKDSYDEDLENLLGQIGDEYTDVFVAARKLYDSILLSGILTVNDLSTKAILSASMVRRYEEHNKDLAKLKAFVKANFTHDVFKEVFSDASKNGYAGYIEGKTSQEDFYKYVKNLIGKVDGSADFIEKIDREDFLRKQRTFDNGSIPHQVHLAEMKAILRRQGEYYPFLKEHAEKIQQILTFRIPYYVGPLDRHGHSDFAWASFNSEEKVTPWNFEEIIDKNKSAQAFIERMTNQDLYLPNEKVLPKHSPLYEKYTVYNELTKIKYVTETGTAKFFDANLKQEIFDGLFKKERKVTKRKLLTFLEKNFDEFRIVDIQGLDKETETFNASYGIYQDLLKIIKDKAFMDDSENADILEDIVLTLTLFEDREMIKQRLAKYADLFDKKVIDNLARRRYTGWGRLSAKLLNGIRDKRSRKTIMDYLVDDGRSNRNLMQLITDDNLTFKDEIAKAQYSDNSDDLHQVVQDLAGSPAIKKGILQSVKIVDELVKVMGYEPEQIVVEMARENQTTAKGRRNSQQRYKRLEEAIKNLDRDLNYKILKEHPTDNQALQNDRLFLYYLQNGRDMYTGESLDINRLSDYDIDHIIPQAFIKDNSIDNRVLVSSAKNRGKSDDVPSEDVVNRMRPFWNKLLNCGLISQRKYSNLTKKELTPNDKAGFIKRQLVETRQITKHVARILDEHFNKEFDEDKKRIRKVKVVTLKSNLVSNFRKEFELYKVREINDYHHAHDAYLNAVVAKALLMKYPKLEPEFVYGEYPKYNSYRERKTATQRMFFYSNIMNMFKSKVKLADERIIERPMIEVNDETGEIAWDKTKHIATVKKVLSYPQINIVKKVEEQTGGLTNETIYPRGSFDKLLNRKNTLEASKYGGFGSPTVAYCVLVVADSKNENGKVKKLKLGSELLGITILEKNDFENNSLDFLSRKGYQGVQEKKIIKLPKYSLFEFQDGSRRMLSSVMANDNKRGDLQKANEMILPAYLVKLLYHAKHINSVGEPAHKNYINEHCSEFQDLLNYIRQFADKFVDVDKNLSKIRSLSKSMAEYSVSEICSSFVNLLTLTALGAPADFKFFGTTIPRKRYGSPQSILSATLIHQSITGLYETRIDLSKLGED

SEQ ID NO: 568 - protein, 1127 aa, Streptococcus salivarius
MSDLVLGLDIGIGSVGVGILNKVTGEIIHKNSRIFPAAQAENNVERRINRQGRRLTRRKKHRRVRLNHLFEESGLITDFTNVSINLNPYQLRVKGLTDELSNEELFIALKNMVKHRGISYLDDASDDGNSSVGDYAQIVKENSKQLETKTPGQIQLERYQKYGQLRGDFTVEEDGKKHRLINVFPTSAYRAEALRILQTQQEFNPQITDEFINSYLQILTGKRKYYHGPGNEKSRTDYGRYTTKKDSEDEYITLDNIFGILIGKCTFYPEEYRAAKASYTAQEFNLLNDLNNLTVPTETKKLSEEQKNQIITNVKNEKAMGPAKLFKYIAKLLSCDVADIKGYRIDKSDKAEIHTFEAYRKMKTLATIDIEQMERENLDKLAYVLTLNTEKEGIQEALEHEFADGTFSQEQIDELVQFRKANSSIFGKGWHSFSVKLMMELIPELYATSEEQMTILTRLGKQKTTSSSNKTKYIDEKQLTEEIYNPVAAKSVRQAIKIVNAAIKEYGDFDNIVIEMARETNEDDEKKAIQKIQKANKDEKDAAMLKAANQYNGKAELPHSVFHGHKQLATKIRLWHQQGERCLYTGKTISIHDLINNSNQFEIDHILPLSITFDDSLANKVLVYATANQEKGQRTPYQALDSMDDAWSFRELKAFVRDSKALSNKKKEYLLTEEDISKFDVRKKFIERNLVDTRYASRVVLNALQEHFRVHKTDTKVSVVRGQFTSQLRRHWGIEKTRDTYHHHAVDALIIAASSQLNLWKKQKNTLVSYSEDQLLDIETGELISDDEYKESVFKAPYQHFVDTLKSKEFEDSILFSYQVDSKFNRKISDATIYATRQAKVGKDKKDETYVLGKIKDIYSQTGYDAFIKIYKKDKSKFLMYRHDPQTFEKVIEPILENYPNKELNEKGKEVPCNPFLKYKEDHGYIRKYSKKGNGPEIKSLKYYDSKLGNHIDITPKNSNNKVVLQSVSPWRADVYFNKTTGKYEILGLKYADLKFEKGTGTYKISEEKYNDIKIKEGVDSDSEFKFTLYKNDLLLIKDTETKEQQLFRFLSRTMPNVKHYVELKPYDKQKFDDNEELIKILGIVAKGGQCKKGVSKPNISIYKIRTDVLGNQHIIKNEGDKPKLDF

SEQ ID NO: 569 - protein, 1385 aa, Streptococcus salivarius
  REGION 1..1385: note = Streptococcus salivarius K12
MTKPYSIGLDIGTNSVGWAVITDDYKVPSKKMKVLGNTSKKYIKKNLLGALLFDSGITAEGRRLKRTARRRYTRRRNRILYLQEIFSTEMATLDDAFFQRLDDSFLVPDDKRDSKYPIFGNLVEEKVYHDEFPTIYHLRKHLADSSKKADLRLVYLALAHMIKYRGHFLIEGDFNSKNNDLQKNFQDFLDTYNAIFESDLSLENSKQLEEIVKDKISKSAKKDRILKLFPGEKNSGIFSEFLKLIVGNQADFRKYFNLDEKTSLQFSKESYDEDLETLLGHIGDDYSDVFLKAKKLYDAILLSGILTVTDNGTEAPLSSAMIMRYKEHEEDLALLKAYIRNISLETYNEVFKDNTKNGYAGYIDGKTSQEDFYVYLKRLLAGLEGADYFLEKIDREDFLRKQRTFDNGSIPYQIYLQEMRAILDKQAKFYPFLAKNKERIEKILTFRIPYYVGPLARGNSDFAWSIRKRNEKITPWNFEDVIDKESSAEAFINRMTSFDLYLPEEKVLPKHSLLYENFTVYNELTKVRFIAEGMRDYQFLDSKQKKDIVRLYFKGKRKVTDKDIIEYLHAIDGYDGIELKGIEKQFNSSLSTYHDLLNIINDKEFLDDSSNETIIEEIIHTLTMFEDREMIKQRLSKFDNIFDKSVLKKLSRRHYTGWGKLSAKLINGIRDEKSGNTILDYLIDDGVSNRNFMQLIHDDALSFKKKIKKAQIIGDKDNIKQVVKSLPGSPAIKKGILQSIKIVDELVKVMGREPESIVVEMARENQYTNQGKSNSQQRLKRLEESLKGLGSKILKENVPTRLSKIDNNALQNDRLYLYYLQNGKDMYTGEELDIDRLSNYDIDHIIPQAFLKDDSIDNKVLVSSASNRGKSDDVPSLEVVKKRKTLWYQLLKSKLISQRKFDNLTKAERGGLSQEEKAGFIQRQLVETRQITKHVARLLDERFNNKKDENNRTLRTVKIITLKSSLVSQFRKDFELYKVREINDFHHAHDAYLNAVVASALLKKYPKLEPEFVYGDYPKYNSFRERKSATEKVYFYSNIMNIFKKSIPLADGTVIDRPLIEVNEETGESVWNKVADLNTVRKVLSYSQVNIVKKVEEQNHGLDRGKPKGLFNANLSSKPKPNSKENLVGAKEYLDPKKYGGYAGISNSFAILVKGTIEKGAKKKITNVLEFQGISILDRIYYRKDKLNFLLEKGYKDIELIIELPKYSLFELSDGSRRMLASILSTNNKRGEIHKGNQIFISQKFVKLLYHAKRISSTFNENHRKYVENHKKEFEELFYYILEFNENYVGAKKNGELLKSAFQSWQNHSIDELCSSFIGPTGSERKGLFELTSRGGAADFEFLGVKIPRYRDYTPSSLLKDATLIHQSVTGLYETRIDLGKLGED

SEQ ID NO: 570 - protein, 1135 aa, Streptococcus salivarius
  REGION 1..1135: note = Streptococcus salivarius PS4
MSDLVLGLDIGIGSVGVGILNKVTGEIIHKNSRIFPAAQAENNLERRTNRQGRRLTRRKKHRRVRLNHLFEESGLITDFTKVSINLNPYQLRVKGLTAELSNEELFIALKNMVKHRGISYLDDASDDGNSSVGDYAQIVKENSKQLETKTPGQIQLERYQKYGQLRGDFTVEEDGRKHRLINVFPTSAYHAEALRILQTQQEFNPQITDEFINSYLEILTGKRKYYHGPGNEKSRTDYGKYTTKKDAQGQYITLNNIFGILIGKCTFYPEEYRAAKASYTAQEFNLLNDLNNLTVPTETKKLSEEQKYQIITYVKNEKAMGPAKLFKYIAKLLACDIADIKGYRIDKSDKAEIHTFEAYRKMKTLETIDIEQIEREKLDKLAYVLTLNTEREGIQEALDHEFADGTFSQEQVDELVQFRKANSSIFGKGWHSFSVKLMMELIPELYATSEEQMTILTRLGKQKTTSSSNKTKYIDEKQLTEEIYNPVVAKSVRQAIKIVNAAIKKYGDFDNIVIEMARETNEDDEKKAIQKIQKANKAEKDAAMRKAANQYNGKAELPHSVFHGHKQLATKIRLWHQQGERCLYTGKTISIHDLINNPNQFEIDHILPLSITFDDSLANKVLVYATANQEKGQRTPYQALDSMDDAWSFRELKAFVRESKALSNKKKEYLLTEEDISKFDVRKKFIERNLVDTRYASRVVLNALQEHFKAHKIDTKVSVVRGQFTSQLRRHWGIDKTRDTYHHHAVDALIIAASSQLNLWKKQKNTLVSYSEDQLLDIETGELISDDEYKESVFKAPYQHFVDTLKSKEFEDSILFSYQVDSKFNRKISDATIYATRQAKVGKDKKDETYVLGKIKDIYALGTKTPSKTGFYKFLDLYNKDKSQFLVYQKDRKTWDEVIEKIMEQYRPFKESDKNGKEVDFNPFEKYRIENGPIRKYSRKGNGPEIKSLKYYASKLGNHIDITPKDSNNKVVLQSVSPWRADVYFNKTTGSYEILGLKYADLQFEKGTGTYRISEEKYNDIKKKEGVDSDSEFKFTLYKNDLLLIKDTETKEQRLFRFLSRSMPNKKHYVELKPYSKDKFEKNESLIEILGSADKSGRCIKGLAKSNLSIFKVRTDVLGNQHIIKNEGDKPKLDF

SEQ ID NO: 571 - protein, 1377 aa, Streptococcus sanguinis
  REGION 1..1377: note = Streptococcus sanguinis SK115
MKKPYSIGLDIGTNSVGWAVITDDYKVPSKKMKVLGNTDKHFIKKNLIGALLFDEGTTAEDRRLKRTSRRRYTRRKNRLRYLQEIFSEEISKLDSSFFHRLDDSFLVPEDKRGSKYPIFATLEEEKEYHKKFPTIYHLRKHLADSKEKTDLRLIYLALAHMIKYRGHFLYEESFDIKNNDIQKIFNEFISIYDNTFEGSSLSGQNAQVEAIFTDKISKSTKRERVLKLFSDEKSTGLFSEFLKLIVGNQADFKKHFDLEEKAPLQFSKDTYDEDLENLLGQIGDGFADLFLVAKKLYDAILLSGILTVTDPSTKAPLSASMIERYENHQEDLAALKQFIKNNLSEKYAEVFSDQSKDGYAGFIDGKTTQEAFYKYIKNLLSKLEGADYFLNKIEREDFLRKQRTFDNGSIPHQIHLQEMNAILRRQGEHYLFLKENREKIEKILAFRIPYYVGPLARGNRDFAWLTRNSDQAIRPWNFEEVVDKASSAEDFINKMTNYDLYLPEEKVLPKHSLLYETFAVYNELTKVKFIAEGLRDYQFLDSGQKKQIVNQLFKDKRKVTEKDIIHYLHNVDGYDGIELKGIEKQFNASLSTYHDLLKIIKDKEFMDNPKNGEILENIIHTLTIFEDREMIKQRLAQYDTLFDEKVIKALTRRHYTGWGKLSAKLINGIRDKQTGKTILEYLIDDGDCNRNFMQLINDDGLSFKEIIQKAQVVGKTDDVKQVVQEIPGSPAIKKGILQSIKIVDELVKVMGHNPESIVIEMARENQTTAKGKKNSQQRYKRIEDALKNLAPGLDSNILKENPTDNIQLQNDRLFLYYLQNGKDMYTGKAIDINQLSNYDIDHIIPQAFIKDDSLDNRVLTSSKDNRGKSDNVPSIEVVQKRKAFWQQLLDSKLISERKFNNLTKAKRGGLDERDKVGFIKRQLVETRQITKHVAQLLDTRFNTEVNEENQKIRTVKIITLKSNLVSNFRKEFGLYKVREINDYHHAHDAYLNAVVAKAILKKYPKLEPEFVYGDYQKYDLKRYILKSKASNTIDKATEKYFFYSNLLNFFKEKVRYADGTIKKRENIEYSNDTGEIAWNKEKDFATIKKVLSLPQVNIVKKTEEQTVGQNGGLFDNNIVSKKKVVDASKLIPIKSSLSPEKYGGYARPTIAYSVLVIADIEKGKGKAKKLKRIKEIVGITIQDKKKFESNPVTYLEECGYKNINSNLIIKLPKYSLFEFNDGQRRLLASSIELQKGNELILPYHLTALLYHAQRINKISEPIHKQYVEAHQNEFKELLTTIISLSKKYIQKPNVELLLQQAFDQADKDIYQLSESFISLLKLTSFGAPGAFKFLGVEISQSSVRYKPNSQFLDTTLIHQSITGLYETRIDLSKLGED

SEQ ID NO: 572 - protein, 1392 aa, Streptococcus sanguinis
  REGION 1..1392: note = Streptococcus sanguinis SK330
MENKNYSIGLDIGTNSVGWAVITDDYKVPSKKMKVFGNTDKHFIKKNLIGALLFDEGATAEDRRLKRTARRRYTRRKNRLRYLQEIFSEEISKLDSSFFHRLDDSFLVPKDKRGSKYPIFATLEEEKEYHKKFPTIYHLRKHLADSKEKTDLRLIYLALAHMIKYRGHFLYEESFDIKNNDIQKIFNEFISIYDNTFEGSSLSGQNAQVEAIFTDKISKSAKRERVLKLFSDEKSTSLFSEFLKLIVGNQADFKKHFDLEEKAPLQFSKDTYDEDLENLLGQIGDGFTDLFLVAKKLYDAILLSGILTVTDPSTKAPLSASMIERYESHQKDLAALKQFIKNNLPKRYNEVFSDQSKDGYAGYIDGKTTQEAFYKYIKNLLSKFEGADYFLDKIEREDFLRKQRTFDNGSIPHQIHLQEMNAILRRQGEHYPFLKENREKIEKILTFRIPYYVGPLARGNRDFAWLTRNSDQAIRPWNFEEIVDKASSAEEFINKMTNYDLYLPEEKVLPKHSLLYETFAVYNELTKVKFIAEGLRDYQFLDSGQKKQIVNQLFKEKRKVTEKDIIHYLHNVDGYDGIELKGIEKQFNASLSTYHDLLKIIKDKEFMDDPKNEEILENIVHTLTIFEDREMIKQRLAQYDSIFDEKVIKALTRRHYTGWGKLSAKLINGICDKQTGDTILDYLIDDGKINRNFMQLINDDGLSFKEIIQKAQVVGKTDDVKQVVQELPGSPAIKKGILQSIKIVDELVKVMGYAPESIVIEMARENQTTARGKKNSQQRYKRIEDSLKNLAPGLDSNILKENPTDNIQLQNDRLFLYYLQNGKDMYTGKPLDIDQLSSYDIDHIIPQAFIKDDSIDNRVLTSSKDNRGKSDNVPSLEVVQKRKAFWQQLLDSKLISERKFNNLTKAERGGLDERDKVGFIRRQLVETRQITKHVAQILDASFNTEVNEKNQKIRTVKIITLKSNLVSNFRKEFELYKVREINDYHHAHDAYLNAVVAKAILKKYPKLEPEFVYGDYQKYDLKRYISRFKPSKEIEKATEKYFFYSNLLNFFKEEVHYADGIIVKRENIEYSKDTGEIAWNKEKDFATIKKVLSYPQVNIVKKTEIQTHGLDRGKPKGLFNSNPSPKPSEDSKENLVPIKQGLDPRKYGGYAGISNSYAVLVKAIVEKGAKKQQKTILEFQGISILDKINFENNKENYLLKKRYIEILSTITLPKYSLFEFPDGTRRRLASILSTNNKRGEIHKGNELVLPGKYTTLLYHAKNINKKLEPEHLEYVEKHRNDFAKLLECVLNFNDKYVGALKNGERIRQAFTDWETVDIEKLCFSFIGPENSKNAGLFELTSQGSASDFEFLGVKIPRYRDYAPSSLLKATLIHQSITGLYETRIDLSKLGED

SEQ ID NO: 573 - protein, 1370 aa, Streptococcus sanguinis
  REGION 1..1370: note = Streptococcus sanguinis SK353
MKKPYSIGLDIGTNSVGWAVVTDDYKVPAKKMRVFGDTDRSHIKKNLLGTLLFDDGNTAESRRLKRTARRRYTRRRNRILYLQEIFTESMNEIDESFFHRLDDSFLVPEDKRGSKYPIFATLQEEKEYHKQFPTIYHLRKQLADSKEKSDVRLIYLALAHMIKYRGHFLYEETFDIKNNDIQKIFNEFINIYDNTFEGSSLSGQNAQVEAIFTDKISKSAKRERVLKLFPDEKSTGLFSEFLKLIVGNQADFKKHFDLEEKAPLQFSKDTYDEELENLLGQIGDDFADLFLIAKKLYDAILLSGILTVTDPSTKAPLSASMIERYENHQKDLAALKQFIKNNLPEKYVEVFSDQSKDGYAGYIDGKTTQEAFYKYIKNLLSKFEGADYFLDKIEREDFLRKQRTFDNGSIPHQIHLQEMNAILRRQGEHYPFLKENREKIEKILTFRIPYYVGPLARDNRDFSWLTRNSDEPIRPWNFEEVVDKARSAEDFIHRMTNYDLYLPEEKVLPKHSLLYETFAVYNELTKVKFIAEGLRDYQFLDSGQKKQIVNQLFKEKRKVTEKDIIHYLHNVDGYDGIELKGIEKQFNANLSTYHDLLKITKDKEFMDDPKNEEILENIVHTLTIFEDREMIKQRLAQYDTLFDEKVIKALTRRHYTGWGKLSAKLINGIRDKQSGKTILDYLIDDDKINRNFMQLINDDGLSFKEIIQKAQVVGKTDDVKQVVQELPGSPAIKKGILQSIKIVDELVKVMGYALESIVIEMARENQTTARGKKNSQQRYKRIEDALKNLAPGLDSNILKENPTDNIQLKNDRLFLYYLQNGKDMYTGKPLDINQLSSYDIDHIIPQAFIKDDSIDNRVLTSSKDNRGKSDNVPSLEVVQKRKAFWQQLLDSKLISERKFNNLTKAERGGLDERDKVGFIRRQLVETQQITKNVAQILDARFNTEVKEKNQKIRTVKIITLKSNLVSNFRKEFGLYKVREINNYHHAHDAYLNAVVAKAILKKYPKLEPEFVYGDYQKYDLKKYISRFKPSKEIEKATEKYFFYSNLLNFFKEEVLYADGTIRKRENIEYSKDTGEIAWDKEKDFATIKKVLSYPQVNIVKKREVQTGGFSKESILPKGNSDKLIPRKTKDILWDTTKYGGFDSPVIAYSILLIADIEKGKAKKLKTVKTLVGITIMEKAAFEENPITFLENKGYHNVRKENILCLPKYSLFELENGRRRLLASAKELQKGNEIVLPVCLTTLLYHSKNLHKLDEPEHLEYIQKHRNEFKDLLNLVSEFSQKYILAEANLEKIKDLYADNEQADIEILANSFINLLTFTALGAPAAFKFFGKDVDRKRYTTVSEILNATLIHQSITGLYETRIDLSKLGEE

SEQ ID NO: 574 - protein, 1421 aa, Streptococcus sanguinis
  REGION 1..1421: note = Streptococcus sanguinis SK49
MTKFNKNYSIGLDIGVSSVGYAVVTEDYRVPAFKFKVLGNTEKEKIKKNLIGSTTFVSAQPAKGTRVFRVNRRRIDRRNHRITYLRDIFQKEIEKVDKNFYRRLDESFRVLGDKSEDLQIKQPFFGDKELETAYHKKYPTIYHLRKHLADADKNSPVADIREVYMAISHILKYRGHFLTLDKINPNNINMQNSWIDFIESCQEVFDLEISDESKNIADIFKSSENRQEKVKKILPYFQQELLKKDKSIFKQLLQLLFGLKTKFKDCFELEEEPDLNFSKENYDENLENFLGSLEEDFSDVFAKLKVLRDTILLSGMLTYTGATHARFSATMVERYEEHRKDLQRFKFFIKQNLSEQDYLDIFGRKTQNGFDVDKETKGYVGYITNKMVLTNPQKQKTIQQNFYDYISGKITGIEGAEYFLNKISDGTFLRKLRTSDNGAIPNQIHAYELEKIIERQGKDYPFLLENKDKLLSILTFKIPYYVGPLAKGSNSRFAWIKRATSSDILDDNDEDTRNGKIRPWNYQKLINMDETRDAFITNLIGNDIILLNEKVLPKRSLIYEEVMLQNELTRVKYKDKYGKAHFFDSELRQNIINGLFKNNSKRVNAKSLIKYLSDNHKDLNAIEIVSGVEKGKSFNSTLKTYNDLKTIFSEELLDSEIYQKELEEIIKVITVFDDKKSIKNYLTKFFGHLEILDEEKINQLSKLRYSGWGRYSAKLLLDIRDEDTGFNLLQFLRNDEENRNLTKLISDNTLSFEPKIKDIQSKSTIEDDIFDEIKKLAGSPAIKRGILNSIKIVDELVQIIGYPPHNIVIEMARENMTTEEGQKKAKTRKTKLESALKNIENSLLENGKVPHSDEQLQSEKLYLYYLQNGKDMYTLDKTGSPAPLYLDQLDQYEVDHIIPYSFLPIDSIDNKVLTHRENNQQKLNNIPDKETVANMKPFWEKLYNAKLISQTKYQRLTTSERTPDGVLTESMKAGFIERQLVETRQIIKHVARILDNRFSDTKIITLKSQLITNFRNTFHIAKIRELNDYHHAHDAYLAVVVGQTLLKVYPKLAPELIYGHHAHFNRHEENKATLRKHLYSNIMRFFNNPDSKVSKDIWDCNRDLPIIKDVIYNSQINFVKRTMIKKGAFYNQNPVGKFNKQLAANNRYPLKTKALCLDTSIYGGYGPMNSALSIIIIAERFNEKKGKIETVKEFHDIFIIDYEKFNNNPFQFLNDTSENGFLKKNNINRVLGFYRIPKYSLMQKIDGTRMLFESKSNLHKATQFKLTKTQNELFFHMKRLLTKSNLMDLKSKSAIKESQNFILKHKEEFDNISNQLSAFSQKMLGNTTSLKNLIKGYNERKIKEIDIRDETIKYFYDNFIKMFSFVKSGAPKDINDFFDNKCTVARMRPKPDKKLLNATLIHQSITGLYETRIDLSKLGED

SEQ ID NO: 575 - protein, 1026 aa, unidentified
  REGION 1..1026: note = Streptococcus sp. BS35b
  source 1..1026: note = Streptococcus sp.
MNGLVLGLDIGIASVGVGILEKNSGKIIHANSRLFPAATADNNVERRKNRQARRLNRRKKHRGVRFQDLFEDYGLLTDFSKVSINLNPYRLRVDGLNQQLTNEELFIALKNIVKRRGISYLDDASEDGGAVSSDYGKAVEENRKLLAEQTPGQIQLERFEKYGQVRGDFTVVENGEKRRLINVFSTSAYRKEAEKILRKQQEFNNQITDEFIEDYLKILTGKRKYYHGPGNEKSRTDYGRFRTDGTTLDNIFGVLIGKCTFYPNEYRASKSSYTAQEFNLLNDLNNLTVPTETKKLSEEQKKVIVEYAKEAKTLGASTLLKYIVKMIDASVDQISGYRVDVNNKPEMHTFEVYRKMQSLETISVGELSRNVLDELAHILTLNTEREGIEEAINSKLMGVFSQDQVLELVQFRKNNSSLFSKGWHNFSLKLMMELIPELYETSEEQMTILTRLGKQKSKETSKRTKYIDEKELTEEIYNPVVAKSVRQAIKIINEATKKHGIFDNIVIEMARENNEEDAKKDYIKRQKANQDEKNAAMEKAAFQYNGKKELPGNIFNGHKELATKIRLWHQQGEKCLYTGKTIPISDLIHNQYKYEIDHILPLSLSFDDSLSNKVLVHATANQEKGQRTPFQALDSMDDAWSYREFKSYVKDLKSLSNKKKDYLLTEEDISKIEVKQKFIERNLVDTRYSSRVVLNALQDFYKSHQFDTTISVVRGQFTSQLRRKWGLEKSRETYHHHAVDALIIAASSQLRLWKKQNNPLITYKEGQFIDSQTGEIISLTDDEYKELVFKAPYDHFVDTLHSKTFEDGILFSYQVDSKYNRKISDATIYATRKAKLDKDKSEETYVLGKIKDIYSQAGYDAFIKIYNKDKRKFLMYHKDPQTFEKVIEEILRTYPSKERNDKNKEVPCNPFEKYRQENGPIRKYSKKGNGPEIKCLKYYDNKLGNYIDISPDGSDNQVVLQSLKPWRTDVYFNHQTKKYELMGLKYSDLSFEKGSGKYSISNEKYNSIKRIEGVNEQSEFKFTLYK

SEQ ID NO: 576 - protein, 1139 aa, unidentified
  REGION 1..1139: note = Streptococcus sp. C150
  source 1..1139: note = Streptococcus sp.
MSDLVLGLDIGIGSVGVGILNKVTGEIIHKNSRIFPAAQAENNLERRTNRQGRRLTRRKKHRRVRLNHLFEESGLITDFTKVSINLNPYQLRVKGLTAELSNEELFIALKNMVKHRGISYLDDASDDGNSSVGDYAQIVKENSKQLETKTPGQIQLERYQKYGQLRGDFTVEEDGRKHRLINVFPTSAYHAEALRILQTQQEFNPQITDEFINSYLEILTGKRKYYHGPGNEKSRTDYGKYTTKKDAQGQYITLNNIFGILIGKCTFYPEEYRAAKASYTAQEFNLLNDLNNLTVPTETKKLSEEQKYQIITYVKNEKAMGPAKLFKYIAKLLSCDVADIKGYRIDKSDKAEIHTFEAYRKMKTLETLDVKKMAREELDKLAYVLTLNTEREGIQEALDHEFADGTFSQEQVDELVQFRKANSSIFGKGWHSFSVKLMMELIPELYATSEEQMTILTRLGKQKTTSSSNKTKYIDEKQLTEEIYNPVVAKSVRQAIKIVNAAIKKYGDFDNIVIEMARETNEDDEKKAIQKIQKANKAEKDAAMRKAANQYNGKAELPHSVFHGHKQLATKIRLWHQQGERCLYTGKTISIHDLINNPNQFEIDHILPLSITFDDSLANKVLVYATANQEKGQRTPYQALDSMDDAWSFRELKAFVRESKALSNKKKEYLLTEEDISKFDVRKKFIERNLVDTRYASRVVLNALQEHFRTHKIDTKVSVVRGQFTSQLRRHWGIEKTRDTYHHHAVDALIIAASSQLNLWKKQKNTLVSYSEDQLLDIETGELISDDEYKESVFKAPYQHFVDTLKSKEFEDSILFSYQVDSKFNRKISDATIYATRKAKLDKEKKEYTYTLGKIKDIYALGTKTPSKTGFYKFLDLYKKDKSQFLMYQKDRRTWDEVIEKILEQYRPFKEKDKNGKEVDFNPFEKYRIENGPIRKYSRKGNGPEIKSLKYYDNLLGRFVDITPSESKNPVALLSLNPWRTDVYYNTETRKYEFLGLKYADLCFEKGGSYGISKVKYNKIREKEGIGKNSEFKFTLYKNDLILIKDTETNRQQIFRFWSRTGKDNPKSFEKHKLELKPYEKTRFEKGEELKVLGKVPPSSNRLQKNMQIENLSIYKVRTDVLGNQHIIKNEGDKPKLDF

SEQ ID NO: 577 - protein, 1377 aa, unidentified
  REGION 1..1377: note = Streptococcus sp. C300
  source 1..1377: note = Streptococcus sp.
MNNKPYSIGLDIGTNSVGWSVITDDYKVPSKKMKVLGNTDKRFIKKNLIGALLFDEGTTAEARRLKRTARRRYTRRKNRLRYLQEIFAEEMSKVDSSFFHRLDDSFLIPEDKRGSKYPIFATLVEEKEYHKQFPTIYHLRKQLADSKEKADLRLIYLVLAHMIKYRGHFLYEEAFDIKNNDIQKIFNEFISIYDNTFEGSSLSGQNAQVETIFTDKISKSAKRERVLKLFPDEKSTGLFSEFLKLIVGNQADFKKHFDLEEKAPLQFSKDTYDEDLENLLEQIGDDFADLFVAAKKLYDAILLSGILTVTDPSTKAPLSASMIERYENHQKDLAVLKQFIKTNLPEKYVEVFSDQSKDGYAGYIDGKTTQEAFYKYIKNLLSKFDGADYFLDKIEREVFLRKQRTFDNGSIPHQIHLQEMNTILRRQGEHYPFLKENKEKIEKILTFRIPYHVGPLARGNRDFAWLTRNSDQAIRPWNFEEIVDKASSAEDFINKMTNYDLYLPEEKVLPKHSLLYETFAVYNELTKVKFIAEGMRDYQFLDSGQKKKIINQLFKKKRKVTEDDIIDCLQKIDNYDGIELKGIEKQFNASLSTYHDILKIIRDKEFMDDPKNGDILENVIHTLTIFEDREMIKQRLAQYNSIFDEKVIKALSRKHYTGWGKLSAKLIDGIRDKQTGKTILDYLMDDGKSNRNFMQLIKDDELSFTEIIQKAQVVGDTDNLRQVVQNLPGSPAIKKGILQSIKIVDELVKVMGHAPESIVIEMARENQTTARGKKNSQQRYKRIEDSLKNLASGLDSNILKENPTDNIQLQNDRLFLYYLQNGKDMYTGEALNINQLSSYDIDHIIPQAFIKDDSLDNRVLTSSKDNRGKSDNVPSLEVVEKMKAFWQQLLDSKLISERKYNNLTKAERERGGLNELDKVGFIKRQLVETRQITKHVAQILDARFNKEVTEKNKKNRNVKIITLKSNMVSNFRKEFGLYKVREINDYHHAHDAYLNAVVAKAILKKYPKLEPEFVYGDYQKYDLKRYISRSKDPKEVEKATEKYFFYSNLLNFFKEEVHYADGTIVKRENIEYSKDTGEIAWNKEKDFATIKKVLSLPQVNIVKKTEEQTVGQNGGLFDNNIVSKKKVVDASKLIPIKSGLSPEKYGGYARPTIAYSVLVTYKQNNKIKNTMVGIPVLTKLEFERDPNLYLRNLGINNVSHVIKLVKYTVLEFKHKYGTYRRFIVSNQELKRANQIFVTTKQMKLISQYTTLDKNEHDSLLKNNQQLIQSIWNQFLEFMLATDLVNKKQYDELILTNNQTIEECRNIMNRVITTLSFTNINAGQKKIIFDDTLSLPIKRWQFTDSDKMVKKIIESTLIHQSITGLYETRIDLSKLGED

SEQ ID NO: 578 - protein, 1371 aa, unidentified
  REGION 1..1371: note = Streptococcus sp. F0441
  source 1..1371: note = Streptococcus sp.
MENKNYSIGLDIGTNSVGWSVITDDYKVPSKKMKVLGNTDKHFIKKNLIGALLFDEGTTAEARRLKRTARRRYTRRKNRLRYLQEIFSEEIGKVDSSFFHRLDDSFLIPEDKRGSKYPIFATLAEEKKYHKQFPTIYHLRKQLADSKEKTDLRLIYLALAHMIKYRGHFLYEEAFDIKNNDIQKIFNEFISIYNNTFEGNSLSGQNVQVEAIFTDKISKSAKRERVLKLFPDEKSTGLFSEFLKLIVGNQADFKKHFDLEEKAPLQFSRDTYDEDLENLLGQIGDDFADLFLVAKKLYDAILLSGILTVTNPSTKAPLSASMIERYENHQKDLASLKQFIKNNLPEKYDEVFSDQSEDGYAGYIDGKTTQETFYKYIKNLLSKFEGADYFLDKIEREDFLRKQRTFDNGSIPHQIHLQEMNAILRRQGEHYPFLKENKEKIEKILTFRIPYYVGPLARGNRDFAWLTRNSDQAIRPWNFEEIVDKASSAEDFINKMTNYDLYLPEEKVLPKHSLLYETFAVYNELTKVKFIAEGLRDYQFLDSGQKKQIVTQLFKEKRKVTEKDIIQFLHNVDGYDGIELKGIEKQFNASLSTYHDLLKIIKDKAFMDDAKNEAILENIVHTLTIFEDREMIKQRLAQYDSLFDEKVIKALTRRHYTGWGKLSAKLINGISDKQTGNTILDYLIDDGEINRNFMQLINDDGLSFKEIIQKAQVVGKTNDVKQVVQELPGSPAIKKGILQSIKIVDELVKVMGHAPESIVIEMARENQTTARGKKNSQQRYKRIEDSLKILASGLNSKILKEHPTDNIQLQNDRLFLYYLQNGKDMYTGEALDINQLSSCDIDHIIPQAFIKDDSLDNRVLTSSKDNRGKSDNVPSLEVVDKMKVFWQQLLDSKLISYRKFNNLTKAERGGLNELDKVGFIKRQLVETRQITKHVAQILDARFNKEVTEKDKKNRTVKIITLKSNLVSNFRKEFELYKVREINDYHHAHDAYLNAVVAKAILKKYPKLEPEFVYGDYQKYDLKRYISRSKDPKEIEKATEKYFFYSNLLNFFKEEVHYADGTIVKRENIEYSKDTGEIAWNKEKDFATIKKVLSLPQVNIVKKREVQTGGFSKESILPKGNSDKLIPRKTKDILWDTTKYGGFDSPVIAYSILLIADIEKGKAKKLKTVKTLVGITIMEKDAFEKNPIAFLENKGYHNVCKENILCLPKYSLFELENGRRRLLASAKELQKCNEIVLPVYLTTLLYHSKNVHKLDEPGHLEYIQKHRNEFKDLLNLVSEFSQKYVLADANLEKIKNLYADNEQADIEILANSFINLLTFTALGAPAAFKFFGKDVDRKRYTTVSEILNATLIHQSITGLYETRIDLSKLGED

SEQ ID NO: 579 - protein, 1121 aa, unidentified
  REGION 1..1121: note = Streptococcus sp. GMD6S
  source 1..1121: note = Streptococcus sp.
MNGLVLGLDIGIASVGVGILEKNSGKIIHANSRLFPAATADNNVERRKNRQARRLHRRKKHRGVRFQDLFEDYGLLTDFSKVSINLNPYRLRVDGLNQQLTNEELFIALKNIVKRRGISYLDDASEDGGTVSSDYGKAVEENRKLLAEQTPGQIQLERFEKYGQVRGDFTVVENGEKRRLINVFSTSAYRKEAERILRKQQEFNSKITDEFIEDCLKILTGKRKYYHGPGNEKSRTDYGRFRTDGTTLDNIFGILIGKCTFYPDEYRASKASYTAQEFNLLNDLNNLTVPTETKKLSEEQKKVIVEYAKEAKTLGASTLLKYIAKMIDASVDQIRGYRVDVNNKPEIHTFEAYRKMQSLETISVGELSRNVLDELAHILTLNTEREGIEEAINTKLKDSFSQDQVLELVQFRKNNSSLFSKGWHNFSLKLMMELIPELYETSEEQMTILTRLGKQKSKEISKRTKYIDEKELTEEIYNPVVAKSVRQAIKIINEATKKHGIFDNIVIEMARENNEEDAKKDYIKRQKANQDEKNAAMEKAAFQYNGKKELPDSIFHGQKELATKIRLWHQQGEKCLYTGKNIPISDLIHNQYKYEIDHILPLSLSFDDSLSNKVLVLATANQEKGQRTPFQALDSMDDAWSYREFKSYVKESKLLGNKKKEYLLTEEDISKIEVKQKFIERNLIDTRYSSRVVLNALQDFYKAHKFDTTISVVRGQFTSQLRRKWGLEKSRETYHHHAVDALIIAASSQLRLWKKQNNPLIAYKEGQFVDSETGEIISLSDDEYKELVFKAPYDHFVDTLSSKTFEDSILFSYQVDSKFNRKISDATIYATRKAKLDKEKSEETYVLGKIKDIYSQAGYDAFIKIYNKDKSKFLMYHKDPQTFEKVIEEILRTYPSKELNDKNKEIPCNPFEKYRQENGPIRKYSKKSNGPEIKSLKYYDNKLGNHIDITPESSDNQVVLQSLKPWRTDVYFNHQTKKYELMGLKYSDLSFEKGSGKYSISNQKYNSIKRIEGIDEQSEFKFTLYKNDLILIKDSENNEQKLFRFNSRNDTAKHYIELKPYDKAKFDGEQELITILGNVAKGGRCLKGLNKSNISIFKVKTDVLGKKHIIKKEGDEPKLKF

SEQ ID NO: 580 - protein, 1375 aa, unidentified
  REGION 1..1375: note = Streptococcus sp. M334
  source 1..1375: note = Streptococcus sp.
MSNKSYSIGLDIGTNSVGWAVITDDYKVPSKKMKVLGNTDKHFIKKNLIGALLFDEGTTAEDRRLKRTARRRYTRRKNRLRYLQEIFSQEISKVDSSFFHRLDDFFLVPEDKRGSKYPIFATLVEEKEYHKKFPTIYHLRKHLADSKEKTDLRLIYLALAHMIKYRGHFLYEESFDIKNNDIQKIFSEFISIYDNTFEGKSLSGQNAQVEAIFTDKISKSTKRERVLKLFPDEKSTGLFSEFLKLIVGNQADFKKHFDLEEKAPLQFSKDTYDEDLENLLGQIGDDFADLFLVAKKLYDAILLSGILTVKDLSTKAPLSASMIERYENHQKDLAALKQFIQNNLQEKYDEVFSDQSKDGYAGYIDGKTTQEAFYKYIKNLLSKFEGADYFLDKIEREDFLKKQRTFDNGSIPHQIHLQEMNAIIRRQGEHYPFLQENKEKIEKILTFRIPYYVGPLARGNGDFAWLTRNSDQAIRPWNFEEIVDQASSAEDFINKMTNYDLYLPEEKVLPKHSLLYETFAVYNELTKVKFIAEGLTRYQFLDKKQKKDIFDTFFKAENKRKVTEKDIIHYLHNVDGYDGIELKGIEKQFNASLSTYHDLLKIIKDKAFMDDSKNEEILENIIHTLTIFEDREMIKQRLAQYDSLFDEKVIKALTRRHYTGWGKLSAKLINGIRDKKSGKTILDYLIDDGEINRNFMQLIHDDGLSFKEIIQKAQVFGKTNDVKQVVQELPGSPAIKKGILQSIKIVDELVKVMGHAPESIVIEMARENQTTARGKKNSQQRYKRIEDSLKNLASGLDSNILKENPTDNIQLQNDRLFLYYLQNGRDMYTGKPLEINQLSNYDIDHIIPQAFIKDDSLDNRVLTSSKDNRGKSDNVPSLEVVEKMKAFWQQLLDSKLISERKFNNLTKAERERGGLNELDKVGFIKRQLVETRQITKHVAQFLDARFNKEVTEKDKKNRNVKIITLKSNLVSNFRKEFGLYKVREINDYHHAHDAYLNAVLAKAILKKYPKLEPEFVYGDYQKYDLQRYISKSREPKEVEKATQKYFFYSNLLNFFKEEVHYADGTIVKRENIEYSKDTGEIAWNKEKDFATVKKVLSLPQVNIVKKTEVQTGGFSKESILPKGNSDKLIPRKTKEILWDTTKYGGFDSPVIAYSILLIADIEKGKAKKLKTVKTLVGITIMEKATFEKNPITFLENKGYHNVRKENILCLPKYSLFELESGRRRMLASAKELQKGNEIVLPVYLTTLLYHSKNVHKLDEPEHLEYIQKHRYEFKDLLNLVSEFSQKYVLADANLEKIKNLYADNEQADIEILANSFINLLTFTALGAPAAFKFLGKDVDRKRYTTVSEILNATLIHQSITGLYETRIDLSKLGED

SEQ ID NO: 581 - protein, 1371 aa, unidentified
  REGION 1..1371: note = Streptococcus sp. oral taxon 056 str. F0418
  source 1..1371: note = Streptococcus sp.
MNNNNYSIGLDIGTNSVGWAVITDDYKVPSKKMRVLGNTDKRFIKKNLIGALLFDEGTTAEDRRLKRTARRRYTRRKNRLRYLQEIFAEEMSKVDSSFFHRLDDSFLVPEDKSGSKYPIFATLAEEKEYHKKFPTIYHLRKHLADSKEKADLRLIYLALAHITKYRGHFLYEEAFDIKNNDIQKIFNEFINIYDNTFEGSSLSGQNAQVEAIFTGKISKSVKREHVLKLFPDEKSTGLFSEFLKLIVGNQADFKKHFDLEEKASLQFSKDTYDEDLENLLGQIGDDFADLFLVAKKLYDAILLSGILTVTDPSTKAPLSASMIERYENHQEDLAALKQFIKNNLPEKYAEVFSDQSKDGYAGYIDGKTTQEAFYKYIKNLLSKFEGADYFLDKIEREDFLRKQRTFDNGSIPHQIHLQEMNAILRRQGEHYPLLKENKEKIEKILTFRIPYYVGPLARGNRDFAWLTRNSDQAIRPWNFEEIVDKASSAESFINKMTNYDLYLPEEKVLPKHSLLYETFAVYNELTKVKFIAEGLRDYQFFDSGQKKQIVNQLFKEKRKVTEKDIIHYLHNVDGYDGIELKGIEKQFNASLSTYHDLLKIIKDKEFMDNHKNQEILENIVHTLTIFEDREMIKQRLAQYDSIFDEKVIKALTRRHYTGWGKLSAKLINGICDKKTGKTILDYLIDDGYNNRNFMQLINDDGLSFKEIIQKAQVVGKTDDLTQVVRELSGSPAIKKGILQSIKIVDELVKIMGYAPESIVIEMARENQTTAKGKKNSQQRYKRIEDALKNLAPGLDSTISKENPTDNIQLQNDRLFLYYLQNGKDMYTGEALDINQLSSYDIDHIIPQAFIKDDSLDNRVLTSSKDNRGKSDNVPSLEVVKKRKAFWQQLLDSKLISERKFNNLTKAERGGLDERDKVGFIKRQLVETRQITKHVARILDARFNTEVSEKNQKIRSVKIITLKSNLVSNFRKEFKLYKVREINDYHHAHDAYLNAVVAKAILKKYPKLEPEFVYGDYQKYDLKRYISKSKDPKEVEKATEKYFFYSNLLNFFKEEVHYADGTIVKRENIEYSKDTGEIAWNKEKDFVTIKKVLSYPQVNIVKKREVQTGGFSKESILPKGNSDKLIPRKTKDILWDTTKYGGFDSPVIAYSILLIADIEKGKAKKLKTVKTLVGITIMEKAAFEKNPITFLENKGYHNVRKENILCLPKYSLFELENGRRRLLASAKELQKGNEIVLPVYLTTLLYHSKNVHKLDEPEHLEYIQKHRYEFKDLLNLVSEFSQKYVLAEANLEKIKSLYVDNEQADIEILANSFINLLTFTALGAPAAFKFFGKDVDRKRYTTVSEILNATLIHQSITGLYETRIDLSKLGED

SEQ ID NO: 582 - protein, 1420 aa, unidentified
  REGION 1..1420: note = Streptococcus sp. oral taxon 071 str. 73H25AP
  source 1..1420: note = Streptococcus sp.
MAKFNKNYSIGLDIGVSSVGYAVVTEDYRVPAFKFKVLGNTEKEKIKKNLIGSTTFVPAQSAQGTRVFRVNRRRIDRRNHRIAYLRDIFQKEIEKIDKNFYRRLDESFRVLGDKSEDIQIKQPFFGNKELETAYHKKYPTIYHLRKHLADADKNSPVADIREVYMVLSHILKYRGHFLTLGKIDPNNINMQNSWIDFIESCQDAFDLEISDESKTIAAIFKSSENRQEKVKQILSYFQQELLKKDKSIFKQLLQLLFGLKTKFKDCFELEEEPDLNFSKENYDENLENLLGALEEDFSDVFAKLKILRDTILLSSMLTYTGATHARFSATMVERYEEHRKDLQRFKSFVKQNLSEQDYLDIFGRKTPTGFDVDKETKGYVGYISNKMVLTNPQKQKTIQQNFYDYISGKITGIEGAECFLNKISDGTFLRKLRTTDNGAIPNQIHAYELEKIIERQGRDYPFLLENKDKLLSILTFKIPYYVGPLAKGNNSRFAWIKRTTSQDVLDDNDEDTRNGKIRPWNYHKLINMDETRDAFIINLIGNDIILLNEKVLPKRSLIYEEVMLQNELTRVKYKDKYGKIHFFNSELRQEIINNLFKTNSKRVSSAMLLSYLENFTNLQAVEIVSGIEKGKSLNSTLKTYNDLKTIFSEELLDSEIYQKELEEIIKVITVFDDKKSIKNYLTKYFGHLEFLNEEKINQLSKLRYTGWGRYSGKLLLGIRDEDTGFNLMQFLRNDDENRNLTQLISDTTLSFDSAIKAIQSKSTVEDDVFEEIKNLAGSPAIKRGILNSIKIVDELVQIIGYPPQNIIIEMARENMTTEEGQKKAKTRKSKLESALKNIEDSVLESGKVPHSDEQLQSEKLYLYYLQNGKDMYSLDKTGSPTPLYRDQLDQYEVDHIIPYSFLPIDSIDNKVLTHRENNQRKLNNIPDKETVANMKPFWEKLYNAKLISQTKYQRLTTSERTPDGVLTESMKAGFIERQLVETRQIIKHVARILDNRFSDTKIITLKSQLVTNFRNTFHIAKIRELNDYHHAHDAYLAVVVGQTLLKAYPKLAPELIYGHHAHFNRHEENKATLRKHLYSNIMRFFNNPDSKVSKDIWDCNRDLPIVKDVIYNSQINFVKRTMIKKGAFYNQNPVGKLNKQIAANNRYPLKTKVSSLDTSIYGGYGPMNSALSIIIIAERFNEKKGKIETVKEFHDIFIIDYEKFNNNPFQFLNNVSEEGFLKKNDLNRVLAFYRISKYSLMQKIDGTRMLFESKSNLHKVTQFKLTKTQNELFFHMKRLLTKSNLMDLKSESAIKESQNFIQTHQNEFDNIADRLSNYSQKMLGETKSLQTLINGYNERPIKQIDNNEETIRYYYDNFIKMFSFVKSGAPKDIINFFNDKYTVPRMRPKPDRKMLDATLIHQSITGLYETRIDLSKLGED

SEQ ID NO: 583 - protein, 1122 aa, Streptococcus suis
  REGION 1..1122: note = Streptococcus suis 89/1591
MSNGKILGLDIGIASVGVGVIDAQTGEIIHASSRIFPSANAANNAERRTFRGSRRLIRRKKHRIKRLDDLFNDFHINLDGEMSTDNPYVLRVKGLSQKLTVEELYISIKNIMKRRGISYLDDAESDNEAGRSDYAKAIERNRQLLTSKTPGEIQLERLEKYGQLRGNFTIIDEEGQSQQIINVFSTSDYVKEVEKILDCQKMYHKFISDEFCDKLIELLREKRKYYVGPGNEKSRTDYGIYRTDGTTLENLFGILIGKCTFYPDQYRSSRASYTAQEFNFLNDLNNLTVPTETKKLSQEQKEFLVNYAKETSVLGAGKILQQIAKLADCKVEDIRGYRLDNKDKPELHTFETYRAMKGLVPLVDIGVLSREQLDILADILTLNTDFEGIREALKKQLPNVFDEKQVKGLASFRKSKSQLFAKGWHNLSQKIMLEVIPELYATSDEQMTILTRLGKFEKSSVAEYPSSINVDEITDEIYNPVVAKSIRQTIKIINASIKKWGEFDQIVIEMPRDRNEDEEKKRIADGQKANAKEKADSILRAAELYCAGKVLPDYVYNGHNQLATKIRLWYQQGERCIYTGQPISIHDLIHNQNQYEIDHILPLSLTFDDSLSNKVLVLATANQEKAQRTPYNYLKSATSAWSYREFKDYVTKRKGIGKKKCEYLTFEEDINGFEVRSKFIQRNLVDTRYASKVILNALQDYFKISGIQTKVSVVRGQFTSQLRHKWGIEKTRETYHHHAVDALIIAASSQLRLWKKQESPLVVDYQEGRQVDLETGEILELTDEQYKELVYQPPYQGFVNTISSSAFDNEILFSYQVDSKVNRKISDATIYATRNAQLGKDKTEGIYVLGKIKDIYTQAGYEAFLKRYTKDKTSFLMYHKDLDTWEKVIEIILRDYREYDEKGKEIGNPFERYRRENGYVKKYSRKGNGTAIKSLKYYDNKLGNHIDITPENSRNAVVLQSLKPWRTDVYFNKETGKYEFLGIKYSDLSFEKGTGEYGISQEKYDSIKIAEGVAKKSIFKFTLYKQDLLFIKDIENNFGKLLRFTSKNDTSKHYVELKPYDKNKFGTEEPLLPVLGNVAKSGQCIKGLNKSNISIYKVRTDILGYRHFIKQEGEHPQLKFKK

SEQ ID NO: 584 - protein, 1122 aa, Streptococcus suis
MSNGKILGLDIGIASVGVGVIDAQTGEIIHASSRIFPSANAANNAERRTFRGSRRLIRRKKHRIKRLDDLFNDFHINLDGEMSTDNPYVLRVKGLSQKLTVEELYISIKNIMKRRGISYLDDAESDNEAGRSDYAKAIERNRQLLTSKTPGEIQLERLEKYGQLRGNFTIIDEEGQSQQIINVFSTSDYVKEVEKILDCQKMYHKFISDEFCDKLIELLREKRKYYVGPGNEKSRTDYGIYRTDGTTLENLFGILIGKCTFYPDQYRSSRASYTAQEFNFLNDLNNLTVPTETKKLSQEQKEFLVNYAKETSVLGAGKILQQIAKLADCKVEDIRGYRLDNKDKPELHTFETYRAMKGLVPLVDIGVLSREQLDILADILTLNTDFEGIREALKKQLPNVFDEKQVKGLASFRKSKSQLFAKGWHNLSQKIMLEVIPELYATSDEQMTILTRLGKFEKSSVAEYPSSINVDEITDEIYNPVVAKSIRQTIKIINASIKKWDEFDQIVIEMPRDRNEDEEKKRIADGQKANAKEKADSILRAAELYCAGKVLPDYVYNGHNQLATKIRLWYQQGERCIYTGQPISIHDLIHNQNQYEIDHILPLSLTFDDSLSNKVLVLATANQEKAQRTPYNYLKSATSAWSYREFKDYVTKRKGIGKKKCEYLTFEEDINGFEVRSKFIQRNLVDTRYASKVILNALQDYFKISGIQTKVSVVRGQFTSQLRHKWGIEKTRETYHHHAVDALIIAASSQLRLWKKQESPLVVDYQEGRQVDLETGEILELTDEQYKELVYQPPYQGFVNTISSSAFDNEILFSYQVDSKVNRKISDATIYATRNAQLGKDKTEGIYVLGKIKDIYTQAGYEAFLKRYTKDKTSFLMYHKDLDTWEKVIEIILRDYREYDEKGKEIGNPFERYRRENGYVKKYSRKGNGTAIKSLKYYDNKLGNHIDITPENSRNAVVLQSLKPWRTDVYFNKETGKYEFLGIKYSDLSFEKGTGEYGISQEKYDSIKIAEGVAKKSIFKFTLYKQDLLFIKDIENNFGKLLRFTSKNDTSKHYVELKPYDKNKFGTEEPLLPVLGNVAKSGQCIKGLNKSNISIYKVRTDILGYRHFIKQEGEHPQLKFKK

SEQ ID NO: 585 - protein, 1381 aa, Streptococcus suis
MVKKKYAIGIDIGTNSVGWSIVTDDYKVPSKKMKVFGNTEKRYIKKNLLGTLLFDEGNTAENRRLKRTARRRYTRRRNRILYLQEIFAEEINKIDDSFFQRLDDSFLIVEDKQGSKHPIFGTLQEEKEYHKQFPTIYHLRKQLADSSQKADIRLIYLALAHIIKYRGHFLFEGDLKSENKDVQHLFNDFVEMFDKTVEGSYLSENLPNVADVLVEKVSKSRRLENILHYFPNEKKNGLFGNFLALALGLQPNFKTNFELAEDAKIQFSKETYEEDLEELLGKIGDDYADLFIATKSLYDGILLAGILSTTDSTTKAPLSSSMVNRYEEHQKDLALLKNFIHQNLSDSYKEVFNDKLKDGYAGYIEGKTTQENFYRFIKKAIEKIEGSNYFIDKIDREDFLRKQRTFDNGSIPHQIHLQEMHAIIRRQAEFYPFLVENQDKIEKILTFRIPYYVGPLARGKSEFAWLNRKSDEKIRPWNFDEMVDKETSAENFITRMTNYDRYLPDQKVLPKHSLLYEKFAVYNELTKVKFIAEGMRDYQFLDSGQKKDIVKTLFKTKRKVTAKDIKAYLENSNGYAGVELKGLEEQFNASLPTYHDLLKILRDKAFIDAEENQEILEDIVLTLTLFEDREMIRKRLEKYKDILTEEQRKKLERRHYTGWGRLSAKLINGILDKVTRKTILGYLIDDGTSNRNFMQLINDDTLSFVDEIRLAQGSGEAEDYRAEVQNLAGSPAIKKGILQSLKIVDELIEVMGYEPEHIVVEMARENQFTNQGRRNSQQRINRLENALKDFGSKILEEQKPYGVSKVNNIHLQSDRLFLYYLQNGKDMYTDEELDIDHLSEYDIDHIIPQAFIKDDSLDNKVLTKSAKNRGKSDDVPSMEIVHNRKNFWRQLLKSKLISQRKFDNLTKAERGGLTNEDKARFIQRQLVETRQITKHVARMLDTRFNTKLDEAGNRIRDPKVNIITLKSNLVSQFRKDYQLYKIREINNYHHAHDAYINAVVATALLKKYPQLAPEFVYGEYPTYNSYNSRKSATEKVLFYSNIMNFFKRIVVHSKTGEVRIRPVIEVNKETGEIVWDKKSDFRTVRKVLSYPQVNVVKKTEVQNHGLDRGKPKGFYNANLSPRPKEGSVENLVPAKQSFDTKRYGGYAGISNSYAVLVNGIIEKGKKKSKAEVTEFQGISILARKDFDKNPKQYLLNLGYKDIKSIIKLPKYSLFELENGSRRMLASILSTNNKRGEIHKGNEMYLPDKFVTLLYHAMRVNRTLEPGHKKYVETHRHVFDELLIYILEYNEKIVGAKANGKRIVEAYSARKDTDNLEELCNSFINLLNLTALGSAVDFEFLGTKIPRYRDYTPSSLLKATLIHQSVTGLYETRIDLSKLGGD

SEQ ID NO: 586 - protein, 1122 aa, Streptococcus suis; identical to SEQ ID NO: 583

SEQ ID NO: 587 - protein, 1388 aa, Streptococcus thermophilus
MTKPYSIGLDIGTNSVGWAVITDNYKVPSKKMKVLGNTSKKYIKKNLLGVLLFDSGITAEGRRLKRTARRRYTRRRNRILYLQEIFSTEMATLDDAFFQRLDDSFLVPDDKRDSKYPIFGNLVEEKVYHDEFPTIYHLRKYLADSTKKADLRLVYLALAHMIKYRGHFLIEGEFNSKNNDIQKNFQDFLDTYNAIFESDLSLENSKQLEEIVKDKISKLEKKDRILKLFPGEKNSGIFSEFLKLIVGNQADFRKCFNLDEKASLHFSKESYDEDLETLLGYIGDDYSDVFLKAKKLYDAILLSGFLTVTDNETEAPLSSAMIKRYNEHKEDLALLKEYIRNISLKTYNEVFKDDTKNGYAGYIDGKTNQEDFYVYLKNLLAEFEGADYFLEKIDREDFLRKQRTFDNGSIPYQIHLQEMRAILDKQAKFYPFLAKNKERIEKILTFRIPYYVGPLARGNSDFAWSIRKRNEKITPWNFEDVIDKESSAEAFINRMTSFDLYLPEEKVLPKHSLLYETFNVYNELTKVRFIAESMRDYQFLDSKQKKDIVRLYFKDKRKVTDKDIIEYLHAIYGYDGIELKGIEKQFNSSLSTYHDLLNIINDKEFLDDSSNEAIIEEIIHTLTIFEDREMIKQRLSKFENIFDKSVLKKLSRRHYTGWGKLSAKLINGIRDEKSGNTILDYLIDDGISNRNFMQLIHDDALSFKKKIQKAQIIGDEDKGNIKEVVKSLPGSPAIKKGILQSIKIVDELVKVMGGRKPESIVVEMARENQYTNQGKSNSQQRLKRLEKSLKELGSKILKENIPAKLSKIDNNALQNDRLYLYYLQNGKDMYTGDDLDIDRLSNYDIDHIIPQAFLKDNSIDNKVLVSSASNRGKSDDFPSLEVVKKRKTFWYQLLKSKLISQRKFDNLTKAERGGLLPEDKAGFIQRQLVETRQITKHVARLLDEKFNNKKDENNRAVRTVKIITLKSTLVSQFRKDFELYKVREINDFHHAHDAYLNAVIASALLKKYPKLEPEFVYGDYPKYNSFRERKSATEKVYFYSNIMNIFKKSISLADGRVIERPLIEVNEETGESVWNKESDLATVRRVLSYPQVNVVKKVEEQNHGLDRGKPKGLFNANLSSKPKPNSNENLVGAKEYLDPKKYGGYAGISNSFAVLVKGTIEKGAKKKITNVLEFQGISILDRINYRKDKLNFLLEKGYKDIELIIELPKYSLFELSDGSRRMLASILSTNNKRGEIHKGNQIFLSQKFVKLLYHAKRISNTINENHRKYVENHKKEFEELFYYILEFNENYVGAKKNGKLLNSAFQSWQNHSIDELCSSFIGPTGSERKGLFELTSRGSAADFEFLGVKIPRYRDYTPSSLLKDATLIHQSVTGLYETRIDLAKLGEG

SEQ ID NO: 588 - protein, 1128 aa, Streptococcus thermophilus
MSDLVLGLDIGIGSVGVGILNKVTGEIIHKNSRIFPAAQAENNLVRRTNRQGRRLTRRKKHRIVRLNRLFEESGLITDFTKISINLNPYQLRVKGLTDELSNEELFIALKNMVKHRGISYLDDASDDGNSSVGDYAQIVKENSKQLETKTPGQIQLERYQTYGQLRGDFTVEKDGKKHRLINVFPTSAYRSEALRILQTQQEFNPQITDEFINRYLEILTGKRKYYHGPGNEKSRTDYGRYRTSGETLDNIFGILIGKCTFYPEEFRAAKASYTAQEFNLLNDLNNLTVPTETKKLSKEQKNQIINYVKNEKAMGPAKLFKYIAKLLSCDVADIKGYRIDKSGKAEIHTFEAYRKMKTLETLDIEQMDRETLDKLAYVLTLNTEREGIQEALEHEFADGSFSQKQVDELVQFRKANSSIFGKGWHNFSVKLMMELIPELYETSEEQMTILTRLGKQKRLRLQIKQNISNKTKYIDEKLLTEEIYNPVVAKSVRQAIKIVNAAIKEYGDFDNIVIEMARETNEDDEKKAIQKIQKANKDEKDAAMLKAANQYNGKAELPHSVFHGHKQLATKIRLWHQQGERCLYTGKTISIHDLINNPNQFEVDHILPLSITFDDSLANKVLVYATANQEKGQRTPYQALDSMDDAWSFRELKAFVRESKTLSNKKKEYLLTEEDISKFDVRKKFIERNLVDTRYASRVVLNALQEHFRAHKIDTKVSVVRGQFTSQLRRHWGIEKTRDTYHHHAVDALIIAASSQLNLWKKQKNTLVSYSEEQLLDIETGELISDDEYKESVFKAPYQHFVDTLKSKEFEDSILFSYQVDSKFNRKISDATIYATRQAKVGKDKKDETYVLGKIKDIYTQDGYDAFMKIYKKDKSKFLMYRHDPQTFEKVIEPILENYPNKQMNEKGKEVPCNPFLKYKEEHGYIRKYSKKGNGPEIKSLKYYDSKLLGNPIDITPENSKNKVVLQSLKPWRTDVYFNKATGKYEILGLKYADLQFEKGTGTYKISQEKYNDIKKKEGVDSDSEFKFTLYKNDLLLVKDTETKEQQLFRFLSRTLPKQKHYVELKPYDKQKFEGGEALIKVLGNVANGGQCIKGLAKSNISIYKVRTDVLGNQHIIKNEGDKPKLDF

SEQ ID NO: 589 - protein, 1121 aa, Streptococcus thermophilus
MSDLVLGLDIGIGSVGVGILNKVTGEIIHKNSRIFPAAQAENNLVRRTNRQGRRLTRRKKHRIVRLNRLFEESGLITDFTKISINLNPYQLRVKGLTDELSNEELFIALKNMVKHRGISYLDDASDDGNSSVGDYAQIVKENSKQLETKTPGQIQLERYQTYGQLRGDFTVEKDGKKHRLINVFPTSAYRSEALRILQTQQEFNPQITDEFINRYLEILTGKRKYYHGPGNEKSRTDYGRYRTSGETLDNIFGILIGKCTFYPDEFRAAKASYTAQEFNLLNDLNNLTVPTETKKLSKEQKNQIINYVKNEKAMGPAKLFKYIAKLLSCDVADIKEYRIDKSGKAEIHTFEAYRKMKTLETLDIEQMDRETLDKLAYVLTLNTEREGIQEALEHEFADGSFSQKQVDELVQFRKANSSIFGKGWHNFSVKLMMELIPELYETSEEQMTILTRLGKQKTTSSSNKTKYIDEKLLTEEIYNPVVAKSVRQAIKIVNAAIKEYGDFDNIVIEMARETNEDDEKKAIQKIQKANKDEKDAAMLKAANQYNGKAELPHSVFHGHKQLATKIRLWHQQGERCLYTGKTISIHDLINNSNQFEVDHILPLSITFDDSLANKVLVYATANQEKGQRTPYQALDSMDDAWSFRELKAFVRESKTLSNKKKEYLLTEEDISKFDVRKKFIERNLVDTRYASRVVLNALQEHFRAHKIDTKVSVVRGQFTSQLRRHWGIEKTRDTYHHHAVDALIIAASIQLNLWKKQKNTLVSYSEDQLLDIETGELISDDEYKESVFKAPYQHFVDTLKSKEFEDSILFSYQVDSKFNRKISDATIYATRQAKVGKDKADETYVLGKIKDIYTQDGYDAFMKIYKKDKSKFLMYRHDPQTFEKVIEPILENYPNKQINEKGKEVPVNPFLKYKEEHGYIRKYSKKGNGPEIKSLKYYDSKLGNHIDITPKDSNNKVVLQSVSPWRADVYFNKTTGKYEILGLKYADLQFEKGTGTYKISQEKYNDIKKKEGVDSDSEFKFTLYKNDLLLVKDTETKEQQLFRFLSRTMPKQKHYVELKPYDKQKFEGGEALIKVLGNVANSGQCKKGLGKSNISIYKVRTDVLGNQHIIKNEGDKPKLDF

SEQ ID NO: 590 - protein, 1388 aa, Streptococcus thermophilus
MTKPYSIGLDIGTNSVGWAVTTDNYKVPSKKMKVLGNTSKKYIKKNLLGVLLFDSGITAEGRRLKRTARRRYTRRRNRILYLQEIFSTEMATLDDAFFQRLDDSFLVPDDKRDSKYPIFGNLVEEKAYHDEFPTIYHLRKYLADSTKKADLRLVYLALAHMIKYRGHFLIEGEFNSKNNDIQKNFQDFLDTYNAIFESDLSLENSKQLEEIVKDKISKLEKKDRILKLFPGEKNSGIFSEFLKLIVGNQADFRKCFNLDEKASLHFSKESYDEDLETLLGYIGDDYSDVFLKAKKLYDAILLSGFLTVTDNETEAPLSSAMIKRYNEHKEDLALLKEYIRNISLKTYNEVFKDDTKNGYAGYIDGKTNQEDFYVYLKKLLAEFEGADYFLEKIDREDFLRKQRTFDNGSIPYQIHLQEMRAILDKQAKFYPFLAKNKERIEKILTFRIPYYVGPLARGNSDFAWSIRKRNEKITPWNFEDVIDKESSAEAFINRMTSFDLYLPEEKVLPKHSLLYETFNVYNELTKVRFIAESMRDYQFLDSKQKKDIVRLYFKDKRKVTDKDIIEYLHAIYGYDGIELKGIEKQFNSSLSTYHDLLNIINDKEFLDDSSNEAIIEEIIHTLTIFEDREMIKQRLSKFENIFDKSVLKKLSRRHYTGWGKLSAKLINGIRDEKSGNTILDYLIDDGISNRNFMQLIHDDALSFKKKIQKAQIIGDEDKGNIKEVVKSLPGSPAIKKGILQSIKIVDELVKVMGGRKPESIVVEMARENQYTNQGKSNSQQRLKRLEKSLKELGSKILKENIPAKLSKIDNNALQNDRLYLYYLQNGKDMYTGDDLDIDRLSNYDIDHIIPQAFLKDNSIDNKVLVSSASNRGKSDDVPSLEVVKKRKTFWYQLLKSKLISQRKFDNLTKAERGGLSPEDKAGFIQRQLVETRQITKHVARLLDEKFNNKKDENNRAVRTVKIITLKSTLVSQFRKDFELYKVREINDFHHAHDAYLNAVVASALLKKYPKLEPEFVYGDYPKYNSFRERKSATEKVYFYSNIMNIFKKSISLADGRVIERPLIEVNEETGESVWNKESDLATVRRVLSYPQVNVVKKVEEQNHGLDRGKPKGLFNANLSSKPKPNSNENLVGAKEYLDPKKYGGYAGISNSFTVLVKGTIEKGAKKKITNVLEFQGISILDRINYRKDKLNFLLEKGYKDIELIIELPKYSLFELSDGSRRMLASILSTNNKRGEIHKGNQIFLSQKFVKLLYHAKRISNTINENHRKYVENHKKEFEELFYYILEFNENYVGAKKNGKLLNSAFQSWQNHSIDELCSSFIGPTGSERKGLFELTSRGSAADFEFLGVKIPRYRDYTPSSLLKDATLIHQSVTGLYETRIDLAKLGEG

SEQ ID NO: 591 - protein, 1121 aa, Streptococcus thermophilus
MSDLVLGLDIGIGSVGVGILNKVTGEIIHKNSRIFPAAQAENNLVRRTNRQGRRLARRKKHRRVRLNRLFEESGLITDFTKISINLNPYQLRVKGLTDELSNEELFIALKNMVKHRGISYLDDASDDGNSSVGDYAQIVKENSKQLETKTPGQIQLERYQTYGQLRGDFTVEKDGKKHRLINVFPTSAYRSEALRILQTQQEFNPQITDEFINRYLEILTGKRKYYHGPGNEKSRTDYGRYRTSGETLDNIFGILIGKCTFYPDEFRAAKASYTAQEFNLLNDLNNLTVPTETKKLSKEQKNQIINYVKNEKAMGPAKLFKYIAKLLSCDVADIKGYRIDKSGKAEIHTFEAYRKMKTLETLDIEQMDRETLDKLAYVLTLNTEREGIQEALEHEFADGSFSQKQVDELVQFRKANSSIFGKGWHNFSVKLMMELIPELYETSEEQMTILTRLGKQKTTSSSNKTKYIDEKLLTEEIYNPVVAKSVRQAIKIVNAAIKEYGDFDNIVIEMARETNEDDEKKAIQKIQKANKDEKDAAMLKAANQYNGKAELPHSVFHGHKQLATKIRLWHQQGERCLYTGKTISIHDLINNSNQFEVDHILPLSITFDDSLANKVLVYATANQEKGQRTPYQALDSMDDAWSFRELKAFVRESKTLSNKKKEYLLTEEDISKFDVRKKFIERNLVDTRYASRVVLNALQEHFRAHKIDTKVSVVRGQFTSQLRRHWGIEKTRDTYHHHAVDALIIAASSQLNLWKKQKNTLVSYSEDQLLDIETGELISDDEYKESVFKAPYQHFVDTLKSKEFEDSILFSYQVDSKFNRKISDATIYATRQAKVGKDKADETYVLGKIKDIYTQDGYDAFMKIYKKDKSKFLMYRHDPQTFEKVIEPILENYPNKQINEKGKEVPCNPFLKYKEEHGYIRKYSKKGNGPEIKSLKYYDSKLGNHIDITPKDSNNKVVLQSVSPWRADVYFNKTTGKYEILGLKYADLQFEKGTGTYKISQEKYNDIKKKEGVDSDSEFKFTLYKNDLLLVKDTETKEQQLFRFLSRTMPKQKHYVELKPYDKQKFEGGEALIKVLGNVANSGQCKKGLGKSNISIYKVRTDVLGNQHIIKNEGDKPKLDF

SEQ ID NO: 592 - protein, 1122 aa, Streptococcus thermophilus
MSDLVLGLDIGIGSVGVGILNKVTGEIIHKNSRIFPAAQAENNLVRRTNRQGRRLTRRKKHRIVRLNRLFEESGLITDFTKISINLNPYQLRVKGLTDELSNEELFIALKNMVKHRGISYLDDASDDGNSSVGDYAQIVKENSKQLETKTPGQIQLERYQTYGQLRGDFTVEKDGKKHRLINVFPTSAYRSEALRILQTQQEFNSQITDEFINRYLEILTGKRKYYHGPGNEKSRTDYGRYRTNGETLDNIFGILIGKCTFYPDEFRAAKASYTAQEFNLLNDLNNLTVPTETKKLSKEQKNQIINYVKNEKVMGPAKLFKYIAKLLSCDVADIKGHRIDKSGKAEIHTFEAYRKMKTLETLDIEQMDRETLDKLAYVLTLNTEREGIQEALEHEFADGSFSQKQVDELVQFRKANSSIFGKGWHNFSVKLMMELIPELYETSEEQMTILTRLGKQKTTSSSNKTKYIDEKLLTEEIYNPVVAKSVRQAIKIVNAAIKEYGDFDNIVIEMARETNEDDEKKAIQKIQKANKDEKDAAMLKAANQYNGKAELPHSVFHGHKQLATKIRLWHQQGERCLYTGKTISIHDLINNPNQFEVDHILPLSITFDDSLANKVLVYATANQEKGQRTPYQALDSMDDAWSFRELKAFVRESKTLSNKKKEYLLTEEDISKFDVRKKFIERNLVDTRYASRVVLNALQEHFRAHKIDTKVSVVRGQFTSQLRRHWGIEKTRDTYHHHAVDALIIAASSQLNLWKKQKNTLVSYSEEQLLDIETGELISDDEYKESVFKAPYQHFVDTLKSKEFEDSILFSYQVDSKFNRKISDATIYATRQAKVGKDKKDETYVLGKIKDIYTQDGYDAFMKIYKKDKSKFLMYRHDPQTFEKVIEPILENYPNKEMNEKGKEVPCNPFLKYKEEHGYIRKYSKKGNGPEIKSLKYYDSKLLGNPIDITPENSKNKVVLQSLKPWRTDVYFNKNTGKYEILGLKYADLQFEKKTGTYKISQEKYNGIMKEEGVDSDSEFKFTLYKNDLLLVKDTETKEQQLFRFLSRTMPNVKYYVELKPYSKDKFEKNESLIEILGSADKSGRCIKGLGKSNISIYKVRTDVLGNQHIIKNEGDKPKLDF

SEQ ID NO: 593 - protein, 1388 aa, Streptococcus thermophilus
MTKPYSIGLDIGTNSVGWAVITDNYKVPSKKMKVLGNTSKKYIKKNLLGVLLFDSGITAEGRRLKRTARRRYTRRRNRILYLQEIFSTEMATLDDAFFQRLDDSFLVPDDKRDSKYPIFGNLVEEKAYHDEFPTIYHLRKYLADSTKKADLRLVYLALAHMIKYRGHFLIEGEFNSKNNDIQKNFQDFLDTYNAIFESDLSLENSKQLEEIVKDKISKLEKKDRILKLFPGEKNSGIFSEFLKLIVGNQADFRKCFNLDEKASLHFSKESYDEDLETLLGYIGDDYSDVFLKAKKLYDAILLSGFLTVTDNETEAPLSSAMIKRYNEHKEDLALLKEYIRNISLKTYNEVFKDDTKNGYAGYIDGKTNQEDFYVYLKNLLAEFEGADYFLEKIDREDFLRKQRTFDNGSIPYQIHLQEMRAILDKQAKFYPFLAKNKERIEKILTFRIPYYVGPLARGNSDFAWSIRKRNEKITPWNFEDVIDKESSAEAFINRMTSFDLYLPEEKVLPKHSLLYETFNVYNELTKVRFIAESMRDYQFLDSKQKKDIVRLYFKDKRKVTDKDIIEYLHAIYGYDGIELKGIEKQFNSSLSTYHDLLNIINDKEFLDDSSNEAIIEEIIHTLTIFEDREMIKQRLSKFENIFDKSVLKKLSRRHYTGWGKLSAKLINGIRDEKSGNTILDYLIDDGISNRNFMQLIHDDALSFKKKIQKAQIIGDEDKGNIKEVVKSLPGSPAIKKGILQSIKIVDELVKVMGGRKPESIVVEMARENQYTNQGKSNSQQRLKRLEKSLKELGSKILKENIPAKLSKIDNNALQNDRLYLYYLQNGKDMYTGDDLDIDRLSNYDIDHIIPQAFLKDNSIDNKVLVSSASNRGKSDDFPSLEVVKKRKTFWYQLLKSKLISQRKFDNLTKAERGGLLPEDKAGFIQRQLVETRQITKHVARLLDEKFNNKKDENNRAVRTVKIITLKSTLVSQFRKDFELYKVREINDFHHAHDAYLNAVIASALLKKYPKLEPEFVYGDYPKYNSFRERKSATEKVYFYSNIMNIFKKSISLADGRVIERPLIEVNEETGESVWNKESDLATVRRVLSYPQVNVVKKVEEQNHGLDRGKPKGLFNANLSSKPKPNSNENLVGAKEYLDPKKYGGYAGISNSFAVLVKGTIEKGAKKKITNVLEFQGISILDRINYRKDKLNFLLEKGYKDIELIIELPKYSLFELSDGSRRMLASILSTNNKRGEIHKGNQIFLSQKFVKLLYHAKRISNTINENHRKYVENHKKEFEELFYYILEFNENYVGAKKNGKLLNSAFQSWQNHSIDELCSSFIGPTGSERKGLFELTSRGSAADFEFLGVKIPRYRDYTPSSLLKDATLIHQSVTGLYETRIDLAKLGEG

SEQ ID NO: 594 - protein, 1121 aa, Streptococcus thermophilus
MSDLVLGLDIGIGSVGVGILNKVTGEIIHKNSRIFPAAQAENNLVRRTNRQGRRLTRRKKHRRVRLNRLFEESGLITDFTKISINLNPYQLRVKGLTDELSNEELFIALKNMVKHRGISYLDDASDDGNSSVGDYAQIVKENSKQLETKTPGQIQLERYQTYGQLRGDFTVEKDGKKHRLINVFPTSAYRSEALRILQTQQEFNPQITDEFVNRYLEILTGKRKYYHGPGNEKSRTDYGRYRTNGETLDNIFGILIGKCTFYPEEFRAAKASYTAQEFNLLNDLNNLTVPTETKKLSKEQKNQIINYVKNEKAMGPAKLFKYIAKLLSCDVADIKGYRIDKSGKAEIHTFEAYRKMKTLETLDIEQMDRETLDKLAYVLTLNTEREGIQEALEHEFADGSFSQKQVDELVQFRKANSSIFGKGWHNFSVKLMMELIPELYETSEEQMTILKRLGKQKTTSSSNKTKYIDEKLLTEEIYNPVVAKSIRQAIKIVNAAIKEYGDFDNIVIEMARETNEDDEKKAIQKIQKANKDEKDAAMLKAANQYNGKAELPHSVFHGHKQLATKIRLWHQQGERCLYTGKTISIHDLINNPNQFEVDHILPLSITFDDSLANKVLVYATANQEKGQRTPYQALDSMDDAWSFRELKAFVRESKTLSNKKKEYLLTEEDISKFDVRKKFIERNLVDTRYASRVVLNALQEHFRAHKIDTKVSVVRGQFTSQLRRHWGIEKTRDTYHHHAVDALIIAASSQLNLWKKQKNTLVSYSEDQLLDIETGELISDDEYKESVFKAPYQHFVDTLKSKEFEDSILFSYQVDSKFNRKISDATIYATRQAKVGKDKKDETYVLGKIKDIYTQDGYDAFMKIYKKDKSKFLMYRHDPQTFEKVIEPILENYPNKEMNEKGKEVPCNPFLKYKEEHGYIRKYSKKGNDPEIKSLKYYDSKLGNHIDITPKDSNNKVVLQSVSPWRADVYFNKTTGKYEILGLKYADLQFEKGTGTYKISQEKYNDIKKKEGVDSDSEFKFTLYKNDLLLVKDTETKEQQLFRFLSRTMPKQKHYVELKPYDKQKFEGGEALIKVLGNVANSGQCKKGLGKSNISIYKVRTDVLGNQHIIKNEGDKPKLDF

SEQ ID NO: 595 - protein, 1122 aa, Streptococcus thermophilus
  REGION 1..1122: note = Streptococcus thermophilus MTCC 5460
MSDLVLGLDIGIGSVGVGILNKVTGEIIHKNSRIFPAAQAENNVERRTNRQGRRLTRRKKHRRVRLNRLFEESGLITDFTKISINLNPYQLRVRGLTDELSNEELFIALKNMVKHRGISYLDDASDDGNSSVGDYAQIVKENSKQLETKTPGQIQLERYQTYGQLRGDFTVEKDGKKHRLINVFPTSAYRSEALRILQTQQEFNSQITDEFINRYLEILTGKRKYYHGPGNEKSRTDYGRYRTSGETLDNIFGILIGKCTFYPEEFRAAKASYTAQEFNLLNDLNNLTVPTETKKLSKEQKNQIINYVKNEKAMGPAKLFKYIAKLLSCDVADIKGYRIDKSGKAEIHTFEAYRKMKTLETLDIEQMDRETLDKLAYVLTLNTEREGIQEALEHEFADGSFSQKQVDELVQFRKASSSIFGKGWHNFSVKLMMELIPELYETSEEQMTILTRLGKQKTTSSSNKTKYIDEKLLTEEIYNPVVAKSVRQAIKIVNAAIKEYGDFDNIVIEMARETNEDDEKKAIQKIQKANKDEKDAAMLKAANQYNGKAELPHSVFHGHKQLATKIRLWHQQGERCLYTGKTISIHDLINNPNQFEVDHILPLSITFDDSLANKVLVYATANQEKGQRTPYQALDSMDDAWSFRELKAFVRESKTLSNKKKEYLLTEEDISKFDVRKKFIERNLVDTRYASRVVLNALQEHFRAHKIDTKVSVVRGQFTSQLRRHWGIEKTRDTYHHHAVDALIIAASSQLNLWKKQKNTLVSYSEDQLLDIETGELISDDEYKESVFKAPYQHFVDTLKSKEFEDSILFSYQVDSKFNRKLSDATIYATRQAKVGKDKKDETYVLGKIKDIYTQDGYDAFMKIYKKDKSKFLMYRHDPQTFEKVIEPILENYPNKEMNEKGKEVPCNPFLKYKEEHGYIRKYSKKGNGPEIKSLKYYDSKLLGNPIDITPENSKNKVVLQSLKPWRADVYFNKTTGKYEILGLKYADLQFEKKTGTYKISQEKYNGIMKEEGVDSDSEFKFTLYKNDLLLVKDTETKEQQLFRFLSRTMPNVKYYVELKPYSKDKFEKNESLIEILGSADKSGRCIKGLGKSNISIYKVRTDVLGNQHIIKNEGDKPKLDF

SEQ ID NO: 596 - protein, 1121 aa, Streptococcus thermophilus
MSDLVLGLDIGIGSVGVGILNKVTGEIIHKNSRIFPAAQAENNLVRRTNRQGRRLTRRKKHRIVRLNRLFEESGLITDFTKISINLNPYQLRVKGLTDELSNEELFIALKNMVKHRGISYLDDASDDGNSSVGDYAQIVKENSKQLETKTPGQIQLERYQTYGQLRGDFTVEKDGKKHRLINVFPTSAYRSEALRILQTQQEFNPQITDEFINRYLEILTGKRKYYHGPGNEKSRTDYGRYRTSGETLDNIFGILIGKCTFYPDEFRAAKASYTAQEFNLLNDLNNLTVPTETKKLSKEQKNQIINYVKNEKAMGPAKLFKYIAKLLSCDVADIKGYRIDKSGKAEIHTFEAYRKMKTLETLDIEQMDRETLDKLAYVLTLNTEREGIQEALEHEFADGSFSQKQVDELVQFRKANSSIFGKGWHNFSVKLMMELIPELYETSEEQMTILTRLGKQKTTSSSNKTKYIDEKLLTEEIYNPVVAKSVRQAIKIVNAAIKEYGDFDNIVIEMARETNEDDEKKAIQKIQKANKDEKDAAMLKAANQYNGKAELPHSVFHGHKQLATKIRLWHQQGERCLYTGKTISIHDLINNSNQFEVDHILPLSITFDDSLANKVLVYATANQEKGQRTPYQALDSMDDAWSFRELKAFVRESKTLSNKKKEYLLTEEDISKFDVRKKFIERNLVDTRYASRVVLNALQEHFRAHKIDTKVSVVRGQFTSQLRRHWGIEKTRDTYHHHAVDALIIAASSQLNLWKKQKNTLVSYSEDQLLDIETGELISDDEYKESVFKAPYQHFVDTLKSKEFEDSILFSYQVDSKFNRKISDATIYATRQAKVGKDKADETYVLGKIKDIYTQDGYDAFMKIYKKDKSKFLMYRHDPQTFEKVIEPILENYPNKQMNEKGKEVPCNPFLKYKEEHGYIRKYSKKGNGPEIKSLKYYDSKLGNHIDITPKDSNNKVVLQSVSPWRADIYFNNTTGKYEILGLKYADLQFEKGTGTYKISQEKYNDIKKKEGVDSDSEFKFTLYKNDLLLVKETETKEQQLFRFLSRTMPKQKHYVELKPYDKQKFEGGEALIKVLGNVANGGQCIKGLGKSNISIYKVRTDVLGNQHIIKNEGDKPKLDF

SEQ ID NO: 597 - protein, 1388 aa, Streptococcus thermophilus
MTKPYSIGLDIGTNSVGWAVITDNYKVPSKKMKVLGNTSKKYIKKNLLGVLLFDSGITAEGRRLKRTARRRYTRRRNRILYLQEIFSTEMATLDDAFFQRLDDSFLVPDDKRDSKYPIFGNLVEEKAYHDEFPTIYHLRKYLADSTKKADLRLVYLALAHMIKYRGHFLIEGEFNSKNNDIQKNFQDFLDTYNAIFESDLSLENSKQLEEIVKDKISKLEKKDRILKLFPGEKNSGIFSEFLKLIVGNQADFRKCFNLDEKASLHFSKESYDEDLETLLGYIGDDYSDVFLKAKKLYDAILLSGFLTVTDNETEAPLSSAMIKRYNEHKEDLALLKEYIRNISLKTYNEVFKDDTKNGYAGYIDGKTNQEDFYVYLKNLLAEFEGADYFLEKIDREDFLRKQRTFDNGSIPYQIHLQEMRAILDKQAKFYPFLAKNKERIEKILTFRIPYYVGPLARGNSDFAWSIRKRNEKITPWNFEDVIDKESSAEAFINRMTSFDLYLPEEKVLPKHSLLYETFNVYNELTKVRFIAESMRDYQFLDSKQKKDIVRLYFKDKRKVTDKDIIEYLHAIYGYDGIELKGIEKQFNSSLSTYHDLLNIINDKEFLDDSSNEAIIEEIIHTLTIFEDREMIKQRLSKFENIFDKSVLKKLSRRHYTGWGKLSAKLINGIRDEKSGNTILDYLIDDGISNRNFMQLIHDDALSFKKKIQKAQIIGDEDKGNIKEVVKSLPGSPAIKKGILQSIKIVDELVKVMGGRKPESIVVEMARENQYTNQGKSNSQQRLKRLEKSLKELGSKILKENIPAKLSKIDNNALQNDRLYLYYLQNGKDMYTGDDLDIDRLSNYDIDHIIPQAFLKDNSIDNKVLVSSASNRGKSDDFPSLEVVKKRKTFWYQLLKSKLISQRKFDNLTKAERGGLLPEDKAGFIQRQLVETRQITKHVARLLDEKFNNKKDENNRAVRTVKIITLKSTLVSQFRKDFELYKVCEINDFHHAHDAYLNAVIASALLKKYPKLEPEFVYGDYPKYNSFRERKSATEKVYFYSNIMNIFKKSISLADGRVIERPLIEVNEETGESVWNKESDLATVRRVLSYPQVNVVKKVEEQNHGLDRGKPKGLFNANLSSKPKPNSNENLVGAKEYLDPKKYGGYAGISNSFAVLVKGTIEKGAKKKITNVLEFQGISILDRINYRKDKLNFLLEKGYKDIELIIELPKYSLFELSDGSRRMLASILSTNNKRGEIHKGNQIFLSQKFVKLLYHAKRISNTINENHRKYVENHKKEFEELFYYILEFNENYVGAKKNGKLLNSAFQSWQNHSIDELCSSFIGPTGSERKGLFELTSRGSAADFEFLGVKIPRYRDYTPSSLLKDATLIHQSVTGLYETRIDLAKLGEG

SEQ ID NO: 598 - protein, 1128 aa, Streptococcus vestibularis
  REGION 1..1128: note = Streptococcus vestibularis ATCC 49124
MSDLVLGLDIGIGSVGVGILNKVTGEIIHKNSRIFPAAQAENNVERRTNRQGRRLTRRKKHRRVRLNHLFEESGLITDFTKVSINLNPYQLRVKGLIDELSNEELFIALKNMVKHRGISYLDDASDDGNSSVGDYAQIVKENSKQLETKTPGQIQLERYQKYGQLRGDFTVEEDGKKHRLINVFPTSAYRSEALRILQTQKEFNPQITDEFINRYLEILTGKRKYYHGPGNEKSRTDYGRYTTKKDSENEYITLDNIFGILIGKCTFYPEEYRAAKASYTAQEFNLLNDLNNLTVPTETKKLSEEQKNQIINYVKNEKAMGPAKLFKYIAKLLSCDVADIKGYRIDKSDKAEIHTFEAYRKMKTLETIDFEKMSRDQLDKLAYVLTLNTEREGIQEALDHEFADGNFSQEQIDELVQFRKANSSIFGKGWHNFSVKLMMELIPELYATSEEQMTILTRLGKQKTTSSSNKTKYIDEKLLTEEIYNPVVAKSVRQAIKIVNAAIKEYGDFDNIVIEMARETNEDDEKKAIQKIQKANKDEKDAAMLKAANQYNGRAELPHSVFHGHKQLATKIRLWHQQGERCLYTGKTISIHDLINNPNQFEIDHILPLSITFDDSLANKVLVYATANQEKGQRTPYQALDSMDDAWSFRELKAFVRESKSLSNKKKEYLLTEEDISRFDVRKKFIERNLVDTRYASRVVLNALQEHFRAHKTDTKVSVVRGQFTSQLRRHWGIEKTRDTYHHHAVDALIIAASSQLNLWKKQKNTLVNYSENQLLDIETGELISDDEYKESVFKAPYQHFVDTLKSKEFEDSILFSYQVDSKFNRKISDATIYATRQAKVGKDKKDETYVLGKIKDIYSQTGYDAFIKIYQKDKSKFLMYRHDPQTFEKVIEPILENYPNKEMNEKGKEVPCNPFLKYKEEHGDYIRKYSKKGNGPEIKSLKYYDSKLGNHIDITPKDSNNKVVLQSVSPWRADVYFNKTTGKYEILGLKYADLQFEKGTGTYKISQEKYNVIKKKEGVDSDSEFKFTLYKNDLLLIKDTETKEQQLFRFLSRTKPNVKHYVELKPYDKQKFEGNESLINVLGAVAKGGQCQKGINKPNISIYKVRTDVLGNQHIIKNEGDKPKLDF

SEQ ID NO: 599 - protein, 1084 aa, unidentified
  REGION 1..1084: note = Subdoligranulum sp. 4_3_54A2FAA
  source 1..1084: note = Subdoligranulum sp.
MKNTLYGIGLDIGVASVGWAVVGLNGTGEPVGLHRLGVRIFDKAEQPKTGESLAAPRRMARGMRRRLRRKALRRADVYALLERSGLSTREELAQMFEAGGLEDIYALRTRALDEPVGKAEFSRILLHLAQRRGFKSNRRTASDGEDGRLLAAVNENRRRMAQGGWRTVGEMLYRHEAFALHKRNKADDYLSTVGRDMVAEEASILFERQRAMGCSWAAPELQAEYLSILLRQRSFDEGPGGNSPYGGNQVEKMVGRCTFEPDEPRAAKAAYSFEYFSLLQKLNHIRLAENGETRPLTQPQRQQLLSLAHKTPDISLARIRKELALPETVQFNGVRCRANETLEESEKKEKFACLPAYHKMRKALDGVVKGRISSLSISQRDAAATALSLYKNEDTLRAKLTEAGFQAPEIDALAGLTGFSKFGHLSLKACRKLIPHLEQGLTYDQACTAAGYDFKGHGAGERAFTLPAAAPEMEQITSPVVRRAVAQTIKVVNGIIREMDASPAWVRIELARELSKTFGERQEMDRSMRENAAQNERLMQELRDTFHLLSPTGQDLVKYRLWKEQDGVCAYSLRRLDVERLFEPGYVDVDHIVPYSLSFDDRRSNKVLVLSSENRQKGNRLPLQYLQGKRREDFIVWTNSSVHDYRKRQNLLREKLSGDEAEGFRQRNLQDTQHMARFLYNYISDHLAFAQSEALGKKRVFAVSGAVTSHLRKRWGLSKVRADGDLHHALDAAVVACTTDGMIRRISGYYGHIEGEYLQDADGAGSQHARTKERFPAPWPRFRDELIVRLSEQPAEPLLDINPEFYCEYGTEHIRPVFVSRMPRRKVTGPGHKETIKGAAAADEGLLTVRKALTELKLDKDGEIKDYYMPSSDTLLYEALKAQLRRFGGDGKKAFAEPFYKPKADGTPGPLVRKVKTTEKATLTVPVHGGAASNDTMVRVDVFLVPGDGYYWVPVYTADTLKPELPNRAVVQGKPYSEWKEMREEDFIFSLYPNDLVYVEHKSGLKFTLQNADSTLEKTRTQTSAFAYFVSGSISTASITIRTHDNAYGIPSLGVKTLKTFHKYQVDVLGNVFPVHKETRQKFR

SEQ ID NO: 600 - protein, 1422 aa, Sutterella wadsworthensis
  REGION 1..1422: note = Sutterella wadsworthensis 3_1_45B
MTQSERRFSCSIGIDMGAKYTGVFYALFDREELPTNLNSKAMTLVMPETGPRYVQAQRTAVRHRLRGQKRYTLARKLAFLVVDDMIKKQEKRLTDEEWKRGREALSGLLKRRGYSRPNADGEDLTPLENVRADVFAAHPAFSTYFSEVRSLAEQWEEFTANISNVEKFLGDPNIPADKEFIEFAVAEGLIDKTEKKAYQSALSTLRANANVLTGLRQMGHKPRSEYFKAIEADLKKDSRLAKINEAFGGAERLARLLGNLSNLQLRAERWYFNAPDIMKDRGWEPDRFKKTLVRAFKFFHPAKDQNKQHLELIKQIENSEDIIETLCTLDPNRTIPPYEDQNNRRPPLDQTLLLSPEKLTRQYGEIWKTWSARLTSAEPTLAPAAEILERSTDRKSRVAVNGHEPLPTLAYQLSYALQRAFDRSKALDPYALRALAAGSKSNKLTSARTALENCIGGQNVKTFLDCARRYYREADDAKVGLWFDNADGLLERSDLHPPMKKKILPLLVANILQTDETTGQKFLDEIWRKQIKGRETVASRCARIETVRKSFGGGFNIAYNTAQYREVNKLPRNAQDKELLTIRDRVAETADFIAANLGLSDEQKRKFANPFSLAQFYTLIETEVSGFSATTLAVHLENAWRMTIKDAVINGETVRAAQCSRLPAETARPFDGLVRRLVDRQAWEIAKRVSTDIQSKVDFSNGIVDVSIFVEENKFEFSASVADLKKNKRVKDKMLSEAEKLETRWLIKNERIKKASRGTCPYTGDRLAEGGEIDHILPRSLIKDARGIVFNAEPNLIYASSRGNQLKKNQRYSLSDLKANYRNEIFKTSNIAAITAEIEDVVTKLQQTHRLKFFDLLNEHEQDCVRHALFLDDGSEARDAVLELLATQRRTRVNGTQIWMIKNLANKIREELQNWCKTTNNRLHFQAAATNVSDAKNLRLKLAQNQPDFEKPDIQPIASHSIDALCSFAVGSADAERDQNGFDYLDGKTVLGLYPQSCEVIHLQAKPQEEKSHFDSVAIFKEGIYAEQFLPIFTLNEKIWIGYETLNAKGERCGAIEVSGKQPKELLEMLAPFFNKPVGDLSAHATYRILKKPAYEFLAKAALQPLSAEEKRLAALLDALRYCTSRKSLMSLFMAANGKSLKKREDVLKPKLFQLKVELKGEKSFKLNGSLTLPVKQDWLRICDSPELADAFGKPCSADELTSKLARIWKRPVMRDLAHAPVRREFSLPAIDNPSGGFRIRRTNLFGNELYQVHAINAKKYRGFASAGSNVDWSKGILFNELQHENLTECGGRFITSADVTPMSEWRKVVAEDNLSIWIAPGTEGRRYVRVETTFIQASHWFEQSVENWAITSPLSLPASFKVDKPAEFQKAVGTELSELLGQPRSEIFIENVGNAKHIRFWYIVVSSNKKMNESYNNVSKS

SEQ ID NO: 601 - protein, 1049 aa, Tistrella mobilis
MINERLTFGIDLGIGSCGWAVLRHADAAGEPGVIEGLGSWCFDVPETSKERIPTNQVRRSNRLLRRVIRRRRNRMAEIRRLFHAQGLLPSADEDALKRPRLDPWELRARGLDQCLSAEEFAVALGHIARHRGFRSSAKRKAANTSGEDSKMLSALLVTRERTARYRTVGEMFARDPEYSARRRNRDGIFDRTVARDDLIHEVGKLFEAQRARGSAFASPDLEADFNAIAFRQAEMQDSERLVGNCPFERDEKRAARWAPSFERFRLLTRLINLRIATAEGERRFTPEDLARVSAELGATAKLPVSRVRALIGLLPDERFTTIRVEDEDRDIVARTGEAAPGTWRLRKTLGEALWAEMQARPDQLDAIAHVLSFFEATAKIRSELDRLGLPAAVIEALDRGLEDGAFAKFKGAGHISAKACRNLLPHLQQGHRYDQACRLAGYDHAASTLSHTAQVVSKAGFNALVTELGESIANPIARKALTEGLKQIRAMCARWGLPGAIHIELAREVGNSIEKRRELESQRETTTKRRQTERDEIRGLLALEDVDDDTLLRYRLWKEQGGKCLYTGKDIHVRQLIATDNSVQVDHILPWSRFGDDSFNNKTLCLASANQRKRGQTPWEWFSLTGTPEAWEVFASRVETSKDLRGFKKRNLLLKNADEVAQRFRSRNLNDTRYAARLLAEAAKLFYPAGDRQEKDGRRRVLTRPGPLTAALRHAWGLESLKKADGKRVSDDRHHALDALAVAAISEREVQRLTRSFQEWEQQGLARPLRHVAPPWPGFRGDVLAAYAQAFVARPERRRARGKGHDASIRQVVGEGPEAQVFERRGLADLKEADLDRVKDPERNQAIIEAVRAWILAGRPADAPPRSPRGDVIVKLRTAPAKKIKPAVPVRGGTADRGDMVRIDVFTRPNRKGRDEWYLVPIYPHQVMNRKAWPHPPMRSVVAYKDEAGWTEIGAEHSFRFSLYPRSYVQLVKSNGDVIEGYLVSMDRSTGAFRVFVHNNPAEMAKGIGAKTLLNLRKFNVDRFGVRTEVKSEVRTWHGEVCTSPVPPD

SEQ ID NO: 602 - protein, 1395 aa, Treponema denticola
  REGION 1..1395: note = Treponema denticola AL-2
MKKEIKDYFLGLDVGTGSVGWAVTDTDYKLLKANRKDLWGMRCFETAETAEVRRLHRGARRRIERRKKRIKLLQELFSQEIAKIDEGFFQRMKESPFYAEDKTILQENALFNDKDFTDKTYHKAYPTINHLIKAWIENKVKPDPRLLYLACHNIIKKRGHFLFEGDFDSENQFDTSIQALFEYLREDMEVDIDADSQKVKEILKDSSLKNSEKQSRLNKILGLKPSDKQKKAITNLISGNKINFADLYDNPDLKDAEKNSISFSKDDFDALSDDLASILGDSFELLLKAKAVYNCSVLSKVIGDEQYLSFAKVKIYEKHKTDLTKLKAVIKKHFPNNYKKVFGYNQDNESKNNYSGYVGVCKTKNKKLVINNSVNQEDFYKFLKPILSAKSEIKEVNDILAEIETGNFLPKQISKSNAEIPYQLRKMELEKILSNAEKHFSFLKQKDEKGLSHSEKIIMLLTFKIPYYIGPINDNHKKSFPDRCWVVKKEKSPSGKTTPWNFFDHIDKEKTAEEFITSRTNFCTYLIGESVLPKNSLLYSEYTVLNEINNLQIIIDGKNICDTKLKQKIYEDLFKKYKKITQKQISTFIKHEGICNKTDEVIILGIDKECTSSLKSYIELKNIFGKQVDEISTKNMLEEIIRWATIYDEGEGKTILKTKIKAEYGKYCSDEQIKKILNLKFSGWGRLSRKFLETVTSEMPGFSEPVNIITAMRETQNNLMELLSSEFKFTENIKKINSGFEDAEKQFSYDGLVKPLFLSPSVKKMLWQTLKLVKEISHITQAPPKKIFIEMAKGAELEPARTKTRLKILQDLYSSCKNDADAFSSEIQYLSGKIENEDNLRLRSDKLYLYYTQLGKCMYCGKPIEIGHVFDTSNYDIDHIYPQSKIKDDSISNRVLVCSSCNKNKEDKYPLKSEIQSKQRGFWNFLQRNNFISLEKLNRLTRTTPISDDETAKFIARQLVETRQATKVAAKVLEKMFPETKIVYSKAETVSMFRNKFDIIKCREINDFHHAHDAYLNIVVGNVYNTKFTNNPWNFIKEKRDNPKIADTYNYYKVFDYDVKRNNITAWEKGKTIITVKDMLKRNTPIYTRQAACKKGGLFDQTIMKKGLGQHPLKKEGPFSNISKYGGYNKVSAAYYTLIEYEEKGNKIRSLETIPLYLVKDIQKDQDVLKSYLTDLLGKKEFKILVPKIKINSLLKINGFPCHITGKTNDSFLLRPAVQFCCSNDEVLYFKKIIRFSEIRSQREKIGKTISPYEDLSFRSYIKENLCKKTKNDEIGEKEFYDLLQKKNLEIYDMLLTKHKDTIYKKRPNSATIDILVKGKEKFKSLIIENQFEVILEILKLFSATRNVSELQHIGGSKYSGVAKIGNKISSLDNCILIYQSITGIFEKRIDLLKV

SEQ ID NO: 603 - protein, 1395 aa, Treponema denticola
  REGION 1..1395: note = Treponema denticola ASLM
MKKEIKDYFLGLDVGTGSVGWAVTDTDYKLLKANRKDLWGMRCFETAETAEVRRLHRGARRRIERRKKRIKLLQELFSQEIAKIDEGFFQRMKESPLYAEDKTILQENTLFNDKDFTDKTYHKAYPTINHLIKAWIENKVKPDPRLLYLACHNIIKKRGHFLFEGDFDSENQFDTSIQALFEYLREDMEVDIDADSQKVKEILKDSSLKNSEKQSRLNKMLGLKPSDKQKKAITNLISGNKINFADLYDNPDLKDAEKNSISFSKDDFDALSDDLASILGDSFELLLKAKAVYNCSVLSKVIGDEQYLSFAKVKIYEKHKTDLTKLKNVIKKHFPKDYKKVFGYNKNEKNNNNYSGYVGVCKTKSKKLIINNSVNQEDFYKFLKTILSAKSEIKEVNDILTEIETGTFLPKQISKSNAEIPYQLRKMELEKILSNAEKHFSFLKQKDEKGLSHSEKIIMLLTFKIPYYIGPINDNHKKSFPDRCWVVKKEKSPSGKTTPWNFFDHIDKEKTAEEFITSRTNFCTYLIGESVLPKNSLLYSEYTVLNEINNLQIIIDGKNICDTKLKQKIYEELFKKYKKITQKQISTFIKHEGICNKTDEVIILGIDKECTSSLKSYIELKNIFGKQVDEISTKNMLEEIIRWATIYDEGEGKTILKTKIKAEYGKYCSDEQIKKILNLKFSGWGRLSRKFLETVTSEMPGFSEPVNIITAMRETQNNLMELLSSEFKFTENIKKINSGFEDVEKQFSYDGLVKPLFLSPSVKKMLWQTLKLVKEISHITQAPPKKIFIEMAKGAELDPVRTKTRLKILQDLYNNCKNDADAFSSEIKDLSGKIENEDNLRLRSDKLYLYYTQLGKCMYCGKPIEIGHVFDTSNYDIDHIYPQSKIKDDSISNRVLVCSSCNKNKEDKYPLKAEIQSKQRGFWNFLQRNNFISLEKFNRLTRATPISDDETAKFIARQLVETRQATKVAARVLEKMFPETKIVYSKAETVSMFRNKFDIVKCREINDFHHAHDAYLNIVVGNVYNTKFTNNLWNFIKEKRDNPKIADTYNYYKVFDYDVKRNNITAWEKGKTIITVKDMLKRNTPIYTRQAACKKGGLFDQTIMKKGLGQHPLKKEGPFSNISKYGGYNKVSAAYYTLIEYEEKGNKIRSLETIPLYLVKDIQKDQDVLKSYLTDLLGKKEFKILVPKIKINSLLKINGFPCHITGKTNDSFLLRPAVQFCCSNDEVLYFKKIIRFSEIRSQREKIGKTISPYEDLSFRSYIKENLCKKTKNDEIGEKEFYDLLQKKNLEIYDMLLTKHKDTIYKKRPNSATIDILVKGKEKFKSLIIENQFEVILEILKLFSATRNVSDLQHIGGSKYSGVAKIGNKISSLDNCILIYQSITGIFEKRIDLLKV

SEQ ID NO: 604 - protein, 1395 aa, Treponema denticola
  REGION 1..1395: note = Treponema denticola ATCC 35405
MKKEIKDYFLGLDVGTGSVGWAVTDTDYKLLKANRKDLWGMRCFETAETAEVRRLHRGARRRIERRKKRIKLLQELFSQEIAKTDEGFFQRMKESPFYAEDKTILQENTLFNDKDFADKTYHKAYPTINHLIKAWIENKVKPDPRLLYLACHNIIKKRGHFLFEGDFDSENQFDTSIQALFEYLREDMEVDIDADSQKVKEILKDSSLKNSEKQSRLNKILGLKPSDKQKKAITNLISGNKINFADLYDNPDLKDAEKNSISFSKDDFDALSDDLASILGDSFELLLKAKAVYNCSVLSKVIGDEQYLSFAKVKIYEKHKTDLTKLKNVIKKHFPKDYKKVFGYNKNEKNNNNYSGYVGVCKTKSKKLIINNSVNQEDFYKFLKTILSAKSEIKEVNDILTEIETGTFLPKQISKSNAEIPYQLRKMELEKILSNAEKHFSFLKQKDEKGLSHSEKIIMLLTFKIPYYIGPINDNHKKFFPDRCWVVKKEKSPSGKTTPWNFFDHIDKEKTAEAFITSRTNFCTYLVGESVLPKSSLLYSEYTVLNEINNLQIIIDGKNICDIKLKQKIYEDLFKKYKKITQKQISTFIKHEGICNKTDEVIILGIDKECTSSLKSYIELKNIFGKQVDEISTKNMLEEIIRWATIYDEGEGKTILKTKIKAEYGKYCSDEQIKKILNLKFSGWGRLSRKFLETVTSEMPGFSEPVNIITAMRETQNNLMELLSSEFTFTENIKKINSGFEDAEKQFSYDGLVKPLFLSPSVKKMLWQTLKLVKEISHITQAPPKKIFIEMAKGAELEPARTKTRLKILQDLYNNCKNDADAFSSEIKDLSGKIENEDNLRLRSDKLYLYYTQLGKCMYCGKPIEIGHVFDTSNYDIDHIYPQSKIKDDSISNRVLVCSSCNKNKEDKYPLKSEIQSKQRGFWNFLQRNNFISLEKLNRLTRATPISDDETAKFIARQLVETRQATKVAAKVLEKMFPETKIVYSKAETVSMFRNKFDIVKCREINDFHHAHDAYLNIVVGNVYNTKFTNNPWNFIKEKRDNPKIADTYNYYKVFDYDVKRNNITAWEKGKTIITVKDMLKRNTPIYTRQAACKKGELFNQTIMKKGLGQHPLKKEGPFSNISKYGGYNKVSAAYYTLIEYEEKGNKIRSLETIPLYLVKDIQKDQDVLKSYLTDLLGKKEFKILVPKIKINSLLKINGFPCHITGKTNDSFLLRPAVQFCCSNNEVLYFKKIIRFSEIRSQREKIGKTISPYEDLSFRSYIKENLWKKTKNDEIGEKEFYDLLQKKNLEIYDMLLTKHKDTIYKKRPNSATIDILVKGKEKFKSLIIENQFEVILEILKLFSATRNVSDLQHIGGSKYSGVAKIGNKISSLDNCILIYQSITGIFEKRIDLLKV

SEQ ID NO: 605 - protein, 1395 aa, Treponema denticola
  REGION 1..1395: note = Treponema denticola H1-T
MKKEIKDYFLGLDVGTGSVGWAVTDTDYKLLKANRKDLWGMRCFETAETAEVRRLHRGARRRIERRKKRIKLLQELFSQEIAKIDEGFFQRMKESPFYAEDKTILQENALFNDKDFTDKTYHKAYPTINHLIKAWIENKVKPDPRLLYLACHNIIKKRGHFLFEGDFDSENQFDTSIQALFEYLREDMEVDIDADSQKVKEILKDSSLKNSEKQSRLNKILGLKPSDKQKKAITNLISGNKINFADLYDNPDLKDAEKNSISFSKDDFDALSDDLASILGDSFELLLKAKAVYNCSVLSKVIGDEQYLSFAKVKIYEKHKTDLTKLKAVIKKHFPNNYKKVFGYNQDNESKNNYSGYVGVCKTKNKKLVINNSVNQEDFYKFLKPILSAKSEIKEVNDILAEIETGNFLPKQISKSNAEIPYQLRKMELEKILSNAEKHFSFLKQKDEKGLSHSEKIIMLLTFKIPYYIGPINDNHKKSFPDRCWVVKKEKSPSGKTTPWNFFDHIDKEKTAEEFITSRTNFCTYLIGESVLPKNSLLYSEYTVLNEINNLQIIIDGKNICDTKLKQKIYEDLFKKYKKITQKQISTFIKHEGICNKTDEVIILGIDKECTSSLKSYIELKNIFGKQVDEISTKNMLEEIIRWATIYDEGEGKTILKTKIKAEYGKYCSDEQIKKILNLKFSGWGRLSRKFLETVTSEMPGFSEPVNIITAMRETQNNLMELLSSEFKFTENIKKINSGFEDAEKQFSYDGLVKPLFLSPSVKKMLWQTLKLVKEISHITQAPPKKIFIEMAKGAELEPARTKTRLKILQDLYSSCKNDADAFSSEIQYLSGKIENEDNLRLRSDKLYLYYTQLGKCMYCGKPIEIGHVFDTSNYDIDHIYPQSKIKDDSISNRVLVCSSCNKNKEDKYPLKSEIQSKQRGFWNFLQRNNFISLEKLNRLTRTTPISDDETAKFIARQLVETRQATKVAAKVLEKMFPETKIVYSKAETVSMFRNKFDIIKCREINDFHHAHDAYLNIVVGNVYNTKFTNNPWNFIKEKRDNPKIADTYNYYKVFDYDVKRNNITAWEKGKTIITVKDMLKRNTPIYTRQAACKKGELFNQTIMKKGLGQHPLKKEGPFSNISKYGGYNKVSAAYYTLIEYEEKVNKIRSLETIPLYLVKDIQKDQDVLKSYLTDLLGKKEIKILVPKIKINSLLKINGFPCHITGKTGDSFVLRPAVQFCCSNDEVLYFKKIIRFNEIRSQREKMGKTISPYEDLSFRSYIKENLCKKTKADEIGEKEFYDLLQKKNLEIYDMLLTKHKDTIYNKRPNSTTLGMLTKGRYEFINLKPKDQIIVMLEILKLFCTTREAIDLGLIKGKPAAGVATLGKKISNLDNCILIYQSITGIFEKRIDLLKV

SEQ ID NO: 606 - protein, 1395 aa, Treponema denticola
  REGION 1..1395: note = Treponema denticola H-22
MKKEIKDYFLGLDVGTGSVGWAVTDTDYKLLKANRKDLWGMRCFETAETAEVRRLHRGARRRIERRKKRIKLLQELFSQEIAKIDEGFFQRMKESPFYAEDKTILQENTLFNDKDFTDKTYHKAYPTINHLIKAWIENKVKPDPRLLYLACHNIIKKRGHFLFEGDFDSENQFDTSIQALFEYLREDMEVDIDADSQKVKEILKDSSLKNSEKQSRLNKILGLKPSDKQKKAITNLISGNKINFADLYDNPDLKDAEKNSISFSKDDFDALSDDLASILGDSFELLLKAKAVYNCSVLSKVIGDEQYLSFAKVKIYEKHKTDLTKLKNVIKKHFPKDYKKVFGYNKNEKNNNNYSGYVGVCKTKSKKLIINNSVNQEDFYKFLKTILSAKSEIKEVNDILTEIETGTFLPKQISKSNAEIPYQLRKMELEKILSNAEKHFSFLKQKDEKGLSHSEKIIMLLTFKIPYYIGPINDNHKKSFPDRCWVIKKEKSPSGKTTPWNFFDHIDKDKTAEAFITSRTNFCTYLVGESVLPKSSLLYSEYTVLNEINNLQIIIDGKNICDIKLKQKIYEELFKKYKKITQKQISTFIKHEGICNKTDEVIILGIDKECTSSLKSYIELKNIFGKQVDEISTKNMLEEIIRWATIYDEGEGKTILKTKIKAEYGKYCSDEQIKKILNLKFSGWGRLSRKFLETVTSEMPGFSEPVNIITAMRETQNNLMELLSSEFKFTENIKKINSGFEDAEKQFSYNGLVKPLFLSPSVKKMLWQTLKLVKEISHITQAPPKKIFIEMAKGAELEPARTKTRLKILQDLYNNCKNDADAFSSEIKDLSGKIENEDNLRLRSDKLYLYYTQLGKCMYCGKPIEIGHVFDTSNYDIDHIYPQSKIKDDSISNRVLVCSSCNKNKEDKYPLKSEIQSKQRGFWNFLQRNNFISLEKLNRLTRTTPISDDETAKFIARQLVETRQATKVAAKVLEKMFPETKIVYSKAETVSMFRNKFDIIKCREINDFHHAHDAYLNIVVGNVYNTKFTNNPWNFIKEKRDNPKIADTYNYYKVFDYDVKRNNITAWEKGKTIITVKDMLKRNTPIYTRQAACKKGGLFDQTIMKKGLGQHPLKKEGAFSNISKYGGYNKVSAAYYTLIEYEEKGNKIRSLETIPLYLVKDIQKDQDVLKSYLTDLLGKKEIKILVPKIKINSLLKINGFPCHITGKTGDSFVLRPAVQFCCSNDEVLYFKKIIRFNEIRSQREKMGKTISPYEDLSFRSYIKENLCKKTKADEIGEKEFYDLLQKKNLEIYDMLLTKHKDTIYNKRPNSTTLGMLTKGRYEFINLKPKDQIIVMLEILKLFCTTREAIDLGLIKGKPAAGVATLGKKISNPDNCILIYQSITGIFEKRIDLLKV

SEQ ID NO: 607 - protein, 1395 aa, Treponema denticola
  REGION 1..1395: note = Treponema denticola OTK
MKKEIKDYFLGLDVGTGSVGWAVTDTDYKLLKANRKDLWGMRCFETAETAEVRRLHRGARRRIERRKKRIKLLQELFSQEIAKIDEGFFQRMKESPLYAEDKTILQENTLFNDKDFTDKTYHKAYPTINHLIKAWIENKVKPDPRLLYLACHNIIKKRGHFLFEGDFDSENQFDTSIQALFEYLREDMELDIDADSQKVKEILKDSSLKNSEKQSRLNKMLGLKPSDKQKKAITNLISGNKINFADLYDNPDLKDAEKNSISFSKDDFDALSDDLASILGDSFELLLKAKAVYNCSVLSKVIGDEQYLSFAKVKIYEKHKTDLTKLKNVIKKHFPKDYKKVFGYNKNEKNNNNYSAYVGVCKITHKKLVIKNSASQEDFYKFLKTILSAKSEIKEVNDILTEIETGTFLPKQISKSNAEIPYQLRKMELEKILSNAEKHFSFLKQKDEKGLSHSEKIIMLLTFKIPYYIGPINDNHKKSFPDRCWVVKKEKSPSGKTTPWNFFDHIDKEKTAEEFITSRTNFCTYLIGESVLPKSSLLYSEYTVLNEINNLQIIIDGKNICDIKLKQKIYEELFKKYKKITQKQISTFIKHEGICNKTDEVIILGIDKECTSSLKSYIELKNIFGKQVDEISTKNMLEEIIRWATIYDEGEGKTILKTKIKAEYGKYCSDEQIKKILNLKFSGWGRLSRKFLETVTSEMPGFSEPVNIITAMRETQNNLMELLSSEFKFTENIKKINSGFEDAEKQFSYNGLVKPLFLSPSVKKMLWQTLKLVKEISHITQAPPKKIFIEMAKGAELEPARTKTRLKILQDLYSSCKNDADAFSSEIQYLSGKIENEDNLRLRSDKLYLYYTQLGKCMYCGKPIEIGHVFDTSNYDIDHIYPQSKIKDDSISNRVLVCSSCNKNKEDKYPLKAEIQSKQRGFWNFLQRNNFISLEKLNRLTRTSPISDDETAKFIARQLVETRQATKVAAKVLEKMFPETKIVYSKAETVSMFRNKFDIIKCREINDFHHAHDAYLNIVVGNVYNTKFTNNPWNFIKEKRDNPKIADTYNYYKVFDYDVKRNNITAWEKGKTIITVKDMLKRNTPIYTRQAACKKGELFNQTIMKKGLGQHPLKKEGPLSNISKYGGYNKVSAAYYTLIEYEEKGSKIRSLETIPLYLVKDIQKNKDGLKSYLTDQIGKKEIKILIPKIKINSLLKINGFPCHITGKMGEAFVLRPAVQFCCSNDEALYFKKIIRFNEIRKQREKMGKTISPYEDLSFRSYIKDNLCKKTKADEIEEKEFYDLLQKKNLEIYDMLLTKHKDTIYKKRPNSATIDILVKGKEKFKSLIIENQFEVILEILKLFSATRNVSDLQHIGGSKNAGNARVGNKISSLDNCILIYQSITGIFEKRIDLLKI

SEQ ID NO: 608 - protein, 1395 aa, Treponema denticola
  REGION 1..1395: note = Treponema denticola SP37
MKKEIKDYFLGLDVGTGSVGWAVTDTDYKLLKANRKDLWGMRCFETAETAEVRRLHRGARRRIERRKKRIKLLQELFSQEIAKTDEGFFQRMKESPFYAEDKTILQENALFNDRDFTDKTYHKAYPTINHLIKAWIENKVKPDPRLLYLACHNIIKKRGHFLFEGDFDSENQFDTSIQALFEYLREDMEVDIDADSQKVKEILKDSSLKNSEKQSRLNKMLGLKPSDKQKKAITNLISGNKINFADLYDNPDLKDAEKNSISFSKDDFDALSDDLASILGDSFELLLKAKAVYNCSVLSKVIGDEQYLSFAKVKIYEKHKTDLTKLKNVIKKHFPNDYKKVFGYNKNEKNNNNYSAYVGVCKTKSKKLVINNTVNQEDFYKFLKPILLAKSEIKEVNDILTEIETGTFLPKQISKSNAEIPYQLRKMELEKILSNAEKHFSFLKQKDEKGLSHSEKIIMLLTFKIPYYIGPINDNHKKSFPDRCWVIKKEKSPSGKTTPWNFFDHIDKDKTAEAFITSRTNFCTYLVGESVLPKNSLLYSEYTVLNEINNLQIIIDGKNICDIKLKQKIYEELFKKYKKITQKQISTFIKHEGICNKTDEVIILGIDKECTSSLKSYIELKNIFGKQVDEISTKNMLEEIIRWATIYDEGEGKTILKTKIKAEYGKYCSDEQIKKILNLKFSGWGRLSRKFLETVTSEMPGFSEPVNIITAMRETQNNLMELLSSEFKFTENIKKINSGFEDVEKQFSYDSLVKPLFLSPSVKKMLWQTLKLVKEISHITQAPPKKIFIEMAKGAELDPVRTKTRLKILQDLYNNCKNDADAFSSEIKDLSGKIENEDNLRLRSDKLYLYYTQLGKCMYCGKPIEIGHVFDTSNYDIDHIYPQSKIKDDSISNRVLVCSSCNKNKEDKYPLKAEIQSKQRGFWNFLQRNNFISLEKLNRLTRTSPISDDETAKFIARQLVETRQATKVAAKVLEKMFPETKIVYSKAETVSMFRNKFDIIKCREINDFHHAHDAYLNIVVGNVYNTKFTNNPWNFIKEKRDNPKIADTYNYYKVFDYDVKRNNITAWEKGKTIITVKDMLKRNTPIYTRQAACKKGELFNQTIMKKGLGQHPLKKEGPLSNISKYGGYNKVSAAYYTLIEYEEKGSKIRSLETIPLYLVKDIQKNKDGLKSYLTDQIGKKEIKILIPKIKINSLLKINGFPCHITGKMGEAFVLRPAVQFCCSNDEALYFKKIIRFNEIRKQREKMGKTISPYEDLSFRSYIKDNLCKKTKADEIEEKEFYDLLQKKNLEIYDMLLTKHKDTIYKKRPNSATIDILVKGKEKFKSLIIENQFEVILEILKLFSATRNVSDLQHIGGSKNAGNARVGNKISSLDNCILIYQSITGIFEKRIDLLKI

SEQ ID NO: 609 - protein, 1062 aa, unidentified
  REGION 1..1062: note = Treponema sp. JC4
  source 1..1062: note = Treponema sp.
MIMKLEKWRLGLDLGTNSIGWSVFSLDKDNSVQDLIDMGVRIFSDGRDPKTKEPLAVARRTARSQRKLIYRRKLRRKQVFKFLQEQGLFPKTKEECMTLKSLNPYELRIKALDEKLEPYELGRALFNLAVRRGFKSNRKDGSREEVSEKKSPDEIKTQADMQTHLEKAIKENGCRTITEFLYKNQGENGGIRFAPGRMTYYPTRKMYEEEFNLIRSKQEKYYPQVDWDDIYKAIFYQRPLKPQQRGYCIYENDKERTFKAMPCSQKLRILQDIGNLAYYEGGSKKRVELNDNQDKVLYELLNSKDKVTFDQMRKALCLADSNSFNLEENRDFLIGNPTAVKMRSKNRFGKLWDEIPLEEQDLIIETIITADEDDAVYEVIKKYDLTQEQRDFIVKNTILQSGTSMLCKEVSEKLVKRLEEIADLKYHEAVESLGYKFADQTVEKYDLLPYYGKVLPGSTMEIDLSAPETNPEKHYGKISNPTVHVALNQTRVVVNALIKEYGKPSQIAIELSRDLKNNVEKKAEIARKQNQRAKENIAINDTISALYHTAFPGKSFYPNRNDRMKYRLWSELGLGNKCIYCGKGISGAELFTKEIEIEHILPFSRTLLDAESNLTVAHSSCNAFKAERSPFEAFGTNPSGYSWQEIIQRANQLKNTSKKNKFSPNAMDSFEKDSSFIARQLSDNQYIAKAALRYLKCLVENPSDVWTTNGSMTKLLRDKWEMDSILCRKFTEKEVALLGLKPEQIGNYKKNRFDHRHHAIDAVVIGLTDRSMVQKLATKNSHKGNRIEIPEFPILRSDLIEKVKNIVVSFKPDHGAEGKLSKETLLGKIKLHGKETFVCRENIVSLSEKNLDDIVDEKIKSKVKDYVAKHKGQKIEAVLSDFSKENGIKKVRCVNRVQTPIEITSGKISRYLSPEDYFAAVIWEIPGEKKTFKAQYIRRNEVEKNSKGLNVVKPAVLENGKPHPAAKQVCLLHKDDYLEFSDKGKMYFCRIAGYAATNNKLDIRPVYAVSYCADWINSTNETMLTGYWKPTPTQNWVSVNVLFDKQKARLVTVSPIGRVFRK

SEQ ID NO: 610 - protein, 1011 aa, unidentified
  REGION 1..1011: note = Description of Unknown: uncultured delta proteobacterium HF0070_07E19 polypeptide
MSSKAIDSLEQLDLFKPQEYTLGLDLGIKSIGWAILSGERIANAGVYLFETAEELNSTGNKLISKAAERGRKRRIRRMLDRKARRGRHIRYLLEREGLPTDELEEVVVHQSNRTLWDVRAEAVERKLTKQELAAVLFHLVRHRGYFPNTKKLPPDDESDSADEEQGKINRATSRLREELKASDCKTIGQFLAQNRDRQRNREGDYSNLMARKLVFEEALQILAFQRKQGHELSKDFEKTYLDVLMGQRSGRSPKLGNCSLIPSELRAPSSAPSTEWFKFLQNLGNLQISNAYREEWSIDAPRRAQIIDACSQRSTSSYWQIRRDFQIPDEYRFNLVNYERRDPDVDLQEYLQQQERKTLANFRNWKQLEKIIGTGHPIQTLDEAARLITLIKDDEKLSDQLADLLPEASDKAITQLCELDFTTAAKISLEAMYRILPHMNQGMGFFDACQQESLPEIGVPPAGDRVPPFDEMYNPVVNRVLSQSRKLINAVIDEYGMPAKIRVELARDLGKGRELRERIKLDQLDKSKQNDQRAEDFRAEFQQAPRGDQSLRYRLWKEQNCTCPYSGRMIPVNSVLSEDTQIDHILPISQSFDNSLSNKVLCFTEENAQKSNRTPFEYLDAADFQRLEAISGNWPEAKRNKLLHKSFGKVAEEWKSRALNDTRYLTSALADHLRHHLPDSKIQTVNGRITGYLRKQWGLEKDRDKHTHHAVDAIVVACTTPAIVQQVTLYHQDIRRYKKLGEKRPTPWPETFRQDVLDVEEEIFITRQPKKVSGGIQTKDTLRKHRSKPDRQRVALTKVKLADLERLVEKDASNRNLYEHLKQCLEESGDQPTKAFKAPFYMPSGPEAKQRPILSKVTLLREKPEPPKQLTELSGGRRYDSMAQGRLDIYRYKPGGKRKDEYRVVLQRMIDLMRGEENVHVFQKGVPYDQGPEIEQNYTFLFSLYFDDLVEFQRSADSEVIRGYYRTFNIANGQLKISTYLEGRQDFDFFGANRLAHFAKVQVNLLGKVIK

SEQ ID NO: 611 - protein, 1032 aa, unidentified
  REGION 1..1032: note = Description of Unknown: uncultured Termite group 1 bacterium phylotype Rs-D17 polypeptide
MLYHIANHRGTDSVRSFLEYDDDKIKENTLTAKIAKETKKVIDAKKYRTFGEYLYKGKIEKFQQNIRKKVSNRKTPANKNKEFAVTRDVIIKETEKILASQKQYYTYILTDEYIKKIKDAISYQTEKLIPESGYCPYFKDEKRLPRSHKLNEYRRMYEALNNAKYFDPVLDENTGEILSYQEKEFSREEKKILFDEVLLKGMELTESGAKKLLYHLPDGCEVQLQGRDKTTQKIKGYALVDLEASPFWLRLSQQQQDEFLYDWNSLPLEKLKPKLTNYYSLTESEVDETFQEIKLPSNYASVGKKAMEILLTYIKDGCSYTEALEKAVSEGKLKVDKQTMIYDSLPYYGKILKESTQKLIGKAFSKQFADRNYKEPDTNKNEREFGKIANPVVHQTLNELRKLINEIITVFGKKPLEIGLETTRELKKSKKNREYLSKQQNKNEYARNRIYKEYIEPHLSQIKSRQENPSKYISKFELLEEQNFICPFCSEKITPDDIINSKVDVEHIFPIEESEDITKNNLVIAHNECNADKGKKSPFDAFGDKTSGKYRWNCILHNAQKNLPHKVWRFYQGSLEKFLENKPMSRRFGTDNSYISKIAARYLACLFNDPYHSEIFCIKSSLIAQLRIAWDLNSIMVPLVKNILSEKELEEFKISKNKKIRIDNRHHALDAIVIAYANRGYHNFLNRIHAKEYKINYREKSWLSKILLPPLNRDLEDFKISVKDSIEKANVSIKHDHNTNGSLVKATAYKVYYSGAGEYIITTSKNVEEISFKEKEDPKDTLYRALCKFECRDIDIKDEKLIKKLKYNSTLYKKVQNNLSKAKQELEQDNKKTEEEGKKSQKITEVRIYKKACSLVKGQYIQCGSRLKDKFFAVKEPTEIKTGLGYDTGDNLFLDLYYDKTGKLCGEIIRKVNFNRNKPNYQKEGYTLFERIYQSDILEVDTSEDRISLKNKTGSAPSDRTFIKVNTFTEVNAYFDGKRDKIQIFFGNLLKSSFKNDSFFISSMQKYNVRKVILTSLGIIKYRSQILKNKEV

SEQ ID NO: 612 - protein, 1398 aa, Veillonella atypica
  REGION 1..1398: note = Veillonella atypica ACS-134-V-Col7a
METQTSNQLITSHLKDYPKQDYFVGLDIGTNSVGWAVTNTSYELLKFHSHKMWGSRLFEEGESAVTRRGFRSMRRRLERRKLRLKLLEELFADAMAQVDSTFFIRLHESKYHYEDKTTGHSSKHILFIDEDYTDQDYFTEYPTIYHLRKDLMENGTDDIRKLFLAVHHILKYRGNFLYEGATFNSNAFTFEDVLKQALVNITFNCFDTNSAISSISNILMESGKTKSDKAKAIERLVDTYTVFDEVNTPDKPQKEQVKEDKKTLKAFANLVLGLSANLIDLFGSVEDIDDDLKKLQIVGDTYDEKRDELAKVWGDEIHIIDDCKSVYDAIILMSIKEPGLTISQSKVKAFDKHKEDLVILKSLLKLDRNVYNEMFKSDKKGLHNYVHYIKQGRTEETSCSREDFYKYTKKIVEGLADSKDKEYILNEIELQTLLPLQRIKDNGVIPYQLHLEELKVILDKCGPKFPFLHTVSDGFSVTEKLIKMLEFRIPYYVGPLNTHHNIDNGGFSWAVRKQAGRVTPWNFEEKIDREKSAAAFIKNLTNKCTYLFGEDVLPKSSLLYSEFMLLNELNNVRIDGKALAQGVKQHLIDSIFKQDHKKMTKNRIELFLKDNNYITKKHKPEITGLDGEIKNDLTSYRDMVRILGNNFDVSMAEDIITDITIFGESKKMLRQTLRNKFGSQLNDETIKKLSKLRYRDWGRLSKKLLKGIDGCDKAGNGAPKTIIELMRNDSYNLMEILGDKFSFMECIEEENAKLAQGQVVNPHDIIDELALSPAVKRAVWQALRIVDEVAHIKKALPSRIFVEVARTNKSEKKKKDSRQKRLSDLYSAIKKDDVLQSGLQDKEFGALKSGLANYDDAALRSKKLYLYYTQMGRCAYTGNIIDLNQLNTDNYDIDHIYPRSLTKDDSFDNLVLCERTANAKKSDIYPIDNRIQTKQKPFWAFLKHQGLISERKYERLTRIAPLTADDLSGFIARQLVETNQSVKATTTLLRRLYPDIDVVFVKAENVSDFRHNNNFIKVRSLNHHHHAKDAYLNIVVGNVYHEKFTRNFRLFFKKNGANRTYNLAKMFNYDVICTNAQDGKAWDVKTSMNTVKKMMASNDVRVTRRLLEQSGALADATIYKASVAAKAKDGAYIGMKTKYSVFADVTKYGGMTKIKNAYSIIVQYTGKKGEEIKEIVPLPIYLINRNATDIELIDYVKSVIPKAKDISIKYRKLCINQLVKVNGFYYYLGGKTNDKIYIDNAIELVVPHDIATYIKLLDKYDLLRKENKTLKASSITTSIYNINTSTVVSLSNKVGIDVFDYFMSKLRTPLYMKMKGNKVDELSSTGRSKFIKMTLEEQSIYLLEVLNLLTNSKTTFDVKPLGITGSRSTIGVKIHNLDEFKIINESITGLYSNEVTIV

SEQ ID NO: 613 - protein, 1398 aa, Veillonella parvula
  REGION 1..1398: note = Veillonella parvula ATCC 17745
METQASNQLISSHLKGYPIKDYFVGLDIGTSSVGWAVTNKAYELLKFRSHKMWGSRLFDEGESAVARRGFRSMRRRLERRKLRLKLLEELFADAMAQVDPTFFMRLRESKYHYEDKTTGHSSKHILFIDKNYNDQDYFKEYPTVYHLRSELMKSGTDDIRKLFLAVHHILKYRGNFLYEGATFDSNASTLDDVIKQALENITFNCFDCNSAISSIGQILMEAGKTKSDKAKAIEHLVDTYIATDTVDTSSKTQKDQVKEDKKRLKAFANLVLGLNASLIDLFGSVEELEEDLKKLQITGDTYDDKRDELAKAWSDEIYIIDDCKSVYDAIILLSIKEPGLTISESKVKAFNKHKDDLAILKSLLKSDRSIYNTMFKVDEKGLHNYVHYIKQGRTEETSCNREDFYKYTKKIVEGLSDSKDKEYILSQIELQILLPLQRIKDNGVIPYQLHLEELKAILAKCGPKFPFLNEVADGFSVAEKLIKMLEFRIPYYVGPLNTHHNVDNGGFAWAVRKASGRVTPWNFDDKIDREKSAAAFIKNLTNKCTYLLGEDVLPKSSLLYSEFMLLNELNNVRIDGKPLEKVVKEHLIEAVFKQDHKKMTKNRIEQFLKDNGYISETHKHEITGLDGEIKNDLASYRDMVRILGDGFDRSMAEEIITDITIFGESKKMLRETLRKKFASCLDDEAIKKLTKLRYRDWGRLSQKLLNGIEGCDKAGDGTPETIIILMRNFSYNLMELLGDKFSFMERIQEINAKLTEGQIVNPHDIIDDLALSPAVKRAVWQALRIVDEVAHIKKALPARIFVEVTRSNKNEKKKKDSRQKRLSDLYAAIKKDDVLLNGLNNEIFGELKSSLAKYDDAALRSKKLYLYYTQMGRCAYTGEIIELSLLNTDNYDIDHIYPRSLTKDDSFDNLVLCKRTANAQKSDAYPISEEIQKTQKPFWTFLKQQGLISERKYERLTRITPLTADDLSGFIARQLVETNQSVKAATTLLRRLYPGVDVVFVKAENVTDFRHDNNFIKVRSLNHHHHAKDAYLNIVVGNVYHERFTRNFRAFFKKNGANRTYNLAKMFNYDVNCTNAKDGKAWDVKTSMDTVKKMMDSNDVRVTKRLLEQTGALADATIYKATVAGKAKDGAYIGMKTKSSVFADVSKYGGMTKIKNAYSIIVQYTGKKGEVIKEIVPLPIYLTNRNTTDQDLINYVASIIPQAKDISIIYGKLCINQLVKVNGFYYYLGGKTNSKFCIDNAIQVIVSNEWIPYLKVLEKFNNMRKDNKDLKANVVSTRALDNKHTIEVRIVEEKNIEFFDYLVSKLKMPIYQKMKGNKAAELSEKGYGLFKKMSLEEQSIHLIELLNLLTNQKTTFEVKPLGITASRSTVGSKISNQDEFKVINESITGLYSNEVTIV

SEQ ID NO: 614 - protein, 1395 aa, unidentified
  REGION 1..1395: note = Veillonella sp. 6_1_27
  source 1..1395: note = Veillonella sp.
METQASNQLISSHLKGYPIKDYFVGLDIGTSSVGWAVTNKAYELLKFRSHKMWGSRLFDEGESAVARRGFRSMRRRLERRKLRLKLLEELFADAMAQVDPTFFMRLRESKYHYEDKTTGHSSKHILFIDKNYTDQDYYKEYPTIYHLRVALMKSGTDDIRKLFLAVHHILKYRGNFLYEGATFDSNASTLDDVLKQALENITFNCFDSSAAIGSIGQILMELGKTKSDKAKAIERLVDTYIITDEVDTSGKTQKEQVKEDKKRLKSFANLVLGLSASLTDLFGSVEDLDEDLKKLQIIGDTYDERRDDLAKVWGDEIHIIDDCKSVYDAIILMSIKEPGLTISESKVKAFKKHKDDLAILKSLLKSDRSIYNTMFKVDEKGLHNYVHYIKQGRTEETSCNREDFYKYTKKVVEGLPDSKDKEYILSEIELQTLLPLQRIKDNGVIPYQLHLEELKVILAKCGPKFPFLNEVADGFSVAEKLIKMLEFRIPYYVGPLNTHHNVDNGGFAWAVRKASGRVTPWNFDDKIDREKSAAAFIKNLTNKCTYLLGEDVLPKSSLLYSEFMLLNELNNVRIDGKPLEKAVKEHLIEAVFKQDHKKMTKNRIEQFLKDNNYIPEKHKPEITGLDGEIKNDLASYRDMVRILGNNFDLSMAEEIITDITIFGESKKMLRETLRNKFSSRLDDEAIKKLSKLRYRDWGRLSRKLLNVIEGCDKAGDGTPETIIILMRNFSYNLMELLGDKFSFMERIQEINAKLIEGQIVNPHDIIDDLALSPAVKRAVWQALRIVDEIVHIKKTLPARIFVEVTRSNKAEKKKKDSRQKRLSDLYAAIKKDDALLSGLTNEEFGGLKSGLAKYDDAALRSKKLYLYYTQMGRCAYTGEVIDLSQLNTDNYDIDHIYPRSLTKDDSFDNLVLCKRTANAQKSDTYPISKEIQKAQKAFWIFLKQQGLISERKYERLTRITPLTADDLSGFIARQLVETNQSVKAATTLLRRLYPGVDVVFVKAENVTDFRHDNDFIKVRSLNHHHHAKDAYLNIVVGNVYHERFTRNFRAFFKKNGANRTYNLAKMFNYDVKCTNAKDGKAWAVKTSMDTVKKMMDSNDVRVTKRVYEQKGQLSDINLTKASKVKADIYLPIKANDPIMSQNMKYGGYSDIKNAYYTIIEYSDKKNNSIKAFIPIPIFIATKTLTKQALLEYIKTVLPKANNLRIIYKKVYNDQLLKIDGFNYYLGGRSNDRFCIDNAIQLIVPLEIQFYIKLVEKFTAIISENKNIALKASSVKSRNPINNQVENITLEYTQKLFDYLVSKFNELIYLKMRGNKLTDVNNIGRKQFIKLSLEERCKALAELLNIFTNMNKKLSLSTINVSASRKVVNFKISSLDEFKIVNESITGLYSHEITIV

SEQ ID NO: 615 - protein, 1120 aa, unidentified
  REGION 1..1120: note = Veillonella sp. oral taxon 780 str. F0422
  source 1..1120: note = Veillonella sp.
MGFKANLVNLFTDEDIEVILPEEKEFKSINLHEGIYEDVRDAYEDAWGDRFAIVDQCKVLHDIIVISSIIKPGQSLSEAKIESYNQHKEDLVLLKSVLKEDRKLYDDMFVVDTDKGTNYVKYTKQGVNGNTSATQEEFYKYVRKVVSVLPETEHTRRIVQKLEEGTFLPLQRISKNGVVPYQLHKEELVRILDKATVNFPFLNKVENGLTVADKIISILEFKIPYYVGPLNPTHSIENGGFAWVVRKEAGQVLPWNFEQKVDVQASAVKFIENLTNKCTYLIDQDVLPKYSLLYAEFSLLNELNNIRVNDKPLPADVKQAFIRDHFISLQDSKTATKKVVAKYLVDNNYVSQPPIITGMDQQIATKLTSHRDMTRILGEHFDHAMAEDIIRYITIFGESKDMLRQVLKNYYGDRLTTEQIKKLGKLTYTGWGRLSKKFLSDIWGMKKNDDDAEAGTIIEHMREGQENLMQLLSSSYSFIDVVQEYVTNVLGEKEKTAFEMLEDLSLSPMVKRSVWQTLRILDEIVSIRKELPKKIFVEVARTNKADKKRTQSRKALLEELYKQIKDEDVHVLQQELESKEDSALNSKKLYLYFTQMGRCMYSGRRIDIHELFTDKYDIDHIYPRSLTKDDSWHNIVLVEKQLNAEKTDRFPILSAIQSKQKGFWKLLWDRGFISEKKYDRLVRTTDLTDEELNQFINRQMVSTNQSVKAVTTLLHQLYPETEVVFSKAENVSDFRHDYDFVKVRSINHHHHAKDAYLNIVVGNVYHEKFTKNFLSFAKQKGTRRTYNLTKIFEYEIKLTEESKKVIWDPNIHMDIVKKMMKSNDVRVTQRAVPQKGGLSDETIYKKGIAKRGVYLPLKSSDERVRDVEKYGGRTSITISEYIILNIRDTSDQDRIEIFSLPLYIAGKKDIHKAIEEAYLSTCKKPASVVDIQILYRGLYIGSKVNINGFTYYMGGKTGSNVSIDSAVDVVMDITSSVYIKLLEKVAIKKIENPKTFRIENIKTSYNHKEVTVSKEQNIALYQELLKKLDTPLFSKMKGNKLEEFRTVGFDTFIALSLEEQASVLLEVLNVLTNFKTKRDITKIGMTSSRSTLGINISNTEQFSVITTSITGLYEQEIKIK

SEQ ID NO: 616 - protein, 1068 aa, Verminephrobacter eiseniae
MNKAVAYRLALDLGSTSLGWAIFRLNEAREPTAIIRAGVRIFSDGRNANSEPLAVHRRVARAMRRRRDRLLKRKKRMHDQLVQHGFFPAEVAERKELERLNPYQLRAKGLHEALTPGEFARALFHINQRRGFKSNRKTDRKDNDSGALKQAISELRKRIQDSDCATAGEWFWKERMQQKPEGVRGQWVRARYRKTPSTTDEGKKRIGYDLYVDRAMVEQEFDALWAAQAALQPGLFTEAARAELKDTLLYQRDLRPVKPGRCTLLPAEERAPLALPSTQRFRILQEVNNLRLLDEALREVPLNLAQRDAVVSALEGKKELSFAAIRKLLTLSGKFNLEDEKRAELKGNATSVILARKDLFGDAWAGFDAAVQDEIVWRLVSQESEGALIAWLQQHTGVDGVCAEAIVNTRLPDGYGRLSRKALERIVPALQREVCTYDKAVQAAGFAHHSDLGFDFDYAEDEVQQVGEHTIASTGEVQAQYAFKQLPYYGKALQRHVAFGSGDAKDHEEKCYGKIANPTVHIGLNQVRTVVNALIRRYGHPTEVVVELARDLKQSREQKQQTQREQADNQKRNEDIRKRIAPILETSPERVRDRDIKKWILWEELNKKDIADRHCPYSGERISATMLLSEAVEIEHILPFSRTLDDSLNNRTVAMRRANRIKGDRTPWEARADFEAQGWRYEAILQRAEGMPPRKRYRFAEDGYQRWLGKDRNFLARALNDTSYLSRLAANYLRLVCPQGVRVIPGQMTDKLRGKFGLNSVLGLDGKKNRNDHRHHAVDACVIGVTDQGLMQRFANASKQARENGLTRLVQDMLLPWWPSYYDHVERAVRHIRVSHRPDHGFEGAMMKGTAHGIREDGIREDGRIKQRPKAKGSADHKTITLIPIDEPRQLARHGVDAEGKPLPYKGYASGSNYCIEITKNGKGKWEGQVISTFDAYRIKAAADAAARAGQVISTVEADSIVRKSGWERLRGAQSQNGQPLVMRLVIGDSVRMEVDGRDEVMRVVKMSGKEMVFAPVREANVDKRNNMPDEQDPFTYTYKRADQLRKAKARQVTISPIGELRDPGFKG

SEQ ID NO: 617 - protein, 1440 aa, Weeksella virosa
MKTILGLDLGTNSIGWALVEQDFENKQGLILGMGSRIIPMDAGIIGKFAEGSSISQTAERTGYRSIRRLRERHLLRRERLHRVLNILKFLPEHYAAEIDFEKRFGQFLAETEPKLAWKKNAEGKFEFLFQRSFDEMVADFKANGQDIKIPYDWTIYYLRKKALTQKISPQELAWIILNFNQKRGYYQLRGEEEEENPNKKVEFYSLKIVDVVADEQPNKKGDTWYSLHLENGWVYRRSSKIPLYDWKDKVRDFIVTTDINEDGSEKLDKDGEVKRSFRAPKEDDWTLIKKKTEQEIEQFNQTVGSYIYEALLDNPTQKIRGKLVRTIERKFYKSELKKILEKQIELQPELFTEDLYNACARELYRRNVAHQQQLSSRDFVYLFLNDIIFYQRPLRSQKSLISNCSLEFRTIKDKDGNGQIIYLKAIPKSNPYYQEFRVWQWLYNLKIFTKEDDKDVTNQFINKVEDLEALFEFLMNQKEVNHTDILTYLIEPIVKSKYPNAKGKAFKDELKKELKKYRWNYVYDADKDESKSYPMNETRYELRKRLDKVENVPADFMTRKIEQHLWHIIYSVTDKIEFEKALKSFANKYDLHQESFVENFKRFKPFDSDYGTYSEKAIKKLLPLMRVGKYWSWDIIDDKTKTRIGKIITGEYDETIKNRVREKAIDLTEENHFQGLQLWLAQYIVYDRHSEADIAGKWNSVADLEQYLSEFKQHSLRNPIVEQVITETLRVVRDIWKQYGKGAKDYFDEIHIELGREMKNTAEERKRLSSIISENETTNLRIRAILEELMYDENMENVRPYSPMQQEALKIYEDGVLSSSVEIPEDIEKISKKSEPTKSEIQRYKLWLEQKYRSPYTGRPIPLSKLFTPAYQIEHIIPQARFFDDGFSNKVICESEVNALKDKMLGLEFIQNYYGQKVTTSFGEVTILTEDAYKAFVKEHYDKNRSKRNKLLLEEIPEKMIDRQMNDTRYISKYISKVLSNLVRGEKDDEGVNSKNIIPGNGKITGILKQDWGLNDVWNDLILPRFERMNQLTNSTDFTAWNEKHQKFLPSVPLELSKGFQKKRIDHRHHALDALIIACATRDHVNLLNNKHAKSRNERYDLQHKLRHTTPWQDKEGKVRTKFTEFKKPWETFTQDTKKELEKIVVNFKQNLRVINKATNYYEKIVDGKKVMFKQEGVNWAIRKPMHKETVSGKIDLPRVKVSKGKILTATRKSLDTSFNAKTILSITDTGIQKILLNYLKAKGNPELAFSPEGIEEMNQNISLYNDGKPHQPILKVRVFEQGSKFPLGETGNKTTKYVEAAKGTNLFFGVYEDNQGKRSYDTIPLNIVIERQKQGLNSVPETNEKGHRLLFSLSPNDLVYVPIEGEVFDETNPDVNRIYKVVSFSGSQMFCVRQDVATSIVYKLEFSSLNKMERTIDGIMIKEICIKLKVDRLGNISKA

SEQ ID NO: 618 - protein, 1409 aa, Wolinella succinogenes
MLVSPISVDLGGKNTGFFSFTDSLDNSQSGTVIYDESFVLSQVGRRSKRHSKRNNLRNKLVKRLFLLILQEHHGLSIDVLPDEIRGLFNKRGYTYAGFELDEKKKDALESDTLKEFLSEKLQSIDRDSDVEDFLNQIASNAESFKDYKKGFEAVFASATHSPNKKLELKDELKSEYGENAKELLAGLRVTKEILDEFDKQENQGNLPRAKYFEELGEYIATNEKVKSFFDSNSLKLTDMTKLIGNISNYQLKELRRYFNDKEMEKGDIWIPNKLHKITERFVRSWHPKNDADRQRRAELMKDLKSKEIMELLTTTEPVMTIPPYDDMNNRGAVKCQTLRLNEEYLDKHLPNWRDIAKRLNHGKFNDDLADSTVKGYSEDSTLLHRLLDTSKEIDIYELRGKKPNELLVKTLGQSDANRLYGFAQNYYELIRQKVRAGIWVPVKNKDDSLNLEDNSNMLKRCNHNPPHKKNQIHNLVAGILGVKLDEAKFAEFEKELWSAKVGNKKLSAYCKNIEELRKTHGNTFKIDIEELRKKDPAELSKEEKAKLRLTDDVILNEWSQKIANFFDIDDKHRQRFNNLFSMAQLHTVIDTPRSGFSSTCKRCTAENRFRSETAFYNDETGEFHKKATATCQRLPADTQRPFSGKIERYIDKLGYELAKIKAKELEGMEAKEIKVPIILEQNAFEYEESLRKSKTGSNDRVINSKKDRDGKKLAKAKENAEDRLKDKDKRIKAFSSGICPYCGDTIGDDGEIDHILPRSHTLKIYGTVFNPEGNLIYVHQKCNQAKADSIYKLSDIKAGVSAQWIEEQVANIKGYKTFSVLSAEQQKAFRYALFLQNDNEAYKKVVDWLRTDQSARVNGTQKYLAKKIQEKLTKMLPNKHLSFEFILADATEVSELRRQYARQNPLLAKAEKQAPSSHAIDAVMAFVARYQKVFKDGTPPNADEVAKLAMLDSWNPASNEPLTKGLSTNQKIEKMIKSGDYGQKNMREVFGKSIFGENAIGERYKPIVVQEGGYYIGYPATVKKGYELKNCKVVTSKNDIAKLEKIIKNQDLISLKENQYIKIFSINKQTISELSNRYFNMNYKNLVERDKEIVGLLEFIVENCRYYTKKVDVKFAPKYIHETKYPFYDDWRRFDEAWRYLQENQNKTSSKDRFVIDKSSLNEYYQPDKNEYKLDVDTQPIWDDFCRWYFLDRYKTANDKKSIRIKARKTFSLLAESGVQGKVFRAKRKIPTGYAYQALPMDNNVIAGDYANILLEANSKTLSLVPKSGISIEKQLDKKLDVIKKTDVRGLAIDNNSFFNADFDTHGIRLIVENTSVKVGNFPISAIDKSAKRMIFRALFEKEKGKRKKKTTISFKESGPVQDYLKVFLKKIVKIQLRTDGSISNIVVRKNAADFTLSFRSEHIQKLLK

SEQ ID NO: 619 - protein, 1059 aa, Wolinella succinogenes
MIERILGVDLGISSLGWAIVEYDKDDEAANRIIDCGVRLFTAAETPKKKESPNKARREARGIRRVLNRRRVRMNMIKKLFLRAGLIQDVDLDGEGGMFYSKANRADVWELRHDGLYRLLKGDELARVLIHIAKHRGYKFIGDDEADEESGKVKKAGVVLRQNFEAAGCRTVGEWLWRERGANGKKRNKHGDYEISIHRDLLVEEVEAIFVAQQEMRSTIATDALKAAYREIAFFVRPMQRIEKMVGHCTYFPEERRAPKSAPTAEKFIAISKFFSTVIIDNEGWEQKIIERKTLEELLDFAVSREKVEFRHLRKFLDLSDNEIFKGLHYKGKPKTAKKREATLFDPNEPTELEFDKVEAEKKAWISLRGAAKLREALGNEFYGRFVALGKHADEATKILTYYKDEGQKRRELTKLPLEAEMVERLVKIGFSDFLKLSLKAIRDILPAMESGARYDEAVLMLGVPHKEKSAILPPLNKTDIDILNPTVIRAFAQFRKVANALVRKYGAFDRVHFELAREINTKGEIEDIKESQRKNEKERKEAADWIAETSFQVPLTRKNILKKRLYIQQDGRCAYTGDVIELERLFDEGYCEIDHILPRSRSADDSFANKVLCLARANQQKTDRTPYEWFGHDAARWNAFETRTSAPSNRVRTGKGKIDRLLKKNFDENSEMAFKDRNLNDTRYMARAIKTYCEQYWVFKNSHTKAPVQVRSGKLTSVLRYQWGLESKDRESHTHHAVDAIIIAFSTQGMVQKLSEYYRFKETHREKERPKLAVPLANFRDAVEEATRIENTETVKEGVEVKRLLISRPPRARVTGQAHEQTAKPYPRIKQVKNKKKWRLAPIDEEKFESFKADRVASANQKNFYETSTIPRVDVYHKKGKFHLVPIYLHEMVLNELPNLSLGTNPEAMDENFFKFSIFKDDLISIQTQGTPKKPAKIIMGYFKNMHGANMVLSSINNSPCEGFTCTPVSMDKKHKDKCKLCPEENRIAGRCLQGFLDYWSQEGLRPPRKEFECDQGVKFALDVKKYQIDPLGYYYEVKQEKRLGTIPQMRSAKKLVKK

SEQ ID NO: 620 - protein, 1388 aa, Zunongwangia profunda
MKRILGLDLGTNSIGWALVNEAENEKEISKIIKLGVRVNPLTIDEKTNFEKGRPLSTNADRTLKRGARRNLQRYKLRRENLIEILIDNHIITKETPLTEIGKGTTYQTLSLRAKAVRERIDLEDFAKVLLAINKKRGYKSSRKASNDEEGQAIDGMAIAKELYERGITPGQYVLELLENDRKYIPDFYRSDLKQEFNKIWNNQKTFYPEILTDELFKELDGKNKSQTWAICQKPFNIKGIKRITKGREKTIENYHWRVKGLSGKLNLEKLAIILQEINNDINQSSGYLGGISDKSKKLYLNKETVGEFLYKQIAKNPHTSLKNQVFYRHDYLDEFEQIWKTQSNFNANLTDELKQEIRDVIIFYQRKIKSQKSLISFCQFESWEQEYFDKETGKTKTRTVGRRVIPKSSPLFQEFKIWQNLNHLVFTNSETDEKIEIKEVEQEIRKELFEELNLRGDLNPNDLLKILRSQFKIGKLSNWKCNFEKIEGNRTNAALFNIYQKISDFEGYGIDWNKSNAKKIRKELKATFPEIGIDASILEFDAYKKQLTNQSSYELWHLLYSAEEDFKISEQDKLIYGNSSVSLKKKLHLKFGFNPEYAKMLANLSLMSDYGNLSAKAIKKILPYLEDGHLYSEACRLAGYNHSKSLTAEELEKFEPKAKLDLLKKNSLRNPVVEKILNQMVNVVNQVIDTYGKPDGVRIELARELKKSAKERAEMTKGIADGTRRNEEIKKIITQKFGIPNPTKSDLVRYRLWQELESRGYKDIFTDKYISPDKIFSSEIDIEHIIPKALLFDDSFSNKTLSFRNVNLKKANRTALDFITQDYQSNVEAYKERVETWNKDNHISKGKRNKLLMSLKDIPDGFIERDLRNSQYIARKAKRMLYEVFPNEVLATSGSITDKLRSDWDLINVMKELNLPKYKALGLTEYEERLDKGTEELFKHEVIKDWTKRNDHRHHAMDALAVAFTTHNHIQYINNLNARKDITQDNHPIIKNIENLITEVNSKGKRVFKAPMSSFRESAKEQIEAILVSFKNKNKVVTKNINQTKKEGGFNYQNAKTPRGQLHKETIYGKSKQPLEKPVKINNRFCKKQVGLIINFKEQEAVLHHLKKYDNNEKIAFSNKTLKSDPIQVNGSPLREVKIFEEIFTIRKDINPDNFKTQKHLDKIIDKGIKEVMKKRLEEYNGDFKTAFSDLDKNPIWLNQSKGITIKRATISGVTNAEPLHQAKDHLGNIILDDNGKEIPIDYVSTGNNHHVAIYQDESGNLQEEVVSFYEAVIRKNQDQPIIKKRHPKGWKFLFTMKQNEMFVFSSENFNPSEIDLLDEKNAAIISPNLFRVQKIATKNYMFRHHLETEVTNNLDFTYRHFQATEWLRNLCKVRIDHIGRIVQIGEY

SEQ ID NO: 621-631 - skipped (11 entries)

SEQ ID NO: 632 - RNA, 22 nt, Homo sapiens
  source 1..22: mol_type = unassigned RNA
tgctcaggttgcacagctggga

SEQ ID NO: 633 - RNA, 22 nt, Homo sapiens
  source 1..22: mol_type = unassigned RNA
tcccagctgtgcaacctgagca

SEQ ID NO: 634 - RNA, 22 nt, Homo sapiens
  source 1..22: mol_type = unassigned RNA
tcaggtgtggaaactgaggcag

SEQ ID NO: 635 - RNA, 22 nt, Homo sapiens
  source 1..22: mol_type = unassigned RNA
ctgcctcagtttccacacctga

SEQ ID NO: 636 - RNA, 22 nt, Homo sapiens
  source 1..22: mol_type = unassigned RNA
caaaaccgcgattactcttgca

SEQ ID NO: 637 - RNA, 22 nt, Homo sapiens
  source 1..22: mol_type = unassigned RNA
tgcaagagtaatcgcggttttg

SEQ ID NO: 638 - RNA, 21 nt, Homo sapiens
  source 1..21: mol_type = unassigned RNA
aaaagtaattgtggtttttgc

SEQ ID NO: 639 - RNA, 21 nt, Homo sapiens
  source 1..21: mol_type = unassigned RNA
gcaaaaaccacaattactttt

SEQ ID NO: 640 - RNA, 21 nt, Homo sapiens
  source 1..21: mol_type = unassigned RNA
aaaaactgcaatcacttttgc

SEQ ID NO: 641 - RNA, 21 nt, Homo sapiens
  source 1..21: mol_type = unassigned RNA
gcaaaagtgattgcagttttt

SEQ ID NO: 642 - RNA, 22 nt, Homo sapiens
  source 1..22: mol_type = unassigned RNA
caaaagtgattgtggtttttgc

SEQ ID NO: 643 - RNA, 22 nt, Homo sapiens
  source 1..22: mol_type = unassigned RNA
gcaaaaaccacaatcacttttg

SEQ ID NO: 644 - RNA, 22 nt, Homo sapiens
  source 1..22: mol_type = unassigned RNA
agcagtgtttgttttgcccaca

SEQ ID NO: 645 - RNA, 22 nt, Homo sapiens
  source 1..22: mol_type = unassigned RNA
tgtgggcaaaacaaacactgct

SEQ ID NO: 646 - RNA, 22 nt, Homo sapiens
  source 1..22: mol_type = unassigned RNA
tcgggcgcaagagcactgcagt

SEQ ID NO: 647 - RNA, 22 nt, Homo sapiens
  source 1..22: mol_type = unassigned RNA
actgcagtgctcttgcgcccga

SEQ ID NO: 648 - RNA, 21 nt, Homo sapiens
  source 1..21: mol_type = unassigned RNA
acacttgttgggatgacctgc

SEQ ID NO: 649 - RNA, 21 nt, Homo sapiens
  source 1..21: mol_type = unassigned RNA
gcaggtcatcccaacaagtgt

SEQ ID NO: 650 - RNA, 24 nt, Homo sapiens
  source 1..24: mol_type = unassigned RNA
aggagctatccactccaggtgtcc

SEQ ID NO: 651 - RNA, 24 nt, Homo sapiens
  source 1..24: mol_type = unassigned RNA
ggacacctggagtggatagctcct

SEQ ID NO: 652 - RNA, 23 nt, Homo sapiens
  source 1..23: mol_type = unassigned RNA
ccagagcagcctgcggtaacagt

SEQ ID NO: 653 - RNA, 23 nt, Homo sapiens
  source 1..23: mol_type = unassigned RNA
actgttaccgcaggctgctctgg

SEQ ID NO: 654 - RNA, 22 nt, Homo sapiens
  source 1..22: mol_type = unassigned RNA
agttgccagggctgcctttggt

SEQ ID NO: 655 - RNA, 22 nt, Homo sapiens
  source 1..22: mol_type = unassigned RNA
accaaaggcagccctggcaact

SEQ ID NO: 656 - RNA, 21 nt, Homo sapiens
  source 1..21: mol_type = unassigned RNA
tagaccatctttctagagtat

SEQ ID NO: 657 - RNA, 21 nt, Homo sapiens
  source 1..21: mol_type = unassigned RNA
atactctagaaagatggtcta

SEQ ID NO: 658 - RNA, 22 nt, Homo sapiens
  source 1..22: mol_type = unassigned RNA
agctctagaaagattgttgacc

SEQ ID NO: 659 - RNA, 22 nt, Homo sapiens
  source 1..22: mol_type = unassigned RNA
ggtcaacaatctttctagagct

SEQ ID NO: 660 - RNA, 21 nt, Homo sapiens
  source 1..21: mol_type = unassigned RNA
gggactaggatgcagacctcc

SEQ ID NO: 661 - RNA, 21 nt, Homo sapiens
  source 1..21: mol_type = unassigned RNA
ggaggtctgcatcctagtccc

SEQ ID NO: 662 - RNA, 23 nt, Homo sapiens
  source 1..23: mol_type = unassigned RNA
aggtctgcattcaaatccccaga

SEQ ID NO: 663 - RNA, 23 nt, Homo sapiens
  source 1..23: mol_type = unassigned RNA
tctggggatttgaatgcagacct

SEQ ID NO: 664 - RNA, 20 nt, Homo sapiens
  source 1..20: mol_type = unassigned RNA
cattacagcacagccattct

SEQ ID NO: 665 - RNA, 20 nt, Homo sapiens
  source 1..20: mol_type = unassigned RNA
agaatggctgtgctgtaatg

SEQ ID NO: 666 - RNA, 21 nt, Homo sapiens
  source 1..21: mol_type = unassigned RNA
tctggctgtgctgtaatgcag

SEQ ID NO: 667 - RNA, 21 nt, Homo sapiens
  source 1..21: mol_type = unassigned RNA
ctgcattacagcacagccaga

SEQ ID NO: 668 - RNA, 21 nt, Homo sapiens
  source 1..21: mol_type = unassigned RNA
tgacttctacctcttccaaag

SEQ ID NO: 669 - RNA, 21 nt, Homo sapiens
  source 1..21: mol_type = unassigned RNA
ctttggaagaggtagaagtca

SEQ ID NO: 670 - RNA, 22 nt, Homo sapiens
  source 1..22: mol_type = unassigned RNA
ttggaataggggatatctcagc

SEQ ID NO: 671 - RNA, 22 nt, Homo sapiens
  source 1..22: mol_type = unassigned RNA
gctgagatatcccctattccaa

SEQ ID NO: 672 - RNA, 22 nt, Homo sapiens
  source 1..22: mol_type = unassigned RNA
tcgtatcagagattccagacac

SEQ ID NO: 673 - RNA, 22 nt, Homo sapiens
  source 1..22: mol_type = unassigned RNA
gtgtctggaatctctgatacga

SEQ ID NO: 674 - RNA, 23 nt, Homo sapiens
  source 1..23: mol_type = unassigned RNA
actgggatgtcactgaatatggt

SEQ ID NO: 675 - RNA, 23 nt, Homo sapiens
  source 1..23: mol_type = unassigned RNA
accatattcagtgacatcccagt

SEQ ID NO: 676 - RNA, 22 nt, Homo sapiens
  source 1..22: mol_type = unassigned RNA
caaagtccttcctatttttccc

SEQ ID NO: 677 - RNA, 22 nt, Homo sapiens
  source 1..22: mol_type = unassigned RNA
gggaaaaataggaaggactttg

SEQ ID NO: 678 - RNA, 21 nt, Homo sapiens
  source 1..21: mol_type = unassigned RNA
gaagaataggagggactttgt

SEQ ID NO: 679 - RNA, 21 nt, Homo sapiens
  source 1..21: mol_type = unassigned RNA
acaaagtccctcctattcttc

SEQ ID NO: 680 - RNA, 22 nt, Homo sapiens
  source 1..22: mol_type = unassigned RNA
tgggccatgcatttctagaact

SEQ ID NO: 681 - RNA, 22 nt, Homo sapiens
  source 1..22: mol_type = unassigned RNA
agttctagaaatgcatggccca

SEQ ID NO: 682 - RNA, 21 nt, Homo sapiens
  source 1..21: mol_type = unassigned RNA
tctagaaatgcatgacccacc

SEQ ID NO: 683 - RNA, 21 nt, Homo sapiens
  source 1..21: mol_type = unassigned RNA
ggtgggtcatgcatttctaga

SEQ ID NO: 684 - RNA, 22 nt, Homo sapiens
  source 1..22: mol_type = unassigned RNA
ttccactgccactacctaattt

SEQ ID NO: 685 - RNA, 22 nt, Homo sapiens
  source 1..22: mol_type = unassigned RNA
aaattaggtagtggcagtggaa

SEQ ID NO: 686 - RNA, 21 nt, Homo sapiens
  source 1..21: mol_type = unassigned RNA
attaggtagtggcagtggaac

SEQ ID NO: 687 - RNA, 21 nt, Homo sapiens
  source 1..21: mol_type = unassigned RNA
gttccactgccactacctaat

SEQ ID NO: 688 - RNA, 21 nt, Homo sapiens
  source 1..21: mol_type = unassigned RNA
caccgactctgtctcctgcag

SEQ ID NO: 689 - RNA, 21 nt, Homo sapiens
  source 1..21: mol_type = unassigned RNA
ctgcaggagacagagtcggtg

SEQ ID NO: 690 - RNA, 22 nt, Homo sapiens
  source 1..22: mol_type = unassigned RNA
cagcaggggagagagaggagtc

SEQ ID NO: 691 - RNA, 22 nt, Homo sapiens
  source 1..22: mol_type = unassigned RNA
gactcctctctctcccctgctg

SEQ ID NO: 692 - RNA, 22 nt, Homo sapiens
  source 1..22: mol_type = unassigned RNA
ttccagcccttctaatggtagg

SEQ ID NO: 693 - RNA, 22 nt, Homo sapiens
  source 1..22: mol_type = unassigned RNA
cctaccattagaagggctggaa

SEQ ID NO: 694 - RNA, 22 nt, Homo sapiens
  source 1..22: mol_type = unassigned RNA
taccattagaagagctggaaga

SEQ ID NO: 695 - RNA, 22 nt, Homo sapiens
  source 1..22: mol_type = unassigned RNA
tcttccagctcttctaatggta

SEQ ID NO: 696 - RNA, 21 nt, Homo sapiens
  source 1..21: mol_type = unassigned RNA
tcaagtgtcatctgtccctag

SEQ ID NO: 697 - RNA, 21 nt, Homo sapiens
  source 1..21: mol_type = unassigned RNA
ctagggacagatgacacttga

SEQ ID NO: 698 - RNA, 23 nt, Homo sapiens
  source 1..23: mol_type = unassigned RNA
tttgggattgacgccacatgtct

SEQ ID NO: 699 - RNA, 23 nt, Homo sapiens
  source 1..23: mol_type = unassigned RNA
agacatgtggcgtcaatcccaaa

SEQ ID NO: 700 - RNA, 21 nt, Homo sapiens
  source 1..21: mol_type = unassigned RNA
ctgcctgttcttccactccag

SEQ ID NO: 701 - RNA, 21 nt, Homo sapiens
  source 1..21: mol_type = unassigned RNA
ctggagtggaagaacaggcag

SEQ ID NO: 702 - RNA, 23 nt, Homo sapiens
  source 1..23: mol_type = unassigned RNA
tatggagtggactttcagctggc

SEQ ID NO: 703 - RNA, 23 nt, Homo sapiens
  source 1..23: mol_type = unassigned RNA
gccagctgaaagtccactccata

SEQ ID NO: 704 - RNA, 22 nt, Homo sapiens
  source 1..22: mol_type = unassigned RNA
cctcaccatcccttctgcctgc

SEQ ID NO: 705 - RNA, 22 nt, Homo sapiens
  source 1..22: mol_type = unassigned RNA
gcaggcagaagggatggtgagg

SEQ ID NO: 706 - RNA, 23 nt, Homo sapiens
  source 1..23: mol_type = unassigned RNA
caggcagaagtggggctgacagg

SEQ ID NO: 707 - RNA, 23 nt, Homo sapiens
  source 1..23: mol_type = unassigned RNA
cctgtcagccccacttctgcctg

SEQ ID NO: 708 - RNA, 20 nt, Homo sapiens
  source 1..20: mol_type = unassigned RNA
tctcttcatctaccccccag

SEQ ID NO: 709 - RNA, 20 nt, Homo sapiens
  source 1..20: mol_type = unassigned RNA
ctggggggtagatgaagaga

SEQ ID NO: 710 - RNA, 21 nt, Homo sapiens
  source 1..21: mol_type = unassigned RNA
ttggagggtgtggaagacatc

SEQ ID NO: 711 - RNA, 21 nt, Homo sapiens
  source 1..21: mol_type = unassigned RNA
gatgtcttccacaccctccaa

SEQ ID NO: 712 - RNA, 22 nt, Homo sapiens
  source 1..22: mol_type = unassigned RNA
ctgccagccccgttccagggca

SEQ ID NO: 713 - RNA, 22 nt, Homo sapiens
  source 1..22: mol_type = unassigned RNA
tgccctggaacggggctggcag

SEQ ID NO: 714 - RNA, 23 nt, Homo sapiens
  source 1..23: mol_type = unassigned RNA
acaaagtacagcattagccttag

SEQ ID NO: 715 - RNA, 23 nt, Homo sapiens
  source 1..23: mol_type = unassigned RNA
ctaaggctaatgctgtactttgt

SEQ ID NO: 716 - RNA, 23 nt, Homo sapiens
  source 1..23: mol_type = unassigned RNA
aaaggtcattgtaaggttaatgc

SEQ ID NO: 717 - RNA, 23 nt, Homo sapiens
  source 1..23: mol_type = unassigned RNA
gcattaaccttacaatgaccttt

SEQ ID NO: 718 - RNA, 22 nt, Homo sapiens
  source 1..22: mol_type = unassigned RNA
tgaggctaatgcactacttcac

SEQ ID NO: 719 - RNA, 22 nt, Homo sapiens
  source 1..22: mol_type = unassigned RNA
gtgaagtagtgcattagcctca

SEQ ID NO: 720 - RNA, 24 nt, Homo sapiens
  source 1..24: mol_type = unassigned RNA
tatagagagcaggaagattaatgt

SEQ ID NO: 721 - RNA, 24 nt, Homo sapiens
  source 1..24: mol_type = unassigned RNA
acattaatcttcctgctctctata

SEQ ID NO: 722 - RNA, 23 nt, Homo sapiens
  source 1..23: mol_type = unassigned RNA
gtgcttcatcgtaattaacctta

SEQ ID NO: 723 - RNA, 23 nt, Homo sapiens
  source 1..23: mol_type = unassigned RNA
taaggttaattacgatgaagcac

SEQ ID NO: 724 - RNA, 24 nt, Homo sapiens
  source 1..24: mol_type = unassigned RNA
gtggaaagcatgcatccagggtgt

SEQ ID NO: 725 - RNA, 24 nt, Homo sapiens
  source 1..24: mol_type = unassigned RNA
acaccctggatgcatgctttccac

SEQ ID NO: 726 - RNA, 22 nt, Homo sapiens
  source 1..22: mol_type = unassigned RNA
agacacatttggagagggaacc

SEQ ID NO: 727 - RNA, 22 nt, Homo sapiens
  source 1..22: mol_type = unassigned RNA
ggttccctctccaaatgtgtct

SEQ ID NO: 728 - RNA, 22 nt, Homo sapiens
  source 1..22: mol_type = unassigned RNA
ttccctttgtcatcctatgcct

SEQ ID NO: 729 - RNA, 22 nt, Homo sapiens
  source 1..22: mol_type = unassigned RNA
aggcataggatgacaaagggaa

SEQ ID NO: 730 - RNA, 21 nt, Homo sapiens
  source 1..21: mol_type = unassigned RNA
gctgggaaggcaaagggacgt

SEQ ID NO: 731 - RNA, 21 nt, Homo sapiens
  source 1..21: mol_type = unassigned RNA
acgtccctttgccttcccagc

SEQ ID NO: 732 - RNA, 21 nt, Homo sapiens
  source 1..21: mol_type = unassigned RNA
taccacagggtagaaccacgg

SEQ ID NO: 733 - RNA, 21 nt, Homo sapiens
  source 1..21: mol_type = unassigned RNA
ccgtggttctaccctgtggta

SEQ ID NO: 734 - RNA, 22 nt, Homo sapiens
  source 1..22: mol_type = unassigned RNA
ggctggagcgagtgcagtggtg

SEQ ID NO: 735 - RNA, 22 nt, Homo sapiens
  source 1..22: mol_type = unassigned RNA
caccactgcactcgctccagcc

SEQ ID NO: 736 - RNA, 18 nt, Homo sapiens
  source 1..18: mol_type = unassigned RNA
ccaggctctgcagtggga

SEQ ID NO: 737 - RNA, 18 nt, Homo sapiens
  source 1..18: mol_type = unassigned RNA
tcccactgcagagcctgg

SEQ ID NO: 738 - RNA, 22 nt, Homo sapiens
  source 1..22: mol_type = unassigned RNA
ctgggaggtgtgatattgtggt

SEQ ID NO: 739 - RNA, 22 nt, Homo sapiens
  source 1..22: mol_type = unassigned RNA
accacaatatcacacctcccag

SEQ ID NO: 740 - RNA, 22 nt, Homo sapiens
  source 1..22: mol_type = unassigned RNA
gggaggtgtgatctcacactcg

SEQ ID NO: 741 - RNA, 22 nt, Homo sapiens
  source 1..22: mol_type = unassigned RNA
cgagtgtgagatcacacctccc

SEQ ID NO: 742 - RNA, 22 nt, Homo sapiens
  source 1..22: mol_type = unassigned RNA
tgtgatatcatggttcctggga

SEQ ID NO: 743 - RNA, 22 nt, Homo sapiens
  source 1..22: mol_type = unassigned RNA
tcccaggaaccatgatatcaca

SEQ ID NO: 744 - RNA, 22 nt, Homo sapiens
  source 1..22: mol_type = unassigned RNA
tgtgatatcgtgcttcctggga

SEQ ID NO: 745 - RNA, 22 nt, Homo sapiens
  source 1..22: mol_type = unassigned RNA
tcccaggaagcacgatatcaca

SEQ ID NO: 746 - RNA, 18 nt, Homo sapiens
  source 1..18: mol_type = unassigned RNA
ggtgggcttcccggaggg

SEQ ID NO: 747 - RNA, 18 nt, Homo sapiens
  source 1..18: mol_type = unassigned RNA
ccctccgggaagcccacc

SEQ ID NO: 748 - RNA, 18 nt, Homo sapiens
  source 1..18: mol_type = unassigned RNA
cactgcaggactcagcag

SEQ ID NO: 749 - RNA, 18 nt, Homo sapiens
  source 1..18: mol_type = unassigned RNA
ctgctgagtcctgcagtg

SEQ ID NO: 750 - RNA, 17 nt, Homo sapiens
  source 1..17: mol_type = unassigned RNA
tgagggaggagactgca

SEQ ID NO: 751 - RNA, 17 nt, Homo sapiens
  source 1..17: mol_type = unassigned RNA
tgcagtctcctccctca

SEQ ID NO: 752 - RNA, 18 nt, Homo sapiens
  source 1..18: mol_type = unassigned RNA
gaggctgaaggaagatgg

SEQ ID NO: 753 - RNA, 18 nt, Homo sapiens
  source 1..18: mol_type = unassigned RNA
ccatcttccttcagcctc

SEQ ID NO: 754 - RNA, 22 nt, Homo sapiens
  source 1..22: mol_type = unassigned RNA
gtcactgatgtctgtagctgag

SEQ ID NO: 755 - RNA, 22 nt, Homo sapiens
  source 1..22: mol_type = unassigned RNA
ctcagctacagacatcagtgac

SEQ ID NO: 756 - RNA, 22 nt, Homo sapiens
  source 1..22: mol_type = unassigned RNA
acctgtctgtggaaaggagcta

SEQ ID NO: 757 - RNA, 22 nt, Homo sapiens
  source 1..22: mol_type = unassigned RNA
tagctcctttccacagacaggt

SEQ ID NO: 758 - RNA, 22 nt, Homo sapiens
  source 1..22: mol_type = unassigned RNA
agagttaactcaaaatggacta

SEQ ID NO: 759 - RNA, 22 nt, Homo sapiens
  source 1..22: mol_type = unassigned RNA
tagtccattttgagttaactct

SEQ ID NO: 760 - RNA, 22 nt, Homo sapiens
  source 1..22: mol_type = unassigned RNA
tgttgggattcagcaggaccat

SEQ ID NO: 761 - RNA, 22 nt, Homo sapiens
  source 1..22: mol_type = unassigned RNA
atggtcctgctgaatcccaaca

SEQ ID NO: 762 - RNA, 17 nt, Homo sapiens
  source 1..17: mol_type = unassigned RNA
gaagatggacgtacttt

SEQ ID NO: 763 - RNA, 17 nt, Homo sapiens
  source 1..17: mol_type = unassigned RNA
aaagtacgtccatcttc

SEQ ID NO: 764 - RNA, 21 nt, Homo sapiens
  source 1..21: mol_type = unassigned RNA
tctgaatagagtctgaagagt

SEQ ID NO: 765 - RNA, 21 nt, Homo sapiens
  source 1..21: mol_type = unassigned RNA
actcttcagactctattcaga

SEQ ID NO: 766 - RNA, 22 nt, Homo sapiens
  source 1..22: mol_type = unassigned RNA
caaggagacgggaacatggagc

SEQ ID NO: 767 - RNA, 22 nt, Homo sapiens
  source 1..22: mol_type = unassigned RNA
gctccatgttcccgtctccttg

SEQ ID NO: 768 - RNA, 20 nt, Homo sapiens
  source 1..20: mol_type = unassigned RNA
aaaagctgggctgagaggcg

SEQ ID NO: 769 - RNA, 20 nt, Homo sapiens
  source 1..20: mol_type = unassigned RNA
cgcctctcagcccagctttt

SEQ ID NO: 770 - RNA, 18 nt, Homo sapiens
  source 1..18: mol_type = unassigned RNA
aggctggagtgagcggag

SEQ ID NO: 771 - RNA, 18 nt, Homo sapiens
  source 1..18: mol_type = unassigned RNA
ctccgctcactccagcct

SEQ ID NO: 772 - RNA, 22 nt, Homo sapiens
  source 1..22: mol_type = unassigned RNA
gcgactctgaaaactagaaggt

SEQ ID NO: 773 - RNA, 22 nt, Homo sapiens
  source 1..22: mol_type = unassigned RNA
accttctagttttcagagtcgc

SEQ ID NO: 774 - RNA, 20 nt, Homo sapiens
  source 1..20: mol_type = unassigned RNA
aaagactctgcaagatgcct

SEQ ID NO: 775 - RNA, 20 nt, Homo sapiens
  source 1..20: mol_type = unassigned RNA
aggcatcttgcagagtcttt

SEQ ID NO: 776 - RNA, 21 nt, Homo sapiens
  source 1..21: mol_type = unassigned RNA
acaggagtgggggtgggacat

SEQ ID NO: 777 - RNA, 21 nt, Homo sapiens
  source 1..21: mol_type = unassigned RNA
atgtcccacccccactcctgt

SEQ ID NO: 778 - RNA, 21 nt, Homo sapiens
  source 1..21: mol_type = unassigned RNA
cgtcccaccccccactcctgt

SEQ ID NO: 779 - RNA, 21 nt, Homo sapiens
  source 1..21: mol_type = unassigned RNA
acaggagtggggggtgggacg

SEQ ID NO: 780 - RNA, 18 nt, Homo sapiens
  source 1..18: mol_type = unassigned RNA
aggagaagtaaagtagaa

SEQ ID NO: 781 - RNA, 18 nt, Homo sapiens
  source 1..18: mol_type = unassigned RNA
ttctactttacttctcct

SEQ ID NO: 782 - RNA, 22 nt, Homo sapiens
  source 1..22: mol_type = unassigned RNA
atggccagagctcacacagagg

SEQ ID NO: 783 - RNA, 22 nt, Homo sapiens
  source 1..22: mol_type = unassigned RNA
cctctgtgtgagctctggccat

SEQ ID NO: 784 - RNA, 21 nt, Homo sapiens
  source 1..21: mol_type = unassigned RNA
tgggctcagggtacaaaggtt

SEQ ID NO: 785 - RNA, 21 nt, Homo sapiens
  source 1..21: mol_type = unassigned RNA
aacctttgtaccctgagccca

SEQ ID NO: 786 - RNA, 21 nt, Homo sapiens
  source 1..21: mol_type = unassigned RNA
cacaggcttagaaaagacagt

SEQ ID NO: 787 - RNA, 21 nt, Homo sapiens
  source 1..21: mol_type = unassigned RNA
actgtcttttctaagcctgtg

SEQ ID NO: 788 - RNA, 22 nt, Homo sapiens
  source 1..22: mol_type = unassigned RNA
gtgactgataccttggaggcat

SEQ ID NO: 789 - RNA, 22 nt, Homo sapiens
  source 1..22: mol_type = unassigned RNA
atgcctccaaggtatcagtcac

SEQ ID NO: 790 - RNA, 22 nt, Homo sapiens
  source 1..22: mol_type = unassigned RNA
tgtcgtggggcttgctggcttg

SEQ ID NO: 791 - RNA, 22 nt, Homo sapiens
  source 1..22: mol_type = unassigned RNA
caagccagcaagccccacgaca

SEQ ID NO: 792 - RNA, 17 nt, Homo sapiens
  source 1..17: mol_type = unassigned RNA
acagggaggagattgta

SEQ ID NO: 793 - RNA, 17 nt, Homo sapiens
  source 1..17: mol_type = unassigned RNA
tacaatctcctccctgt

SEQ ID NO: 794 - RNA, 17 nt, Homo sapiens
  source 1..17: mol_type = unassigned RNA
gccggacaagagggagg

SEQ ID NO: 795 - RNA, 17 nt, Homo sapiens
  source 1..17: mol_type = unassigned RNA
cctccctcttgtccggc

SEQ ID NO: 796 - RNA, 17 nt, Homo sapiens
  source 1..17: mol_type = unassigned RNA
ttggaggcgtgggtttt

SEQ ID NO: 797 - RNA, 17 nt, Homo sapiens
  source 1..17: mol_type = unassigned RNA
aaaacccacgcctccaa

SEQ ID NO: 798 - RNA, 18 nt, Homo sapiens
  source 1..18: mol_type = unassigned RNA
ctcgagttggaagaggcg

SEQ ID NO: 799 - RNA, 18 nt, Homo sapiens
  source 1..18: mol_type = unassigned RNA
cgcctcttccaactcgag

SEQ ID NO: 800 - RNA, 21 nt, Homo sapiens
  source 1..21: mol_type = unassigned RNA
cacggcaaaagaaacaatcca

SEQ ID NO: 801 - RNA, 21 nt, Homo sapiens
  source 1..21: mol_type = unassigned RNA
tggattgtttcttttgccgtg

SEQ ID NO: 802 - RNA, 22 nt, Homo sapiens
  source 1..22: mol_type = unassigned RNA
agattgtttcttttgccgtgca

SEQ ID NO: 803 - RNA, 22 nt, Homo sapiens
  source 1..22: mol_type = unassigned RNA
tgcacggcaaaagaaacaatct

SEQ ID NO: 804 - RNA, 17 nt, Homo sapiens
  source 1..17: mol_type = unassigned RNA
ggtgggggctgttgttt

SEQ ID NO: 805 - RNA, 17 nt, Homo sapiens
  source 1..17: mol_type = unassigned RNA
aaacaacagcccccacc

SEQ ID NO: 806 - RNA, 20 nt, Homo sapiens
  source 1..20: mol_type = unassigned RNA
ggctccttggtctaggggta

SEQ ID NO: 807 - RNA, 20 nt, Homo sapiens
  source 1..20: mol_type = unassigned RNA
tacccctagaccaaggagcc

SEQ ID NO: 808 - RNA, 22 nt, Homo sapiens
  source 1..22: mol_type = unassigned RNA
cgtcccggggctgcgcgaggca

SEQ ID NO: 809 - RNA, 22 nt, Homo sapiens
  source 1..22: mol_type = unassigned RNA
tgcctcgcgcagccccgggacg

SEQ ID NO: 810 - RNA, 22 nt, Homo sapiens
  source 1..22: mol_type = unassigned RNA
tggggatttggagaagtggtga

SEQ ID NO: 811 - RNA, 22 nt, Homo sapiens
  source 1..22: mol_type = unassigned RNA
tcaccacttctccaaatcccca

SEQ ID NO: 812 - RNA, 17 nt, Homo sapiens
  source 1..17: mol_type = unassigned RNA
tggtagagctgaggaca

SEQ ID NO: 813 - RNA, 17 nt, Homo sapiens
  source 1..17: mol_type = unassigned RNA
tgtcctcagctctacca

SEQ ID NO: 814 - RNA, 23 nt, Homo sapiens
  source 1..23: mol_type = unassigned RNA
ttgaattcttggccttaagtgat

SEQ ID NO: 815 - RNA, 23 nt, Homo sapiens
  source 1..23: mol_type = unassigned RNA
atcacttaaggccaagaattcaa

SEQ ID NO: 816 - RNA, 20 nt, Homo sapiens
  source 1..20: mol_type = unassigned RNA
gagcttggtctgtagcggtt

SEQ ID NO: 817 - RNA, 20 nt, Homo sapiens
  source 1..20: mol_type = unassigned RNA
aaccgctacagaccaagctc

SEQ ID NO: 818 - RNA, 20 nt, Homo sapiens
  source 1..20: mol_type = unassigned RNA
ggatccgagtcacggcacca

SEQ ID NO: 819 - RNA, 20 nt, Homo sapiens
  source 1..20: mol_type = unassigned RNA
tggtgccgtgactcggatcc

SEQ ID NO: 820 - RNA, 17 nt, Homo sapiens
  source 1..17: mol_type = unassigned RNA
agggtgtgtgtgttttt

SEQ ID NO: 821 - RNA, 17 nt, Homo sapiens
  source 1..17: mol_type = unassigned RNA
aaaaacacacacaccct

SEQ ID NO: 822 - RNA, 17 nt, Homo sapiens
  source 1..17: mol_type = unassigned RNA
cctggtggcttcctttt

SEQ ID NO: 823 - RNA, 17 nt, Homo sapiens
  source 1..17: mol_type = unassigned RNA
aaaaggaagccaccagg

SEQ ID NO: 824 - RNA, 22 nt, Homo sapiens
  source 1..22: mol_type = unassigned RNA
tcacaaggtattgactggcgta

SEQ ID NO: 825 - RNA, 22 nt, Homo sapiens
  source 1..22: mol_type = unassigned RNA
tacgccagtcaataccttgtga

SEQ ID NO: 826 - RNA, 19 nt, Homo sapiens
  source 1..19: mol_type = unassigned RNA
agaggtaggtgtggaagaa

SEQ ID NO: 827 - RNA, 19 nt, Homo sapiens
  source 1..19: mol_type = unassigned RNA
ttcttccacacctacctct

SEQ ID NO: 828 - RNA, 22 nt, Homo sapiens
  source 1..22: mol_type = unassigned RNA
ccaggaggcggaggaggtggag

SEQ ID NO: 829 - RNA, 22 nt, Homo sapiens
  source 1..22: mol_type = unassigned RNA
ctccacctcctccgcctcctgg

SEQ ID NO: 830 - RNA, 22 nt, Homo sapiens
  source 1..22: mol_type = unassigned RNA
atagtggttgtgaatttacctt

SEQ ID NO: 831 - RNA, 22 nt, Homo sapiens
  source 1..22: mol_type = unassigned RNA
aaggtaaattcacaaccactat

SEQ ID NO: 832 - RNA, 23 nt, Homo sapiens
  source 1..23: mol_type = unassigned RNA
gattgagactagtagggctaggc

SEQ ID NO: 833 - RNA, 23 nt, Homo sapiens
  source 1..23: mol_type = unassigned RNA
gcctagccctactagtctcaatc

SEQ ID NO: 834 - RNA, 23 nt, Homo sapiens
  source 1..23: mol_type = unassigned RNA
tgacacggagggtggcttgggaa

SEQ ID NO: 835 - RNA, 23 nt, Homo sapiens
  source 1..23: mol_type = unassigned RNA
ttcccaagccaccctccgtgtca

SEQ ID NO: 836 - RNA, 17 nt, Homo sapiens
  source 1..17: mol_type = unassigned RNA
gagactggggtggggcc

SEQ ID NO: 837 - RNA, 17 nt, Homo sapiens
  source 1..17: mol_type = unassigned RNA
ggccccaccccagtctc

SEQ ID NO: 838 - RNA, 21 nt, Homo sapiens
  source 1..21: mol_type = unassigned RNA
aaggtttggatagatgcaata

SEQ ID NO: 839 - RNA, 21 nt, Homo sapiens
  source 1..21: mol_type = unassigned RNA
tattgcatctatccaaacctt

SEQ ID NO: 840 - RNA, 22 nt, Homo sapiens
  source 1..22: mol_type = unassigned RNA
ctcaagtagtctgaccagggga

SEQ ID NO: 841 - RNA, 22 nt, Homo sapiens
  source 1..22: mol_type = unassigned RNA
tcccctggtcagactacttgag

SEQ ID NO: 842 - RNA, 18 nt, Homo sapiens
  source 1..18: mol_type = unassigned RNA
gggtgcgggccggcgggg

SEQ ID NO: 843 - RNA, 18 nt, Homo sapiens
  source 1..18: mol_type = unassigned RNA
ccccgccggcccgcaccc

SEQ ID NO: 844 - RNA, 18 nt, Homo sapiens
  source 1..18: mol_type = unassigned RNA
agagcagaaggatgagat

SEQ ID NO: 845 - RNA, 18 nt, Homo sapiens
  source 1..18: mol_type = unassigned RNA
atctcatccttctgctct

SEQ ID NO: 846 - RNA, 21 nt, Homo sapiens
  source 1..21: mol_type = unassigned RNA
tggcaaacgtggaagccgaga

SEQ ID NO: 847 - RNA, 21 nt, Homo sapiens
  source 1..21: mol_type = unassigned RNA
tctcggcttccacgtttgcca

SEQ ID NO: 848 - RNA, 18 nt, Homo sapiens
  source 1..18: mol_type = unassigned RNA
ggtggggggtgttgtttt

SEQ ID NO: 849 - RNA, 18 nt, Homo sapiens
  source 1..18: mol_type = unassigned RNA
aaaacaacaccccccacc

SEQ ID NO: 850 - RNA, 22 nt, Homo sapiens
  source 1..22: mol_type = unassigned RNA
ctagtgctctccgttacaagta

SEQ ID NO: 851 - RNA, 22 nt, Homo sapiens
  source 1..22: mol_type = unassigned RNA
tacttgtaacggagagcactag

SEQ ID NO: 852 - RNA, 22 nt, Homo sapiens
  source 1..22: mol_type = unassigned RNA
caagggaccaagcattcattat

SEQ ID NO: 853 - RNA, 22 nt, Homo sapiens
  source 1..22: mol_type = unassigned RNA
ataatgaatgcttggtcccttg

SEQ ID NO: 854 - RNA, 22 nt, Homo sapiens
  source 1..22: mol_type = unassigned RNA
caggaaggatttagggacaggc

SEQ ID NO: 855 - RNA, 22 nt, Homo sapiens
  source 1..22: mol_type = unassigned RNA
gcctgtccctaaatccttcctg

SEQ ID NO: 856 - RNA, 22 nt, Homo sapiens
  source 1..22: mol_type = unassigned RNA
ctattaaggacatttgtgattc

SEQ ID NO: 857 - RNA, 22 nt, Homo sapiens
  source 1..22: mol_type = unassigned RNA
gaatcacaaatgtccttaatag

SEQ ID NO: 858 - RNA, 22 nt, Homo sapiens
  source 1..22: mol_type = unassigned RNA
attaaggacatttgtgattgat

SEQ ID NO: 859 - RNA, 22 nt, Homo sapiens
  source 1..22: mol_type = unassigned RNA
atcaatcacaaatgtccttaat

SEQ ID NO: 860 - RNA, 17 nt, Homo sapiens
  source 1..17: mol_type = unassigned RNA
gaggctgagctgaggag

SEQ ID NO: 861 - RNA, 17 nt, Homo sapiens
  source 1..17: mol_type = unassigned RNA
ctcctcagctcagcctc

SEQ ID NO: 862 - RNA, 22 nt, Homo sapiens
  source 1..22: mol_type = unassigned RNA
cgcgcggccgtgctcggagcag

SEQ ID NO: 863 - RNA, 22 nt, Homo sapiens
  source 1..22: mol_type = unassigned RNA
ctgctccgagcacggccgcgcg

SEQ ID NO: 864 - RNA, 21 nt, Homo sapiens
  source 1..21: mol_type = unassigned RNA
agccaagtggaagttacttta

SEQ ID NO: 865 - RNA, 21 nt, Homo sapiens
  source 1..21: mol_type = unassigned RNA
taaagtaacttccacttggct

SEQ ID NO: 866 - RNA, 17 nt, Homo sapiens
  source 1..17: mol_type = unassigned RNA
ggagtgggctggtggtt

SEQ ID NO: 867 - RNA, 17 nt, Homo sapiens
  source 1..17: mol_type = unassigned RNA
aaccaccagcccactcc

SEQ ID NO: 868 - RNA, 22 nt, Homo sapiens
  source 1..22: mol_type = unassigned RNA
tttctatttctcagtggggctc

SEQ ID NO: 869 - RNA, 22 nt, Homo sapiens
  source 1..22: mol_type = unassigned RNA
gagccccactgagaaatagaaa

SEQ ID NO: 870 - RNA, 22 nt, Homo sapiens
  source 1..22: mol_type = unassigned RNA
aacccagtgggctatggaaatg

SEQ ID NO: 871 - RNA, 22 nt, Homo sapiens
  source 1..22: mol_type = unassigned RNA
catttccatagcccactgggtt

SEQ ID NO: 872 - RNA, 17 nt, Homo sapiens
  source 1..17: mol_type = unassigned RNA
ggggtggtctgttgttg

SEQ ID NO: 873 - RNA, 17 nt, Homo sapiens
  source 1..17: mol_type = unassigned RNA
caacaacagaccacccc

SEQ ID NO: 874 - RNA, 20 nt, Homo sapiens
  source 1..20: mol_type = unassigned RNA
aaaaggcgggagaagcccca

SEQ ID NO: 875 - RNA, 20 nt, Homo sapiens
  source 1..20: mol_type = unassigned RNA
tggggcttctcccgcctttt

SEQ ID NO: 876 - RNA, 20 nt, Homo sapiens
  source 1..20: mol_type = unassigned RNA
taacggccgcggtaccctaa

SEQ ID NO: 877 - RNA, 20 nt, Homo sapiens
  source 1..20: mol_type = unassigned RNA
ttagggtaccgcggccgtta

SEQ ID NO: 878 - RNA, 17 nt, Homo sapiens
  source 1..17: mol_type = unassigned RNA
gctgggcgaggctggca

SEQ ID NO: 879 - RNA, 17 nt, Homo sapiens
  source 1..17: mol_type = unassigned RNA
tgccagcctcgcccagc

SEQ ID NO: 880 - RNA, 19 nt, Homo sapiens
  source 1..19: mol_type = unassigned RNA
agagctggctgaagggcag

SEQ ID NO: 881 - RNA, 19 nt, Homo sapiens
  source 1..19: mol_type = unassigned RNA
ctgcccttcagccagctct

SEQ ID NO: 882 - RNA, 18 nt, Homo sapiens
  source 1..18: mol_type = unassigned RNA
agggggcgggctccggcg

SEQ ID NO: 883 - RNA, 18 nt, Homo sapiens
  source 1..18: mol_type = unassigned RNA
cgccggagcccgccccct

SEQ ID NO: 884 - RNA, 22 nt, Homo sapiens
  source 1..22: mol_type = unassigned RNA
tctggtaagagatttgggcata

SEQ ID NO: 885 - RNA, 22 nt, Homo sapiens
  source 1..22: mol_type = unassigned RNA
tatgcccaaatctcttaccaga

SEQ ID NO: 886 - RNA, 22 nt, Homo sapiens
  source 1..22: mol_type = unassigned RNA
aatgtggactggtgtgaccaaa

SEQ ID NO: 887 - RNA, 22 nt, Homo sapiens
  source 1..22: mol_type = unassigned RNA
tttggtcacaccagtccacatt

SEQ ID NO: 888 - RNA, 17 nt, Homo sapiens
  source 1..17: mol_type = unassigned RNA
ggggctgggcgcgcgcc

SEQ ID NO: 889 - RNA, 17 nt, Homo sapiens
  source 1..17: mol_type = unassigned RNA
ggcgcgcgcccagcccc

SEQ ID NO: 890 - RNA, 21 nt, Homo sapiens
  source 1..21: mol_type = unassigned RNA
agaaggcctttccatctctgt

SEQ ID NO: 891 - RNA, 21 nt, Homo sapiens
  source 1..21: mol_type = unassigned RNA
acagagatggaaaggccttct

SEQ ID NO: 892 - RNA, 22 nt, Homo sapiens
  source 1..22: mol_type = unassigned RNA
ccagactgtggctgaccagagg

SEQ ID NO: 893 - RNA, 22 nt, Homo sapiens
  source 1..22: mol_type = unassigned RNA
cctctggtcagccacagtctgg

SEQ ID NO: 894 - RNA, 21 nt, Homo sapiens
  source 1..21: mol_type = unassigned RNA
aatgtaaacaggctttttgct

SEQ ID NO: 895 - RNA, 21 nt, Homo sapiens
  source 1..21: mol_type = unassigned RNA
agcaaaaagcctgtttacatt

SEQ ID NO: 896 - RNA, 22 nt, Homo sapiens
  source 1..22: mol_type = unassigned RNA
gaggaaactgaagctgagaggg

SEQ ID NO: 897 - RNA, 22 nt, Homo sapiens
  source 1..22: mol_type = unassigned RNA
ccctctcagcttcagtttcctc

SEQ ID NO: 898 - RNA, 17 nt, Homo sapiens
  source 1..17: mol_type = unassigned RNA
ctccgggacggctgggc

SEQ ID NO: 899 - RNA, 17 nt, Homo sapiens
  source 1..17: mol_type = unassigned RNA
gcccagccgtcccggag

SEQ ID NO: 900 - RNA, 22 nt, Homo sapiens
  source 1..22: mol_type = unassigned RNA
tgggctggcagggcaagtgctg

SEQ ID NO: 901 - RNA, 22 nt, Homo sapiens
  source 1..22: mol_type = unassigned RNA
cagcacttgccctgccagccca

SEQ ID NO: 902 - RNA, 17 nt, Homo sapiens
  source 1..17: mol_type = unassigned RNA
aagactgagaggaggga

SEQ ID NO: 903 - RNA, 17 nt, Homo sapiens
  source 1..17: mol_type = unassigned RNA
tccctcctctcagtctt

SEQ ID NO: 904 - RNA, 17 nt, Homo sapiens
  source 1..17: mol_type = unassigned RNA
tgaggtagtagtttctt

SEQ ID NO: 905 - RNA, 17 nt, Homo sapiens
  source 1..17: mol_type = unassigned RNA
aagaaactactacctca

SEQ ID NO: 906 - RNA, 21 nt, Homo sapiens
  source 1..21: mol_type = unassigned RNA
tatgtgacctcggatgaatca

SEQ ID NO: 907 - RNA, 21 nt, Homo sapiens
  source 1..21: mol_type = unassigned RNA
tgattcatccgaggtcacata

SEQ ID NO: 908 - RNA, 22 nt, Homo sapiens
  source 1..22: mol_type = unassigned RNA
gctgatgatgatggtgctgaag

SEQ ID NO: 909 - RNA, 22 nt, Homo sapiens
  source 1..22: mol_type = unassigned RNA
cttcagcaccatcatcatcagc

SEQ ID NO: 910 - RNA, 22 nt, Homo sapiens
  source 1..22: mol_type = unassigned RNA
tttaagcaggaaatagaattta

SEQ ID NO: 911 - RNA, 22 nt, Homo sapiens
  source 1..22: mol_type = unassigned RNA
taaattctatttcctgcttaaa

SEQ ID NO: 912 - RNA, 22 nt, Homo sapiens
  source 1..22: mol_type = unassigned RNA
tgtgacaatagagatgaacatg

SEQ ID NO: 913 - RNA, 22 nt, Homo sapiens
  source 1..22: mol_type = unassigned RNA
catgttcatctctattgtcaca

SEQ ID NO: 914 - RNA, 18 nt, Homo sapiens
  source 1..18: mol_type = unassigned RNA
aggctgggctgggacgga

SEQ ID NO: 915 - RNA, 18 nt, Homo sapiens
  source 1..18: mol_type = unassigned RNA
tccgtcccagcccagcct

SEQ ID NO: 916 - RNA, 20 nt, Homo sapiens
  source 1..20: mol_type = unassigned RNA
aaatgggtggtctgaggcaa

SEQ ID NO: 917 - RNA, 20 nt, Homo sapiens
  source 1..20: mol_type = unassigned RNA
ttgcctcagaccacccattt

SEQ ID NO: 918 - RNA, 20 nt, Homo sapiens
  source 1..20: mol_type = unassigned RNA
ctgggttgggctgggctggg

SEQ ID NO: 919 - RNA, 20 nt, Homo sapiens
  source 1..20: mol_type = unassigned RNA
cccagcccagcccaacccag

SEQ ID NO: 920 - RNA, 17 nt, Homo sapiens
  source 1..17: mol_type = unassigned RNA
gcggggctgggcgcgcg

SEQ ID NO: 921 - RNA, 17 nt, Homo sapiens
  source 1..17: mol_type = unassigned RNA
cgcgcgcccagccccgc

SEQ ID NO: 922 - RNA, 22 nt, Homo sapiens
  source 1..22: mol_type = unassigned RNA
actaaaggatatagaaggtttt

SEQ ID NO: 923 - RNA, 22 nt, Homo sapiens
  source 1..22: mol_type = unassigned RNA
aaaaccttctatatcctttagt

SEQ ID NO: 924 - RNA, 22 nt, Homo sapiens
  source 1..22: mol_type = unassigned RNA
tgagggagtaggatgtatggtt

SEQ ID NO: 925 - RNA, 22 nt, Homo sapiens
  source 1..22: mol_type = unassigned RNA
aaccatacatcctactccctca

SEQ ID NO: 926 - RNA, 22 nt, Homo sapiens
  source 1..22: mol_type = unassigned RNA
gaagaactgttgcatttgccct

SEQ ID NO: 927 - RNA, 22 nt, Homo sapiens
  source 1..22: mol_type = unassigned RNA
agggcaaatgcaacagttcttc

SEQ ID NO: 928 - RNA, 22 nt, Homo sapiens
  source 1..22: mol_type = unassigned RNA
cagggcctcactgtatcgccca

SEQ ID NO: 929 - RNA, 22 nt, Homo sapiens
  source 1..22: mol_type = unassigned RNA
tgggcgatacagtgaggccctg

SEQ ID NO: 930 - RNA, 22 nt, Homo sapiens
  source 1..22: mol_type = unassigned RNA
agactgacggctggaggcccat

SEQ ID NO: 931 - RNA, 22 nt, Homo sapiens
  source 1..22: mol_type = unassigned RNA
atgggcctccagccgtcagtct

SEQ ID NO: 932 - RNA, 18 nt, Homo sapiens
  source 1..18: mol_type = unassigned RNA
acaggcaggattggggaa

SEQ ID NO: 933 - RNA, 18 nt, Homo sapiens
  source 1..18: mol_type = unassigned RNA
ttccccaatcctgcctgt

SEQ ID NO: 934 - RNA, 22 nt, Homo sapiens
  source 1..22: mol_type = unassigned RNA
aggactggactcccggcagccc

SEQ ID NO: 935 - RNA, 22 nt, Homo sapiens
  source 1..22: mol_type = unassigned RNA
gggctgccgggagtccagtcct

SEQ ID NO: 936 - RNA, 17 nt, Homo sapiens
  source 1..17: mol_type = unassigned RNA
gggagaagggtcggggc

SEQ ID NO: 937 - RNA, 17 nt, Homo sapiens
  source 1..17: mol_type = unassigned RNA
gccccgacccttctccc

SEQ ID NO: 938 - RNA, 25 nt, Homo sapiens
  source 1..25: mol_type = unassigned RNA
aaatatgatgaaactcacagctgag

SEQ ID NO: 939 - RNA, 25 nt, Homo sapiens
  source 1..25: mol_type = unassigned RNA
ctcagctgtgagtttcatcatattt

SEQ ID NO: 940 - RNA, 26 nt, Homo sapiens
  source 1..26: mol_type = unassigned RNA
gctcagggatgataactgtgctgaga

SEQ ID NO: 941 - RNA, 26 nt, Homo sapiens
  source 1..26: mol_type = unassigned RNA
tctcagcacagttatcatccctgagc

SEQ ID NO: 942 - RNA, 18 nt, Homo sapiens
  source 1..18: mol_type = unassigned RNA
cagcagtgcgcagggctg

SEQ ID NO: 943 - RNA, 18 nt, Homo sapiens
  source 1..18: mol_type = unassigned RNA
cagccctgcgcactgctg

SEQ ID NO: 944 - RNA, 22 nt, Homo sapiens
  source 1..22: mol_type = unassigned RNA
gctaaggaagtcctgtgctcag

SEQ ID NO: 945 - RNA, 22 nt, Homo sapiens
  source 1..22: mol_type = unassigned RNA
ctgagcacaggacttccttagc

SEQ ID NO: 946 - RNA, 21 nt, Homo sapiens
  source 1..21: mol_type = unassigned RNA
tgactctgcctgtaggccggt

SEQ ID NO: 947 - RNA, 21 nt, Homo sapiens
  source 1..21: mol_type = unassigned RNA
accggcctacaggcagagtca

SEQ ID NO: 948 - RNA, 21 nt, Homo sapiens
  source 1..21: mol_type = unassigned RNA
gaccgagagggcctcggctgt

SEQ ID NO: 949 - RNA, 21 nt, Homo sapiens
  source 1..21: mol_type = unassigned RNA
acagccgaggccctctcggtc

SEQ ID NO: 950 - RNA, 21 nt, Homo sapiens
  source 1..21: mol_type = unassigned RNA
ggggggatgtgcatgctggtt

SEQ ID NO: 951 - RNA, 21 nt, Homo sapiens
  source 1..21: mol_type = unassigned RNA
aaccagcatgcacatcccccc

SEQ ID NO: 952 - RNA, 22 nt, Homo sapiens
  source 1..22: mol_type = unassigned RNA
tggtctgcaaagagatgactgt

SEQ ID NO: 953 - RNA, 22 nt, Homo sapiens
  source 1..22: mol_type = unassigned RNA
acagtcatctctttgcagacca

SEQ ID NO: 954 - RNA, 22 nt, Homo sapiens
  source 1..22: mol_type = unassigned RNA
tcattatatgtatgatctggac

SEQ ID NO: 955 - RNA, 22 nt, Homo sapiens
  source 1..22: mol_type = unassigned RNA
gtccagatcatacatataatga

SEQ ID NO: 956 - RNA, 18 nt, Homo sapiens
  source 1..18: mol_type = unassigned RNA
cccagcaggacgggagcg

SEQ ID NO: 957 - RNA, 18 nt, Homo sapiens
  source 1..18: mol_type = unassigned RNA
cgctcccgtcctgctggg

SEQ ID NO: 958 - RNA, 17 nt, Homo sapiens
  source 1..17: mol_type = unassigned RNA
atggagaaggcttctga

SEQ ID NO: 959 - RNA, 17 nt, Homo sapiens
  source 1..17: mol_type = unassigned RNA
tcagaagccttctccat

SEQ ID NO: 960 - RNA, 17 nt, Homo sapiens
  source 1..17: mol_type = unassigned RNA
ccccggggagcccggcg

SEQ ID NO: 961 - RNA, 17 nt, Homo sapiens
  source 1..17: mol_type = unassigned RNA
cgccgggctccccgggg

SEQ ID NO: 962 - RNA, 22 nt, Homo sapiens
  source 1..22: mol_type = unassigned RNA
tggaaggaggttgccggacgct

SEQ ID NO: 963 - RNA, 22 nt, Homo sapiens
  source 1..22: mol_type = unassigned RNA
agcgtccggcaacctccttcca

SEQ ID NO: 964 - RNA, 17 nt, Homo sapiens
  source 1..17: mol_type = unassigned RNA
ggatggaggaggggtct

SEQ ID NO: 965 - RNA, 17 nt, Homo sapiens
  source 1..17: mol_type = unassigned RNA
agacccctcctccatcc

SEQ ID NO: 966 - RNA, 17 nt, Homo sapiens
  source 1..17: mol_type = unassigned RNA
gtggacctggctgggac

SEQ ID NO: 967 - RNA, 17 nt, Homo sapiens
  source 1..17: mol_type = unassigned RNA
gtcccagccaggtccac

SEQ ID NO: 968 - RNA, 21 nt, Homo sapiens
  source 1..21: mol_type = unassigned RNA
tcgtgcatatatctaccacat

SEQ ID NO: 969 - RNA, 21 nt, Homo sapiens
  source 1..21: mol_type = unassigned RNA
atgtggtagatatatgcacga

SEQ ID NO: 970 - RNA, 21 nt, Homo sapiens
  source 1..21: mol_type = unassigned RNA
tgtggtagatatatgcacgat

SEQ ID NO: 971 - RNA, 21 nt, Homo sapiens
  source 1..21: mol_type = unassigned RNA
atcgtgcatatatctaccaca

SEQ ID NO: 972 - RNA, 22 nt, Homo sapiens
  source 1..22: mol_type = unassigned RNA
tgagccgagctgagcttagctg

SEQ ID NO: 973 - RNA, 22 nt, Homo sapiens
  source 1..22: mol_type = unassigned RNA
cagctaagctcagctcggctca

SEQ ID NO: 974 - RNA, 22 nt, Homo sapiens
  source 1..22: mol_type = unassigned RNA
gagcttggatgagctgggctga

SEQ ID NO: 975 - RNA, 22 nt, Homo sapiens
  source 1..22: mol_type = unassigned RNA
tcagcccagctcatccaagctc

SEQ ID NO: 976 - RNA, 22 nt, Homo sapiens
  source 1..22: mol_type = unassigned RNA
gctgaactgggctgagctgggc

SEQ ID NO: 977 - RNA, 22 nt, Homo sapiens
  source 1..22: mol_type = unassigned RNA
gcccagctcagcccagttcagc

SEQ ID NO: 978 - RNA, 21 nt, Homo sapiens
  source 1..21: mol_type = unassigned RNA
ttagtcctgcctgtaggttta

SEQ ID NO: 979 - RNA, 21 nt, Homo sapiens
  source 1..21: mol_type = unassigned RNA
taaacctacaggcaggactaa

SEQ ID NO: 980 - RNA, 20 nt, Homo sapiens
  source 1..20: mol_type = unassigned RNA
ttgggctgggctgggttggg

SEQ ID NO: 981 - RNA, 20 nt, Homo sapiens
  source 1..20: mol_type = unassigned RNA
cccaacccagcccagcccaa

SEQ ID NO: 982 - RNA, 20 nt, Homo sapiens
  source 1..20: mol_type = unassigned RNA
taggatgggggtgagaggtg

SEQ ID NO: 983 - RNA, 20 nt, Homo sapiens
  source 1..20: mol_type = unassigned RNA
cacctctcacccccatccta

SEQ ID NO: 984 - RNA, 22 nt, Homo sapiens
  source 1..22: mol_type = unassigned RNA
aaaagtaattgtggattttgct

SEQ ID NO: 985 - RNA, 22 nt, Homo sapiens
  source 1..22: mol_type = unassigned RNA
agcaaaatccacaattactttt

SEQ ID NO: 986 - RNA, 22 nt, Homo sapiens
  source 1..22: mol_type = unassigned RNA
caaaaaccggcaattacttttg

SEQ ID NO: 987 - RNA, 22 nt, Homo sapiens
  source 1..22: mol_type = unassigned RNA
caaaagtaattgccggtttttg

SEQ ID NO: 988 - RNA, 22 nt, Homo sapiens
  source 1..22: mol_type = unassigned RNA
gaaaacgacaatgacttttgca

SEQ ID NO: 989 - RNA, 22 nt, Homo sapiens
  source 1..22: mol_type = unassigned RNA
tgcaaaagtcattgtcgttttc

SEQ ID NO: 990 - RNA, 21 nt, Homo sapiens
  source 1..21: mol_type = unassigned RNA
caaaaactgcaattactttca

SEQ ID NO: 991 - RNA, 21 nt, Homo sapiens
  source 1..21: mol_type = unassigned RNA
tgaaagtaattgcagtttttg

SEQ ID NO: 992 - RNA, 21 nt, Homo sapiens
  source 1..21: mol_type = unassigned RNA
aaaggtaattgtggtttctgc

SEQ ID NO: 993 - RNA, 21 nt, Homo sapiens
  source 1..21: mol_type = unassigned RNA
gcagaaaccacaattaccttt

SEQ ID NO: 994 - RNA, 22 nt, Homo sapiens
  source 1..22: mol_type = unassigned RNA
caaaaactgcagttacttttgc

SEQ ID NO: 995 - RNA, 22 nt, Homo sapiens
  source 1..22: mol_type = unassigned RNA
gcaaaagtaactgcagtttttg

SEQ ID NO: 996 - RNA, 20 nt, Homo sapiens
  source 1..20: mol_type = unassigned RNA
aaaagtgattgcagtgtttg

SEQ ID NO: 997 - RNA, 20 nt, Homo sapiens
  source 1..20: mol_type = unassigned RNA
caaacactgcaatcactttt

SEQ ID NO: 998 - RNA, 22 nt, Homo sapiens
  source 1..22: mol_type = unassigned RNA
aaaggtaattgcagtttttccc

SEQ ID NO: 999 - RNA, 22 nt, Homo sapiens
  source 1..22: mol_type = unassigned RNA
gggaaaaactgcaattaccttt

SEQ ID NO: 1000 - RNA, 21 nt, Homo sapiens
  source 1..21: mol_type = unassigned RNA
taaaaactgcaattactttta

SEQ ID NO: 1001 - RNA, 21 nt, Homo sapiens
  source 1..21: mol_type = unassigned RNA
taaaagtaattgcagttttta

SEQ ID NO: 1002 - RNA, 23 nt, Homo sapiens
  source 1..23: mol_type = unassigned RNA
tgcaaaagtaattgcagtttttg

SEQ ID NO: 1003 - RNA, 23 nt, Homo sapiens
  source 1..23: mol_type = unassigned RNA
caaaaactgcaattacttttgca

SEQ ID NO: 1004 - RNA, 21 nt, Homo sapiens
  source 1..21: mol_type = unassigned RNA
aaaagtaactgcggtttttga

SEQ ID NO: 1005 - RNA, 21 nt, Homo sapiens
  source 1..21: mol_type = unassigned RNA
tcaaaaaccgcagttactttt

SEQ ID NO: 1006 - RNA, 22 nt, Homo sapiens
  source 1..22: mol_type = unassigned RNA
aacggcaatgacttttgtacca

SEQ ID NO: 1007 - RNA, 22 nt, Homo sapiens
  source 1..22: mol_type = unassigned RNA
tggtacaaaagtcattgccgtt

SEQ ID NO: 1008 - RNA, 22 nt, Homo sapiens
  source 1..22: mol_type = unassigned RNA
caaaaactgcagttacttttgt

SEQ ID NO: 1009 - RNA, 22 nt, Homo sapiens
  source 1..22: mol_type = unassigned RNA
acaaaagtaactgcagtttttg

SEQ ID NO: 1010 - RNA, 22 nt, Homo sapiens
  source 1..22: mol_type = unassigned RNA
aaaagtaattgcggtttttgcc

SEQ ID NO: 1011 - RNA, 22 nt, Homo sapiens
  source 1..22: mol_type = unassigned RNA
ggcaaaaaccgcaattactttt

SEQ ID NO: 1012 - RNA, 20 nt, Homo sapiens
  source 1..20: mol_type = unassigned RNA
aaaaggcattgtggtttttg

SEQ ID NO: 1013 - RNA, 20 nt, Homo sapiens
  source 1..20: mol_type = unassigned RNA
caaaaaccacaatgcctttt

SEQ ID NO: 1014 - RNA, 23 nt, Homo sapiens
  source 1..23: mol_type = unassigned RNA
cggcccgggctgctgctgttcct

SEQ ID NO: 1015 - RNA, 23 nt, Homo sapiens
  source 1..23: mol_type = unassigned RNA
aggaacagcagcagcccgggccg

SEQ ID NO: 1016 - RNA, 20 nt, Homo sapiens
  source 1..20: mol_type = unassigned RNA
agaggtatagggcatgggaa

SEQ ID NO: 1017 - RNA, 20 nt, Homo sapiens
  source 1..20: mol_type = unassigned RNA
ttcccatgccctatacctct

SEQ ID NO: 1018 - RNA, 22 nt, Homo sapiens
  source 1..22: mol_type = unassigned RNA
ttcctatgcatatacttctttg

SEQ ID NO: 1019 - RNA, 22 nt, Homo sapiens
  source 1..22: mol_type = unassigned RNA
caaagaagtatatgcataggaa

SEQ ID NO: 1020 - RNA, 22 nt, Homo sapiens
  source 1..22: mol_type = unassigned RNA
atcatagaggaaaatccatgtt

SEQ ID NO: 1021 - RNA, 22 nt, Homo sapiens
  source 1..22: mol_type = unassigned RNA
aacatggattttcctctatgat

SEQ ID NO: 1022 - RNA, 22 nt, Homo sapiens
  source 1..22: mol_type = unassigned RNA
cgtggatattccttctatgttt

SEQ ID NO: 1023 - RNA, 22 nt, Homo sapiens
  source 1..22: mol_type = unassigned RNA
aaacatagaaggaatatccacg

SEQ ID NO: 1024 - RNA, 22 nt, Homo sapiens
  source 1..22: mol_type = unassigned RNA
tgagtattacatggccaatctc

SEQ ID NO: 1025 - RNA, 22 nt, Homo sapiens
  source 1..22: mol_type = unassigned RNA
gagattggccatgtaatactca

SEQ ID NO: 1026 - RNA, 21 nt, Homo sapiens
  source 1..21: mol_type = unassigned RNA
cttccgccccgccgggcgtcg

SEQ ID NO: 1027 - RNA, 21 nt, Homo sapiens
  source 1..21: mol_type = unassigned RNA
cgacgcccggcggggcggaag

SEQ ID NO: 1028 - RNA, 22 nt, Homo sapiens
  source 1..22: mol_type = unassigned RNA
tagcttatcagactgatgttga

SEQ ID NO: 1029 - RNA, 22 nt, Homo sapiens
  source 1..22: mol_type = unassigned RNA
tcaacatcagtctgataagcta

SEQ ID NO: 1030 - RNA, 22 nt, Homo sapiens
  source 1..22: mol_type = unassigned RNA
cactagattgtgagctcctgga

SEQ ID NO: 1031 - RNA, 22 nt, Homo sapiens
  source 1..22: mol_type = unassigned RNA
tccaggagctcacaatctagtg

SEQ ID NO: 1032 - RNA, 22 nt, Homo sapiens
  source 1..22: mol_type = unassigned RNA
aaggagctcacagtctattgag

SEQ ID NO: 1033 - RNA, 22 nt, Homo sapiens
  source 1..22: mol_type = unassigned RNA
ctcaatagactgtgagctcctt

SEQ ID NO: 1034 - RNA, 22 nt, Homo sapiens
  source 1..22: mol_type = unassigned RNA
tacgtcatcgttgtcatcgtca

SEQ ID NO: 1035 - RNA, 22 nt, Homo sapiens
  source 1..22: mol_type = unassigned RNA
tgacgatgacaacgatgacgta

SEQ ID NO: 1036 - RNA, 22 nt, Homo sapiens
  source 1..22: mol_type = unassigned RNA
cacgctcatgcacacacccaca

SEQ ID NO: 1037 - RNA, 22 nt, Homo sapiens
  source 1..22: mol_type = unassigned RNA
tgtgggtgtgtgcatgagcgtg

SEQ ID NO: 1038 - RNA, 21 nt, Homo sapiens
  source 1..21: mol_type = unassigned RNA
caacaccagtcgatgggctgt

SEQ ID NO: 1039 - RNA, 21 nt, Homo sapiens
  source 1..21: mol_type = unassigned RNA
acagcccatcgactggtgttg

SEQ ID NO: 1040 - RNA, 22 nt, Homo sapiens
  source 1..22: mol_type = unassigned RNA
ttcaccaccttctccacccagc

SEQ ID NO: 1041 - RNA, 22 nt, Homo sapiens
  source 1..22: mol_type = unassigned RNA
gctgggtggagaaggtggtgaa

SEQ ID NO: 1042 - RNA, 23 nt, Homo sapiens
  source 1..23: mol_type = unassigned RNA
cgggtagagagggcagtgggagg

SEQ ID NO: 1043 - RNA, 23 nt, Homo sapiens
  source 1..23: mol_type = unassigned RNA
cctcccactgccctctctacccg

SEQ ID NO: 1044 - RNA, 18 nt, Homo sapiens
  source 1..18: mol_type = unassigned RNA
aatccttgctacctgggt

SEQ ID NO: 1045 - RNA, 18 nt, Homo sapiens
  source 1..18: mol_type = unassigned RNA
acccaggtagcaaggatt

SEQ ID NO: 1046 - RNA, 22 nt, Homo sapiens
  source 1..22: mol_type = unassigned RNA
caatttagtgtgtgtgatattt

SEQ ID NO: 1047 - RNA, 22 nt, Homo sapiens
  source 1..22: mol_type = unassigned RNA
aaatatcacacacactaaattg

SEQ ID NO: 1048 - RNA, 22 nt, Homo sapiens
  source 1..22: mol_type = unassigned RNA
tattgcacattactaagttgca

SEQ ID NO: 1049 - RNA, 22 nt, Homo sapiens
  source 1..22: mol_type = unassigned RNA
tgcaacttagtaatgtgcaata

SEQ ID NO: 1050 - RNA, 22 nt, Homo sapiens
  source 1..22: mol_type = unassigned RNA
cctattcttgattacttgtttc

SEQ ID NO: 1051 - RNA, 22 nt, Homo sapiens
  source 1..22: mol_type = unassigned RNA
gaaacaagtaatcaagaatagg

SEQ ID NO: 1052 - RNA, 22 nt, Homo sapiens
  source 1..22: mol_type = unassigned RNA
ttcaagtaatccaggataggct

SEQ ID NO: 1053 - RNA, 22 nt, Homo sapiens
  source 1..22: mol_type = unassigned RNA
agcctatcctggattacttgaa

SEQ ID NO: 1054 - RNA, 23 nt, Homo sapiens
  source 1..23: mol_type = unassigned RNA
ccagttaccgcttccgctaccgc

SEQ ID NO: 1055 - RNA, 23 nt, Homo sapiens
  source 1..23: mol_type = unassigned RNA
gcggtagcggaagcggtaactgg

SEQ ID NO: 1056 - RNA, 21 nt, Homo sapiens
  source 1..21: mol_type = unassigned RNA
gatttcagtggagtgaagttc

SEQ ID NO: 1057 - RNA, 21 nt, Homo sapiens
  source 1..21: mol_type = unassigned RNA
gaacttcactccactgaaatc

SEQ ID NO: 1058 - RNA, 22 nt, Homo sapiens
  source 1..22: mol_type = unassigned RNA
tccttcattccaccggagtctg

SEQ ID NO: 1059 - RNA, 22 nt, Homo sapiens
  source 1..22: mol_type = unassigned RNA
cagactccggtggaatgaagga

SEQ ID NO: 1060 - RNA, 23 nt, Homo sapiens
  source 1..23: mol_type = unassigned RNA
aaaatggtgccctagtgactaca

SEQ ID NO: 1061 - RNA, 23 nt, Homo sapiens
  source 1..23: mol_type = unassigned RNA
tgtagtcactagggcaccatttt

SEQ ID NO: 1062 - RNA, 21 nt, Homo sapiens
  source 1..21: mol_type = unassigned RNA
caagtcactagtggttccgtt

SEQ ID NO: 1063 - RNA, 21 nt, Homo sapiens
  source 1..21: mol_type = unassigned RNA
aacggaaccactagtgacttg

SEQ ID NO: 1064 - RNA, 22 nt, Homo sapiens
  source 1..22: mol_type = unassigned RNA
ccagtattaactgtgctgctga

SEQ ID NO: 1065 - RNA, 22 nt, Homo sapiens
  source 1..22: mol_type = unassigned RNA
tcagcagcacagttaatactgg

SEQ ID NO: 1066 - RNA, 23 nt, Homo sapiens
  source 1..23: mol_type = unassigned RNA
tcccccaggtgtgattctgattt

SEQ ID NO: 1067 - RNA, 23 nt, Homo sapiens
  source 1..23: mol_type = unassigned RNA
aaatcagaatcacacctggggga

SEQ ID NO: 1068 - RNA, 22 nt, Homo sapiens
  source 1..22: mol_type = unassigned RNA
aaaagctgggttgagagggcga

SEQ ID NO: 1069 - RNA, 22 nt, Homo sapiens
  source 1..22: mol_type = unassigned RNA
tcgccctctcaacccagctttt

SEQ ID NO: 1070 - RNA, 22 nt, Homo sapiens
  source 1..22: mol_type = unassigned RNA
tggacggagaactgataagggt

SEQ ID NO: 1071 - RNA, 22 nt, Homo sapiens
  source 1..22: mol_type = unassigned RNA
acccttatcagttctccgtcca

SEQ ID NO: 1072 - RNA, 22 nt, Homo sapiens
  source 1..22: mol_type = unassigned RNA
tggtgggccgcagaacatgtgc

SEQ ID NO: 1073 - RNA, 22 nt, Homo sapiens
  source 1..22: mol_type = unassigned RNA
gcacatgttctgcggcccacca

SEQ ID NO: 1074 - RNA, 22 nt, Homo sapiens
  source 1..22: mol_type = unassigned RNA
agtgcctgctatgtgccaggca

SEQ ID NO: 1075 - RNA, 22 nt, Homo sapiens
  source 1..22: mol_type = unassigned RNA
tgcctggcacatagcaggcact

SEQ ID NO: 1076 - RNA, 22 nt, Homo sapiens
  source 1..22: mol_type = unassigned RNA
cttggcacctagcaagcactca

SEQ ID NO: 1077 - RNA, 22 nt, Homo sapiens
  source 1..22: mol_type = unassigned RNA
tgagtgcttgctaggtgccaag

SEQ ID NO: 1078 - RNA, 23 nt, Homo sapiens
  source 1..23: mol_type = unassigned RNA
ttattgcttaagaatacgcgtag

SEQ ID NO: 1079 - RNA, 23 nt, Homo sapiens
  source 1..23: mol_type = unassigned RNA
ctacgcgtattcttaagcaataa

SEQ ID NO: 1080 - RNA, 22 nt, Homo sapiens
  source 1..22: mol_type = unassigned RNA
ttgcatagtcacaaaagtgatc

SEQ ID NO: 1081 - RNA, 22 nt, Homo sapiens
  source 1..22: mol_type = unassigned RNA
gatcacttttgtgactatgcaa

SEQ ID NO: 1082 - RNA, 22 nt, Homo sapiens
  source 1..22: mol_type = unassigned RNA
gtgaattaccgaagggccataa

SEQ ID NO: 1083 - RNA, 22 nt, Homo sapiens
  source 1..22: mol_type = unassigned RNA
ttatggcccttcggtaattcac

SEQ ID NO: 1084 - RNA, 22 nt, Homo sapiens
  source 1..22: mol_type = unassigned RNA
tatggcactggtagaattcact

SEQ ID NO: 1085 - RNA, 22 nt, Homo sapiens
  source 1..22: mol_type = unassigned RNA
agtgaattctaccagtgccata

SEQ ID NO: 1086 - RNA, 22 nt, Homo sapiens
  source 1..22: mol_type = unassigned RNA
tgatatgtttgatatattaggt

SEQ ID NO: 1087 - RNA, 22 nt, Homo sapiens
  source 1..22: mol_type = unassigned RNA
acctaatatatcaaacatatca

SEQ ID NO: 1088 - RNA, 21 nt, Homo sapiens
  source 1..21: mol_type = unassigned RNA
tgatatgtttgatattgggtt

SEQ ID NO: 1089 - RNA, 21 nt, Homo sapiens
  source 1..21: mol_type = unassigned RNA
aacccaatatcaaacatatca

SEQ ID NO: 1090 - RNA, 18 nt, Homo sapiens
  source 1..18: mol_type = unassigned RNA
agcaggtgcggggcggcg

SEQ ID NO: 1091 - RNA, 18 nt, Homo sapiens
  source 1..18: mol_type = unassigned RNA
cgccgccccgcacctgct

SEQ ID NO: 1092 - RNA, 21 nt, Homo sapiens
  source 1..21: mol_type = unassigned RNA
cagtgcaagtgtagatgccga

SEQ ID NO: 1093 - RNA, 21 nt, Homo sapiens
  source 1..21: mol_type = unassigned RNA
tcggcatctacacttgcactg

SEQ ID NO: 1094 - RNA, 22 nt, Homo sapiens
  source 1..22: mol_type = unassigned RNA
tatgtaatatggtccacatctt

SEQ ID NO: 1095 - RNA, 22 nt, Homo sapiens
  source 1..22: mol_type = unassigned RNA
aagatgtggaccatattacata

SEQ ID NO: 1096 - RNA, 21 nt, Homo sapiens
  source 1..21: mol_type = unassigned RNA
aatataacacagatggcctgt

SEQ ID NO: 1097 - RNA, 21 nt, Homo sapiens
  source 1..21: mol_type = unassigned RNA
acaggccatctgtgttatatt

SEQ ID NO: 1098 - RNA, 22 nt, Homo sapiens
  source 1..22: mol_type = unassigned RNA
atcgggaatgtcgtgtccgccc

SEQ ID NO: 1099 - RNA, 22 nt, Homo sapiens
  source 1..22: mol_type = unassigned RNA
gggcggacacgacattcccgat

SEQ ID NO: 1100 - RNA, 23 nt, Homo sapiens
  source 1..23: mol_type = unassigned RNA
aatgacacgatcactcccgttga

SEQ ID NO: 1101 - RNA, 23 nt, Homo sapiens
  source 1..23: mol_type = unassigned RNA
tcaacgggagtgatcgtgtcatt

SEQ ID NO: 1102 - RNA, 22 nt, Homo sapiens
  source 1..22: mol_type = unassigned RNA
tactcaggagagtggcaatcac

SEQ ID NO: 1103 - RNA, 22 nt, Homo sapiens
  source 1..22: mol_type = unassigned RNA
gtgattgccactctcctgagta

SEQ ID NO: 1104 - RNA, 23 nt, Homo sapiens
  source 1..23: mol_type = unassigned RNA
tggaagactagtgattttgttgt

SEQ ID NO: 1105 - RNA, 23 nt, Homo sapiens
  source 1..23: mol_type = unassigned RNA
acaacaaaatcactagtcttcca

SEQ ID NO: 1106 - RNA, 22 nt, Homo sapiens
  source 1..22: mol_type = unassigned RNA
ataaagctagataaccgaaagt

SEQ ID NO: 1107 - RNA, 22 nt, Homo sapiens
  source 1..22: mol_type = unassigned RNA
actttcggttatctagctttat

SEQ ID NO: 1108 - RNA, 23 nt, Homo sapiens
  source 1..23: mol_type = unassigned RNA
tctttggttatctagctgtatga

SEQ ID NO: 1109 - RNA, 23 nt, Homo sapiens
  source 1..23: mol_type = unassigned RNA
tcatacagctagataaccaaaga

SEQ ID NO: 1110 - RNA, 22 nt, Homo sapiens
  source 1..22: mol_type = unassigned RNA
acaggtgaggttcttgggagcc

SEQ ID NO: 1111 - RNA, 22 nt, Homo sapiens
  source 1..22: mol_type = unassigned RNA
ggctcccaagaacctcacctgt

SEQ ID NO: 1112 - RNA, 24 nt, Homo sapiens
  source 1..24: mol_type = unassigned RNA
tccctgagaccctttaacctgtga

SEQ ID NO: 1113 - RNA, 24 nt, Homo sapiens
  source 1..24: mol_type = unassigned RNA
tcacaggttaaagggtctcaggga

SEQ ID NO: 1114 - RNA, 22 nt, Homo sapiens
  source 1..22: mol_type = unassigned RNA
caacaaatcccagtctacctaa

SEQ ID NO: 1115 - RNA, 22 nt, Homo sapiens
  source 1..22: mol_type = unassigned RNA
ttaggtagactgggatttgttg

SEQ ID NO: 1116 - RNA, 22 nt, Homo sapiens
  source 1..22: mol_type = unassigned RNA
cgtgttcacagcggaccttgat

SEQ ID NO: 1117 - RNA, 22 nt, Homo sapiens
  source 1..22: mol_type = unassigned RNA
atcaaggtccgctgtgaacacg

SEQ ID NO: 1118 - RNA, 20 nt, Homo sapiens
  source 1..20: mol_type = unassigned RNA
taaggcacgcggtgaatgcc

SEQ ID NO: 1119 - RNA, 20 nt, Homo sapiens
  source 1..20: mol_type = unassigned RNA
ggcattcaccgcgtgcctta

SEQ ID NO: 1120 - RNA, 22 nt, Homo sapiens
  source 1..22: mol_type = unassigned RNA
aacacacctggttaacctcttt

SEQ ID NO: 1121 - RNA, 22 nt, Homo sapiens
  source 1..22: mol_type = unassigned RNA
aaagaggttaaccaggtgtgtt

SEQ ID NO: 1122 - RNA, 22 nt, Homo sapiens
  source 1..22: mol_type = unassigned RNA
taacagtctacagccatggtcg

SEQ ID NO: 1123 - RNA, 22 nt, Homo sapiens
  source 1..22: mol_type = unassigned RNA
cgaccatggctgtagactgtta

SEQ ID NO: 1124 - RNA, 22 nt, Homo sapiens
  source 1..22: mol_type = unassigned RNA
accgtggctttcgattgttact

SEQ ID NO: 1125 - RNA, 22 nt, Homo sapiens
  source 1..22: mol_type = unassigned RNA
agtaacaatcgaaagccacggt

SEQ ID NO: 1126 - RNA, 21 nt, Homo sapiens
  source 1..21: mol_type = unassigned RNA
taacagtctccagtcacggcc

SEQ ID NO: 1127 - RNA, 21 nt, Homo sapiens
  source 1..21: mol_type = unassigned RNA
ggccgtgactggagactgtta

SEQ ID NO: 1128 - RNA, 23 nt, Homo sapiens
  source 1..23: mol_type = unassigned RNA
accttggctctagactgcttact

SEQ ID NO: 1129 - RNA, 23 nt, Homo sapiens
  source 1..23: mol_type = unassigned RNA
agtaagcagtctagagccaaggt

SEQ ID NO: 1130 - RNA, 23 nt, Homo sapiens
  source 1..23: mol_type = unassigned RNA
tctcacacagaaatcgcacccgt

SEQ ID NO: 1131 - RNA, 23 nt, Homo sapiens
  source 1..23: mol_type = unassigned RNA
acgggtgcgatttctgtgtgaga

SEQ ID NO: 1132 - RNA, 22 nt, Homo sapiens
  source 1..22: mol_type = unassigned RNA
tggttgaccatagaacatgcgc

SEQ ID NO: 1133 - RNA, 22 nt, Homo sapiens
  source 1..22: mol_type = unassigned RNA
gcgcatgttctatggtcaacca

SEQ ID NO: 1134 - RNA, 23 nt, Homo sapiens
  source 1..23: mol_type = unassigned RNA
cagtaacaaagattcatccttgt

SEQ ID NO: 1135 - RNA, 23 nt, Homo sapiens
  source 1..23: mol_type = unassigned RNA
acaaggatgaatctttgttactg

SEQ ID NO: 1136 - RNA, 22 nt, Homo sapiens
  source 1..22: mol_type = unassigned RNA
agagttgagtctggacgtcccg

SEQ ID NO: 1137 - RNA, 22 nt, Homo sapiens
  source 1..22: mol_type = unassigned RNA
cgggacgtccagactcaactct

SEQ ID NO: 1138 - RNA, 22 nt, Homo sapiens
  source 1..22: mol_type = unassigned RNA
agaattgtggctggacatctgt

SEQ ID NO: 1139 - RNA, 22 nt, Homo sapiens
  source 1..22: mol_type = unassigned RNA
acagatgtccagccacaattct

SEQ ID NO: 1140 - RNA, 21 nt, Homo sapiens
  source 1..21: mol_type = unassigned RNA
tgattgtccaaacgcaattct

SEQ ID NO: 1141 - RNA, 21 nt, Homo sapiens
  source 1..21: mol_type = unassigned RNA
agaattgcgtttggacaatca

SEQ ID NO: 1142 - RNA, 22 nt, Homo sapiens
  source 1..22: mol_type = unassigned RNA
tatagggattggagccgtggcg

SEQ ID NO: 1143 - RNA, 22 nt, Homo sapiens
  source 1..22: mol_type = unassigned RNA
cgccacggctccaatccctata

SEQ ID NO: 1144 - RNA, 23 nt, Homo sapiens
  source 1..23: mol_type = unassigned RNA
tatggctttttattcctatgtga

SEQ ID NO: 1145 - RNA, 23 nt, Homo sapiens
  source 1..23: mol_type = unassigned RNA
tcacataggaataaaaagccata

SEQ ID NO: 1146 - RNA, 22 nt, Homo sapiens
  source 1..22: mol_type = unassigned RNA
atgtagggctaaaagccatggg

SEQ ID NO: 1147 - RNA, 22 nt, Homo sapiens
  source 1..22: mol_type = unassigned RNA
cccatggcttttagccctacat

SEQ ID NO: 1148 - RNA, 23 nt, Homo sapiens
  source 1..23: mol_type = unassigned RNA
tatggcttttcattcctatgtga

SEQ ID NO: 1149 - RNA, 23 nt, Homo sapiens
  source 1..23: mol_type = unassigned RNA
tcacataggaatgaaaagccata

SEQ ID NO: 1150 - RNA, 22 nt, Homo sapiens
  source 1..22: mol_type = unassigned RNA
aaccatcgaccgttgagtggac

SEQ ID NO: 1151 - RNA, 22 nt, Homo sapiens
  source 1..22: mol_type = unassigned RNA
gtccactcaacggtcgatggtt

SEQ ID NO: 1152 - RNA, 22 nt, Homo sapiens
  source 1..22: mol_type = unassigned RNA
aacattcaacctgtcggtgagt

SEQ ID NO: 1153 - RNA, 22 nt, Homo sapiens
  source 1..22: mol_type = unassigned RNA
actcaccgacaggttgaatgtt

SEQ ID NO: 1154 - RNA, 25 nt, Homo sapiens
  source 1..25: mol_type = unassigned RNA
cttccagacgctccgccccacgtcg

SEQ ID NO: 1155 - RNA, 25 nt, Homo sapiens
  source 1..25: mol_type = unassigned RNA
cgacgtggggcggagcgtctggaag

SEQ ID NO: 1156 - RNA, 24 nt, Homo sapiens
  source 1..24: mol_type = unassigned RNA
aacaacaaaatcactagtcttcca

SEQ ID NO: 1157 - RNA, 24 nt, Homo sapiens
  source 1..24: mol_type = unassigned RNA
tggaagactagtgattttgttgtt

SEQ ID NO: 1158 - RNA, 22 nt, Homo sapiens
  source 1..22: mol_type = unassigned RNA
aggtagactgggatttgttgtt

SEQ ID NO: 1159 - RNA, 22 nt, Homo sapiens
  source 1..22: mol_type = unassigned RNA
aacaacaaatcccagtctacct

SEQ ID NO: 1160 - RNA, 22 nt, Homo sapiens
  source 1..22: mol_type = unassigned RNA
aaacaccattgtcacactccac

SEQ ID NO: 1161 - RNA, 22 nt, Homo sapiens
  source 1..22: mol_type = unassigned RNA
gtggagtgtgacaatggtgttt

SEQ ID NO: 1162 - RNA, 23 nt, Homo sapiens
  source 1..23: mol_type = unassigned RNA
tttagtgtgataatggcgtttga

SEQ ID NO: 1163 - RNA, 23 nt, Homo sapiens
  source 1..23: mol_type = unassigned RNA
tcaaacgccattatcacactaaa

SEQ ID NO: 1164 - RNA, 22 nt, Homo sapiens
  source 1..22: mol_type = unassigned RNA
tatggaaagactttgccactct

SEQ ID NO: 1165 - RNA, 22 nt, Homo sapiens
  source 1..22: mol_type = unassigned RNA
agagtggcaaagtctttccata

SEQ ID NO: 1166 - RNA, 21 nt, Homo sapiens
  source 1..21: mol_type = unassigned RNA
agtggcaaagtctttccatat

SEQ ID NO: 1167 - RNA, 21 nt, Homo sapiens
  source 1..21: mol_type = unassigned RNA
atatggaaagactttgccact

SEQ ID NO: 1168 - RNA, 22 nt, Homo sapiens
  source 1..22: mol_type = unassigned RNA
cagcccggatcccagcccactt

SEQ ID NO: 1169 - RNA, 22 nt, Homo sapiens
  source 1..22: mol_type = unassigned RNA
aagtgggctgggatccgggctg

SEQ ID NO: 1170 - RNA, 20 nt, Homo sapiens
  source 1..20: mol_type = unassigned RNA
gtgggttggggcgggctctg

SEQ ID NO: 1171 - RNA, 20 nt, Homo sapiens
  source 1..20: mol_type = unassigned RNA
cagagcccgccccaacccac

SEQ ID NO: 1172 - RNA, 23 nt, Homo sapiens
  source 1..23: mol_type = unassigned RNA
ttcgggctggcctgctgctccgg

SEQ ID NO: 1173 - RNA, 23 nt, Homo sapiens
  source 1..23: mol_type = unassigned RNA
ccggagcagcaggccagcccgaa

SEQ ID NO: 1174 - RNA, 21 nt, Homo sapiens
  source 1..21: mol_type = unassigned RNA
tgtgcagcaggccaaccgaga

SEQ ID NO: 1175 - RNA, 21 nt, Homo sapiens
  source 1..21: mol_type = unassigned RNA
tctcggttggcctgctgcaca

SEQ ID NO: 1176 - RNA, 22 nt, Homo sapiens
  source 1..22: mol_type = unassigned RNA
cagggcaggaagaagtggacaa

SEQ ID NO: 1177 - RNA, 22 nt, Homo sapiens
  source 1..22: mol_type = unassigned RNA
ttgtccacttcttcctgccctg

SEQ ID NO: 1178 - RNA, 22 nt, Homo sapiens
  source 1..22: mol_type = unassigned RNA
gtccacttctgcctgccctgcc

SEQ ID NO: 1179 - RNA, 22 nt, Homo sapiens
  source 1..22: mol_type = unassigned RNA
ggcagggcaggcagaagtggac

SEQ ID NO: 1180 - RNA, 22 nt, Homo sapiens
  source 1..22: mol_type = unassigned RNA
tttggacagaaaacacgcaggt

SEQ ID NO: 1181 - RNA, 22 nt, Homo sapiens
  source 1..22: mol_type = unassigned RNA
acctgcgtgttttctgtccaaa

SEQ ID NO: 1182 - RNA, 20 nt, Homo sapiens
  source 1..20: mol_type = unassigned RNA
cctgcgtgttttctgtccaa

SEQ ID NO: 1183 - RNA, 20 nt, Homo sapiens
  source 1..20: mol_type = unassigned RNA
ttggacagaaaacacgcagg

SEQ ID NO: 1184 - RNA, 22 nt, Homo sapiens
  source 1..22: mol_type = unassigned RNA
tgccgccctctcgctgctctag

SEQ ID NO: 1185 - RNA, 22 nt, Homo sapiens
  source 1..22: mol_type = unassigned RNA
ctagagcagcgagagggcggca

SEQ ID NO: 1186 - RNA, 23 nt, Homo sapiens
  source 1..23: mol_type = unassigned RNA
gagggcagcgtgggtgtggcgga

SEQ ID NO: 1187 - RNA, 23 nt, Homo sapiens
  source 1..23: mol_type = unassigned RNA
tccgccacacccacgctgccctc

SEQ ID NO: 1188 - RNA, 22 nt, Homo sapiens
  source 1..22: mol_type = unassigned RNA
aggagctagccaggcatatgca

SEQ ID NO: 1189 - RNA, 22 nt, Homo sapiens
  source 1..22: mol_type = unassigned RNA
tgcatatgcctggctagctcct

SEQ ID NO: 1190 - RNA, 20 nt, Homo sapiens
  source 1..20: mol_type = unassigned RNA
atatgcctggctagctcctc

SEQ ID NO: 1191 - RNA, 20 nt, Homo sapiens
  source 1..20: mol_type = unassigned RNA
gaggagctagccaggcatat

SEQ ID NO: 1192 - RNA, 19 nt, Homo sapiens
  source 1..19: mol_type = unassigned RNA
cggcgcgaccggcccgggg

SEQ ID NO: 1193 - RNA, 19 nt, Homo sapiens
  source 1..19: mol_type = unassigned RNA
ccccgggccggtcgcgccg

SEQ ID NO: 1194 - RNA, 21 nt, Homo sapiens
  source 1..21: mol_type = unassigned RNA
tcttgaagtcagaacccgcaa

SEQ ID NO: 1195 - RNA, 21 nt, Homo sapiens
  source 1..21: mol_type = unassigned RNA
ttgcgggttctgacttcaaga

SEQ ID NO: 1196 - RNA, 22 nt, Homo sapiens
  source 1..22: mol_type = unassigned RNA
aactcgtgttcaaagcctttag

SEQ ID NO: 1197 - RNA, 22 nt, Homo sapiens
  source 1..22: mol_type = unassigned RNA
ctaaaggctttgaacacgagtt

SEQ ID NO: 1198 - RNA, 23 nt, Homo sapiens
  source 1..23: mol_type = unassigned RNA
cctggacaccgctcagccggccg

SEQ ID NO: 1199 - RNA, 23 nt, Homo sapiens
  source 1..23: mol_type = unassigned RNA
cggccggctgagcggtgtccagg

SEQ ID NO: 1200 - RNA, 21 nt, Homo sapiens
  source 1..21: mol_type = unassigned RNA
actcggctgcggtggacaagt

SEQ ID NO: 1201 - RNA, 21 nt, Homo sapiens
  source 1..21: mol_type = unassigned RNA
acttgtccaccgcagccgagt

SEQ ID NO: 1202 - RNA, 20 nt, Homo sapiens
  source 1..20: mol_type = unassigned RNA
tcactctcaccttgctttgc

SEQ ID NO: 1203 - RNA, 20 nt, Homo sapiens
  source 1..20: mol_type = unassigned RNA
gcaaagcaaggtgagagtga

SEQ ID NO: 1204 - RNA, 22 nt, Homo sapiens
  source 1..22: mol_type = unassigned RNA
ttgctaagtaggctgagattga

SEQ ID NO: 1205 - RNA, 22 nt, Homo sapiens
  source 1..22: mol_type = unassigned RNA
tcaatctcagcctacttagcaa

SEQ ID NO: 1206 - RNA, 22 nt, Homo sapiens
  source 1..22: mol_type = unassigned RNA
caccccctgtttcctggcccac

SEQ ID NO: 1207 - RNA, 22 nt, Homo sapiens
  source 1..22: mol_type = unassigned RNA
gtgggccaggaaacagggggtg

SEQ ID NO: 1208 - RNA, 23 nt, Homo sapiens
  source 1..23: mol_type = unassigned RNA
tgggccagggagcagctggtggg

SEQ ID NO: 1209 - RNA, 23 nt, Homo sapiens
  source 1..23: mol_type = unassigned RNA
cccaccagctgctccctggccca

SEQ ID NO: 1210 - RNA, 24 nt, Homo sapiens
  source 1..24: mol_type = unassigned RNA
tgcccatgccatacttttgcctca

SEQ ID NO: 1211 - RNA, 24 nt, Homo sapiens
  source 1..24: mol_type = unassigned RNA
tgaggcaaaagtatggcatgggca

SEQ ID NO: 1212 - RNA, 22 nt, Homo sapiens
  source 1..22: mol_type = unassigned RNA
atggcatcgtcccctggtggct

SEQ ID NO: 1213 - RNA, 22 nt, Homo sapiens
  source 1..22: mol_type = unassigned RNA
agccaccaggggacgatgccat

SEQ ID NO: 1214 - RNA, 22 nt, Homo sapiens
  source 1..22: mol_type = unassigned RNA
gacacatgaccataaatgctaa

SEQ ID NO: 1215 - RNA, 22 nt, Homo sapiens
  source 1..22: mol_type = unassigned RNA
ttagcatttatggtcatgtgtc

SEQ ID NO: 1216 - RNA, 23 nt, Homo sapiens
  source 1..23: mol_type = unassigned RNA
tggagagagaaaagagacagaag

SEQ ID NO: 1217 - RNA, 23 nt, Homo sapiens
  source 1..23: mol_type = unassigned RNA
cttctgtctcttttctctctcca

SEQ ID NO: 1218 - RNA, 22 nt, Homo sapiens
  source 1..22: mol_type = unassigned RNA
agacagtagttcttgcctggtt

SEQ ID NO: 1219 - RNA, 22 nt, Homo sapiens
  source 1..22: mol_type = unassigned RNA
aaccaggcaagaactactgtct

SEQ ID NO: 1220 - RNA, 19 nt, Homo sapiens
  source 1..19: mol_type = unassigned RNA
accaggcaagaaatattgt

SEQ ID NO: 1221 - RNA, 19 nt, Homo sapiens
  source 1..19: mol_type = unassigned RNA
acaatatttcttgcctggt

SEQ ID NO: 1222 - RNA, 21 nt, Homo sapiens
  source 1..21: mol_type = unassigned RNA
attgtccctctcccttcccag

SEQ ID NO: 1223 - RNA, 21 nt, Homo sapiens
  source 1..21: mol_type = unassigned RNA
ctgggaagggagagggacaat

SEQ ID NO: 1224 - RNA, 22 nt, Homo sapiens
  source 1..22: mol_type = unassigned RNA
actgggaagaggagctgaggga

SEQ ID NO: 1225 - RNA, 22 nt, Homo sapiens
  source 1..22: mol_type = unassigned RNA
tccctcagctcctcttcccagt

SEQ ID NO: 1226 - RNA, 23 nt, Homo sapiens
  source 1..23: mol_type = unassigned RNA
gaagatggtgctgtgctgaggaa

SEQ ID NO: 1227 - RNA, 23 nt, Homo sapiens
  source 1..23: mol_type = unassigned RNA
ttcctcagcacagcaccatcttc

SEQ ID NO: 1228 - RNA, 20 nt, Homo sapiens
  source 1..20: mol_type = unassigned RNA
tgtgggactgcaaatgggag

SEQ ID NO: 1229 - RNA, 20 nt, Homo sapiens
  source 1..20: mol_type = unassigned RNA
ctcccatttgcagtcccaca

SEQ ID NO: 1230 - RNA, 21 nt, Homo sapiens
  source 1..21: mol_type = unassigned RNA
tctgaggcctgcctctcccca

SEQ ID NO: 1231 - RNA, 21 nt, Homo sapiens
  source 1..21: mol_type = unassigned RNA
tggggagaggcaggcctcaga

SEQ ID NO: 1232 - RNA, 24 nt, Homo sapiens
  source 1..24: mol_type = unassigned RNA
tgggcgaggggtgggctctcagag

SEQ ID NO: 1233 - RNA, 24 nt, Homo sapiens
  source 1..24: mol_type = unassigned RNA
ctctgagagcccacccctcgccca

SEQ ID NO: 1234 - RNA, 21 nt, Homo sapiens
  source 1..21: mol_type = unassigned RNA
aggtagaatgaggcctgacat

SEQ ID NO: 1235 - RNA, 21 nt, Homo sapiens
  source 1..21: mol_type = unassigned RNA
atgtcaggcctcattctacct

SEQ ID NO: 1236 - RNA, 19 nt, Homo sapiens
  source 1..19: mol_type = unassigned RNA
tcaggcctctttctacctt

SEQ ID NO: 1237 - RNA, 19 nt, Homo sapiens
  source 1..19: mol_type = unassigned RNA
aaggtagaaagaggcctga

SEQ ID NO: 1238 - RNA, 20 nt, Homo sapiens
  source 1..20: mol_type = unassigned RNA
cggggtgggtgaggtcgggc

SEQ ID NO: 1239 - RNA, 20 nt, Homo sapiens
  source 1..20: mol_type = unassigned RNA
gcccgacctcacccaccccg

SEQ ID NO: 1240 - RNA, 22 nt, Homo sapiens
  source 1..22: mol_type = unassigned RNA
gttctgttaacccatcccctca

SEQ ID NO: 1241 - RNA, 22 nt, Homo sapiens
  source 1..22: mol_type = unassigned RNA
tgaggggatgggttaacagaac

SEQ ID NO: 1242 - RNA, 22 nt, Homo sapiens
  source 1..22: mol_type = unassigned RNA
aggggactggttaatagaacta

SEQ ID NO: 1243 - RNA, 22 nt, Homo sapiens
  source 1..22: mol_type = unassigned RNA
tagttctattaaccagtcccct

SEQ ID NO: 1244 - RNA, 23 nt, Homo sapiens
  source 1..23: mol_type = unassigned RNA
tggagttaagggttgcttggaga

SEQ ID NO: 1245 - RNA, 23 nt, Homo sapiens
  source 1..23: mol_type = unassigned RNA
tctccaagcaacccttaactcca

SEQ ID NO: 1246 - RNA, 22 nt, Homo sapiens
  source 1..22: mol_type = unassigned RNA
tctctgagcaaggcttaacacc

SEQ ID NO: 1247 - RNA, 22 nt, Homo sapiens
  source 1..22: mol_type = unassigned RNA
ggtgttaagccttgctcagaga

SEQ ID NO: 1248 - RNA, 22 nt, Homo sapiens
  source 1..22: mol_type = unassigned RNA
tgtgggatctggaggcatctgg

SEQ ID NO: 1249 - RNA, 22 nt, Homo sapiens
  source 1..22: mol_type = unassigned RNA
ccagatgcctccagatcccaca

SEQ ID NO: 1250 - RNA, 21 nt, Homo sapiens
  source 1..21: mol_type = unassigned RNA
accctcgtcaggtccccgggg

SEQ ID NO: 1251 - RNA, 21 nt, Homo sapiens
  source 1..21: mol_type = unassigned RNA
ccccggggacctgacgagggt

SEQ ID NO: 1252 - RNA, 22 nt, Homo sapiens
  source 1..22: mol_type = unassigned RNA
caccggggatggcagagggtcg

SEQ ID NO: 1253 - RNA, 22 nt, Homo sapiens
  source 1..22: mol_type = unassigned RNA
cgaccctctgccatccccggtg

SEQ ID NO: 1254 - RNA, 23 nt, Homo sapiens
  source 1..23: mol_type = unassigned RNA
tgggctgagggcaggaggcctgt

SEQ ID NO: 1255 - RNA, 23 nt, Homo sapiens
  source 1..23: mol_type = unassigned RNA
acaggcctcctgccctcagccca

SEQ ID NO: 1256 - RNA, 23 nt, Homo sapiens
  source 1..23: mol_type = unassigned RNA
aatgtggaagtggtctgaggcat

SEQ ID NO: 1257 - RNA, 23 nt, Homo sapiens
  source 1..23: mol_type = unassigned RNA
atgcctcagaccacttccacatt

SEQ ID NO: 1258 - RNA, 23 nt, Homo sapiens
  source 1..23: mol_type = unassigned RNA
gtgagtgtggatcctggaggaat

SEQ ID NO: 1259 - RNA, 23 nt, Homo sapiens
  source 1..23: mol_type = unassigned RNA
attcctccaggatccacactcac

SEQ ID NO: 1260 - RNA, 22 nt, Homo sapiens
  source 1..22: mol_type = unassigned RNA
tttcttcttagacatggcaacg

SEQ ID NO: 1261 - RNA, 22 nt, Homo sapiens
  source 1..22: mol_type = unassigned RNA
cgttgccatgtctaagaagaaa

SEQ ID NO: 1262 - RNA, 22 nt, Homo sapiens
  source 1..22: mol_type = unassigned RNA
ctgccatgtctaagaagaaaac

SEQ ID NO: 1263 - RNA, 22 nt, Homo sapiens
  source 1..22: mol_type = unassigned RNA
gttttcttcttagacatggcag

SEQ ID NO: 1264 - RNA, 22 nt, Homo sapiens
  source 1..22: mol_type = unassigned RNA
tttcttcttagacatggcagct

SEQ ID NO: 1265 - RNA, 22 nt, Homo sapiens
  source 1..22: mol_type = unassigned RNA
agctgccatgtctaagaagaaa

SEQ ID NO: 1266 - RNA, 19 nt, Homo sapiens
  source 1..19: mol_type = unassigned RNA
ttgccatgtctaagaagaa

SEQ ID NO: 1267 - RNA, 19 nt, Homo sapiens
  source 1..19: mol_type = unassigned RNA
ttcttcttagacatggcaa

SEQ ID NO: 1268 - RNA, 23 nt, Homo sapiens
  source 1..23: mol_type = unassigned RNA
tgcagctctggtggaaaatggag

SEQ ID NO: 1269 - RNA, 23 nt, Homo sapiens
  source 1..23: mol_type = unassigned RNA
ctccattttccaccagagctgca

SEQ ID NO: 1270 - RNA, 22 nt, Homo sapiens
  source 1..22: mol_type = unassigned RNA
caggatccacagagctagtcca

SEQ ID NO: 1271 - RNA, 22 nt, Homo sapiens
  source 1..22: mol_type = unassigned RNA
tggactagctctgtggatcctg

SEQ ID NO: 1272 - RNA, 22 nt, Homo sapiens
  source 1..22: mol_type = unassigned RNA
aactagctctgtggatcctgac

SEQ ID NO: 1273 - RNA, 22 nt, Homo sapiens
  source 1..22: mol_type = unassigned RNA
gtcaggatccacagagctagtt

SEQ ID NO: 1274 - RNA, 22 nt, Homo sapiens
  source 1..22: mol_type = unassigned RNA
aaagatggacaattggctaaat

SEQ ID NO: 1275 - RNA, 22 nt, Homo sapiens
  source 1..22: mol_type = unassigned RNA
atttagccaattgtccatcttt

SEQ ID NO: 1276 - RNA, 24 nt, Homo sapiens
  source 1..24: mol_type = unassigned RNA
agctgagctccatggacgtgcagt

SEQ ID NO: 1277 - RNA, 24 nt, Homo sapiens
  source 1..24: mol_type = unassigned RNA
actgcacgtccatggagctcagct

SEQ ID NO: 1278 - RNA, 22 nt, Homo sapiens
  source 1..22: mol_type = unassigned RNA
cttccggtctgtgagccccgtc

SEQ ID NO: 1279 - RNA, 22 nt, Homo sapiens
  source 1..22: mol_type = unassigned RNA
gacggggctcacagaccggaag

SEQ ID NO: 1280 - RNA, 22 nt, Homo sapiens
  source 1..22: mol_type = unassigned RNA
tggggtgcccactccgcaagtt

SEQ ID NO: 1281 - RNA, 22 nt, Homo sapiens
  source 1..22: mol_type = unassigned RNA
aacttgcggagtgggcacccca

SEQ ID NO: 1282 - RNA, 26 nt, Homo sapiens
  source 1..26: mol_type = unassigned RNA
ctcggccgcggcgcgtagcccccgcc

SEQ ID NO: 1283 - RNA, 26 nt, Homo sapiens
  source 1..26: mol_type = unassigned RNA
ggcgggggctacgcgccgcggccgag

SEQ ID NO: 1284 - RNA, 23 nt, Homo sapiens
  source 1..23: mol_type = unassigned RNA
ctgggggacgcgtgagcgcgagc

SEQ ID NO: 1285 - RNA, 23 nt, Homo sapiens
  source 1..23: mol_type = unassigned RNA
gctcgcgctcacgcgtcccccag

SEQ ID NO: 1286 - RNA, 21 nt, Homo sapiens
  source 1..21: mol_type = unassigned RNA
catacaatctgacatgtattt

SEQ ID NO: 1287 - RNA, 21 nt, Homo sapiens
  source 1..21: mol_type = unassigned RNA
aaatacatgtcagattgtatg

SEQ ID NO: 1288 - RNA, 21 nt, Homo sapiens
  source 1..21: mol_type = unassigned RNA
atacatgtcagattgtatgcc

SEQ ID NO: 1289 - RNA, 21 nt, Homo sapiens
  source 1..21: mol_type = unassigned RNA
ggcatacaatctgacatgtat

SEQ ID NO: 1290 - RNA, 21 nt, Homo sapiens
  source 1..21: mol_type = unassigned RNA
tccctccttctgtccccacag

SEQ ID NO: 1291 - RNA, 21 nt, Homo sapiens
  source 1..21: mol_type = unassigned RNA
ctgtggggacagaaggaggga

SEQ ID NO: 1292 - RNA, 22 nt, Homo sapiens
  source 1..22: mol_type = unassigned RNA
actggggagcagaaggagaacc

SEQ ID NO: 1293 - RNA, 22 nt, Homo sapiens
  source 1..22: mol_type = unassigned RNA
ggttctccttctgctccccagt

SEQ ID NO: 1294 - RNA, 23 nt, Homo sapiens
  source 1..23: mol_type = unassigned RNA
gaaaatcctttttgtttttccag

SEQ ID NO: 1295 - RNA, 23 nt, Homo sapiens
  source 1..23: mol_type = unassigned RNA
ctggaaaaacaaaaaggattttc

SEQ ID NO: 1296 - RNA, 23 nt, Homo sapiens
  source 1..23: mol_type = unassigned RNA
agggaaaaaaaaaaggatttgtc

SEQ ID NO: 1297 - RNA, 23 nt, Homo sapiens
  source 1..23: mol_type = unassigned RNA
gacaaatccttttttttttccct

SEQ ID NO: 1298 - RNA, 22 nt, Homo sapiens
  source 1..22: mol_type = unassigned RNA
tgtgtccgggaagtggaggagg

SEQ ID NO: 1299 - RNA, 22 nt, Homo sapiens
  source 1..22: mol_type = unassigned RNA
cctcctccacttcccggacaca

SEQ ID NO: 1300 - RNA, 22 nt, Homo sapiens
  source 1..22: mol_type = unassigned RNA
tgaagttacatcatggtcgctt

SEQ ID NO: 1301 - RNA, 22 nt, Homo sapiens
  source 1..22: mol_type = unassigned RNA
aagcgaccatgatgtaacttca

SEQ ID NO: 1302 - RNA, 22 nt, Homo sapiens
  source 1..22: mol_type = unassigned RNA
aagcgaccatgatgtaacttca

SEQ ID NO: 1303 - RNA, 22 nt, Homo sapiens
  source 1..22: mol_type = unassigned RNA
tgaagttacatcatggtcgctt

SEQ ID NO: 1304 - RNA, 21 nt, Homo sapiens
  source 1..21: mol_type = unassigned RNA
ttagtgcatagtctttggtct

SEQ ID NO: 1305 - RNA, 21 nt, Homo sapiens
  source 1..21: mol_type = unassigned RNA
agaccaaagactatgcactaa

SEQ ID NO: 1306 - RNA, 22 nt, Homo sapiens
  source 1..22: mol_type = unassigned RNA
accgaagactgtgcgctaatct

SEQ ID NO: 1307 - RNA, 22 nt, Homo sapiens
  source 1..22: mol_type = unassigned RNA
agattagcgcacagtcttcggt

SEQ ID NO: 1308 - RNA, 21 nt, Homo sapiens
  source 1..21: mol_type = unassigned RNA
ttacacagctggacagaggca

SEQ ID NO: 1309 - RNA, 21 nt, Homo sapiens
  source 1..21: mol_type = unassigned RNA
tgcctctgtccagctgtgtaa

SEQ ID NO: 1310 - RNA, 22 nt, Homo sapiens
  source 1..22: mol_type = unassigned RNA
tccaggcaggagccggactgga

SEQ ID NO: 1311 - RNA, 22 nt, Homo sapiens
  source 1..22: mol_type = unassigned RNA
tccagtccggctcctgcctgga

SEQ ID NO: 1312 - RNA, 21 nt, Homo sapiens
  source 1..21: mol_type = unassigned RNA
ctgggctcgggacgcgcggct

SEQ ID NO: 1313 - RNA, 21 nt, Homo sapiens
  source 1..21: mol_type = unassigned RNA
agccgcgcgtcccgagcccag

SEQ ID NO: 1314 - RNA, 22 nt, Homo sapiens
  source 1..22: mol_type = unassigned RNA
ggggctgtgattgaccagcagg

SEQ ID NO: 1315 - RNA, 22 nt, Homo sapiens
  source 1..22: mol_type = unassigned RNA
cctgctggtcaatcacagcccc

SEQ ID NO: 1316 - RNA, 22 nt, Homo sapiens
  source 1..22: mol_type = unassigned RNA
cactgtttcaccactggctctt

SEQ ID NO: 1317 - RNA, 22 nt, Homo sapiens
  source 1..22: mol_type = unassigned RNA
aagagccagtggtgaaacagtg

SEQ ID NO: 1318 - RNA, 21 nt, Homo sapiens
  source 1..21: mol_type = unassigned RNA
gagccagtggtgagacagtga

SEQ ID NO: 1319 - RNA, 21 nt, Homo sapiens
  source 1..21: mol_type = unassigned RNA
tcactgtctcaccactggctc

SEQ ID NO: 1320 - RNA, 22 nt, Homo sapiens
  source 1..22: mol_type = unassigned RNA
aaggtattgttcagacttatga

SEQ ID NO: 1321 - RNA, 22 nt, Homo sapiens
  source 1..22: mol_type = unassigned RNA
tcataagtctgaacaatacctt

SEQ ID NO: 1322 - RNA, 22 nt, Homo sapiens
  source 1..22: mol_type = unassigned RNA
tctgtgatagagattctttgct

SEQ ID NO: 1323 - RNA, 22 nt, Homo sapiens
  source 1..22: mol_type = unassigned RNA
agcaaagaatctctatcacaga

SEQ ID NO: 1324 - RNA, 21 nt, Homo sapiens
  source 1..21: mol_type = unassigned RNA
tctgaattgtaagagttgtta

SEQ ID NO: 1325 - RNA, 21 nt, Homo sapiens
  source 1..21: mol_type = unassigned RNA
taacaactcttacaattcaga

SEQ ID NO: 1326 - RNA, 23 nt, Homo sapiens
  source 1..23: mol_type = unassigned RNA
agaactcttgcagtcttagatgt

SEQ ID NO: 1327 - RNA, 23 nt, Homo sapiens
  source 1..23: mol_type = unassigned RNA
acatctaagactgcaagagttct

SEQ ID NO: 1328 - RNA, 22 nt, Homo sapiens
  source 1..22: mol_type = unassigned RNA
aacgggaatgcaggctgtatct

SEQ ID NO: 1329 - RNA, 22 nt, Homo sapiens
  source 1..22: mol_type = unassigned RNA
agatacagcctgcattcccgtt

SEQ ID NO: 1330 - RNA, 23 nt, Homo sapiens
  source 1..23: mol_type = unassigned RNA
tctgagttcctggagcctggtct

SEQ ID NO: 1331 - RNA, 23 nt, Homo sapiens
  source 1..23: mol_type = unassigned RNA
agaccaggctccaggaactcaga

SEQ ID NO: 1332 - RNA, 23 nt, Homo sapiens
  source 1..23: mol_type = unassigned RNA
tggagatccagtgctcgcccgat

SEQ ID NO: 1333 - RNA, 23 nt, Homo sapiens
  source 1..23: mol_type = unassigned RNA
atcgggcgagcactggatctcca

SEQ ID NO: 1334 - RNA, 22 nt, Homo sapiens
  source 1..22: mol_type = unassigned RNA
tgttgcaagtcggtggagacgt

SEQ ID NO: 1335 - RNA, 22 nt, Homo sapiens
  source 1..22: mol_type = unassigned RNA
acgtctccaccgacttgcaaca

SEQ ID NO: 1336 - RNA, 22 nt, Homo sapiens
  source 1..22: mol_type = unassigned RNA
ctctctactgacttgcaacata

SEQ ID NO: 1337 - RNA, 22 nt, Homo sapiens
  source 1..22: mol_type = unassigned RNA
tatgttgcaagtcagtagagag

SEQ ID NO: 1338 - RNA, 22 nt, Homo sapiens
  source 1..22: mol_type = unassigned RNA
tctcccttcctgccctggctag

SEQ ID NO: 1339 - RNA, 22 nt, Homo sapiens
  source 1..22: mol_type = unassigned RNA
ctagccagggcaggaagggaga

SEQ ID NO: 1340 - RNA, 26 nt, Homo sapiens
  source 1..26: mol_type = unassigned RNA
cccagggcttggagtggggcaaggtt

SEQ ID NO: 1341 - RNA, 26 nt, Homo sapiens
  source 1..26: mol_type = unassigned RNA
aaccttgccccactccaagccctggg

SEQ ID NO: 1342 - RNA, 23 nt, Homo sapiens
  source 1..23: mol_type = unassigned RNA
tatctgctgggctttctggtgtt

SEQ ID NO: 1343 - RNA, 23 nt, Homo sapiens
  source 1..23: mol_type = unassigned RNA
aacaccagaaagcccagcagata

SEQ ID NO: 1344 - RNA, 21 nt, Homo sapiens
  source 1..21: mol_type = unassigned RNA
tggctgttggagggggcaggc

SEQ ID NO: 1345 - RNA, 21 nt, Homo sapiens
  source 1..21: mol_type = unassigned RNA
gcctgccccctccaacagcca

SEQ ID NO: 1346 - RNA, 22 nt, Homo sapiens
  source 1..22: mol_type = unassigned RNA
cagccctcctcccgcacccaaa

SEQ ID NO: 1347 - RNA, 22 nt, Homo sapiens
  source 1..22: mol_type = unassigned RNA
tttgggtgcgggaggagggctg

SEQ ID NO: 1348 - RNA, 22 nt, Homo sapiens
  source 1..22: mol_type = unassigned RNA
taggggcagcagaggacctggg

SEQ ID NO: 1349 - RNA, 22 nt, Homo sapiens
  source 1..22: mol_type = unassigned RNA
cccaggtcctctgctgccccta

SEQ ID NO: 1350 - RNA, 22 nt, Homo sapiens
  source 1..22: mol_type = unassigned RNA
ttgaggagacatggtgggggcc

SEQ ID NO: 1351 - RNA, 22 nt, Homo sapiens
  source 1..22: mol_type = unassigned RNA
ggcccccaccatgtctcctcaa

SEQ ID NO: 1352 - RNA, 21 nt, Homo sapiens
  source 1..21: mol_type = unassigned RNA
gcagcccagctgaggcctctg

SEQ ID NO: 1353 - RNA, 21 nt, Homo sapiens
  source 1..21: mol_type = unassigned RNA
cagaggcctcagctgggctgc

SEQ ID NO: 1354 - RNA, 22 nt, Homo sapiens
  source 1..22: mol_type = unassigned RNA
gagcaggcgaggctgggctgaa

SEQ ID NO: 1355 - RNA, 22 nt, Homo sapiens
  source 1..22: mol_type = unassigned RNA
ttcagcccagcctcgcctgctc

SEQ ID NO: 1356 - RNA, 23 nt, Homo sapiens
  source 1..23: mol_type = unassigned RNA
ccagccacggactgagagtgcat

SEQ ID NO: 1357 - RNA, 23 nt, Homo sapiens
  source 1..23: mol_type = unassigned RNA
atgcactctcagtccgtggctgg

SEQ ID NO: 1358 - RNA, 23 nt, Homo sapiens
  source 1..23: mol_type = unassigned RNA
gtcctccaggccatgagctgcgg

SEQ ID NO: 1359 - RNA, 23 nt, Homo sapiens
  source 1..23: mol_type = unassigned RNA
ccgcagctcatggcctggaggac

SEQ ID NO: 1360 - RNA, 22 nt, Homo sapiens
  source 1..22: mol_type = unassigned RNA
tcaggcagtgtgggtatcagat

SEQ ID NO: 1361 - RNA, 22 nt, Homo sapiens
  source 1..22: mol_type = unassigned RNA
atctgatacccacactgcctga

SEQ ID NO: 1362 - RNA, 23 nt, Homo sapiens
  source 1..23: mol_type = unassigned RNA
tgagagtggaattcacagtattt

SEQ ID NO: 1363 - RNA, 23 nt, Homo sapiens
  source 1..23: mol_type = unassigned RNA
aaatactgtgaattccactctca

SEQ ID NO: 1364 - RNA, 23 nt, Homo sapiens
  source 1..23: mol_type = unassigned RNA
atactgtgaatttcactgtcaca

SEQ ID NO: 1365 - RNA, 23 nt, Homo sapiens
  source 1..23: mol_type = unassigned RNA
tgtgacagtgaaattcacagtat

SEQ ID NO: 1366 - RNA, 21 nt, Homo sapiens
  source 1..21: mol_type = unassigned RNA
caaatggacaggataacacct

SEQ ID NO: 1367 - RNA, 21 nt, Homo sapiens
  source 1..21: mol_type = unassigned RNA
aggtgttatcctgtccatttg

SEQ ID NO: 1368 - RNA, 22 nt, Homo sapiens
  source 1..22: mol_type = unassigned RNA
aggtgttatcctatccatttgc

SEQ ID NO: 1369 - RNA, 22 nt, Homo sapiens
  source 1..22: mol_type = unassigned RNA
gcaaatggataggataacacct

SEQ ID NO: 1370 - RNA, 22 nt, Homo sapiens
  source 1..22: mol_type = unassigned RNA
tgatctcaccgctgcctccttc

SEQ ID NO: 1371 - RNA, 22 nt, Homo sapiens
  source 1..22: mol_type = unassigned RNA
gaaggaggcagcggtgagatca

SEQ ID NO: 1372 - RNA, 22 nt, Homo sapiens
  source 1..22: mol_type = unassigned RNA
caggaggcagtgggcgagcagg

SEQ ID NO: 1373 - RNA, 22 nt, Homo sapiens
  source 1..22: mol_type = unassigned RNA
cctgctcgcccactgcctcctg

SEQ ID NO: 1374 - RNA, 22 nt, Homo sapiens
  source 1..22: mol_type = unassigned RNA
tgcaagacggatactgtcatct

SEQ ID NO: 1375 - RNA, 22 nt, Homo sapiens
  source 1..22: mol_type = unassigned RNA
agatgacagtatccgtcttgca

SEQ ID NO: 1376 - RNA, 24 nt, Homo sapiens
  source 1..24: mol_type = unassigned RNA
tgtcagtgactcctgccccttggt

SEQ ID NO: 1377 - RNA, 24 nt, Homo sapiens
  source 1..24: mol_type = unassigned RNA
accaaggggcaggagtcactgaca

SEQ ID NO: 1378 - RNA, 22 nt, Homo sapiens
  source 1..22: mol_type = unassigned RNA
agggggcgcagtcactgacgtg

SEQ ID NO: 1379 - RNA, 22 nt, Homo sapiens
  source 1..22: mol_type = unassigned RNA
cacgtcagtgactgcgccccct

SEQ ID NO: 1380 - RNA, 23 nt, Homo sapiens
  source 1..23: mol_type = unassigned RNA
tcaaaatgtagaggaagacccca

SEQ ID NO: 1381 - RNA, 23 nt, Homo sapiens
  source 1..23: mol_type = unassigned RNA
tggggtcttcctctacattttga

SEQ ID NO: 1382 - RNA, 22 nt, Homo sapiens
  source 1..22: mol_type = unassigned RNA
aatttactctgcaatcttctcc

SEQ ID NO: 1383 - RNA, 22 nt, Homo sapiens
  source 1..22: mol_type = unassigned RNA
ggagaagattgcagagtaaatt

SEQ ID NO: 1384 - RNA, 22 nt, Homo sapiens
  source 1..22: mol_type = unassigned RNA
agaagattgcagagtaagttcc

SEQ ID NO: 1385 - RNA, 22 nt, Homo sapiens
  source 1..22: mol_type = unassigned RNA
ggaacttactctgcaatcttct

SEQ ID NO: 1386 - RNA, 26 nt, Homo sapiens
  source 1..26: mol_type = unassigned RNA
cacaggactgactcctcaccccagtg

SEQ ID NO: 1387 - RNA, 26 nt, Homo sapiens
  source 1..26: mol_type = unassigned RNA
cactggggtgaggagtcagtcctgtg

SEQ ID NO: 1388 - RNA, 22 nt, Homo sapiens
  source 1..22: mol_type = unassigned RNA
tctggggatgaggacagtgtgt

SEQ ID NO: 1389 - RNA, 22 nt, Homo sapiens
  source 1..22: mol_type = unassigned RNA
acacactgtcctcatccccaga

SEQ ID NO: 1390 - RNA, 20 nt, Homo sapiens
  source 1..20: mol_type = unassigned RNA
atgggtgatgggtgtggtgt

SEQ ID NO: 1391 - RNA, 20 nt, Homo sapiens
  source 1..20: mol_type = unassigned RNA
acaccacacccatcacccat

SEQ ID NO: 1392 - RNA, 22 nt, Homo sapiens
  source 1..22: mol_type = unassigned RNA
ttggccaccacacctacccctt

SEQ ID NO: 1393 - RNA, 22 nt, Homo sapiens
  source 1..22: mol_type = unassigned RNA
aaggggtaggtgtggtggccaa

SEQ ID NO: 1394 - RNA, 22 nt, Homo sapiens
  source 1..22: mol_type = unassigned RNA
tgtagttgtattgtattgccac

SEQ ID NO: 1395 - RNA, 22 nt, Homo sapiens
  source 1..22: mol_type = unassigned RNA
gtggcaatacaatacaactaca

SEQ ID NO: 1396 - RNA, 23 nt, Homo sapiens
  source 1..23: mol_type = unassigned RNA
tagcaatacagtacaaatatagt

SEQ ID NO: 1397 - RNA, 23 nt, Homo sapiens
  source 1..23: mol_type = unassigned RNA
actatatttgtactgtattgcta

SEQ ID NO: 1398 - RNA, 22 nt, Homo sapiens
  source 1..22: mol_type = unassigned RNA
tcagtcacatatctagtgtcta

SEQ ID NO: 1399 - RNA, 22 nt, Homo sapiens
  source 1..22: mol_type = unassigned RNA
tagacactagatatgtgactga

SEQ ID NO: 1400 - RNA, 22 nt, Homo sapiens
  source 1..22: mol_type = unassigned RNA
gacactaggcatgtgagtgatt

SEQ ID NO: 1401 - RNA, 22 nt, Homo sapiens
  source 1..22: mol_type = unassigned RNA
aatcactcacatgcctagtgtc

SEQ ID NO: 1402 - RNA, 22 nt, Homo sapiens
  source 1..22: mol_type = unassigned RNA
tcaatcacttggtaattgctgt

SEQ ID NO: 1403 - RNA, 22 nt, Homo sapiens
  source 1..22: mol_type = unassigned RNA
acagcaattaccaagtgattga

SEQ ID NO: 1404 - RNA, 25 nt, Homo sapiens
  source 1..25: mol_type = unassigned RNA
agcggggaggaagtgggcgctgctt

SEQ ID NO: 1405 - RNA, 25 nt, Homo sapiens
  source 1..25: mol_type = unassigned RNA
aagcagcgcccacttcctccccgct

SEQ ID NO: 1406 - RNA, 22 nt, Homo sapiens
  source 1..22: mol_type = unassigned RNA
agcccgccccagccgaggttct

SEQ ID NO: 1407 - RNA, 22 nt, Homo sapiens
  source 1..22: mol_type = unassigned RNA
agaacctcggctggggcgggct

SEQ ID NO: 1408 - RNA, 23 nt, Homo sapiens
  source 1..23: mol_type = unassigned RNA
gccccggcgcgggcgggttctgg

SEQ ID NO: 1409 - RNA, 23 nt, Homo sapiens
  source 1..23: mol_type = unassigned RNA
ccagaacccgcccgcgccggggc

SEQ ID NO: 1410 - RNA, 22 nt, Homo sapiens
  source 1..22: mol_type = unassigned RNA
agcaaggcggcatctctctgat

SEQ ID NO: 1411 - RNA, 22 nt, Homo sapiens
  source 1..22: mol_type = unassigned RNA
atcagagagatgccgccttgct

SEQ ID NO: 1412 - RNA, 21 nt, Homo sapiens
  source 1..21: mol_type = unassigned RNA
agagatgccgccttgctcctt

SEQ ID NO: 1413 - RNA, 21 nt, Homo sapiens
  source 1..21: mol_type = unassigned RNA
aaggagcaaggcggcatctct

SEQ ID NO: 1414 - RNA, 23 nt, Homo sapiens
  source 1..23: mol_type = unassigned RNA
ttgaagaggaggtgctctgtagc

SEQ ID NO: 1415 - RNA, 23 nt, Homo sapiens
  source 1..23: mol_type = unassigned RNA
gctacagagcacctcctcttcaa

SEQ ID NO: 1416 - RNA, 22 nt, Homo sapiens
  source 1..22: mol_type = unassigned RNA
acaacagtgacttgctctccaa

SEQ ID NO: 1417 - RNA, 22 nt, Homo sapiens
  source 1..22: mol_type = unassigned RNA
ttggagagcaagtcactgttgt

SEQ ID NO: 1418 - RNA, 18 nt, Homo sapiens
  source 1..18: mol_type = unassigned RNA
gggtgagggcaggtggtt

SEQ ID NO: 1419 - RNA, 18 nt, Homo sapiens
  source 1..18: mol_type = unassigned RNA
aaccacctgccctcaccc

SEQ ID NO: 1420 - RNA, 18 nt, Homo sapiens
  source 1..18: mol_type = unassigned RNA
cgtgtcttctggcttgat

SEQ ID NO: 1421 - RNA, 18 nt, Homo sapiens
  source 1..18: mol_type = unassigned RNA
atcaagccagaagacacg

SEQ ID NO: 1422 - RNA, 23 nt, Homo sapiens
  source 1..23: mol_type = unassigned RNA
tgcatcaggccagaagacatgag

SEQ ID NO: 1423 - RNA, 23 nt, Homo sapiens
  source 1..23: mol_type = unassigned RNA
ctcatgtcttctggcctgatgca

SEQ ID NO: 1424 - RNA, 21 nt, Homo sapiens
  source 1..21: mol_type = unassigned RNA
aatgagagacctgtactgtat

SEQ ID NO: 1425 - RNA, 21 nt, Homo sapiens
  source 1..21: mol_type = unassigned RNA
atacagtacaggtctctcatt

SEQ ID NO: 1426 - RNA, 22 nt, Homo sapiens
  source 1..22: mol_type = unassigned RNA
tccagtacaggtctctcatttc

SEQ ID NO: 1427 - RNA, 22 nt, Homo sapiens
  source 1..22: mol_type = unassigned RNA
gaaatgagagacctgtactgga

SEQ ID NO: 1428 - RNA, 22 nt, Homo sapiens
  source 1..22: mol_type = unassigned RNA
tgggatccagacagtgggagaa

SEQ ID NO: 1429 - RNA, 22 nt, Homo sapiens
  source 1..22: mol_type = unassigned RNA
ttctcccactgtctggatccca

SEQ ID NO: 1430 - RNA, 22 nt, Homo sapiens
  source 1..22: mol_type = unassigned RNA
ttctcccactaccaggctccca

SEQ ID NO: 1431 - RNA, 22 nt, Homo sapiens
  source 1..22: mol_type = unassigned RNA
tgggagcctggtagtgggagaa

SEQ ID NO: 1432 - RNA, 22 nt, Homo sapiens
  source 1..22: mol_type = unassigned RNA
ccaacctaggtggtcagagttg

SEQ ID NO: 1433 - RNA, 22 nt, Homo sapiens
  source 1..22: mol_type = unassigned RNA
caactctgaccacctaggttgg

SEQ ID NO: 1434 - RNA, 22 nt, Homo sapiens
  source 1..22: mol_type = unassigned RNA
aactctgaccccttaggttgat

SEQ ID NO: 1435 - RNA, 22 nt, Homo sapiens
  source 1..22: mol_type = unassigned RNA
atcaacctaaggggtcagagtt

SEQ ID NO: 1436 - RNA, 23 nt, Homo sapiens
  source 1..23: mol_type = unassigned RNA
gtgccaccttaactgcagccaat

SEQ ID NO: 1437 - RNA, 23 nt, Homo sapiens
  source 1..23: mol_type = unassigned RNA
attggctgcagttaaggtggcac

SEQ ID NO: 1438 - RNA, 22 nt, Homo sapiens
  source 1..22: mol_type = unassigned RNA
aagttggctgcagttaaggtgg

SEQ ID NO: 1439 - RNA, 22 nt, Homo sapiens
  source 1..22: mol_type = unassigned RNA
ccaccttaactgcagccaactt

SEQ ID NO: 1440 - RNA, 22 nt, Homo sapiens
  source 1..22: mol_type = unassigned RNA
aagggggaaggaaacatggaga

SEQ ID NO: 1441 - RNA, 22 nt, Homo sapiens
  source 1..22: mol_type = unassigned RNA
tctccatgtttccttccccctt

SEQ ID NO: 1442 - RNA, 22 nt, Homo sapiens
  source 1..22: mol_type = unassigned RNA
tccatgtttccttcccccttct

SEQ ID NO: 1443 - RNA, 22 nt, Homo sapiens
  source 1..22: mol_type = unassigned RNA
agaagggggaaggaaacatgga

SEQ ID NO: 1444 - RNA, 21 nt, Homo sapiens
  source 1..21: mol_type = unassigned RNA
acacatgggtggctgtggcct

SEQ ID NO: 1445 - RNA, 21 nt, Homo sapiens
  source 1..21: mol_type = unassigned RNA
aggccacagccacccatgtgt

SEQ ID NO: 1446 - RNA, 22 nt, Homo sapiens
  source 1..22: mol_type = unassigned RNA
taggccacagccacccatgtgt

SEQ ID NO: 1447 - RNA, 22 nt, Homo sapiens
  source 1..22: mol_type = unassigned RNA
acacatgggtggctgtggccta

SEQ ID NO: 1448 - RNA, 21 nt, Homo sapiens
  source 1..21: mol_type = unassigned RNA
agctgtacctgaaaccaagca

SEQ ID NO: 1449 - RNA, 21 nt, Homo sapiens
  source 1..21: mol_type = unassigned RNA
tgcttggtttcaggtacagct

SEQ ID NO: 1450 - RNA, 22 nt, Homo sapiens
  source 1..22: mol_type = unassigned RNA
tcacaaatctataatatgcagg

SEQ ID NO: 1451 - RNA, 22 nt, Homo sapiens
  source 1..22: mol_type = unassigned RNA
cctgcatattatagatttgtga

SEQ ID NO: 1452 - RNA, 21 nt, Homo sapiens
  source 1..21: mol_type = unassigned RNA
tgcttaagttgtaccaagtat

SEQ ID NO: 1453 - RNA, 21 nt, Homo sapiens
  source 1..21: mol_type = unassigned RNA
atacttggtacaacttaagca

SEQ ID NO: 1454 - RNA, 22 nt, Homo sapiens
  source 1..22: mol_type = unassigned RNA
cctggcatatttggtataactt

SEQ ID NO: 1455 - RNA, 22 nt, Homo sapiens
  source 1..22: mol_type = unassigned RNA
aagttataccaaatatgccagg

SEQ ID NO: 1456 - RNA, 22 nt, Homo sapiens
  source 1..22: mol_type = unassigned RNA
tgagggctccaggtgacggtgg

SEQ ID NO: 1457 - RNA, 22 nt, Homo sapiens
  source 1..22: mol_type = unassigned RNA
ccaccgtcacctggagccctca

SEQ ID NO: 1458 - RNA, 22 nt, Homo sapiens
  source 1..22: mol_type = unassigned RNA
acctgccagcacctccctgcag

SEQ ID NO: 1459 - RNA, 22 nt, Homo sapiens
  source 1..22: mol_type = unassigned RNA
ctgcagggaggtgctggcaggt

SEQ ID NO: 1460 - RNA, 23 nt, Homo sapiens
  source 1..23: mol_type = unassigned RNA
ggcaggagggctgtgccaggttg

SEQ ID NO: 1461 - RNA, 23 nt, Homo sapiens
  source 1..23: mol_type = unassigned RNA
caacctggcacagccctcctgcc

SEQ ID NO: 1462 - RNA, 22 nt, Homo sapiens
  source 1..22: mol_type = unassigned RNA
ccctctctggctcctccccaaa

SEQ ID NO: 1463 - RNA, 22 nt, Homo sapiens
  source 1..22: mol_type = unassigned RNA
tttggggaggagccagagaggg

SEQ ID NO: 1464 - RNA, 24 nt, Homo sapiens
  source 1..24: mol_type = unassigned RNA
tgggggagccatgagataagagca

SEQ ID NO: 1465 - RNA, 24 nt, Homo sapiens
  source 1..24: mol_type = unassigned RNA
tgctcttatctcatggctccccca

SEQ ID NO: 1466 - RNA, 21 nt, Homo sapiens
  source 1..21: mol_type = unassigned RNA
gtaccttctggttcagctagt

SEQ ID NO: 1467 - RNA, 21 nt, Homo sapiens
  source 1..21: mol_type = unassigned RNA
actagctgaaccagaaggtac

SEQ ID NO: 1468 - RNA, 23 nt, Homo sapiens
  source 1..23: mol_type = unassigned RNA
aactgaaccaggagtgagcttcg

SEQ ID NO: 1469 - RNA, 23 nt, Homo sapiens
  source 1..23: mol_type = unassigned RNA
cgaagctcactcctggttcagtt

SEQ ID NO: 1470 - RNA, 22 nt, Homo sapiens
  source 1..22: mol_type = unassigned RNA
tggggaaggcgtcagtgtcggg

SEQ ID NO: 1471 - RNA, 22 nt, Homo sapiens
  source 1..22: mol_type = unassigned RNA
cccgacactgacgccttcccca

SEQ ID NO: 1472 - RNA, 21 nt, Homo sapiens
  source 1..21: mol_type = unassigned RNA
agaccctgcagccttcccacc

SEQ ID NO: 1473 - RNA, 21 nt, Homo sapiens
  source 1..21: mol_type = unassigned RNA
ggtgggaaggctgcagggtct

SEQ ID NO: 1474 - RNA, 22 nt, Homo sapiens
  source 1..22: mol_type = unassigned RNA
acccaggttccctctggccgca

SEQ ID NO: 1475 - RNA, 22 nt, Homo sapiens
  source 1..22: mol_type = unassigned RNA
tgcggccagagggaacctgggt

SEQ ID NO: 1476 - RNA, 23 nt, Homo sapiens
  source 1..23: mol_type = unassigned RNA
agggccagaggagcctggagtgg

SEQ ID NO: 1477 - RNA, 23 nt, Homo sapiens
  source 1..23: mol_type = unassigned RNA
ccactccaggctcctctggccct

SEQ ID NO: 1478 - RNA, 22 nt, Homo sapiens
  source 1..22: mol_type = unassigned RNA
atagtgggaagctggcagattc

SEQ ID NO: 1479 - RNA, 22 nt, Homo sapiens
  source 1..22: mol_type = unassigned RNA
gaatctgccagcttcccactat

SEQ ID NO: 1480 - RNA, 21 nt, Homo sapiens
  source 1..21: mol_type = unassigned RNA
atctgccagcttccacagtgg

SEQ ID NO: 1481 - RNA, 21 nt, Homo sapiens
  source 1..21: mol_type = unassigned RNA
ccactgtggaagctggcagat

SEQ ID NO: 1482 - RNA, 25 nt, Homo sapiens
  source 1..25: mol_type = unassigned RNA
catgctgacctccctcctgccccag

SEQ ID NO: 1483 - RNA, 25 nt, Homo sapiens
  source 1..25: mol_type = unassigned RNA
ctggggcaggagggaggtcagcatg

SEQ ID NO: 1484 - RNA, 23 nt, Homo sapiens
  source 1..23: mol_type = unassigned RNA
tgggaggggagaggcagcaagca

SEQ ID NO: 1485 - RNA, 23 nt, Homo sapiens
  source 1..23: mol_type = unassigned RNA
tgcttgctgcctctcccctccca

SEQ ID NO: 1486 - RNA, 22 nt, Homo sapiens
  source 1..22: mol_type = unassigned RNA
tcatttatctgttgggaagcta

SEQ ID NO: 1487 - RNA, 22 nt, Homo sapiens
  source 1..22: mol_type = unassigned RNA
tagcttcccaacagataaatga

SEQ ID NO: 1488 - RNA, 23 nt, Homo sapiens
  source 1..23: mol_type = unassigned RNA
ctggcggagcccattccatgcca

SEQ ID NO: 1489 - RNA, 23 nt, Homo sapiens
  source 1..23: mol_type = unassigned RNA
tggcatggaatgggctccgccag

SEQ ID NO: 1490 - RNA, 22 nt, Homo sapiens
  source 1..22: mol_type = unassigned RNA
cacacaagtggcccccaacact

SEQ ID NO: 1491 - RNA, 22 nt, Homo sapiens
  source 1..22: mol_type = unassigned RNA
agtgttgggggccacttgtgtg

SEQ ID NO: 1492 - RNA, 22 nt, Homo sapiens
  source 1..22: mol_type = unassigned RNA
tgctgggggccacatgagtgtg

SEQ ID NO: 1493 - RNA, 22 nt, Homo sapiens
  source 1..22: mol_type = unassigned RNA
cacactcatgtggcccccagca

SEQ ID NO: 1494 - RNA, 21 nt, Homo sapiens
  source 1..21: mol_type = unassigned RNA
gccctgacctgtcctgttctg

SEQ ID NO: 1495 - RNA, 21 nt, Homo sapiens
  source 1..21: mol_type = unassigned RNA
cagaacaggacaggtcagggc

SEQ ID NO: 1496 - RNA, 23 nt, Homo sapiens
  source 1..23: mol_type = unassigned RNA
tgtagagcagggagcaggaagct

SEQ ID NO: 1497 - RNA, 23 nt, Homo sapiens
  source 1..23: mol_type = unassigned RNA
agcttcctgctccctgctctaca

SEQ ID NO: 1498 - RNA, 22 nt, Homo sapiens
  source 1..22: mol_type = unassigned RNA
ccaccaggtctagcattgggat

SEQ ID NO: 1499 - RNA, 22 nt, Homo sapiens
  source 1..22: mol_type = unassigned RNA
atcccaatgctagacctggtgg

SEQ ID NO: 1500 - RNA, 22 nt, Homo sapiens
  source 1..22: mol_type = unassigned RNA
aatcccaatgctagacccggtg

SEQ ID NO: 1501 - RNA, 22 nt, Homo sapiens
  source 1..22: mol_type = unassigned RNA
caccgggtctagcattgggatt

SEQ ID NO: 1502 - RNA, 22 nt, Homo sapiens
  source 1..22: mol_type = unassigned RNA
gctgcgggctgcggtcagggcg

SEQ ID NO: 1503 - RNA, 22 nt, Homo sapiens
  source 1..22: mol_type = unassigned RNA
cgccctgaccgcagcccgcagc

SEQ ID NO: 1504 - RNA, 21 nt, Homo sapiens
  source 1..21: mol_type = unassigned RNA
aaaggtgctcaaattagacat

SEQ ID NO: 1505 - RNA, 21 nt, Homo sapiens
  source 1..21: mol_type = unassigned RNA
atgtctaatttgagcaccttt

SEQ ID NO: 1506 - RNA, 22 nt, Homo sapiens
  source 1..22: mol_type = unassigned RNA
cctaatttgaacaccttcggta

SEQ ID NO: 1507 - RNA, 22 nt, Homo sapiens
  source 1..22: mol_type = unassigned RNA
taccgaaggtgttcaaattagg

SEQ ID NO: 1508 - RNA, 19 nt, Homo sapiens
  source 1..19: mol_type = unassigned RNA
aggcaggttatctgggctg

SEQ ID NO: 1509 - RNA, 19 nt, Homo sapiens
  source 1..19: mol_type = unassigned RNA
cagcccagataacctgcct

SEQ ID NO: 1510 - RNA, 20 nt, Homo sapiens
  source 1..20: mol_type = unassigned RNA
atgcgaggatgctgacagtg

SEQ ID NO: 1511 - RNA, 20 nt, Homo sapiens
  source 1..20: mol_type = unassigned RNA
cactgtcagcatcctcgcat

SEQ ID NO: 1512 - RNA, 22 nt, Homo sapiens
  source 1..22: mol_type = unassigned RNA
tgaaactggagcgcctggagga

SEQ ID NO: 1513 - RNA, 22 nt, Homo sapiens
  source 1..22: mol_type = unassigned RNA
tcctccaggcgctccagtttca

SEQ ID NO: 1514 - RNA, 22 nt, Homo sapiens
  source 1..22: mol_type = unassigned RNA
accagcgcgttttcagtttcat

SEQ ID NO: 1515 - RNA, 22 nt, Homo sapiens
  source 1..22: mol_type = unassigned RNA
atgaaactgaaaacgcgctggt

SEQ ID NO: 1516 - RNA, 25 nt, Homo sapiens
  source 1..25: mol_type = unassigned RNA
aagggaggaggagcggaggggccct

SEQ ID NO: 1517 - RNA, 25 nt, Homo sapiens
  source 1..25: mol_type = unassigned RNA
agggcccctccgctcctcctccctt

SEQ ID NO: 1518 - RNA, 22 nt, Homo sapiens
  source 1..22: mol_type = unassigned RNA
gcccgagaggatccgtccctgc

SEQ ID NO: 1519 - RNA, 22 nt, Homo sapiens
  source 1..22: mol_type = unassigned RNA
gcagggacggatcctctcgggc

SEQ ID NO: 1520 - RNA, 22 nt, Homo sapiens
  source 1..22: mol_type = unassigned RNA
aggactgatcctctcgggcagg

SEQ ID NO: 1521 - RNA, 22 nt, Homo sapiens
  source 1..22: mol_type = unassigned RNA
cctgcccgagaggatcagtcct

SEQ ID NO: 1522 - RNA, 23 nt, Homo sapiens
  source 1..23: mol_type = unassigned RNA
tcaggcaaagggatatttacaga

SEQ ID NO: 1523 - RNA, 23 nt, Homo sapiens
  source 1..23: mol_type = unassigned RNA
tctgtaaatatccctttgcctga

SEQ ID NO: 1524 - RNA, 21 nt, Homo sapiens
  source 1..21: mol_type = unassigned RNA
tttctgtcttttctggtccag

SEQ ID NO: 1525 - RNA, 21 nt, Homo sapiens
  source 1..21: mol_type = unassigned RNA
ctggaccagaaaagacagaaa

SEQ ID NO: 1526 - RNA, 23 nt, Homo sapiens
  source 1..23: mol_type = unassigned RNA
tggccggatgggacaggaggcat

SEQ ID NO: 1527 - RNA, 23 nt, Homo sapiens
  source 1..23: mol_type = unassigned RNA
atgcctcctgtcccatccggcca

SEQ ID NO: 1528 - RNA, 23 nt, Homo sapiens
  source 1..23: mol_type = unassigned RNA
tctaaagactagacttcgctatg

SEQ ID NO: 1529 - RNA, 23 nt, Homo sapiens
  source 1..23: mol_type = unassigned RNA
catagcgaagtctagtctttaga

SEQ ID NO: 1530 - RNA, 23 nt, Homo sapiens
  source 1..23: mol_type = unassigned RNA
tggcccggcgacgtctcacggtc

SEQ ID NO: 1531 - RNA, 23 nt, Homo sapiens
  source 1..23: mol_type = unassigned RNA
gaccgtgagacgtcgccgggcca

SEQ ID NO: 1532 - RNA, 23 nt, Homo sapiens
  source 1..23: mol_type = unassigned RNA
tgagtggggctcccgggacggcg

SEQ ID NO: 1533 - RNA, 23 nt, Homo sapiens
  source 1..23: mol_type = unassigned RNA
cgccgtcccgggagccccactca

SEQ ID NO: 1534 - RNA, 21 nt, Homo sapiens
  source 1..21: mol_type = unassigned RNA
agcggtgctcctgcgggccga

SEQ ID NO: 1535 - RNA, 21 nt, Homo sapiens
  source 1..21: mol_type = unassigned RNA
tcggcccgcaggagcaccgct

SEQ ID NO: 1536 - RNA, 23 nt, Homo sapiens
  source 1..23: mol_type = unassigned RNA
ccggtcccaggagaacctgcaga

SEQ ID NO: 1537 - RNA, 23 nt, Homo sapiens
  source 1..23: mol_type = unassigned RNA
tctgcaggttctcctgggaccgg

SEQ ID NO: 1538 - RNA, 22 nt, Homo sapiens
  source 1..22: mol_type = unassigned RNA
aaggcccgggctttcctcccag

SEQ ID NO: 1539 - RNA, 22 nt, Homo sapiens
  source 1..22: mol_type = unassigned RNA
ctgggaggaaagcccgggcctt

SEQ ID NO: 1540 - RNA, 22 nt, Homo sapiens
  source 1..22: mol_type = unassigned RNA
agggaaggaggcttggtcttag

SEQ ID NO: 1541 - RNA, 22 nt, Homo sapiens
  source 1..22: mol_type = unassigned RNA
ctaagaccaagcctccttccct

SEQ ID NO: 1542 - RNA, 21 nt, Homo sapiens
  source 1..21: mol_type = unassigned RNA
gaggtttggggaggatttgct

SEQ ID NO: 1543 - RNA, 21 nt, Homo sapiens
  source 1..21: mol_type = unassigned RNA
agcaaatcctccccaaacctc

SEQ ID NO: 1544 - RNA, 20 nt, Homo sapiens
  source 1..20: mol_type = unassigned RNA
cgcccctcctgcccccacag

SEQ ID NO: 1545 - RNA, 20 nt, Homo sapiens
  source 1..20: mol_type = unassigned RNA
ctgtgggggcaggaggggcg

SEQ ID NO: 1546 - RNA, 22 nt, Homo sapiens
  source 1..22: mol_type = unassigned RNA
tgcggggacaggccagggcatc

SEQ ID NO: 1547 - RNA, 22 nt, Homo sapiens
  source 1..22: mol_type = unassigned RNA
gatgccctggcctgtccccgca

SEQ ID NO: 1548 - RNA, 22 nt, Homo sapiens
  source 1..22: mol_type = unassigned RNA
cctgacccaccccctcccgcag

SEQ ID NO: 1549 - RNA, 22 nt, Homo sapiens
  source 1..22: mol_type = unassigned RNA
ctgcgggagggggtgggtcagg

SEQ ID NO: 1550 - RNA, 22 nt, Homo sapiens
  source 1..22: mol_type = unassigned RNA
ctcgggcggaggtggttgagtg

SEQ ID NO: 1551 - RNA, 22 nt, Homo sapiens
  source 1..22: mol_type = unassigned RNA
cactcaaccacctccgcccgag

SEQ ID NO: 1552 - RNA, 24 nt, Homo sapiens
  source 1..24: mol_type = unassigned RNA
agaggacccgtagctgctagaagg

SEQ ID NO: 1553 - RNA, 24 nt, Homo sapiens
  source 1..24: mol_type = unassigned RNA
ccttctagcagctacgggtcctct

SEQ ID NO: 1554 - RNA, 22 nt, Homo sapiens
  source 1..22: mol_type = unassigned RNA
ttgtggatctcaaggatgtgct

SEQ ID NO: 1555 - RNA, 22 nt, Homo sapiens
  source 1..22: mol_type = unassigned RNA
agcacatccttgagatccacaa

SEQ ID NO: 1556 - RNA, 22 nt, Homo sapiens
  source 1..22: mol_type = unassigned RNA
ttctctttctttagccttgtgt

SEQ ID NO: 1557 - RNA, 22 nt, Homo sapiens
  source 1..22: mol_type = unassigned RNA
acacaaggctaaagaaagagaa

SEQ ID NO: 1558 - RNA, 22 nt, Homo sapiens
  source 1..22: mol_type = unassigned RNA
caaggccaaaggaagagaacag

SEQ ID NO: 1559 - RNA, 22 nt, Homo sapiens
  source 1..22: mol_type = unassigned RNA
ctgttctcttcctttggccttg

SEQ ID NO: 1560 - RNA, 23 nt, Homo sapiens
  source 1..23: mol_type = unassigned RNA
atgcggacctgggttagcggagt

SEQ ID NO: 1561 - RNA, 23 nt, Homo sapiens
  source 1..23: mol_type = unassigned RNA
actccgctaacccaggtccgcat

SEQ ID NO: 1562 - RNA, 22 nt, Homo sapiens
  source 1..22: mol_type = unassigned RNA
agccaggctctgaagggaaagt

SEQ ID NO: 1563 - RNA, 22 nt, Homo sapiens
  source 1..22: mol_type = unassigned RNA
actttcccttcagagcctggct

SEQ ID NO: 1564 - RNA, 22 nt, Homo sapiens
  source 1..22: mol_type = unassigned RNA
tttcccttcagagcctggcttt

SEQ ID NO: 1565 - RNA, 22 nt, Homo sapiens
  source 1..22: mol_type = unassigned RNA
aaagccaggctctgaagggaaa

SEQ ID NO: 1566 - RNA, 22 nt, Homo sapiens
  source 1..22: mol_type = unassigned RNA
ccagagatggttgccttcctat

SEQ ID NO: 1567 - RNA, 22 nt, Homo sapiens
  source 1..22: mol_type = unassigned RNA
ataggaaggcaaccatctctgg

SEQ ID NO: 1568 - RNA, 23 nt, Homo sapiens
  source 1..23: mol_type = unassigned RNA
cagggaggcgctcactctctgct

SEQ ID NO: 1569 - RNA, 23 nt, Homo sapiens
  source 1..23: mol_type = unassigned RNA
agcagagagtgagcgcctccctg

SEQ ID NO: 1570 - RNA, 22 nt, Homo sapiens
  source 1..22: mol_type = unassigned RNA
catgacgtcacagaggcttcgc

SEQ ID NO: 1571 - RNA, 22 nt, Homo sapiens
  source 1..22: mol_type = unassigned RNA
gcgaagcctctgtgacgtcatg

SEQ ID NO: 1572 - RNA, 23 nt, Homo sapiens
  source 1..23: mol_type = unassigned RNA
aggcctctgtgacgtcacggtgt

SEQ ID NO: 1573 - RNA, 23 nt, Homo sapiens
  source 1..23: mol_type = unassigned RNA
acaccgtgacgtcacagaggcct

SEQ ID NO: 1574 - RNA, 23 nt, Homo sapiens
  source 1..23: mol_type = unassigned RNA
tgccccacctgctgaccaccctc

SEQ ID NO: 1575 - RNA, 23 nt, Homo sapiens
  source 1..23: mol_type = unassigned RNA
gagggtggtcagcaggtggggca

SEQ ID NO: 1576 - RNA, 23 nt, Homo sapiens
  source 1..23: mol_type = unassigned RNA
gtgagtgggagccggtggggctg

SEQ ID NO: 1577 - RNA, 23 nt, Homo sapiens
  source 1..23: mol_type = unassigned RNA
cagccccaccggctcccactcac

SEQ ID NO: 1578 - RNA, 21 nt, Homo sapiens
  source 1..21: mol_type = unassigned RNA
taggactagatgttggaatta

SEQ ID NO: 1579 - RNA, 21 nt, Homo sapiens
  source 1..21: mol_type = unassigned RNA
taattccaacatctagtccta

SEQ ID NO: 1580 - RNA, 22 nt, Homo sapiens
  source 1..22: mol_type = unassigned RNA
aaattcatgttcaatctaaacc

SEQ ID NO: 1581 - RNA, 22 nt, Homo sapiens
  source 1..22: mol_type = unassigned RNA
ggtttagattgaacatgaattt

SEQ ID NO: 1582 - RNA, 22 nt, Homo sapiens
  source 1..22: mol_type = unassigned RNA
tttagattgaacatgaagttag

SEQ ID NO: 1583 - RNA, 22 nt, Homo sapiens
  source 1..22: mol_type = unassigned RNA
ctaacttcatgttcaatctaaa

SEQ ID NO: 1584 - RNA, 21 nt, Homo sapiens
  source 1..21: mol_type = unassigned RNA
gagggcatgcgcactttgtcc

SEQ ID NO: 1585 - RNA, 21 nt, Homo sapiens
  source 1..21: mol_type = unassigned RNA
ggacaaagtgcgcatgccctc

SEQ ID NO: 1586 - RNA, 21 nt, Homo sapiens
  source 1..21: mol_type = unassigned RNA
acaaggtgtgcatgcctgacc

SEQ ID NO: 1587 - RNA, 21 nt, Homo sapiens
  source 1..21: mol_type = unassigned RNA
ggtcaggcatgcacaccttgt

SEQ ID NO: 1588 - RNA, 22 nt, Homo sapiens
  source 1..22: mol_type = unassigned RNA
cttctgatcaagatttgtggtg

SEQ ID NO: 1589 - RNA, 22 nt, Homo sapiens
  source 1..22: mol_type = unassigned RNA
caccacaaatcttgatcagaag

SEQ ID NO: 1590 - RNA, 21 nt, Homo sapiens
  source 1..21: mol_type = unassigned RNA
ccaaatcttgatcagaagcct

SEQ ID NO: 1591 - RNA, 21 nt, Homo sapiens
  source 1..21: mol_type = unassigned RNA
aggcttctgatcaagatttgg

SEQ ID NO: 1592 - RNA, 24 nt, Homo sapiens
  source 1..24: mol_type = unassigned RNA
aggcaggggctggtgctgggcggg

SEQ ID NO: 1593 - RNA, 24 nt, Homo sapiens
  source 1..24: mol_type = unassigned RNA
cccgcccagcaccagcccctgcct

SEQ ID NO: 1594 - RNA, 21 nt, Homo sapiens
  source 1..21: mol_type = unassigned RNA
cgcctgcccagccctcctgct

SEQ ID NO: 1595 - RNA, 21 nt, Homo sapiens
  source 1..21: mol_type = unassigned RNA
agcaggagggctgggcaggcg

SEQ ID NO: 1596 - RNA, 22 nt, Homo sapiens
  source 1..22: mol_type = unassigned RNA
ttaactcctttcacacccatgg

SEQ ID NO: 1597 - RNA, 22 nt, Homo sapiens
  source 1..22: mol_type = unassigned RNA
ccatgggtgtgaaaggagttaa

SEQ ID NO: 1598 - RNA, 21 nt, Homo sapiens
  source 1..21: mol_type = unassigned RNA
tggatgtggaaggagttatct

SEQ ID NO: 1599 - RNA, 21 nt, Homo sapiens
  source 1..21: mol_type = unassigned RNA
agataactccttccacatcca

SEQ ID NO: 1600 - RNA, 22 nt, Homo sapiens
  source 1..22: mol_type = unassigned RNA
tgagtgattgatagctatgttc

SEQ ID NO: 1601 - RNA, 22 nt, Homo sapiens
  source 1..22: mol_type = unassigned RNA
gaacatagctatcaatcactca

SEQ ID NO: 1602 - RNA, 21 nt, Homo sapiens
  source 1..21: mol_type = unassigned RNA
atagcaattgctcttttggaa

SEQ ID NO: 1603 - RNA, 21 nt, Homo sapiens
  source 1..21: mol_type = unassigned RNA
ttccaaaagagcaattgctat

SEQ ID NO: 1604 - RNA, 21 nt, Homo sapiens
  source 1..21: mol_type = unassigned RNA
tctgaaagagcagttggtgtt

SEQ ID NO: 1605 - RNA, 21 nt, Homo sapiens
  source 1..21: mol_type = unassigned RNA
aacaccaactgctctttcaga

SEQ ID NO: 1606 - RNA, 23 nt, Homo sapiens
  source 1..23: mol_type = unassigned RNA
cgcgggcgctcctggccgccgcc

SEQ ID NO: 1607 - RNA, 23 nt, Homo sapiens
  source 1..23: mol_type = unassigned RNA
ggcggcggccaggagcgcccgcg

SEQ ID NO: 1608 - RNA, 20 nt, Homo sapiens
  source 1..20: mol_type = unassigned RNA
ccaggagatccagagagaat

SEQ ID NO: 1609 - RNA, 20 nt, Homo sapiens
  source 1..20: mol_type = unassigned RNA
attctctctggatctcctgg

SEQ ID NO: 1610 - RNA, 22 nt, Homo sapiens
  source 1..22: mol_type = unassigned RNA
attctctctggatcccatggat

SEQ ID NO: 1611 - RNA, 22 nt, Homo sapiens
  source 1..22: mol_type = unassigned RNA
atccatgggatccagagagaat

SEQ ID NO: 1612 - RNA, 22 nt, Homo sapiens
  source 1..22: mol_type = unassigned RNA
tctgccatcctccctcccctac

SEQ ID NO: 1613 - RNA, 22 nt, Homo sapiens
  source 1..22: mol_type = unassigned RNA
gtaggggagggaggatggcaga

SEQ ID NO: 1614 - RNA, 24 nt, Homo sapiens
  source 1..24: mol_type = unassigned RNA
ggtgggatggagagaaggtatgag

SEQ ID NO: 1615 - RNA, 24 nt, Homo sapiens
  source 1..24: mol_type = unassigned RNA
ctcataccttctctccatcccacc

SEQ ID NO: 1616 - RNA, 18 nt, Homo sapiens
  source 1..18: mol_type = unassigned RNA
tgagatgacactgtagct

SEQ ID NO: 1617 - RNA, 18 nt, Homo sapiens
  source 1..18: mol_type = unassigned RNA
agctacagtgtcatctca

SEQ ID NO: 1618 - RNA, 21 nt, Homo sapiens
  source 1..21: mol_type = unassigned RNA
agcagacttgacctacaatta

SEQ ID NO: 1619 - RNA, 21 nt, Homo sapiens
  source 1..21: mol_type = unassigned RNA
taattgtaggtcaagtctgct

SEQ ID NO: 1620 - RNA, 22 nt, Homo sapiens
  source 1..22: mol_type = unassigned RNA
cagaacaggagcatagaaaggc

SEQ ID NO: 1621 - RNA, 22 nt, Homo sapiens
  source 1..22: mol_type = unassigned RNA
gcctttctatgctcctgttctg

SEQ ID NO: 1622 - RNA, 22 nt, Homo sapiens
  source 1..22: mol_type = unassigned RNA
ttaattttttgtttcggtcact

SEQ ID NO: 1623 - RNA, 22 nt, Homo sapiens
  source 1..22: mol_type = unassigned RNA
agtgaccgaaacaaaaaattaa

SEQ ID NO: 1624 - RNA, 23 nt, Homo sapiens
  source 1..23: mol_type = unassigned RNA
cttgccatcctggtccactgcat

SEQ ID NO: 1625 - RNA, 23 nt, Homo sapiens
  source 1..23: mol_type = unassigned RNA
atgcagtggaccaggatggcaag

SEQ ID NO: 1626 - RNA, 22 nt, Homo sapiens
  source 1..22: mol_type = unassigned RNA
gtggaccaggatggcaagggct

SEQ ID NO: 1627 - RNA, 22 nt, Homo sapiens
  source 1..22: mol_type = unassigned RNA
agcccttgccatcctggtccac

SEQ ID NO: 1628 - RNA, 22 nt, Homo sapiens
  source 1..22: mol_type = unassigned RNA
atacctcatctagaatgctgta

SEQ ID NO: 1629 - RNA, 22 nt, Homo sapiens
  source 1..22: mol_type = unassigned RNA
tacagcattctagatgaggtat

SEQ ID NO: 1630 - RNA, 22 nt, Homo sapiens
  source 1..22: mol_type = unassigned RNA
ttctagatgagagatatatata

SEQ ID NO: 1631 - RNA, 22 nt, Homo sapiens
  source 1..22: mol_type = unassigned RNA
tatatatatctctcatctagaa

SEQ ID NO: 1632 - RNA, 22 nt, Homo sapiens
  source 1..22: mol_type = unassigned RNA
tcttcttcctttgcagagttga

SEQ ID NO: 1633 - RNA, 22 nt, Homo sapiens
  source 1..22: mol_type = unassigned RNA
tcaactctgcaaaggaagaaga

SEQ ID NO: 1634 - RNA, 22 nt, Homo sapiens
  source 1..22: mol_type = unassigned RNA
aattctgtaaaggaagaagagg

SEQ ID NO: 1635 - RNA, 22 nt, Homo sapiens
  source 1..22: mol_type = unassigned RNA
cctcttcttcctttacagaatt

SEQ ID NO: 1636 - RNA, 22 nt, Homo sapiens
  source 1..22: mol_type = unassigned RNA
taggagggaatagtaaaagcag

SEQ ID NO: 1637 - RNA, 22 nt, Homo sapiens
  source 1..22: mol_type = unassigned RNA
ctgcttttactattccctccta

SEQ ID NO: 1638 - RNA, 22 nt, Homo sapiens
  source 1..22: mol_type = unassigned RNA
acccttgagcctgatccctagc

SEQ ID NO: 1639 - RNA, 22 nt, Homo sapiens
  source 1..22: mol_type = unassigned RNA
gctagggatcaggctcaagggt

SEQ ID NO: 1640 - RNA, 22 nt, Homo sapiens
  source 1..22: mol_type = unassigned RNA
aatgttggaatcctcgctagag

SEQ ID NO: 1641 - RNA, 22 nt, Homo sapiens
  source 1..22: mol_type = unassigned RNA
ctctagcgaggattccaacatt

SEQ ID NO: 1642 - RNA, 21 nt, Homo sapiens
  source 1..21: mol_type = unassigned RNA
tagcggggattccaatattgg

SEQ ID NO: 1643 - RNA, 21 nt, Homo sapiens
  source 1..21: mol_type = unassigned RNA
ccaatattggaatccccgcta

SEQ ID NO: 1644 - RNA, 22 nt, Homo sapiens
  source 1..22: mol_type = unassigned RNA
tgattgtcttcatatctagaac

SEQ ID NO: 1645 - RNA, 22 nt, Homo sapiens
  source 1..22: mol_type = unassigned RNA
gttctagatatgaagacaatca

SEQ ID NO: 1646 - RNA, 22 nt, Homo sapiens
  source 1..22: mol_type = unassigned RNA
ttctggatatgaagacaatcaa

SEQ ID NO: 1647 - RNA, 22 nt, Homo sapiens
  source 1..22: mol_type = unassigned RNA
ttgattgtcttcatatccagaa

SEQ ID NO: 1648 - RNA, 23 nt, Homo sapiens
  source 1..23: mol_type = unassigned RNA
ccccggtgttggggcgcgtctgc

SEQ ID NO: 1649 - RNA, 23 nt, Homo sapiens
  source 1..23: mol_type = unassigned RNA
gcagacgcgccccaacaccgggg

SEQ ID NO: 1650 - RNA, 21 nt, Homo sapiens
  source 1..21: mol_type = unassigned RNA
ggcgcgcccagctcccgggct

SEQ ID NO: 1651 - RNA, 21 nt, Homo sapiens
  source 1..21: mol_type = unassigned RNA
agcccgggagctgggcgcgcc

SEQ ID NO: 1652 - RNA, 20 nt, Homo sapiens
  source 1..20: mol_type = unassigned RNA
tgaggagatgctgggactga

SEQ ID NO: 1653 - RNA, 20 nt, Homo sapiens
  source 1..20: mol_type = unassigned RNA
tcagtcccagcatctcctca

SEQ ID NO: 1654 - RNA, 21 nt, Homo sapiens
  source 1..21: mol_type = unassigned RNA
agagtcggcgacgccgccagc

SEQ ID NO: 1655 - RNA, 21 nt, Homo sapiens
  source 1..21: mol_type = unassigned RNA
gctggcggcgtcgccgactct

SEQ ID NO: 1656 - RNA, 22 nt, Homo sapiens
  source 1..22: mol_type = unassigned RNA
tgaagccagctctggtctgggc

SEQ ID NO: 1657 - RNA, 22 nt, Homo sapiens
  source 1..22: mol_type = unassigned RNA
gcccagaccagagctggcttca

SEQ ID NO: 1658 - RNA, 22 nt, Homo sapiens
  source 1..22: mol_type = unassigned RNA
tgagaccaggactggatgcacc

SEQ ID NO: 1659 - RNA, 22 nt, Homo sapiens
  source 1..22: mol_type = unassigned RNA
ggtgcatccagtcctggtctca

SEQ ID NO: 1660 - RNA, 24 nt, Homo sapiens
  source 1..24: mol_type = unassigned RNA
gatgcgccgcccactgccccgcgc

SEQ ID NO: 1661 - RNA, 24 nt, Homo sapiens
  source 1..24: mol_type = unassigned RNA
gcgcggggcagtgggcggcgcatc

SEQ ID NO: 1662 - RNA, 22 nt, Homo sapiens
  source 1..22: mol_type = unassigned RNA
gcgggggtggcggcggcatccc

SEQ ID NO: 1663 - RNA, 22 nt, Homo sapiens
  source 1..22: mol_type = unassigned RNA
gggatgccgccgccacccccgc

SEQ ID NO: 1664 - RNA, 22 nt, Homo sapiens
  source 1..22: mol_type = unassigned RNA
ttacggaccagctaagggaggc

SEQ ID NO: 1665 - RNA, 22 nt, Homo sapiens
  source 1..22: mol_type = unassigned RNA
gcctcccttagctggtccgtaa

SEQ ID NO: 1666 - RNA, 21 nt, Homo sapiens
  source 1..21: mol_type = unassigned RNA
cacacatagcaggtgtatata

SEQ ID NO: 1667 - RNA, 21 nt, Homo sapiens
  source 1..21: mol_type = unassigned RNA
tatatacacctgctatgtgtg

SEQ ID NO: 1668 - RNA, 22 nt, Homo sapiens
  source 1..22: mol_type = unassigned RNA
gtatacacctgatatgtgtatg

SEQ ID NO: 1669 - RNA, 22 nt, Homo sapiens
  source 1..22: mol_type = unassigned RNA
catacacatatcaggtgtatac

SEQ ID NO: 1670 - RNA, 22 nt, Homo sapiens
  source 1..22: mol_type = unassigned RNA
tgaatggtaaagcgatgtcaca

SEQ ID NO: 1671 - RNA, 22 nt, Homo sapiens
  source 1..22: mol_type = unassigned RNA
tgtgacatcgctttaccattca

SEQ ID NO: 1672 - RNA, 20 nt, Homo sapiens
  source 1..20: mol_type = unassigned RNA
atcgctttaccattcatgtt

SEQ ID NO: 1673 - RNA, 20 nt, Homo sapiens
  source 1..20: mol_type = unassigned RNA
aacatgaatggtaaagcgat

SEQ ID NO: 1674 - RNA, 18 nt, Homo sapiens
  source 1..18: mol_type = unassigned RNA
tggatatgatgactgaaa

SEQ ID NO: 1675 - RNA, 18 nt, Homo sapiens
  source 1..18: mol_type = unassigned RNA
tttcagtcatcatatcca

SEQ ID NO: 1676 - RNA, 18 nt, Homo sapiens
  source 1..18: mol_type = unassigned RNA
cggtgagcgctcgctggc

SEQ ID NO: 1677 - RNA, 18 nt, Homo sapiens
  source 1..18: mol_type = unassigned RNA
gccagcgagcgctcaccg

SEQ ID NO: 1678 - RNA, 23 nt, Homo sapiens
  source 1..23: mol_type = unassigned RNA
tctgcactgtgagttggctggct

SEQ ID NO: 1679 - RNA, 23 nt, Homo sapiens
  source 1..23: mol_type = unassigned RNA
agccagccaactcacagtgcaga

SEQ ID NO: 1680 - RNA, 24 nt, Homo sapiens
  source 1..24: mol_type = unassigned RNA
acatcctgctccacagggcagagg

SEQ ID NO: 1681 - RNA, 24 nt, Homo sapiens
  source 1..24: mol_type = unassigned RNA
cctctgccctgtggagcaggatgt

SEQ ID NO: 1682 - RNA, 22 nt, Homo sapiens
  source 1..22: mol_type = unassigned RNA
tctggctatctcacgagactgt

SEQ ID NO: 1683 - RNA, 22 nt, Homo sapiens
  source 1..22: mol_type = unassigned RNA
acagtctcgtgagatagccaga

SEQ ID NO: 1684 - RNA, 22 nt, Homo sapiens
  source 1..22: mol_type = unassigned RNA
atattattagccacttctggat

SEQ ID NO: 1685 - RNA, 22 nt, Homo sapiens
  source 1..22: mol_type = unassigned RNA
atccagaagtggctaataatat

SEQ ID NO: 1686 - RNA, 21 nt, Homo sapiens
  source 1..21: mol_type = unassigned RNA
agaagtggctaataatattga

SEQ ID NO: 1687 - RNA, 21 nt, Homo sapiens
  source 1..21: mol_type = unassigned RNA
tcaatattattagccacttct

SEQ ID NO: 1688 - RNA, 22 nt, Homo sapiens
  source 1..22: mol_type = unassigned RNA
taaagtggcagagtatagacac

SEQ ID NO: 1689 - RNA, 22 nt, Homo sapiens
  source 1..22: mol_type = unassigned RNA
gtgtctatactctgccacttta

SEQ ID NO: 1690 - RNA, 22 nt, Homo sapiens
  source 1..22: mol_type = unassigned RNA
tgtctatactctgtcactttac

SEQ ID NO: 1691 - RNA, 22 nt, Homo sapiens
  source 1..22: mol_type = unassigned RNA
gtaaagtgacagagtatagaca

SEQ ID NO: 1692 - RNA, 21 nt, Homo sapiens
  source 1..21: mol_type = unassigned RNA
tctcagtaagtggcactctgt

SEQ ID NO: 1693 - RNA, 21 nt, Homo sapiens
  source 1..21: mol_type = unassigned RNA
acagagtgccacttactgaga

SEQ ID NO: 1694 - RNA, 21 nt, Homo sapiens
  source 1..21: mol_type = unassigned RNA
gacagagtgccacttactgaa

SEQ ID NO: 1695 - RNA, 21 nt, Homo sapiens
  source 1..21: mol_type = unassigned RNA
ttcagtaagtggcactctgtc

SEQ ID NO: 1696 - RNA, 22 nt, Homo sapiens
  source 1..22: mol_type = unassigned RNA
aactcacgaagtataccgaagt

SEQ ID NO: 1697 - RNA, 22 nt, Homo sapiens
  source 1..22: mol_type = unassigned RNA
acttcggtatacttcgtgagtt

SEQ ID NO: 1698 - RNA, 22 nt, Homo sapiens
  source 1..22: mol_type = unassigned RNA
ttcggtatactttgtgaattgg

SEQ ID NO: 1699 - RNA, 22 nt, Homo sapiens
  source 1..22: mol_type = unassigned RNA
ccaattcacaaagtataccgaa

SEQ ID NO: 1700 - RNA, 22 nt, Homo sapiens
  source 1..22: mol_type = unassigned RNA
actggcatgctgcatttatata

SEQ ID NO: 1701 - RNA, 22 nt, Homo sapiens
  source 1..22: mol_type = unassigned RNA
tatataaatgcagcatgccagt

SEQ ID NO: 1702 - RNA, 22 nt, Homo sapiens
  source 1..22: mol_type = unassigned RNA
atctaaatgcagcatgccagtc

SEQ ID NO: 1703 - RNA, 22 nt, Homo sapiens
  source 1..22: mol_type = unassigned RNA
gactggcatgctgcatttagat

SEQ ID NO: 1704 - RNA, 19 nt, Homo sapiens
  source 1..19: mol_type = unassigned RNA
catccgtccgtctgtccac

SEQ ID NO: 1705 - RNA, 19 nt, Homo sapiens
  source 1..19: mol_type = unassigned RNA
gtggacagacggacggatg

SEQ ID NO: 1706 - RNA, 21 nt, Homo sapiens
  source 1..21: mol_type = unassigned RNA
agtggaccgaggaaggaagga

SEQ ID NO: 1707 - RNA, 21 nt, Homo sapiens
  source 1..21: mol_type = unassigned RNA
tccttccttcctcggtccact

SEQ ID NO: 1708 - RNA, 22 nt, Homo sapiens
  source 1..22: mol_type = unassigned RNA
tacacaagaaaaccaaggctca

SEQ ID NO: 1709 - RNA, 22 nt, Homo sapiens
  source 1..22: mol_type = unassigned RNA
tgagccttggttttcttgtgta

SEQ ID NO: 1710 - RNA, 21 nt, Homo sapiens
  source 1..21: mol_type = unassigned RNA
taacataatagtgtggattga

SEQ ID NO: 1711 - RNA, 21 nt, Homo sapiens
  source 1..21: mol_type = unassigned RNA
tcaatccacactattatgtta

SEQ ID NO: 1712 - RNA, 21 nt, Homo sapiens
  source 1..21: mol_type = unassigned RNA
tgcttaaccttgccctcgaaa

SEQ ID NO: 1713 - RNA, 21 nt, Homo sapiens
  source 1..21: mol_type = unassigned RNA
tttcgagggcaaggttaagca

SEQ ID NO: 1714 - RNA, 21 nt, Homo sapiens
  source 1..21: mol_type = unassigned RNA
ttggacggtaaggttaagcaa

SEQ ID NO: 1715 - RNA, 21 nt, Homo sapiens
  source 1..21: mol_type = unassigned RNA
ttgcttaaccttaccgtccaa

SEQ ID NO: 1716 - RNA, 21 nt, Homo sapiens
  source 1..21: mol_type = unassigned RNA
aaaagcatcaggaagtaccca

SEQ ID NO: 1717 - RNA, 21 nt, Homo sapiens
  source 1..21: mol_type = unassigned RNA
tgggtacttcctgatgctttt

SEQ ID NO: 1718 - RNA, 21 nt, Homo sapiens
  source 1..21: mol_type = unassigned RNA
gcaggacaggcagaagtggat

SEQ ID NO: 1719 - RNA, 21 nt, Homo sapiens
  source 1..21: mol_type = unassigned RNA
atccacttctgcctgtcctgc

SEQ ID NO: 1720 - RNA, 22 nt, Homo sapiens
  source 1..22: mol_type = unassigned RNA
cagggctggcagtgacatgggt

SEQ ID NO: 1721 - RNA, 22 nt, Homo sapiens
  source 1..22: mol_type = unassigned RNA
acccatgtcactgccagccctg

SEQ ID NO: 1722 - RNA, 22 nt, Homo sapiens
  source 1..22: mol_type = unassigned RNA
atttccctgccattcccttggc

SEQ ID NO: 1723 - RNA, 22 nt, Homo sapiens
  source 1..22: mol_type = unassigned RNA
gccaagggaatggcagggaaat

SEQ ID NO: 1724 - RNA, 22 nt, Homo sapiens
  source 1..22: mol_type = unassigned RNA
tggcggcggtagttatgggctt

SEQ ID NO: 1725 - RNA, 22 nt, Homo sapiens
  source 1..22: mol_type = unassigned RNA
aagcccataactaccgccgcca

SEQ ID NO: 1726 - RNA, 22 nt, Homo sapiens
  source 1..22: mol_type = unassigned RNA
gctccctctagggtcgctcgga

SEQ ID NO: 1727 - RNA, 22 nt, Homo sapiens
  source 1..22: mol_type = unassigned RNA
tccgagcgaccctagagggagc

SEQ ID NO: 1728 - RNA, 22 nt, Homo sapiens
  source 1..22: mol_type = unassigned RNA
tgggaacttagtagaggtttaa

SEQ ID NO: 1729 - RNA, 22 nt, Homo sapiens
  source 1..22: mol_type = unassigned RNA
ttaaacctctactaagttccca

SEQ ID NO: 1730 - RNA, 21 nt, Homo sapiens
  source 1..21: mol_type = unassigned RNA
tggggctagtgatgcaggacg

SEQ ID NO: 1731 - RNA, 21 nt, Homo sapiens
  source 1..21: mol_type = unassigned RNA
cgtcctgcatcactagcccca

SEQ ID NO: 1732 - RNA, 22 nt, Homo sapiens
  source 1..22: mol_type = unassigned RNA
gctgacagcagggctggccgct

SEQ ID NO: 1733 - RNA, 22 nt, Homo sapiens
  source 1..22: mol_type = unassigned RNA
agcggccagccctgctgtcagc

SEQ ID NO: 1734 - RNA, 21 nt, Homo sapiens
  source 1..21: mol_type = unassigned RNA
attggactgctgatggcccgt

SEQ ID NO: 1735 - RNA, 21 nt, Homo sapiens
  source 1..21: mol_type = unassigned RNA
acgggccatcagcagtccaat

SEQ ID NO: 1736 - RNA, 22 nt, Homo sapiens
  source 1..22: mol_type = unassigned RNA
aggccatcagcagtccaatgaa

SEQ ID NO: 1737 - RNA, 22 nt, Homo sapiens
  source 1..22: mol_type = unassigned RNA
ttcattggactgctgatggcct

SEQ ID NO: 1738 - RNA, 22 nt, Homo sapiens
  source 1..22: mol_type = unassigned RNA
ttggacagaaaacacgcaggaa

SEQ ID NO: 1739 - RNA, 22 nt, Homo sapiens
  source 1..22: mol_type = unassigned RNA
ttcctgcgtgttttctgtccaa

SEQ ID NO: 1740 - RNA, 20 nt, Homo sapiens
  source 1..20: mol_type = unassigned RNA
cctgcgtgttttctgtccaa

SEQ ID NO: 1741 - RNA, 20 nt, Homo sapiens
  source 1..20: mol_type = unassigned RNA
ttggacagaaaacacgcagg

SEQ ID NO: 1742 - RNA, 22 nt, Homo sapiens
  source 1..22: mol_type = unassigned RNA
tgagacaggcttatgctgctat

SEQ ID NO: 1743 - RNA, 22 nt, Homo sapiens
  source 1..22: mol_type = unassigned RNA
atagcagcataagcctgtctca

SEQ ID NO: 1744 - RNA, 22 nt, Homo sapiens
  source 1..22: mol_type = unassigned RNA
atagcagcatgaacctgtctca

SEQ ID NO: 1745 - RNA, 22 nt, Homo sapiens
  source 1..22: mol_type = unassigned RNA
tgagacaggttcatgctgctat

SEQ ID NO: 1746 - RNA, 20 nt, Homo sapiens
  source 1..20: mol_type = unassigned RNA
gagacaggttcatgctgcta

SEQ ID NO: 1747 - RNA, 20 nt, Homo sapiens
  source 1..20: mol_type = unassigned RNA
tagcagcatgaacctgtctc

SEQ ID NO: 1748 - RNA, 21 nt, Homo sapiens
  source 1..21: mol_type = unassigned RNA
atagcagcataagcctgtctc

SEQ ID NO: 1749 - RNA, 21 nt, Homo sapiens
  source 1..21: mol_type = unassigned RNA
gagacaggcttatgctgctat

SEQ ID NO: 1750 - RNA, 22 nt, Homo sapiens
  source 1..22: mol_type = unassigned RNA
tgtgtggatcctggaggaggca

SEQ ID NO: 1751 - RNA, 22 nt, Homo sapiens
  source 1..22: mol_type = unassigned RNA
tgcctcctccaggatccacaca

SEQ ID NO: 1752 - RNA, 22 nt, Homo sapiens
  source 1..22: mol_type = unassigned RNA
agacatcaagatcagtcccaaa

SEQ ID NO: 1753 - RNA, 22 nt, Homo sapiens
  source 1..22: mol_type = unassigned RNA
tttgggactgatcttgatgtct

SEQ ID NO: 1754 - RNA, 22 nt, Homo sapiens
  source 1..22: mol_type = unassigned RNA
tttgggactgatcttgatgtct

SEQ ID NO: 1755 - RNA, 22 nt, Homo sapiens
  source 1..22: mol_type = unassigned RNA
agacatcaagatcagtcccaaa

SEQ ID NO: 1756 - RNA, 22 nt, Homo sapiens
  source 1..22: mol_type = unassigned RNA
aaggaaccagaaaatgagaagt

SEQ ID NO: 1757 - RNA, 22 nt, Homo sapiens
  source 1..22: mol_type = unassigned RNA
acttctcattttctggttcctt

SEQ ID NO: 1758 - RNA, 22 nt, Homo sapiens
  source 1..22: mol_type = unassigned RNA
tctggccttgacttgactcttt

SEQ ID NO: 1759 - RNA, 22 nt, Homo sapiens
  source 1..22: mol_type = unassigned RNA
aaagagtcaagtcaaggccaga

SEQ ID NO: 1760 - RNA, 23 nt, Homo sapiens
  source 1..23: mol_type = unassigned RNA
tcaaggccagaggtcccacagca

SEQ ID NO: 1761 - RNA, 23 nt, Homo sapiens
  source 1..23: mol_type = unassigned RNA
tgctgtgggacctctggccttga

SEQ ID NO: 1762 - RNA, 21 nt, Homo sapiens
  source 1..21: mol_type = unassigned RNA
actccagttttagttctcttg

SEQ ID NO: 1763 - RNA, 21 nt, Homo sapiens
  source 1..21: mol_type = unassigned RNA
caagagaactaaaactggagt

SEQ ID NO: 1764 - RNA, 22 nt, Homo sapiens
  source 1..22: mol_type = unassigned RNA
aagagaactgaaagtggagcct

SEQ ID NO: 1765 - RNA, 22 nt, Homo sapiens
  source 1..22: mol_type = unassigned RNA
aggctccactttcagttctctt

SEQ ID NO: 1766 - RNA, 22 nt, Homo sapiens
  source 1..22: mol_type = unassigned RNA
taaggggtgtatggcagatgca

SEQ ID NO: 1767 - RNA, 22 nt, Homo sapiens
  source 1..22: mol_type = unassigned RNA
tgcatctgccatacacccctta

SEQ ID NO: 1768 - RNA, 21 nt, Homo sapiens
  source 1..21: mol_type = unassigned RNA
tttcagataacagtattacat

SEQ ID NO: 1769 - RNA, 21 nt, Homo sapiens
  source 1..21: mol_type = unassigned RNA
atgtaatactgttatctgaaa

SEQ ID NO: 1770 - RNA, 22 nt, Homo sapiens
  source 1..22: mol_type = unassigned RNA
aagcaatactgttacctgaaat

SEQ ID NO: 1771 - RNA, 22 nt, Homo sapiens
  source 1..22: mol_type = unassigned RNA
atttcaggtaacagtattgctt

SEQ ID NO: 1772 - RNA, 22 nt, Homo sapiens
  source 1..22: mol_type = unassigned RNA
tactaactgcagattcaagtga

SEQ ID NO: 1773 - RNA, 22 nt, Homo sapiens
  source 1..22: mol_type = unassigned RNA
tcacttgaatctgcagttagta

SEQ ID NO: 1774 - RNA, 21 nt, Homo sapiens
  source 1..21: mol_type = unassigned RNA
attgcctaacatgtgccagaa

SEQ ID NO: 1775 - RNA, 21 nt, Homo sapiens
  source 1..21: mol_type = unassigned RNA
ttctggcacatgttaggcaat

SEQ ID NO: 1776 - RNA, 22 nt, Homo sapiens
  source 1..22: mol_type = unassigned RNA
tctggtatgtagtaggtaataa

SEQ ID NO: 1777 - RNA, 22 nt, Homo sapiens
  source 1..22: mol_type = unassigned RNA
ttattacctactacataccaga

SEQ ID NO: 1778 - RNA, 22 nt, Homo sapiens
  source 1..22: mol_type = unassigned RNA
agttgcctttttgttcccatgc

SEQ ID NO: 1779 - RNA, 22 nt, Homo sapiens
  source 1..22: mol_type = unassigned RNA
gcatgggaacaaaaaggcaact

SEQ ID NO: 1780 - RNA, 21 nt, Homo sapiens
  source 1..21: mol_type = unassigned RNA
ataggcaccaaaaagcaacaa

SEQ ID NO: 1781 - RNA, 21 nt, Homo sapiens
  source 1..21: mol_type = unassigned RNA
ttgttgctttttggtgcctat

SEQ ID NO: 1782 - RNA, 22 nt, Homo sapiens
  source 1..22: mol_type = unassigned RNA
cctgcaactttgcctgatcaga

SEQ ID NO: 1783 - RNA, 22 nt, Homo sapiens
  source 1..22: mol_type = unassigned RNA
tctgatcaggcaaagttgcagg

SEQ ID NO: 1784 - RNA, 22 nt, Homo sapiens
  source 1..22: mol_type = unassigned RNA
tgatcaggcaaaattgcagact

SEQ ID NO: 1785 - RNA, 22 nt, Homo sapiens
  source 1..22: mol_type = unassigned RNA
agtctgcaattttgcctgatca

SEQ ID NO: 1786 - RNA, 22 nt, Homo sapiens
  source 1..22: mol_type = unassigned RNA
ttgtggctggtcatgaggctaa

SEQ ID NO: 1787 - RNA, 22 nt, Homo sapiens
  source 1..22: mol_type = unassigned RNA
ttagcctcatgaccagccacaa

SEQ ID NO: 1788 - RNA, 21 nt, Homo sapiens
  source 1..21: mol_type = unassigned RNA
ttagtctcatgatcagacaca

SEQ ID NO: 1789 - RNA, 21 nt, Homo sapiens
  source 1..21: mol_type = unassigned RNA
tgtgtctgatcatgagactaa

SEQ ID NO: 1790 - RNA, 22 nt, Homo sapiens
  source 1..22: mol_type = unassigned RNA
aaagatagacaattggctaaat

SEQ ID NO: 1791 - RNA, 22 nt, Homo sapiens
  source 1..22: mol_type = unassigned RNA
atttagccaattgtctatcttt

SEQ ID NO: 1792 - RNA, 22 nt, Homo sapiens
  source 1..22: mol_type = unassigned RNA
ttagccaattgtccatctttag

SEQ ID NO: 1793 - RNA, 22 nt, Homo sapiens
  source 1..22: mol_type = unassigned RNA
ctaaagatggacaattggctaa

SEQ ID NO: 1794 - RNA, 22 nt, Homo sapiens
  source 1..22: mol_type = unassigned RNA
tctgtgagaccaaagaactact

SEQ ID NO: 1795 - RNA, 22 nt, Homo sapiens
  source 1..22: mol_type = unassigned RNA
agtagttctttggtctcacaga

SEQ ID NO: 1796 - RNA, 22 nt, Homo sapiens
  source 1..22: mol_type = unassigned RNA
ttgttctttggtctttcagcca

SEQ ID NO: 1797 - RNA, 22 nt, Homo sapiens
  source 1..22: mol_type = unassigned RNA
tggctgaaagaccaaagaacaa

SEQ ID NO: 1798 - RNA, 23 nt, Homo sapiens
  source 1..23: mol_type = unassigned RNA
cgggctgtccggaggggtcggct

SEQ ID NO: 1799 - RNA, 23 nt, Homo sapiens
  source 1..23: mol_type = unassigned RNA
agccgacccctccggacagcccg

SEQ ID NO: 1800 - RNA, 23 nt, Homo sapiens
  source 1..23: mol_type = unassigned RNA
tctgtattctcctttgcctgcag

SEQ ID NO: 1801 - RNA, 23 nt, Homo sapiens
  source 1..23: mol_type = unassigned RNA
ctgcaggcaaaggagaatacaga

SEQ ID NO: 1802 - RNA, 23 nt, Homo sapiens
  source 1..23: mol_type = unassigned RNA
tacatggatggaaaccttcaagc

SEQ ID NO: 1803 - RNA, 23 nt, Homo sapiens
  source 1..23: mol_type = unassigned RNA
gcttgaaggtttccatccatgta

SEQ ID NO: 1804 - RNA, 22 nt, Homo sapiens
  source 1..22: mol_type = unassigned RNA
tatggaggttctagaccatgtt

SEQ ID NO: 1805 - RNA, 22 nt, Homo sapiens
  source 1..22: mol_type = unassigned RNA
aacatggtctagaacctccata

SEQ ID NO: 1806 - RNA, 22 nt, Homo sapiens
  source 1..22: mol_type = unassigned RNA
gggaccatcctgcctgctgtgg

SEQ ID NO: 1807 - RNA, 22 nt, Homo sapiens
  source 1..22: mol_type = unassigned RNA
ccacagcaggcaggatggtccc

SEQ ID NO: 1808 - RNA, 22 nt, Homo sapiens
  source 1..22: mol_type = unassigned RNA
tcagcaggcaggctggtgcagc

SEQ ID NO: 1809 - RNA, 22 nt, Homo sapiens
  source 1..22: mol_type = unassigned RNA
gctgcaccagcctgcctgctga

SEQ ID NO: 1810 - RNA, 22 nt, Homo sapiens
  source 1..22: mol_type = unassigned RNA
tcacctgacctcccatgcctgt

SEQ ID NO: 1811 - RNA, 22 nt, Homo sapiens
  source 1..22: mol_type = unassigned RNA
acaggcatgggaggtcaggtga

SEQ ID NO: 1812 - RNA, 22 nt, Homo sapiens
  source 1..22: mol_type = unassigned RNA
caggcacgggagctcaggtgag

SEQ ID NO: 1813 - RNA, 22 nt, Homo sapiens
  source 1..22: mol_type = unassigned RNA
ctcacctgagctcccgtgcctg

SEQ ID NO: 1814 - RNA, 21 nt, Homo sapiens
  source 1..21: mol_type = unassigned RNA
tgagtgttgtctacgagggca

SEQ ID NO: 1815 - RNA, 21 nt, Homo sapiens
  source 1..21: mol_type = unassigned RNA
tgccctcgtagacaacactca

SEQ ID NO: 1816 - RNA, 21 nt, Homo sapiens
  source 1..21: mol_type = unassigned RNA
actgacaggagagcattttga

SEQ ID NO: 1817 - RNA, 21 nt, Homo sapiens
  source 1..21: mol_type = unassigned RNA
tcaaaatgctctcctgtcagt

SEQ ID NO: 1818 - RNA, 22 nt, Homo sapiens
  source 1..22: mol_type = unassigned RNA
tgacctgggactcggacagctg

SEQ ID NO: 1819 - RNA, 22 nt, Homo sapiens
  source 1..22: mol_type = unassigned RNA
cagctgtccgagtcccaggtca

SEQ ID NO: 1820 - RNA, 22 nt, Homo sapiens
  source 1..22: mol_type = unassigned RNA
tctcaggagtaaagacagagtt

SEQ ID NO: 1821 - RNA, 22 nt, Homo sapiens
  source 1..22: mol_type = unassigned RNA
aactctgtctttactcctgaga

SEQ ID NO: 1822 - RNA, 22 nt, Homo sapiens
  source 1..22: mol_type = unassigned RNA
aactctgtcttcactcatgagt

SEQ ID NO: 1823 - RNA, 22 nt, Homo sapiens
  source 1..22: mol_type = unassigned RNA
actcatgagtgaagacagagtt

SEQ ID NO: 1824 - RNA, 22 nt, Homo sapiens
  source 1..22: mol_type = unassigned RNA
tggggcggagcttccggaggcc

SEQ ID NO: 1825 - RNA, 22 nt, Homo sapiens
  source 1..22: mol_type = unassigned RNA
ggcctccggaagctccgcccca

SEQ ID NO: 1826 - RNA, 22 nt, Homo sapiens
  source 1..22: mol_type = unassigned RNA
caatcagcaagtatactgccct

SEQ ID NO: 1827 - RNA, 22 nt, Homo sapiens
  source 1..22: mol_type = unassigned RNA
agggcagtatacttgctgattg

SEQ ID NO: 1828 - RNA, 22 nt, Homo sapiens
  source 1..22: mol_type = unassigned RNA
tggcagtgtcttagctggttgt

SEQ ID NO: 1829 - RNA, 22 nt, Homo sapiens
  source 1..22: mol_type = unassigned RNA
acaaccagctaagacactgcca

SEQ ID NO: 1830 - RNA, 22 nt, Homo sapiens
  source 1..22: mol_type = unassigned RNA
ccaatattggctgtgctgctcc

SEQ ID NO: 1831 - RNA, 22 nt, Homo sapiens
  source 1..22: mol_type = unassigned RNA
ggagcagcacagccaatattgg

SEQ ID NO: 1832 - RNA, 21 nt, Homo sapiens
  source 1..21: mol_type = unassigned RNA
tagcagcacagaaatattggc

SEQ ID NO: 1833 - RNA, 21 nt, Homo sapiens
  source 1..21: mol_type = unassigned RNA
gccaatatttctgtgctgcta

SEQ ID NO: 1834 - RNA, 21 nt, Homo sapiens
  source 1..21: mol_type = unassigned RNA
taattttatgtataagctagt

SEQ ID NO: 1835 - RNA, 21 nt, Homo sapiens
  source 1..21: mol_type = unassigned RNA
actagcttatacataaaatta

SEQ ID NO: 1836 - RNA, 22 nt, Homo sapiens
  source 1..22: mol_type = unassigned RNA
gagcttattcataaaagtgcag

SEQ ID NO: 1837 - RNA, 22 nt, Homo sapiens
  source 1..22: mol_type = unassigned RNA
ctgcacttttatgaataagctc

SEQ ID NO: 1838 - RNA, 22 nt, Homo sapiens
  source 1..22: mol_type = unassigned RNA
aagacgggaggaaagaagggag

SEQ ID NO: 1839 - RNA, 22 nt, Homo sapiens
  source 1..22: mol_type = unassigned RNA
ctcccttctttcctcccgtctt

SEQ ID NO: 1840 - RNA, 22 nt, Homo sapiens
  source 1..22: mol_type = unassigned RNA
cagtggttttaccctatggtag

SEQ ID NO: 1841 - RNA, 22 nt, Homo sapiens
  source 1..22: mol_type = unassigned RNA
ctaccatagggtaaaaccactg

SEQ ID NO: 1842 - RNA, 22 nt, Homo sapiens
  source 1..22: mol_type = unassigned RNA
attctaatttctccacgtcttt

SEQ ID NO: 1843 - RNA, 22 nt, Homo sapiens
  source 1..22: mol_type = unassigned RNA
aaagacgtggagaaattagaat

SEQ ID NO: 1844 - RNA, 22 nt, Homo sapiens
  source 1..22: mol_type = unassigned RNA
aaccagcaccccaactttggac

SEQ ID NO: 1845 - RNA, 22 nt, Homo sapiens
  source 1..22: mol_type = unassigned RNA
gtccaaagttggggtgctggtt

SEQ ID NO: 1846 - RNA, 24 nt, Homo sapiens
  source 1..24: mol_type = unassigned RNA
aaagacataggatagagtcacctc

SEQ ID NO: 1847 - RNA, 24 nt, Homo sapiens
  source 1..24: mol_type = unassigned RNA
gaggtgactctatcctatgtcttt

SEQ ID NO: 1848 - RNA, 22 nt, Homo sapiens
  source 1..22: mol_type = unassigned RNA
taactggttgaacaactgaacc

SEQ ID NO: 1849 - RNA, 22 nt, Homo sapiens
  source 1..22: mol_type = unassigned RNA
ggttcagttgttcaaccagtta

SEQ ID NO: 1850 - RNA, 20 nt, Homo sapiens
  source 1..20: mol_type = unassigned RNA
cgtgccacccttttccccag

SEQ ID NO: 1851 - RNA, 20 nt, Homo sapiens
  source 1..20: mol_type = unassigned RNA
ctggggaaaagggtggcacg

SEQ ID NO: 1852 - RNA, 17 nt, Homo sapiens
  source 1..17: mol_type = unassigned RNA
gtggggccaggcggtgg

SEQ ID NO: 1853 - RNA, 17 nt, Homo sapiens
  source 1..17: mol_type = unassigned RNA
ccaccgcctggccccac

SEQ ID NO: 1854 - RNA, 22 nt, Homo sapiens
  source 1..22: mol_type = unassigned RNA
aaaagctgggttgagagggcaa

SEQ ID NO: 1855 - RNA, 22 nt, Homo sapiens
  source 1..22: mol_type = unassigned RNA
ttgccctctcaacccagctttt

SEQ ID NO: 1856 - RNA, 22 nt, Homo sapiens
  source 1..22: mol_type = unassigned RNA
ggtccagaggggagataggttc

SEQ ID NO: 1857 - RNA, 22 nt, Homo sapiens
  source 1..22: mol_type = unassigned RNA
gaacctatctcccctctggacc

SEQ ID NO: 1858 - RNA, 23 nt, Homo sapiens
  source 1..23: mol_type = unassigned RNA
tagccttcagatcttggtgtttt

SEQ ID NO: 1859 - RNA, 23 nt, Homo sapiens
  source 1..23: mol_type = unassigned RNA
aaaacaccaagatctgaaggcta

SEQ ID NO: 1860 - RNA, 23 nt, Homo sapiens
  source 1..23: mol_type = unassigned RNA
ccacttggatctgaaggctgccc

SEQ ID NO: 1861 - RNA, 23 nt, Homo sapiens
  source 1..23: mol_type = unassigned RNA
gggcagccttcagatccaagtgg

SEQ ID NO: 1862 - RNA, 22 nt, Homo sapiens
  source 1..22: mol_type = unassigned RNA
tgtgcgcagggagacctctccc

SEQ ID NO: 1863 - RNA, 22 nt, Homo sapiens
  source 1..22: mol_type = unassigned RNA
gggagaggtctccctgcgcaca

SEQ ID NO: 1864 - RNA, 22 nt, Homo sapiens
  source 1..22: mol_type = unassigned RNA
tgtctactactggagacactgg

SEQ ID NO: 1865 - RNA, 22 nt, Homo sapiens
  source 1..22: mol_type = unassigned RNA
ccagtgtctccagtagtagaca

SEQ ID NO: 1866 - RNA, 21 nt, Homo sapiens
  source 1..21: mol_type = unassigned RNA
aaggcagggcccccgctcccc

SEQ ID NO: 1867 - RNA, 21 nt, Homo sapiens
  source 1..21: mol_type = unassigned RNA
ggggagcgggggccctgcctt

SEQ ID NO: 1868 - RNA, 21 nt, Homo sapiens
  source 1..21: mol_type = unassigned RNA
ctgactgttgccgtcctccag

SEQ ID NO: 1869 - RNA, 21 nt, Homo sapiens
  source 1..21: mol_type = unassigned RNA
ctggaggacggcaacagtcag

SEQ ID NO: 1870 - RNA, 25 nt, Homo sapiens
  source 1..25: mol_type = unassigned RNA
aaaaaccacaattacttttgcacca

SEQ ID NO: 1871 - RNA, 25 nt, Homo sapiens
  source 1..25: mol_type = unassigned RNA
tggtgcaaaagtaattgtggttttt

SEQ ID NO: 1872 - RNA, 23 nt, Homo sapiens
  source 1..23: mol_type = unassigned RNA
caaaaaccgcaattacttttgca

SEQ ID NO: 1873 - RNA, 23 nt, Homo sapiens
  source 1..23: mol_type = unassigned RNA
tgcaaaagtaattgcggtttttg

SEQ ID NO: 1874 - RNA, 22 nt, Homo sapiens
  source 1..22: mol_type = unassigned RNA
atgtgcctgagggagtaagaca

SEQ ID NO: 1875 - RNA, 22 nt, Homo sapiens
  source 1..22: mol_type = unassigned RNA
tgtcttactccctcaggcacat

SEQ ID NO: 1876 - RNA, 20 nt, Homo sapiens
  source 1..20: mol_type = unassigned RNA
tcttactccctcaggcactg

SEQ ID NO: 1877 - RNA, 20 nt, Homo sapiens
  source 1..20: mol_type = unassigned RNA
cagtgcctgagggagtaaga

SEQ ID NO: 1878 - RNA, 22 nt, Homo sapiens
  source 1..22: mol_type = unassigned RNA
agacacatttggagagggaccc

SEQ ID NO: 1879 - RNA, 22 nt, Homo sapiens
  source 1..22: mol_type = unassigned RNA
gggtccctctccaaatgtgtct

SEQ ID NO: 1880 - RNA, 22 nt, Homo sapiens
  source 1..22: mol_type = unassigned RNA
ggttccctctccaaatgtgtct

SEQ ID NO: 1881 - RNA, 22 nt, Homo sapiens
  source 1..22: mol_type = unassigned RNA
agacacatttggagagggaacc

SEQ ID NO: 1882 - RNA, 21 nt, Homo sapiens
  source 1..21: mol_type = unassigned RNA
aaaatttctttcactacttag

SEQ ID NO: 1883 - RNA, 21 nt, Homo sapiens
  source 1..21: mol_type = unassigned RNA
ctaagtagtgaaagaaatttt

SEQ ID NO: 1884 - RNA, 21 nt, Homo sapiens
  source 1..21: mol_type = unassigned RNA
ttagtgaaggctattttaatt

SEQ ID NO: 1885 - RNA, 21 nt, Homo sapiens
  source 1..21: mol_type = unassigned RNA
aattaaaatagccttcactaa

SEQ ID NO: 1886 - RNA, 20 nt, Homo sapiens
  source 1..20: mol_type = unassigned RNA
actgtaaacgctttctgatg

SEQ ID NO: 1887 - RNA, 20 nt, Homo sapiens
  source 1..20: mol_type = unassigned RNA
catcagaaagcgtttacagt

SEQ ID NO: 1888 - RNA, 22 nt, Homo sapiens
  source 1..22: mol_type = unassigned RNA
gcatgtgatgaagcaaatcagt

SEQ ID NO: 1889 - RNA, 22 nt, Homo sapiens
  source 1..22: mol_type = unassigned RNA
actgatttgcttcatcacatgc

SEQ ID NO: 1890 - RNA, 24 nt, Homo sapiens
  source 1..24: mol_type = unassigned RNA
caaagtgatgagtaatactggctg

SEQ ID NO: 1891 - RNA, 24 nt, Homo sapiens
  source 1..24: mol_type = unassigned RNA
cagccagtattactcatcactttg

SEQ ID NO: 1892 - RNA, 20 nt, Homo sapiens
  source 1..20: mol_type = unassigned RNA
gaatcggaaaggaggcgccg

SEQ ID NO: 1893 - RNA, 20 nt, Homo sapiens
  source 1..20: mol_type = unassigned RNA
cggcgcctcctttccgattc

SEQ ID NO: 1894 - RNA, 21 nt, Homo sapiens
  source 1..21: mol_type = unassigned RNA
ttgtgaagaaagaaattctta

SEQ ID NO: 1895 - RNA, 21 nt, Homo sapiens
  source 1..21: mol_type = unassigned RNA
taagaatttctttcttcacaa

SEQ ID NO: 1896 - RNA, 22 nt, Homo sapiens
  source 1..22: mol_type = unassigned RNA
aggaggcatcttgagaaatgga

SEQ ID NO: 1897 - RNA, 22 nt, Homo sapiens
  source 1..22: mol_type = unassigned RNA
tccatttctcaagatgcctcct

SEQ ID NO: 1898 - RNA, 24 nt, Homo sapiens
  source 1..24: mol_type = unassigned RNA
acaaaaaaaaaagcccaacccttc

SEQ ID NO: 1899 - RNA, 24 nt, Homo sapiens
  source 1..24: mol_type = unassigned RNA
gaagggttgggcttttttttttgt

SEQ ID NO: 1900 - RNA, 22 nt, Homo sapiens
  source 1..22: mol_type = unassigned RNA
tgttgtacttttttttttgttc

SEQ ID NO: 1901 - RNA, 22 nt, Homo sapiens
  source 1..22: mol_type = unassigned RNA
gaacaaaaaaaaaagtacaaca

SEQ ID NO: 1902 - RNA, 21 nt, Homo sapiens
  source 1..21: mol_type = unassigned RNA
tctctcggctcctcgcggctc

SEQ ID NO: 1903 - RNA, 21 nt, Homo sapiens
  source 1..21: mol_type = unassigned RNA
gagccgcgaggagccgagaga

SEQ ID NO: 1904 - RNA, 23 nt, Homo sapiens
  source 1..23: mol_type = unassigned RNA
cgagggcatttcatgatgcaggc

SEQ ID NO: 1905 - RNA, 23 nt, Homo sapiens
  source 1..23: mol_type = unassigned RNA
gcctgcatcatgaaatgccctcg

SEQ ID NO: 1906 - RNA, 22 nt, Homo sapiens
  source 1..22: mol_type = unassigned RNA
atgaagtgcactcatgatatgt

SEQ ID NO: 1907 - RNA, 22 nt, Homo sapiens
  source 1..22: mol_type = unassigned RNA
acatatcatgagtgcacttcat

SEQ ID NO: 1908 - RNA, 22 nt, Homo sapiens
  source 1..22: mol_type = unassigned RNA
tgtctacattaatgaaaagagc

SEQ ID NO: 1909 - RNA, 22 nt, Homo sapiens
  source 1..22: mol_type = unassigned RNA
gctcttttcattaatgtagaca

SEQ ID NO: 1910 - RNA, 22 nt, Homo sapiens
  source 1..22: mol_type = unassigned RNA
tcaccctgcatcccgcacccag

SEQ ID NO: 1911 - RNA, 22 nt, Homo sapiens
  source 1..22: mol_type = unassigned RNA
ctgggtgcgggatgcagggtga

SEQ ID NO: 1912 - RNA, 22 nt, Homo sapiens
  source 1..22: mol_type = unassigned RNA
gtgggctgggctgggctgggcc

SEQ ID NO: 1913 - RNA, 22 nt, Homo sapiens
  source 1..22: mol_type = unassigned RNA
ggcccagcccagcccagcccac

SEQ ID NO: 1914 - RNA, 20 nt, Homo sapiens
  source 1..20: mol_type = unassigned RNA
cgcgggtcggggtctgcagg

SEQ ID NO: 1915 - RNA, 20 nt, Homo sapiens
  source 1..20: mol_type = unassigned RNA
cctgcagaccccgacccgcg

SEQ ID NO: 1916 - RNA, 21 nt, Homo sapiens
  source 1..21: mol_type = unassigned RNA
tcacctgagctcccgtgcctg

SEQ ID NO: 1917 - RNA, 21 nt, Homo sapiens
  source 1..21: mol_type = unassigned RNA
caggcacgggagctcaggtga

SEQ ID NO: 1918 - RNA, 20 nt, Homo sapiens
  source 1..20: mol_type = unassigned RNA
aggcatgggaggtcaggtga

SEQ ID NO: 1919 - RNA, 20 nt, Homo sapiens
  source 1..20: mol_type = unassigned RNA
tcacctgacctcccatgcct

SEQ ID NO: 1920 - RNA, 23 nt, Homo sapiens
  source 1..23: mol_type = unassigned RNA
catcagcaccctatgtcctttct

SEQ ID NO: 1921 - RNA, 23 nt, Homo sapiens
  source 1..23: mol_type = unassigned RNA
agaaaggacatagggtgctgatg

SEQ ID NO: 1922 - RNA, 22 nt, Homo sapiens
  source 1..22: mol_type = unassigned RNA
aaagacatagttgcaagatggg

SEQ ID NO: 1923 - RNA, 22 nt, Homo sapiens
  source 1..22: mol_type = unassigned RNA
cccatcttgcaactatgtcttt

SEQ ID NO: 1924 - RNA, 22 nt, Homo sapiens
  source 1..22: mol_type = unassigned RNA
tttgtgacctggtccactaacc

SEQ ID NO: 1925 - RNA, 22 nt, Homo sapiens
  source 1..22: mol_type = unassigned RNA
ggttagtggaccaggtcacaaa

SEQ ID NO: 1926 - RNA, 22 nt, Homo sapiens
  source 1..22: mol_type = unassigned RNA
gatggttgaccagagagcacac

SEQ ID NO: 1927 - RNA, 22 nt, Homo sapiens
  source 1..22: mol_type = unassigned RNA
gtgtgctctctggtcaaccatc

SEQ ID NO: 1928 - RNA, 20 nt, Homo sapiens
  source 1..20: mol_type = unassigned RNA
aaaagctgggttgagagggt

SEQ ID NO: 1929 - RNA, 20 nt, Homo sapiens
  source 1..20: mol_type = unassigned RNA
accctctcaacccagctttt

SEQ ID NO: 1930 - RNA, 21 nt, Homo sapiens
  source 1..21: mol_type = unassigned RNA
cacaaggtattggtattacct

SEQ ID NO: 1931 - RNA, 21 nt, Homo sapiens
  source 1..21: mol_type = unassigned RNA
aggtaataccaataccttgtg

SEQ ID NO: 1932 - RNA, 22 nt, Homo sapiens
  source 1..22: mol_type = unassigned RNA
tagtaccagtaccttgtgttca

SEQ ID NO: 1933 - RNA, 22 nt, Homo sapiens
  source 1..22: mol_type = unassigned RNA
tgaacacaaggtactggtacta

SEQ ID NO: 1934 - RNA, 22 nt, Homo sapiens
  source 1..22: mol_type = unassigned RNA
agtattctgtaccagggaaggt

SEQ ID NO: 1935 - RNA, 22 nt, Homo sapiens
  source 1..22: mol_type = unassigned RNA
accttccctggtacagaatact

SEQ ID NO: 1936 - RNA, 22 nt, Homo sapiens
  source 1..22: mol_type = unassigned RNA
tggcagtgtattgttagctggt

SEQ ID NO: 1937 - RNA, 22 nt, Homo sapiens
  source 1..22: mol_type = unassigned RNA
accagctaacaatacactgcca

SEQ ID NO: 1938 - RNA, 22 nt, Homo sapiens
  source 1..22: mol_type = unassigned RNA
tatacaagggcaagctctctgt

SEQ ID NO: 1939 - RNA, 22 nt, Homo sapiens
  source 1..22: mol_type = unassigned RNA
acagagagcttgcccttgtata

SEQ ID NO: 1940 - RNA, 22 nt, Homo sapiens
  source 1..22: mol_type = unassigned RNA
agcgaggttgccctttgtatat

SEQ ID NO: 1941 - RNA, 22 nt, Homo sapiens
  source 1..22: mol_type = unassigned RNA
atatacaaagggcaacctcgct

SEQ ID NO: 1942 - RNA, 22 nt, Homo sapiens
  source 1..22: mol_type = unassigned RNA
caatcactaactccactgccat

SEQ ID NO: 1943 - RNA, 22 nt, Homo sapiens
  source 1..22: mol_type = unassigned RNA
atggcagtggagttagtgattg

SEQ ID NO: 1944 - RNA, 23 nt, Homo sapiens
  source 1..23: mol_type = unassigned RNA
taggcagtgtcattagctgattg

SEQ ID NO: 1945 - RNA, 23 nt, Homo sapiens
  source 1..23: mol_type = unassigned RNA
caatcagctaatgacactgccta

SEQ ID NO: 1946 - RNA, 22 nt, Homo sapiens
  source 1..22: mol_type = unassigned RNA
cagccacaactaccctgccact

SEQ ID NO: 1947 - RNA, 22 nt, Homo sapiens
  source 1..22: mol_type = unassigned RNA
agtggcagggtagttgtggctg

SEQ ID NO: 1948 - RNA, 22 nt, Homo sapiens
  source 1..22: mol_type = unassigned RNA
aggcagtgtattgttagctggc

SEQ ID NO: 1949 - RNA, 22 nt, Homo sapiens
  source 1..22: mol_type = unassigned RNA
gccagctaacaatacactgcct

SEQ ID NO: 1950 - RNA, 22 nt, Homo sapiens
  source 1..22: mol_type = unassigned RNA
aatcactaaccacacggccagg

SEQ ID NO: 1951 - RNA, 22 nt, Homo sapiens
  source 1..22: mol_type = unassigned RNA
cctggccgtgtggttagtgatt

SEQ ID NO: 1952 - RNA, 23 nt, Homo sapiens
  source 1..23: mol_type = unassigned RNA
aggcagtgtagttagctgattgc

SEQ ID NO: 1953 - RNA, 23 nt, Homo sapiens
  source 1..23: mol_type = unassigned RNA
gcaatcagctaactacactgcct

SEQ ID NO: 1954 - RNA, 20 nt, Homo sapiens
  source 1..20: mol_type = unassigned RNA
gtccgctcggcggtggccca

SEQ ID NO: 1955 - RNA, 20 nt, Homo sapiens
  source 1..20: mol_type = unassigned RNA
tgggccaccgccgagcggac

SEQ ID NO: 1956 - RNA, 23 nt, Homo sapiens
  source 1..23: mol_type = unassigned RNA
gaacgcctgttcttgccaggtgg

SEQ ID NO: 1957 - RNA, 23 nt, Homo sapiens
  source 1..23: mol_type = unassigned RNA
ccacctggcaagaacaggcgttc

SEQ ID NO: 1958 - RNA, 19 nt, Homo sapiens
  source 1..19: mol_type = unassigned RNA
aagtgtgcagggcactggt

SEQ ID NO: 1959 - RNA, 19 nt, Homo sapiens
  source 1..19: mol_type = unassigned RNA
accagtgccctgcacactt

SEQ ID NO: 1960 - RNA, 21 nt, Homo sapiens
  source 1..21: mol_type = unassigned RNA
aggggtgctatctgtgattga

SEQ ID NO: 1961 - RNA, 21 nt, Homo sapiens
  source 1..21: mol_type = unassigned RNA
tcaatcacagatagcacccct

SEQ ID NO: 1962 - RNA, 22 nt, Homo sapiens
  source 1..22: mol_type = unassigned RNA
ctttcagtcagatgtttgctgc

SEQ ID NO: 1963 - RNA, 22 nt, Homo sapiens
  source 1..22: mol_type = unassigned RNA
gcagcaaacatctgactgaaag

SEQ ID NO: 1964 - RNA, 22 nt, Homo sapiens
  source 1..22: mol_type = unassigned RNA
tgtaaacatccccgactggaag

SEQ ID NO: 1965 - RNA, 22 nt, Homo sapiens
  source 1..22: mol_type = unassigned RNA
cttccagtcggggatgtttaca

SEQ ID NO: 1966 - RNA, 22 nt, Homo sapiens
  source 1..22: mol_type = unassigned RNA
tgtaaacatcctcgactggaag

SEQ ID NO: 1967 - RNA, 22 nt, Homo sapiens
  source 1..22: mol_type = unassigned RNA
cttccagtcgaggatgtttaca

SEQ ID NO: 1968 - RNA, 22 nt, Homo sapiens
  source 1..22: mol_type = unassigned RNA
agaagtaattgcggttttgcca

SEQ ID NO: 1969 - RNA, 22 nt, Homo sapiens
  source 1..22: mol_type = unassigned RNA
tggcaaaaccgcaattacttct

SEQ ID NO: 1970 - RNA, 22 nt, Homo sapiens
  source 1..22: mol_type = unassigned RNA
caaaactggcaattacttttgc

SEQ ID NO: 1971 - RNA, 22 nt, Homo sapiens
  source 1..22: mol_type = unassigned RNA
gcaaaagtaattgccagttttg

SEQ ID NO: 1972 - RNA, 22 nt, Homo sapiens
  source 1..22: mol_type = unassigned RNA
aaaagtaattgcgagttttacc

SEQ ID NO: 1973 - RNA, 22 nt, Homo sapiens
  source 1..22: mol_type = unassigned RNA
ggtaaaactcgcaattactttt

SEQ ID NO: 1974 - RNA, 22 nt, Homo sapiens
  source 1..22: mol_type = unassigned RNA
caagaacctcagttgcttttgt

SEQ ID NO: 1975 - RNA, 22 nt, Homo sapiens
  source 1..22: mol_type = unassigned RNA
acaaaagcaactgaggttcttg

SEQ ID NO: 1976 - RNA, 22 nt, Homo sapiens
  source 1..22: mol_type = unassigned RNA
caaaaatctcaattacttttgc

SEQ ID NO: 1977 - RNA, 22 nt, Homo sapiens
  source 1..22: mol_type = unassigned RNA
gcaaaagtaattgagatttttg

SEQ ID NO: 1978 - RNA, 22 nt, Homo sapiens
  source 1..22: mol_type = unassigned RNA
caaaaaccacagtttcttttgc

SEQ ID NO: 1979 - RNA, 22 nt, Homo sapiens
  source 1..22: mol_type = unassigned RNA
gcaaaagaaactgtggtttttg

SEQ ID NO: 1980 - RNA, 22 nt, Homo sapiens
  source 1..22: mol_type = unassigned RNA
aaaagtaattgtggtttttgcc

SEQ ID NO: 1981 - RNA, 22 nt, Homo sapiens
  source 1..22: mol_type = unassigned RNA
ggcaaaaaccacaattactttt

SEQ ID NO: 1982 - RNA, 21 nt, Homo sapiens
  source 1..21: mol_type = unassigned RNA
tgacaactatggatgagctct

SEQ ID NO: 1983 - RNA, 21 nt, Homo sapiens
  source 1..21: mol_type = unassigned RNA
agagctcatccatagttgtca

SEQ ID NO: 1984 - RNA, 21 nt, Homo sapiens
  source 1..21: mol_type = unassigned RNA
aacaggtgactggttagacaa

SEQ ID NO: 1985 - RNA, 21 nt, Homo sapiens
  source 1..21: mol_type = unassigned RNA
ttgtctaaccagtcacctgtt

SEQ ID NO: 1986 - RNA, 21 nt, Homo sapiens
  source 1..21: mol_type = unassigned RNA
aaaacggtgagattttgtttt

SEQ ID NO: 1987 - RNA, 21 nt, Homo sapiens
  source 1..21: mol_type = unassigned RNA
aaaacaaaatctcaccgtttt

SEQ ID NO: 1988 - RNA, 21 nt, Homo sapiens
  source 1..21: mol_type = unassigned RNA
gctagtcctgactcagccagt

SEQ ID NO: 1989 - RNA, 21 nt, Homo sapiens
  source 1..21: mol_type = unassigned RNA
actggctgagtcaggactagc

SEQ ID NO: 1990 - RNA, 21 nt, Homo sapiens
  source 1..21: mol_type = unassigned RNA
agggtaagctgaacctctgat

SEQ ID NO: 1991 - RNA, 21 nt, Homo sapiens
  source 1..21: mol_type = unassigned RNA
atcagaggttcagcttaccct

SEQ ID NO: 1992 - RNA, 22 nt, Homo sapiens
  source 1..22: mol_type = unassigned RNA
atattaccattagctcatcttt

SEQ ID NO: 1993 - RNA, 22 nt, Homo sapiens
  source 1..22: mol_type = unassigned RNA
aaagatgagctaatggtaatat

SEQ ID NO: 1994 - RNA, 22 nt, Homo sapiens
  source 1..22: mol_type = unassigned RNA
gatgagctcattgtaatatgag

SEQ ID NO: 1995 - RNA, 22 nt, Homo sapiens
  source 1..22: mol_type = unassigned RNA
ctcatattacaatgagctcatc

SEQ ID NO: 1996 - RNA, 19 nt, Homo sapiens
  source 1..19: mol_type = unassigned RNA
aggttgacatacgtttccc

SEQ ID NO: 1997 - RNA, 19 nt, Homo sapiens
  source 1..19: mol_type = unassigned RNA
gggaaacgtatgtcaacct

SEQ ID NO: 1998 - RNA, 20 nt, Homo sapiens
  source 1..20: mol_type = unassigned RNA
atgtataaatgtatacacac

SEQ ID NO: 1999 - RNA, 20 nt, Homo sapiens
  source 1..20: mol_type = unassigned RNA
gtgtgtatacatttatacat

SEQ ID NO: 2000 - RNA, 24 nt, Homo sapiens
  source 1..24: mol_type = unassigned RNA
ctgaagtgatgtgtaactgatcag

SEQ ID NO: 2001 - RNA, 24 nt, Homo sapiens
  source 1..24: mol_type = unassigned RNA
ctgatcagttacacatcacttcag

SEQ ID NO: 2002 - RNA, 22 nt, Homo sapiens
  source 1..22: mol_type = unassigned RNA
aagatgtggaaaaattggaatc

SEQ ID NO: 2003 - RNA, 22 nt, Homo sapiens
  source 1..22: mol_type = unassigned RNA
gattccaatttttccacatctt

SEQ ID NO: 2004 - RNA, 21 nt, Homo sapiens
  source 1..21: mol_type = unassigned RNA
tagataaaatattggtacctg

SEQ ID NO: 2005 - RNA, 21 nt, Homo sapiens
  source 1..21: mol_type = unassigned RNA
caggtaccaatattttatcta

SEQ ID NO: 2006 - RNA, 21 nt, Homo sapiens
  source 1..21: mol_type = unassigned RNA
cttcttgtgctctaggattgt

SEQ ID NO: 2007 - RNA, 21 nt, Homo sapiens
  source 1..21: mol_type = unassigned RNA
acaatcctagagcacaagaag

SEQ ID NO: 2008 - RNA, 22 nt, Homo sapiens
  source 1..22: mol_type = unassigned RNA
tatgcattgtatttttaggtcc

SEQ ID NO: 2009 - RNA, 22 nt, Homo sapiens
  source 1..22: mol_type = unassigned RNA
ggacctaaaaatacaatgcata

SEQ ID NO: 2010 - RNA, 21 nt, Homo sapiens
  source 1..21: mol_type = unassigned RNA
tttccataggtgatgagtcac

SEQ ID NO: 2011 - RNA, 21 nt, Homo sapiens
  source 1..21: mol_type = unassigned RNA
gtgactcatcacctatggaaa

SEQ ID NO: 2012 - RNA, 21 nt, Homo sapiens
  source 1..21: mol_type = unassigned RNA
ttggccacaatgggttagaac

SEQ ID NO: 2013 - RNA, 21 nt, Homo sapiens
  source 1..21: mol_type = unassigned RNA
gttctaacccattgtggccaa

SEQ ID NO: 2014 - RNA, 22 nt, Homo sapiens
  source 1..22: mol_type = unassigned RNA
tgtgtcactcgatgaccactgt

SEQ ID NO: 2015 - RNA, 22 nt, Homo sapiens
  source 1..22: mol_type = unassigned RNA
acagtggtcatcgagtgacaca

SEQ ID NO: 2016 - RNA, 23 nt, Homo sapiens
  source 1..23: mol_type = unassigned RNA
acttacagacaagagccttgctc

SEQ ID NO: 2017 - RNA, 23 nt, Homo sapiens
  source 1..23: mol_type = unassigned RNA
gagcaaggctcttgtctgtaagt

SEQ ID NO: 2018 - RNA, 19 nt, Homo sapiens
  source 1..19: mol_type = unassigned RNA
aggctgcggaattcaggac

SEQ ID NO: 2019 - RNA, 19 nt, Homo sapiens
  source 1..19: mol_type = unassigned RNA
gtcctgaattccgcagcct

SEQ ID NO: 2020 - RNA, 23 nt, Homo sapiens
  source 1..23: mol_type = unassigned RNA
taaatcccatggtgccttctcct

SEQ ID NO: 2021 - RNA, 23 nt, Homo sapiens
  source 1..23: mol_type = unassigned RNA
aggagaaggcaccatgggattta

SEQ ID NO: 2022 - RNA, 21 nt, Homo sapiens
  source 1..21: mol_type = unassigned RNA
aaactactgaaaatcaaagat

SEQ ID NO: 2023 - RNA, 21 nt, Homo sapiens
  source 1..21: mol_type = unassigned RNA
atctttgattttcagtagttt

SEQ ID NO: 2024 - RNA, 21 nt, Homo sapiens
  source 1..21: mol_type = unassigned RNA
gttcaaatccagatctataac

SEQ ID NO: 2025 - RNA, 21 nt, Homo sapiens
  source 1..21: mol_type = unassigned RNA
gttatagatctggatttgaac

SEQ ID NO: 2026 - RNA, 19 nt, Homo sapiens
  source 1..19: mol_type = unassigned RNA
ccggttccagtccctggag

SEQ ID NO: 2027 - RNA, 19 nt, Homo sapiens
  source 1..19: mol_type = unassigned RNA
ctccagggactggaaccgg

SEQ ID NO: 2028 - RNA, 20 nt, Homo sapiens
  source 1..20: mol_type = unassigned RNA
agggtgtttctctcatctct

SEQ ID NO: 2029 - RNA, 20 nt, Homo sapiens
  source 1..20: mol_type = unassigned RNA
agagatgagagaaacaccct

SEQ ID NO: 2030 - RNA, 24 nt, Homo sapiens
  source 1..24: mol_type = unassigned RNA
gacctggacatgtttgtgcccagt

SEQ ID NO: 2031 - RNA, 24 nt, Homo sapiens
  source 1..24: mol_type = unassigned RNA
actgggcacaaacatgtccaggtc

SEQ ID NO: 2032 - RNA, 20 nt, Homo sapiens
  source 1..20: mol_type = unassigned RNA
atggagatagatatagaaat

SEQ ID NO: 2033 - RNA, 20 nt, Homo sapiens
  source 1..20: mol_type = unassigned RNA
atttctatatctatctccat

SEQ ID NO: 2034 - RNA, 19 nt, Homo sapiens
  source 1..19: mol_type = unassigned RNA
agctgtctgaaaatgtctt

SEQ ID NO: 2035 - RNA, 19 nt, Homo sapiens
  source 1..19: mol_type = unassigned RNA
aagacattttcagacagct

SEQ ID NO: 2036 - RNA, 21 nt, Homo sapiens
  source 1..21: mol_type = unassigned RNA
agacctggcccagacctcagc

SEQ ID NO: 2037 - RNA, 21 nt, Homo sapiens
  source 1..21: mol_type = unassigned RNA
gctgaggtctgggccaggtct

SEQ ID NO: 2038 - RNA, 23 nt, Homo sapiens
  source 1..23: mol_type = unassigned RNA
acttgggcactgaaacaatgtcc

SEQ ID NO: 2039 - RNA, 23 nt, Homo sapiens
  source 1..23: mol_type = unassigned RNA
ggacattgtttcagtgcccaagt

SEQ ID NO: 2040 - RNA, 24 nt, Homo sapiens
  source 1..24: mol_type = unassigned RNA
actgggggctttcgggctctgcgt

SEQ ID NO: 2041 - RNA, 24 nt, Homo sapiens
  source 1..24: mol_type = unassigned RNA
acgcagagcccgaaagcccccagt

SEQ ID NO: 2042 - RNA, 23 nt, Homo sapiens
  source 1..23: mol_type = unassigned RNA
atcgctgcggttgcgagcgctgt

SEQ ID NO: 2043 - RNA, 23 nt, Homo sapiens
  source 1..23: mol_type = unassigned RNA
acagcgctcgcaaccgcagcgat

SEQ ID NO: 2044 - RNA, 22 nt, Homo sapiens
  source 1..22: mol_type = unassigned RNA
gtccctctccaaatgtgtcttg

SEQ ID NO: 2045 - RNA, 22 nt, Homo sapiens
  source 1..22: mol_type = unassigned RNA
caagacacatttggagagggac

SEQ ID NO: 2046 - RNA, 22 nt, Homo sapiens
  source 1..22: mol_type = unassigned RNA
acttgtatgctagctcaggtag

SEQ ID NO: 2047 - RNA, 22 nt, Homo sapiens
  source 1..22: mol_type = unassigned RNA
ctacctgagctagcatacaagt

SEQ ID NO: 2048 - RNA, 22 nt, Homo sapiens
  source 1..22: mol_type = unassigned RNA
tttaggataagcttgacttttg

SEQ ID NO: 2049 - RNA, 22 nt, Homo sapiens
  source 1..22: mol_type = unassigned RNA
caaaagtcaagcttatcctaaa

SEQ ID NO: 2050 - RNA, 21 nt, Homo sapiens
  source 1..21: mol_type = unassigned RNA
gtgttgaaacaatctctactg

SEQ ID NO: 2051 - RNA, 21 nt, Homo sapiens
  source 1..21: mol_type = unassigned RNA
cagtagagattgtttcaacac

SEQ ID NO: 2052 - RNA, 22 nt, Homo sapiens
  source 1..22: mol_type = unassigned RNA
tatgtctgctgaccatcacctt

SEQ ID NO: 2053 - RNA, 22 nt, Homo sapiens
  source 1..22: mol_type = unassigned RNA
aaggtgatggtcagcagacata

SEQ ID NO: 2054 - RNA, 22 nt, Homo sapiens
  source 1..22: mol_type = unassigned RNA
ggggctggggccggggccgagc

SEQ ID NO: 2055 - RNA, 22 nt, Homo sapiens
  source 1..22: mol_type = unassigned RNA
gctcggccccggccccagcccc

SEQ ID NO: 2056 - RNA, 22 nt, Homo sapiens
  source 1..22: mol_type = unassigned RNA
tgaggtagtaggttgtatggtt

SEQ ID NO: 2057 - RNA, 22 nt, Homo sapiens
  source 1..22: mol_type = unassigned RNA
aaccatacaacctactacctca

SEQ ID NO: 2058 - RNA, 21 nt, Homo sapiens
  source 1..21: mol_type = unassigned RNA
gtgtcttttgctctgcagtca

SEQ ID NO: 2059 - RNA, 21 nt, Homo sapiens
  source 1..21: mol_type = unassigned RNA
tgactgcagagcaaaagacac

SEQ ID NO: 2060 - RNA, 24 nt, Homo sapiens
  source 1..24: mol_type = unassigned RNA
ccccgggaacgtcgagactggagc

SEQ ID NO: 2061 - RNA, 24 nt, Homo sapiens
  source 1..24: mol_type = unassigned RNA
gctccagtctcgacgttcccgggg

SEQ ID NO: 2062 - RNA, 22 nt, Homo sapiens
  source 1..22: mol_type = unassigned RNA
acccgtcccgttcgtccccgga

SEQ ID NO: 2063 - RNA, 22 nt, Homo sapiens
  source 1..22: mol_type = unassigned RNA
tccggggacgaacgggacgggt

SEQ ID NO: 2064 - RNA, 22 nt, Homo sapiens
  source 1..22: mol_type = unassigned RNA
atgggtgaatttgtagaaggat

SEQ ID NO: 2065 - RNA, 22 nt, Homo sapiens
  source 1..22: mol_type = unassigned RNA
atccttctacaaattcacccat

SEQ ID NO: 2066 - RNA, 22 nt, Homo sapiens
  source 1..22: mol_type = unassigned RNA
ctggactgagccgtgctactgg

SEQ ID NO: 2067 - RNA, 22 nt, Homo sapiens
  source 1..22: mol_type = unassigned RNA
ccagtagcacggctcagtccag

SEQ ID NO: 2068 - RNA, 22 nt, Homo sapiens
  source 1..22: mol_type = unassigned RNA
ctggactgagccatgctactgg

SEQ ID NO: 2069 - RNA, 22 nt, Homo sapiens
  source 1..22: mol_type = unassigned RNA
ccagtagcatggctcagtccag

SEQ ID NO: 2070 - RNA, 22 nt, Homo sapiens
  source 1..22: mol_type = unassigned RNA
tacgtagatatatatgtatttt

SEQ ID NO: 2071 - RNA, 22 nt, Homo sapiens
  source 1..22: mol_type = unassigned RNA
aaaatacatatatatctacgta

SEQ ID NO: 2072 - RNA, 24 nt, Homo sapiens
  source 1..24: mol_type = unassigned RNA
aaatatatatatatatgtacgtat

SEQ ID NO: 2073 - RNA, 22 nt, Homo sapiens
  source 1..22: mol_type = unassigned RNA
gctcttttcattaatgtagaca

SEQ ID NO: 2074 - RNA, 22 nt, Homo sapiens
  source 1..22: mol_type = unassigned RNA
tgctggatcagtggttcgagtc

SEQ ID NO: 2075 - RNA, 22 nt, Homo sapiens
  source 1..22: mol_type = unassigned RNA
gactcgaaccactgatccagca

SEQ ID NO: 2076 - RNA, 19 nt, Homo sapiens
  source 1..19: mol_type = unassigned RNA
tggatttttggatcaggga

SEQ ID NO: 2077 - RNA, 19 nt, Homo sapiens
  source 1..19: mol_type = unassigned RNA
tccctgatccaaaaatcca

SEQ ID NO: 2078 - RNA, 22 nt, Homo sapiens
  source 1..22: mol_type = unassigned RNA
ttataaagcaatgagactgatt

SEQ ID NO: 2079 - RNA, 22 nt, Homo sapiens
  source 1..22: mol_type = unassigned RNA
aatcagtctcattgctttataa

SEQ ID NO: 2080 - RNA, 23 nt, Homo sapiens
  source 1..23: mol_type = unassigned RNA
tagtgcaatattgcttatagggt

SEQ ID NO: 2081 - RNA, 23 nt, Homo sapiens
  source 1..23: mol_type = unassigned RNA
accctataagcaatattgcacta

SEQ ID NO: 2082 - RNA, 22 nt, Homo sapiens
  source 1..22: mol_type = unassigned RNA
accctatcaatattgtctctgc

SEQ ID NO: 2083 - RNA, 22 nt, Homo sapiens
  source 1..22: mol_type = unassigned RNA
gcagagacaatattgatagggt

SEQ ID NO: 2084 - RNA, 17 nt, Homo sapiens
  source 1..17: mol_type = unassigned RNA
taagtgcttccatgctt

SEQ ID NO: 2085 - RNA, 17 nt, Homo sapiens
  source 1..17: mol_type = unassigned RNA
aagcatggaagcactta

SEQ ID NO: 2086 - RNA, 22 nt, Homo sapiens
  source 1..22: mol_type = unassigned RNA
tcggcctgaccacccaccccac

SEQ ID NO: 2087 - RNA, 22 nt, Homo sapiens
  source 1..22: mol_type = unassigned RNA
gtggggtgggtggtcaggccga

SEQ ID NO: 2088 - RNA, 21 nt, Homo sapiens
  source 1..21: mol_type = unassigned RNA
ggggggggggggggggggccg

SEQ ID NO: 2089 - RNA, 21 nt, Homo sapiens
  source 1..21: mol_type = unassigned RNA
cggcccccccccccccccccc

SEQ ID NO: 2090 - RNA, 22 nt, Homo sapiens
  source 1..22: mol_type = unassigned RNA
ctatacgacctgctgcctttct

SEQ ID NO: 2091 - RNA, 22 nt, Homo sapiens
  source 1..22: mol_type = unassigned RNA
agaaaggcagcaggtcgtatag

SEQ ID NO: 2092 - RNA, 22 nt, Homo sapiens
  source 1..22: mol_type = unassigned RNA
agaggtagtaggttgcatagtt

SEQ ID NO: 2093 - RNA, 22 nt, Homo sapiens
  source 1..22: mol_type = unassigned RNA
aactatgcaacctactacctct

SEQ ID NO: 2094 - RNA, 22 nt, Homo sapiens
  source 1..22: mol_type = unassigned RNA
ccgcactgtgggtacttgctgc

SEQ ID NO: 2095 - RNA, 22 nt, Homo sapiens
  source 1..22: mol_type = unassigned RNA
gcagcaagtacccacagtgcgg

SEQ ID NO: 2096 - RNA, 21 nt, Homo sapiens
  source 1..21: mol_type = unassigned RNA
taaagtgctgacagtgcagat

SEQ ID NO: 2097 - RNA, 21 nt, Homo sapiens
  source 1..21: mol_type = unassigned RNA
atctgcactgtcagcacttta

SEQ ID NO: 2098 - RNA, 22 nt, Homo sapiens
  source 1..22: mol_type = unassigned RNA
aactggatcaattataggagtg

SEQ ID NO: 2099 - RNA, 22 nt, Homo sapiens
  source 1..22: mol_type = unassigned RNA
cactcctataattgatccagtt

SEQ ID NO: 2100 - RNA, 26 nt, Homo sapiens
  source 1..26: mol_type = unassigned RNA
aagtagttggtttgtatgagatggtt

SEQ ID NO: 2101 - RNA, 26 nt, Homo sapiens
  source 1..26: mol_type = unassigned RNA
aaccatctcatacaaaccaactactt

SEQ ID NO: 2102 - RNA, 21 nt, Homo sapiens
  source 1..21: mol_type = unassigned RNA
aagtgatctaaaggcctacat

SEQ ID NO: 2103 - RNA, 21 nt, Homo sapiens
  source 1..21: mol_type = unassigned RNA
atgtaggcctttagatcactt

SEQ ID NO: 2104 - RNA, 22 nt, Homo sapiens
  source 1..22: mol_type = unassigned RNA
tcagatgatctaaaggcctata

SEQ ID NO: 2105 - RNA, 22 nt, Homo sapiens
  source 1..22: mol_type = unassigned RNA
tataggcctttagatcatctga

SEQ ID NO: 2106 - RNA, 21 nt, Homo sapiens
  source 1..21: mol_type = unassigned RNA
taggcctttagatcacttaaa

SEQ ID NO: 2107 - RNA, 21 nt, Homo sapiens
  source 1..21: mol_type = unassigned RNA
tttaagtgatctaaaggccta

SEQ ID NO: 2108 - RNA, 21 nt, Homo sapiens
  source 1..21: mol_type = unassigned RNA
actctagctgccaaaggcgct

SEQ ID NO: 2109 - RNA, 21 nt, Homo sapiens
  source 1..21: mol_type = unassigned RNA
agcgcctttggcagctagagt

SEQ ID NO: 2110 - RNA, 22 nt, Homo sapiens
  source 1..22: mol_type = unassigned RNA
agaaggaaattgaattcattta

SEQ ID NO: 2111 - RNA, 22 nt, Homo sapiens
  source 1..22: mol_type = unassigned RNA
taaatgaattcaatttccttct

SEQ ID NO: 2112 - RNA, 21 nt, Homo sapiens
  source 1..21: mol_type = unassigned RNA
agagaagaagatcagcctgca

SEQ ID NO: 2113 - RNA, 21 nt, Homo sapiens
  source 1..21: mol_type = unassigned RNA
tgcaggctgatcttcttctct

SEQ ID NO: 2114 - RNA, 24 nt, Homo sapiens
  source 1..24: mol_type = unassigned RNA
agcctggaagctggagcctgcagt

SEQ ID NO: 2115 - RNA, 24 nt, Homo sapiens
  source 1..24: mol_type = unassigned RNA
actgcaggctccagcttccaggct

SEQ ID NO: 2116 - RNA, 23 nt, Homo sapiens
  source 1..23: mol_type = unassigned RNA
aggatgagcaaagaaagtagatt

SEQ ID NO: 2117 - RNA, 23 nt, Homo sapiens
  source 1..23: mol_type = unassigned RNA
aatctactttctttgctcatcct

SEQ ID NO: 2118 - RNA, 22 nt, Homo sapiens
  source 1..22: mol_type = unassigned RNA
aaccactttctttgctcatcca

SEQ ID NO: 2119 - RNA, 22 nt, Homo sapiens
  source 1..22: mol_type = unassigned RNA
tggatgagcaaagaaagtggtt

SEQ ID NO: 2120 - RNA, 22 nt, Homo sapiens
  source 1..22: mol_type = unassigned RNA
cggatgagcaaagaaagtggtt

SEQ ID NO: 2121 - RNA, 22 nt, Homo sapiens
  source 1..22: mol_type = unassigned RNA
aaccactttctttgctcatccg

SEQ ID NO: 2122 - RNA, 22 nt, Homo sapiens
  source 1..22: mol_type = unassigned RNA
aggcattgacttctcactagct

SEQ ID NO: 2123 - RNA, 22 nt, Homo sapiens
  source 1..22: mol_type = unassigned RNA
agctagtgagaagtcaatgcct

SEQ ID NO: 2124 - RNA, 21 nt, Homo sapiens
  source 1..21: mol_type = unassigned RNA
agtgaatgatgggttctgacc

SEQ ID NO: 2125 - RNA, 21 nt, Homo sapiens
  source 1..21: mol_type = unassigned RNA
ggtcagaacccatcattcact

SEQ ID NO: 2126 - RNA, 21 nt, Homo sapiens
  source 1..21: mol_type = unassigned RNA
agttaggattaggtcgtggaa

SEQ ID NO: 2127 - RNA, 21 nt, Homo sapiens
  source 1..21: mol_type = unassigned RNA
ttccacgacctaatcctaact

SEQ ID NO: 2128 - RNA, 19 nt, Homo sapiens
  source 1..19: mol_type = unassigned RNA
atggataaggctttggctt

SEQ ID NO: 2129 - RNA, 19 nt, Homo sapiens
  source 1..19: mol_type = unassigned RNA
aagccaaagccttatccat

SEQ ID NO: 2130 - RNA, 22 nt, Homo sapiens
  source 1..22: mol_type = unassigned RNA
atggtaccctggcatactgagt

SEQ ID NO: 2131 - RNA, 22 nt, Homo sapiens
  source 1..22: mol_type = unassigned RNA
actcagtatgccagggtaccat

SEQ ID NO: 2132 - RNA, 23 nt, Homo sapiens
  source 1..23: mol_type = unassigned RNA
caagtcttatttgagcacctgtt

SEQ ID NO: 2133 - RNA, 23 nt, Homo sapiens
  source 1..23: mol_type = unassigned RNA
aacaggtgctcaaataagacttg

SEQ ID NO: 2134 - RNA, 22 nt, Homo sapiens
  source 1..22: mol_type = unassigned RNA
caggatgtggtcaagtgttgtt

SEQ ID NO: 2135 - RNA, 22 nt, Homo sapiens
  source 1..22: mol_type = unassigned RNA
aacaacacttgaccacatcctg

SEQ ID NO: 2136 - RNA, 23 nt, Homo sapiens
  source 1..23: mol_type = unassigned RNA
cctcagggctgtagaacagggct

SEQ ID NO: 2137 - RNA, 23 nt, Homo sapiens
  source 1..23: mol_type = unassigned RNA
agccctgttctacagccctgagg

SEQ ID NO: 2138 - RNA, 21 nt, Homo sapiens
  source 1..21: mol_type = unassigned RNA
cctgttgaagtgtaatcccca

SEQ ID NO: 2139 - RNA, 21 nt, Homo sapiens
  source 1..21: mol_type = unassigned RNA
tggggattacacttcaacagg

SEQ ID NO: 2140 - RNA, 18 nt, Homo sapiens
  source 1..18: mol_type = unassigned RNA
cgggcgtggtggtggggg

SEQ ID NO: 2141 - RNA, 18 nt, Homo sapiens
  source 1..18: mol_type = unassigned RNA
cccccaccaccacgcccg

SEQ ID NO: 2142 - RNA, 20 nt, Homo sapiens
  source 1..20: mol_type = unassigned RNA
cgggcgtggtggtgggggtg

SEQ ID NO: 2143 - RNA, 20 nt, Homo sapiens
  source 1..20: mol_type = unassigned RNA
cacccccaccaccacgcccg

SEQ ID NO: 2144 - RNA, 23 nt, Homo sapiens
  source 1..23: mol_type = unassigned RNA
ctggagatatggaagagctgtgt

SEQ ID NO: 2145 - RNA, 23 nt, Homo sapiens
  source 1..23: mol_type = unassigned RNA
acacagctcttccatatctccag

SEQ ID NO: 2146 - RNA, 26 nt, Homo sapiens
  source 1..26: mol_type = unassigned RNA
gatgatgatggcagcaaattctgaaa

SEQ ID NO: 2147 - RNA, 26 nt, Homo sapiens
  source 1..26: mol_type = unassigned RNA
tttcagaatttgctgccatcatcatc

SEQ ID NO: 2148 - RNA, 25 nt, Homo sapiens
  source 1..25: mol_type = unassigned RNA
gggcgacaaagcaagactctttctt

SEQ ID NO: 2149 - RNA, 25 nt, Homo sapiens
  source 1..25: mol_type = unassigned RNA
aagaaagagtcttgctttgtcgccc

SEQ ID NO: 2150 - RNA, 25 nt, Homo sapiens
  source 1..25: mol_type = unassigned RNA
gaacccatgaggttgaggctgcagt

SEQ ID NO: 2151 - RNA, 25 nt, Homo sapiens
  source 1..25: mol_type = unassigned RNA
actgcagcctcaacctcatgggttc

SEQ ID NO: 2152 - RNA, 17 nt, Homo sapiens
  source 1..17: mol_type = unassigned RNA
gtgggggagaggctgtc

SEQ ID NO: 2153 - RNA, 17 nt, Homo sapiens
  source 1..17: mol_type = unassigned RNA
gacagcctctcccccac

SEQ ID NO: 2154 - RNA, 20 nt, Homo sapiens
  source 1..20: mol_type = unassigned RNA
taaagagccctgtggagaca

SEQ ID NO: 2155 - RNA, 20 nt, Homo sapiens
  source 1..20: mol_type = unassigned RNA
tgtctccacagggctcttta

SEQ ID NO: 2156 - RNA, 22 nt, Homo sapiens
  source 1..22: mol_type = unassigned RNA
tagtactgtgcatatcatctat

SEQ ID NO: 2157 - RNA, 22 nt, Homo sapiens
  source 1..22: mol_type = unassigned RNA
atagatgatatgcacagtacta

SEQ ID NO: 2158 - RNA, 20 nt, Homo sapiens
  source 1..20: mol_type = unassigned RNA
tcgtttgcctttttctgctt

SEQ ID NO: 2159 - RNA, 20 nt, Homo sapiens
  source 1..20: mol_type = unassigned RNA
aagcagaaaaaggcaaacga

SEQ ID NO: 2160 - RNA, 21 nt, Homo sapiens
  source 1..21: mol_type = unassigned RNA
tggactgccctgatctggaga

SEQ ID NO: 2161 - RNA, 21 nt, Homo sapiens
  source 1..21: mol_type = unassigned RNA
tctccagatcagggcagtcca

SEQ ID NO: 2162 - RNA, 22 nt, Homo sapiens
  source 1..22: mol_type = unassigned RNA
tgggtggtctggagatttgtgc

SEQ ID NO: 2163 - RNA, 22 nt, Homo sapiens
  source 1..22: mol_type = unassigned RNA
gcacaaatctccagaccaccca

SEQ ID NO: 2164 - RNA, 22 nt, Homo sapiens
  source 1..22: mol_type = unassigned RNA
tgtgaggttggcattgttgtct

SEQ ID NO: 2165 - RNA, 22 nt, Homo sapiens
  source 1..22: mol_type = unassigned RNA
agacaacaatgccaacctcaca

SEQ ID NO: 2166 - RNA, 17 nt, Homo sapiens
  source 1..17: mol_type = unassigned RNA
ttcaagtaattcaggtg

SEQ ID NO: 2167 - RNA, 17 nt, Homo sapiens
  source 1..17: mol_type = unassigned RNA
cacctgaattacttgaa

SEQ ID NO: 2168 - RNA, 22 nt, Homo sapiens
  source 1..22: mol_type = unassigned RNA
ttctggaattctgtgtgaggga

SEQ ID NO: 2169 - RNA, 22 nt, Homo sapiens
  source 1..22: mol_type = unassigned RNA
tccctcacacagaattccagaa

SEQ ID NO: 2170 - RNA, 22 nt, Homo sapiens
  source 1..22: mol_type = unassigned RNA
ttttcaactctaatgggagaga

SEQ ID NO: 2171 - RNA, 22 nt, Homo sapiens
  source 1..22: mol_type = unassigned RNA
tctctcccattagagttgaaaa

SEQ ID NO: 2172 - RNA, 18 nt, Homo sapiens
  source 1..18: mol_type = unassigned RNA
acgttggctctggtggtg

SEQ ID NO: 2173 - RNA, 18 nt, Homo sapiens
  source 1..18: mol_type = unassigned RNA
caccaccagagccaacgt

SEQ ID NO: 2174 - RNA, 22 nt, Homo sapiens
  source 1..22: mol_type = unassigned RNA
ccacctcccctgcaaacgtcca

SEQ ID NO: 2175 - RNA, 22 nt, Homo sapiens
  source 1..22: mol_type = unassigned RNA
tggacgtttgcaggggaggtgg

SEQ ID NO: 2176 - RNA, 22 nt, Homo sapiens
  source 1..22: mol_type = unassigned RNA
actcggcgtggcgtcggtcgtg

SEQ ID NO: 2177 - RNA, 22 nt, Homo sapiens
  source 1..22: mol_type = unassigned RNA
cacgaccgacgccacgccgagt

SEQ ID NO: 2178 - RNA, 21 nt, Homo sapiens
  source 1..21: mol_type = unassigned RNA
tcgaccggacctcgaccggct

SEQ ID NO: 2179 - RNA, 21 nt, Homo sapiens
  source 1..21: mol_type = unassigned RNA
agccggtcgaggtccggtcga

SEQ ID NO: 2180 - RNA, 22 nt, Homo sapiens
  source 1..22: mol_type = unassigned RNA
tgagaactgaattccataggct

SEQ ID NO: 2181 - RNA, 22 nt, Homo sapiens
  source 1..22: mol_type = unassigned RNA
agcctatggaattcagttctca

SEQ ID NO: 2182 - RNA, 22 nt, Homo sapiens
  source 1..22: mol_type = unassigned RNA
aatcatacacggttgacctatt

SEQ ID NO: 2183 - RNA, 22 nt, Homo sapiens
  source 1..22: mol_type = unassigned RNA
aataggtcaaccgtgtatgatt

SEQ ID NO: 2184 - RNA, 22 nt, Homo sapiens
  source 1..22: mol_type = unassigned RNA
taggttatccgtgttgccttcg

SEQ ID NO: 2185 - RNA, 22 nt, Homo sapiens
  source 1..22: mol_type = unassigned RNA
cgaaggcaacacggataaccta

SEQ ID NO: 2186 - RNA, 21 nt, Homo sapiens
  source 1..21: mol_type = unassigned RNA
ccagtcctgtgcctgccgcct

SEQ ID NO: 2187 - RNA, 21 nt, Homo sapiens
  source 1..21: mol_type = unassigned RNA
aggcggcaggcacaggactgg

SEQ ID NO: 2188 - RNA, 22 nt, Homo sapiens
  source 1..22: mol_type = unassigned RNA
tctgccccctccgctgctgcca

SEQ ID NO: 2189 - RNA, 22 nt, Homo sapiens
  source 1..22: mol_type = unassigned RNA
tggcagcagcggagggggcaga

SEQ ID NO: 2190 - RNA, 22 nt, Homo sapiens
  source 1..22: mol_type = unassigned RNA
ggaggggtcccgcactgggagg

SEQ ID NO: 2191 - RNA, 22 nt, Homo sapiens
  source 1..22: mol_type = unassigned RNA
cctcccagtgcgggacccctcc

SEQ ID NO: 2192 - RNA, 22 nt, Homo sapiens
  source 1..22: mol_type = unassigned RNA
ccctgtgcccggcccacttctg

SEQ ID NO: 2193 - RNA, 22 nt, Homo sapiens
  source 1..22: mol_type = unassigned RNA
cagaagtgggccgggcacaggg

SEQ ID NO: 2194 - RNA, 20 nt, Homo sapiens
  source 1..20: mol_type = unassigned RNA
ccccagggcgacgcggcggg

SEQ ID NO: 2195 - RNA, 20 nt, Homo sapiens
  source 1..20: mol_type = unassigned RNA
cccgccgcgtcgccctgggg

SEQ ID NO: 2196 - RNA, 22 nt, Homo sapiens
  source 1..22: mol_type = unassigned RNA
accttgccttgctgcccgggcc

SEQ ID NO: 2197 - RNA, 22 nt, Homo sapiens
  source 1..22: mol_type = unassigned RNA
ggcccgggcagcaaggcaaggt

SEQ ID NO: 2198 - RNA, 21 nt, Homo sapiens
  source 1..21: mol_type = unassigned RNA
atttgtgcttggctctgtcac

SEQ ID NO: 2199 - RNA, 21 nt, Homo sapiens
  source 1..21: mol_type = unassigned RNA
gtgacagagccaagcacaaat

SEQ ID NO: 2200 - RNA, 22 nt, Homo sapiens
  source 1..22: mol_type = unassigned RNA
attgtccttgctgtttggagat

SEQ ID NO: 2201 - RNA, 22 nt, Homo sapiens
  source 1..22: mol_type = unassigned RNA
atctccaaacagcaaggacaat

SEQ ID NO: 2202 - RNA, 21 nt, Homo sapiens
  source 1..21: mol_type = unassigned RNA
atccccagatacaatggacaa

SEQ ID NO: 2203 - RNA, 21 nt, Homo sapiens
  source 1..21: mol_type = unassigned RNA
ttgtccattgtatctggggat

SEQ ID NO: 2204 - RNA, 23 nt, Homo sapiens
  source 1..23: mol_type = unassigned RNA
cagtgcaatagtattgtcaaagc

SEQ ID NO: 2205 - RNA, 23 nt, Homo sapiens
  source 1..23: mol_type = unassigned RNA
gctttgacaatactattgcactg

SEQ ID NO: 2206 - RNA, 22 nt, Homo sapiens
  source 1..22: mol_type = unassigned RNA
gctctgactttattgcactact

SEQ ID NO: 2207 - RNA, 22 nt, Homo sapiens
  source 1..22: mol_type = unassigned RNA
agtagtgcaataaagtcagagc

SEQ ID NO: 2208 - RNA, 23 nt, Homo sapiens
  source 1..23: mol_type = unassigned RNA
taagtgcttccatgttttagtag

SEQ ID NO: 2209 - RNA, 23 nt, Homo sapiens
  source 1..23: mol_type = unassigned RNA
ctactaaaacatggaagcactta

SEQ ID NO: 2210 - RNA, 22 nt, Homo sapiens
  source 1..22: mol_type = unassigned RNA
actttaacatggaagtgctttc

SEQ ID NO: 2211 - RNA, 22 nt, Homo sapiens
  source 1..22: mol_type = unassigned RNA
gaaagcacttccatgttaaagt

SEQ ID NO: 2212 - RNA, 23 nt, Homo sapiens
  source 1..23: mol_type = unassigned RNA
taagtgcttccatgtttcagtgg

SEQ ID NO: 2213 - RNA, 23 nt, Homo sapiens
  source 1..23: mol_type = unassigned RNA
ccactgaaacatggaagcactta

SEQ ID NO: 2214 - RNA, 22 nt, Homo sapiens
  source 1..22: mol_type = unassigned RNA
tttaacatgggggtacctgctg

SEQ ID NO: 2215 - RNA, 22 nt, Homo sapiens
  source 1..22: mol_type = unassigned RNA
cagcaggtacccccatgttaaa

SEQ ID NO: 2216 - RNA, 23 nt, Homo sapiens
  source 1..23: mol_type = unassigned RNA
taagtgcttccatgtttgagtgt

SEQ ID NO: 2217 - RNA, 23 nt, Homo sapiens
  source 1..23: mol_type = unassigned RNA
acactcaaacatggaagcactta

SEQ ID NO: 2218 - RNA, 22 nt, Homo sapiens
  source 1..22: mol_type = unassigned RNA
actttaacatggaggcacttgc

SEQ ID NO: 2219 - RNA, 22 nt, Homo sapiens
  source 1..22: mol_type = unassigned RNA
gcaagtgcctccatgttaaagt

SEQ ID NO: 2220 - RNA, 22 nt, Homo sapiens
  source 1..22: mol_type = unassigned RNA
aattgcactttagcaatggtga

SEQ ID NO: 2221 - RNA, 22 nt, Homo sapiens
  source 1..22: mol_type = unassigned RNA
tcaccattgctaaagtgcaatt

SEQ ID NO: 2222 - RNA, 22 nt, Homo sapiens
  source 1..22: mol_type = unassigned RNA
actgttgctaatatgcaactct

SEQ ID NO: 2223 - RNA, 22 nt, Homo sapiens
  source 1..22: mol_type = unassigned RNA
agagttgcatattagcaacagt

SEQ ID NO: 2224 - RNA, 23 nt, Homo sapiens
  source 1..23: mol_type = unassigned RNA
agctcggtctgaggcccctcagt

SEQ ID NO: 2225 - RNA, 23 nt, Homo sapiens
  source 1..23: mol_type = unassigned RNA
actgaggggcctcagaccgagct

SEQ ID NO: 2226 - RNA, 22 nt, Homo sapiens
  source 1..22: mol_type = unassigned RNA
aaaaactgagactacttttgca

SEQ ID NO: 2227 - RNA, 22 nt, Homo sapiens
  source 1..22: mol_type = unassigned RNA
tgcaaaagtagtctcagttttt

SEQ ID NO: 2228 - RNA, 19 nt, Homo sapiens
  source 1..19: mol_type = unassigned RNA
aaaaactgtaattactttt

SEQ ID NO: 2229 - RNA, 19 nt, Homo sapiens
  source 1..19: mol_type = unassigned RNA
aaaagtaattacagttttt

SEQ ID NO: 2230 - RNA, 22 nt, Homo sapiens
  source 1..22: mol_type = unassigned RNA
aaaactgtaattacttttgtac

SEQ ID NO: 2231 - RNA, 22 nt, Homo sapiens
  source 1..22: mol_type = unassigned RNA
gtacaaaagtaattacagtttt

SEQ ID NO: 2232 - RNA, 23 nt, Homo sapiens
  source 1..23: mol_type = unassigned RNA
tgcaaaagtaattgcagtttttg

SEQ ID NO: 2233 - RNA, 23 nt, Homo sapiens
  source 1..23: mol_type = unassigned RNA
caaaaactgcaattacttttgca

SEQ ID NO: 2234 - RNA, 23 nt, Homo sapiens
  source 1..23: mol_type = unassigned RNA
caaaaaccgcaattacttttgca

SEQ ID NO: 2235 - RNA, 23 nt, Homo sapiens
  source 1..23: mol_type = unassigned RNA
tgcaaaagtaattgcggtttttg

SEQ ID NO: 2236 - RNA, 22 nt, Homo sapiens
  source 1..22: mol_type = unassigned RNA
aaaagtaatcgcggtttttgtc

SEQ ID NO: 2237 - RNA, 22 nt, Homo sapiens
  source 1..22: mol_type = unassigned RNA
gacaaaaaccgcgattactttt

SEQ ID NO: 2238 - RNA, 22 nt, Homo sapiens
  source 1..22: mol_type = unassigned RNA
aaaagtacttgcggattttgct

SEQ ID NO: 2239 - RNA, 22 nt, Homo sapiens
  source 1..22: mol_type = unassigned RNA
agcaaaatccgcaagtactttt

SEQ ID NO: 2240 - RNA, 22 nt, Homo sapiens
  source 1..22: mol_type = unassigned RNA
aaaagtatttgcgggttttgtc

SEQ ID NO: 2241 - RNA, 22 nt, Homo sapiens
  source 1..22: mol_type = unassigned RNA
gacaaaacccgcaaatactttt

SEQ ID NO: 2242 - RNA, 21 nt, Homo sapiens
  source 1..21: mol_type = unassigned RNA
caaaggtatttgtggtttttg

SEQ ID NO: 2243 - RNA, 21 nt, Homo sapiens
  source 1..21: mol_type = unassigned RNA
caaaaaccacaaatacctttg

SEQ ID NO: 2244 - RNA, 22 nt, Homo sapiens
  source 1..22: mol_type = unassigned RNA
ccaaaactgcagttacttttgc

SEQ ID NO: 2245 - RNA, 22 nt, Homo sapiens
  source 1..22: mol_type = unassigned RNA
gcaaaagtaactgcagttttgg

SEQ ID NO: 2246 - RNA, 22 nt, Homo sapiens
  source 1..22: mol_type = unassigned RNA
aaaagtaattgcggtttttgcc

SEQ ID NO: 2247 - RNA, 22 nt, Homo sapiens
  source 1..22: mol_type = unassigned RNA
ggcaaaaaccgcaattactttt

SEQ ID NO: 2248 - RNA, 22 nt, Homo sapiens
  source 1..22: mol_type = unassigned RNA
tagcaaaaactgcagttacttt

SEQ ID NO: 2249 - RNA, 22 nt, Homo sapiens
  source 1..22: mol_type = unassigned RNA
aaagtaactgcagtttttgcta

SEQ ID NO: 2250 - RNA, 20 nt, Homo sapiens
  source 1..20: mol_type = unassigned RNA
ggaggttgggaagggcagag

SEQ ID NO: 2251 - RNA, 20 nt, Homo sapiens
  source 1..20: mol_type = unassigned RNA
ctctgcccttcccaacctcc

SEQ ID NO: 2252 - RNA, 18 nt, Homo sapiens
  source 1..18: mol_type = unassigned RNA
tgaggcgggggggcgagc

SEQ ID NO: 2253 - RNA, 18 nt, Homo sapiens
  source 1..18: mol_type = unassigned RNA
gctcgcccccccgcctca

SEQ ID NO: 2254 - RNA, 20 nt, Homo sapiens
  source 1..20: mol_type = unassigned RNA
agagatgaagcgggggggcg

SEQ ID NO: 2255 - RNA, 20 nt, Homo sapiens
  source 1..20: mol_type = unassigned RNA
cgcccccccgcttcatctct

SEQ ID NO: 2256 - RNA, 24 nt, Homo sapiens
  source 1..24: mol_type = unassigned RNA
ggaggccggggtggggcggggcgg

SEQ ID NO: 2257 - RNA, 24 nt, Homo sapiens
  source 1..24: mol_type = unassigned RNA
ccgccccgccccaccccggcctcc

SEQ ID NO: 2258 - RNA, 19 nt, Homo sapiens
  source 1..19: mol_type = unassigned RNA
ggggagcgaggggcggggc

SEQ ID NO: 2259 - RNA, 19 nt, Homo sapiens
  source 1..19: mol_type = unassigned RNA
gccccgcccctcgctcccc

SEQ ID NO: 2260 - RNA, 23 nt, Homo sapiens
  source 1..23: mol_type = unassigned RNA
tattcatttatccccagcctaca

SEQ ID NO: 2261 - RNA, 23 nt, Homo sapiens
  source 1..23: mol_type = unassigned RNA
tgtaggctggggataaatgaata

SEQ ID NO: 2262 - RNA, 24 nt, Homo sapiens
  source 1..24: mol_type = unassigned RNA
actggctagggaaaatgattggat

SEQ ID NO: 2263 - RNA, 24 nt, Homo sapiens
  source 1..24: mol_type = unassigned RNA
atccaatcattttccctagccagt

SEQ ID NO: 2264 - RNA, 22 nt, Homo sapiens
  source 1..22: mol_type = unassigned RNA
ttcatttgcctcccagcctaca

SEQ ID NO: 2265 - RNA, 22 nt, Homo sapiens
  source 1..22: mol_type = unassigned RNA
tgtaggctgggaggcaaatgaa

SEQ ID NO: 2266 - RNA, 24 nt, Homo sapiens
  source 1..24: mol_type = unassigned RNA
tgggctaagggagatgattgggta

SEQ ID NO: 2267 - RNA, 24 nt, Homo sapiens
  source 1..24: mol_type = unassigned RNA
tacccaatcatctcccttagccca

SEQ ID NO: 2268 - RNA, 22 nt, Homo sapiens
  source 1..22: mol_type = unassigned RNA
actccagccccacagcctcagc

SEQ ID NO: 2269 - RNA, 22 nt, Homo sapiens
  source 1..22: mol_type = unassigned RNA
gctgaggctgtggggctggagt

SEQ ID NO: 2270 - RNA, 22 nt, Homo sapiens
  source 1..22: mol_type = unassigned RNA
aggaggaattggtgctggtctt

SEQ ID NO: 2271 - RNA, 22 nt, Homo sapiens
  source 1..22: mol_type = unassigned RNA
aagaccagcaccaattcctcct

SEQ ID NO: 2272 - RNA, 22 nt, Homo sapiens
  source 1..22: mol_type = unassigned RNA
aggcagcggggtgtagtggata

SEQ ID NO: 2273 - RNA, 22 nt, Homo sapiens
  source 1..22: mol_type = unassigned RNA
tatccactacaccccgctgcct

SEQ ID NO: 2274 - RNA, 22 nt, Homo sapiens
  source 1..22: mol_type = unassigned RNA
tccattacactaccctgcctct

SEQ ID NO: 2275 - RNA, 22 nt, Homo sapiens
  source 1..22: mol_type = unassigned RNA
agaggcagggtagtgtaatgga

SEQ ID NO: 2276 - RNA, 22 nt, Homo sapiens
  source 1..22: mol_type = unassigned RNA
actgctgagctagcacttcccg

SEQ ID NO: 2277 - RNA, 22 nt, Homo sapiens
  source 1..22: mol_type = unassigned RNA
cgggaagtgctagctcagcagt

SEQ ID NO: 2278 - RNA, 23 nt, Homo sapiens
  source 1..23: mol_type = unassigned RNA
caaagtgctgttcgtgcaggtag

SEQ ID NO: 2279 - RNA, 23 nt, Homo sapiens
  source 1..23: mol_type = unassigned RNA
ctacctgcacgaacagcactttg

SEQ ID NO: 2280 - RNA, 23 nt, Homo sapiens
  source 1..23: mol_type = unassigned RNA
cacccggctgtgtgcacatgtgc

SEQ ID NO: 2281 - RNA, 23 nt, Homo sapiens
  source 1..23: mol_type = unassigned RNA
gcacatgtgcacacagccgggtg

SEQ ID NO: 2282 - RNA, 23 nt, Homo sapiens
  source 1..23: mol_type = unassigned RNA
agcttctttacagtgctgccttg

SEQ ID NO: 2283 - RNA, 23 nt, Homo sapiens
  source 1..23: mol_type = unassigned RNA
caaggcagcactgtaaagaagct

SEQ ID NO: 2284 - RNA, 23 nt, Homo sapiens
  source 1..23: mol_type = unassigned RNA
agcagcattgtacagggctatga

SEQ ID NO: 2285 - RNA, 23 nt, Homo sapiens
  source 1..23: mol_type = unassigned RNA
tcatagccctgtacaatgctgct

SEQ ID NO: 2286 - RNA, 17 nt, Homo sapiens
  source 1..17: mol_type = unassigned RNA
cctgagaaaagggccaa

SEQ ID NO: 2287 - RNA, 17 nt, Homo sapiens
  source 1..17: mol_type = unassigned RNA
ttggcccttttctcagg

SEQ ID NO: 2288 - RNA, 19 nt, Homo sapiens
  source 1..19: mol_type = unassigned RNA
ggccactgagtcagcacca

SEQ ID NO: 2289 - RNA, 19 nt, Homo sapiens
  source 1..19: mol_type = unassigned RNA
tggtgctgactcagtggcc

SEQ ID NO: 2290 - RNA, 18 nt, Homo sapiens
  source 1..18: mol_type = unassigned RNA
agggcatgtccagggggt

SEQ ID NO: 2291 - RNA, 18 nt, Homo sapiens
  source 1..18: mol_type = unassigned RNA
accccctggacatgccct

SEQ ID NO: 2292 - RNA, 23 nt, Homo sapiens
  source 1..23: mol_type = unassigned RNA
gcctggagctactccaccatctc

SEQ ID NO: 2293 - RNA, 23 nt, Homo sapiens
  source 1..23: mol_type = unassigned RNA
gagatggtggagtagctccaggc

SEQ ID NO: 2294 - RNA, 17 nt, Homo sapiens
  source 1..17: mol_type = unassigned RNA
cagtgttcagagatgga

SEQ ID NO: 2295 - RNA, 17 nt, Homo sapiens
  source 1..17: mol_type = unassigned RNA
tccatctctgaacactg

SEQ ID NO: 2296 - RNA, 18 nt, Homo sapiens
  source 1..18: mol_type = unassigned RNA
atctgacctgatgaaggt

SEQ ID NO: 2297 - RNA, 18 nt, Homo sapiens
  source 1..18: mol_type = unassigned RNA
accttcatcaggtcagat

SEQ ID NO: 2298 - RNA, 18 nt, Homo sapiens
  source 1..18: mol_type = unassigned RNA
ccagaggtggggactgag

SEQ ID NO: 2299 - RNA, 18 nt, Homo sapiens
  source 1..18: mol_type = unassigned RNA
ctcagtccccacctctgg

SEQ ID NO: 2300 - RNA, 17 nt, Homo sapiens
  source 1..17: mol_type = unassigned RNA
ccccgccaccgccttgg

SEQ ID NO: 2301 - RNA, 17 nt, Homo sapiens
  source 1..17: mol_type = unassigned RNA
ccaaggcggtggcgggg

SEQ ID NO: 2302 - RNA, 22 nt, Homo sapiens
  source 1..22: mol_type = unassigned RNA
cagttgggtctaggggtcagga

SEQ ID NO: 2303 - RNA, 22 nt, Homo sapiens
  source 1..22: mol_type = unassigned RNA
tcctgacccctagacccaactg

SEQ ID NO: 2304 - RNA, 19 nt, Homo sapiens
  source 1..19: mol_type = unassigned RNA
cttggggcatggagtccca

SEQ ID NO: 2305 - RNA, 19 nt, Homo sapiens
  source 1..19: mol_type = unassigned RNA
tgggactccatgccccaag

SEQ ID NO: 2306 - RNA, 16 nt, Homo sapiens
  source 1..16: mol_type = unassigned RNA
aggaaacagggaccca

SEQ ID NO: 2307 - RNA, 16 nt, Homo sapiens
  source 1..16: mol_type = unassigned RNA
tgggtccctgtttcct

SEQ ID NO: 2308 - RNA, 17 nt, Homo sapiens
  source 1..17: mol_type = unassigned RNA
gacattcagactacctg

SEQ ID NO: 2309 - RNA, 17 nt, Homo sapiens
  source 1..17: mol_type = unassigned RNA
caggtagtctgaatgtc

SEQ ID NO: 2310 - RNA, 18 nt, Homo sapiens
  source 1..18: mol_type = unassigned RNA
attctaagtgccttggcc

SEQ ID NO: 2311 - RNA, 18 nt, Homo sapiens
  source 1..18: mol_type = unassigned RNA
ggccaaggcacttagaat

SEQ ID NO: 2312 - RNA, 17 nt, Homo sapiens
  source 1..17: mol_type = unassigned RNA
actcagtcatggtcatt

SEQ ID NO: 2313 - RNA, 17 nt, Homo sapiens
  source 1..17: mol_type = unassigned RNA
aatgaccatgactgagt

SEQ ID NO: 2314 - RNA, 19 nt, Homo sapiens
  source 1..19: mol_type = unassigned RNA
ctgtgggctcagctctggg

SEQ ID NO: 2315 - RNA, 19 nt, Homo sapiens
  source 1..19: mol_type = unassigned RNA
cccagagctgagcccacag

SEQ ID NO: 2316 - RNA, 16 nt, Homo sapiens
  source 1..16: mol_type = unassigned RNA
ctaggaggccttggcc

SEQ ID NO: 2317 - RNA, 16 nt, Homo sapiens
  source 1..16: mol_type = unassigned RNA
ggccaaggcctcctag

SEQ ID NO: 2318 - RNA, 16 nt, Homo sapiens
  source 1..16: mol_type = unassigned RNA
tccagctcggtggcac

SEQ ID NO: 2319 - RNA, 16 nt, Homo sapiens
  source 1..16: mol_type = unassigned RNA
gtgccaccgagctgga

SEQ ID NO: 2320 - RNA, 21 nt, Homo sapiens
  source 1..21: mol_type = unassigned RNA
ggctcctcctctcaggatgtg

SEQ ID NO: 2321 - RNA, 21 nt, Homo sapiens
  source 1..21: mol_type = unassigned RNA
cacatcctgagaggaggagcc

SEQ ID NO: 2322 - RNA, 21 nt, Homo sapiens
  source 1..21: mol_type = unassigned RNA
gcaggcacagacagccctggc

SEQ ID NO: 2323 - RNA, 21 nt, Homo sapiens
  source 1..21: mol_type = unassigned RNA
gccagggctgtctgtgcctgc

SEQ ID NO: 2324 - RNA, 20 nt, Homo sapiens
  source 1..20: mol_type = unassigned RNA
tcagggagtcaggggagggc

SEQ ID NO: 2325 - RNA, 20 nt, Homo sapiens
  source 1..20: mol_type = unassigned RNA
gccctcccctgactccctga

SEQ ID NO: 2326 - RNA, 19 nt, Homo sapiens
  source 1..19: mol_type = unassigned RNA
gggggaagaaaaggtgggg

SEQ ID NO: 2327 - RNA, 19 nt, Homo sapiens
  source 1..19: mol_type = unassigned RNA
ccccaccttttcttccccc

SEQ ID NO: 2328 - RNA, 18 nt, Homo sapiens
  source 1..18: mol_type = unassigned RNA
cattcaactagtgattgt

SEQ ID NO: 2329 - RNA, 18 nt, Homo sapiens
  source 1..18: mol_type = unassigned RNA
acaatcactagttgaatg

SEQ ID NO: 2330 - RNA, 18 nt, Homo sapiens
  source 1..18: mol_type = unassigned RNA
cagcagtccctccccctg

SEQ ID NO: 2331 - RNA, 18 nt, Homo sapiens
  source 1..18: mol_type = unassigned RNA
cagggggagggactgctg

SEQ ID NO: 2332 - RNA, 17 nt, Homo sapiens
  source 1..17: mol_type = unassigned RNA
ccaattaccacttcttt

SEQ ID NO: 2333 - RNA, 17 nt, Homo sapiens
  source 1..17: mol_type = unassigned RNA
aaagaagtggtaattgg

SEQ ID NO: 2334 - RNA, 17 nt, Homo sapiens
  source 1..17: mol_type = unassigned RNA
ctcagtgactcatgtgc

SEQ ID NO: 2335 - RNA, 17 nt, Homo sapiens
  source 1..17: mol_type = unassigned RNA
gcacatgagtcactgag

SEQ ID NO: 2336 - RNA, 21 nt, Homo sapiens
  source 1..21: mol_type = unassigned RNA
gcagttctgagcacagtacac

SEQ ID NO: 2337 - RNA, 21 nt, Homo sapiens
  source 1..21: mol_type = unassigned RNA
gtgtactgtgctcagaactgc

SEQ ID NO: 2338 - RNA, 18 nt, Homo sapiens
  source 1..18: mol_type = unassigned RNA
ctagggggtttgcccttg

SEQ ID NO: 2339 - RNA, 18 nt, Homo sapiens
  source 1..18: mol_type = unassigned RNA
caagggcaaaccccctag

SEQ ID NO: 2340 - RNA, 16 nt, Homo sapiens
  source 1..16: mol_type = unassigned RNA
ctctcctcccggcttc

SEQ ID NO: 2341 - RNA, 16 nt, Homo sapiens
  source 1..16: mol_type = unassigned RNA
gaagccgggaggagag

SEQ ID NO: 2342 - RNA, 21 nt, Homo sapiens
  source 1..21: mol_type = unassigned RNA
gagtgtagttctgagcagagc

SEQ ID NO: 2343 - RNA, 21 nt, Homo sapiens
  source 1..21: mol_type = unassigned RNA
gctctgctcagaactacactc

SEQ ID NO: 2344 - RNA, 18 nt, Homo sapiens
  source 1..18: mol_type = unassigned RNA
gggtcccggggagggggg

SEQ ID NO: 2345 - RNA, 18 nt, Homo sapiens
  source 1..18: mol_type = unassigned RNA
cccccctccccgggaccc

SEQ ID NO: 2346 - RNA, 18 nt, Homo sapiens
  source 1..18: mol_type = unassigned RNA
taaaatttgcatccagga

SEQ ID NO: 2347 - RNA, 18 nt, Homo sapiens
  source 1..18: mol_type = unassigned RNA
tcctggatgcaaatttta

SEQ ID NO: 2348 - RNA, 17 nt, Homo sapiens
  source 1..17: mol_type = unassigned RNA
tggggctcagcgagttt

SEQ ID NO: 2349 - RNA, 17 nt, Homo sapiens
  source 1..17: mol_type = unassigned RNA
aaactcgctgagcccca

SEQ ID NO: 2350 - RNA, 18 nt, Homo sapiens
  source 1..18: mol_type = unassigned RNA
gggctcacatcaccccat

SEQ ID NO: 2351 - RNA, 18 nt, Homo sapiens
  source 1..18: mol_type = unassigned RNA
atggggtgatgtgagccc

SEQ ID NO: 2352 - RNA, 18 nt, Homo sapiens
  source 1..18: mol_type = unassigned RNA
gcggcgagtccgactcat

SEQ ID NO: 2353 - RNA, 18 nt, Homo sapiens
  source 1..18: mol_type = unassigned RNA
atgagtcggactcgccgc

SEQ ID NO: 2354 - RNA, 17 nt, Homo sapiens
  source 1..17: mol_type = unassigned RNA
accccactcctggtacc

SEQ ID NO: 2355 - RNA, 17 nt, Homo sapiens
  source 1..17: mol_type = unassigned RNA
ggtaccaggagtggggt

SEQ ID NO: 2356 - RNA, 19 nt, Homo sapiens
  source 1..19: mol_type = unassigned RNA
tctcccttgagggcacttt

SEQ ID NO: 2357 - RNA, 19 nt, Homo sapiens
  source 1..19: mol_type = unassigned RNA
aaagtgccctcaagggaga

SEQ ID NO: 2358 - RNA, 17 nt, Homo sapiens
  source 1..17: mol_type = unassigned RNA
ttgtctgctgagtttcc

SEQ ID NO: 2359 - RNA, 17 nt, Homo sapiens
  source 1..17: mol_type = unassigned RNA
ggaaactcagcagacaa

SEQ ID NO: 2360 - RNA, 19 nt, Homo sapiens
  source 1..19: mol_type = unassigned RNA
gcattgtgcagggctatca

SEQ ID NO: 2361 - RNA, 19 nt, Homo sapiens
  source 1..19: mol_type = unassigned RNA
tgatagccctgcacaatgc

SEQ ID NO: 2362 - RNA, 19 nt, Homo sapiens
  source 1..19: mol_type = unassigned RNA
tgccctcctttcttccctc

SEQ ID NO: 2363 - RNA, 19 nt, Homo sapiens
  source 1..19: mol_type = unassigned RNA
gagggaagaaaggagggca

SEQ ID NO: 2364 - RNA, 16 nt, Homo sapiens
  source 1..16: mol_type = unassigned RNA
ttcagcaggaacagct

SEQ ID NO: 2365 - RNA, 16 nt, Homo sapiens
  source 1..16: mol_type = unassigned RNA
agctgttcctgctgaa

SEQ ID NO: 2366 - RNA, 18 nt, Homo sapiens
  source 1..18: mol_type = unassigned RNA
cccctgggccggccttgg

SEQ ID NO: 2367 - RNA, 18 nt, Homo sapiens
  source 1..18: mol_type = unassigned RNA
ccaaggccggcccagggg

SEQ ID NO: 2368 - RNA, 17 nt, Homo sapiens
  source 1..17: mol_type = unassigned RNA
cagcctgacaggaacag

SEQ ID NO: 2369 - RNA, 17 nt, Homo sapiens
  source 1..17: mol_type = unassigned RNA
ctgttcctgtcaggctg

SEQ ID NO: 2370 - RNA, 17 nt, Homo sapiens
  source 1..17: mol_type = unassigned RNA
gggagtctacagcaggg

SEQ ID NO: 2371 - RNA, 17 nt, Homo sapiens
  source 1..17: mol_type = unassigned RNA
ccctgctgtagactccc

SEQ ID NO: 2372 - RNA, 18 nt, Homo sapiens
  source 1..18: mol_type = unassigned RNA
cagtgcaatgttttcctt

SEQ ID NO: 2373 - RNA, 18 nt, Homo sapiens
  source 1..18: mol_type = unassigned RNA
aaggaaaacattgcactg

SEQ ID NO: 2374 - RNA, 17 nt, Homo sapiens
  source 1..17: mol_type = unassigned RNA
atgtgggctcaggctca

SEQ ID NO: 2375 - RNA, 17 nt, Homo sapiens
  source 1..17: mol_type = unassigned RNA
tgagcctgagcccacat

SEQ ID NO: 2376 - RNA, 16 nt, Homo sapiens
  source 1..16: mol_type = unassigned RNA
tgccttcctgtctgtg

SEQ ID NO: 2377 - RNA, 16 nt, Homo sapiens
  source 1..16: mol_type = unassigned RNA
cacagacaggaaggca

SEQ ID NO: 2378 - RNA, 22 nt, Homo sapiens
  source 1..22: mol_type = unassigned RNA
ctgggacaggaggaggaggcag

SEQ ID NO: 2379 - RNA, 22 nt, Homo sapiens
  source 1..22: mol_type = unassigned RNA
ctgcctcctcctcctgtcccag

SEQ ID NO: 2380 - RNA, 18 nt, Homo sapiens
  source 1..18: mol_type = unassigned RNA
gctggtgacatgagaggc

SEQ ID NO: 2381 - RNA, 18 nt, Homo sapiens
  source 1..18: mol_type = unassigned RNA
gcctctcatgtcaccagc

SEQ ID NO: 2382 - RNA, 18 nt, Homo sapiens
  source 1..18: mol_type = unassigned RNA
tgggagctggactacttc

SEQ ID NO: 2383 - RNA, 18 nt, Homo sapiens
  source 1..18: mol_type = unassigned RNA
gaagtagtccagctccca

SEQ ID NO: 2384 - RNA, 20 nt, Homo sapiens
  source 1..20: mol_type = unassigned RNA
tcccactacttcacttgtga

SEQ ID NO: 2385 - RNA, 20 nt, Homo sapiens
  source 1..20: mol_type = unassigned RNA
tcacaagtgaagtagtggga

SEQ ID NO: 2386 - RNA, 18 nt, Homo sapiens
  source 1..18: mol_type = unassigned RNA
ccagtgtggctcagcgag

SEQ ID NO: 2387 - RNA, 18 nt, Homo sapiens
  source 1..18: mol_type = unassigned RNA
ctcgctgagccacactgg

SEQ ID NO: 2388 - RNA, 17 nt, Homo sapiens
  source 1..17: mol_type = unassigned RNA
ttctgagctgaggacag

SEQ ID NO: 2389 - RNA, 17 nt, Homo sapiens
  source 1..17: mol_type = unassigned RNA
ctgtcctcagctcagaa

SEQ ID NO: 2390 - RNA, 17 nt, Homo sapiens
  source 1..17: mol_type = unassigned RNA
ccggcatgtccagggca

SEQ ID NO: 2391 - RNA, 17 nt, Homo sapiens
  source 1..17: mol_type = unassigned RNA
tgccctggacatgccgg

SEQ ID NO: 2392 - RNA, 18 nt, Homo sapiens
  source 1..18: mol_type = unassigned RNA
cctagacacctccagttc

SEQ ID NO: 2393 - RNA, 18 nt, Homo sapiens
  source 1..18: mol_type = unassigned RNA
gaactggaggtgtctagg

SEQ ID NO: 2394 - RNA, 17 nt, Homo sapiens
  source 1..17: mol_type = unassigned RNA
tggagagaaaggcagta

SEQ ID NO: 2395 - RNA, 17 nt, Homo sapiens
  source 1..17: mol_type = unassigned RNA
tactgcctttctctcca

SEQ ID NO: 2396 - RNA, 19 nt, Homo sapiens
  source 1..19: mol_type = unassigned RNA
aatgttttttcctgtttcc

SEQ ID NO: 2397 - RNA, 19 nt, Homo sapiens
  source 1..19: mol_type = unassigned RNA
ggaaacaggaaaaaacatt

SEQ ID NO: 2398 - RNA, 18 nt, Homo sapiens
  source 1..18: mol_type = unassigned RNA
tccctggagtttcttctt

SEQ ID NO: 2399 - RNA, 18 nt, Homo sapiens
  source 1..18: mol_type = unassigned RNA
aagaagaaactccaggga

SEQ ID NO: 2400 - RNA, 18 nt, Homo sapiens
  source 1..18: mol_type = unassigned RNA
ctggagtctaggattcca

SEQ ID NO: 2401 - RNA, 18 nt, Homo sapiens
  source 1..18: mol_type = unassigned RNA
tggaatcctagactccag

SEQ ID NO: 2402 - RNA, 16 nt, Homo sapiens
  source 1..16: mol_type = unassigned RNA
gcagcattcatgtccc

SEQ ID NO: 2403 - RNA, 16 nt, Homo sapiens
  source 1..16: mol_type = unassigned RNA
gggacatgaatgctgc

SEQ ID NO: 2404 - RNA, 18 nt, Homo sapiens
  source 1..18: mol_type = unassigned RNA
gaaagagagctgagtgtg

SEQ ID NO: 2405 - RNA, 18 nt, Homo sapiens
  source 1..18: mol_type = unassigned RNA
cacactcagctctctttc

SEQ ID NO: 2406 - RNA, 19 nt, Homo sapiens
  source 1..19: mol_type = unassigned RNA
ggccttgttcctgtcccca

SEQ ID NO: 2407 - RNA, 19 nt, Homo sapiens
  source 1..19: mol_type = unassigned RNA
tggggacaggaacaaggcc

SEQ ID NO: 2408 - RNA, 20 nt, Homo sapiens
  source 1..20: mol_type = unassigned RNA
agccccctggccccaaaccc

SEQ ID NO: 2409 - RNA, 20 nt, Homo sapiens
  source 1..20: mol_type = unassigned RNA
gggtttggggccagggggct

SEQ ID NO: 2410 - RNA, 18 nt, Homo sapiens
  source 1..18: mol_type = unassigned RNA
ctctgggaaatgggacag

SEQ ID NO: 2411 - RNA, 18 nt, Homo sapiens
  source 1..18: mol_type = unassigned RNA
ctgtcccatttcccagag

SEQ ID NO: 2412 - RNA, 18 nt, Homo sapiens
  source 1..18: mol_type = unassigned RNA
ccgctttctgagctggac

SEQ ID NO: 2413 - RNA, 18 nt, Homo sapiens
  source 1..18: mol_type = unassigned RNA
gtccagctcagaaagcgg

SEQ ID NO: 2414 - RNA, 17 nt, Homo sapiens
  source 1..17: mol_type = unassigned RNA
ggtgaggctagctggtg

SEQ ID NO: 2415 - RNA, 17 nt, Homo sapiens
  source 1..17: mol_type = unassigned RNA
caccagctagcctcacc

SEQ ID NO: 2416 - RNA, 17 nt, Homo sapiens
  source 1..17: mol_type = unassigned RNA
acattgccagggagttt

SEQ ID NO: 2417 - RNA, 17 nt, Homo sapiens
  source 1..17: mol_type = unassigned RNA
aaactccctggcaatgt

SEQ ID NO: 2418 - RNA, 17 nt, Homo sapiens
  source 1..17: mol_type = unassigned RNA
cactgtgggtacatgct

SEQ ID NO: 2419 - RNA, 17 nt, Homo sapiens
  source 1..17: mol_type = unassigned RNA
agcatgtacccacagtg

SEQ ID NO: 2420 - RNA, 17 nt, Homo sapiens
  source 1..17: mol_type = unassigned RNA
tccctgagcaaagccac

SEQ ID NO: 2421 - RNA, 17 nt, Homo sapiens
  source 1..17: mol_type = unassigned RNA
gtggctttgctcaggga

SEQ ID NO: 2422 - RNA, 18 nt, Homo sapiens
  source 1..18: mol_type = unassigned RNA
gggattctgtagcttcct

SEQ ID NO: 2423 - RNA, 18 nt, Homo sapiens
  source 1..18: mol_type = unassigned RNA
aggaagctacagaatccc

SEQ ID NO: 2424 - RNA, 21 nt, Homo sapiens
  source 1..21: mol_type = unassigned RNA
ttagcggtggaccgccctgcg

SEQ ID NO: 2425 - RNA, 21 nt, Homo sapiens
  source 1..21: mol_type = unassigned RNA
cgcagggcggtccaccgctaa

SEQ ID NO: 2426 - RNA, 21 nt, Homo sapiens
  source 1..21: mol_type = unassigned RNA
ctgtgggctcagcgcgtgggg

SEQ ID NO: 2427 - RNA, 21 nt, Homo sapiens
  source 1..21: mol_type = unassigned RNA
ccccacgcgctgagcccacag

SEQ ID NO: 2428 - RNA, 18 nt, Homo sapiens
  source 1..18: mol_type = unassigned RNA
cagccccacagcctcaga

SEQ ID NO: 2429 - RNA, 18 nt, Homo sapiens
  source 1..18: mol_type = unassigned RNA
tctgaggctgtggggctg

SEQ ID NO: 2430 - RNA, 20 nt, Homo sapiens
  source 1..20: mol_type = unassigned RNA
ccctgagaccctaaccttaa

SEQ ID NO: 2431 - RNA, 20 nt, Homo sapiens
  source 1..20: mol_type = unassigned RNA
ttaaggttagggtctcaggg

SEQ ID NO: 2432 - RNA, 18 nt, Homo sapiens
  source 1..18: mol_type = unassigned RNA
ttgcacttgtctcagtga

SEQ ID NO: 2433 - RNA, 18 nt, Homo sapiens
  source 1..18: mol_type = unassigned RNA
tcactgagacaagtgcaa

SEQ ID NO: 2434 - RNA, 20 nt, Homo sapiens
  source 1..20: mol_type = unassigned RNA
tgttcctctgtctcccagac

SEQ ID NO: 2435 - RNA, 20 nt, Homo sapiens
  source 1..20: mol_type = unassigned RNA
gtctgggagacagaggaaca

SEQ ID NO: 2436 - RNA, 19 nt, Homo sapiens
  source 1..19: mol_type = unassigned RNA
ggcttgcatgggggactgg

SEQ ID NO: 2437 - RNA, 19 nt, Homo sapiens
  source 1..19: mol_type = unassigned RNA
ccagtcccccatgcaagcc

SEQ ID NO: 2438 - RNA, 17 nt, Homo sapiens
  source 1..17: mol_type = unassigned RNA
ccagttttcccaggatt

SEQ ID NO: 2439 - RNA, 17 nt, Homo sapiens
  source 1..17: mol_type = unassigned RNA
aatcctgggaaaactgg

SEQ ID NO: 2440 - RNA, 19 nt, Homo sapiens
  source 1..19: mol_type = unassigned RNA
cctgagaccctagttccac

SEQ ID NO: 2441 - RNA, 19 nt, Homo sapiens
  source 1..19: mol_type = unassigned RNA
gtggaactagggtctcagg

SEQ ID NO: 2442 - RNA, 19 nt, Homo sapiens
  source 1..19: mol_type = unassigned RNA
cctcagatcagagccttgc

SEQ ID NO: 2443 - RNA, 19 nt, Homo sapiens
  source 1..19: mol_type = unassigned RNA
gcaaggctctgatctgagg

SEQ ID NO: 2444 - RNA, 22 nt, Homo sapiens
  source 1..22: mol_type = unassigned RNA
cattgcacttgtctcggtctga

SEQ ID NO: 2445 - RNA, 22 nt, Homo sapiens
  source 1..22: mol_type = unassigned RNA
tcagaccgagacaagtgcaatg

SEQ ID NO: 2446 - RNA, 21 nt, Homo sapiens
  source 1..21: mol_type = unassigned RNA
aggcggagacttgggcaattg

SEQ ID NO: 2447 - RNA, 21 nt, Homo sapiens
  source 1..21: mol_type = unassigned RNA
caattgcccaagtctccgcct

SEQ ID NO: 2448 - RNA, 22 nt, Homo sapiens
  source 1..22: mol_type = unassigned RNA
cctattcttggttacttgcacg

SEQ ID NO: 2449 - RNA, 22 nt, Homo sapiens
  source 1..22: mol_type = unassigned RNA
cgtgcaagtaaccaagaatagg

SEQ ID NO: 2450 - RNA, 19 nt, Homo sapiens
  source 1..19: mol_type = unassigned RNA
aatggatttttggagcagg

SEQ ID NO: 2451 - RNA, 19 nt, Homo sapiens
  source 1..19: mol_type = unassigned RNA
cctgctccaaaaatccatt

SEQ ID NO: 2452 - RNA, 22 nt, Homo sapiens
  source 1..22: mol_type = unassigned RNA
tgcggggctagggctaacagca

SEQ ID NO: 2453 - RNA, 22 nt, Homo sapiens
  source 1..22: mol_type = unassigned RNA
tgctgttagccctagccccgca

SEQ ID NO: 2454 - RNA, 22 nt, Homo sapiens
  source 1..22: mol_type = unassigned RNA
aaaagtaattgcggattttgcc

SEQ ID NO: 2455 - RNA, 22 nt, Homo sapiens
  source 1..22: mol_type = unassigned RNA
ggcaaaatccgcaattactttt

SEQ ID NO: 2456 - RNA, 22 nt, Homo sapiens
  source 1..22: mol_type = unassigned RNA
caaaagtaattgtggattttgt

SEQ ID NO: 2457 - RNA, 22 nt, Homo sapiens
  source 1..22: mol_type = unassigned RNA
acaaaatccacaattacttttg

SEQ ID NO: 2458 - RNA, 23 nt, Homo sapiens
  source 1..23: mol_type = unassigned RNA
taagtgcttccatgttttggtga

SEQ ID NO: 2459 - RNA, 23 nt, Homo sapiens
  source 1..23: mol_type = unassigned RNA
tcaccaaaacatggaagcactta

SEQ ID NO: 2460 - RNA, 23 nt, Homo sapiens
  source 1..23: mol_type = unassigned RNA
acttaaacgtggatgtacttgct

SEQ ID NO: 2461 - RNA, 23 nt, Homo sapiens
  source 1..23: mol_type = unassigned RNA
agcaagtacatccacgtttaagt

SEQ ID NO: 2462 - RNA, 21 nt, Homo sapiens
  source 1..21: mol_type = unassigned RNA
ctatacaatctactgtctttc

SEQ ID NO: 2463 - RNA, 21 nt, Homo sapiens
  source 1..21: mol_type = unassigned RNA
gaaagacagtagattgtatag

SEQ ID NO: 2464 - RNA, 22 nt, Homo sapiens
  source 1..22: mol_type = unassigned RNA
tgaggtagtaggttgtatagtt

SEQ ID NO: 2465 - RNA, 22 nt, Homo sapiens
  source 1..22: mol_type = unassigned RNA
aactatacaacctactacctca

SEQ ID NO: 2466 - RNA, 22 nt, Homo sapiens
  source 1..22: mol_type = unassigned RNA
ctgtacagcctcctagctttcc

SEQ ID NO: 2467 - RNA, 22 nt, Homo sapiens
  source 1..22: mol_type = unassigned RNA
ggaaagctaggaggctgtacag

SEQ ID NO: 2468 - RNA, 20 nt, Homo sapiens
  source 1..20: mol_type = unassigned RNA
caccaggcattgtggtctcc

SEQ ID NO: 2469 - RNA, 20 nt, Homo sapiens
  source 1..20: mol_type = unassigned RNA
ggagaccacaatgcctggtg

SEQ ID NO: 2470 - RNA, 23 nt, Homo sapiens
  source 1..23: mol_type = unassigned RNA
tgagtaccgccatgtctgttggg

SEQ ID NO: 2471 - RNA, 23 nt, Homo sapiens
  source 1..23: mol_type = unassigned RNA
cccaacagacatggcggtactca

SEQ ID NO: 2472 - RNA, 22 nt, Homo sapiens
  source 1..22: mol_type = unassigned RNA
tacccagagcatgcagtgtgaa

SEQ ID NO: 2473 - RNA, 22 nt, Homo sapiens
  source 1..22: mol_type = unassigned RNA
ttcacactgcatgctctgggta

SEQ ID NO: 2474 - RNA, 22 nt, Homo sapiens
  source 1..22: mol_type = unassigned RNA
aagtgctgtcatagctgaggtc

SEQ ID NO: 2475 - RNA, 22 nt, Homo sapiens
  source 1..22: mol_type = unassigned RNA
gacctcagctatgacagcactt

SEQ ID NO: 2476 - RNA, 23 nt, Homo sapiens
  source 1..23: mol_type = unassigned RNA
cactcagccttgagggcactttc

SEQ ID NO: 2477 - RNA, 23 nt, Homo sapiens
  source 1..23: mol_type = unassigned RNA
gaaagtgccctcaaggctgagtg

SEQ ID NO: 2478 - RNA, 22 nt, Homo sapiens
  source 1..22: mol_type = unassigned RNA
tcgacagcacgacactgccttc

SEQ ID NO: 2479 - RNA, 22 nt, Homo sapiens
  source 1..22: mol_type = unassigned RNA
gaaggcagtgtcgtgctgtcga

SEQ ID NO: 2480 - RNA, 22 nt, Homo sapiens
  source 1..22: mol_type = unassigned RNA
taggtagtttcctgttgttggg

SEQ ID NO: 2481 - RNA, 22 nt, Homo sapiens
  source 1..22: mol_type = unassigned RNA
cccaacaacaggaaactaccta

SEQ ID NO: 2482 - RNA, 21 nt, Homo sapiens
  source 1..21: mol_type = unassigned RNA
tacagtactgtgataactgaa

SEQ ID NO: 2483 - RNA, 21 nt, Homo sapiens
  source 1..21: mol_type = unassigned RNA
ttcagttatcacagtactgta

SEQ ID NO: 2484 - RNA, 22 nt, Homo sapiens
  source 1..22: mol_type = unassigned RNA
cagttatcacagtgctgatgct

SEQ ID NO: 2485 - RNA, 22 nt, Homo sapiens
  source 1..22: mol_type = unassigned RNA
agcatcagcactgtgataactg

SEQ ID NO: 2486 - RNA, 23 nt, Homo sapiens
  source 1..23: mol_type = unassigned RNA
tgtgcaaatctatgcaaaactga

SEQ ID NO: 2487 - RNA, 23 nt, Homo sapiens
  source 1..23: mol_type = unassigned RNA
tcagttttgcatagatttgcaca

SEQ ID NO: 2488 - RNA, 22 nt, Homo sapiens
  source 1..22: mol_type = unassigned RNA
agttttgcatagttgcactaca

SEQ ID NO: 2489 - RNA, 22 nt, Homo sapiens
  source 1..22: mol_type = unassigned RNA
tgtagtgcaactatgcaaaact

SEQ ID NO: 2490 - RNA, 23 nt, Homo sapiens
  source 1..23: mol_type = unassigned RNA
agttttgcaggtttgcatccagc

SEQ ID NO: 2491 - RNA, 23 nt, Homo sapiens
  source 1..23: mol_type = unassigned RNA
gctggatgcaaacctgcaaaact

SEQ ID NO: 2492 - RNA, 22 nt, Homo sapiens
  source 1..22: mol_type = unassigned RNA
agttttgcaggtttgcatttca

SEQ ID NO: 2493 - RNA, 22 nt, Homo sapiens
  source 1..22: mol_type = unassigned RNA
tgaaatgcaaacctgcaaaact

SEQ ID NO: 2494 - RNA, 23 nt, Homo sapiens
  source 1..23: mol_type = unassigned RNA
tgtgcaaatccatgcaaaactga

SEQ ID NO: 2495 - RNA, 23 nt, Homo sapiens
  source 1..23: mol_type = unassigned RNA
tcagttttgcatggatttgcaca

SEQ ID NO: 2496 - RNA, 23 nt, Homo sapiens
  source 1..23: mol_type = unassigned RNA
tactgcatcaggaactgattgga

SEQ ID NO: 2497 - RNA, 23 nt, Homo sapiens
  source 1..23: mol_type = unassigned RNA
tccaatcagttcctgatgcagta

SEQ ID NO: 2498 - RNA, 22 nt, Homo sapiens
  source 1..22: mol_type = unassigned RNA
atggttccgtcaagcaccatgg

SEQ ID NO: 2499 - RNA, 22 nt, Homo sapiens
  source 1..22: mol_type = unassigned RNA
ccatggtgcttgacggaaccat

SEQ ID NO: 2500 - RNA, 21 nt, Homo sapiens
  source 1..21: mol_type = unassigned RNA
agctacatctggctactgggt

SEQ ID NO: 2501 - RNA, 21 nt, Homo sapiens
  source 1..21: mol_type = unassigned RNA
acccagtagccagatgtagct

SEQ ID NO: 2502 - RNA, 22 nt, Homo sapiens
  source 1..22: mol_type = unassigned RNA
ctcagtagccagtgtagatcct

SEQ ID NO: 2503 - RNA, 22 nt, Homo sapiens
  source 1..22: mol_type = unassigned RNA
aggatctacactggctactgag

SEQ ID NO: 2504 - RNA, 22 nt, Homo sapiens
  source 1..22: mol_type = unassigned RNA
ttatcagaatctccaggggtac

SEQ ID NO: 2505 - RNA, 22 nt, Homo sapiens
  source 1..22: mol_type = unassigned RNA
gtacccctggagattctgataa

SEQ ID NO: 2506 - RNA, 23 nt, Homo sapiens
  source 1..23: mol_type = unassigned RNA
atcaacagacattaattgggcgc

SEQ ID NO: 2507 - RNA, 23 nt, Homo sapiens
  source 1..23: mol_type = unassigned RNA
gcgcccaattaatgtctgttgat

SEQ ID NO: 2508 - RNA, 21 nt, Homo sapiens
  source 1..21: mol_type = unassigned RNA
caaaacgtgaggcgctgctat

SEQ ID NO: 2509 - RNA, 21 nt, Homo sapiens
  source 1..21: mol_type = unassigned RNA
atagcagcgcctcacgttttg

SEQ ID NO: 2510 - RNA, 22 nt, Homo sapiens
  source 1..22: mol_type = unassigned RNA
cagcagcaattcatgttttgaa

SEQ ID NO: 2511 - RNA, 22 nt, Homo sapiens
  source 1..22: mol_type = unassigned RNA
ttcaaaacatgaattgctgctg

SEQ ID NO: 2512 - RNA, 18 nt, Homo sapiens
  source 1..18: mol_type = unassigned RNA
ttcacagggaggtgtcat

SEQ ID NO: 2513 - RNA, 18 nt, Homo sapiens
  source 1..18: mol_type = unassigned RNA
atgacacctccctgtgaa

SEQ ID NO: 2514 - RNA, 20 nt, Homo sapiens
  source 1..20: mol_type = unassigned RNA
gcggagagagaatggggagc

SEQ ID NO: 2515 - RNA, 20 nt, Homo sapiens
  source 1..20: mol_type = unassigned RNA
gctccccattctctctccgc

SEQ ID NO: 2516 - RNA, 21 nt, Homo sapiens
  source 1..21: mol_type = unassigned RNA
cctgcgagtctccggcggtgg

SEQ ID NO: 2517 - RNA, 21 nt, Homo sapiens
  source 1..21: mol_type = unassigned RNA
ccaccgccggagactcgcagg

SEQ ID NO: 2518 - RNA, 21 nt, Homo sapiens
  source 1..21: mol_type = unassigned RNA
gggctagggcctgctgccccc

SEQ ID NO: 2519 - RNA, 21 nt, Homo sapiens
  source 1..21: mol_type = unassigned RNA
gggggcagcaggccctagccc

SEQ ID NO: 2520 - RNA, 19 nt, Homo sapiens
  source 1..19: mol_type = unassigned RNA
ttctgctgccggccaaggc

SEQ ID NO: 2521 - RNA, 19 nt, Homo sapiens
  source 1..19: mol_type = unassigned RNA
gccttggccggcagcagaa

SEQ ID NO: 2522 - RNA, 22 nt, Homo sapiens
  source 1..22: mol_type = unassigned RNA
tcctcatcacactgcaccttag

SEQ ID NO: 2523 - RNA, 22 nt, Homo sapiens
  source 1..22: mol_type = unassigned RNA
ctaaggtgcagtgtgatgagga

SEQ ID NO: 2524 - RNA, 20 nt, Homo sapiens
  source 1..20: mol_type = unassigned RNA
ggtagtgagttatcagctac

SEQ ID NO: 2525 - RNA, 20 nt, Homo sapiens
  source 1..20: mol_type = unassigned RNA
gtagctgataactcactacc

SEQ ID NO: 2526 - RNA, 20 nt, Homo sapiens
  source 1..20: mol_type = unassigned RNA
gatattcagaggctaggtgg

SEQ ID NO: 2527 - RNA, 20 nt, Homo sapiens
  source 1..20: mol_type = unassigned RNA
ccacctagcctctgaatatc

SEQ ID NO: 2528 - RNA, 21 nt, Homo sapiens
  source 1..21: mol_type = unassigned RNA
acggcccaggcggcattggtg

SEQ ID NO: 2529 - RNA, 21 nt, Homo sapiens
  source 1..21: mol_type = unassigned RNA
caccaatgccgcctgggccgt

SEQ ID NO: 2530 - RNA, 21 nt, Homo sapiens
  source 1..21: mol_type = unassigned RNA
agcatgacagaggagaggtgg

SEQ ID NO: 2531 - RNA, 21 nt, Homo sapiens
  source 1..21: mol_type = unassigned RNA
ccacctctcctctgtcatgct

SEQ ID NO: 2532 - RNA, 21 nt, Homo sapiens
  source 1..21: mol_type = unassigned RNA
gggaagagctgtacggccttc

SEQ ID NO: 2533 - RNA, 21 nt, Homo sapiens
  source 1..21: mol_type = unassigned RNA
gaaggccgtacagctcttccc

SEQ ID NO: 2534 - RNA, 19 nt, Homo sapiens
  source 1..19: mol_type = unassigned RNA
ccgcctgagctagctgtgg

SEQ ID NO: 2535 - RNA, 19 nt, Homo sapiens
  source 1..19: mol_type = unassigned RNA
ccacagctagctcaggcgg

SEQ ID NO: 2536 - RNA, 24 nt, Homo sapiens
  source 1..24: mol_type = unassigned RNA
ttggaagcttggaccaactagctg

SEQ ID NO: 2537 - RNA, 24 nt, Homo sapiens
  source 1..24: mol_type = unassigned RNA
cagctagttggtccaagcttccaa

SEQ ID NO: 2538 - RNA, 19 nt, Homo sapiens
  source 1..19: mol_type = unassigned RNA
tctagtgcgggcgttcccg

SEQ ID NO: 2539 - RNA, 19 nt, Homo sapiens
  source 1..19: mol_type = unassigned RNA
cgggaacgcccgcactaga

SEQ ID NO: 2540 - RNA, 24 nt, Homo sapiens
  source 1..24: mol_type = unassigned RNA
aggagcagtgccggccaaggcgcc

SEQ ID NO: 2541 - RNA, 24 nt, Homo sapiens
  source 1..24: mol_type = unassigned RNA
ggcgccttggccggcactgctcct

SEQ ID NO: 2542 - RNA, 19 nt, Homo sapiens
  source 1..19: mol_type = unassigned RNA
gaatacgtctggttgatcc

SEQ ID NO: 2543 - RNA, 19 nt, Homo sapiens
  source 1..19: mol_type = unassigned RNA
ggatcaaccagacgtattc

SEQ ID NO: 2544 - RNA, 20 nt, Homo sapiens
  source 1..20: mol_type = unassigned RNA
cttatatcagaggctgtggg

SEQ ID NO: 2545 - RNA, 20 nt, Homo sapiens
  source 1..20: mol_type = unassigned RNA
cccacagcctctgatataag

SEQ ID NO: 2546 - RNA, 20 nt, Homo sapiens
  source 1..20: mol_type = unassigned RNA
ttccgccagtcggtggccgg

SEQ ID NO: 2547 - RNA, 20 nt, Homo sapiens
  source 1..20: mol_type = unassigned RNA
ccggccaccgactggcggaa

SEQ ID NO: 2548 - RNA, 19 nt, Homo sapiens
  source 1..19: mol_type = unassigned RNA
aaggggctgggggagcaca

SEQ ID NO: 2549 - RNA, 19 nt, Homo sapiens
  source 1..19: mol_type = unassigned RNA
tgtgctcccccagcccctt

SEQ ID NO: 2550 - RNA, 23 nt, Homo sapiens
  source 1..23: mol_type = unassigned RNA
aggttgggatcggttgcaatgct

SEQ ID NO: 2551 - RNA, 23 nt, Homo sapiens
  source 1..23: mol_type = unassigned RNA
agcattgcaaccgatcccaacct

SEQ ID NO: 2552 - RNA, 22 nt, Homo sapiens
  source 1..22: mol_type = unassigned RNA
gggtggggatttgttgcattac

SEQ ID NO: 2553 - RNA, 22 nt, Homo sapiens
  source 1..22: mol_type = unassigned RNA
gtaatgcaacaaatccccaccc

SEQ ID NO: 2554 - RNA, 22 nt, Homo sapiens
  source 1..22: mol_type = unassigned RNA
tattgcacttgtcccggcctgt

SEQ ID NO: 2555 - RNA, 22 nt, Homo sapiens
  source 1..22: mol_type = unassigned RNA
acaggccgggacaagtgcaata

SEQ ID NO: 2556 - RNA, 22 nt, Homo sapiens
  source 1..22: mol_type = unassigned RNA
tattgcactcgtcccggcctcc

SEQ ID NO: 2557 - RNA, 22 nt, Homo sapiens
  source 1..22: mol_type = unassigned RNA
ggaggccgggacgagtgcaata

SEQ ID NO: 2558 - RNA, 22 nt, Homo sapiens
  source 1..22: mol_type = unassigned RNA
agggacgggacgcggtgcagtg

SEQ ID NO: 2559 - RNA, 22 nt, Homo sapiens
  source 1..22: mol_type = unassigned RNA
cactgcaccgcgtcccgtccct

SEQ ID NO: 2560 - RNA, 21 nt, Homo sapiens
  source 1..21: mol_type = unassigned RNA
atcacattgccagggatttcc

SEQ ID NO: 2561 - RNA, 21 nt, Homo sapiens
  source 1..21: mol_type = unassigned RNA
ggaaatccctggcaatgtgat

SEQ ID NO: 2562 - RNA, 22 nt, Homo sapiens
  source 1..22: mol_type = unassigned RNA
ggggttcctggggatgggattt

SEQ ID NO: 2563 - RNA, 22 nt, Homo sapiens
  source 1..22: mol_type = unassigned RNA
aaatcccatccccaggaacccc

SEQ ID NO: 2564 - RNA, 22 nt, Homo sapiens
  source 1..22: mol_type = unassigned RNA
actgcagtgaaggcacttgtag

SEQ ID NO: 2565 - RNA, 22 nt, Homo sapiens
  source 1..22: mol_type = unassigned RNA
ctacaagtgccttcactgcagt

SEQ ID NO: 2566 - RNA, 23 nt, Homo sapiens
  source 1..23: mol_type = unassigned RNA
agctacattgtctgctgggtttc

SEQ ID NO: 2567 - RNA, 23 nt, Homo sapiens
  source 1..23: mol_type = unassigned RNA
gaaacccagcagacaatgtagct

SEQ ID NO: 2568 - RNA, 22 nt, Homo sapiens
  source 1..22: mol_type = unassigned RNA
acctggcatacaatgtagattt

SEQ ID NO: 2569 - RNA, 22 nt, Homo sapiens
  source 1..22: mol_type = unassigned RNA
aaatctacattgtatgccaggt

SEQ ID NO: 2570 - RNA, 22 nt, Homo sapiens
  source 1..22: mol_type = unassigned RNA
tcgtaccgtgagtaataatgcg

SEQ ID NO: 2571 - RNA, 22 nt, Homo sapiens
  source 1..22: mol_type = unassigned RNA
cgcattattactcacggtacga

SEQ ID NO: 2572 - RNA, 21 nt, Homo sapiens
  source 1..21: mol_type = unassigned RNA
cattattacttttggtacgcg

SEQ ID NO: 2573 - RNA, 21 nt, Homo sapiens
  source 1..21: mol_type = unassigned RNA
cgcgtaccaaaagtaataatg

SEQ ID NO: 2574 - RNA, 23 nt, Homo sapiens
  source 1..23: mol_type = unassigned RNA
tactccagagggcgtcactcatg

SEQ ID NO: 2575 - RNA, 23 nt, Homo sapiens
  source 1..23: mol_type = unassigned RNA
catgagtgacgccctctggagta

SEQ ID NO: 2576 - RNA, 21 nt, Homo sapiens
  source 1..21: mol_type = unassigned RNA
tcccacgttgtggcccagcag

SEQ ID NO: 2577 - RNA, 21 nt, Homo sapiens
  source 1..21: mol_type = unassigned RNA
ctgctgggccacaacgtggga

SEQ ID NO: 2578 - RNA, 23 nt, Homo sapiens
  source 1..23: mol_type = unassigned RNA
cctcaccaccccttctgcctgca

SEQ ID NO: 2579 - RNA, 23 nt, Homo sapiens
  source 1..23: mol_type = unassigned RNA
tgcaggcagaaggggtggtgagg

SEQ ID NO: 2580 - RNA, 24 nt, Homo sapiens
  source 1..24: mol_type = unassigned RNA
ctgcaggcagaagtggggctgaca

SEQ ID NO: 2581 - RNA, 24 nt, Homo sapiens
  source 1..24: mol_type = unassigned RNA
tgtcagccccacttctgcctgcag

SEQ ID NO: 2582 - RNA, 21 nt, Homo sapiens
  source 1..21: mol_type = unassigned RNA
ccaaaccagtcgtgcctgtgg

SEQ ID NO: 2583 - RNA, 21 nt, Homo sapiens
  source 1..21: mol_type = unassigned RNA
ccacaggcacgactggtttgg

SEQ ID NO: 2584 - RNA, 22 nt, Homo sapiens
  source 1..22: mol_type = unassigned RNA
ctcaaaccggctgtgcctgtgg

SEQ ID NO: 2585 - RNA, 22 nt, Homo sapiens
  source 1..22: mol_type = unassigned RNA
ccacaggcacagccggtttgag

SEQ ID NO: 2586 - RNA, 21 nt, Homo sapiens
  source 1..21: mol_type = unassigned RNA
acaggcacgactggtttggca

SEQ ID NO: 2587 - RNA, 21 nt, Homo sapiens
  source 1..21: mol_type = unassigned RNA
tgccaaaccagtcgtgcctgt

SEQ ID NO: 2588 - RNA, 22 nt, Homo sapiens
  source 1..22: mol_type = unassigned RNA
tccgaactctccattcctctgc

SEQ ID NO: 2589 - RNA, 22 nt, Homo sapiens
  source 1..22: mol_type = unassigned RNA
gcagaggaatggagagttcgga

SEQ ID NO: 2590 - RNA, 20 nt, Homo sapiens
  source 1..20: mol_type = unassigned RNA
tgggaatgggggtaagggcc

SEQ ID NO: 2591 - RNA, 20 nt, Homo sapiens
  source 1..20: mol_type = unassigned RNA
ggcccttacccccattccca

SEQ ID NO: 2592 - RNA, 22 nt, Homo sapiens
  source 1..22: mol_type = unassigned RNA
aggcgatgtggggatgtagaga

SEQ ID NO: 2593 - RNA, 22 nt, Homo sapiens
  source 1..22: mol_type = unassigned RNA
tctctacatccccacatcgcct

SEQ ID NO: 2594 - RNA, 21 nt, Homo sapiens
  source 1..21: mol_type = unassigned RNA
tagtggtcagagggcttatga

SEQ ID NO: 2595 - RNA, 21 nt, Homo sapiens
  source 1..21: mol_type = unassigned RNA
tcataagccctctgaccacta

SEQ ID NO: 2596 - RNA, 22 nt, Homo sapiens
  source 1..22: mol_type = unassigned RNA
tctgacatcagtgattctcctg

SEQ ID NO: 2597 - RNA, 22 nt, Homo sapiens
  source 1..22: mol_type = unassigned RNA
caggagaatcactgatgtcaga

SEQ ID NO: 2598 - RNA, 22 nt, Homo sapiens
  source 1..22: mol_type = unassigned RNA
cgcgcctgcaggaactggtaga

SEQ ID NO: 2599 - RNA, 22 nt, Homo sapiens
  source 1..22: mol_type = unassigned RNA
tctaccagttcctgcaggcgcg

SEQ ID NO: 2600 - RNA, 23 nt, Homo sapiens
  source 1..23: mol_type = unassigned RNA
tgggcaggggcttattgtaggag

SEQ ID NO: 2601 - RNA, 23 nt, Homo sapiens
  source 1..23: mol_type = unassigned RNA
ctcctacaataagcccctgccca

SEQ ID NO: 2602 - RNA, 22 nt, Homo sapiens
  source 1..22: mol_type = unassigned RNA
tgcaggggtcgggtgggccagg

SEQ ID NO: 2603 - RNA, 22 nt, Homo sapiens
  source 1..22: mol_type = unassigned RNA
cctggcccacccgacccctgca

SEQ ID NO: 2604 - RNA, 20 nt, Homo sapiens
  source 1..20: mol_type = unassigned RNA
aggcgcacccgaccacatgc

SEQ ID NO: 2605 - RNA, 20 nt, Homo sapiens
  source 1..20: mol_type = unassigned RNA
gcatgtggtcgggtgcgcct

SEQ ID NO: 2606 - RNA, 22 nt, Homo sapiens
  source 1..22: mol_type = unassigned RNA
atagtccgagtaacgtcggggc

SEQ ID NO: 2607 - RNA, 22 nt, Homo sapiens
  source 1..22: mol_type = unassigned RNA
gccccgacgttactcggactat

SEQ ID NO: 2608 - RNA, 23 nt, Homo sapiens
  source 1..23: mol_type = unassigned RNA
ctgggcccgcggcgggcgtgggg

SEQ ID NO: 2609 - RNA, 23 nt, Homo sapiens
  source 1..23: mol_type = unassigned RNA
ccccacgcccgccgcgggcccag

SEQ ID NO: 2610 - RNA, 21 nt, Homo sapiens
  source 1..21: mol_type = unassigned RNA
tacttggaaaggcatcagttg

SEQ ID NO: 2611 - RNA, 21 nt, Homo sapiens
  source 1..21: mol_type = unassigned RNA
caactgatgcctttccaagta

SEQ ID NO: 2612 - RNA, 22 nt, Homo sapiens
  source 1..22: mol_type = unassigned RNA
tgcaacgaacctgagccactga

SEQ ID NO: 2613 - RNA, 22 nt, Homo sapiens
  source 1..22: mol_type = unassigned RNA
tcagtggctcaggttcgttgca

SEQ ID NO: 2614 - RNA, 22 nt, Homo sapiens
  source 1..22: mol_type = unassigned RNA
tgcaacttacctgagtcattga

SEQ ID NO: 2615 - RNA, 22 nt, Homo sapiens
  source 1..22: mol_type = unassigned RNA
tcaatgactcaggtaagttgca

SEQ ID NO: 2616 - RNA, 21 nt, Homo sapiens
  source 1..21: mol_type = unassigned RNA
cactgtgtcctttctgcgtag

SEQ ID NO: 2617 - RNA, 21 nt, Homo sapiens
  source 1..21: mol_type = unassigned RNA
ctacgcagaaaggacacagtg

SEQ ID NO: 2618 - RNA, 22 nt, Homo sapiens
  source 1..22: mol_type = unassigned RNA
cactggctcctttctgggtaga

SEQ ID NO: 2619 - RNA, 22 nt, Homo sapiens
  source 1..22: mol_type = unassigned RNA
tctacccagaaaggagccagtg

SEQ ID NO: 2620 - RNA, 22 nt, Homo sapiens
  source 1..22: mol_type = unassigned RNA
cactgtttcctttctgagtgga

SEQ ID NO: 2621 - RNA, 22 nt, Homo sapiens
  source 1..22: mol_type = unassigned RNA
tccactcagaaaggaaacagtg

SEQ ID NO: 2622 - RNA, 21 nt, Homo sapiens
  source 1..21: mol_type = unassigned RNA
tattcagaaaggtgccagtca

SEQ ID NO: 2623 - RNA, 21 nt, Homo sapiens
  source 1..21: mol_type = unassigned RNA
tgactggcacctttctgaata

SEQ ID NO: 2624 - RNA, 20 nt, Homo sapiens
  source 1..20: mol_type = unassigned RNA
attcctagaaattgttcata

SEQ ID NO: 2625 - RNA, 20 nt, Homo sapiens
  source 1..20: mol_type = unassigned RNA
tatgaacaatttctaggaat

SEQ ID NO: 2626 - RNA, 22 nt, Homo sapiens
  source 1..22: mol_type = unassigned RNA
taatactgtctggtaaaaccgt

SEQ ID NO: 2627 - RNA, 22 nt, Homo sapiens
  source 1..22: mol_type = unassigned RNA
acggttttaccagacagtatta

SEQ ID NO: 2628 - RNA, 22 nt, Homo sapiens
  source 1..22: mol_type = unassigned RNA
tgaaacatacacgggaaacctc

SEQ ID NO: 2629 - RNA, 22 nt, Homo sapiens
  source 1..22: mol_type = unassigned RNA
gaggtttcccgtgtatgtttca

SEQ ID NO: 2630 - RNA, 22 nt, Homo sapiens
  source 1..22: mol_type = unassigned RNA
ctatacaacctactgccttccc

SEQ ID NO: 2631 - RNA, 22 nt, Homo sapiens
  source 1..22: mol_type = unassigned RNA
gggaaggcagtaggttgtatag

SEQ ID NO: 2632 - RNA, 22 nt, Homo sapiens
  source 1..22: mol_type = unassigned RNA
tgaggtagtaggttgtgtggtt

SEQ ID NO: 2633 - RNA, 22 nt, Homo sapiens
  source 1..22: mol_type = unassigned RNA
aaccacacaacctactacctca

SEQ ID NO: 2634 - RNA, 22 nt, Homo sapiens
  source 1..22: mol_type = unassigned RNA
taacactgtctggtaacgatgt

SEQ ID NO: 2635 - RNA, 22 nt, Homo sapiens
  source 1..22: mol_type = unassigned RNA
acatcgttaccagacagtgtta

SEQ ID NO: 2636 - RNA, 22 nt, Homo sapiens
  source 1..22: mol_type = unassigned RNA
catcttaccggacagtgctgga

SEQ ID NO: 2637 - RNA, 22 nt, Homo sapiens
  source 1..22: mol_type = unassigned RNA
tccagcactgtccggtaagatg

SEQ ID NO: 2638 - RNA, 22 nt, Homo sapiens
  source 1..22: mol_type = unassigned RNA
taatactgcctggtaatgatga

SEQ ID NO: 2639 - RNA, 22 nt, Homo sapiens
  source 1..22: mol_type = unassigned RNA
tcatcattaccaggcagtatta

SEQ ID NO: 2640 - RNA, 22 nt, Homo sapiens
  source 1..22: mol_type = unassigned RNA
catcttactgggcagcattgga

SEQ ID NO: 2641 - RNA, 22 nt, Homo sapiens
  source 1..22: mol_type = unassigned RNA
tccaatgctgcccagtaagatg

SEQ ID NO: 2642 - RNA, 23 nt, Homo sapiens
  source 1..23: mol_type = unassigned RNA
taatactgccgggtaatgatgga

SEQ ID NO: 2643 - RNA, 23 nt, Homo sapiens
  source 1..23: mol_type = unassigned RNA
tccatcattacccggcagtatta

SEQ ID NO: 2644 - RNA, 22 nt, Homo sapiens
  source 1..22: mol_type = unassigned RNA
cgtcttacccagcagtgtttgg

SEQ ID NO: 2645 - RNA, 22 nt, Homo sapiens
  source 1..22: mol_type = unassigned RNA
ccaaacactgctgggtaagacg

SEQ ID NO: 2646 - RNA, 22 nt, Homo sapiens
  source 1..22: mol_type = unassigned RNA
tccagcatcagtgattttgttg

SEQ ID NO: 2647 - RNA, 22 nt, Homo sapiens
  source 1..22: mol_type = unassigned RNA
caacaaaatcactgatgctgga

SEQ ID NO: 2648 - RNA, 20 nt, Homo sapiens
  source 1..20: mol_type = unassigned RNA
tacagtatagatgatgtact

SEQ ID NO: 2649 - RNA, 20 nt, Homo sapiens
  source 1..20: mol_type = unassigned RNA
agtacatcatctatactgta

SEQ ID NO: 2650 - RNA, 22 nt, Homo sapiens
  source 1..22: mol_type = unassigned RNA
ggatatcatcatatactgtaag

SEQ ID NO: 2651 - RNA, 22 nt, Homo sapiens
  source 1..22: mol_type = unassigned RNA
cttacagtatatgatgatatcc

SEQ ID NO: 2652 - RNA, 21 nt, Homo sapiens
  source 1..21: mol_type = unassigned RNA
cggggcagctcagtacaggat

SEQ ID NO: 2653 - RNA, 21 nt, Homo sapiens
  source 1..21: mol_type = unassigned RNA
atcctgtactgagctgccccg

SEQ ID NO: 2654 - RNA, 21 nt, Homo sapiens
  source 1..21: mol_type = unassigned RNA
tccttctgctccgtcccccag

SEQ ID NO: 2655 - RNA, 21 nt, Homo sapiens
  source 1..21: mol_type = unassigned RNA
ctgggggacggagcagaagga

SEQ ID NO: 2656 - RNA, 21 nt, Homo sapiens
  source 1..21: mol_type = unassigned RNA
cgggggcggggccgaagcgcg

SEQ ID NO: 2657 - RNA, 21 nt, Homo sapiens
  source 1..21: mol_type = unassigned RNA
cgcgcttcggccccgcccccg

SEQ ID NO: 2658 - RNA, 21 nt, Homo sapiens
  source 1..21: mol_type = unassigned RNA
tcctgcgcgtcccagatgccc

SEQ ID NO: 2659 - RNA, 21 nt, Homo sapiens
  source 1..21: mol_type = unassigned RNA
gggcatctgggacgcgcagga

SEQ ID NO: 2660 - RNA, 22 nt, Homo sapiens
  source 1..22: mol_type = unassigned RNA
catcagaattcatggaggctag

SEQ ID NO: 2661 - RNA, 22 nt, Homo sapiens
  source 1..22: mol_type = unassigned RNA
ctagcctccatgaattctgatg

SEQ ID NO: 2662 - RNA, 22 nt, Homo sapiens
  source 1..22: mol_type = unassigned RNA
agcttccatgactcctgatgga

SEQ ID NO: 2663 - RNA, 22 nt, Homo sapiens
  source 1..22: mol_type = unassigned RNA
tccatcaggagtcatggaagct

SEQ ID NO: 2664 - RNA, 21 nt, Homo sapiens
  source 1..21: mol_type = unassigned RNA
tgacagcgccctgcctggctc

SEQ ID NO: 2665 - RNA, 21 nt, Homo sapiens
  source 1..21: mol_type = unassigned RNA
gagccaggcagggcgctgtca

SEQ ID NO: 2666 - RNA, 24 nt, Homo sapiens
  source 1..24: mol_type = unassigned RNA
agcgcgggctgagcgctgccagtc

SEQ ID NO: 2667 - RNA, 24 nt, Homo sapiens
  source 1..24: mol_type = unassigned RNA
gactggcagcgctcagcccgcgct

SEQ ID NO: 2668 - RNA, 22 nt, Homo sapiens
  source 1..22: mol_type = unassigned RNA
ctgggaggtgtgatatcgtggt

SEQ ID NO: 2669 - RNA, 22 nt, Homo sapiens
  source 1..22: mol_type = unassigned RNA
accacgatatcacacctcccag

SEQ ID NO: 2670 - RNA, 22 nt, Homo sapiens
  source 1..22: mol_type = unassigned RNA
tgtgatatcatggttcctggga

SEQ ID NO: 2671 - RNA, 22 nt, Homo sapiens
  source 1..22: mol_type = unassigned RNA
tcccaggaaccatgatatcaca

SEQ ID NO: 2672 - RNA, 22 nt, Homo sapiens
  source 1..22: mol_type = unassigned RNA
aggtgctccaggctggctcaca

SEQ ID NO: 2673 - RNA, 22 nt, Homo sapiens
  source 1..22: mol_type = unassigned RNA
tgtgagccagcctggagcacct

SEQ ID NO: 2674 - RNA, 22 nt, Homo sapiens
  source 1..22: mol_type = unassigned RNA
gagcaatgtaggtagactgttt

SEQ ID NO: 2675 - RNA, 22 nt, Homo sapiens
  source 1..22: mol_type = unassigned RNA
aaacagtctacctacattgctc

SEQ ID NO: 2676 - RNA, 22 nt, Homo sapiens
  source 1..22: mol_type = unassigned RNA
tgtcctctagggcctgcagtct

SEQ ID NO: 2677 - RNA, 22 nt, Homo sapiens
  source 1..22: mol_type = unassigned RNA
agactgcaggccctagaggaca

SEQ ID NO: 2678 - RNA, 20 nt, Homo sapiens
  source 1..20: mol_type = unassigned RNA
aaaggcataaaaccaagaca

SEQ ID NO: 2679 - RNA, 20 nt, Homo sapiens
  source 1..20: mol_type = unassigned RNA
tgtcttggttttatgccttt

SEQ ID NO: 2680 - RNA, 21 nt, Homo sapiens
  source 1..21: mol_type = unassigned RNA
taacgcataatatggacatgt

SEQ ID NO: 2681 - RNA, 21 nt, Homo sapiens
  source 1..21: mol_type = unassigned RNA
acatgtccatattatgcgtta

SEQ ID NO: 2682 - RNA, 22 nt, Homo sapiens
  source 1..22: mol_type = unassigned RNA
ttgaggaaaagatggtcttatt

SEQ ID NO: 2683 - RNA, 22 nt, Homo sapiens
  source 1..22: mol_type = unassigned RNA
aataagaccatcttttcctcaa

SEQ ID NO: 2684 - RNA, 26 nt, Homo sapiens
  source 1..26: mol_type = unassigned RNA
aagaggaagaaatggctggttctcag

SEQ ID NO: 2685 - RNA, 26 nt, Homo sapiens
  source 1..26: mol_type = unassigned RNA
ctgagaaccagccatttcttcctctt

SEQ ID NO: 2686 - RNA, 20 nt, Homo sapiens
  source 1..20: mol_type = unassigned RNA
gctcggactgagcaggtggg

SEQ ID NO: 2687 - RNA, 20 nt, Homo sapiens
  source 1..20: mol_type = unassigned RNA
cccacctgctcagtccgagc

SEQ ID NO: 2688 - RNA, 21 nt, Homo sapiens
  source 1..21: mol_type = unassigned RNA
acagggccgcagatggagact

SEQ ID NO: 2689 - RNA, 21 nt, Homo sapiens
  source 1..21: mol_type = unassigned RNA
agtctccatctgcggccctgt

SEQ ID NO: 2690 - RNA, 21 nt, Homo sapiens
  source 1..21: mol_type = unassigned RNA
gcagagaacaaaggactcagt

SEQ ID NO: 2691 - RNA, 21 nt, Homo sapiens
  source 1..21: mol_type = unassigned RNA
actgagtcctttgttctctgc

SEQ ID NO: 2692 - RNA, 22 nt, Homo sapiens
  source 1..22: mol_type = unassigned RNA
actgattatcttaactctctga

SEQ ID NO: 2693 - RNA, 22 nt, Homo sapiens
  source 1..22: mol_type = unassigned RNA
tcagagagttaagataatcagt

SEQ ID NO: 2694 - RNA, 23 nt, Homo sapiens
  source 1..23: mol_type = unassigned RNA
tctctgagtaccatatgccttgt

SEQ ID NO: 2695 - RNA, 23 nt, Homo sapiens
  source 1..23: mol_type = unassigned RNA
acaaggcatatggtactcagaga

SEQ ID NO: 2696 - RNA, 22 nt, Homo sapiens
  source 1..22: mol_type = unassigned RNA
aactagtaatgttggattaggg

SEQ ID NO: 2697 - RNA, 22 nt, Homo sapiens
  source 1..22: mol_type = unassigned RNA
ccctaatccaacattactagtt

SEQ ID NO: 2698 - RNA, 22 nt, Homo sapiens
  source 1..22: mol_type = unassigned RNA
atatgtatatgtgactgctact

SEQ ID NO: 2699 - RNA, 22 nt, Homo sapiens
  source 1..22: mol_type = unassigned RNA
agtagcagtcacatatacatat

SEQ ID NO: 2700 - RNA, 21 nt, Homo sapiens
  source 1..21: mol_type = unassigned RNA
tggccaaaaagcaggcagaga

SEQ ID NO: 2701 - RNA, 21 nt, Homo sapiens
  source 1..21: mol_type = unassigned RNA
tctctgcctgctttttggcca

SEQ ID NO: 2702 - RNA, 22 nt, Homo sapiens
  source 1..22: mol_type = unassigned RNA
ggaggaaccttggagcttcggc

SEQ ID NO: 2703 - RNA, 22 nt, Homo sapiens
  source 1..22: mol_type = unassigned RNA
gccgaagctccaaggttcctcc

SEQ ID NO: 2704 - RNA, 23 nt, Homo sapiens
  source 1..23: mol_type = unassigned RNA
gaggctgatgtgagtagaccact

SEQ ID NO: 2705 - RNA, 23 nt, Homo sapiens
  source 1..23: mol_type = unassigned RNA
agtggtctactcacatcagcctc

SEQ ID NO: 2706 - RNA, 21 nt, Homo sapiens
  source 1..21: mol_type = unassigned RNA
ctgtcctaaggttgttgagtt

SEQ ID NO: 2707 - RNA, 21 nt, Homo sapiens
  source 1..21: mol_type = unassigned RNA
aactcaacaaccttaggacag

SEQ ID NO: 2708 - RNA, 21 nt, Homo sapiens
  source 1..21: mol_type = unassigned RNA
tcttcaacctcaggacttgca

SEQ ID NO: 2709 - RNA, 21 nt, Homo sapiens
  source 1..21: mol_type = unassigned RNA
tgcaagtcctgaggttgaaga

SEQ ID NO: 2710 - RNA, 22 nt, Homo sapiens
  source 1..22: mol_type = unassigned RNA
tgtgatatcatggttcctggga

SEQ ID NO: 2711 - RNA, 22 nt, Homo sapiens
  source 1..22: mol_type = unassigned RNA
tcccaggaaccatgatatcaca

SEQ ID NO: 2712 - RNA, 22 nt, Homo sapiens
  source 1..22: mol_type = unassigned RNA
ctgggaggtgtgatattgtggt

SEQ ID NO: 2713 - RNA, 22 nt, Homo sapiens
  source 1..22: mol_type = unassigned RNA
accacaatatcacacctcccag

SEQ ID NO: 2714 - RNA, 22 nt, Homo sapiens
  source 1..22: mol_type = unassigned RNA
caggtagatatttgataggcat

SEQ ID NO: 2715 - RNA, 22 nt, Homo sapiens
  source 1..22: mol_type = unassigned RNA
atgcctatcaaatatctacctg

SEQ ID NO: 2716 - RNA, 21 nt, Homo sapiens
  source 1..21: mol_type = unassigned RNA
gcctatcacatatctgcctgt

SEQ ID NO: 2717 - RNA, 21 nt, Homo sapiens
  source 1..21: mol_type = unassigned RNA
acaggcagatatgtgataggc

SEQ ID NO: 2718 - RNA, 20 nt, Homo sapiens
  source 1..20: mol_type = unassigned RNA
gggctggggcgcggggaggt

SEQ ID NO: 2719 - RNA, 20 nt, Homo sapiens
  source 1..20: mol_type = unassigned RNA
acctccccgcgccccagccc

SEQ ID NO: 2720 - RNA, 18 nt, Homo sapiens
  source 1..18: mol_type = unassigned RNA
tgcttcctttcagagggt

SEQ ID NO: 2721 - RNA, 18 nt, Homo sapiens
  source 1..18: mol_type = unassigned RNA
accctctgaaaggaagca

SEQ ID NO: 2722 - RNA, 21 nt, Homo sapiens
  source 1..21: mol_type = unassigned RNA
tgagttggccatctgagtgag

SEQ ID NO: 2723 - RNA, 21 nt, Homo sapiens
  source 1..21: mol_type = unassigned RNA
ctcactcagatggccaactca

SEQ ID NO: 2724 - RNA, 23 nt, Homo sapiens
  source 1..23: mol_type = unassigned RNA
aacattcattgttgtcggtgggt

SEQ ID NO: 2725 - RNA, 23 nt, Homo sapiens
  source 1..23: mol_type = unassigned RNA
acccaccgacaacaatgaatgtt

SEQ ID NO: 2726 - RNA, 21 nt, Homo sapiens
  source 1..21: mol_type = unassigned RNA
tcacagtgaaccggtctcttt

SEQ ID NO: 2727 - RNA, 21 nt, Homo sapiens
  source 1..21: mol_type = unassigned RNA
aaagagaccggttcactgtga

SEQ ID NO: 2728 - RNA, 22 nt, Homo sapiens
  source 1..22: mol_type = unassigned RNA
caacaaatcacagtctgccata

SEQ ID NO: 2729 - RNA, 22 nt, Homo sapiens
  source 1..22: mol_type = unassigned RNA
tatggcagactgtgatttgttg

SEQ ID NO: 2730 - RNA, 21 nt, Homo sapiens
  source 1..21: mol_type = unassigned RNA
ctcactgaacaatgaatgcaa

SEQ ID NO: 2731 - RNA, 21 nt, Homo sapiens
  source 1..21: mol_type = unassigned RNA
ttgcattcattgttcagtgag

SEQ ID NO: 2732 - RNA, 23 nt, Homo sapiens
  source 1..23: mol_type = unassigned RNA
aacattcattgctgtcggtgggt

SEQ ID NO: 2733 - RNA, 23 nt, Homo sapiens
  source 1..23: mol_type = unassigned RNA
acccaccgacagcaatgaatgtt

SEQ ID NO: 2734 - RNA, 22 nt, Homo sapiens
  source 1..22: mol_type = unassigned RNA
accatcgaccgttgattgtacc

SEQ ID NO: 2735 - RNA, 22 nt, Homo sapiens
  source 1..22: mol_type = unassigned RNA
ggtacaatcaacggtcgatggt

SEQ ID NO: 2736 - RNA, 23 nt, Homo sapiens
  source 1..23: mol_type = unassigned RNA
aacattcaacgctgtcggtgagt

SEQ ID NO: 2737 - RNA, 23 nt, Homo sapiens
  source 1..23: mol_type = unassigned RNA
actcaccgacagcgttgaatgtt

SEQ ID NO: 2738 - RNA, 22 nt, Homo sapiens
  source 1..22: mol_type = unassigned RNA
accactgaccgttgactgtacc

SEQ ID NO: 2739 - RNA, 22 nt, Homo sapiens
  source 1..22: mol_type = unassigned RNA
ggtacagtcaacggtcagtggt

SEQ ID NO: 2740 - RNA, 22 nt, Homo sapiens
  source 1..22: mol_type = unassigned RNA
ctgttgccactaacctcaacct

SEQ ID NO: 2741 - RNA, 22 nt, Homo sapiens
  source 1..22: mol_type = unassigned RNA
aggttgaggttagtggcaacag

SEQ ID NO: 2742 - RNA, 22 nt, Homo sapiens
  source 1..22: mol_type = unassigned RNA
ataagacgagcaaaaagcttgt

SEQ ID NO: 2743 - RNA, 22 nt, Homo sapiens
  source 1..22: mol_type = unassigned RNA
acaagctttttgctcgtcttat

SEQ ID NO: 2744 - RNA, 22 nt, Homo sapiens
  source 1..22: mol_type = unassigned RNA
ataagacgaacaaaaggtttgt

SEQ ID NO: 2745 - RNA, 22 nt, Homo sapiens
  source 1..22: mol_type = unassigned RNA
acaaaccttttgttcgtcttat

SEQ ID NO: 2746 - RNA, 21 nt, Homo sapiens
  source 1..21: mol_type = unassigned RNA
agggagggacgggggctgtgc

SEQ ID NO: 2747 - RNA, 21 nt, Homo sapiens
  source 1..21: mol_type = unassigned RNA
gcacagcccccgtccctccct

SEQ ID NO: 2748 - RNA, 23 nt, Homo sapiens
  source 1..23: mol_type = unassigned RNA
tctggctccgtgtcttcactccc

SEQ ID NO: 2749 - RNA, 23 nt, Homo sapiens
  source 1..23: mol_type = unassigned RNA
gggagtgaagacacggagccaga

SEQ ID NO: 2750 - RNA, 22 nt, Homo sapiens
  source 1..22: mol_type = unassigned RNA
tggaatgtaaagaagtatgtat

SEQ ID NO: 2751 - RNA, 22 nt, Homo sapiens
  source 1..22: mol_type = unassigned RNA
atacatacttctttacattcca

SEQ ID NO: 2752 - RNA, 22 nt, Homo sapiens
  source 1..22: mol_type = unassigned RNA
aacatcacagcaagtctgtgct

SEQ ID NO: 2753 - RNA, 22 nt, Homo sapiens
  source 1..22: mol_type = unassigned RNA
agcacagacttgctgtgatgtt

SEQ ID NO: 2754 - RNA, 21 nt, Homo sapiens
  source 1..21: mol_type = unassigned RNA
ttaagacttgcagtgatgttt

SEQ ID NO: 2755 - RNA, 21 nt, Homo sapiens
  source 1..21: mol_type = unassigned RNA
aaacatcactgcaagtcttaa

SEQ ID NO: 2756 - RNA, 22 nt, Homo sapiens
  source 1..22: mol_type = unassigned RNA
aacatcactgcaagtcttaaca

SEQ ID NO: 2757 - RNA, 22 nt, Homo sapiens
  source 1..22: mol_type = unassigned RNA
tgttaagacttgcagtgatgtt

SEQ ID NO: 2758 - RNA, 21 nt, Homo sapiens
  source 1..21: mol_type = unassigned RNA
acagacttgctgtgatgttca

SEQ ID NO: 2759 - RNA, 21 nt, Homo sapiens
  source 1..21: mol_type = unassigned RNA
tgaacatcacagcaagtctgt

SEQ ID NO: 2760 - RNA, 22 nt, Homo sapiens
  source 1..22: mol_type = unassigned RNA
aaaccgttaccattactgagtt

SEQ ID NO: 2761 - RNA, 22 nt, Homo sapiens
  source 1..22: mol_type = unassigned RNA
aactcagtaatggtaacggttt

SEQ ID NO: 2762 - RNA, 22 nt, Homo sapiens
  source 1..22: mol_type = unassigned RNA
tagcaagagaaccattaccatt

SEQ ID NO: 2763 - RNA, 22 nt, Homo sapiens
  source 1..22: mol_type = unassigned RNA
aatggtaatggttctcttgcta

SEQ ID NO: 2764 - RNA, 23 nt, Homo sapiens
  source 1..23: mol_type = unassigned RNA
tgaggggcagagagcgagacttt

SEQ ID NO: 2765 - RNA, 23 nt, Homo sapiens
  source 1..23: mol_type = unassigned RNA
aaagtctcgctctctgcccctca

SEQ ID NO: 2766 - RNA, 22 nt, Homo sapiens
  source 1..22: mol_type = unassigned RNA
caagctcgcttctatgggtctg

SEQ ID NO: 2767 - RNA, 22 nt, Homo sapiens
  source 1..22: mol_type = unassigned RNA
cagacccatagaagcgagcttg

SEQ ID NO: 2768 - RNA, 22 nt, Homo sapiens
  source 1..22: mol_type = unassigned RNA
aacccgtagatccgatcttgtg

SEQ ID NO: 2769 - RNA, 22 nt, Homo sapiens
  source 1..22: mol_type = unassigned RNA
cacaagatcggatctacgggtt

SEQ ID NO: 2770 - RNA, 22 nt, Homo sapiens
  source 1..22: mol_type = unassigned RNA
caagctcgtgtctgtgggtccg

SEQ ID NO: 2771 - RNA, 22 nt, Homo sapiens
  source 1..22: mol_type = unassigned RNA
cggacccacagacacgagcttg

SEQ ID NO: 2772 - RNA, 22 nt, Homo sapiens
  source 1..22: mol_type = unassigned RNA
cacccgtagaaccgaccttgcg

SEQ ID NO: 2773 - RNA, 22 nt, Homo sapiens
  source 1..22: mol_type = unassigned RNA
cgcaaggtcggttctacgggtg

SEQ ID NO: 2774 - RNA, 23 nt, Homo sapiens
  source 1..23: mol_type = unassigned RNA
tggagacgcggccctgttggagt

SEQ ID NO: 2775 - RNA, 23 nt, Homo sapiens
  source 1..23: mol_type = unassigned RNA
actccaacagggccgcgtctcca

SEQ ID NO: 2776 - RNA, 23 nt, Homo sapiens
  source 1..23: mol_type = unassigned RNA
tctacagtgcacgtgtctccagt

SEQ ID NO: 2777 - RNA, 23 nt, Homo sapiens
  source 1..23: mol_type = unassigned RNA
actggagacacgtgcactgtaga

SEQ ID NO: 2778 - RNA, 22 nt, Homo sapiens
  source 1..22: mol_type = unassigned RNA
caaattcgtatctaggggaata

SEQ ID NO: 2779 - RNA, 22 nt, Homo sapiens
  source 1..22: mol_type = unassigned RNA
tattcccctagatacgaatttg

SEQ ID NO: 2780 - RNA, 23 nt, Homo sapiens
  source 1..23: mol_type = unassigned RNA
taccctgtagatccgaatttgtg

SEQ ID NO: 2781 - RNA, 23 nt, Homo sapiens
  source 1..23: mol_type = unassigned RNA
cacaaattcggatctacagggta

SEQ ID NO: 2782 - RNA, 23 nt, Homo sapiens
  source 1..23: mol_type = unassigned RNA
cctgcagcgacttgatggcttcc

SEQ ID NO: 2783 - RNA, 23 nt, Homo sapiens
  source 1..23: mol_type = unassigned RNA
ggaagccatcaagtcgctgcagg

SEQ ID NO: 2784 - RNA, 22 nt, Homo sapiens
  source 1..22: mol_type = unassigned RNA
tcagtgcactacagaactttgt

SEQ ID NO: 2785 - RNA, 22 nt, Homo sapiens
  source 1..22: mol_type = unassigned RNA
acaaagttctgtagtgcactga

SEQ ID NO: 2786 - RNA, 22 nt, Homo sapiens
  source 1..22: mol_type = unassigned RNA
aaagttctgagacactccgact

SEQ ID NO: 2787 - RNA, 22 nt, Homo sapiens
  source 1..22: mol_type = unassigned RNA
agtcggagtgtctcagaacttt

SEQ ID NO: 2788 - RNA, 22 nt, Homo sapiens
  source 1..22: mol_type = unassigned RNA
cctgttctccattacttggctc

SEQ ID NO: 2789 - RNA, 22 nt, Homo sapiens
  source 1..22: mol_type = unassigned RNA
gagccaagtaatggagaacagg

SEQ ID NO: 2790 - RNA, 21 nt, Homo sapiens
  source 1..21: mol_type = unassigned RNA
ttcaagtaattcaggataggt

SEQ ID NO: 2791 - RNA, 21 nt, Homo sapiens
  source 1..21: mol_type = unassigned RNA
acctatcctgaattacttgaa

SEQ ID NO: 2792 - RNA, 22 nt, Homo sapiens
  source 1..22: mol_type = unassigned RNA
gccctgaacgaggggtctggag

SEQ ID NO: 2793 - RNA, 22 nt, Homo sapiens
  source 1..22: mol_type = unassigned RNA
ctccagacccctcgttcagggc

SEQ ID NO: 2794 - RNA, 22 nt, Homo sapiens
  source 1..22: mol_type = unassigned RNA
gctgactcctagtccagggctc

SEQ ID NO: 2795 - RNA, 22 nt, Homo sapiens
  source 1..22: mol_type = unassigned RNA
gagccctggactaggagtcagc

SEQ ID NO: 2796 - RNA, 22 nt, Homo sapiens
  source 1..22: mol_type = unassigned RNA
atcacacaaaggcaacttttgt

SEQ ID NO: 2797 - RNA, 22 nt, Homo sapiens
  source 1..22: mol_type = unassigned RNA
acaaaagttgcctttgtgtgat

SEQ ID NO: 2798 - RNA, 22 nt, Homo sapiens
  source 1..22: mol_type = unassigned RNA
agaggttgcccttggtgaattc

SEQ ID NO: 2799 - RNA, 22 nt, Homo sapiens
  source 1..22: mol_type = unassigned RNA
gaattcaccaagggcaacctct

SEQ ID NO: 2800 - RNA, 21 nt, Homo sapiens
  source 1..21: mol_type = unassigned RNA
ggtagattttccttctatggt

SEQ ID NO: 2801 - RNA, 21 nt, Homo sapiens
  source 1..21: mol_type = unassigned RNA
accatagaaggaaaatctacc

SEQ ID NO: 2802 - RNA, 21 nt, Homo sapiens
  source 1..21: mol_type = unassigned RNA
atcatagaggaaaatccacgt

SEQ ID NO: 2803 - RNA, 21 nt, Homo sapiens
  source 1..21: mol_type = unassigned RNA
acgtggattttcctctatgat

SEQ ID NO: 2804 - RNA, 22 nt, Homo sapiens
  source 1..22: mol_type = unassigned RNA
gtagattctccttctatgagta

SEQ ID NO: 2805 - RNA, 22 nt, Homo sapiens
  source 1..22: mol_type = unassigned RNA
tactcatagaaggagaatctac

SEQ ID NO: 2806 - RNA, 22 nt, Homo sapiens
  source 1..22: mol_type = unassigned RNA
ctggtacaggcctgggggacag

SEQ ID NO: 2807 - RNA, 22 nt, Homo sapiens
  source 1..22: mol_type = unassigned RNA
ctgtcccccaggcctgtaccag

SEQ ID NO: 2808 - RNA, 22 nt, Homo sapiens
  source 1..22: mol_type = unassigned RNA
tctcccaacccttgtaccagtg

SEQ ID NO: 2809 - RNA, 22 nt, Homo sapiens
  source 1..22: mol_type = unassigned RNA
cactggtacaagggttgggaga

SEQ ID NO: 2810 - RNA, 22 nt, Homo sapiens
  source 1..22: mol_type = unassigned RNA
acgggttaggctcttgggagct

SEQ ID NO: 2811 - RNA, 22 nt, Homo sapiens
  source 1..22: mol_type = unassigned RNA
agctcccaagagcctaacccgt

SEQ ID NO: 2812 - RNA, 22 nt, Homo sapiens
  source 1..22: mol_type = unassigned RNA
tcacaagtcaggctcttgggac

SEQ ID NO: 2813 - RNA, 22 nt, Homo sapiens
  source 1..22: mol_type = unassigned RNA
gtcccaagagcctgacttgtga

SEQ ID NO: 2814 - RNA, 22 nt, Homo sapiens
  source 1..22: mol_type = unassigned RNA
aacccgtagatccgaacttgtg

SEQ ID NO: 2815 - RNA, 22 nt, Homo sapiens
  source 1..22: mol_type = unassigned RNA
cacaagttcggatctacgggtt

SEQ ID NO: 2816 - RNA, 21 nt, Homo sapiens
  source 1..21: mol_type = unassigned RNA
ctgtacaggccactgccttgc

SEQ ID NO: 2817 - RNA, 21 nt, Homo sapiens
  source 1..21: mol_type = unassigned RNA
gcaaggcagtggcctgtacag

SEQ ID NO: 2818 - RNA, 22 nt, Homo sapiens
  source 1..22: mol_type = unassigned RNA
tgaggtagtagtttgtacagtt

SEQ ID NO: 2819 - RNA, 22 nt, Homo sapiens
  source 1..22: mol_type = unassigned RNA
aactgtacaaactactacctca

SEQ ID NO: 2820 - RNA, 22 nt, Homo sapiens
  source 1..22: mol_type = unassigned RNA
tccctgagaccctaacttgtga

SEQ ID NO: 2821 - RNA, 22 nt, Homo sapiens
  source 1..22: mol_type = unassigned RNA
tcacaagttagggtctcaggga

SEQ ID NO: 2822 - RNA, 22 nt, Homo sapiens
  source 1..22: mol_type = unassigned RNA
caagcttgtatctataggtatg

SEQ ID NO: 2823 - RNA, 22 nt, Homo sapiens
  source 1..22: mol_type = unassigned RNA
catacctatagatacaagcttg

SEQ ID NO: 2824 - RNA, 23 nt, Homo sapiens
  source 1..23: mol_type = unassigned RNA
aaagtgctgcgacatttgagcgt

SEQ ID NO: 2825 - RNA, 23 nt, Homo sapiens
  source 1..23: mol_type = unassigned RNA
acgctcaaatgtcgcagcacttt

SEQ ID NO: 2826 - RNA, 22 nt, Homo sapiens
  source 1..22: mol_type = unassigned RNA
tttagagacggggtcttgctct

SEQ ID NO: 2827 - RNA, 22 nt, Homo sapiens
  source 1..22: mol_type = unassigned RNA
agagcaagaccccgtctctaaa

SEQ ID NO: 2828 - RNA, 24 nt, Homo sapiens
  source 1..24: mol_type = unassigned RNA
tggccctgactgaagaccagcagt

SEQ ID NO: 2829 - RNA, 24 nt, Homo sapiens
  source 1..24: mol_type = unassigned RNA
actgctggtcttcagtcagggcca

SEQ ID NO: 2830 - RNA, 21 nt, Homo sapiens
  source 1..21: mol_type = unassigned RNA
gcgacccatacttggtttcag

SEQ ID NO: 2831 - RNA, 21 nt, Homo sapiens
  source 1..21: mol_type = unassigned RNA
ctgaaaccaagtatgggtcgc

SEQ ID NO: 2832 - RNA, 22 nt, Homo sapiens
  source 1..22: mol_type = unassigned RNA
gaaatcaagcgtgggtgagacc

SEQ ID NO: 2833 - RNA, 22 nt, Homo sapiens
  source 1..22: mol_type = unassigned RNA
ggtctcacccacgcttgatttc

SEQ ID NO: 2834 - RNA, 21 nt, Homo sapiens
  source 1..21: mol_type = unassigned RNA
ccctgggcctctgctccccag

SEQ ID NO: 2835 - RNA, 21 nt, Homo sapiens
  source 1..21: mol_type = unassigned RNA
ctggggagcagaggcccaggg

SEQ ID NO: 2836 - RNA, 24 nt, Homo sapiens
  source 1..24: mol_type = unassigned RNA
tggggagctgaggctctgggggtg

SEQ ID NO: 2837 - RNA, 24 nt, Homo sapiens
  source 1..24: mol_type = unassigned RNA
cacccccagagcctcagctcccca

SEQ ID NO: 2838 - RNA, 20 nt, Homo sapiens
  source 1..20: mol_type = unassigned RNA
ggggagctgtggaagcagta

SEQ ID NO: 2839 - RNA, 20 nt, Homo sapiens
  source 1..20: mol_type = unassigned RNA
tactgcttccacagctcccc

SEQ ID NO: 2840 - RNA, 25 nt, Homo sapiens
  source 1..25: mol_type = unassigned RNA
ctagtgagggacagaaccaggattc

SEQ ID NO: 2841 - RNA, 25 nt, Homo sapiens
  source 1..25: mol_type = unassigned RNA
gaatcctggttctgtccctcactag

SEQ ID NO: 2842 - RNA, 20 nt, Homo sapiens
  source 1..20: mol_type = unassigned RNA
agagtcttgtgatgtcttgc

SEQ ID NO: 2843 - RNA, 20 nt, Homo sapiens
  source 1..20: mol_type = unassigned RNA
gcaagacatcacaagactct

SEQ ID NO: 2844 - RNA, 23 nt, Homo sapiens
  source 1..23: mol_type = unassigned RNA
gcagcagagaataggactacgtc

SEQ ID NO: 2845 - RNA, 23 nt, Homo sapiens
  source 1..23: mol_type = unassigned RNA
gacgtagtcctattctctgctgc

SEQ ID NO: 2846 - RNA, 23 nt, Homo sapiens
  source 1..23: mol_type = unassigned RNA
tgagcgcctcgacgacagagccg

SEQ ID NO: 2847 - RNA, 23 nt, Homo sapiens
  source 1..23: mol_type = unassigned RNA
cggctctgtcgtcgaggcgctca

SEQ ID NO: 2848 - RNA, 23 nt, Homo sapiens
  source 1..23: mol_type = unassigned RNA
tccctgtcctccaggagctcacg

SEQ ID NO: 2849 - RNA, 23 nt, Homo sapiens
  source 1..23: mol_type = unassigned RNA
cgtgagctcctggaggacaggga

SEQ ID NO: 2850 - RNA, 22 nt, Homo sapiens
  source 1..22: mol_type = unassigned RNA
ctatacggcctcctagctttcc

SEQ ID NO: 2851 - RNA, 22 nt, Homo sapiens
  source 1..22: mol_type = unassigned RNA
ggaaagctaggaggccgtatag

SEQ ID NO: 2852 - RNA, 22 nt, Homo sapiens
  source 1..22: mol_type = unassigned RNA
tgaggtaggaggttgtatagtt

SEQ ID NO: 2853 - RNA, 22 nt, Homo sapiens
  source 1..22: mol_type = unassigned RNA
aactatacaacctcctacctca

SEQ ID NO: 2854 - RNA, 22 nt, Homo sapiens
  source 1..22: mol_type = unassigned RNA
ctgcgcaagctactgccttgct

SEQ ID NO: 2855 - RNA, 22 nt, Homo sapiens
  source 1..22: mol_type = unassigned RNA
agcaaggcagtagcttgcgcag

SEQ ID NO: 2856 - RNA, 22 nt, Homo sapiens
  source 1..22: mol_type = unassigned RNA
tgaggtagtagtttgtgctgtt

SEQ ID NO: 2857 - RNA, 22 nt, Homo sapiens
  source 1..22: mol_type = unassigned RNA
aacagcacaaactactacctca

SEQ ID NO: 2858 - RNA, 22 nt, Homo sapiens
  source 1..22: mol_type = unassigned RNA
tgccctgtggactcagttctgg

SEQ ID NO: 2859 - RNA, 22 nt, Homo sapiens
  source 1..22: mol_type = unassigned RNA
ccagaactgagtccacagggca

SEQ ID NO: 2860 - RNA, 21 nt, Homo sapiens
  source 1..21: mol_type = unassigned RNA
tggttctagacttgccaacta

SEQ ID NO: 2861 - RNA, 21 nt, Homo sapiens
  source 1..21: mol_type = unassigned RNA
tagttggcaagtctagaacca

SEQ ID NO: 2862 - RNA, 23 nt, Homo sapiens
  source 1..23: mol_type = unassigned RNA
tgtctgcccgcatgcctgcctct

SEQ ID NO: 2863 - RNA, 23 nt, Homo sapiens
  source 1..23: mol_type = unassigned RNA
agaggcaggcatgcgggcagaca

SEQ ID NO: 2864 - RNA, 22 nt, Homo sapiens
  source 1..22: mol_type = unassigned RNA
aaaagtaattgcggtctttggt

SEQ ID NO: 2865 - RNA, 22 nt, Homo sapiens
  source 1..22: mol_type = unassigned RNA
accaaagaccgcaattactttt

SEQ ID NO: 2866 - RNA, 18 nt, Homo sapiens
  source 1..18: mol_type = unassigned RNA
tcgaggagctcacagtct

SEQ ID NO: 2867 - RNA, 18 nt, Homo sapiens
  source 1..18: mol_type = unassigned RNA
agactgtgagctcctcga

SEQ ID NO: 2868 - RNA, 22 nt, Homo sapiens
  source 1..22: mol_type = unassigned RNA
ctatacaatctattgccttccc

SEQ ID NO: 2869 - RNA, 22 nt, Homo sapiens
  source 1..22: mol_type = unassigned RNA
gggaaggcaatagattgtatag

SEQ ID NO: 2870 - RNA, 22 nt, Homo sapiens
  source 1..22: mol_type = unassigned RNA
ctatacagtctactgtctttcc

SEQ ID NO: 2871 - RNA, 22 nt, Homo sapiens
  source 1..22: mol_type = unassigned RNA
ggaaagacagtagactgtatag

SEQ ID NO: 2872 - RNA, 22 nt, Homo sapiens
  source 1..22: mol_type = unassigned RNA
tgaggtagtagattgtatagtt

SEQ ID NO: 2873 - RNA, 22 nt, Homo sapiens
  source 1..22: mol_type = unassigned RNA
aactatacaatctactacctca

SEQ ID NO: 2874 - RNA, 22 nt, Homo sapiens
  source 1..22: mol_type = unassigned RNA
aaaagtaattgtggttttggcc

SEQ ID NO: 2875 - RNA, 22 nt, Homo sapiens
  source 1..22: mol_type = unassigned RNA
ggccaaaaccacaattactttt

SEQ ID NO: 2876 - RNA, 22 nt, Homo sapiens
  source 1..22: mol_type = unassigned RNA
aaaagtaattgcggtttttgcc

SEQ ID NO: 2877 - RNA, 22 nt, Homo sapiens
  source 1..22: mol_type = unassigned RNA
ggcaaaaaccgcaattactttt

SEQ ID NO: 2878 - RNA, 22 nt, Homo sapiens
  source 1..22: mol_type = unassigned RNA
cctctgaaattcagttcttcag

SEQ ID NO: 2879 - RNA, 22 nt, Homo sapiens
  source 1..22: mol_type = unassigned RNA
ctgaagaactgaatttcagagg

SEQ ID NO: 2880 - RNA, 22 nt, Homo sapiens
  source 1..22: mol_type = unassigned RNA
tgagaactgaattccatgggtt

SEQ ID NO: 2881 - RNA, 22 nt, Homo sapiens
  source 1..22: mol_type = unassigned RNA
aacccatggaattcagttctca

SEQ ID NO: 2882 - RNA, 22 nt, Homo sapiens
  source 1..22: mol_type = unassigned RNA
acagcaggcacagacaggcagt

SEQ ID NO: 2883 - RNA, 22 nt, Homo sapiens
  source 1..22: mol_type = unassigned RNA
actgcctgtctgtgcctgctgt

SEQ ID NO: 2884 - RNA, 22 nt, Homo sapiens
  source 1..22: mol_type = unassigned RNA
tgcctgtctacacttgctgtgc

SEQ ID NO: 2885 - RNA, 22 nt, Homo sapiens
  source 1..22: mol_type = unassigned RNA
gcacagcaagtgtagacaggca

SEQ ID NO: 2886 - RNA, 22 nt, Homo sapiens
  source 1..22: mol_type = unassigned RNA
tagcaccatctgaaatcggtta

SEQ ID NO: 2887 - RNA, 22 nt, Homo sapiens
  source 1..22: mol_type = unassigned RNA
taaccgatttcagatggtgcta

SEQ ID NO: 2888 - RNA, 22 nt, Homo sapiens
  source 1..22: mol_type = unassigned RNA
actgatttcttttggtgttcag

SEQ ID NO: 2889 - RNA, 22 nt, Homo sapiens
  source 1..22: mol_type = unassigned RNA
ctgaacaccaaaagaaatcagt

SEQ ID NO: 2890 - RNA, 24 nt, Homo sapiens
  source 1..24: mol_type = unassigned RNA
gctggtttcatatggtggtttaga

SEQ ID NO: 2891 - RNA, 24 nt, Homo sapiens
  source 1..24: mol_type = unassigned RNA
tctaaaccaccatatgaaaccagc

SEQ ID NO: 2892 - RNA, 22 nt, Homo sapiens
  source 1..22: mol_type = unassigned RNA
ctggtttcacatggtggcttag

SEQ ID NO: 2893 - RNA, 22 nt, Homo sapiens
  source 1..22: mol_type = unassigned RNA
ctaagccaccatgtgaaaccag

SEQ ID NO: 2894 - RNA, 23 nt, Homo sapiens
  source 1..23: mol_type = unassigned RNA
tagcaccatttgaaatcagtgtt

SEQ ID NO: 2895 - RNA, 23 nt, Homo sapiens
  source 1..23: mol_type = unassigned RNA
aacactgatttcaaatggtgcta

SEQ ID NO: 2896 - RNA, 22 nt, Homo sapiens
  source 1..22: mol_type = unassigned RNA
tagcaccatttgaaatcggtta

SEQ ID NO: 2897 - RNA, 22 nt, Homo sapiens
  source 1..22: mol_type = unassigned RNA
taaccgatttcaaatggtgcta

SEQ ID NO: 2898 - RNA, 22 nt, Homo sapiens
  source 1..22: mol_type = unassigned RNA
tgaccgatttctcctggtgttc

SEQ ID NO: 2899 - RNA, 22 nt, Homo sapiens
  source 1..22: mol_type = unassigned RNA
gaacaccaggagaaatcggtca

SEQ ID NO: 2900 - RNA, 23 nt, Homo sapiens
  source 1..23: mol_type = unassigned RNA
tgtcactcggctcggcccactac

SEQ ID NO: 2901 - RNA, 23 nt, Homo sapiens
  source 1..23: mol_type = unassigned RNA
gtagtgggccgagccgagtgaca

SEQ ID NO: 2902 - RNA, 22 nt, Homo sapiens
  source 1..22: mol_type = unassigned RNA
ctgccaattccataggtcacag

SEQ ID NO: 2903 - RNA, 22 nt, Homo sapiens
  source 1..22: mol_type = unassigned RNA
ctgtgacctatggaattggcag

SEQ ID NO: 2904 - RNA, 21 nt, Homo sapiens
  source 1..21: mol_type = unassigned RNA
ctgacctatgaattgacagcc

SEQ ID NO: 2905 - RNA, 21 nt, Homo sapiens
  source 1..21: mol_type = unassigned RNA
ggctgtcaattcataggtcag

SEQ ID NO: 2906 - RNA, 20 nt, Homo sapiens
  source 1..20: mol_type = unassigned RNA
actgccccaggtgctgctgg

SEQ ID NO: 2907 - RNA, 20 nt, Homo sapiens
  source 1..20: mol_type = unassigned RNA
ccagcagcacctggggcagt

SEQ ID NO: 2908 - RNA, 22 nt, Homo sapiens
  source 1..22: mol_type = unassigned RNA
aacgccattatcacactaaata

SEQ ID NO: 2909 - RNA, 22 nt, Homo sapiens
  source 1..22: mol_type = unassigned RNA
tatttagtgtgataatggcgtt

SEQ ID NO: 2910 - RNA, 22 nt, Homo sapiens
  source 1..22: mol_type = unassigned RNA
ctttcagtcggatgtttgcagc

SEQ ID NO: 2911 - RNA, 22 nt, Homo sapiens
  source 1..22: mol_type = unassigned RNA
gctgcaaacatccgactgaaag

SEQ ID NO: 2912 - RNA, 22 nt, Homo sapiens
  source 1..22: mol_type = unassigned RNA
aattgcacggtatccatctgta

SEQ ID NO: 2913 - RNA, 22 nt, Homo sapiens
  source 1..22: mol_type = unassigned RNA
tacagatggataccgtgcaatt

SEQ ID NO: 2914 - RNA, 22 nt, Homo sapiens
  source 1..22: mol_type = unassigned RNA
cgggtggatcacgatgcaattt

SEQ ID NO: 2915 - RNA, 22 nt, Homo sapiens
  source 1..22: mol_type = unassigned RNA
aaattgcatcgtgatccacccg

SEQ ID NO: 2916 - RNA, 22 nt, Homo sapiens
  source 1..22: mol_type = unassigned RNA
ctgggaggtggatgtttacttc

SEQ ID NO: 2917 - RNA, 22 nt, Homo sapiens
  source 1..22: mol_type = unassigned RNA
gaagtaaacatccacctcccag

SEQ ID NO: 2918 - RNA, 22 nt, Homo sapiens
  source 1..22: mol_type = unassigned RNA
tgtaaacatcctacactcagct

SEQ ID NO: 2919 - RNA, 22 nt, Homo sapiens
  source 1..22: mol_type = unassigned RNA
agctgagtgtaggatgtttaca

SEQ ID NO: 2920 - RNA, 22 nt, Homo sapiens
  source 1..22: mol_type = unassigned RNA
ctgggagagggttgtttactcc

SEQ ID NO: 2921 - RNA, 22 nt, Homo sapiens
  source 1..22: mol_type = unassigned RNA
ggagtaaacaaccctctcccag

SEQ ID NO: 2922 - RNA, 22 nt, Homo sapiens
  source 1..22: mol_type = unassigned RNA
ctgggagaaggctgtttactct

SEQ ID NO: 2923 - RNA, 22 nt, Homo sapiens
  source 1..22: mol_type = unassigned RNA
agagtaaacagccttctcccag

SEQ ID NO: 2924 - RNA, 23 nt, Homo sapiens
  source 1..23: mol_type = unassigned RNA
tgtaaacatcctacactctcagc

SEQ ID NO: 2925 - RNA, 23 nt, Homo sapiens
  source 1..23: mol_type = unassigned RNA
gctgagagtgtaggatgtttaca

SEQ ID NO: 2926 - RNA, 22 nt, Homo sapiens
  source 1..22: mol_type = unassigned RNA
tttttcattattgctcctgacc

SEQ ID NO: 2927 - RNA, 22 nt, Homo sapiens
  source 1..22: mol_type = unassigned RNA
ggtcaggagcaataatgaaaaa

SEQ ID NO: 2928 - RNA, 23 nt, Homo sapiens
  source 1..23: mol_type = unassigned RNA
tcaagagcaataacgaaaaatgt

SEQ ID NO: 2929 - RNA, 23 nt, Homo sapiens
  source 1..23: mol_type = unassigned RNA
acatttttcgttattgctcttga

SEQ ID NO: 2930 - RNA, 23 nt, Homo sapiens
  source 1..23: mol_type = unassigned RNA
caaagtgcttacagtgcaggtag

SEQ ID NO: 2931 - RNA, 23 nt, Homo sapiens
  source 1..23: mol_type = unassigned RNA
ctacctgcactgtaagcactttg

SEQ ID NO: 2932 - RNA, 22 nt, Homo sapiens
  source 1..22: mol_type = unassigned RNA
ggattcctggaaatactgttct

SEQ ID NO: 2933 - RNA, 22 nt, Homo sapiens
  source 1..22: mol_type = unassigned RNA
agaacagtatttccaggaatcc

SEQ ID NO: 2934 - RNA, 23 nt, Homo sapiens
  source 1..23: mol_type = unassigned RNA
gtccagttttcccaggaatccct

SEQ ID NO: 2935 - RNA, 23 nt, Homo sapiens
  source 1..23: mol_type = unassigned RNA
agggattcctgggaaaactggac

SEQ ID NO: 2936 - RNA, 22 nt, Homo sapiens
  source 1..22: mol_type = unassigned RNA
actgcattatgagcacttaaag

SEQ ID NO: 2937 - RNA, 22 nt, Homo sapiens
  source 1..22: mol_type = unassigned RNA
ctttaagtgctcataatgcagt

SEQ ID NO: 2938 - RNA, 23 nt, Homo sapiens
  source 1..23: mol_type = unassigned RNA
taaagtgcttatagtgcaggtag

SEQ ID NO: 2939 - RNA, 23 nt, Homo sapiens
  source 1..23: mol_type = unassigned RNA
ctacctgcactataagcacttta

SEQ ID NO: 2940 - RNA, 22 nt, Homo sapiens
  source 1..22: mol_type = unassigned RNA
gagggttgggtggaggctctcc

SEQ ID NO: 2941 - RNA, 22 nt, Homo sapiens
  source 1..22: mol_type = unassigned RNA
ggagagcctccacccaaccctc

SEQ ID NO: 2942 - RNA, 22 nt, Homo sapiens
  source 1..22: mol_type = unassigned RNA
ctgtgcgtgtgacagcggctga

SEQ ID NO: 2943 - RNA, 22 nt, Homo sapiens
  source 1..22: mol_type = unassigned RNA
tcagccgctgtcacacgcacag

SEQ ID NO: 2944 - RNA, 22 nt, Homo sapiens
  source 1..22: mol_type = unassigned RNA
ccagtggggctgctgttatctg

SEQ ID NO: 2945 - RNA, 22 nt, Homo sapiens
  source 1..22: mol_type = unassigned RNA
cagataacagcagccccactgg

SEQ ID NO: 2946 - RNA, 22 nt, Homo sapiens
  source 1..22: mol_type = unassigned RNA
tgtaacagcaactccatgtgga

SEQ ID NO: 2947 - RNA, 22 nt, Homo sapiens
  source 1..22: mol_type = unassigned RNA
tccacatggagttgctgttaca

SEQ ID NO: 2948 - RNA, 22 nt, Homo sapiens
  source 1..22: mol_type = unassigned RNA
tcacagtggtctctgggattat

SEQ ID NO: 2949 - RNA, 22 nt, Homo sapiens
  source 1..22: mol_type = unassigned RNA
ataatcccagagaccactgtga

SEQ ID NO: 2950 - RNA, 22 nt, Homo sapiens
  source 1..22: mol_type = unassigned RNA
taatctcagctggcaactgtga

SEQ ID NO: 2951 - RNA, 22 nt, Homo sapiens
  source 1..22: mol_type = unassigned RNA
tcacagttgccagctgagatta

SEQ ID NO: 2952 - RNA, 22 nt, Homo sapiens
  source 1..22: mol_type = unassigned RNA
cagtgcctcggcagtgcagccc

SEQ ID NO: 2953 - RNA, 22 nt, Homo sapiens
  source 1..22: mol_type = unassigned RNA
gggctgcactgccgaggcactg

SEQ ID NO: 2954 - RNA, 20 nt, Homo sapiens
  source 1..20: mol_type = unassigned RNA
gtgcattgctgttgcattgc

SEQ ID NO: 2955 - RNA, 20 nt, Homo sapiens
  source 1..20: mol_type = unassigned RNA
gcaatgcaacagcaatgcac

SEQ ID NO: 2956 - RNA, 19 nt, Homo sapiens
  source 1..19: mol_type = unassigned RNA
actggacttggaggcagaa

SEQ ID NO: 2957 - RNA, 19 nt, Homo sapiens
  source 1..19: mol_type = unassigned RNA
ttctgcctccaagtccagt

SEQ ID NO: 2958 - RNA, 25 nt, Homo sapiens
  source 1..25: mol_type = unassigned RNA
actggacttggagtcagaagagtgg

SEQ ID NO: 2959 - RNA, 25 nt, Homo sapiens
  source 1..25: mol_type = unassigned RNA
ccactcttctgactccaagtccagt

SEQ ID NO: 2960 - RNA, 20 nt, Homo sapiens
  source 1..20: mol_type = unassigned RNA
actggacttggagtcagaaa

SEQ ID NO: 2961 - RNA, 20 nt, Homo sapiens
  source 1..20: mol_type = unassigned RNA
tttctgactccaagtccagt

SEQ ID NO: 2962 - RNA, 19 nt, Homo sapiens
  source 1..19: mol_type = unassigned RNA
actggacttggagtcagga

SEQ ID NO: 2963 - RNA, 19 nt, Homo sapiens
  source 1..19: mol_type = unassigned RNA
tcctgactccaagtccagt

SEQ ID NO: 2964 - RNA, 20 nt, Homo sapiens
  source 1..20: mol_type = unassigned RNA
actggacttggagccagaag

SEQ ID NO: 2965 - RNA, 20 nt, Homo sapiens
  source 1..20: mol_type = unassigned RNA
cttctggctccaagtccagt

SEQ ID NO: 2966 - RNA, 20 nt, Homo sapiens
  source 1..20: mol_type = unassigned RNA
actgggcttggagtcagaag

SEQ ID NO: 2967 - RNA, 20 nt, Homo sapiens
  source 1..20: mol_type = unassigned RNA
cttctgactccaagcccagt

SEQ ID NO: 2968 - RNA, 21 nt, Homo sapiens
  source 1..21: mol_type = unassigned RNA
actggacttggtgtcagatgg

SEQ ID NO: 2969 - RNA, 21 nt, Homo sapiens
  source 1..21: mol_type = unassigned RNA
ccatctgacaccaagtccagt

SEQ ID NO: 2970 - RNA, 21 nt, Homo sapiens
  source 1..21: mol_type = unassigned RNA
actggactaggagtcagaagg

SEQ ID NO: 2971 - RNA, 21 nt, Homo sapiens
  source 1..21: mol_type = unassigned RNA
ccttctgactcctagtccagt

SEQ ID NO: 2972 - RNA, 19 nt, Homo sapiens
  source 1..19: mol_type = unassigned RNA
actggatttggagccagaa

SEQ ID NO: 2973 - RNA, 19 nt, Homo sapiens
  source 1..19: mol_type = unassigned RNA
ttctggctccaaatccagt

SEQ ID NO: 2974 - RNA, 20 nt, Homo sapiens
  source 1..20: mol_type = unassigned RNA
aggaatgttccttctttgcc

SEQ ID NO: 2975 - RNA, 20 nt, Homo sapiens
  source 1..20: mol_type = unassigned RNA
ggcaaagaaggaacattcct

SEQ ID NO: 2976 - RNA, 21 nt, Homo sapiens
  source 1..21: mol_type = unassigned RNA
tcagtgcatgacagaacttgg

SEQ ID NO: 2977 - RNA, 21 nt, Homo sapiens
  source 1..21: mol_type = unassigned RNA
ccaagttctgtcatgcactga

SEQ ID NO: 2978 - RNA, 20 nt, Homo sapiens
  source 1..20: mol_type = unassigned RNA
tcacacctgcctcgcccccc

SEQ ID NO: 2979 - RNA, 20 nt, Homo sapiens
  source 1..20: mol_type = unassigned RNA
ggggggcgaggcaggtgtga

SEQ ID NO: 2980 - RNA, 21 nt, Homo sapiens
  source 1..21: mol_type = unassigned RNA
gtgggcgggggcaggtgtgtg

SEQ ID NO: 2981 - RNA, 21 nt, Homo sapiens
  source 1..21: mol_type = unassigned RNA
cacacacctgcccccgcccac

SEQ ID NO: 2982 - RNA, 22 nt, Homo sapiens
  source 1..22: mol_type = unassigned RNA
acgcccttcccccccttcttca

SEQ ID NO: 2983 - RNA, 22 nt, Homo sapiens
  source 1..22: mol_type = unassigned RNA
tgaagaagggggggaagggcgt

SEQ ID NO: 2984 - RNA, 22 nt, Homo sapiens
  source 1..22: mol_type = unassigned RNA
ttgcatatgtaggatgtcccat

SEQ ID NO: 2985 - RNA, 22 nt, Homo sapiens
  source 1..22: mol_type = unassigned RNA
atgggacatcctacatatgcaa

SEQ ID NO: 2986 - RNA, 23 nt, Homo sapiens
  source 1..23: mol_type = unassigned RNA
gtttgcacgggtgggccttgtct

SEQ ID NO: 2987 - RNA, 23 nt, Homo sapiens
  source 1..23: mol_type = unassigned RNA
agacaaggcccacccgtgcaaac

SEQ ID NO: 2988 - RNA, 22 nt, Homo sapiens
  source 1..22: mol_type = unassigned RNA
gactatagaactttccccctca

SEQ ID NO: 2989 - RNA, 22 nt, Homo sapiens
  source 1..22: mol_type = unassigned RNA
tgagggggaaagttctatagtc

SEQ ID NO: 2990 - RNA, 21 nt, Homo sapiens
  source 1..21: mol_type = unassigned RNA
agggggaaagttctatagtcc

SEQ ID NO: 2991 - RNA, 21 nt, Homo sapiens
  source 1..21: mol_type = unassigned RNA
ggactatagaactttccccct

SEQ ID NO: 2992 - RNA, 21 nt, Homo sapiens
  source 1..21: mol_type = unassigned RNA
ctttttgcggtctgggcttgc

SEQ ID NO: 2993 - RNA, 21 nt, Homo sapiens
  source 1..21: mol_type = unassigned RNA
gcaagcccagaccgcaaaaag

SEQ ID NO: 2994 - RNA, 21 nt, Homo sapiens
  source 1..21: mol_type = unassigned RNA
tcttgtgttctctagatcagt

SEQ ID NO: 2995 - RNA, 21 nt, Homo sapiens
  source 1..21: mol_type = unassigned RNA
actgatctagagaacacaaga

SEQ ID NO: 2996 - RNA, 23 nt, Homo sapiens
  source 1..23: mol_type = unassigned RNA
cccagtgttcagactacctgttc

SEQ ID NO: 2997 - RNA, 23 nt, Homo sapiens
  source 1..23: mol_type = unassigned RNA
gaacaggtagtctgaacactggg

SEQ ID NO: 2998 - RNA, 22 nt, Homo sapiens
  source 1..22: mol_type = unassigned RNA
acagtagtctgcacattggtta

SEQ ID NO: 2999 - RNA, 22 nt, Homo sapiens
  source 1..22: mol_type = unassigned RNA
taaccaatgtgcagactactgt

SEQ ID NO: 3000 - RNA, 22 nt, Homo sapiens
  source 1..22: mol_type = unassigned RNA
acagtagtctgcacattggtta

SEQ ID NO: 3001 - RNA, 22 nt, Homo sapiens
  source 1..22: mol_type = unassigned RNA
taaccaatgtgcagactactgt

SEQ ID NO: 3002 - RNA, 23 nt, Homo sapiens
  source 1..23: mol_type = unassigned RNA
cccagtgtttagactatctgttc

SEQ ID NO: 3003 - RNA, 23 nt, Homo sapiens
  source 1..23: mol_type = unassigned RNA
gaacagatagtctaaacactggg

SEQ ID NO: 3004 - RNA, 22 nt, Homo sapiens
  source 1..22: mol_type = unassigned RNA
tggagtgtgacaatggtgtttg

SEQ ID NO: 3005 - RNA, 22 nt, Homo sapiens
  source 1..22: mol_type = unassigned RNA
caaacaccattgtcacactcca

SEQ ID NO: 3006 - RNA, 22 nt, Homo sapiens
  source 1..22: mol_type = unassigned RNA
tgccctaaatgccccttctggc

SEQ ID NO: 3007 - RNA, 22 nt, Homo sapiens
  source 1..22: mol_type = unassigned RNA
gccagaaggggcatttagggca

SEQ ID NO: 3008 - RNA, 23 nt, Homo sapiens
  source 1..23: mol_type = unassigned RNA
taaggtgcatctagtgcagttag

SEQ ID NO: 3009 - RNA, 23 nt, Homo sapiens
  source 1..23: mol_type = unassigned RNA
ctaactgcactagatgcacctta

SEQ ID NO: 3010 - RNA, 22 nt, Homo sapiens
  source 1..22: mol_type = unassigned RNA
ctcctatatgatgcctttcttc

SEQ ID NO: 3011 - RNA, 22 nt, Homo sapiens
  source 1..22: mol_type = unassigned RNA
gaagaaaggcatcatataggag

SEQ ID NO: 3012 - RNA, 21 nt, Homo sapiens
  source 1..21: mol_type = unassigned RNA
gaacggcttcatacaggagtt

SEQ ID NO: 3013 - RNA, 21 nt, Homo sapiens
  source 1..21: mol_type = unassigned RNA
aactcctgtatgaagccgttc

SEQ ID NO: 3014 - RNA, 22 nt, Homo sapiens
  source 1..22: mol_type = unassigned RNA
tgtgactggttgaccagagggg

SEQ ID NO: 3015 - RNA, 22 nt, Homo sapiens
  source 1..22: mol_type = unassigned RNA
cccctctggtcaaccagtcaca

SEQ ID NO: 3016 - RNA, 23 nt, Homo sapiens
  source 1..23: mol_type = unassigned RNA
actgccctaagtgctccttctgg

SEQ ID NO: 3017 - RNA, 23 nt, Homo sapiens
  source 1..23: mol_type = unassigned RNA
ccagaaggagcacttagggcagt

SEQ ID NO: 3018 - RNA, 23 nt, Homo sapiens
  source 1..23: mol_type = unassigned RNA
taaggtgcatctagtgcagatag

SEQ ID NO: 3019 - RNA, 23 nt, Homo sapiens
  source 1..23: mol_type = unassigned RNA
ctatctgcactagatgcacctta

SEQ ID NO: 3020 - RNA, 22 nt, Homo sapiens
  source 1..22: mol_type = unassigned RNA
cagtgcaatgatgaaagggcat

SEQ ID NO: 3021 - RNA, 22 nt, Homo sapiens
  source 1..22: mol_type = unassigned RNA
atgccctttcatcattgcactg

SEQ ID NO: 3022 - RNA, 21 nt, Homo sapiens
  source 1..21: mol_type = unassigned RNA
actctttccctgttgcactac

SEQ ID NO: 3023 - RNA, 21 nt, Homo sapiens
  source 1..21: mol_type = unassigned RNA
gtagtgcaacagggaaagagt

SEQ ID NO: 3024 - RNA, 24 nt, Homo sapiens
  source 1..24: mol_type = unassigned RNA
tttggcaatggtagaactcacact

SEQ ID NO: 3025 - RNA, 24 nt, Homo sapiens
  source 1..24: mol_type = unassigned RNA
agtgtgagttctaccattgccaaa

SEQ ID NO: 3026 - RNA, 21 nt, Homo sapiens
  source 1..21: mol_type = unassigned RNA
agggccccccctcaatcctgt

SEQ ID NO: 3027 - RNA, 21 nt, Homo sapiens
  source 1..21: mol_type = unassigned RNA
acaggattgagggggggccct

SEQ ID NO: 3028 - RNA, 22 nt, Homo sapiens
  source 1..22: mol_type = unassigned RNA
cagtgcaatgttaaaagggcat

SEQ ID NO: 3029 - RNA, 22 nt, Homo sapiens
  source 1..22: mol_type = unassigned RNA
atgcccttttaacattgcactg

SEQ ID NO: 3030 - RNA, 22 nt, Homo sapiens
  source 1..22: mol_type = unassigned RNA
ttcacattgtgctactgtctgc

SEQ ID NO: 3031 - RNA, 22 nt, Homo sapiens
  source 1..22: mol_type = unassigned RNA
gcagacagtagcacaatgtgaa

SEQ ID NO: 3032 - RNA, 22 nt, Homo sapiens
  source 1..22: mol_type = unassigned RNA
tcggatccgtctgagcttggct

SEQ ID NO: 3033 - RNA, 22 nt, Homo sapiens
  source 1..22: mol_type = unassigned RNA
agccaagctcagacggatccga

SEQ ID NO: 3034 - RNA, 22 nt, Homo sapiens
  source 1..22: mol_type = unassigned RNA
ctgaagctcagagggctctgat

SEQ ID NO: 3035 - RNA, 22 nt, Homo sapiens
  source 1..22: mol_type = unassigned RNA
atcagagccctctgagcttcag

SEQ ID NO: 3036 - RNA, 22 nt, Homo sapiens
  source 1..22: mol_type = unassigned RNA
cctcttccccttgtctctccag

SEQ ID NO: 3037 - RNA, 22 nt, Homo sapiens
  source 1..22: mol_type = unassigned RNA
ctggagagacaaggggaagagg

SEQ ID NO: 3038 - RNA, 22 nt, Homo sapiens
  source 1..22: mol_type = unassigned RNA
tgagtgacaggggaaatgggga

SEQ ID NO: 3039 - RNA, 22 nt, Homo sapiens
  source 1..22: mol_type = unassigned RNA
tccccatttcccctgtcactca

SEQ ID NO: 3040 - RNA, 22 nt, Homo sapiens
  source 1..22: mol_type = unassigned RNA
tcaggacacttctgaacttgga

SEQ ID NO: 3041 - RNA, 22 nt, Homo sapiens
  source 1..22: mol_type = unassigned RNA
tccaagttcagaagtgtcctga

SEQ ID NO: 3042 - RNA, 22 nt, Homo sapiens
  source 1..22: mol_type = unassigned RNA
cagttcagaagtgttcctgagt

SEQ ID NO: 3043 - RNA, 22 nt, Homo sapiens
  source 1..22: mol_type = unassigned RNA
actcaggaacacttctgaactg

SEQ ID NO: 3044 - RNA, 21 nt, Homo sapiens
  source 1..21: mol_type = unassigned RNA
tttccctttccatcctggcag

SEQ ID NO: 3045 - RNA, 21 nt, Homo sapiens
  source 1..21: mol_type = unassigned RNA
ctgccaggatggaaagggaaa

SEQ ID NO: 3046 - RNA, 21 nt, Homo sapiens
  source 1..21: mol_type = unassigned RNA
ttgccagggcaggaggtggaa

SEQ ID NO: 3047 - RNA, 21 nt, Homo sapiens
  source 1..21: mol_type = unassigned RNA
ttccacctcctgccctggcaa

SEQ ID NO: 3048 - RNA, 21 nt, Homo sapiens
  source 1..21: mol_type = unassigned RNA
agagattggtagaaatcaggt

SEQ ID NO: 3049 - RNA, 21 nt, Homo sapiens
  source 1..21: mol_type = unassigned RNA
acctgatttctaccaatctct

SEQ ID NO: 3050 - RNA, 23 nt, Homo sapiens
  source 1..23: mol_type = unassigned RNA
aatcggacccatttaaaccggag

SEQ ID NO: 3051 - RNA, 23 nt, Homo sapiens
  source 1..23: mol_type = unassigned RNA
ctccggtttaaatgggtccgatt

SEQ ID NO: 3052 - RNA, 24 nt, Homo sapiens
  source 1..24: mol_type = unassigned RNA
tctgggcacaggcggatggacagg

SEQ ID NO: 3053 - RNA, 24 nt, Homo sapiens
  source 1..24: mol_type = unassigned RNA
cctgtccatccgcctgtgcccaga

SEQ ID NO: 3054 - RNA, 21 nt, Homo sapiens
  source 1..21: mol_type = unassigned RNA
ccagtgactgagctggagcca

SEQ ID NO: 3055 - RNA, 21 nt, Homo sapiens
  source 1..21: mol_type = unassigned RNA
tggctccagctcagtcactgg

SEQ ID NO: 3056 - RNA, 22 nt, Homo sapiens
  source 1..22: mol_type = unassigned RNA
aggataggaagaatgaagtgct

SEQ ID NO: 3057 - RNA, 22 nt, Homo sapiens
  source 1..22: mol_type = unassigned RNA
agcacttcattcttcctatcct

SEQ ID NO: 3058 - RNA, 22 nt, Homo sapiens
  source 1..22: mol_type = unassigned RNA
aggagagtggattccaggtggt

SEQ ID NO: 3059 - RNA, 22 nt, Homo sapiens
  source 1..22: mol_type = unassigned RNA
accacctggaatccactctcct

SEQ ID NO: 3060 - RNA, 22 nt, Homo sapiens
  source 1..22: mol_type = unassigned RNA
tcctcctctacctcatcccagt

SEQ ID NO: 3061 - RNA, 22 nt, Homo sapiens
  source 1..22: mol_type = unassigned RNA
actgggatgaggtagaggagga

SEQ ID NO: 3062 - RNA, 22 nt, Homo sapiens
  source 1..22: mol_type = unassigned RNA
tgaggggtttggaatgggatgg

SEQ ID NO: 3063 - RNA, 22 nt, Homo sapiens
  source 1..22: mol_type = unassigned RNA
ccatcccattccaaacccctca

SEQ ID NO: 3064 - RNA, 21 nt, Homo sapiens
  source 1..21: mol_type = unassigned RNA
atccagttctctgagggggct

SEQ ID NO: 3065 - RNA, 21 nt, Homo sapiens
  source 1..21: mol_type = unassigned RNA
agccccctcagagaactggat

SEQ ID NO: 3066 - RNA, 22 nt, Homo sapiens
  source 1..22: mol_type = unassigned RNA
aacccctaaggcaactggatgg

SEQ ID NO: 3067 - RNA, 22 nt, Homo sapiens
  source 1..22: mol_type = unassigned RNA
ccatccagttgccttaggggtt

SEQ ID NO: 3068 - RNA, 21 nt, Homo sapiens
  source 1..21: mol_type = unassigned RNA
tcatcctcgtctccctcccag

SEQ ID NO: 3069 - RNA, 21 nt, Homo sapiens
  source 1..21: mol_type = unassigned RNA
ctgggagggagacgaggatga

SEQ ID NO: 3070 - RNA, 22 nt, Homo sapiens
  source 1..22: mol_type = unassigned RNA
agggaaggggacgagggttggg

SEQ ID NO: 3071 - RNA, 22 nt, Homo sapiens
  source 1..22: mol_type = unassigned RNA
cccaaccctcgtccccttccct

SEQ ID NO: 3072 - RNA, 23 nt, Homo sapiens
  source 1..23: mol_type = unassigned RNA
aagaagagactgagtcatcgaat

SEQ ID NO: 3073 - RNA, 23 nt, Homo sapiens
  source 1..23: mol_type = unassigned RNA
attcgatgactcagtctcttctt

SEQ ID NO: 3074 - RNA, 23 nt, Homo sapiens
  source 1..23: mol_type = unassigned RNA
caatggcacaaactcattcttga

SEQ ID NO: 3075 - RNA, 23 nt, Homo sapiens
  source 1..23: mol_type = unassigned RNA
tcaagaatgagtttgtgccattg

SEQ ID NO: 3076 - RNA, 21 nt, Homo sapiens
  source 1..21: mol_type = unassigned RNA
actgaatcctcttttcctcag

SEQ ID NO: 3077 - RNA, 21 nt, Homo sapiens
  source 1..21: mol_type = unassigned RNA
ctgaggaaaagaggattcagt

SEQ ID NO: 3078 - RNA, 22 nt, Homo sapiens
  source 1..22: mol_type = unassigned RNA
tgggatgagggattgaagtgga

SEQ ID NO: 3079 - RNA, 22 nt, Homo sapiens
  source 1..22: mol_type = unassigned RNA
tccacttcaatccctcatccca

SEQ ID NO: 3080 - RNA, 22 nt, Homo sapiens
  source 1..22: mol_type = unassigned RNA
caggccatattgtgctgcctca

SEQ ID NO: 3081 - RNA, 22 nt, Homo sapiens
  source 1..22: mol_type = unassigned RNA
tgaggcagcacaatatggcctg

SEQ ID NO: 3082 - RNA, 22 nt, Homo sapiens
  source 1..22: mol_type = unassigned RNA
tagcagcacataatggtttgtg

SEQ ID NO: 3083 - RNA, 22 nt, Homo sapiens
  source 1..22: mol_type = unassigned RNA
cacaaaccattatgtgctgcta

SEQ ID NO: 3084 - RNA, 22 nt, Homo sapiens
  source 1..22: mol_type = unassigned RNA
cgaatcattatttgctgctcta

SEQ ID NO: 3085 - RNA, 22 nt, Homo sapiens
  source 1..22: mol_type = unassigned RNA
tagagcagcaaataatgattcg

SEQ ID NO: 3086 - RNA, 22 nt, Homo sapiens
  source 1..22: mol_type = unassigned RNA
tagcagcacatcatggtttaca

SEQ ID NO: 3087 - RNA, 22 nt, Homo sapiens
  source 1..22: mol_type = unassigned RNA
tgtaaaccatgatgtgctgcta

SEQ ID NO: 3088 - RNA, 22 nt, Homo sapiens
  source 1..22: mol_type = unassigned RNA
ccaatattactgtgctgcttta

SEQ ID NO: 3089 - RNA, 22 nt, Homo sapiens
  source 1..22: mol_type = unassigned RNA
taaagcagcacagtaatattgg

SEQ ID NO: 3090 - RNA, 22 nt, Homo sapiens
  source 1..22: mol_type = unassigned RNA
ctaggtatggtcccagggatcc

SEQ ID NO: 3091 - RNA, 22 nt, Homo sapiens
  source 1..22: mol_type = unassigned RNA
ggatccctgggaccatacctag

SEQ ID NO: 3092 - RNA, 20 nt, Homo sapiens
  source 1..20: mol_type = unassigned RNA
gtgtgtggaaatgcttctgc

SEQ ID NO: 3093 - RNA, 20 nt, Homo sapiens
  source 1..20: mol_type = unassigned RNA
gcagaagcatttccacacac

SEQ ID NO: 3094 - RNA, 22 nt, Homo sapiens
  source 1..22: mol_type = unassigned RNA
gtgtgcggaaatgcttctgcta

SEQ ID NO: 3095 - RNA, 22 nt, Homo sapiens
  source 1..22: mol_type = unassigned RNA
tagcagaagcatttccgcacac

SEQ ID NO: 3096 - RNA, 23 nt, Homo sapiens
  source 1..23: mol_type = unassigned RNA
agcagcattgtacagggctatca

SEQ ID NO: 3097 - RNA, 23 nt, Homo sapiens
  source 1..23: mol_type = unassigned RNA
tgatagccctgtacaatgctgct

SEQ ID NO: 3098 - RNA, 22 nt, Homo sapiens
  source 1..22: mol_type = unassigned RNA
aactggccctcaaagtcccgct

SEQ ID NO: 3099 - RNA, 22 nt, Homo sapiens
  source 1..22: mol_type = unassigned RNA
agcgggactttgagggccagtt

SEQ ID NO: 3100 - RNA, 22 nt, Homo sapiens
  source 1..22: mol_type = unassigned RNA
cggggttttgagggcgagatga

SEQ ID NO: 3101 - RNA, 22 nt, Homo sapiens
  source 1..22: mol_type = unassigned RNA
tcatctcgccctcaaaaccccg

SEQ ID NO: 3102 - RNA, 21 nt, Homo sapiens
  source 1..21: mol_type = unassigned RNA
gcagggacagcaaaggggtgc

SEQ ID NO: 3103 - RNA, 21 nt, Homo sapiens
  source 1..21: mol_type = unassigned RNA
gcacccctttgctgtccctgc

SEQ ID NO: 3104 - RNA, 22 nt, Homo sapiens
  source 1..22: mol_type = unassigned RNA
ttccctttgtcatccttcgcct

SEQ ID NO: 3105 - RNA, 22 nt, Homo sapiens
  source 1..22: mol_type = unassigned RNA
aggcgaaggatgacaaagggaa

SEQ ID NO: 3106 - RNA, 23 nt, Homo sapiens
  source 1..23: mol_type = unassigned RNA
atggccaaaactgcagttatttt

SEQ ID NO: 3107 - RNA, 23 nt, Homo sapiens
  source 1..23: mol_type = unassigned RNA
aaaataactgcagttttggccat

SEQ ID NO: 3108 - RNA, 25 nt, Homo sapiens
  source 1..25: mol_type = unassigned RNA
aaaaaccacaattacttttgcacca

SEQ ID NO: 3109 - RNA, 25 nt, Homo sapiens
  source 1..25: mol_type = unassigned RNA
tggtgcaaaagtaattgtggttttt

SEQ ID NO: 3110 - RNA, 21 nt, Homo sapiens
  source 1..21: mol_type = unassigned RNA
caaaagtgatcgtggtttttg

SEQ ID NO: 3111 - RNA, 21 nt, Homo sapiens
  source 1..21: mol_type = unassigned RNA
caaaaaccacgatcacttttg

SEQ ID NO: 3112 - RNA, 23 nt, Homo sapiens
  source 1..23: mol_type = unassigned RNA
caaagactgcaattacttttgcg

SEQ ID NO: 3113 - RNA, 23 nt, Homo sapiens
  source 1..23: mol_type = unassigned RNA
cgcaaaagtaattgcagtctttg

SEQ ID NO: 3114 - RNA, 23 nt, Homo sapiens
  source 1..23: mol_type = unassigned RNA
aaaagtaactgcggtttttgcct

SEQ ID NO: 3115 - RNA, 23 nt, Homo sapiens
  source 1..23: mol_type = unassigned RNA
aggcaaaaaccgcagttactttt

SEQ ID NO: 3116 - RNA, 22 nt, Homo sapiens
  source 1..22: mol_type = unassigned RNA
tgcctggaacatagtagggact

SEQ ID NO: 3117 - RNA, 22 nt, Homo sapiens
  source 1..22: mol_type = unassigned RNA
agtccctactatgttccaggca

SEQ ID NO: 3118 - RNA, 21 nt, Homo sapiens
  source 1..21: mol_type = unassigned RNA
ataggactcatatagtgccag

SEQ ID NO: 3119 - RNA, 21 nt, Homo sapiens
  source 1..21: mol_type = unassigned RNA
ctggcactatatgagtcctat

SEQ ID NO: 3120 - RNA, 20 nt, Homo sapiens
  source 1..20: mol_type = unassigned RNA
agacactatacgagtcatat

SEQ ID NO: 3121 - RNA, 20 nt, Homo sapiens
  source 1..20: mol_type = unassigned RNA
atatgactcgtatagtgtct

SEQ ID NO: 3122 - RNA, 23 nt, Homo sapiens
  source 1..23: mol_type = unassigned RNA
tgtgactgcattatgaaaattct

SEQ ID NO: 3123 - RNA, 23 nt, Homo sapiens
  source 1..23: mol_type = unassigned RNA
agaattttcataatgcagtcaca

SEQ ID NO: 3124 - RNA, 20 nt, Homo sapiens
  source 1..20: mol_type = unassigned RNA
tggcttttaactttgatggc

SEQ ID NO: 3125 - RNA, 20 nt, Homo sapiens
  source 1..20: mol_type = unassigned RNA
gccatcaaagttaaaagcca

SEQ ID NO: 3126 - RNA, 21 nt, Homo sapiens
  source 1..21: mol_type = unassigned RNA
cacagcaagtgtagacaggca

SEQ ID NO: 3127 - RNA, 21 nt, Homo sapiens
  source 1..21: mol_type = unassigned RNA
tgcctgtctacacttgctgtg

SEQ ID NO: 3128 - RNA, 21 nt, Homo sapiens
  source 1..21: mol_type = unassigned RNA
cctgtctgtgcctgctgtaca

SEQ ID NO: 3129 - RNA, 21 nt, Homo sapiens
  source 1..21: mol_type = unassigned RNA
tgtacagcaggcacagacagg

SEQ ID NO: 3130 - RNA, 22 nt, Homo sapiens
  source 1..22: mol_type = unassigned RNA
taaatagagtaggcaaaggaca

SEQ ID NO: 3131 - RNA, 22 nt, Homo sapiens
  source 1..22: mol_type = unassigned RNA
tgtcctttgcctactctattta

SEQ ID NO: 3132 - RNA, 22 nt, Homo sapiens
  source 1..22: mol_type = unassigned RNA
tcctttgcctattctatttaag

SEQ ID NO: 3133 - RNA, 22 nt, Homo sapiens
  source 1..22: mol_type = unassigned RNA
cttaaatagaataggcaaagga

SEQ ID NO: 3134 - RNA, 22 nt, Homo sapiens
  source 1..22: mol_type = unassigned RNA
gttgggacaagaggacggtctt

SEQ ID NO: 3135 - RNA, 22 nt, Homo sapiens
  source 1..22: mol_type = unassigned RNA
aagaccgtcctcttgtcccaac

SEQ ID NO: 3136 - RNA, 17 nt, Homo sapiens
  source 1..17: mol_type = unassigned RNA
cagagaattgtttaatc

SEQ ID NO: 3137 - RNA, 17 nt, Homo sapiens
  source 1..17: mol_type = unassigned RNA
gattaaacaattctctg

SEQ ID NO: 3138 - RNA, 20 nt, Homo sapiens
  source 1..20: mol_type = unassigned RNA
tagaggaagctgtggagaga

SEQ ID NO: 3139 - RNA, 20 nt, Homo sapiens
  source 1..20: mol_type = unassigned RNA
tctctccacagcttcctcta

SEQ ID NO: 3140 - RNA, 22 nt, Homo sapiens
  source 1..22: mol_type = unassigned RNA
tccccttctgcaggcctgctgg

SEQ ID NO: 3141 - RNA, 22 nt, Homo sapiens
  source 1..22: mol_type = unassigned RNA
ccagcaggcctgcagaagggga

SEQ ID NO: 3142 - RNA, 23 nt, Homo sapiens
  source 1..23: mol_type = unassigned RNA
atcagggcttgtggaatgggaag

SEQ ID NO: 3143 - RNA, 23 nt, Homo sapiens
  source 1..23: mol_type = unassigned RNA
cttcccattccacaagccctgat

SEQ ID NO: 3144 - RNA, 23 nt, Homo sapiens
  source 1..23: mol_type = unassigned RNA
tctggcaagtaaaaaactctcat

SEQ ID NO: 3145 - RNA, 23 nt, Homo sapiens
  source 1..23: mol_type = unassigned RNA
atgagagttttttacttgccaga

SEQ ID NO: 3146 - RNA, 23 nt, Homo sapiens
  source 1..23: mol_type = unassigned RNA
tcgaggactggtggaagggcctt

SEQ ID NO: 3147 - RNA, 23 nt, Homo sapiens
  source 1..23: mol_type = unassigned RNA
aaggcccttccaccagtcctcga

SEQ ID NO: 3148 - RNA, 24 nt, Homo sapiens
  source 1..24: mol_type = unassigned RNA
tgggtagagaaggagctcagagga

SEQ ID NO: 3149 - RNA, 24 nt, Homo sapiens
  source 1..24: mol_type = unassigned RNA
tcctctgagctccttctctaccca

SEQ ID NO: 3150 - RNA, 22 nt, Homo sapiens
  source 1..22: mol_type = unassigned RNA
taaagaactcttaaaacccaat

SEQ ID NO: 3151 - RNA, 22 nt, Homo sapiens
  source 1..22: mol_type = unassigned RNA
attgggttttaagagttcttta

SEQ ID NO: 3152 - RNA, 23 nt, Homo sapiens
  source 1..23: mol_type = unassigned RNA
tgatggataaaagactacatatt

SEQ ID NO: 3153 - RNA, 23 nt, Homo sapiens
  source 1..23: mol_type = unassigned RNA
aatatgtagtcttttatccatca

SEQ ID NO: 3154 - RNA, 22 nt, Homo sapiens
  source 1..22: mol_type = unassigned RNA
tgcctaggctgagactgcagtg

SEQ ID NO: 3155 - RNA, 22 nt, Homo sapiens
  source 1..22: mol_type = unassigned RNA
cactgcagtctcagcctaggca

SEQ ID NO: 3156 - RNA, 22 nt, Homo sapiens
  source 1..22: mol_type = unassigned RNA
tggcccaacctattcagttagt

SEQ ID NO: 3157 - RNA, 22 nt, Homo sapiens
  source 1..22: mol_type = unassigned RNA
actaactgaataggttgggcca

SEQ ID NO: 3158 - RNA, 23 nt, Homo sapiens
  source 1..23: mol_type = unassigned RNA
ctgactgaataggtagggtcatt

SEQ ID NO: 3159 - RNA, 23 nt, Homo sapiens
  source 1..23: mol_type = unassigned RNA
aatgaccctacctattcagtcag

SEQ ID NO: 3160 - RNA, 24 nt, Homo sapiens
  source 1..24: mol_type = unassigned RNA
tctgtagcctgggagcaatggggt

SEQ ID NO: 3161 - RNA, 24 nt, Homo sapiens
  source 1..24: mol_type = unassigned RNA
accccattgctcccaggctacaga

SEQ ID NO: 3162 - RNA, 23 nt, Homo sapiens
  source 1..23: mol_type = unassigned RNA
taggagctcaacagatgcctgtt

SEQ ID NO: 3163 - RNA, 23 nt, Homo sapiens
  source 1..23: mol_type = unassigned RNA
aacaggcatctgttgagctccta

SEQ ID NO: 3164 - RNA, 19 nt, Homo sapiens
  source 1..19: mol_type = unassigned RNA
gagggcgggtggaggagga

SEQ ID NO: 3165 - RNA, 19 nt, Homo sapiens
  source 1..19: mol_type = unassigned RNA
tcctcctccacccgccctc

SEQ ID NO: 3166 - RNA, 25 nt, Homo sapiens
  source 1..25: mol_type = unassigned RNA
ataacattgtaaagcgcttctttcg

SEQ ID NO: 3167 - RNA, 25 nt, Homo sapiens
  source 1..25: mol_type = unassigned RNA
cgaaagaagcgctttacaatgttat

SEQ ID NO: 3168 - RNA, 24 nt, Homo sapiens
  source 1..24: mol_type = unassigned RNA
agatattttgagtgtttggaattg

SEQ ID NO: 3169 - RNA, 24 nt, Homo sapiens
  source 1..24: mol_type = unassigned RNA
caattccaaacactcaaaatatct

SEQ ID NO: 3170 - RNA, 22 nt, Homo sapiens
  source 1..22: mol_type = unassigned RNA
aactccaaacactcaaaactca

SEQ ID NO: 3171 - RNA, 22 nt, Homo sapiens
  source 1..22: mol_type = unassigned RNA
tgagttttgagtgtttggagtt

SEQ ID NO: 3172 - RNA, 22 nt, Homo sapiens
  source 1..22: mol_type = unassigned RNA
catgctaggatagaaagaatgg

SEQ ID NO: 3173 - RNA, 22 nt, Homo sapiens
  source 1..22: mol_type = unassigned RNA
ccattctttctatcctagcatg

SEQ ID NO: 3174 - RNA, 24 nt, Homo sapiens
  source 1..24: mol_type = unassigned RNA
ggttgggcagtgaggagggtgtga

SEQ ID NO: 3175 - RNA, 24 nt, Homo sapiens
  source 1..24: mol_type = unassigned RNA
tcacaccctcctcactgcccaacc

SEQ ID NO: 3176 - RNA, 22 nt, Homo sapiens
  source 1..22: mol_type = unassigned RNA
tggaaaaaactggtgtgtgctt

SEQ ID NO: 3177 - RNA, 22 nt, Homo sapiens
  source 1..22: mol_type = unassigned RNA
aagcacacaccagttttttcca

SEQ ID NO: 3178 - RNA, 22 nt, Homo sapiens
  source 1..22: mol_type = unassigned RNA
ctggggagatcctcgaggttgg

SEQ ID NO: 3179 - RNA, 22 nt, Homo sapiens
  source 1..22: mol_type = unassigned RNA
ccaacctcgaggatctccccag

SEQ ID NO: 3180 - RNA, 22 nt, Homo sapiens
  source 1..22: mol_type = unassigned RNA
caacctcgacgatctcctcagc

SEQ ID NO: 3181 - RNA, 22 nt, Homo sapiens
  source 1..22: mol_type = unassigned RNA
gctgaggagatcgtcgaggttg

SEQ ID NO: 3182 - RNA, 21 nt, Homo sapiens
  source 1..21: mol_type = unassigned RNA
tgaggagatcgtcgaggttgg

SEQ ID NO: 3183 - RNA, 21 nt, Homo sapiens
  source 1..21: mol_type = unassigned RNA
ccaacctcgacgatctcctca

SEQ ID NO: 3184 - RNA, 22 nt, Homo sapiens
  source 1..22: mol_type = unassigned RNA
caacctcgaggatctccccagc

SEQ ID NO: 3185 - RNA, 22 nt, Homo sapiens
  source 1..22: mol_type = unassigned RNA
gctggggagatcctcgaggttg

SEQ ID NO: 3186 - RNA, 21 nt, Homo sapiens
  source 1..21: mol_type = unassigned RNA
ggtggggcaatgggatcaggt

SEQ ID NO: 3187 - RNA, 21 nt, Homo sapiens
  source 1..21: mol_type = unassigned RNA
acctgatcccattgccccacc

SEQ ID NO: 3188 - RNA, 23 nt, Homo sapiens
  source 1..23: mol_type = unassigned RNA
ggggaaagcgagtagggacattt

SEQ ID NO: 3189 - RNA, 23 nt, Homo sapiens
  source 1..23: mol_type = unassigned RNA
aaatgtccctactcgctttcccc

SEQ ID NO: 3190 - RNA, 22 nt, Homo sapiens
  source 1..22: mol_type = unassigned RNA
cagaaggggagttgggagcaga

SEQ ID NO: 3191 - RNA, 22 nt, Homo sapiens
  source 1..22: mol_type = unassigned RNA
tctgctcccaactccccttctg

SEQ ID NO: 3192 - RNA, 21 nt, Homo sapiens
  source 1..21: mol_type = unassigned RNA
ccaggctctgcagtgggaact

SEQ ID NO: 3193 - RNA, 21 nt, Homo sapiens
  source 1..21: mol_type = unassigned RNA
agttcccactgcagagcctgg

SEQ ID NO: 3194 - RNA, 21 nt, Homo sapiens
  source 1..21: mol_type = unassigned RNA
ctcccacttccagatctttct

SEQ ID NO: 3195 - RNA, 21 nt, Homo sapiens
  source 1..21: mol_type = unassigned RNA
agaaagatctggaagtgggag

SEQ ID NO: 3196 - RNA, 22 nt, Homo sapiens
  source 1..22: mol_type = unassigned RNA
aaagatctggaagtgggagaca

SEQ ID NO: 3197 - RNA, 22 nt, Homo sapiens
  source 1..22: mol_type = unassigned RNA
tgtctcccacttccagatcttt

SEQ ID NO: 3198 - RNA, 22 nt, Homo sapiens
  source 1..22: mol_type = unassigned RNA
ctgccctagtctagctgaagct

SEQ ID NO: 3199 - RNA, 22 nt, Homo sapiens
  source 1..22: mol_type = unassigned RNA
agcttcagctagactagggcag

SEQ ID NO: 3200 - RNA, 22 nt, Homo sapiens
  source 1..22: mol_type = unassigned RNA
ttcagccaggctagtgcagtct

SEQ ID NO: 3201 - RNA, 22 nt, Homo sapiens
  source 1..22: mol_type = unassigned RNA
agactgcactagcctggctgaa

SEQ ID NO: 3202 - RNA, 22 nt, Homo sapiens
  source 1..22: mol_type = unassigned RNA
taggattacaagtgtcggccac

SEQ ID NO: 3203 - RNA, 22 nt, Homo sapiens
  source 1..22: mol_type = unassigned RNA
gtggccgacacttgtaatccta

SEQ ID NO: 3204 - RNA, 22 nt, Homo sapiens
  source 1..22: mol_type = unassigned RNA
agagctgagactagaaagccca

SEQ ID NO: 3205 - RNA, 22 nt, Homo sapiens
  source 1..22: mol_type = unassigned RNA
tgggctttctagtctcagctct

SEQ ID NO: 3206 - RNA, 22 nt, Homo sapiens
  source 1..22: mol_type = unassigned RNA
ggctttctagtctcagctctcc

SEQ ID NO: 3207 - RNA, 22 nt, Homo sapiens
  source 1..22: mol_type = unassigned RNA
ggagagctgagactagaaagcc

SEQ ID NO: 3208 - RNA, 23 nt, Homo sapiens
  source 1..23: mol_type = unassigned RNA
ctgataagaacagaggcccagat

SEQ ID NO: 3209 - RNA, 23 nt, Homo sapiens
  source 1..23: mol_type = unassigned RNA
atctgggcctctgttcttatcag

SEQ ID NO: 3210 - RNA, 21 nt, Homo sapiens
  source 1..21: mol_type = unassigned RNA
tccctacccctccactcccca

SEQ ID NO: 3211 - RNA, 21 nt, Homo sapiens
  source 1..21: mol_type = unassigned RNA
tggggagtggaggggtaggga

SEQ ID NO: 3212 - RNA, 23 nt, Homo sapiens
  source 1..23: mol_type = unassigned RNA
ttagggagtagaagggtggggag

SEQ ID NO: 3213 - RNA, 23 nt, Homo sapiens
  source 1..23: mol_type = unassigned RNA
ctccccacccttctactccctaa

SEQ ID NO: 3214 - RNA, 22 nt, Homo sapiens
  source 1..22: mol_type = unassigned RNA
tataaaatgagggcagtaagac

SEQ ID NO: 3215 - RNA, 22 nt, Homo sapiens
  source 1..22: mol_type = unassigned RNA
gtcttactgccctcattttata

SEQ ID NO: 3216 - RNA, 22 nt, Homo sapiens
  source 1..22: mol_type = unassigned RNA
tgtgactttaagggaaatggcg

SEQ ID NO: 3217 - RNA, 22 nt, Homo sapiens
  source 1..22: mol_type = unassigned RNA
cgccatttcccttaaagtcaca

SEQ ID NO: 3218 - RNA, 22 nt, Homo sapiens
  source 1..22: mol_type = unassigned RNA
aggtggatgcaatgtgacctca

SEQ ID NO: 3219 - RNA, 22 nt, Homo sapiens
  source 1..22: mol_type = unassigned RNA
tgaggtcacattgcatccacct

SEQ ID NO: 3220 - RNA, 23 nt, Homo sapiens
  source 1..23: mol_type = unassigned RNA
cgcagacaatgcctactggccta

SEQ ID NO: 3221 - RNA, 23 nt, Homo sapiens
  source 1..23: mol_type = unassigned RNA
taggccagtaggcattgtctgcg

SEQ ID NO: 3222 - RNA, 17 nt, Homo sapiens
  source 1..17: mol_type = unassigned RNA
gagttctacagtcagac

SEQ ID NO: 3223 - RNA, 17 nt, Homo sapiens
  source 1..17: mol_type = unassigned RNA
gtctgactgtagaactc

SEQ ID NO: 3224 - RNA, 22 nt, Homo sapiens
  source 1..22: mol_type = unassigned RNA
taggactgtgcttggcacatag

SEQ ID NO: 3225 - RNA, 22 nt, Homo sapiens
  source 1..22: mol_type = unassigned RNA
ctatgtgccaagcacagtccta

SEQ ID NO: 3226 - RNA, 22 nt, Homo sapiens
  source 1..22: mol_type = unassigned RNA
ctggggttctgagacagacagt

SEQ ID NO: 3227 - RNA, 22 nt, Homo sapiens
  source 1..22: mol_type = unassigned RNA
actgtctgtctcagaaccccag

SEQ ID NO: 3228 - RNA, 22 nt, Homo sapiens
  source 1..22: mol_type = unassigned RNA
aaaggaggaaataggcaggcca

SEQ ID NO: 3229 - RNA, 22 nt, Homo sapiens
  source 1..22: mol_type = unassigned RNA
tggcctgcctatttcctccttt

SEQ ID NO: 3230 - RNA, 22 nt, Homo sapiens
  source 1..22: mol_type = unassigned RNA
tgccctgcctgttttctccttt

SEQ ID NO: 3231 - RNA, 22 nt, Homo sapiens
  source 1..22: mol_type = unassigned RNA
aaaggagaaaacaggcagggca

SEQ ID NO: 3232 - RNA, 23 nt, Homo sapiens
  source 1..23: mol_type = unassigned RNA
tagtgagttagagatgcagagcc

SEQ ID NO: 3233 - RNA, 23 nt, Homo sapiens
  source 1..23: mol_type = unassigned RNA
ggctctgcatctctaactcacta

SEQ ID NO: 3234 - RNA, 19 nt, Homo sapiens
  source 1..19: mol_type = unassigned RNA
actggcctgggactaccgg

SEQ ID NO: 3235 - RNA, 19 nt, Homo sapiens
  source 1..19: mol_type = unassigned RNA
ccggtagtcccaggccagt

SEQ ID NO: 3236 - RNA, 21 nt, Homo sapiens
  source 1..21: mol_type = unassigned RNA
tgcacggcactggggacacgt

SEQ ID NO: 3237 - RNA, 21 nt, Homo sapiens
  source 1..21: mol_type = unassigned RNA
acgtgtccccagtgccgtgca

SEQ ID NO: 3238 - RNA, 23 nt, Homo sapiens
  source 1..23: mol_type = unassigned RNA
tgtgtacacacgtgccaggcgct

SEQ ID NO: 3239 - RNA, 23 nt, Homo sapiens
  source 1..23: mol_type = unassigned RNA
agcgcctggcacgtgtgtacaca

SEQ ID NO: 3240 - RNA, 17 nt, Homo sapiens
  source 1..17: mol_type = unassigned RNA
ggggcgcggccggatcg

SEQ ID NO: 3241 - RNA, 17 nt, Homo sapiens
  source 1..17: mol_type = unassigned RNA
cgatccggccgcgcccc

SEQ ID NO: 3242 - RNA, 22 nt, Homo sapiens
  source 1..22: mol_type = unassigned RNA
agaaggggtgaaatttaaacgt

SEQ ID NO: 3243 - RNA, 22 nt, Homo sapiens
  source 1..22: mol_type = unassigned RNA
acgtttaaatttcaccccttct

SEQ ID NO: 3244 - RNA, 19 nt, Homo sapiens
  source 1..19: mol_type = unassigned RNA
atcgggccctcggcgccgg

SEQ ID NO: 3245 - RNA, 19 nt, Homo sapiens
  source 1..19: mol_type = unassigned RNA
ccggcgccgagggcccgat

SEQ ID NO: 3246 - RNA, 17 nt, Homo sapiens
  source 1..17: mol_type = unassigned RNA
gcttctgtagtgtagtc

SEQ ID NO: 3247 - RNA, 17 nt, Homo sapiens
  source 1..17: mol_type = unassigned RNA
gactacactacagaagc

SEQ ID NO: 3248 - RNA, 22 nt, Homo sapiens
  source 1..22: mol_type = unassigned RNA
gcctctctcggagtcgctcgga

SEQ ID NO: 3249 - RNA, 22 nt, Homo sapiens
  source 1..22: mol_type = unassigned RNA
tccgagcgactccgagagaggc

SEQ ID NO: 3250 - RNA, 23 nt, Homo sapiens
  source 1..23: mol_type = unassigned RNA
aaagtctcgctctctgcccctca

SEQ ID NO: 3251 - RNA, 23 nt, Homo sapiens
  source 1..23: mol_type = unassigned RNA
tgaggggcagagagcgagacttt

SEQ ID NO: 3252 - RNA, 24 nt, Homo sapiens
  source 1..24: mol_type = unassigned RNA
tgaggggcctcagaccgagctttt

SEQ ID NO: 3253 - RNA, 24 nt, Homo sapiens
  source 1..24: mol_type = unassigned RNA
aaaagctcggtctgaggcccctca

SEQ ID NO: 3254 - RNA, 23 nt, Homo sapiens
  source 1..23: mol_type = unassigned RNA
agaagaaggcggtcggtctgcgg

SEQ ID NO: 3255 - RNA, 23 nt, Homo sapiens
  source 1..23: mol_type = unassigned RNA
ccgcagaccgaccgccttcttct

SEQ ID NO: 3256 - RNA, 20 nt, Homo sapiens
  source 1..20: mol_type = unassigned RNA
ttggccatggggctgcgcgg

SEQ ID NO: 3257 - RNA, 20 nt, Homo sapiens
  source 1..20: mol_type = unassigned RNA
ccgcgcagccccatggccaa

SEQ ID NO: 3258 - RNA, 23 nt, Homo sapiens
  source 1..23: mol_type = unassigned RNA
cctgggcagcgtgtggctgaagg

SEQ ID NO: 3259 - RNA, 23 nt, Homo sapiens
  source 1..23: mol_type = unassigned RNA
ccttcagccacacgctgcccagg

SEQ ID NO: 3260 - RNA, 23 nt, Homo sapiens
  source 1..23: mol_type = unassigned RNA
agaggctttgtgcggatacgggg

SEQ ID NO: 3261 - RNA, 23 nt, Homo sapiens
  source 1..23: mol_type = unassigned RNA
ccccgtatccgcacaaagcctct

SEQ ID NO: 3262 - RNA, 21 nt, Homo sapiens
  source 1..21: mol_type = unassigned RNA
cccttgggtctgatggggtag

SEQ ID NO: 3263 - RNA, 21 nt, Homo sapiens
  source 1..21: mol_type = unassigned RNA
ctaccccatcagacccaaggg

SEQ ID NO: 3264 - RNA, 25 nt, Homo sapiens
  source 1..25: mol_type = unassigned RNA
tgccccatctgtgccctgggtagga

SEQ ID NO: 3265 - RNA, 25 nt, Homo sapiens
  source 1..25: mol_type = unassigned RNA
tcctacccagggcacagatggggca

SEQ ID NO: 3266 - RNA, 23 nt, Homo sapiens
  source 1..23: mol_type = unassigned RNA
tgtggaaggtagacggccagaga

SEQ ID NO: 3267 - RNA, 23 nt, Homo sapiens
  source 1..23: mol_type = unassigned RNA
tctctggccgtctaccttccaca

SEQ ID NO: 3268 - RNA, 20 nt, Homo sapiens
  source 1..20: mol_type = unassigned RNA
tctggccagctacgtcccca

SEQ ID NO: 3269 - RNA, 20 nt, Homo sapiens
  source 1..20: mol_type = unassigned RNA
tggggacgtagctggccaga

SEQ ID NO: 3270 - RNA, 23 nt, Homo sapiens
  source 1..23: mol_type = unassigned RNA
tggggacgtagctggccagacag

SEQ ID NO: 3271 - RNA, 23 nt, Homo sapiens
  source 1..23: mol_type = unassigned RNA
ctgtctggccagctacgtcccca

SEQ ID NO: 3272 - RNA, 22 nt, Homo sapiens
  source 1..22: mol_type = unassigned RNA
ctctctggccgtctaccttcca

SEQ ID NO: 3273 - RNA, 22 nt, Homo sapiens
  source 1..22: mol_type = unassigned RNA
tggaaggtagacggccagagag

SEQ ID NO: 3274 - RNA, 23 nt, Homo sapiens
  source 1..23: mol_type = unassigned RNA
tctgggaggttgtagcagtggaa

SEQ ID NO: 3275 - RNA, 23 nt, Homo sapiens
  source 1..23: mol_type = unassigned RNA
ttccactgctacaacctcccaga

SEQ ID NO: 3276 - RNA, 22 nt, Homo sapiens
  source 1..22: mol_type = unassigned RNA
tcctgcgtaggatctgaggagt

SEQ ID NO: 3277 - RNA, 22 nt, Homo sapiens
  source 1..22: mol_type = unassigned RNA
actcctcagatcctacgcagga

SEQ ID NO: 3278 - RNA, 22 nt, Homo sapiens
  source 1..22: mol_type = unassigned RNA
agctctgctgctcactggcagt

SEQ ID NO: 3279 - RNA, 22 nt, Homo sapiens
  source 1..22: mol_type = unassigned RNA
actgccagtgagcagcagagct

SEQ ID NO: 3280 - RNA, 21 nt, Homo sapiens
  source 1..21: mol_type = unassigned RNA
ggccagccaccaggagggctg

SEQ ID NO: 3281 - RNA, 21 nt, Homo sapiens
  source 1..21: mol_type = unassigned RNA
cagccctcctggtggctggcc

SEQ ID NO: 3282 - RNA, 17 nt, Homo sapiens
  source 1..17: mol_type = unassigned RNA
cgcgccgggcccgggtt

SEQ ID NO: 3283 - RNA, 17 nt, Homo sapiens
  source 1..17: mol_type = unassigned RNA
aacccgggcccggcgcg

SEQ ID NO: 3284 - RNA, 23 nt, Homo sapiens
  source 1..23: mol_type = unassigned RNA
ggaggcgcaggctcggaaaggcg

SEQ ID NO: 3285 - RNA, 23 nt, Homo sapiens
  source 1..23: mol_type = unassigned RNA
cgcctttccgagcctgcgcctcc

SEQ ID NO: 3286 - RNA, 22 nt, Homo sapiens
  source 1..22: mol_type = unassigned RNA
gtggagtcctggggaatggaga

SEQ ID NO: 3287 - RNA, 22 nt, Homo sapiens
  source 1..22: mol_type = unassigned RNA
tctccattccccaggactccac

SEQ ID NO: 3288 - RNA, 23 nt, Homo sapiens
  source 1..23: mol_type = unassigned RNA
agggactgccttaggagaaagtt

SEQ ID NO: 3289 - RNA, 23 nt, Homo sapiens
  source 1..23: mol_type = unassigned RNA
aactttctcctaaggcagtccct

SEQ ID NO: 3290 - RNA, 17 nt, Homo sapiens
  source 1..17: mol_type = unassigned RNA
gggatatgaagaaaaat

SEQ ID NO: 3291 - RNA, 17 nt, Homo sapiens
  source 1..17: mol_type = unassigned RNA
atttttcttcatatccc

SEQ ID NO: 3292 - RNA, 22 nt, Homo sapiens
  source 1..22: mol_type = unassigned RNA
tggaagggagaagagctttaat

SEQ ID NO: 3293 - RNA, 22 nt, Homo sapiens
  source 1..22: mol_type = unassigned RNA
attaaagctcttctcccttcca

SEQ ID NO: 3294 - RNA, 22 nt, Homo sapiens
  source 1..22: mol_type = unassigned RNA
actttcctcactcccgtgaagt

SEQ ID NO: 3295 - RNA, 22 nt, Homo sapiens
  source 1..22: mol_type = unassigned RNA
acttcacgggagtgaggaaagt

SEQ ID NO: 3296 - RNA, 21 nt, Homo sapiens
  source 1..21: mol_type = unassigned RNA
ttcgcgggcgaaggcaaagtc

SEQ ID NO: 3297 - RNA, 21 nt, Homo sapiens
  source 1..21: mol_type = unassigned RNA
gactttgccttcgcccgcgaa

SEQ ID NO: 3298 - RNA, 22 nt, Homo sapiens
  source 1..22: mol_type = unassigned RNA
catctggcatccgtcacacaga

SEQ ID NO: 3299 - RNA, 22 nt, Homo sapiens
  source 1..22: mol_type = unassigned RNA
tctgtgtgacggatgccagatg

SEQ ID NO: 3300 - RNA, 22 nt, Homo sapiens
  source 1..22: mol_type = unassigned RNA
tgagggacagatgccagaagca

SEQ ID NO: 3301 - RNA, 22 nt, Homo sapiens
  source 1..22: mol_type = unassigned RNA
tgcttctggcatctgtccctca

SEQ ID NO: 3302 - RNA, 22 nt, Homo sapiens
  source 1..22: mol_type = unassigned RNA
aaactaatctctacactgctgc

SEQ ID NO: 3303 - RNA, 22 nt, Homo sapiens
  source 1..22: mol_type = unassigned RNA
gcagcagtgtagagattagttt

SEQ ID NO: 3304 - RNA, 22 nt, Homo sapiens
  source 1..22: mol_type = unassigned RNA
gcagtagtgtagagattggttt

SEQ ID NO: 3305 - RNA, 22 nt, Homo sapiens
  source 1..22: mol_type = unassigned RNA
aaaccaatctctacactactgc

SEQ ID NO: 3306 - RNA, 21 nt, Homo sapiens
  source 1..21: mol_type = unassigned RNA
gctgcaccggagactgggtaa

SEQ ID NO: 3307 - RNA, 21 nt, Homo sapiens
  source 1..21: mol_type = unassigned RNA
ttacccagtctccggtgcagc

SEQ ID NO: 3308 - RNA, 21 nt, Homo sapiens
  source 1..21: mol_type = unassigned RNA
tacccagtctccggtgcagcc

SEQ ID NO: 3309 - RNA, 21 nt, Homo sapiens
  source 1..21: mol_type = unassigned RNA
ggctgcaccggagactgggta

SEQ ID NO: 3310 - RNA, 24 nt, Homo sapiens
  source 1..24: mol_type = unassigned RNA
tgtggacagtgaggtagagggagt

SEQ ID NO: 3311 - RNA, 24 nt, Homo sapiens
  source 1..24: mol_type = unassigned RNA
actccctctacctcactgtccaca

SEQ ID NO: 3312 - RNA, 22 nt, Homo sapiens
  source 1..22: mol_type = unassigned RNA
agcttttgggaattcaggtagt

SEQ ID NO: 3313 - RNA, 22 nt, Homo sapiens
  source 1..22: mol_type = unassigned RNA
actacctgaattcccaaaagct

SEQ ID NO: 3314 - RNA, 21 nt, Homo sapiens
  source 1..21: mol_type = unassigned RNA
acctgaattaccaaaagcttt

SEQ ID NO: 3315 - RNA, 21 nt, Homo sapiens
  source 1..21: mol_type = unassigned RNA
aaagcttttggtaattcaggt

SEQ ID NO: 3316 - RNA, 22 nt, Homo sapiens
  source 1..22: mol_type = unassigned RNA
atatacctgttcggtctcttta

SEQ ID NO: 3317 - RNA, 22 nt, Homo sapiens
  source 1..22: mol_type = unassigned RNA
taaagagaccgaacaggtatat

SEQ ID NO: 3318 - RNA, 22 nt, Homo sapiens
  source 1..22: mol_type = unassigned RNA
aggggaccaaagagatatatag

SEQ ID NO: 3319 - RNA, 22 nt, Homo sapiens
  source 1..22: mol_type = unassigned RNA
ctatatatctctttggtcccct

SEQ ID NO: 3320 - RNA, 23 nt, Homo sapiens
  source 1..23: mol_type = unassigned RNA
tttgtatggatatgtgtgtgtat

SEQ ID NO: 3321 - RNA, 23 nt, Homo sapiens
  source 1..23: mol_type = unassigned RNA
atacacacacatatccatacaaa

SEQ ID NO: 3322 - RNA, 22 nt, Homo sapiens
  source 1..22: mol_type = unassigned RNA
tgtgttagaataggggcaataa

SEQ ID NO: 3323 - RNA, 22 nt, Homo sapiens
  source 1..22: mol_type = unassigned RNA
ttattgcccctattctaacaca

SEQ ID NO: 3324 - RNA, 22 nt, Homo sapiens
  source 1..22: mol_type = unassigned RNA
attgcctctgttctaacacaag

SEQ ID NO: 3325 - RNA, 22 nt, Homo sapiens
  source 1..22: mol_type = unassigned RNA
cttgtgttagaacagaggcaat

SEQ ID NO: 3326 - RNA, 22 nt, Homo sapiens
  source 1..22: mol_type = unassigned RNA
aagggcttcctctctgcaggac

SEQ ID NO: 3327 - RNA, 22 nt, Homo sapiens
  source 1..22: mol_type = unassigned RNA
gtcctgcagagaggaagccctt

SEQ ID NO: 3328 - RNA, 21 nt, Homo sapiens
  source 1..21: mol_type = unassigned RNA
cctgcagagaggaagcccttc

SEQ ID NO: 3329 - RNA, 21 nt, Homo sapiens
  source 1..21: mol_type = unassigned RNA
gaagggcttcctctctgcagg

SEQ ID NO: 3330 - RNA, 22 nt, Homo sapiens
  source 1..22: mol_type = unassigned RNA
aggatttcagaaatactggtgt

SEQ ID NO: 3331 - RNA, 22 nt, Homo sapiens
  source 1..22: mol_type = unassigned RNA
acaccagtatttctgaaatcct

SEQ ID NO: 3332 - RNA, 24 nt, Homo sapiens
  source 1..24: mol_type = unassigned RNA
agatgtatggaatctgtatatatc

SEQ ID NO: 3333 - RNA, 24 nt, Homo sapiens
  source 1..24: mol_type = unassigned RNA
gatatatacagattccatacatct

SEQ ID NO: 3334 - RNA, 22 nt, Homo sapiens
  source 1..22: mol_type = unassigned RNA
cggggagagaacgcagtgacgt

SEQ ID NO: 3335 - RNA, 22 nt, Homo sapiens
  source 1..22: mol_type = unassigned RNA
acgtcactgcgttctctccccg

SEQ ID NO: 3336 - RNA, 19 nt, Homo sapiens
  source 1..19: mol_type = unassigned RNA
tggggcggagcttccggag

SEQ ID NO: 3337 - RNA, 19 nt, Homo sapiens
  source 1..19: mol_type = unassigned RNA
ctccggaagctccgcccca

SEQ ID NO: 3338 - RNA, 21 nt, Homo sapiens
  source 1..21: mol_type = unassigned RNA
tcacgcggagagatggctttg

SEQ ID NO: 3339 - RNA, 21 nt, Homo sapiens
  source 1..21: mol_type = unassigned RNA
caaagccatctctccgcgtga

SEQ ID NO: 3340 - RNA, 22 nt, Homo sapiens
  source 1..22: mol_type = unassigned RNA
caggcgtctgtctacgtggctt

SEQ ID NO: 3341 - RNA, 22 nt, Homo sapiens
  source 1..22: mol_type = unassigned RNA
aagccacgtagacagacgcctg

SEQ ID NO: 3342 - RNA, 22 nt, Homo sapiens
  source 1..22: mol_type = unassigned RNA
caccttgcgctactcaggtctg

SEQ ID NO: 3343 - RNA, 22 nt, Homo sapiens
  source 1..22: mol_type = unassigned RNA
cagacctgagtagcgcaaggtg

SEQ ID NO: 3344 - RNA, 22 nt, Homo sapiens
  source 1..22: mol_type = unassigned RNA
aatctgagaaggcgcacaaggt

SEQ ID NO: 3345 - RNA, 22 nt, Homo sapiens
  source 1..22: mol_type = unassigned RNA
accttgtgcgccttctcagatt

SEQ ID NO: 3346 - RNA, 22 nt, Homo sapiens
  source 1..22: mol_type = unassigned RNA
aaggcctttctgaaccttcaga

SEQ ID NO: 3347 - RNA, 22 nt, Homo sapiens
  source 1..22: mol_type = unassigned RNA
tctgaaggttcagaaaggcctt

SEQ ID NO: 3348 - RNA, 22 nt, Homo sapiens
  source 1..22: mol_type = unassigned RNA
gtgacatcacatatacggcagc

SEQ ID NO: 3349 - RNA, 22 nt, Homo sapiens
  source 1..22: mol_type = unassigned RNA
gctgccgtatatgtgatgtcac

SEQ ID NO: 3350 - RNA, 24 nt, Homo sapiens
  source 1..24: mol_type = unassigned RNA
tcagaacaaatgccggttcccaga

SEQ ID NO: 3351 - RNA, 24 nt, Homo sapiens
  source 1..24: mol_type = unassigned RNA
tctgggaaccggcatttgttctga

SEQ ID NO: 3352 - RNA, 22 nt, Homo sapiens
  source 1..22: mol_type = unassigned RNA
tgagaaccacgtctgctctgag

SEQ ID NO: 3353 - RNA, 22 nt, Homo sapiens
  source 1..22: mol_type = unassigned RNA
ctcagagcagacgtggttctca

SEQ ID NO: 3354 - RNA, 17 nt, Homo sapiens
  source 1..17: mol_type = unassigned RNA
tcatattgcttctttct

SEQ ID NO: 3355 - RNA, 17 nt, Homo sapiens
  source 1..17: mol_type = unassigned RNA
agaaagaagcaatatga

SEQ ID NO: 3356 - RNA, 22 nt, Homo sapiens
  source 1..22: mol_type = unassigned RNA
tgtgacagattgataactgaaa

SEQ ID NO: 3357 - RNA, 22 nt, Homo sapiens
  source 1..22: mol_type = unassigned RNA
tttcagttatcaatctgtcaca

SEQ ID NO: 3358 - RNA, 23 nt, Homo sapiens
  source 1..23: mol_type = unassigned RNA
tggagtccaggaatctgcatttt

SEQ ID NO: 3359 - RNA, 23 nt, Homo sapiens
  source 1..23: mol_type = unassigned RNA
aaaatgcagattcctggactcca

SEQ ID NO: 3360 - RNA, 22 nt, Homo sapiens
  source 1..22: mol_type = unassigned RNA
aagcccttaccccaaaaagtat

SEQ ID NO: 3361 - RNA, 22 nt, Homo sapiens
  source 1..22: mol_type = unassigned RNA
atactttttggggtaagggctt

SEQ ID NO: 3362 - RNA, 22 nt, Homo sapiens
  source 1..22: mol_type = unassigned RNA
aagcccttaccccaaaaagcat

SEQ ID NO: 3363 - RNA, 22 nt, Homo sapiens
  source 1..22: mol_type = unassigned RNA
atgctttttggggtaagggctt

SEQ ID NO: 3364 - RNA, 22 nt, Homo sapiens
  source 1..22: mol_type = unassigned RNA
tggaatgtaaggaagtgtgtgg

SEQ ID NO: 3365 - RNA, 22 nt, Homo sapiens
  source 1..22: mol_type = unassigned RNA
ccacacacttccttacattcca

SEQ ID NO: 3366 - RNA, 22 nt, Homo sapiens
  source 1..22: mol_type = unassigned RNA
cttatcagattgtattgtaatt

SEQ ID NO: 3367 - RNA, 22 nt, Homo sapiens
  source 1..22: mol_type = unassigned RNA
aattacaatacaatctgataag

SEQ ID NO: 3368 - RNA, 22 nt, Homo sapiens
  source 1..22: mol_type = unassigned RNA
ttataatacaacctgataagtg

SEQ ID NO: 3369 - RNA, 22 nt, Homo sapiens
  source 1..22: mol_type = unassigned RNA
cacttatcaggttgtattataa

SEQ ID NO: 3370 - RNA, 22 nt, Homo sapiens
  source 1..22: mol_type = unassigned RNA
cttagcaggttgtattatcatt

SEQ ID NO: 3371 - RNA, 22 nt, Homo sapiens
  source 1..22: mol_type = unassigned RNA
aatgataatacaacctgctaag

SEQ ID NO: 3372 - RNA, 22 nt, Homo sapiens
  source 1..22: mol_type = unassigned RNA
atataatacaacctgctaagtg

SEQ ID NO: 3373 - RNA, 22 nt, Homo sapiens
  source 1..22: mol_type = unassigned RNA
cacttagcaggttgtattatat

SEQ ID NO: 3374 - RNA, 22 nt, Homo sapiens
  source 1..22: mol_type = unassigned RNA
cacttagcaggttgtattatat

SEQ ID NO: 3375 - RNA, 22 nt, Homo sapiens
  source 1..22: mol_type = unassigned RNA
atataatacaacctgctaagtg

SEQ ID NO: 3376 - RNA, 22 nt, Homo sapiens
  source 1..22: mol_type = unassigned RNA
ataatacaacctgctaagtgct

SEQ ID NO: 3377 - RNA, 22 nt, Homo sapiens
  source 1..22: mol_type = unassigned RNA
agcacttagcaggttgtattat

SEQ ID NO: 3378 - RNA, 22 nt, Homo sapiens
  source 1..22: mol_type = unassigned RNA
tttggtccccttcaaccagctg

SEQ ID NO: 3379 - RNA, 22 nt, Homo sapiens
  source 1..22: mol_type = unassigned RNA
cagctggttgaaggggaccaaa

SEQ ID NO: 3380 - RNA, 22 nt, Homo sapiens
  source 1..22: mol_type = unassigned RNA
tttggtccccttcaaccagcta

SEQ ID NO: 3381 - RNA, 22 nt, Homo sapiens
  source 1..22: mol_type = unassigned RNA
tagctggttgaaggggaccaaa

SEQ ID NO: 3382 - RNA, 22 nt, Homo sapiens
  source 1..22: mol_type = unassigned RNA
tgtaaacatccttgactggaag

SEQ ID NO: 3383 - RNA, 22 nt, Homo sapiens
  source 1..22: mol_type = unassigned RNA
cttccagtcaaggatgtttaca

SEQ ID NO: 3384 - RNA, 22 nt, Homo sapiens
  source 1..22: mol_type = unassigned RNA
tgtcagtttgtcaaatacccca

SEQ ID NO: 3385 - RNA, 22 nt, Homo sapiens
  source 1..22: mol_type = unassigned RNA
tggggtatttgacaaactgaca

SEQ ID NO: 3386 - RNA, 22 nt, Homo sapiens
  source 1..22: mol_type = unassigned RNA
cgtgtatttgacaagctgagtt

SEQ ID NO: 3387 - RNA, 22 nt, Homo sapiens
  source 1..22: mol_type = unassigned RNA
aactcagcttgtcaaatacacg

SEQ ID NO: 3388 - RNA, 21 nt, Homo sapiens
  source 1..21: mol_type = unassigned RNA
ttcacagtggctaagttccgc

SEQ ID NO: 3389 - RNA, 21 nt, Homo sapiens
  source 1..21: mol_type = unassigned RNA
gcggaacttagccactgtgaa

SEQ ID NO: 3390 - RNA, 22 nt, Homo sapiens
  source 1..22: mol_type = unassigned RNA
agggcttagctgcttgtgagca

SEQ ID NO: 3391 - RNA, 22 nt, Homo sapiens
  source 1..22: mol_type = unassigned RNA
tgctcacaagcagctaagccct

SEQ ID NO: 3392 - RNA, 21 nt, Homo sapiens
  source 1..21: mol_type = unassigned RNA
atcacattgccagggattacc

SEQ ID NO: 3393 - RNA, 21 nt, Homo sapiens
  source 1..21: mol_type = unassigned RNA
ggtaatccctggcaatgtgat

SEQ ID NO: 3394 - RNA, 22 nt, Homo sapiens
  source 1..22: mol_type = unassigned RNA
tgggttcctggcatgctgattt

SEQ ID NO: 3395 - RNA, 22 nt, Homo sapiens
  source 1..22: mol_type = unassigned RNA
aaatcagcatgccaggaaccca

SEQ ID NO: 3396 - RNA, 22 nt, Homo sapiens
  source 1..22: mol_type = unassigned RNA
ctttcagtcggatgtttacagc

SEQ ID NO: 3397 - RNA, 22 nt, Homo sapiens
  source 1..22: mol_type = unassigned RNA
gctgtaaacatccgactgaaag

SEQ ID NO: 3398 - RNA, 22 nt, Homo sapiens
  source 1..22: mol_type = unassigned RNA
tgcctactgagctgatatcagt

SEQ ID NO: 3399 - RNA, 22 nt, Homo sapiens
  source 1..22: mol_type = unassigned RNA
actgatatcagctcagtaggca

SEQ ID NO: 3400 - RNA, 22 nt, Homo sapiens
  source 1..22: mol_type = unassigned RNA
tgcctactgagctgaaacacag

SEQ ID NO: 3401 - RNA, 22 nt, Homo sapiens
  source 1..22: mol_type = unassigned RNA
ctgtgtttcagctcagtaggca

SEQ ID NO: 3402 - RNA, 22 nt, Homo sapiens
  source 1..22: mol_type = unassigned RNA
tggctcagttcagcaggaacag

SEQ ID NO: 3403 - RNA, 22 nt, Homo sapiens
  source 1..22: mol_type = unassigned RNA
ctgttcctgctgaactgagcca

SEQ ID NO: 3404 - RNA, 21 nt, Homo sapiens
  source 1..21: mol_type = unassigned RNA
ttcacagtggctaagttctgc

SEQ ID NO: 3405 - RNA, 21 nt, Homo sapiens
  source 1..21: mol_type = unassigned RNA
gcagaacttagccactgtgaa

SEQ ID NO: 3406 - RNA, 22 nt, Homo sapiens
  source 1..22: mol_type = unassigned RNA
agagcttagctgattggtgaac

SEQ ID NO: 3407 - RNA, 22 nt, Homo sapiens
  source 1..22: mol_type = unassigned RNA
gttcaccaatcagctaagctct

SEQ ID NO: 3408 - RNA, 23 nt, Homo sapiens
  source 1..23: mol_type = unassigned RNA
tgtagtgtttcctactttatgga

SEQ ID NO: 3409 - RNA, 23 nt, Homo sapiens
  source 1..23: mol_type = unassigned RNA
tccataaagtaggaaacactaca

SEQ ID NO: 3410 - RNA, 21 nt, Homo sapiens
  source 1..21: mol_type = unassigned RNA
cataaagtagaaagcactact

SEQ ID NO: 3411 - RNA, 21 nt, Homo sapiens
  source 1..21: mol_type = unassigned RNA
agtagtgctttctactttatg

SEQ ID NO: 3412 - RNA, 22 nt, Homo sapiens
  source 1..22: mol_type = unassigned RNA
tgaaggtctactgtgtgccagg

SEQ ID NO: 3413 - RNA, 22 nt, Homo sapiens
  source 1..22: mol_type = unassigned RNA
cctggcacacagtagaccttca

SEQ ID NO: 3414 - RNA, 22 nt, Homo sapiens
  source 1..22: mol_type = unassigned RNA
ttgtacatggtaggctttcatt

SEQ ID NO: 3415 - RNA, 22 nt, Homo sapiens
  source 1..22: mol_type = unassigned RNA
aatgaaagcctaccatgtacaa

SEQ ID NO: 3416 - RNA, 21 nt, Homo sapiens
  source 1..21: mol_type = unassigned RNA
ctggatggctcctccatgtct

SEQ ID NO: 3417 - RNA, 21 nt, Homo sapiens
  source 1..21: mol_type = unassigned RNA
agacatggaggagccatccag

SEQ ID NO: 3418 - RNA, 23 nt, Homo sapiens
  source 1..23: mol_type = unassigned RNA
tcttggagtaggtcattgggtgg

SEQ ID NO: 3419 - RNA, 23 nt, Homo sapiens
  source 1..23: mol_type = unassigned RNA
ccacccaatgacctactccaaga

SEQ ID NO: 3420 - RNA, 22 nt, Homo sapiens
  source 1..22: mol_type = unassigned RNA
ctcatctgcaaagaagtaagtg

SEQ ID NO: 3421 - RNA, 22 nt, Homo sapiens
  source 1..22: mol_type = unassigned RNA
cacttacttctttgcagatgag

SEQ ID NO: 3422 - RNA, 22 nt, Homo sapiens
  source 1..22: mol_type = unassigned RNA
aactgtttgcagaggaaactga

SEQ ID NO: 3423 - RNA, 22 nt, Homo sapiens
  source 1..22: mol_type = unassigned RNA
tcagtttcctctgcaaacagtt

SEQ ID NO: 3424 - RNA, 22 nt, Homo sapiens
  source 1..22: mol_type = unassigned RNA
cttggttcagggagggtcccca

SEQ ID NO: 3425 - RNA, 22 nt, Homo sapiens
  source 1..22: mol_type = unassigned RNA
tggggaccctccctgaaccaag

SEQ ID NO: 3426 - RNA, 22 nt, Homo sapiens
  source 1..22: mol_type = unassigned RNA
aggaccttccctgaaccaagga

SEQ ID NO: 3427 - RNA, 22 nt, Homo sapiens
  source 1..22: mol_type = unassigned RNA
tccttggttcagggaaggtcct

SEQ ID NO: 3428 - RNA, 21 nt, Homo sapiens
  source 1..21: mol_type = unassigned RNA
acctcctgtgtgcatggatta

SEQ ID NO: 3429 - RNA, 21 nt, Homo sapiens
  source 1..21: mol_type = unassigned RNA
taatccatgcacacaggaggt

SEQ ID NO: 3430 - RNA, 22 nt, Homo sapiens
  source 1..22: mol_type = unassigned RNA
tacccattgcatatcggagttg

SEQ ID NO: 3431 - RNA, 22 nt, Homo sapiens
  source 1..22: mol_type = unassigned RNA
caactccgatatgcaatgggta

SEQ ID NO: 3432 - RNA, 18 nt, Homo sapiens
  source 1..18: mol_type = unassigned RNA
aaagctgggttgagaagg

SEQ ID NO: 3433 - RNA, 18 nt, Homo sapiens
  source 1..18: mol_type = unassigned RNA
ccttctcaacccagcttt

SEQ ID NO: 3434 - RNA, 20 nt, Homo sapiens
  source 1..20: mol_type = unassigned RNA
ggtatccgtttggggatggt

SEQ ID NO: 3435 - RNA, 20 nt, Homo sapiens
  source 1..20: mol_type = unassigned RNA
accatccccaaacggatacc

SEQ ID NO: 3436 - RNA, 22 nt, Homo sapiens
  source 1..22: mol_type = unassigned RNA
gaaggcagcagtgctcccctgt

SEQ ID NO: 3437 - RNA, 22 nt, Homo sapiens
  source 1..22: mol_type = unassigned RNA
acaggggagcactgctgccttc

SEQ ID NO: 3438 - RNA, 22 nt, Homo sapiens
  source 1..22: mol_type = unassigned RNA
tcagtgcatcacagaactttgt

SEQ ID NO: 3439 - RNA, 22 nt, Homo sapiens
  source 1..22: mol_type = unassigned RNA
acaaagttctgtgatgcactga

SEQ ID NO: 3440 - RNA, 22 nt, Homo sapiens
  source 1..22: mol_type = unassigned RNA
aagttctgttatacactcaggc

SEQ ID NO: 3441 - RNA, 22 nt, Homo sapiens
  source 1..22: mol_type = unassigned RNA
gcctgagtgtataacagaactt

SEQ ID NO: 3442 - RNA, 22 nt, Homo sapiens
  source 1..22: mol_type = unassigned RNA
ctggccctctctgcccttccgt

SEQ ID NO: 3443 - RNA, 22 nt, Homo sapiens
  source 1..22: mol_type = unassigned RNA
acggaagggcagagagggccag

SEQ ID NO: 3444 - RNA, 21 nt, Homo sapiens
  source 1..21: mol_type = unassigned RNA
ctagactgaagctccttgagg

SEQ ID NO: 3445 - RNA, 21 nt, Homo sapiens
  source 1..21: mol_type = unassigned RNA
cctcaaggagcttcagtctag

SEQ ID NO: 3446 - RNA, 21 nt, Homo sapiens
  source 1..21: mol_type = unassigned RNA
tcgaggagctcacagtctagt

SEQ ID NO: 3447 - RNA, 21 nt, Homo sapiens
  source 1..21: mol_type = unassigned RNA
actagactgtgagctcctcga

SEQ ID NO: 3448 - RNA, 21 nt, Homo sapiens
  source 1..21: mol_type = unassigned RNA
cacattacacggtcgacctct

SEQ ID NO: 3449 - RNA, 21 nt, Homo sapiens
  source 1..21: mol_type = unassigned RNA
agaggtcgaccgtgtaatgtg

SEQ ID NO: 3450 - RNA, 22 nt, Homo sapiens
  source 1..22: mol_type = unassigned RNA
aggtggtccgtggcgcgttcgc

SEQ ID NO: 3451 - RNA, 22 nt, Homo sapiens
  source 1..22: mol_type = unassigned RNA
gcgaacgcgccacggaccacct

SEQ ID NO: 3452 - RNA, 23 nt, Homo sapiens
  source 1..23: mol_type = unassigned RNA
cgcatcccctagggcattggtgt

SEQ ID NO: 3453 - RNA, 23 nt, Homo sapiens
  source 1..23: mol_type = unassigned RNA
acaccaatgccctaggggatgcg

SEQ ID NO: 3454 - RNA, 20 nt, Homo sapiens
  source 1..20: mol_type = unassigned RNA
cctctgggcccttcctccag

SEQ ID NO: 3455 - RNA, 20 nt, Homo sapiens
  source 1..20: mol_type = unassigned RNA
ctggaggaagggcccagagg

SEQ ID NO: 3456 - RNA, 23 nt, Homo sapiens
  source 1..23: mol_type = unassigned RNA
cctagtaggtgtccagtaagtgt

SEQ ID NO: 3457 - RNA, 23 nt, Homo sapiens
  source 1..23: mol_type = unassigned RNA
acacttactggacacctactagg

SEQ ID NO: 3458 - RNA, 21 nt, Homo sapiens
  source 1..21: mol_type = unassigned RNA
acggtgctggatgtggccttt

SEQ ID NO: 3459 - RNA, 21 nt, Homo sapiens
  source 1..21: mol_type = unassigned RNA
aaaggccacatccagcaccgt

SEQ ID NO: 3460 - RNA, 23 nt, Homo sapiens
  source 1..23: mol_type = unassigned RNA
tcagcaccaggatattgttggag

SEQ ID NO: 3461 - RNA, 23 nt, Homo sapiens
  source 1..23: mol_type = unassigned RNA
ctccaacaatatcctggtgctga

SEQ ID NO: 3462 - RNA, 23 nt, Homo sapiens
  source 1..23: mol_type = unassigned RNA
tcaacaaaatcactgatgctgga

SEQ ID NO: 3463 - RNA, 23 nt, Homo sapiens
  source 1..23: mol_type = unassigned RNA
tccagcatcagtgattttgttga

SEQ ID NO: 3464 - RNA, 22 nt, Homo sapiens
  source 1..22: mol_type = unassigned RNA
aacaatatcctggtgctgagtg

SEQ ID NO: 3465 - RNA, 22 nt, Homo sapiens
  source 1..22: mol_type = unassigned RNA
cactcagcaccaggatattgtt

SEQ ID NO: 3466 - RNA, 23 nt, Homo sapiens
  source 1..23: mol_type = unassigned RNA
ggcaggttctcaccctctctagg

SEQ ID NO: 3467 - RNA, 23 nt, Homo sapiens
  source 1..23: mol_type = unassigned RNA
cctagagagggtgagaacctgcc

SEQ ID NO: 3468 - RNA, 23 nt, Homo sapiens
  source 1..23: mol_type = unassigned RNA
gacacgggcgacagctgcggccc

SEQ ID NO: 3469 - RNA, 23 nt, Homo sapiens
  source 1..23: mol_type = unassigned RNA
gggccgcagctgtcgcccgtgtc

SEQ ID NO: 3470 - RNA, 21 nt, Homo sapiens
  source 1..21: mol_type = unassigned RNA
atgtatgtgtgcatgtgcatg

SEQ ID NO: 3471 - RNA, 21 nt, Homo sapiens
  source 1..21: mol_type = unassigned RNA
catgcacatgcacacatacat

SEQ ID NO: 3472 - RNA, 22 nt, Homo sapiens
  source 1..22: mol_type = unassigned RNA
tatacaagggcagactctctct

SEQ ID NO: 3473 - RNA, 22 nt, Homo sapiens
  source 1..22: mol_type = unassigned RNA
agagagagtctgcccttgtata

SEQ ID NO: 3474 - RNA, 20 nt, Homo sapiens
  source 1..20: mol_type = unassigned RNA
ggcggcggcggaggcggggg

SEQ ID NO: 3475 - RNA, 20 nt, Homo sapiens
  source 1..20: mol_type = unassigned RNA
cccccgcctccgccgccgcc

SEQ ID NO: 3476 - RNA, 22 nt, Homo sapiens
  source 1..22: mol_type = unassigned RNA
gcaggtgctcacttgtcctcct

SEQ ID NO: 3477 - RNA, 22 nt, Homo sapiens
  source 1..22: mol_type = unassigned RNA
aggaggacaagtgagcacctgc

SEQ ID NO: 3478 - RNA, 19 nt, Homo sapiens
  source 1..19: mol_type = unassigned RNA
ggggcctggcggtgggcgg

SEQ ID NO: 3479 - RNA, 19 nt, Homo sapiens
  source 1..19: mol_type = unassigned RNA
ccgcccaccgccaggcccc

SEQ ID NO: 3480 - RNA, 22 nt, Homo sapiens
  source 1..22: mol_type = unassigned RNA
gcccaaaggtgaattttttggg

SEQ ID NO: 3481 - RNA, 22 nt, Homo sapiens
  source 1..22: mol_type = unassigned RNA
cccaaaaaattcacctttgggc

SEQ ID NO: 3482 - RNA, 22 nt, Homo sapiens
  source 1..22: mol_type = unassigned RNA
caaagaattctccttttgggct

SEQ ID NO: 3483 - RNA, 22 nt, Homo sapiens
  source 1..22: mol_type = unassigned RNA
agcccaaaaggagaattctttg

SEQ ID NO: 3484 - RNA, 22 nt, Homo sapiens
  source 1..22: mol_type = unassigned RNA
ctgcaatgtaagcacttcttac

SEQ ID NO: 3485 - RNA, 22 nt, Homo sapiens
  source 1..22: mol_type = unassigned RNA
gtaagaagtgcttacattgcag

SEQ ID NO: 3486 - RNA, 23 nt, Homo sapiens
  source 1..23: mol_type = unassigned RNA
aaaagtgcttacagtgcaggtag

SEQ ID NO: 3487 - RNA, 23 nt, Homo sapiens
  source 1..23: mol_type = unassigned RNA
ctacctgcactgtaagcactttt

SEQ ID NO: 3488 - RNA, 22 nt, Homo sapiens
  source 1..22: mol_type = unassigned RNA
actgtagtatgggcacttccag

SEQ ID NO: 3489 - RNA, 22 nt, Homo sapiens
  source 1..22: mol_type = unassigned RNA
ctggaagtgcccatactacagt

SEQ ID NO: 3490 - RNA, 23 nt, Homo sapiens
  source 1..23: mol_type = unassigned RNA
caaagtgctcatagtgcaggtag

SEQ ID NO: 3491 - RNA, 23 nt, Homo sapiens
  source 1..23: mol_type = unassigned RNA
ctacctgcactatgagcactttg

SEQ ID NO: 3492 - RNA, 23 nt, Homo sapiens
  source 1..23: mol_type = unassigned RNA
ggggtattgtttccgctgccagg

SEQ ID NO: 3493 - RNA, 23 nt, Homo sapiens
  source 1..23: mol_type = unassigned RNA
cctggcagcggaaacaatacccc

SEQ ID NO: 3494 - RNA, 23 nt, Homo sapiens
  source 1..23: mol_type = unassigned RNA
tagcagcgggaacagttctgcag

SEQ ID NO: 3495 - RNA, 23 nt, Homo sapiens
  source 1..23: mol_type = unassigned RNA
ctgcagaactgttcccgctgcta

SEQ ID NO: 3496 - RNA, 21 nt, Homo sapiens
  source 1..21: mol_type = unassigned RNA
cgagcctcaagcaagggactt

SEQ ID NO: 3497 - RNA, 21 nt, Homo sapiens
  source 1..21: mol_type = unassigned RNA
aagtcccttgcttgaggctcg

SEQ ID NO: 3498 - RNA, 22 nt, Homo sapiens
  source 1..22: mol_type = unassigned RNA
tagtcccttccttgaagcggtc

SEQ ID NO: 3499 - RNA, 22 nt, Homo sapiens
  source 1..22: mol_type = unassigned RNA
gaccgcttcaaggaagggacta

SEQ ID NO: 3500 - RNA, 21 nt, Homo sapiens
  source 1..21: mol_type = unassigned RNA
actggacttggagtcagaagg

SEQ ID NO: 3501 - RNA, 21 nt, Homo sapiens
  source 1..21: mol_type = unassigned RNA
ccttctgactccaagtccagt

SEQ ID NO: 3502 - RNA, 22 nt, Homo sapiens
  source 1..22: mol_type = unassigned RNA
ctcctgactccaggtcctgtgt

SEQ ID NO: 3503 - RNA, 22 nt, Homo sapiens
  source 1..22: mol_type = unassigned RNA
acacaggacctggagtcaggag

SEQ ID NO: 3504 - RNA, 22 nt, Homo sapiens
  source 1..22: mol_type = unassigned RNA
tttgttcgttcggctcgcgtga

SEQ ID NO: 3505 - RNA, 22 nt, Homo sapiens
  source 1..22: mol_type = unassigned RNA
tcacgcgagccgaacgaacaaa

SEQ ID NO: 3506 - RNA, 22 nt, Homo sapiens
  source 1..22: mol_type = unassigned RNA
acggatgtttgagcatgtgcta

SEQ ID NO: 3507 - RNA, 22 nt, Homo sapiens
  source 1..22: mol_type = unassigned RNA
tagcacatgctcaaacatccgt

SEQ ID NO: 3508 - RNA, 23 nt, Homo sapiens
  source 1..23: mol_type = unassigned RNA
tcaaatgctcagactcctgtggt

SEQ ID NO: 3509 - RNA, 23 nt, Homo sapiens
  source 1..23: mol_type = unassigned RNA
accacaggagtctgagcatttga

SEQ ID NO: 3510 - RNA, 22 nt, Homo sapiens
  source 1..22: mol_type = unassigned RNA
cggcaacaagaaactgcctgag

SEQ ID NO: 3511 - RNA, 22 nt, Homo sapiens
  source 1..22: mol_type = unassigned RNA
ctcaggcagtttcttgttgccg

SEQ ID NO: 3512 - RNA, 22 nt, Homo sapiens
  source 1..22: mol_type = unassigned RNA
taggtagtttcatgttgttggg

SEQ ID NO: 3513 - RNA, 22 nt, Homo sapiens
  source 1..22: mol_type = unassigned RNA
cccaacaacatgaaactaccta

SEQ ID NO: 3514 - RNA, 22 nt, Homo sapiens
  source 1..22: mol_type = unassigned RNA
caatgtttccacagtgcatcac

SEQ ID NO: 3515 - RNA, 22 nt, Homo sapiens
  source 1..22: mol_type = unassigned RNA
gtgatgcactgtggaaacattg

SEQ ID NO: 3516 - RNA, 21 nt, Homo sapiens
  source 1..21: mol_type = unassigned RNA
gtgcattgtagttgcattgca

SEQ ID NO: 3517 - RNA, 21 nt, Homo sapiens
  source 1..21: mol_type = unassigned RNA
tgcaatgcaactacaatgcac

SEQ ID NO: 3518 - RNA, 18 nt, Homo sapiens
  source 1..18: mol_type = unassigned RNA
atcccacctctgccacca

SEQ ID NO: 3519 - RNA, 18 nt, Homo sapiens
  source 1..18: mol_type = unassigned RNA
tggtggcagaggtgggat

SEQ ID NO: 3520 - RNA, 19 nt, Homo sapiens
  source 1..19: mol_type = unassigned RNA
atcccaccactgccaccat

SEQ ID NO: 3521 - RNA, 19 nt, Homo sapiens
  source 1..19: mol_type = unassigned RNA
atggtggcagtggtgggat

SEQ ID NO: 3522 - RNA, 22 nt, Homo sapiens
  source 1..22: mol_type = unassigned RNA
accttcctctccatgggtcttt

SEQ ID NO: 3523 - RNA, 22 nt, Homo sapiens
  source 1..22: mol_type = unassigned RNA
aaagacccatggagaggaaggt

SEQ ID NO: 3524 - RNA, 22 nt, Homo sapiens
  source 1..22: mol_type = unassigned RNA
aaagacccattgaggagaaggt

SEQ ID NO: 3525 - RNA, 22 nt, Homo sapiens
  source 1..22: mol_type = unassigned RNA
accttctcctcaatgggtcttt

SEQ ID NO: 3526 - RNA, 21 nt, Homo sapiens
  source 1..21: mol_type = unassigned RNA
aatgtagagattgatcaaaat

SEQ ID NO: 3527 - RNA, 21 nt, Homo sapiens
  source 1..21: mol_type = unassigned RNA
attttgatcaatctctacatt

SEQ ID NO: 3528 - RNA, 23 nt, Homo sapiens
  source 1..23: mol_type = unassigned RNA
acggaatatgtatacggaatata

SEQ ID NO: 3529 - RNA, 23 nt, Homo sapiens
  source 1..23: mol_type = unassigned RNA
tatattccgtatacatattccgt

SEQ ID NO: 3530 - RNA, 24 nt, Homo sapiens
  source 1..24: mol_type = unassigned RNA
agagctcacagctgtccttctcta

SEQ ID NO: 3531 - RNA, 24 nt, Homo sapiens
  source 1..24: mol_type = unassigned RNA
tagagaaggacagctgtgagctct

SEQ ID NO: 3532 - RNA, 22 nt, Homo sapiens
  source 1..22: mol_type = unassigned RNA
atcaaataaggactagtctgca

SEQ ID NO: 3533 - RNA, 22 nt, Homo sapiens
  source 1..22: mol_type = unassigned RNA
tgcagactagtccttatttgat

SEQ ID NO: 3534 - RNA, 23 nt, Homo sapiens
  source 1..23: mol_type = unassigned RNA
atgagactcatgtaaaacatctt

SEQ ID NO: 3535 - RNA, 23 nt, Homo sapiens
  source 1..23: mol_type = unassigned RNA
aagatgttttacatgagtctcat

SEQ ID NO: 3536 - RNA, 21 nt, Homo sapiens
  source 1..21: mol_type = unassigned RNA
atggaatgtatatacggaata

SEQ ID NO: 3537 - RNA, 21 nt, Homo sapiens
  source 1..21: mol_type = unassigned RNA
tattccgtatatacattccat

SEQ ID NO: 3538 - RNA, 22 nt, Homo sapiens
  source 1..22: mol_type = unassigned RNA
attgtagaacctaagattggcc

SEQ ID NO: 3539 - RNA, 22 nt, Homo sapiens
  source 1..22: mol_type = unassigned RNA
ggccaatcttaggttctacaat

SEQ ID NO: 3540 - RNA, 22 nt, Homo sapiens
  source 1..22: mol_type = unassigned RNA
catctctaaggaactcccccaa

SEQ ID NO: 3541 - RNA, 22 nt, Homo sapiens
  source 1..22: mol_type = unassigned RNA
ttgggggagttccttagagatg

SEQ ID NO: 3542 - RNA, 23 nt, Homo sapiens
  source 1..23: mol_type = unassigned RNA
tatggggcttctgtagagatttc

SEQ ID NO: 3543 - RNA, 23 nt, Homo sapiens
  source 1..23: mol_type = unassigned RNA
gaaatctctacagaagccccata

SEQ ID NO: 3544 - RNA, 20 nt, Homo sapiens
  source 1..20: mol_type = unassigned RNA
ccgtgtttcccccacgcttt

SEQ ID NO: 3545 - RNA, 20 nt, Homo sapiens
  source 1..20: mol_type = unassigned RNA
aaagcgtgggggaaacacgg

SEQ ID NO: 3546 - RNA, 15 nt, Homo sapiens
  source 1..15: mol_type = unassigned RNA
aggagatcctgggtt

SEQ ID NO: 3547 - RNA, 15 nt, Homo sapiens
  source 1..15: mol_type = unassigned RNA
aacccaggatctcct

SEQ ID NO: 3548 - RNA, 22 nt, Homo sapiens
  source 1..22: mol_type = unassigned RNA
ctcgtgggctctggccacggcc

SEQ ID NO: 3549 - RNA, 22 nt, Homo sapiens
  source 1..22: mol_type = unassigned RNA
ggccgtggccagagcccacgag

SEQ ID NO: 3550 - RNA, 22 nt, Homo sapiens
  source 1..22: mol_type = unassigned RNA
cagtggccagagccctgcagtg

SEQ ID NO: 3551 - RNA, 22 nt, Homo sapiens
  source 1..22: mol_type = unassigned RNA
cactgcagggctctggccactg

SEQ ID NO: 3552 - RNA, 22 nt, Homo sapiens
  source 1..22: mol_type = unassigned RNA
ctgcagagtttgtacggaccgg

SEQ ID NO: 3553 - RNA, 22 nt, Homo sapiens
  source 1..22: mol_type = unassigned RNA
ccggtccgtacaaactctgcag

SEQ ID NO: 3554 - RNA, 20 nt, Homo sapiens
  source 1..20: mol_type = unassigned RNA
tccgtacaaactctgctgtg

SEQ ID NO: 3555 - RNA, 20 nt, Homo sapiens
  source 1..20: mol_type = unassigned RNA
cacagcagagtttgtacgga

SEQ ID NO: 3556 - RNA, 22 nt, Homo sapiens
  source 1..22: mol_type = unassigned RNA
cttccccccagtaatcttcatc

SEQ ID NO: 3557 - RNA, 22 nt, Homo sapiens
  source 1..22: mol_type = unassigned RNA
gatgaagattactggggggaag

SEQ ID NO: 3558 - RNA, 23 nt, Homo sapiens
  source 1..23: mol_type = unassigned RNA
tgaggatatggcagggaagggga

SEQ ID NO: 3559 - RNA, 23 nt, Homo sapiens
  source 1..23: mol_type = unassigned RNA
tccccttccctgccatatcctca

SEQ ID NO: 3560 - RNA, 23 nt, Homo sapiens
  source 1..23: mol_type = unassigned RNA
ttttgcatgaccctgggagtagg

SEQ ID NO: 3561 - RNA, 23 nt, Homo sapiens
  source 1..23: mol_type = unassigned RNA
cctactcccagggtcatgcaaaa

SEQ ID NO: 3562 - RNA, 22 nt, Homo sapiens
  source 1..22: mol_type = unassigned RNA
gactcactcacaggattgtgca

SEQ ID NO: 3563 - RNA, 22 nt, Homo sapiens
  source 1..22: mol_type = unassigned RNA
tgcacaatcctgtgagtgagtc

SEQ ID NO: 3564 - RNA, 22 nt, Homo sapiens
  source 1..22: mol_type = unassigned RNA
acacagtgcttcatccactact

SEQ ID NO: 3565 - RNA, 22 nt, Homo sapiens
  source 1..22: mol_type = unassigned RNA
agtagtggatgaagcactgtgt

SEQ ID NO: 3566 - RNA, 22 nt, Homo sapiens
  source 1..22: mol_type = unassigned RNA
tagtggatgatgcactctgtgc

SEQ ID NO: 3567 - RNA, 22 nt, Homo sapiens
  source 1..22: mol_type = unassigned RNA
gcacagagtgcatcatccacta

SEQ ID NO: 3568 - RNA, 21 nt, Homo sapiens
  source 1..21: mol_type = unassigned RNA
tgatgatacaggtggaggtag

SEQ ID NO: 3569 - RNA, 21 nt, Homo sapiens
  source 1..21: mol_type = unassigned RNA
ctacctccacctgtatcatca

SEQ ID NO: 3570 - RNA, 22 nt, Homo sapiens
  source 1..22: mol_type = unassigned RNA
ctacttctacctgtgttatcat

SEQ ID NO: 3571 - RNA, 22 nt, Homo sapiens
  source 1..22: mol_type = unassigned RNA
atgataacacaggtagaagtag

SEQ ID NO: 3572 - RNA, 22 nt, Homo sapiens
  source 1..22: mol_type = unassigned RNA
tgcgacattggaagtagtatca

SEQ ID NO: 3573 - RNA, 22 nt, Homo sapiens
  source 1..22: mol_type = unassigned RNA
tgatactacttccaatgtcgca

SEQ ID NO: 3574 - RNA, 21 nt, Homo sapiens
  source 1..21: mol_type = unassigned RNA
ttagacctagtacacgtcctt

SEQ ID NO: 3575 - RNA, 21 nt, Homo sapiens
  source 1..21: mol_type = unassigned RNA
aaggacgtgtactaggtctaa

SEQ ID NO: 3576 - RNA, 22 nt, Homo sapiens
  source 1..22: mol_type = unassigned RNA
tttcctaccctacctgaagact

SEQ ID NO: 3577 - RNA, 22 nt, Homo sapiens
  source 1..22: mol_type = unassigned RNA
agtcttcaggtagggtaggaaa

SEQ ID NO: 3578 - RNA, 22 nt, Homo sapiens
  source 1..22: mol_type = unassigned RNA
atctgtaagagaaagtaaatga

SEQ ID NO: 3579 - RNA, 22 nt, Homo sapiens
  source 1..22: mol_type = unassigned RNA
tcatttactttctcttacagat

SEQ ID NO: 3580 - RNA, 24 nt, Homo sapiens
  source 1..24: mol_type = unassigned RNA
cccggacaggcgttcgtgcgacgt

SEQ ID NO: 3581 - RNA, 24 nt, Homo sapiens
  source 1..24: mol_type = unassigned RNA
acgtcgcacgaacgcctgtccggg

SEQ ID NO: 3582 - RNA, 23 nt, Homo sapiens
  source 1..23: mol_type = unassigned RNA
acctggacccagcgtagacaaag

SEQ ID NO: 3583 - RNA, 23 nt, Homo sapiens
  source 1..23: mol_type = unassigned RNA
ctttgtctacgctgggtccaggt

SEQ ID NO: 3584 - RNA, 22 nt, Homo sapiens
  source 1..22: mol_type = unassigned RNA
accaagtctgcgtcatcctctc

SEQ ID NO: 3585 - RNA, 22 nt, Homo sapiens
  source 1..22: mol_type = unassigned RNA
gagaggatgacgcagacttggt

SEQ ID NO: 3586 - RNA, 23 nt, Homo sapiens
  source 1..23: mol_type = unassigned RNA
agtggatgatggagactcggtac

SEQ ID NO: 3587 - RNA, 23 nt, Homo sapiens
  source 1..23: mol_type = unassigned RNA
gtaccgagtctccatcatccact

SEQ ID NO: 3588 - RNA, 24 nt, Homo sapiens
  source 1..24: mol_type = unassigned RNA
gttccacactgacactgcagaagt

SEQ ID NO: 3589 - RNA, 24 nt, Homo sapiens
  source 1..24: mol_type = unassigned RNA
acttctgcagtgtcagtgtggaac

SEQ ID NO: 3590 - RNA, 24 nt, Homo sapiens
  source 1..24: mol_type = unassigned RNA
cctgctggtcaggagtggatactg

SEQ ID NO: 3591 - RNA, 24 nt, Homo sapiens
  source 1..24: mol_type = unassigned RNA
cagtatccactcctgaccagcagg

SEQ ID NO: 3592 - RNA, 23 nt, Homo sapiens
  source 1..23: mol_type = unassigned RNA
gagggtcttgggagggatgtgac

SEQ ID NO: 3593 - RNA, 23 nt, Homo sapiens
  source 1..23: mol_type = unassigned RNA
gtcacatccctcccaagaccctc

SEQ ID NO: 3594 - RNA, 22 nt, Homo sapiens
  source 1..22: mol_type = unassigned RNA
atatacagggggagactcttat

SEQ ID NO: 3595 - RNA, 22 nt, Homo sapiens
  source 1..22: mol_type = unassigned RNA
ataagagtctccccctgtatat

SEQ ID NO: 3596 - RNA, 22 nt, Homo sapiens
  source 1..22: mol_type = unassigned RNA
atatacagggggagactctcat

SEQ ID NO: 3597 - RNA, 22 nt, Homo sapiens
  source 1..22: mol_type = unassigned RNA
atgagagtctccccctgtatat

SEQ ID NO: 3598 - RNA, 21 nt, Homo sapiens
  source 1..21: mol_type = unassigned RNA
agaggataccctttgtatgtt

SEQ ID NO: 3599 - RNA, 21 nt, Homo sapiens
  source 1..21: mol_type = unassigned RNA
aacatacaaagggtatcctct

SEQ ID NO: 3600 - RNA, 22 nt, Homo sapiens
  source 1..22: mol_type = unassigned RNA
tctacaaaggaaagcgctttct

SEQ ID NO: 3601 - RNA, 22 nt, Homo sapiens
  source 1..22: mol_type = unassigned RNA
agaaagcgctttcctttgtaga

SEQ ID NO: 3602 - RNA, 22 nt, Homo sapiens
  source 1..22: mol_type = unassigned RNA
tcaaaactgaggggcattttct

SEQ ID NO: 3603 - RNA, 22 nt, Homo sapiens
  source 1..22: mol_type = unassigned RNA
agaaaatgcccctcagttttga

SEQ ID NO: 3604 - RNA, 24 nt, Homo sapiens
  source 1..24: mol_type = unassigned RNA
ttctccaaaagaaagcactttctg

SEQ ID NO: 3605 - RNA, 24 nt, Homo sapiens
  source 1..24: mol_type = unassigned RNA
cagaaagtgctttcttttggagaa

SEQ ID NO: 3606 - RNA, 23 nt, Homo sapiens
  source 1..23: mol_type = unassigned RNA
ttctcgaggaaagaagcactttc

SEQ ID NO: 3607 - RNA, 23 nt, Homo sapiens
  source 1..23: mol_type = unassigned RNA
gaaagtgcttctttcctcgagaa

SEQ ID NO: 3608 - RNA, 22 nt, Homo sapiens
  source 1..22: mol_type = unassigned RNA
cctctagatggaagcactgtct

SEQ ID NO: 3609 - RNA, 22 nt, Homo sapiens
  source 1..22: mol_type = unassigned RNA
agacagtgcttccatctagagg

SEQ ID NO: 3610 - RNA, 22 nt, Homo sapiens
  source 1..22: mol_type = unassigned RNA
atcgtgcatccctttagagtgt

SEQ ID NO: 3611 - RNA, 22 nt, Homo sapiens
  source 1..22: mol_type = unassigned RNA
acactctaaagggatgcacgat

SEQ ID NO: 3612 - RNA, 22 nt, Homo sapiens
  source 1..22: mol_type = unassigned RNA
atcgtgcatccctttagagtgt

SEQ ID NO: 3613 - RNA, 22 nt, Homo sapiens
  source 1..22: mol_type = unassigned RNA
acactctaaagggatgcacgat

SEQ ID NO: 3614 - RNA, 22 nt, Homo sapiens
  source 1..22: mol_type = unassigned RNA
atcgtgcatccttttagagtgt

SEQ ID NO: 3615 - RNA, 22 nt, Homo sapiens
  source 1..22: mol_type = unassigned RNA
acactctaaaaggatgcacgat

SEQ ID NO: 3616 - RNA, 22 nt, Homo sapiens
  source 1..22: mol_type = unassigned RNA
caaagcgctcccctttagaggt

SEQ ID NO: 3617 - RNA, 22 nt, Homo sapiens
  source 1..22: mol_type = unassigned RNA
acctctaaaggggagcgctttg

SEQ ID NO: 3618 - RNA, 23 nt, Homo sapiens
  source 1..23: mol_type = unassigned RNA
caaagcgcttctctttagagtgt

SEQ ID NO: 3619 - RNA, 23 nt, Homo sapiens
  source 1..23: mol_type = unassigned RNA
acactctaaagagaagcgctttg

SEQ ID NO: 3620 - RNA, 23 nt, Homo sapiens
  source 1..23: mol_type = unassigned RNA
tctctggagggaagcactttctg

SEQ ID NO: 3621 - RNA, 23 nt, Homo sapiens
  source 1..23: mol_type = unassigned RNA
cagaaagtgcttccctccagaga

SEQ ID NO: 3622 - RNA, 21 nt, Homo sapiens
  source 1..21: mol_type = unassigned RNA
gaaagcgcttctctttagagg

SEQ ID NO: 3623 - RNA, 21 nt, Homo sapiens
  source 1..21: mol_type = unassigned RNA
cctctaaagagaagcgctttc

SEQ ID NO: 3624 - RNA, 22 nt, Homo sapiens
  source 1..22: mol_type = unassigned RNA
ctctagagggaagcactttctc

SEQ ID NO: 3625 - RNA, 22 nt, Homo sapiens
  source 1..22: mol_type = unassigned RNA
gagaaagtgcttccctctagag

SEQ ID NO: 3626 - RNA, 22 nt, Homo sapiens
  source 1..22: mol_type = unassigned RNA
aaagtgcatccttttagagtgt

SEQ ID NO: 3627 - RNA, 22 nt, Homo sapiens
  source 1..22: mol_type = unassigned RNA
acactctaaaaggatgcacttt

SEQ ID NO: 3628 - RNA, 22 nt, Homo sapiens
  source 1..22: mol_type = unassigned RNA
ctctagagggaagcgctttctg

SEQ ID NO: 3629 - RNA, 22 nt, Homo sapiens
  source 1..22: mol_type = unassigned RNA
cagaaagcgcttccctctagag

SEQ ID NO: 3630 - RNA, 22 nt, Homo sapiens
  source 1..22: mol_type = unassigned RNA
caaagtgcctccctttagagtg

SEQ ID NO: 3631 - RNA, 22 nt, Homo sapiens
  source 1..22: mol_type = unassigned RNA
cactctaaagggaggcactttg

SEQ ID NO: 3632 - RNA, 22 nt, Homo sapiens
  source 1..22: mol_type = unassigned RNA
aagtgcctccttttagagtgtt

SEQ ID NO: 3633 - RNA, 22 nt, Homo sapiens
  source 1..22: mol_type = unassigned RNA
aacactctaaaaggaggcactt

SEQ ID NO: 3634 - RNA, 22 nt, Homo sapiens
  source 1..22: mol_type = unassigned RNA
ttctccaaaagggagcactttc

SEQ ID NO: 3635 - RNA, 22 nt, Homo sapiens
  source 1..22: mol_type = unassigned RNA
gaaagtgctcccttttggagaa

SEQ ID NO: 3636 - RNA, 22 nt, Homo sapiens
  source 1..22: mol_type = unassigned RNA
aaagtgcttccctttggactgt

SEQ ID NO: 3637 - RNA, 22 nt, Homo sapiens
  source 1..22: mol_type = unassigned RNA
acagtccaaagggaagcacttt

SEQ ID NO: 3638 - RNA, 21 nt, Homo sapiens
  source 1..21: mol_type = unassigned RNA
ctccagagggaagtactttct

SEQ ID NO: 3639 - RNA, 21 nt, Homo sapiens
  source 1..21: mol_type = unassigned RNA
agaaagtacttccctctggag

SEQ ID NO: 3640 - RNA, 22 nt, Homo sapiens
  source 1..22: mol_type = unassigned RNA
acaaagtgcttccctttagagt

SEQ ID NO: 3641 - RNA, 22 nt, Homo sapiens
  source 1..22: mol_type = unassigned RNA
actctaaagggaagcactttgt

SEQ ID NO: 3642 - RNA, 22 nt, Homo sapiens
  source 1..22: mol_type = unassigned RNA
ctacaaagggaagcactttctc

SEQ ID NO: 3643 - RNA, 22 nt, Homo sapiens
  source 1..22: mol_type = unassigned RNA
gagaaagtgcttccctttgtag

SEQ ID NO: 3644 - RNA, 22 nt, Homo sapiens
  source 1..22: mol_type = unassigned RNA
gaaggcgcttccctttagagcg

SEQ ID NO: 3645 - RNA, 22 nt, Homo sapiens
  source 1..22: mol_type = unassigned RNA
cgctctaaagggaagcgccttc

SEQ ID NO: 3646 - RNA, 21 nt, Homo sapiens
  source 1..21: mol_type = unassigned RNA
ctccagagggatgcactttct

SEQ ID NO: 3647 - RNA, 21 nt, Homo sapiens
  source 1..21: mol_type = unassigned RNA
agaaagtgcatccctctggag

SEQ ID NO: 3648 - RNA, 22 nt, Homo sapiens
  source 1..22: mol_type = unassigned RNA
ctctagagggaagcactttctg

SEQ ID NO: 3649 - RNA, 22 nt, Homo sapiens
  source 1..22: mol_type = unassigned RNA
cagaaagtgcttccctctagag

SEQ ID NO: 3650 - RNA, 22 nt, Homo sapiens
  source 1..22: mol_type = unassigned RNA
gaaagtgcttccttttagaggc

SEQ ID NO: 3651 - RNA, 22 nt, Homo sapiens
  source 1..22: mol_type = unassigned RNA
gcctctaaaaggaagcactttc

SEQ ID NO: 3652 - RNA, 23 nt, Homo sapiens
  source 1..23: mol_type = unassigned RNA
ctcttgagggaagcactttctgt

SEQ ID NO: 3653 - RNA, 23 nt, Homo sapiens
  source 1..23: mol_type = unassigned RNA
acagaaagtgcttccctcaagag

SEQ ID NO: 3654 - RNA, 22 nt, Homo sapiens
  source 1..22: mol_type = unassigned RNA
actggacttagggtcagaaggc

SEQ ID NO: 3655 - RNA, 22 nt, Homo sapiens
  source 1..22: mol_type = unassigned RNA
gccttctgaccctaagtccagt

SEQ ID NO: 3656 - RNA, 22 nt, Homo sapiens
  source 1..22: mol_type = unassigned RNA
aaacaaacatggtgcacttctt

SEQ ID NO: 3657 - RNA, 22 nt, Homo sapiens
  source 1..22: mol_type = unassigned RNA
aagaagtgcaccatgtttgttt

SEQ ID NO: 3658 - RNA, 22 nt, Homo sapiens
  source 1..22: mol_type = unassigned RNA
gaagttgcccatgttattttcg

SEQ ID NO: 3659 - RNA, 22 nt, Homo sapiens
  source 1..22: mol_type = unassigned RNA
cgaaaataacatgggcaacttc

SEQ ID NO: 3660 - RNA, 21 nt, Homo sapiens
  source 1..21: mol_type = unassigned RNA
aatcattcacggacaacactt

SEQ ID NO: 3661 - RNA, 21 nt, Homo sapiens
  source 1..21: mol_type = unassigned RNA
aagtgttgtccgtgaatgatt

SEQ ID NO: 3662 - RNA, 22 nt, Homo sapiens
  source 1..22: mol_type = unassigned RNA
gaagttgttcgtggtggattcg

SEQ ID NO: 3663 - RNA, 22 nt, Homo sapiens
  source 1..22: mol_type = unassigned RNA
cgaatccaccacgaacaacttc

SEQ ID NO: 3664 - RNA, 23 nt, Homo sapiens
  source 1..23: mol_type = unassigned RNA
cctccgtgttacctgtcctctag

SEQ ID NO: 3665 - RNA, 23 nt, Homo sapiens
  source 1..23: mol_type = unassigned RNA
ctagaggacaggtaacacggagg

SEQ ID NO: 3666 - RNA, 23 nt, Homo sapiens
  source 1..23: mol_type = unassigned RNA
tgaggatggatagcaaggaagcc

SEQ ID NO: 3667 - RNA, 23 nt, Homo sapiens
  source 1..23: mol_type = unassigned RNA
ggcttccttgctatccatcctca

SEQ ID NO: 3668 - RNA, 22 nt, Homo sapiens
  source 1..22: mol_type = unassigned RNA
ttcagatcccagcggtgcctct

SEQ ID NO: 3669 - RNA, 22 nt, Homo sapiens
  source 1..22: mol_type = unassigned RNA
agaggcaccgctgggatctgaa

SEQ ID NO: 3670 - RNA, 19 nt, Homo sapiens
  source 1..19: mol_type = unassigned RNA
gtcctaggaggctcctctg

SEQ ID NO: 3671 - RNA, 19 nt, Homo sapiens
  source 1..19: mol_type = unassigned RNA
cagaggagcctcctaggac

SEQ ID NO: 3672 - RNA, 21 nt, Homo sapiens
  source 1..21: mol_type = unassigned RNA
caattctcaaaggagcctccc

SEQ ID NO: 3673 - RNA, 21 nt, Homo sapiens
  source 1..21: mol_type = unassigned RNA
gggaggctcctttgagaattg

SEQ ID NO: 3674 - RNA, 21 nt, Homo sapiens
  source 1..21: mol_type = unassigned RNA
gttggggtgcaggggtctgct

SEQ ID NO: 3675 - RNA, 21 nt, Homo sapiens
  source 1..21: mol_type = unassigned RNA
agcagacccctgcaccccaac

SEQ ID NO: 3676 - RNA, 22 nt, Homo sapiens
  source 1..22: mol_type = unassigned RNA
tttccggctcgcgtgggtgtgt

SEQ ID NO: 3677 - RNA, 22 nt, Homo sapiens
  source 1..22: mol_type = unassigned RNA
acacacccacgcgagccggaaa

SEQ ID NO: 3678 - RNA, 23 nt, Homo sapiens
  source 1..23: mol_type = unassigned RNA
tgagtgtgtgtgtgtgagtgtgt

SEQ ID NO: 3679 - RNA, 23 nt, Homo sapiens
  source 1..23: mol_type = unassigned RNA
acacactcacacacacacactca

SEQ ID NO: 3680 - RNA, 22 nt, Homo sapiens
  source 1..22: mol_type = unassigned RNA
agtgggaggccagggcacggca

SEQ ID NO: 3681 - RNA, 22 nt, Homo sapiens
  source 1..22: mol_type = unassigned RNA
tgccgtgccctggcctcccact

SEQ ID NO: 3682 - RNA, 20 nt, Homo sapiens
  source 1..20: mol_type = unassigned RNA
tgagccctgtcctcccgcag

SEQ ID NO: 3683 - RNA, 20 nt, Homo sapiens
  source 1..20: mol_type = unassigned RNA
ctgcgggaggacagggctca

SEQ ID NO: 3684 - RNA, 23 nt, Homo sapiens
  source 1..23: mol_type = unassigned RNA
aagtgccgccatcttttgagtgt

SEQ ID NO: 3685 - RNA, 23 nt, Homo sapiens
  source 1..23: mol_type = unassigned RNA
acactcaaaagatggcggcactt

SEQ ID NO: 3686 - RNA, 20 nt, Homo sapiens
  source 1..20: mol_type = unassigned RNA
actcaaactgtgggggcact

SEQ ID NO: 3687 - RNA, 20 nt, Homo sapiens
  source 1..20: mol_type = unassigned RNA
agtgcccccacagtttgagt

SEQ ID NO: 3688 - RNA, 23 nt, Homo sapiens
  source 1..23: mol_type = unassigned RNA
aagtgcccccacagtttgagtgc

SEQ ID NO: 3689 - RNA, 23 nt, Homo sapiens
  source 1..23: mol_type = unassigned RNA
gcactcaaactgtgggggcactt

SEQ ID NO: 3690 - RNA, 22 nt, Homo sapiens
  source 1..22: mol_type = unassigned RNA
actcaaaagatggcggcacttt

SEQ ID NO: 3691 - RNA, 22 nt, Homo sapiens
  source 1..22: mol_type = unassigned RNA
aaagtgccgccatcttttgagt

SEQ ID NO: 3692 - RNA, 22 nt, Homo sapiens
  source 1..22: mol_type = unassigned RNA
aaacctgtgttgttcaagagtc

SEQ ID NO: 3693 - RNA, 22 nt, Homo sapiens
  source 1..22: mol_type = unassigned RNA
gactcttgaacaacacaggttt

SEQ ID NO: 3694 - RNA, 22 nt, Homo sapiens
  source 1..22: mol_type = unassigned RNA
acagtagagggaggaatcgcag

SEQ ID NO: 3695 - RNA, 22 nt, Homo sapiens
  source 1..22: mol_type = unassigned RNA
ctgcgattcctccctctactgt

SEQ ID NO: 3696 - RNA, 22 nt, Homo sapiens
  source 1..22: mol_type = unassigned RNA
gtgaaatgtttaggaccactag

SEQ ID NO: 3697 - RNA, 22 nt, Homo sapiens
  source 1..22: mol_type = unassigned RNA
ctagtggtcctaaacatttcac

SEQ ID NO: 3698 - RNA, 23 nt, Homo sapiens
  source 1..23: mol_type = unassigned RNA
ttgaactgttaagaaccactgga

SEQ ID NO: 3699 - RNA, 23 nt, Homo sapiens
  source 1..23: mol_type = unassigned RNA
tccagtggttcttaacagttcaa

SEQ ID NO: 3700 - RNA, 22 nt, Homo sapiens
  source 1..22: mol_type = unassigned RNA
tagtggtcctaaacatttcaca

SEQ ID NO: 3701 - RNA, 22 nt, Homo sapiens
  source 1..22: mol_type = unassigned RNA
tgtgaaatgtttaggaccacta

SEQ ID NO: 3702 - RNA, 21 nt, Homo sapiens
  source 1..21: mol_type = unassigned RNA
tgcaggaccaagatgagccct

SEQ ID NO: 3703 - RNA, 21 nt, Homo sapiens
  source 1..21: mol_type = unassigned RNA
agggctcatcttggtcctgca

SEQ ID NO: 3704 - RNA, 21 nt, Homo sapiens
  source 1..21: mol_type = unassigned RNA
ctcccacatgcagggtttgca

SEQ ID NO: 3705 - RNA, 21 nt, Homo sapiens
  source 1..21: mol_type = unassigned RNA
tgcaaaccctgcatgtgggag

SEQ ID NO: 3706 - RNA, 21 nt, Homo sapiens
  source 1..21: mol_type = unassigned RNA
catcccttgcatggtggaggg

SEQ ID NO: 3707 - RNA, 21 nt, Homo sapiens
  source 1..21: mol_type = unassigned RNA
ccctccaccatgcaagggatg

SEQ ID NO: 3708 - RNA, 22 nt, Homo sapiens
  source 1..22: mol_type = unassigned RNA
aaaatgaaatgagcccagccca

SEQ ID NO: 3709 - RNA, 22 nt, Homo sapiens
  source 1..22: mol_type = unassigned RNA
tgggctgggctcatttcatttt

SEQ ID NO: 3710 - RNA, 21 nt, Homo sapiens
  source 1..21: mol_type = unassigned RNA
agccgcggggatcgccgaggg

SEQ ID NO: 3711 - RNA, 21 nt, Homo sapiens
  source 1..21: mol_type = unassigned RNA
ccctcggcgatccccgcggct

SEQ ID NO: 3712 - RNA, 19 nt, Homo sapiens
  source 1..19: mol_type = unassigned RNA
agggacctgagtgtctaag

SEQ ID NO: 3713 - RNA, 19 nt, Homo sapiens
  source 1..19: mol_type = unassigned RNA
cttagacactcaggtccct

SEQ ID NO: 3714 - RNA, 19 nt, Homo sapiens
  source 1..19: mol_type = unassigned RNA
aggtgtgtctgtagagtcc

SEQ ID NO: 3715 - RNA, 19 nt, Homo sapiens
  source 1..19: mol_type = unassigned RNA
ggactctacagacacacct

SEQ ID NO: 3716 - RNA, 24 nt, Homo sapiens
  source 1..24: mol_type = unassigned RNA
catagcccggtcgctggtacatga

SEQ ID NO: 3717 - RNA, 24 nt, Homo sapiens
  source 1..24: mol_type = unassigned RNA
tcatgtaccagcgaccgggctatg

SEQ ID NO: 3718 - RNA, 18 nt, Homo sapiens
  source 1..18: mol_type = unassigned RNA
cggctggaggtgtgagga

SEQ ID NO: 3719 - RNA, 18 nt, Homo sapiens
  source 1..18: mol_type = unassigned RNA
tcctcacacctccagccg

SEQ ID NO: 3720 - RNA, 18 nt, Homo sapiens
  source 1..18: mol_type = unassigned RNA
ctaagaagttgactgaag

SEQ ID NO: 3721 - RNA, 18 nt, Homo sapiens
  source 1..18: mol_type = unassigned RNA
cttcagtcaacttcttag

SEQ ID NO: 3722 - RNA, 19 nt, Homo sapiens
  source 1..19: mol_type = unassigned RNA
gactggacaagctgaggaa

SEQ ID NO: 3723 - RNA, 19 nt, Homo sapiens
  source 1..19: mol_type = unassigned RNA
ttcctcagcttgtccagtc

SEQ ID NO: 3724 - RNA, 21 nt, Homo sapiens
  source 1..21: mol_type = unassigned RNA
gcttgtcgctgcggtgttgct

SEQ ID NO: 3725 - RNA, 21 nt, Homo sapiens
  source 1..21: mol_type = unassigned RNA
agcaacaccgcagcgacaagc

SEQ ID NO: 3726 - RNA, 17 nt, Homo sapiens
  source 1..17: mol_type = unassigned RNA
ggcgggtgcgggggtgg

SEQ ID NO: 3727 - RNA, 17 nt, Homo sapiens
  source 1..17: mol_type = unassigned RNA
ccacccccgcacccgcc

SEQ ID NO: 3728 - RNA, 21 nt, Homo sapiens
  source 1..21: mol_type = unassigned RNA
tgtgtcccattattggtgatt

SEQ ID NO: 3729 - RNA, 21 nt, Homo sapiens
  source 1..21: mol_type = unassigned RNA
aatcaccaataatgggacaca

SEQ ID NO: 3730 - RNA, 22 nt, Homo sapiens
  source 1..22: mol_type = unassigned RNA
tttaagaaaacaccatggagat

SEQ ID NO: 3731 - RNA, 22 nt, Homo sapiens
  source 1..22: mol_type = unassigned RNA
atctccatggtgttttcttaaa

SEQ ID NO: 3732 - RNA, 22 nt, Homo sapiens
  source 1..22: mol_type = unassigned RNA
gctatttcacgacaccagggtt

SEQ ID NO: 3733 - RNA, 22 nt, Homo sapiens
  source 1..22: mol_type = unassigned RNA
aaccctggtgtcgtgaaatagc

SEQ ID NO: 3734 - RNA, 23 nt, Homo sapiens
  source 1..23: mol_type = unassigned RNA
agctggtgttgtgaatcaggccg

SEQ ID NO: 3735 - RNA, 23 nt, Homo sapiens
  source 1..23: mol_type = unassigned RNA
cggcctgattcacaacaccagct

SEQ ID NO: 3736 - RNA, 21 nt, Homo sapiens
  source 1..21: mol_type = unassigned RNA
aataatacatggttgatcttt

SEQ ID NO: 3737 - RNA, 21 nt, Homo sapiens
  source 1..21: mol_type = unassigned RNA
aaagatcaaccatgtattatt

SEQ ID NO: 3738 - RNA, 22 nt, Homo sapiens
  source 1..22: mol_type = unassigned RNA
agatcgaccgtgttatattcgc

SEQ ID NO: 3739 - RNA, 22 nt, Homo sapiens
  source 1..22: mol_type = unassigned RNA
gcgaatataacacggtcgatct

SEQ ID NO: 3740 - RNA, 22 nt, Homo sapiens
  source 1..22: mol_type = unassigned RNA
aatcatgtgcagtgccaatatg

SEQ ID NO: 3741 - RNA, 22 nt, Homo sapiens
  source 1..22: mol_type = unassigned RNA
catattggcactgcacatgatt

SEQ ID NO: 3742 - RNA, 23 nt, Homo sapiens
  source 1..23: mol_type = unassigned RNA
tttggcactagcacatttttgct

SEQ ID NO: 3743 - RNA, 23 nt, Homo sapiens
  source 1..23: mol_type = unassigned RNA
agcaaaaatgtgctagtgccaaa

SEQ ID NO: 3744 - RNA, 22 nt, Homo sapiens
  source 1..22: mol_type = unassigned RNA
tcctgtactgagctgccccgag

SEQ ID NO: 3745 - RNA, 22 nt, Homo sapiens
  source 1..22: mol_type = unassigned RNA
ctcggggcagctcagtacagga

SEQ ID NO: 3746 - RNA, 22 nt, Homo sapiens
  source 1..22: mol_type = unassigned RNA
gctacttcacaacaccagggcc

SEQ ID NO: 3747 - RNA, 22 nt, Homo sapiens
  source 1..22: mol_type = unassigned RNA
ggccctggtgttgtgaagtagc

SEQ ID NO: 3748 - RNA, 22 nt, Homo sapiens
  source 1..22: mol_type = unassigned RNA
catcatcgtctcaaatgagtct

SEQ ID NO: 3749 - RNA, 22 nt, Homo sapiens
  source 1..22: mol_type = unassigned RNA
agactcatttgagacgatgatg

SEQ ID NO: 3750 - RNA, 23 nt, Homo sapiens
  source 1..23: mol_type = unassigned RNA
actccatttgttttgatgatgga

SEQ ID NO: 3751 - RNA, 23 nt, Homo sapiens
  source 1..23: mol_type = unassigned RNA
tccatcatcaaaacaaatggagt

SEQ ID NO: 3752 - RNA, 22 nt, Homo sapiens
  source 1..22: mol_type = unassigned RNA
ctcctacatattagcattaaca

SEQ ID NO: 3753 - RNA, 22 nt, Homo sapiens
  source 1..22: mol_type = unassigned RNA
tgttaatgctaatatgtaggag

SEQ ID NO: 3754 - RNA, 23 nt, Homo sapiens
  source 1..23: mol_type = unassigned RNA
ttaatgctaatcgtgataggggt

SEQ ID NO: 3755 - RNA, 23 nt, Homo sapiens
  source 1..23: mol_type = unassigned RNA
acccctatcacgattagcattaa

SEQ ID NO: 3756 - RNA, 22 nt, Homo sapiens
  source 1..22: mol_type = unassigned RNA
agatcagaaggtgattgtggct

SEQ ID NO: 3757 - RNA, 22 nt, Homo sapiens
  source 1..22: mol_type = unassigned RNA
agccacaatcaccttctgatct

SEQ ID NO: 3758 - RNA, 22 nt, Homo sapiens
  source 1..22: mol_type = unassigned RNA
tactgcagacgtggcaatcatg

SEQ ID NO: 3759 - RNA, 22 nt, Homo sapiens
  source 1..22: mol_type = unassigned RNA
catgattgccacgtctgcagta

SEQ ID NO: 3760 - RNA, 21 nt, Homo sapiens
  source 1..21: mol_type = unassigned RNA
gttagggccaacatctcttgg

SEQ ID NO: 3761 - RNA, 21 nt, Homo sapiens
  source 1..21: mol_type = unassigned RNA
ccaagagatgttggccctaac

SEQ ID NO: 3762 - RNA, 21 nt, Homo sapiens
  source 1..21: mol_type = unassigned RNA
aacatagaggaaattccacgt

SEQ ID NO: 3763 - RNA, 21 nt, Homo sapiens
  source 1..21: mol_type = unassigned RNA
acgtggaatttcctctatgtt

SEQ ID NO: 3764 - RNA, 21 nt, Homo sapiens
  source 1..21: mol_type = unassigned RNA
ggtggatattccttctatgtt

SEQ ID NO: 3765 - RNA, 21 nt, Homo sapiens
  source 1..21: mol_type = unassigned RNA
aacatagaaggaatatccacc

SEQ ID NO: 3766 - RNA, 23 nt, Homo sapiens
  source 1..23: mol_type = unassigned RNA
tcatagccctgtacaatgctgct

SEQ ID NO: 3767 - RNA, 23 nt, Homo sapiens
  source 1..23: mol_type = unassigned RNA
agcagcattgtacagggctatga

SEQ ID NO: 3768 - RNA, 22 nt, Homo sapiens
  source 1..22: mol_type = unassigned RNA
taacactgtctggtaaagatgg

SEQ ID NO: 3769 - RNA, 22 nt, Homo sapiens
  source 1..22: mol_type = unassigned RNA
ccatctttaccagacagtgtta

SEQ ID NO: 3770 - RNA, 22 nt, Homo sapiens
  source 1..22: mol_type = unassigned RNA
catcttccagtacagtgttgga

SEQ ID NO: 3771 - RNA, 22 nt, Homo sapiens
  source 1..22: mol_type = unassigned RNA
tccaacactgtactggaagatg

SEQ ID NO: 3772 - RNA, 22 nt, Homo sapiens
  source 1..22: mol_type = unassigned RNA
aactggcctacaaagtcccagt

SEQ ID NO: 3773 - RNA, 22 nt, Homo sapiens
  source 1..22: mol_type = unassigned RNA
actgggactttgtaggccagtt

SEQ ID NO: 3774 - RNA, 22 nt, Homo sapiens
  source 1..22: mol_type = unassigned RNA
tgggtctttgcgggcgagatga

SEQ ID NO: 3775 - RNA, 22 nt, Homo sapiens
  source 1..22: mol_type = unassigned RNA
tcatctcgcccgcaaagaccca

SEQ ID NO: 3776 - RNA, 21 nt, Homo sapiens
  source 1..21: mol_type = unassigned RNA
atgacctatgaattgacagac

SEQ ID NO: 3777 - RNA, 21 nt, Homo sapiens
  source 1..21: mol_type = unassigned RNA
gtctgtcaattcataggtcat

SEQ ID NO: 3778 - RNA, 22 nt, Homo sapiens
  source 1..22: mol_type = unassigned RNA
aagctgccagttgaagaactgt

SEQ ID NO: 3779 - RNA, 22 nt, Homo sapiens
  source 1..22: mol_type = unassigned RNA
acagttcttcaactggcagctt

SEQ ID NO: 3780 - RNA, 22 nt, Homo sapiens
  source 1..22: mol_type = unassigned RNA
agttcttcagtggcaagcttta

SEQ ID NO: 3781 - RNA, 22 nt, Homo sapiens
  source 1..22: mol_type = unassigned RNA
taaagcttgccactgaagaact

SEQ ID NO: 3782 - RNA, 22 nt, Homo sapiens
  source 1..22: mol_type = unassigned RNA
acagattcgattctaggggaat

SEQ ID NO: 3783 - RNA, 22 nt, Homo sapiens
  source 1..22: mol_type = unassigned RNA
attcccctagaatcgaatctgt

SEQ ID NO: 3784 - RNA, 23 nt, Homo sapiens
  source 1..23: mol_type = unassigned RNA
taccctgtagaaccgaatttgtg

SEQ ID NO: 3785 - RNA, 23 nt, Homo sapiens
  source 1..23: mol_type = unassigned RNA
cacaaattcggttctacagggta

SEQ ID NO: 3786 - RNA, 22 nt, Homo sapiens
  source 1..22: mol_type = unassigned RNA
tagcagcacgtaaatattggcg

SEQ ID NO: 3787 - RNA, 22 nt, Homo sapiens
  source 1..22: mol_type = unassigned RNA
cgccaatatttacgtgctgcta

SEQ ID NO: 3788 - RNA, 21 nt, Homo sapiens
  source 1..21: mol_type = unassigned RNA
tgagatgaagcactgtagctc

SEQ ID NO: 3789 - RNA, 21 nt, Homo sapiens
  source 1..21: mol_type = unassigned RNA
gagctacagtgcttcatctca

SEQ ID NO: 3790 - RNA, 22 nt, Homo sapiens
  source 1..22: mol_type = unassigned RNA
ggtgcagtgctgcatctctggt

SEQ ID NO: 3791 - RNA, 22 nt, Homo sapiens
  source 1..22: mol_type = unassigned RNA
accagagatgcagcactgcacc

SEQ ID NO: 3792 - RNA, 21 nt, Homo sapiens
  source 1..21: mol_type = unassigned RNA
ttgctcactgttcttccctag

SEQ ID NO: 3793 - RNA, 21 nt, Homo sapiens
  source 1..21: mol_type = unassigned RNA
ctagggaagaacagtgagcaa

SEQ ID NO: 3794 - RNA, 18 nt, Homo sapiens
  source 1..18: mol_type = unassigned RNA
cagggtcagctgagcatg

SEQ ID NO: 3795 - RNA, 18 nt, Homo sapiens
  source 1..18: mol_type = unassigned RNA
catgctcagctgaccctg

SEQ ID NO: 3796 - RNA, 21 nt, Homo sapiens
  source 1..21: mol_type = unassigned RNA
aagcattctttcattggttgg

SEQ ID NO: 3797 - RNA, 21 nt, Homo sapiens
  source 1..21: mol_type = unassigned RNA
ccaaccaatgaaagaatgctt

SEQ ID NO: 3798 - RNA, 21 nt, Homo sapiens
  source 1..21: mol_type = unassigned RNA
ccgtcgccgccacccgagccg

SEQ ID NO: 3799 - RNA, 21 nt, Homo sapiens
  source 1..21: mol_type = unassigned RNA
cggctcgggtggcggcgacgg

SEQ ID NO: 3800 - RNA, 27 nt, Homo sapiens
  source 1..27: mol_type = unassigned RNA
cactgtaggtgatggtgagagtgggca

SEQ ID NO: 3801 - RNA, 27 nt, Homo sapiens
  source 1..27: mol_type = unassigned RNA
tgcccactctcaccatcacctacagtg

SEQ ID NO: 3802 - RNA, 23 nt, Homo sapiens
  source 1..23: mol_type = unassigned RNA
gggatggtagaccggtgacgtgc

SEQ ID NO: 3803 - RNA, 23 nt, Homo sapiens
  source 1..23: mol_type = unassigned RNA
gcacgtcaccggtctaccatccc

SEQ ID NO: 3804 - RNA, 21 nt, Homo sapiens
  source 1..21: mol_type = unassigned RNA
taggacacatggtctacttct

SEQ ID NO: 3805 - RNA, 21 nt, Homo sapiens
  source 1..21: mol_type = unassigned RNA
agaagtagaccatgtgtccta

SEQ ID NO: 3806 - RNA, 22 nt, Homo sapiens
  source 1..22: mol_type = unassigned RNA
ctcctgagccattctgagcctc

SEQ ID NO: 3807 - RNA, 22 nt, Homo sapiens
  source 1..22: mol_type = unassigned RNA
gaggctcagaatggctcaggag

SEQ ID NO: 3808 - RNA, 21 nt, Homo sapiens
  source 1..21: mol_type = unassigned RNA
gtgccagctgcagtgggggag

SEQ ID NO: 3809 - RNA, 21 nt, Homo sapiens
  source 1..21: mol_type = unassigned RNA
ctcccccactgcagctggcac

SEQ ID NO: 3810 - RNA, 21 nt, Homo sapiens
  source 1..21: mol_type = unassigned RNA
cccggagccaggatgcagctc

SEQ ID NO: 3811 - RNA, 21 nt, Homo sapiens
  source 1..21: mol_type = unassigned RNA
gagctgcatcctggctccggg

SEQ ID NO: 3812 - RNA, 21 nt, Homo sapiens
  source 1..21: mol_type = unassigned RNA
tcgtggcctggtctccattat

SEQ ID NO: 3813 - RNA, 21 nt, Homo sapiens
  source 1..21: mol_type = unassigned RNA
ataatggagaccaggccacga

SEQ ID NO: 3814 - RNA, 20 nt, Homo sapiens
  source 1..20: mol_type = unassigned RNA
tctgcagggtttgctttgag

SEQ ID NO: 3815 - RNA, 20 nt, Homo sapiens
  source 1..20: mol_type = unassigned RNA
ctcaaagcaaaccctgcaga

SEQ ID NO: 3816 - RNA, 21 nt, Homo sapiens
  source 1..21: mol_type = unassigned RNA
tgttcatgtagatgtttaagc

SEQ ID NO: 3817 - RNA, 21 nt, Homo sapiens
  source 1..21: mol_type = unassigned RNA
gcttaaacatctacatgaaca

SEQ ID NO: 3818 - RNA, 18 nt, Homo sapiens
  source 1..18: mol_type = unassigned RNA
tcagctggccctcatttc

SEQ ID NO: 3819 - RNA, 18 nt, Homo sapiens
  source 1..18: mol_type = unassigned RNA
gaaatgagggccagctga

SEQ ID NO: 3820 - RNA, 21 nt, Homo sapiens
  source 1..21: mol_type = unassigned RNA
tggcagggaggctgggagggg

SEQ ID NO: 3821 - RNA, 21 nt, Homo sapiens
  source 1..21: mol_type = unassigned RNA
cccctcccagcctccctgcca

SEQ ID NO: 3822 - RNA, 20 nt, Homo sapiens
  source 1..20: mol_type = unassigned RNA
tcactgttcagacaggcgga

SEQ ID NO: 3823 - RNA, 20 nt, Homo sapiens
  source 1..20: mol_type = unassigned RNA
tccgcctgtctgaacagtga

SEQ ID NO: 3824 - RNA, 21 nt, Homo sapiens
  source 1..21: mol_type = unassigned RNA
ccccacctcctctctcctcag

SEQ ID NO: 3825 - RNA, 21 nt, Homo sapiens
  source 1..21: mol_type = unassigned RNA
ctgaggagagaggaggtgggg

SEQ ID NO: 3826 - RNA, 19 nt, Homo sapiens
  source 1..19: mol_type = unassigned RNA
gtgaggactcgggaggtgg

SEQ ID NO: 3827 - RNA, 19 nt, Homo sapiens
  source 1..19: mol_type = unassigned RNA
ccacctcccgagtcctcac

SEQ ID NO: 3828 - RNA, 22 nt, Homo sapiens
  source 1..22: mol_type = unassigned RNA
tgagcccctgtgccgcccccag

SEQ ID NO: 3829 - RNA, 22 nt, Homo sapiens
  source 1..22: mol_type = unassigned RNA
ctgggggcggcacaggggctca

SEQ ID NO: 3830 - RNA, 22 nt, Homo sapiens
  source 1..22: mol_type = unassigned RNA
gtgggtacggcccagtgggggg

SEQ ID NO: 3831 - RNA, 22 nt, Homo sapiens
  source 1..22: mol_type = unassigned RNA
ccccccactgggccgtacccac

SEQ ID NO: 3832 - RNA, 22 nt, Homo sapiens
  source 1..22: mol_type = unassigned RNA
tcaccagccctgtgttccctag

SEQ ID NO: 3833 - RNA, 22 nt, Homo sapiens
  source 1..22: mol_type = unassigned RNA
ctagggaacacagggctggtga

SEQ ID NO: 3834 - RNA, 26 nt, Homo sapiens
  source 1..26: mol_type = unassigned RNA
gtgagggcatgcaggcctggatgggg

SEQ ID NO: 3835 - RNA, 26 nt, Homo sapiens
  source 1..26: mol_type = unassigned RNA
ccccatccaggcctgcatgccctcac

SEQ ID NO: 3836 - RNA, 23 nt, Homo sapiens
  source 1..23: mol_type = unassigned RNA
ctctcaccactgccctcccacag

SEQ ID NO: 3837 - RNA, 23 nt, Homo sapiens
  source 1..23: mol_type = unassigned RNA
ctgtgggagggcagtggtgagag

SEQ ID NO: 3838 - RNA, 24 nt, Homo sapiens
  source 1..24: mol_type = unassigned RNA
gtgggtagggtttgggggagagcg

SEQ ID NO: 3839 - RNA, 24 nt, Homo sapiens
  source 1..24: mol_type = unassigned RNA
cgctctcccccaaaccctacccac

SEQ ID NO: 3840 - RNA, 20 nt, Homo sapiens
  source 1..20: mol_type = unassigned RNA
gtgtctgggcggacagctgc

SEQ ID NO: 3841 - RNA, 20 nt, Homo sapiens
  source 1..20: mol_type = unassigned RNA
gcagctgtccgcccagacac

SEQ ID NO: 3842 - RNA, 20 nt, Homo sapiens
  source 1..20: mol_type = unassigned RNA
cttcctcgtctgtctgcccc

SEQ ID NO: 3843 - RNA, 20 nt, Homo sapiens
  source 1..20: mol_type = unassigned RNA
ggggcagacagacgaggaag

SEQ ID NO: 3844 - RNA, 23 nt, Homo sapiens
  source 1..23: mol_type = unassigned RNA
gtgagtgggagccccagtgtgtg

SEQ ID NO: 3845 - RNA, 23 nt, Homo sapiens
  source 1..23: mol_type = unassigned RNA
cacacactggggctcccactcac

SEQ ID NO: 3846 - RNA, 27 nt, Homo sapiens
  source 1..27: mol_type = unassigned RNA
accttcttgtataagcactgtgctaaa

SEQ ID NO: 3847 - RNA, 27 nt, Homo sapiens
  source 1..27: mol_type = unassigned RNA
tttagcacagtgcttatacaagaaggt

SEQ ID NO: 3848 - RNA, 22 nt, Homo sapiens
  source 1..22: mol_type = unassigned RNA
ggcgacaaaacgagaccctgtc

SEQ ID NO: 3849 - RNA, 22 nt, Homo sapiens
  source 1..22: mol_type = unassigned RNA
gacagggtctcgttttgtcgcc

SEQ ID NO: 3850 - RNA, 22 nt, Homo sapiens
  source 1..22: mol_type = unassigned RNA
ttgcttgaacccaggaagtgga

SEQ ID NO: 3851 - RNA, 22 nt, Homo sapiens
  source 1..22: mol_type = unassigned RNA
tccacttcctgggttcaagcaa

SEQ ID NO: 3852 - RNA, 19 nt, Homo sapiens
  source 1..19: mol_type = unassigned RNA
ggagatggaggttgcagtg

SEQ ID NO: 3853 - RNA, 19 nt, Homo sapiens
  source 1..19: mol_type = unassigned RNA
cactgcaacctccatctcc

SEQ ID NO: 3854 - RNA, 21 nt, Homo sapiens
  source 1..21: mol_type = unassigned RNA
accactgcactccagcctgag

SEQ ID NO: 3855 - RNA, 21 nt, Homo sapiens
  source 1..21: mol_type = unassigned RNA
ctcaggctggagtgcagtggt

SEQ ID NO: 3856 - RNA, 22 nt, Homo sapiens
  source 1..22: mol_type = unassigned RNA
ggtggttgaggctgcagtaagt

SEQ ID NO: 3857 - RNA, 22 nt, Homo sapiens
  source 1..22: mol_type = unassigned RNA
acttactgcagcctcaaccacc

SEQ ID NO: 3858 - RNA, 17 nt, Homo sapiens
  source 1..17: mol_type = unassigned RNA
tcgcctcctcctctccc

SEQ ID NO: 3859 - RNA, 17 nt, Homo sapiens
  source 1..17: mol_type = unassigned RNA
gggagaggaggaggcga

SEQ ID NO: 3860 - RNA, 22 nt, Homo sapiens
  source 1..22: mol_type = unassigned RNA
tctatacagaccctggcttttc

SEQ ID NO: 3861 - RNA, 22 nt, Homo sapiens
  source 1..22: mol_type = unassigned RNA
gaaaagccagggtctgtataga

SEQ ID NO: 3862 - RNA, 22 nt, Homo sapiens
  source 1..22: mol_type = unassigned RNA
tctgggcaacaaagtgagacct

SEQ ID NO: 3863 - RNA, 22 nt, Homo sapiens
  source 1..22: mol_type = unassigned RNA
aggtctcactttgttgcccaga

SEQ ID NO: 3864 - RNA, 21 nt, Homo sapiens
  source 1..21: mol_type = unassigned RNA
gatctcactttgttgcccagg

SEQ ID NO: 3865 - RNA, 21 nt, Homo sapiens
  source 1..21: mol_type = unassigned RNA
cctgggcaacaaagtgagatc

SEQ ID NO: 3866 - RNA, 20 nt, Homo sapiens
  source 1..20: mol_type = unassigned RNA
tcgcgccccggctcccgttc

SEQ ID NO: 3867 - RNA, 20 nt, Homo sapiens
  source 1..20: mol_type = unassigned RNA
gaacgggagccggggcgcga

SEQ ID NO: 3868 - RNA, 25 nt, Homo sapiens
  source 1..25: mol_type = unassigned RNA
tgggaacgggttccggcagacgctg

SEQ ID NO: 3869 - RNA, 25 nt, Homo sapiens
  source 1..25: mol_type = unassigned RNA
cagcgtctgccggaacccgttccca

SEQ ID NO: 3870 - RNA, 21 nt, Homo sapiens
  source 1..21: mol_type = unassigned RNA
ttaggccgcagatctgggtga

SEQ ID NO: 3871 - RNA, 21 nt, Homo sapiens
  source 1..21: mol_type = unassigned RNA
tcacccagatctgcggcctaa

SEQ ID NO: 3872 - RNA, 22 nt, Homo sapiens
  source 1..22: mol_type = unassigned RNA
aataggccacggatctgggcaa

SEQ ID NO: 3873 - RNA, 22 nt, Homo sapiens
  source 1..22: mol_type = unassigned RNA
ttgcccagatccgtggcctatt

SEQ ID NO: 3874 - RNA, 21 nt, Homo sapiens
  source 1..21: mol_type = unassigned RNA
cacccagatctgcggcctaat

SEQ ID NO: 3875 - RNA, 21 nt, Homo sapiens
  source 1..21: mol_type = unassigned RNA
attaggccgcagatctgggtg

SEQ ID NO: 3876 - RNA, 22 nt, Homo sapiens
  source 1..22: mol_type = unassigned RNA
ttagggccctggctccatctcc

SEQ ID NO: 3877 - RNA, 22 nt, Homo sapiens
  source 1..22: mol_type = unassigned RNA
ggagatggagccagggccctaa

SEQ ID NO: 3878 - RNA, 22 nt, Homo sapiens
  source 1..22: mol_type = unassigned RNA
ttcattcggctgtccagatgta

SEQ ID NO: 3879 - RNA, 22 nt, Homo sapiens
  source 1..22: mol_type = unassigned RNA
tacatctggacagccgaatgaa

SEQ ID NO: 3880 - RNA, 24 nt, Homo sapiens
  source 1..24: mol_type = unassigned RNA
ttgcagctgcctgggagtgacttc

SEQ ID NO: 3881 - RNA, 24 nt, Homo sapiens
  source 1..24: mol_type = unassigned RNA
gaagtcactcccaggcagctgcaa

SEQ ID NO: 3882 - RNA, 21 nt, Homo sapiens
  source 1..21: mol_type = unassigned RNA
ttgggacatacttatgctaaa

SEQ ID NO: 3883 - RNA, 21 nt, Homo sapiens
  source 1..21: mol_type = unassigned RNA
tttagcataagtatgtcccaa

SEQ ID NO: 3884 - RNA, 22 nt, Homo sapiens
  source 1..22: mol_type = unassigned RNA
tctcactgtagcctcgaacccc

SEQ ID NO: 3885 - RNA, 22 nt, Homo sapiens
  source 1..22: mol_type = unassigned RNA
ggggttcgaggctacagtgaga

SEQ ID NO: 3886 - RNA, 22 nt, Homo sapiens
  source 1..22: mol_type = unassigned RNA
tttgaggctacagtgagatgtg

SEQ ID NO: 3887 - RNA, 22 nt, Homo sapiens
  source 1..22: mol_type = unassigned RNA
cacatctcactgtagcctcaaa

SEQ ID NO: 3888 - RNA, 18 nt, Homo sapiens
  source 1..18: mol_type = unassigned RNA
cagggaggtgaatgtgat

SEQ ID NO: 3889 - RNA, 18 nt, Homo sapiens
  source 1..18: mol_type = unassigned RNA
atcacattcacctccctg

SEQ ID NO: 3890 - RNA, 19 nt, Homo sapiens
  source 1..19: mol_type = unassigned RNA
gatgatgctgctgatgctg

SEQ ID NO: 3891 - RNA, 19 nt, Homo sapiens
  source 1..19: mol_type = unassigned RNA
cagcatcagcagcatcatc

SEQ ID NO: 3892 - RNA, 24 nt, Homo sapiens
  source 1..24: mol_type = unassigned RNA
ccagacagaattctatgcactttc

SEQ ID NO: 3893 - RNA, 24 nt, Homo sapiens
  source 1..24: mol_type = unassigned RNA
gaaagtgcatagaattctgtctgg

SEQ ID NO: 3894 - RNA, 22 nt, Homo sapiens
  source 1..22: mol_type = unassigned RNA
ctcctggggcccgcactctcgc

SEQ ID NO: 3895 - RNA, 22 nt, Homo sapiens
  source 1..22: mol_type = unassigned RNA
gcgagagtgcgggccccaggag

SEQ ID NO: 3896 - RNA, 21 nt, Homo sapiens
  source 1..21: mol_type = unassigned RNA
ctccgtttgcctgtttcgctg

SEQ ID NO: 3897 - RNA, 21 nt, Homo sapiens
  source 1..21: mol_type = unassigned RNA
cagcgaaacaggcaaacggag

SEQ ID NO: 3898 - RNA, 22 nt, Homo sapiens
  source 1..22: mol_type = unassigned RNA
ctcggcgcggggcgcgggctcc

SEQ ID NO: 3899 - RNA, 22 nt, Homo sapiens
  source 1..22: mol_type = unassigned RNA
ggagcccgcgccccgcgccgag

SEQ ID NO: 3900 - RNA, 21 nt, Homo sapiens
  source 1..21: mol_type = unassigned RNA
gccctccgcccgtgcaccccg

SEQ ID NO: 3901 - RNA, 21 nt, Homo sapiens
  source 1..21: mol_type = unassigned RNA
cggggtgcacgggcggagggc

SEQ ID NO: 3902 - RNA, 22 nt, Homo sapiens
  source 1..22: mol_type = unassigned RNA
gcccgcgtgtggagccaggtgt

SEQ ID NO: 3903 - RNA, 22 nt, Homo sapiens
  source 1..22: mol_type = unassigned RNA
acacctggctccacacgcgggc

SEQ ID NO: 3904 - RNA, 22 nt, Homo sapiens
  source 1..22: mol_type = unassigned RNA
aaaaccgtctagttacagttgt

SEQ ID NO: 3905 - RNA, 22 nt, Homo sapiens
  source 1..22: mol_type = unassigned RNA
acaactgtaactagacggtttt

SEQ ID NO: 3906 - RNA, 18 nt, Homo sapiens
  source 1..18: mol_type = unassigned RNA
tccagtgccctcctctcc

SEQ ID NO: 3907 - RNA, 18 nt, Homo sapiens
  source 1..18: mol_type = unassigned RNA
ggagaggagggcactgga

SEQ ID NO: 3908 - RNA, 18 nt, Homo sapiens
  source 1..18: mol_type = unassigned RNA
tgaggcagtagattgaat

SEQ ID NO: 3909 - RNA, 18 nt, Homo sapiens
  source 1..18: mol_type = unassigned RNA
attcaatctactgcctca

SEQ ID NO: 3910 - RNA, 22 nt, Homo sapiens
  source 1..22: mol_type = unassigned RNA
aggggctggctttcctctggtc

SEQ ID NO: 3911 - RNA, 22 nt, Homo sapiens
  source 1..22: mol_type = unassigned RNA
gaccagaggaaagccagcccct

SEQ ID NO: 3912 - RNA, 22 nt, Homo sapiens
  source 1..22: mol_type = unassigned RNA
tggagagaaaggcagttcctga

SEQ ID NO: 3913 - RNA, 22 nt, Homo sapiens
  source 1..22: mol_type = unassigned RNA
tcaggaactgcctttctctcca

SEQ ID NO: 3914 - RNA, 22 nt, Homo sapiens
  source 1..22: mol_type = unassigned RNA
tcgtgtcttgtgttgcagccgg

SEQ ID NO: 3915 - RNA, 22 nt, Homo sapiens
  source 1..22: mol_type = unassigned RNA
ccggctgcaacacaagacacga

SEQ ID NO: 3916 - RNA, 22 nt, Homo sapiens
  source 1..22: mol_type = unassigned RNA
ggctacaacacaggacccgggc

SEQ ID NO: 3917 - RNA, 22 nt, Homo sapiens
  source 1..22: mol_type = unassigned RNA
gcccgggtcctgtgttgtagcc

SEQ ID NO: 3918 - RNA, 21 nt, Homo sapiens
  source 1..21: mol_type = unassigned RNA
cggcggggacggcgattggtc

SEQ ID NO: 3919 - RNA, 21 nt, Homo sapiens
  source 1..21: mol_type = unassigned RNA
gaccaatcgccgtccccgccg

SEQ ID NO: 3920 - RNA, 22 nt, Homo sapiens
  source 1..22: mol_type = unassigned RNA
cgcaggggccgggtgctcaccg

SEQ ID NO: 3921 - RNA, 22 nt, Homo sapiens
  source 1..22: mol_type = unassigned RNA
cggtgagcacccggcccctgcg

SEQ ID NO: 3922 - RNA, 21 nt, Homo sapiens
  source 1..21: mol_type = unassigned RNA
tgagtgccggtgcctgccctg

SEQ ID NO: 3923 - RNA, 21 nt, Homo sapiens
  source 1..21: mol_type = unassigned RNA
cagggcaggcaccggcactca

SEQ ID NO: 3924 - RNA, 22 nt, Homo sapiens
  source 1..22: mol_type = unassigned RNA
gctgcgcttggatttcgtcccc

SEQ ID NO: 3925 - RNA, 22 nt, Homo sapiens
  source 1..22: mol_type = unassigned RNA
ggggacgaaatccaagcgcagc

SEQ ID NO: 3926 - RNA, 23 nt, Homo sapiens
  source 1..23: mol_type = unassigned RNA
caacggaatcccaaaagcagctg

SEQ ID NO: 3927 - RNA, 23 nt, Homo sapiens
  source 1..23: mol_type = unassigned RNA
cagctgcttttgggattccgttg

SEQ ID NO: 3928 - RNA, 22 nt, Homo sapiens
  source 1..22: mol_type = unassigned RNA
tcaggccaggcacagtggctca

SEQ ID NO: 3929 - RNA, 22 nt, Homo sapiens
  source 1..22: mol_type = unassigned RNA
tgagccactgtgcctggcctga

SEQ ID NO: 3930 - RNA, 19 nt, Homo sapiens
  source 1..19: mol_type = unassigned RNA
accgtgcaaaggtagcata

SEQ ID NO: 3931 - RNA, 19 nt, Homo sapiens
  source 1..19: mol_type = unassigned RNA
tatgctacctttgcacggt

SEQ ID NO: 3932 - RNA, 20 nt, Homo sapiens
  source 1..20: mol_type = unassigned RNA
cctcctgccctccttgctgt

SEQ ID NO: 3933 - RNA, 20 nt, Homo sapiens
  source 1..20: mol_type = unassigned RNA
acagcaaggagggcaggagg

SEQ ID NO: 3934 - RNA, 20 nt, Homo sapiens
  source 1..20: mol_type = unassigned RNA
tgttttgataacagtaatgt

SEQ ID NO: 3935 - RNA, 20 nt, Homo sapiens
  source 1..20: mol_type = unassigned RNA
acattactgttatcaaaaca

SEQ ID NO: 3936 - RNA, 23 nt, Homo sapiens
  source 1..23: mol_type = unassigned RNA
gtgttaattaaacctctatttac

SEQ ID NO: 3937 - RNA, 23 nt, Homo sapiens
  source 1..23: mol_type = unassigned RNA
gtaaatagaggtttaattaacac

SEQ ID NO: 3938 - RNA, 23 nt, Homo sapiens
  source 1..23: mol_type = unassigned RNA
ctgtaatataaatttaatttatt

SEQ ID NO: 3939 - RNA, 23 nt, Homo sapiens
  source 1..23: mol_type = unassigned RNA
aataaattaaatttatattacag

SEQ ID NO: 3940 - RNA, 22 nt, Homo sapiens
  source 1..22: mol_type = unassigned RNA
ttggggaaacggccgctgagtg

SEQ ID NO: 3941 - RNA, 22 nt, Homo sapiens
  source 1..22: mol_type = unassigned RNA
cactcagcggccgtttccccaa

SEQ ID NO: 3942 - RNA, 21 nt, Homo sapiens
  source 1..21: mol_type = unassigned RNA
cctcccatgccaagaactccc

SEQ ID NO: 3943 - RNA, 21 nt, Homo sapiens
  source 1..21: mol_type = unassigned RNA
gggagttcttggcatgggagg

SEQ ID NO: 3944 - RNA, 21 nt, Homo sapiens
  source 1..21: mol_type = unassigned RNA
ggttcttagcataggaggtct

SEQ ID NO: 3945 - RNA, 21 nt, Homo sapiens
  source 1..21: mol_type = unassigned RNA
agacctcctatgctaagaacc

SEQ ID NO: 3946 - RNA, 21 nt, Homo sapiens
  source 1..21: mol_type = unassigned RNA
tgttctctttgccaaggacag

SEQ ID NO: 3947 - RNA, 21 nt, Homo sapiens
  source 1..21: mol_type = unassigned RNA
ctgtccttggcaaagagaaca

SEQ ID NO: 3948 - RNA, 22 nt, Homo sapiens
  source 1..22: mol_type = unassigned RNA
aaatctctgcaggcaaatgtga

SEQ ID NO: 3949 - RNA, 22 nt, Homo sapiens
  source 1..22: mol_type = unassigned RNA
tcacatttgcctgcagagattt

SEQ ID NO: 3950 - RNA, 22 nt, Homo sapiens
  source 1..22: mol_type = unassigned RNA
catggttctgtcaagcaccgcg

SEQ ID NO: 3951 - RNA, 22 nt, Homo sapiens
  source 1..22: mol_type = unassigned RNA
cgcggtgcttgacagaaccatg

SEQ ID NO: 3952 - RNA, 21 nt, Homo sapiens
  source 1..21: mol_type = unassigned RNA
ttgtgcttgatctaaccatgt

SEQ ID NO: 3953 - RNA, 21 nt, Homo sapiens
  source 1..21: mol_type = unassigned RNA
acatggttagatcaagcacaa

SEQ ID NO: 3954 - RNA, 22 nt, Homo sapiens
  source 1..22: mol_type = unassigned RNA
tctgcaagtgtcagaggcgagg

SEQ ID NO: 3955 - RNA, 22 nt, Homo sapiens
  source 1..22: mol_type = unassigned RNA
cctcgcctctgacacttgcaga

SEQ ID NO: 3956 - RNA, 22 nt, Homo sapiens
  source 1..22: mol_type = unassigned RNA
gagagcagtgtgtgttgcctgg

SEQ ID NO: 3957 - RNA, 22 nt, Homo sapiens
  source 1..22: mol_type = unassigned RNA
ccaggcaacacacactgctctc

SEQ ID NO: 3958 - RNA, 22 nt, Homo sapiens
  source 1..22: mol_type = unassigned RNA
atcacattgccagtgattaccc

SEQ ID NO: 3959 - RNA, 22 nt, Homo sapiens
  source 1..22: mol_type = unassigned RNA
gggtaatcactggcaatgtgat

SEQ ID NO: 3960 - RNA, 22 nt, Homo sapiens
  source 1..22: mol_type = unassigned RNA
agcagaggcagagaggctcagg

SEQ ID NO: 3961 - RNA, 22 nt, Homo sapiens
  source 1..22: mol_type = unassigned RNA
cctgagcctctctgcctctgct

SEQ ID NO: 3962 - RNA, 23 nt, Homo sapiens
  source 1..23: mol_type = unassigned RNA
tgaggctctgttagccttggctc

SEQ ID NO: 3963 - RNA, 23 nt, Homo sapiens
  source 1..23: mol_type = unassigned RNA
gagccaaggctaacagagcctca

SEQ ID NO: 3964 - RNA, 22 nt, Homo sapiens
  source 1..22: mol_type = unassigned RNA
tatcatggagttggtaaagcac

SEQ ID NO: 3965 - RNA, 22 nt, Homo sapiens
  source 1..22: mol_type = unassigned RNA
gtgctttaccaactccatgata

SEQ ID NO: 3966 - RNA, 22 nt, Homo sapiens
  source 1..22: mol_type = unassigned RNA
gttttaccacctccaggagact

SEQ ID NO: 3967 - RNA, 22 nt, Homo sapiens
  source 1..22: mol_type = unassigned RNA
agtctcctggaggtggtaaaac

SEQ ID NO: 3968 - RNA, 22 nt, Homo sapiens
  source 1..22: mol_type = unassigned RNA
cgcctcttcagcgctgtcttcc

SEQ ID NO: 3969 - RNA, 22 nt, Homo sapiens
  source 1..22: mol_type = unassigned RNA
ggaagacagcgctgaagaggcg

SEQ ID NO: 3970 - RNA, 23 nt, Homo sapiens
  source 1..23: mol_type = unassigned RNA
caggcagtgactgttcagacgtc

SEQ ID NO: 3971 - RNA, 23 nt, Homo sapiens
  source 1..23: mol_type = unassigned RNA
gacgtctgaacagtcactgcctg

SEQ ID NO: 3972 - RNA, 23 nt, Homo sapiens
  source 1..23: mol_type = unassigned RNA
agaattgcgtttggacaatcagt

SEQ ID NO: 3973 - RNA, 23 nt, Homo sapiens
  source 1..23: mol_type = unassigned RNA
actgattgtccaaacgcaattct

SEQ ID NO: 3974 - RNA, 22 nt, Homo sapiens
  source 1..22: mol_type = unassigned RNA
agatgtccagccacaattctcg

SEQ ID NO: 3975 - RNA, 22 nt, Homo sapiens
  source 1..22: mol_type = unassigned RNA
cgagaattgtggctggacatct

SEQ ID NO: 3976 - RNA, 24 nt, Homo sapiens
  source 1..24: mol_type = unassigned RNA
agcagaagcagggaggttctccca

SEQ ID NO: 3977 - RNA, 24 nt, Homo sapiens
  source 1..24: mol_type = unassigned RNA
tgggagaacctccctgcttctgct

SEQ ID NO: 3978 - RNA, 22 nt, Homo sapiens
  source 1..22: mol_type = unassigned RNA
tatgtgggatggtaaaccgctt

SEQ ID NO: 3979 - RNA, 22 nt, Homo sapiens
  source 1..22: mol_type = unassigned RNA
aagcggtttaccatcccacata

SEQ ID NO: 3980 - RNA, 22 nt, Homo sapiens
  source 1..22: mol_type = unassigned RNA
tggtttaccgtcccacatacat

SEQ ID NO: 3981 - RNA, 22 nt, Homo sapiens
  source 1..22: mol_type = unassigned RNA
atgtatgtgggacggtaaacca

SEQ ID NO: 3982 - RNA, 23 nt, Homo sapiens
  source 1..23: mol_type = unassigned RNA
cagtgcaatgatattgtcaaagc

SEQ ID NO: 3983 - RNA, 23 nt, Homo sapiens
  source 1..23: mol_type = unassigned RNA
gctttgacaatatcattgcactg

SEQ ID NO: 3984 - RNA, 17 nt, Homo sapiens
  source 1..17: mol_type = unassigned RNA
taattgcttccatgttt

SEQ ID NO: 3985 - RNA, 17 nt, Homo sapiens
  source 1..17: mol_type = unassigned RNA
aaacatggaagcaatta

SEQ ID NO: 3986 - RNA, 23 nt, Homo sapiens
  source 1..23: mol_type = unassigned RNA
ttgccacactgcaacaccttaca

SEQ ID NO: 3987 - RNA, 23 nt, Homo sapiens
  source 1..23: mol_type = unassigned RNA
tgtaaggtgttgcagtgtggcaa

SEQ ID NO: 3988 - RNA, 21 nt, Homo sapiens
  source 1..21: mol_type = unassigned RNA
tctggctgttgtggtgtgcaa

SEQ ID NO: 3989 - RNA, 21 nt, Homo sapiens
  source 1..21: mol_type = unassigned RNA
ttgcacaccacaacagccaga

SEQ ID NO: 3990 - RNA, 22 nt, Homo sapiens
  source 1..22: mol_type = unassigned RNA
gatatcagctcagtaggcaccg

SEQ ID NO: 3991 - RNA, 22 nt, Homo sapiens
  source 1..22: mol_type = unassigned RNA
cggtgcctactgagctgatatc

SEQ ID NO: 3992 - RNA, 21 nt, Homo sapiens
  source 1..21: mol_type = unassigned RNA
gttcctgctgaactgagccag

SEQ ID NO: 3993 - RNA, 21 nt, Homo sapiens
  source 1..21: mol_type = unassigned RNA
ctggctcagttcagcaggaac

SEQ ID NO: 3994 - RNA, 20 nt, Homo sapiens
  source 1..20: mol_type = unassigned RNA
atatgggtttactagttggt

SEQ ID NO: 3995 - RNA, 20 nt, Homo sapiens
  source 1..20: mol_type = unassigned RNA
accaactagtaaacccatat

SEQ ID NO: 3996 - RNA, 22 nt, Homo sapiens
  source 1..22: mol_type = unassigned RNA
tgctatgccaacatattgccat

SEQ ID NO: 3997 - RNA, 22 nt, Homo sapiens
  source 1..22: mol_type = unassigned RNA
atggcaatatgttggcatagca

SEQ ID NO: 3998 - RNA, 21 nt, Homo sapiens
  source 1..21: mol_type = unassigned RNA
aggcaagatgctggcatagct

SEQ ID NO: 3999 - RNA, 21 nt, Homo sapiens
  source 1..21: mol_type = unassigned RNA
agctatgccagcatcttgcct

SEQ ID NO: 4000 - RNA, 18 nt, Homo sapiens
  source 1..18: mol_type = unassigned RNA
cggggcggcaggggcctc

SEQ ID NO: 4001 - RNA, 18 nt, Homo sapiens
  source 1..18: mol_type = unassigned RNA
gaggcccctgccgccccg

SEQ ID NO: 4002 - RNA, 19 nt, Homo sapiens
  source 1..19: mol_type = unassigned RNA
aaaagctgggttgagagga

SEQ ID NO: 4003 - RNA, 19 nt, Homo sapiens
  source 1..19: mol_type = unassigned RNA
tcctctcaacccagctttt

SEQ ID NO: 4004 - RNA, 22 nt, Homo sapiens
  source 1..22: mol_type = unassigned RNA
cccaatacacggtcgacctctt

SEQ ID NO: 4005 - RNA, 22 nt, Homo sapiens
  source 1..22: mol_type = unassigned RNA
aagaggtcgaccgtgtattggg

SEQ ID NO: 4006 - RNA, 23 nt, Homo sapiens
  source 1..23: mol_type = unassigned RNA
aggttgtccgtggtgagttcgca

SEQ ID NO: 4007 - RNA, 23 nt, Homo sapiens
  source 1..23: mol_type = unassigned RNA
tgcgaactcaccacggacaacct

SEQ ID NO: 4008 - RNA, 23 nt, Homo sapiens
  source 1..23: mol_type = unassigned RNA
gcaaagcacacggcctgcagaga

SEQ ID NO: 4009 - RNA, 23 nt, Homo sapiens
  source 1..23: mol_type = unassigned RNA
tctctgcaggccgtgtgctttgc

SEQ ID NO: 4010 - RNA, 22 nt, Homo sapiens
  source 1..22: mol_type = unassigned RNA
tctctgggcctgtgtcttaggc

SEQ ID NO: 4011 - RNA, 22 nt, Homo sapiens
  source 1..22: mol_type = unassigned RNA
gcctaagacacaggcccagaga

SEQ ID NO: 4012 - RNA, 21 nt, Homo sapiens
  source 1..21: mol_type = unassigned RNA
gcccctgggcctatcctagaa

SEQ ID NO: 4013 - RNA, 21 nt, Homo sapiens
  source 1..21: mol_type = unassigned RNA
ttctaggataggcccaggggc

SEQ ID NO: 4014 - RNA, 22 nt, Homo sapiens
  source 1..22: mol_type = unassigned RNA
tccgtctcagttactttatagc

SEQ ID NO: 4015 - RNA, 22 nt, Homo sapiens
  source 1..22: mol_type = unassigned RNA
gctataaagtaactgagacgga

SEQ ID NO: 4016 - RNA, 22 nt, Homo sapiens
  source 1..22: mol_type = unassigned RNA
aacacacctattcaaggattca

SEQ ID NO: 4017 - RNA, 22 nt, Homo sapiens
  source 1..22: mol_type = unassigned RNA
tgaatccttgaataggtgtgtt

SEQ ID NO: 4018 - RNA, 24 nt, Homo sapiens
  source 1..24: mol_type = unassigned RNA
aatccttggaacctaggtgtgagt

SEQ ID NO: 4019 - RNA, 24 nt, Homo sapiens
  source 1..24: mol_type = unassigned RNA
actcacacctaggttccaaggatt

SEQ ID NO: 4020 - RNA, 22 nt, Homo sapiens
  source 1..22: mol_type = unassigned RNA
taatgcccctaaaaatccttat

SEQ ID NO: 4021 - RNA, 22 nt, Homo sapiens
  source 1..22: mol_type = unassigned RNA
ataaggatttttaggggcatta

SEQ ID NO: 4022 - RNA, 23 nt, Homo sapiens
  source 1..23: mol_type = unassigned RNA
agggacttttgggggcagatgtg

SEQ ID NO: 4023 - RNA, 23 nt, Homo sapiens
  source 1..23: mol_type = unassigned RNA
cacatctgcccccaaaagtccct

SEQ ID NO: 4024 - RNA, 22 nt, Homo sapiens
  source 1..22: mol_type = unassigned RNA
taatgcccctaaaaatccttat

SEQ ID NO: 4025 - RNA, 22 nt, Homo sapiens
  source 1..22: mol_type = unassigned RNA
ataaggatttttaggggcatta

SEQ ID NO: 4026 - RNA, 22 nt, Homo sapiens
  source 1..22: mol_type = unassigned RNA
agggactttcaggggcagctgt

SEQ ID NO: 4027 - RNA, 22 nt, Homo sapiens
  source 1..22: mol_type = unassigned RNA
acagctgcccctgaaagtccct

SEQ ID NO: 4028 - RNA, 24 nt, Homo sapiens
  source 1..24: mol_type = unassigned RNA
gaaaatgatgagtagtgactgatg

SEQ ID NO: 4029 - RNA, 24 nt, Homo sapiens
  source 1..24: mol_type = unassigned RNA
catcagtcactactcatcattttc

SEQ ID NO: 4030 - RNA, 23 nt, Homo sapiens
  source 1..23: mol_type = unassigned RNA
tgagcaccacacaggccgggcgc

SEQ ID NO: 4031 - RNA, 23 nt, Homo sapiens
  source 1..23: mol_type = unassigned RNA
gcgcccggcctgtgtggtgctca

SEQ ID NO: 4032 - RNA, 21 nt, Homo sapiens
  source 1..21: mol_type = unassigned RNA
gctggtctgcgtggtgctcgg

SEQ ID NO: 4033 - RNA, 21 nt, Homo sapiens
  source 1..21: mol_type = unassigned RNA
ccgagcaccacgcagaccagc

SEQ ID NO: 4034 - RNA, 22 nt, Homo sapiens
  source 1..22: mol_type = unassigned RNA
gcctgctggggtggaacctggt

SEQ ID NO: 4035 - RNA, 22 nt, Homo sapiens
  source 1..22: mol_type = unassigned RNA
accaggttccaccccagcaggc

SEQ ID NO: 4036 - RNA, 23 nt, Homo sapiens
  source 1..23: mol_type = unassigned RNA
gaagtgcttcgattttggggtgt

SEQ ID NO: 4037 - RNA, 23 nt, Homo sapiens
  source 1..23: mol_type = unassigned RNA
acaccccaaaatcgaagcacttc

SEQ ID NO: 4038 - RNA, 22 nt, Homo sapiens
  source 1..22: mol_type = unassigned RNA
actcaaaatgggggcgctttcc

SEQ ID NO: 4039 - RNA, 22 nt, Homo sapiens
  source 1..22: mol_type = unassigned RNA
ggaaagcgcccccattttgagt

SEQ ID NO: 4040 - RNA, 22 nt, Homo sapiens
  source 1..22: mol_type = unassigned RNA
tatgtaacatggtccactaact

SEQ ID NO: 4041 - RNA, 22 nt, Homo sapiens
  source 1..22: mol_type = unassigned RNA
agttagtggaccatgttacata

SEQ ID NO: 4042 - RNA, 21 nt, Homo sapiens
  source 1..21: mol_type = unassigned RNA
tggtagactatggaacgtagg

SEQ ID NO: 4043 - RNA, 21 nt, Homo sapiens
  source 1..21: mol_type = unassigned RNA
cctacgttccatagtctacca

SEQ ID NO: 4044 - RNA, 22 nt, Homo sapiens
  source 1..22: mol_type = unassigned RNA
tgtagatacgagcaccagccac

SEQ ID NO: 4045 - RNA, 22 nt, Homo sapiens
  source 1..22: mol_type = unassigned RNA
gtggctggtgctcgtatctaca

SEQ ID NO: 4046 - RNA, 23 nt, Homo sapiens
  source 1..23: mol_type = unassigned RNA
acaggcggctgtagcaatggggg

SEQ ID NO: 4047 - RNA, 23 nt, Homo sapiens
  source 1..23: mol_type = unassigned RNA
cccccattgctacagccgcctgt

SEQ ID NO: 4048 - RNA, 22 nt, Homo sapiens
  source 1..22: mol_type = unassigned RNA
aattcccttgtagataacccgg

SEQ ID NO: 4049 - RNA, 22 nt, Homo sapiens
  source 1..22: mol_type = unassigned RNA
ccgggttatctacaagggaatt

SEQ ID NO: 4050 - RNA, 22 nt, Homo sapiens
  source 1..22: mol_type = unassigned RNA
tacgcgcagaccacaggatgtc

SEQ ID NO: 4051 - RNA, 22 nt, Homo sapiens
  source 1..22: mol_type = unassigned RNA
gacatcctgtggtctgcgcgta

SEQ ID NO: 4052 - RNA, 22 nt, Homo sapiens
  source 1..22: mol_type = unassigned RNA
ttacacacaactgaggatcata

SEQ ID NO: 4053 - RNA, 22 nt, Homo sapiens
  source 1..22: mol_type = unassigned RNA
tatgatcctcagttgtgtgtaa

SEQ ID NO: 4054 - RNA, 23 nt, Homo sapiens
  source 1..23: mol_type = unassigned RNA
tagcccccaggcttcacttggcg

SEQ ID NO: 4055 - RNA, 23 nt, Homo sapiens
  source 1..23: mol_type = unassigned RNA
cgccaagtgaagcctgggggcta

SEQ ID NO: 4056 - RNA, 23 nt, Homo sapiens
  source 1..23: mol_type = unassigned RNA
agggcataggagagggttgatat

SEQ ID NO: 4057 - RNA, 23 nt, Homo sapiens
  source 1..23: mol_type = unassigned RNA
atatcaaccctctcctatgccct

SEQ ID NO: 4058 - RNA, 22 nt, Homo sapiens
  source 1..22: mol_type = unassigned RNA
gaatgttgctcggtgaacccct

SEQ ID NO: 4059 - RNA, 22 nt, Homo sapiens
  source 1..22: mol_type = unassigned RNA
aggggttcaccgagcaacattc

SEQ ID NO: 4060 - RNA, 23 nt, Homo sapiens
  source 1..23: mol_type = unassigned RNA
aggttacccgagcaactttgcat

SEQ ID NO: 4061 - RNA, 23 nt, Homo sapiens
  source 1..23: mol_type = unassigned RNA
atgcaaagttgctcgggtaacct

SEQ ID NO: 4062 - RNA, 22 nt, Homo sapiens
  source 1..22: mol_type = unassigned RNA
tatgtaacacggtccactaacc

SEQ ID NO: 4063 - RNA, 22 nt, Homo sapiens
  source 1..22: mol_type = unassigned RNA
ggttagtggaccgtgttacata

SEQ ID NO: 4064 - RNA, 21 nt, Homo sapiens
  source 1..21: mol_type = unassigned RNA
tagtagaccgtatagcgtacg

SEQ ID NO: 4065 - RNA, 21 nt, Homo sapiens
  source 1..21: mol_type = unassigned RNA
cgtacgctatacggtctacta

SEQ ID NO: 4066 - RNA, 23 nt, Homo sapiens
  source 1..23: mol_type = unassigned RNA
acttcacctggtccactagccgt

SEQ ID NO: 4067 - RNA, 23 nt, Homo sapiens
  source 1..23: mol_type = unassigned RNA
acggctagtggaccaggtgaagt

SEQ ID NO: 4068 - RNA, 18 nt, Homo sapiens
  source 1..18: mol_type = unassigned RNA
gtgttctctgatggacag

SEQ ID NO: 4069 - RNA, 18 nt, Homo sapiens
  source 1..18: mol_type = unassigned RNA
ctgtccatcagagaacac

SEQ ID NO: 4070 - RNA, 22 nt, Homo sapiens
  source 1..22: mol_type = unassigned RNA
caggtcgtcttgcagggcttct

SEQ ID NO: 4071 - RNA, 22 nt, Homo sapiens
  source 1..22: mol_type = unassigned RNA
agaagccctgcaagacgacctg

SEQ ID NO: 4072 - RNA, 21 nt, Homo sapiens
  source 1..21: mol_type = unassigned RNA
tgtcttgcaggccgtcatgca

SEQ ID NO: 4073 - RNA, 21 nt, Homo sapiens
  source 1..21: mol_type = unassigned RNA
tgcatgacggcctgcaagaca

SEQ ID NO: 4074 - RNA, 22 nt, Homo sapiens
  source 1..22: mol_type = unassigned RNA
atcatgatgggctcctcggtgt

SEQ ID NO: 4075 - RNA, 22 nt, Homo sapiens
  source 1..22: mol_type = unassigned RNA
acaccgaggagcccatcatgat

SEQ ID NO: 4076 - RNA, 23 nt, Homo sapiens
  source 1..23: mol_type = unassigned RNA
ttgctagttgcactcctctctgt

SEQ ID NO: 4077 - RNA, 23 nt, Homo sapiens
  source 1..23: mol_type = unassigned RNA
acagagaggagtgcaactagcaa

SEQ ID NO: 4078 - RNA, 25 nt, Homo sapiens
  source 1..25: mol_type = unassigned RNA
taggcagtgtattgctagcggctgt

SEQ ID NO: 4079 - RNA, 25 nt, Homo sapiens
  source 1..25: mol_type = unassigned RNA
acagccgctagcaatacactgccta

SEQ ID NO: 4080 - RNA, 22 nt, Homo sapiens
  source 1..22: mol_type = unassigned RNA
attggggacattttgcattcat

SEQ ID NO: 4081 - RNA, 22 nt, Homo sapiens
  source 1..22: mol_type = unassigned RNA
atgaatgcaaaatgtccccaat

SEQ ID NO: 4082 - RNA, 22 nt, Homo sapiens
  source 1..22: mol_type = unassigned RNA
ttttgcgatgtgttcctaatat

SEQ ID NO: 4083 - RNA, 22 nt, Homo sapiens
  source 1..22: mol_type = unassigned RNA
atattaggaacacatcgcaaaa

SEQ ID NO: 4084 - RNA, 22 nt, Homo sapiens
  source 1..22: mol_type = unassigned RNA
ttgggatcattttgcatccata

SEQ ID NO: 4085 - RNA, 22 nt, Homo sapiens
  source 1..22: mol_type = unassigned RNA
tatggatgcaaaatgatcccaa

SEQ ID NO: 4086 - RNA, 22 nt, Homo sapiens
  source 1..22: mol_type = unassigned RNA
ttttgcaatatgttcctgaata

SEQ ID NO: 4087 - RNA, 22 nt, Homo sapiens
  source 1..22: mol_type = unassigned RNA
tattcaggaacatattgcaaaa

SEQ ID NO: 4088 - RNA, 21 nt, Homo sapiens
  source 1..21: mol_type = unassigned RNA
gcagtccatgggcatatacac

SEQ ID NO: 4089 - RNA, 21 nt, Homo sapiens
  source 1..21: mol_type = unassigned RNA
gtgtatatgcccatggactgc

SEQ ID NO: 4090 - RNA, 22 nt, Homo sapiens
  source 1..22: mol_type = unassigned RNA
tatgtgcctttggactacatcg

SEQ ID NO: 4091 - RNA, 22 nt, Homo sapiens
  source 1..22: mol_type = unassigned RNA
cgatgtagtccaaaggcacata

SEQ ID NO: 4092 - RNA, 23 nt, Homo sapiens
  source 1..23: mol_type = unassigned RNA
atacacatacacgcaacacacat

SEQ ID NO: 4093 - RNA, 23 nt, Homo sapiens
  source 1..23: mol_type = unassigned RNA
atgtgtgttgcgtgtatgtgtat

SEQ ID NO: 4094 - RNA, 23 nt, Homo sapiens
  source 1..23: mol_type = unassigned RNA
ttgcatgtcagattgtaattccc

SEQ ID NO: 4095 - RNA, 23 nt, Homo sapiens
  source 1..23: mol_type = unassigned RNA
gggaattacaatctgacatgcaa

SEQ ID NO: 4096 - RNA, 21 nt, Homo sapiens
  source 1..21: mol_type = unassigned RNA
tcactcctctcctcccgtctt

SEQ ID NO: 4097 - RNA, 21 nt, Homo sapiens
  source 1..21: mol_type = unassigned RNA
aagacgggaggagaggagtga

SEQ ID NO: 4098 - RNA, 22 nt, Homo sapiens
  source 1..22: mol_type = unassigned RNA
tcaggctcagtcccctcccgat

SEQ ID NO: 4099 - RNA, 22 nt, Homo sapiens
  source 1..22: mol_type = unassigned RNA
atcgggaggggactgagcctga

SEQ ID NO: 4100 - RNA, 22 nt, Homo sapiens
  source 1..22: mol_type = unassigned RNA
gtcatacacggctctcctctct

SEQ ID NO: 4101 - RNA, 22 nt, Homo sapiens
  source 1..22: mol_type = unassigned RNA
agagaggagagccgtgtatgac

SEQ ID NO: 4102 - RNA, 22 nt, Homo sapiens
  source 1..22: mol_type = unassigned RNA
agaggctggccgtgatgaattc

SEQ ID NO: 4103 - RNA, 22 nt, Homo sapiens
  source 1..22: mol_type = unassigned RNA
gaattcatcacggccagcctct

SEQ ID NO: 4104 - RNA, 22 nt, Homo sapiens
  source 1..22: mol_type = unassigned RNA
aatcatacagggacatccagtt

SEQ ID NO: 4105 - RNA, 22 nt, Homo sapiens
  source 1..22: mol_type = unassigned RNA
aactggatgtccctgtatgatt

SEQ ID NO: 4106 - RNA, 22 nt, Homo sapiens
  source 1..22: mol_type = unassigned RNA
aatcgtacagggtcatccactt

SEQ ID NO: 4107 - RNA, 22 nt, Homo sapiens
  source 1..22: mol_type = unassigned RNA
aagtggatgaccctgtacgatt

SEQ ID NO: 4108 - RNA, 21 nt, Homo sapiens
  source 1..21: mol_type = unassigned RNA
ttgaaaggctatttcttggtc

SEQ ID NO: 4109 - RNA, 21 nt, Homo sapiens
  source 1..21: mol_type = unassigned RNA
gaccaagaaatagcctttcaa

SEQ ID NO: 4110 - RNA, 21 nt, Homo sapiens
  source 1..21: mol_type = unassigned RNA
cccagataatggcactctcaa

SEQ ID NO: 4111 - RNA, 21 nt, Homo sapiens
  source 1..21: mol_type = unassigned RNA
ttgagagtgccattatctggg

SEQ ID NO: 4112 - RNA, 22 nt, Homo sapiens
  source 1..22: mol_type = unassigned RNA
caacctggaggactccatgctg

SEQ ID NO: 4113 - RNA, 22 nt, Homo sapiens
  source 1..22: mol_type = unassigned RNA
cagcatggagtcctccaggttg

SEQ ID NO: 4114 - RNA, 20 nt, Homo sapiens
  source 1..20: mol_type = unassigned RNA
ccatggatctccaggtgggt

SEQ ID NO: 4115 - RNA, 20 nt, Homo sapiens
  source 1..20: mol_type = unassigned RNA
acccacctggagatccatgg

SEQ ID NO: 4116 - RNA, 22 nt, Homo sapiens
  source 1..22: mol_type = unassigned RNA
cttatgcaagattcccttctac

SEQ ID NO: 4117 - RNA, 22 nt, Homo sapiens
  source 1..22: mol_type = unassigned RNA
gtagaagggaatcttgcataag

SEQ ID NO: 4118 - RNA, 22 nt, Homo sapiens
  source 1..22: mol_type = unassigned RNA
agtggggaacccttccatgagg

SEQ ID NO: 4119 - RNA, 22 nt, Homo sapiens
  source 1..22: mol_type = unassigned RNA
cctcatggaagggttccccact

SEQ ID NO: 4120 - RNA, 23 nt, Homo sapiens
  source 1..23: mol_type = unassigned RNA
aggacctgcgggacaagattctt

SEQ ID NO: 4121 - RNA, 23 nt, Homo sapiens
  source 1..23: mol_type = unassigned RNA
aagaatcttgtcccgcaggtcct

SEQ ID NO: 4122 - RNA, 22 nt, Homo sapiens
  source 1..22: mol_type = unassigned RNA
caaaccacactgtggtgttaga

SEQ ID NO: 4123 - RNA, 22 nt, Homo sapiens
  source 1..22: mol_type = unassigned RNA
tctaacaccacagtgtggtttg

SEQ ID NO: 4124 - RNA, 21 nt, Homo sapiens
  source 1..21: mol_type = unassigned RNA
cagcagcacactgtggtttgt

SEQ ID NO: 4125 - RNA, 21 nt, Homo sapiens
  source 1..21: mol_type = unassigned RNA
acaaaccacagtgtgctgctg

SEQ ID NO: 4126 - RNA, 23 nt, Homo sapiens
  source 1..23: mol_type = unassigned RNA
tttcaagccagggggcgtttttc

SEQ ID NO: 4127 - RNA, 23 nt, Homo sapiens
  source 1..23: mol_type = unassigned RNA
gaaaaacgccccctggcttgaaa

SEQ ID NO: 4128 - RNA, 20 nt, Homo sapiens
  source 1..20: mol_type = unassigned RNA
tcactacctgacaatacagt

SEQ ID NO: 4129 - RNA, 20 nt, Homo sapiens
  source 1..20: mol_type = unassigned RNA
actgtattgtcaggtagtga

SEQ ID NO: 4130 - RNA, 21 nt, Homo sapiens
  source 1..21: mol_type = unassigned RNA
tgctgtattgtcaggtagtga

SEQ ID NO: 4131 - RNA, 21 nt, Homo sapiens
  source 1..21: mol_type = unassigned RNA
tcactacctgacaatacagca

SEQ ID NO: 4132 - RNA, 22 nt, Homo sapiens
  source 1..22: mol_type = unassigned RNA
ttctgcctctgtccaggtcctt

SEQ ID NO: 4133 - RNA, 22 nt, Homo sapiens
  source 1..22: mol_type = unassigned RNA
aaggacctggacagaggcagaa

SEQ ID NO: 4134 - RNA, 24 nt, Homo sapiens
  source 1..24: mol_type = unassigned RNA
agggctggactcagcggcggagct

SEQ ID NO: 4135 - RNA, 24 nt, Homo sapiens
  source 1..24: mol_type = unassigned RNA
agctccgccgctgagtccagccct

SEQ ID NO: 4136 - RNA, 21 nt, Homo sapiens
  source 1..21: mol_type = unassigned RNA
tgactgcctcactgaccactt

SEQ ID NO: 4137 - RNA, 21 nt, Homo sapiens
  source 1..21: mol_type = unassigned RNA
aagtggtcagtgaggcagtca

SEQ ID NO: 4138 - RNA, 24 nt, Homo sapiens
  source 1..24: mol_type = unassigned RNA
aatttggtttctgaggcacttagt

SEQ ID NO: 4139 - RNA, 24 nt, Homo sapiens
  source 1..24: mol_type = unassigned RNA
actaagtgcctcagaaaccaaatt

SEQ ID NO: 4140 - RNA, 21 nt, Homo sapiens
  source 1..21: mol_type = unassigned RNA
tacttttctaggttgttgggg

SEQ ID NO: 4141 - RNA, 21 nt, Homo sapiens
  source 1..21: mol_type = unassigned RNA
ccccaacaacctagaaaagta

SEQ ID NO: 4142 - RNA, 23 nt, Homo sapiens
  source 1..23: mol_type = unassigned RNA
tcacaacaaccttgcagggtaga

SEQ ID NO: 4143 - RNA, 23 nt, Homo sapiens
  source 1..23: mol_type = unassigned RNA
tctaccctgcaaggttgttgtga

SEQ ID NO: 4144 - RNA, 22 nt, Homo sapiens
  source 1..22: mol_type = unassigned RNA
cttggattttcctgggcctcag

SEQ ID NO: 4145 - RNA, 22 nt, Homo sapiens
  source 1..22: mol_type = unassigned RNA
ctgaggcccaggaaaatccaag

SEQ ID NO: 4146 - RNA, 22 nt, Homo sapiens
  source 1..22: mol_type = unassigned RNA
tgaggacagggcaaattcacga

SEQ ID NO: 4147 - RNA, 22 nt, Homo sapiens
  source 1..22: mol_type = unassigned RNA
tcgtgaatttgccctgtcctca

SEQ ID NO: 4148 - RNA, 22 nt, Homo sapiens
  source 1..22: mol_type = unassigned RNA
atcatatgaaccaaactctaat

SEQ ID NO: 4149 - RNA, 22 nt, Homo sapiens
  source 1..22: mol_type = unassigned RNA
attagagtttggttcatatgat

SEQ ID NO: 4150 - RNA, 22 nt, Homo sapiens
  source 1..22: mol_type = unassigned RNA
tagagtctggctgatatggttt

SEQ ID NO: 4151 - RNA, 22 nt, Homo sapiens
  source 1..22: mol_type = unassigned RNA
aaaccatatcagccagactcta

SEQ ID NO: 4152 - RNA, 21 nt, Homo sapiens
  source 1..21: mol_type = unassigned RNA
cctgtgctcccagggcctcgc

SEQ ID NO: 4153 - RNA, 21 nt, Homo sapiens
  source 1..21: mol_type = unassigned RNA
gcgaggccctgggagcacagg

SEQ ID NO: 4154 - RNA, 22 nt, Homo sapiens
  source 1..22: mol_type = unassigned RNA
tgaggcccttggggcacagtgg

SEQ ID NO: 4155 - RNA, 22 nt, Homo sapiens
  source 1..22: mol_type = unassigned RNA
ccactgtgccccaagggcctca

SEQ ID NO: 4156 - RNA, 22 nt, Homo sapiens
  source 1..22: mol_type = unassigned RNA
tcctaaatctgaaagtccaaaa

SEQ ID NO: 4157 - RNA, 22 nt, Homo sapiens
  source 1..22: mol_type = unassigned RNA
ttttggactttcagatttagga

SEQ ID NO: 4158 - RNA, 24 nt, Homo sapiens
  source 1..24: mol_type = unassigned RNA
ttggactttttcagatttggggat

SEQ ID NO: 4159 - RNA, 24 nt, Homo sapiens
  source 1..24: mol_type = unassigned RNA
atccccaaatctgaaaaagtccaa

SEQ ID NO: 4160 - RNA, 22 nt, Homo sapiens
  source 1..22: mol_type = unassigned RNA
atgcacctgggcaaggattctg

SEQ ID NO: 4161 - RNA, 22 nt, Homo sapiens
  source 1..22: mol_type = unassigned RNA
cagaatccttgcccaggtgcat

SEQ ID NO: 4162 - RNA, 23 nt, Homo sapiens
  source 1..23: mol_type = unassigned RNA
taatccttgctacctgggtgaga

SEQ ID NO: 4163 - RNA, 23 nt, Homo sapiens
  source 1..23: mol_type = unassigned RNA
tctcacccaggtagcaaggatta

SEQ ID NO: 4164 - RNA, 22 nt, Homo sapiens
  source 1..22: mol_type = unassigned RNA
ttttgtgtctcccattccccag

SEQ ID NO: 4165 - RNA, 22 nt, Homo sapiens
  source 1..22: mol_type = unassigned RNA
ctggggaatgggagacacaaaa

SEQ ID NO: 4166 - RNA, 22 nt, Homo sapiens
  source 1..22: mol_type = unassigned RNA
agggggatggcagagcaaaatt

SEQ ID NO: 4167 - RNA, 22 nt, Homo sapiens
  source 1..22: mol_type = unassigned RNA
aattttgctctgccatccccct

SEQ ID NO: 4168 - RNA, 22 nt, Homo sapiens
  source 1..22: mol_type = unassigned RNA
gtgcatggctgtatatataaca

SEQ ID NO: 4169 - RNA, 22 nt, Homo sapiens
  source 1..22: mol_type = unassigned RNA
tgttatatatacagccatgcac

SEQ ID NO: 4170 - RNA, 21 nt, Homo sapiens
  source 1..21: mol_type = unassigned RNA
tatatatacagccatgcactc

SEQ ID NO: 4171 - RNA, 21 nt, Homo sapiens
  source 1..21: mol_type = unassigned RNA
gagtgcatggctgtatatata

SEQ ID NO: 4172 - RNA, 22 nt, Homo sapiens
  source 1..22: mol_type = unassigned RNA
aatgcacccgggcaaggattct

SEQ ID NO: 4173 - RNA, 22 nt, Homo sapiens
  source 1..22: mol_type = unassigned RNA
agaatccttgcccgggtgcatt

SEQ ID NO: 4174 - RNA, 22 nt, Homo sapiens
  source 1..22: mol_type = unassigned RNA
aatcctttgtccctgggtgaga

SEQ ID NO: 4175 - RNA, 22 nt, Homo sapiens
  source 1..22: mol_type = unassigned RNA
tctcacccagggacaaaggatt

SEQ ID NO: 4176 - RNA, 22 nt, Homo sapiens
  source 1..22: mol_type = unassigned RNA
aatgcacctgggcaaggattca

SEQ ID NO: 4177 - RNA, 22 nt, Homo sapiens
  source 1..22: mol_type = unassigned RNA
tgaatccttgcccaggtgcatt

SEQ ID NO: 4178 - RNA, 21 nt, Homo sapiens
  source 1..21: mol_type = unassigned RNA
atccttgctatctgggtgcta

SEQ ID NO: 4179 - RNA, 21 nt, Homo sapiens
  source 1..21: mol_type = unassigned RNA
tagcacccagatagcaaggat

SEQ ID NO: 4180 - RNA, 22 nt, Homo sapiens
  source 1..22: mol_type = unassigned RNA
agaccctggtctgcactctatc

SEQ ID NO: 4181 - RNA, 22 nt, Homo sapiens
  source 1..22: mol_type = unassigned RNA
gatagagtgcagaccagggtct

SEQ ID NO: 4182 - RNA, 21 nt, Homo sapiens
  source 1..21: mol_type = unassigned RNA
ttgcagctgcggttgtaaggt

SEQ ID NO: 4183 - RNA, 21 nt, Homo sapiens
  source 1..21: mol_type = unassigned RNA
accttacaaccgcagctgcaa

SEQ ID NO: 4184 - RNA, 22 nt, Homo sapiens
  source 1..22: mol_type = unassigned RNA
cgtcaacacttgctggtttcct

SEQ ID NO: 4185 - RNA, 22 nt, Homo sapiens
  source 1..22: mol_type = unassigned RNA
aggaaaccagcaagtgttgacg

SEQ ID NO: 4186 - RNA, 22 nt, Homo sapiens
  source 1..22: mol_type = unassigned RNA
gggagccaggaagtattgatgt

SEQ ID NO: 4187 - RNA, 22 nt, Homo sapiens
  source 1..22: mol_type = unassigned RNA
acatcaatacttcctggctccc

SEQ ID NO: 4188 - RNA, 21 nt, Homo sapiens
  source 1..21: mol_type = unassigned RNA
taaggcacccttctgagtaga

SEQ ID NO: 4189 - RNA, 21 nt, Homo sapiens
  source 1..21: mol_type = unassigned RNA
tctactcagaagggtgcctta

SEQ ID NO: 4190 - RNA, 22 nt, Homo sapiens
  source 1..22: mol_type = unassigned RNA
tattcaggaaggtgttacttaa

SEQ ID NO: 4191 - RNA, 22 nt, Homo sapiens
  source 1..22: mol_type = unassigned RNA
ttaagtaacaccttcctgaata

SEQ ID NO: 4192 - RNA, 21 nt, Homo sapiens
  source 1..21: mol_type = unassigned RNA
ttttgcaccttttggagtgaa

SEQ ID NO: 4193 - RNA, 21 nt, Homo sapiens
  source 1..21: mol_type = unassigned RNA
ttcactccaaaaggtgcaaaa

SEQ ID NO: 4194 - RNA, 23 nt, Homo sapiens
  source 1..23: mol_type = unassigned RNA
tgattgtagccttttggagtaga

SEQ ID NO: 4195 - RNA, 23 nt, Homo sapiens
  source 1..23: mol_type = unassigned RNA
tctactccaaaaggctacaatca

SEQ ID NO: 4196 - RNA, 23 nt, Homo sapiens
  source 1..23: mol_type = unassigned RNA
gggtttgtagctttgctggcatg

SEQ ID NO: 4197 - RNA, 23 nt, Homo sapiens
  source 1..23: mol_type = unassigned RNA
catgccagcaaagctacaaaccc

SEQ ID NO: 4198 - RNA, 23 nt, Homo sapiens
  source 1..23: mol_type = unassigned RNA
cagggctcagggattggatggag

SEQ ID NO: 4199 - RNA, 23 nt, Homo sapiens
  source 1..23: mol_type = unassigned RNA
ctccatccaatccctgagccctg

SEQ ID NO: 4200 - RNA, 23 nt, Homo sapiens
  source 1..23: mol_type = unassigned RNA
atgctactcggaaatcccactga

SEQ ID NO: 4201 - RNA, 23 nt, Homo sapiens
  source 1..23: mol_type = unassigned RNA
tcagtgggatttccgagtagcat

SEQ ID NO: 4202 - RNA, 21 nt, Homo sapiens
  source 1..21: mol_type = unassigned RNA
gtgggatttctgagtagcatc

SEQ ID NO: 4203 - RNA, 21 nt, Homo sapiens
  source 1..21: mol_type = unassigned RNA
gatgctactcagaaatcccac

SEQ ID NO: 4204 - RNA, 23 nt, Homo sapiens
  source 1..23: mol_type = unassigned RNA
ccggggcagattggtgtagggtg

SEQ ID NO: 4205 - RNA, 23 nt, Homo sapiens
  source 1..23: mol_type = unassigned RNA
caccctacaccaatctgccccgg

SEQ ID NO: 4206 - RNA, 23 nt, Homo sapiens
  source 1..23: mol_type = unassigned RNA
acggagacgacaagactgtgctg

SEQ ID NO: 4207 - RNA, 23 nt, Homo sapiens
  source 1..23: mol_type = unassigned RNA
cagcacagtcttgtcgtctccgt

SEQ ID NO: 4208 - RNA, 22 nt, Homo sapiens
  source 1..22: mol_type = unassigned RNA
aatccacgctgagcttggcatc

SEQ ID NO: 4209 - RNA, 22 nt, Homo sapiens
  source 1..22: mol_type = unassigned RNA
gatgccaagctcagcgtggatt

SEQ ID NO: 4210 - RNA, 23 nt, Homo sapiens
  source 1..23: mol_type = unassigned RNA
aggaaatgaggctggctaggagc

SEQ ID NO: 4211 - RNA, 23 nt, Homo sapiens
  source 1..23: mol_type = unassigned RNA
gctcctagccagcctcatttcct

SEQ ID NO: 4212 - RNA, 22 nt, Homo sapiens
  source 1..22: mol_type = unassigned RNA
tgattggtacgtctgtgggtag

SEQ ID NO: 4213 - RNA, 22 nt, Homo sapiens
  source 1..22: mol_type = unassigned RNA
ctacccacagacgtaccaatca

SEQ ID NO: 4214 - RNA, 22 nt, Homo sapiens
  source 1..22: mol_type = unassigned RNA
aatcagtgaatgccttgaacct

SEQ ID NO: 4215 - RNA, 22 nt, Homo sapiens
  source 1..22: mol_type = unassigned RNA
aggttcaaggcattcactgatt

SEQ ID NO: 4216 - RNA, 21 nt, Homo sapiens
  source 1..21: mol_type = unassigned RNA
ttacaggcgtgaaccaccgcg

SEQ ID NO: 4217 - RNA, 21 nt, Homo sapiens
  source 1..21: mol_type = unassigned RNA
cgcggtggttcacgcctgtaa

SEQ ID NO: 4218 - RNA, 21 nt, Homo sapiens
  source 1..21: mol_type = unassigned RNA
tactgcagacagtggcaatca

SEQ ID NO: 4219 - RNA, 21 nt, Homo sapiens
  source 1..21: mol_type = unassigned RNA
tgattgccactgtctgcagta

SEQ ID NO: 4220 - RNA, 21 nt, Homo sapiens
  source 1..21: mol_type = unassigned RNA
gtttcaccatgttggtcaggc

SEQ ID NO: 4221 - RNA, 21 nt, Homo sapiens
  source 1..21: mol_type = unassigned RNA
gcctgaccaacatggtgaaac

SEQ ID NO: 4222 - RNA, 23 nt, Homo sapiens
  source 1..23: mol_type = unassigned RNA
taaatttcacctttctgagaagg

SEQ ID NO: 4223 - RNA, 23 nt, Homo sapiens
  source 1..23: mol_type = unassigned RNA
ccttctcagaaaggtgaaattta

SEQ ID NO: 4224 - RNA, 22 nt, Homo sapiens
  source 1..22: mol_type = unassigned RNA
ttcacaaggaggtgtcatttat

SEQ ID NO: 4225 - RNA, 22 nt, Homo sapiens
  source 1..22: mol_type = unassigned RNA
ataaatgacacctccttgtgaa

SEQ ID NO: 4226 - RNA, 23 nt, Homo sapiens
  source 1..23: mol_type = unassigned RNA
taaatttcacctttctgagaaga

SEQ ID NO: 4227 - RNA, 23 nt, Homo sapiens
  source 1..23: mol_type = unassigned RNA
tcttctcagaaaggtgaaattta

SEQ ID NO: 4228 - RNA, 22 nt, Homo sapiens
  source 1..22: mol_type = unassigned RNA
ttctcaaggaggtgtcgtttat

SEQ ID NO: 4229 - RNA, 22 nt, Homo sapiens
  source 1..22: mol_type = unassigned RNA
ataaacgacacctccttgagaa

SEQ ID NO: 4230 - RNA, 21 nt, Homo sapiens
  source 1..21: mol_type = unassigned RNA
attgacacttctgtgagtaga

SEQ ID NO: 4231 - RNA, 21 nt, Homo sapiens
  source 1..21: mol_type = unassigned RNA
tctactcacagaagtgtcaat

SEQ ID NO: 4232 - RNA, 23 nt, Homo sapiens
  source 1..23: mol_type = unassigned RNA
tactctggagagtgacaatcatg

SEQ ID NO: 4233 - RNA, 23 nt, Homo sapiens
  source 1..23: mol_type = unassigned RNA
catgattgtcactctccagagta

SEQ ID NO: 4234 - RNA, 21 nt, Homo sapiens
  source 1..21: mol_type = unassigned RNA
attgacacctctgtgagtgga

SEQ ID NO: 4235 - RNA, 21 nt, Homo sapiens
  source 1..21: mol_type = unassigned RNA
tccactcacagaggtgtcaat

SEQ ID NO: 4236 - RNA, 22 nt, Homo sapiens
  source 1..22: mol_type = unassigned RNA
ttctcaagagggaggcaatcat

SEQ ID NO: 4237 - RNA, 22 nt, Homo sapiens
  source 1..22: mol_type = unassigned RNA
atgattgcctccctcttgagaa

SEQ ID NO: 4238 - RNA, 22 nt, Homo sapiens
  source 1..22: mol_type = unassigned RNA
gagtgccttcttttggagcgtt

SEQ ID NO: 4239 - RNA, 22 nt, Homo sapiens
  source 1..22: mol_type = unassigned RNA
aacgctccaaaagaaggcactc

SEQ ID NO: 4240 - RNA, 18 nt, Homo sapiens
  source 1..18: mol_type = unassigned RNA
tgcttcctttcagagggt

SEQ ID NO: 4241 - RNA, 18 nt, Homo sapiens
  source 1..18: mol_type = unassigned RNA
accctctgaaaggaagca

SEQ ID NO: 4242 - RNA, 22 nt, Homo sapiens
  source 1..22: mol_type = unassigned RNA
atctggaggtaagaagcacttt

SEQ ID NO: 4243 - RNA, 22 nt, Homo sapiens
  source 1..22: mol_type = unassigned RNA
aaagtgcttcttacctccagat

SEQ ID NO: 4244 - RNA, 22 nt, Homo sapiens
  source 1..22: mol_type = unassigned RNA
gaaagcgcttccctttgctgga

SEQ ID NO: 4245 - RNA, 22 nt, Homo sapiens
  source 1..22: mol_type = unassigned RNA
tccagcaaagggaagcgctttc

SEQ ID NO: 4246 - RNA, 20 nt, Homo sapiens
  source 1..20: mol_type = unassigned RNA
ctgcaaagggaagccctttc

SEQ ID NO: 4247 - RNA, 20 nt, Homo sapiens
  source 1..20: mol_type = unassigned RNA
gaaagggcttccctttgcag

SEQ ID NO: 4248 - RNA, 21 nt, Homo sapiens
  source 1..21: mol_type = unassigned RNA
caaagcgcttccctttggagc

SEQ ID NO: 4249 - RNA, 21 nt, Homo sapiens
  source 1..21: mol_type = unassigned RNA
gctccaaagggaagcgctttg

SEQ ID NO: 4250 - RNA, 22 nt, Homo sapiens
  source 1..22: mol_type = unassigned RNA
ctctagagggaagcactttctg

SEQ ID NO: 4251 - RNA, 22 nt, Homo sapiens
  source 1..22: mol_type = unassigned RNA
cagaaagtgcttccctctagag

SEQ ID NO: 4252 - RNA, 21 nt, Homo sapiens
  source 1..21: mol_type = unassigned RNA
aaagcgcttcccttcagagtg

SEQ ID NO: 4253 - RNA, 21 nt, Homo sapiens
  source 1..21: mol_type = unassigned RNA
cactctgaagggaagcgcttt

SEQ ID NO: 4254 - RNA, 22 nt, Homo sapiens
  source 1..22: mol_type = unassigned RNA
ctctagagggaagcgctttctg

SEQ ID NO: 4255 - RNA, 22 nt, Homo sapiens
  source 1..22: mol_type = unassigned RNA
cagaaagcgcttccctctagag

SEQ ID NO: 4256 - RNA, 22 nt, Homo sapiens
  source 1..22: mol_type = unassigned RNA
aaagtgcatccttttagaggtt

SEQ ID NO: 4257 - RNA, 22 nt, Homo sapiens
  source 1..22: mol_type = unassigned RNA
aacctctaaaaggatgcacttt

SEQ ID NO: 4258 - RNA, 22 nt, Homo sapiens
  source 1..22: mol_type = unassigned RNA
ctctagagggaagcgctttctg

SEQ ID NO: 4259 - RNA, 22 nt, Homo sapiens
  source 1..22: mol_type = unassigned RNA
cagaaagcgcttccctctagag

SEQ ID NO: 4260 - RNA, 22 nt, Homo sapiens
  source 1..22: mol_type = unassigned RNA
aaagtgcatctttttagaggat

SEQ ID NO: 4261 - RNA, 22 nt, Homo sapiens
  source 1..22: mol_type = unassigned RNA
atcctctaaaaagatgcacttt

SEQ ID NO: 4262 - RNA, 22 nt, Homo sapiens
  source 1..22: mol_type = unassigned RNA
ctctagagggaagcgctttctg

SEQ ID NO: 4263 - RNA, 22 nt, Homo sapiens
  source 1..22: mol_type = unassigned RNA
cagaaagcgcttccctctagag

SEQ ID NO: 4264 - RNA, 21 nt, Homo sapiens
  source 1..21: mol_type = unassigned RNA
aaagtgcttccttttagaggg

SEQ ID NO: 4265 - RNA, 21 nt, Homo sapiens
  source 1..21: mol_type = unassigned RNA
ccctctaaaaggaagcacttt

SEQ ID NO: 4266 - RNA, 22 nt, Homo sapiens
  source 1..22: mol_type = unassigned RNA
aaagtgcttccttttagagggt

SEQ ID NO: 4267 - RNA, 22 nt, Homo sapiens
  source 1..22: mol_type = unassigned RNA
accctctaaaaggaagcacttt

SEQ ID NO: 4268 - RNA, 22 nt, Homo sapiens
  source 1..22: mol_type = unassigned RNA
ctctagagggaagcactttctg

SEQ ID NO: 4269 - RNA, 22 nt, Homo sapiens
  source 1..22: mol_type = unassigned RNA
cagaaagtgcttccctctagag

SEQ ID NO: 4270 - RNA, 22 nt, Homo sapiens
  source 1..22: mol_type = unassigned RNA
aaagtgcttctctttggtgggt

SEQ ID NO: 4271 - RNA, 22 nt, Homo sapiens
  source 1..22: mol_type = unassigned RNA
acccaccaaagagaagcacttt

SEQ ID NO: 4272 - RNA, 20 nt, Homo sapiens
  source 1..20: mol_type = unassigned RNA
ctacaaagggaagccctttc

SEQ ID NO: 4273 - RNA, 20 nt, Homo sapiens
  source 1..20: mol_type = unassigned RNA
gaaagggcttccctttgtag

SEQ ID NO: 4274 - RNA, 21 nt, Homo sapiens
  source 1..21: mol_type = unassigned RNA
aaagtgcttcctttttgaggg

SEQ ID NO: 4275 - RNA, 21 nt, Homo sapiens
  source 1..21: mol_type = unassigned RNA
ccctcaaaaaggaagcacttt

SEQ ID NO: 4276 - RNA, 22 nt, Homo sapiens
  source 1..22: mol_type = unassigned RNA
aagtgcttccttttagagggtt

SEQ ID NO: 4277 - RNA, 22 nt, Homo sapiens
  source 1..22: mol_type = unassigned RNA
aaccctctaaaaggaagcactt

SEQ ID NO: 4278 - RNA, 24 nt, Homo sapiens
  source 1..24: mol_type = unassigned RNA
acaaagtgcttccctttagagtgt

SEQ ID NO: 4279 - RNA, 24 nt, Homo sapiens
  source 1..24: mol_type = unassigned RNA
acactctaaagggaagcactttgt

SEQ ID NO: 4280 - RNA, 22 nt, Homo sapiens
  source 1..22: mol_type = unassigned RNA
aacgcacttccctttagagtgt

SEQ ID NO: 4281 - RNA, 22 nt, Homo sapiens
  source 1..22: mol_type = unassigned RNA
acactctaaagggaagtgcgtt

SEQ ID NO: 4282 - RNA, 22 nt, Homo sapiens
  source 1..22: mol_type = unassigned RNA
aaaatggttccctttagagtgt

SEQ ID NO: 4283 - RNA, 22 nt, Homo sapiens
  source 1..22: mol_type = unassigned RNA
acactctaaagggaaccatttt

SEQ ID NO: 4284 - RNA, 22 nt, Homo sapiens
  source 1..22: mol_type = unassigned RNA
ctctagagggaagcgctttctg

SEQ ID NO: 4285 - RNA, 22 nt, Homo sapiens
  source 1..22: mol_type = unassigned RNA
cagaaagcgcttccctctagag

SEQ ID NO: 4286 - RNA, 23 nt, Homo sapiens
  source 1..23: mol_type = unassigned RNA
gaacgcgcttccctatagagggt

SEQ ID NO: 4287 - RNA, 23 nt, Homo sapiens
  source 1..23: mol_type = unassigned RNA
accctctatagggaagcgcgttc

SEQ ID NO: 4288 - RNA, 22 nt, Homo sapiens
  source 1..22: mol_type = unassigned RNA
ctctagagggaagcgctttctg

SEQ ID NO: 4289 - RNA, 22 nt, Homo sapiens
  source 1..22: mol_type = unassigned RNA
cagaaagcgcttccctctagag

SEQ ID NO: 4290 - RNA, 21 nt, Homo sapiens
  source 1..21: mol_type = unassigned RNA
gaaggcgcttccctttggagt

SEQ ID NO: 4291 - RNA, 21 nt, Homo sapiens
  source 1..21: mol_type = unassigned RNA
actccaaagggaagcgccttc

SEQ ID NO: 4292 - RNA, 20 nt, Homo sapiens
  source 1..20: mol_type = unassigned RNA
ctgcaaagggaagccctttc

SEQ ID NO: 4293 - RNA, 20 nt, Homo sapiens
  source 1..20: mol_type = unassigned RNA
gaaagggcttccctttgcag

SEQ ID NO: 4294 - RNA, 22 nt, Homo sapiens
  source 1..22: mol_type = unassigned RNA
cctcccacacccaaggcttgca

SEQ ID NO: 4295 - RNA, 22 nt, Homo sapiens
  source 1..22: mol_type = unassigned RNA
tgcaagccttgggtgtgggagg

SEQ ID NO: 4296 - RNA, 22 nt, Homo sapiens
  source 1..22: mol_type = unassigned RNA
catgccttgagtgtaggaccgt

SEQ ID NO: 4297 - RNA, 22 nt, Homo sapiens
  source 1..22: mol_type = unassigned RNA
acggtcctacactcaaggcatg

SEQ ID NO: 4298 - RNA, 22 nt, Homo sapiens
  source 1..22: mol_type = unassigned RNA
atcatacaaggacaatttcttt

SEQ ID NO: 4299 - RNA, 22 nt, Homo sapiens
  source 1..22: mol_type = unassigned RNA
aaagaaattgtccttgtatgat

SEQ ID NO: 4300 - RNA, 22 nt, Homo sapiens
  source 1..22: mol_type = unassigned RNA
ggagaaattatccttggtgtgt

SEQ ID NO: 4301 - RNA, 22 nt, Homo sapiens
  source 1..22: mol_type = unassigned RNA
acacaccaaggataatttctcc

SEQ ID NO: 4302 - RNA, 22 nt, Homo sapiens
  source 1..22: mol_type = unassigned RNA
tggtgggcacagaatctggact

SEQ ID NO: 4303 - RNA, 22 nt, Homo sapiens
  source 1..22: mol_type = unassigned RNA
agtccagattctgtgcccacca

SEQ ID NO: 4304 - RNA, 25 nt, Homo sapiens
  source 1..25: mol_type = unassigned RNA
aaaggattctgctgtcggtcccact

SEQ ID NO: 4305 - RNA, 25 nt, Homo sapiens
  source 1..25: mol_type = unassigned RNA
agtgggaccgacagcagaatccttt

SEQ ID NO: 4306 - RNA, 23 nt, Homo sapiens
  source 1..23: mol_type = unassigned RNA
tcggggatcatcatgtcacgaga

SEQ ID NO: 4307 - RNA, 23 nt, Homo sapiens
  source 1..23: mol_type = unassigned RNA
tctcgtgacatgatgatccccga

SEQ ID NO: 4308 - RNA, 22 nt, Homo sapiens
  source 1..22: mol_type = unassigned RNA
aaacattcgcggtgcacttctt

SEQ ID NO: 4309 - RNA, 22 nt, Homo sapiens
  source 1..22: mol_type = unassigned RNA
aagaagtgcaccgcgaatgttt

SEQ ID NO: 4310 - RNA, 22 nt, Homo sapiens
  source 1..22: mol_type = unassigned RNA
attctgcatttttagcaagttc

SEQ ID NO: 4311 - RNA, 22 nt, Homo sapiens
  source 1..22: mol_type = unassigned RNA
gaacttgctaaaaatgcagaat

SEQ ID NO: 4312 - RNA, 22 nt, Homo sapiens
  source 1..22: mol_type = unassigned RNA
acctgaggttgtgcatttctaa

SEQ ID NO: 4313 - RNA, 22 nt, Homo sapiens
  source 1..22: mol_type = unassigned RNA
ttagaaatgcacaacctcaggt

SEQ ID NO: 4314 - RNA, 22 nt, Homo sapiens
  source 1..22: mol_type = unassigned RNA
tcagcaaacatttattgtgtgc

SEQ ID NO: 4315 - RNA, 22 nt, Homo sapiens
  source 1..22: mol_type = unassigned RNA
gcacacaataaatgtttgctga

SEQ ID NO: 4316 - RNA, 22 nt, Homo sapiens
  source 1..22: mol_type = unassigned RNA
tcagtaaatgtttattagatga

SEQ ID NO: 4317 - RNA, 22 nt, Homo sapiens
  source 1..22: mol_type = unassigned RNA
tcatctaataaacatttactga

SEQ ID NO: 4318 - RNA, 22 nt, Homo sapiens
  source 1..22: mol_type = unassigned RNA
agctacagttacttttgcacca

SEQ ID NO: 4319 - RNA, 22 nt, Homo sapiens
  source 1..22: mol_type = unassigned RNA
tggtgcaaaagtaactgtagct

SEQ ID NO: 4320 - RNA, 20 nt, Homo sapiens
  source 1..20: mol_type = unassigned RNA
taaaaactgcaattactttc

SEQ ID NO: 4321 - RNA, 20 nt, Homo sapiens
  source 1..20: mol_type = unassigned RNA
gaaagtaattgcagttttta

SEQ ID NO: 4322 - RNA, 23 nt, Homo sapiens
  source 1..23: mol_type = unassigned RNA
tgcaaaagtaattgcagtttttg

SEQ ID NO: 4323 - RNA, 23 nt, Homo sapiens
  source 1..23: mol_type = unassigned RNA
caaaaactgcaattacttttgca

SEQ ID NO: 4324 - RNA, 22 nt, Homo sapiens
  source 1..22: mol_type = unassigned RNA
aaagaccgtgactacttttgca

SEQ ID NO: 4325 - RNA, 22 nt, Homo sapiens
  source 1..22: mol_type = unassigned RNA
tgcaaaagtagtcacggtcttt

SEQ ID NO: 4326 - RNA, 22 nt, Homo sapiens
  source 1..22: mol_type = unassigned RNA
agaagtaactacggtttttgca

SEQ ID NO: 4327 - RNA, 22 nt, Homo sapiens
  source 1..22: mol_type = unassigned RNA
tgcaaaaaccgtagttacttct

SEQ ID NO: 4328 - RNA, 19 nt, Homo sapiens
  source 1..19: mol_type = unassigned RNA
aaaaaccacaattactttt

SEQ ID NO: 4329 - RNA, 19 nt, Homo sapiens
  source 1..19: mol_type = unassigned RNA
aaaagtaattgtggttttt

SEQ ID NO: 4330 - RNA, 19 nt, Homo sapiens
  source 1..19: mol_type = unassigned RNA
aaaagtaattgcggtcttt

SEQ ID NO: 4331 - RNA, 19 nt, Homo sapiens
  source 1..19: mol_type = unassigned RNA
aaagaccgcaattactttt

SEQ ID NO: 4332 - RNA, 22 nt, Homo sapiens
  source 1..22: mol_type = unassigned RNA
caaaaactgcaattacttttgc

SEQ ID NO: 4333 - RNA, 22 nt, Homo sapiens
  source 1..22: mol_type = unassigned RNA
gcaaaagtaattgcagtttttg

SEQ ID NO: 4334 - RNA, 22 nt, Homo sapiens
  source 1..22: mol_type = unassigned RNA
gaaagtaattgctgtttttgcc

SEQ ID NO: 4335 - RNA, 22 nt, Homo sapiens
  source 1..22: mol_type = unassigned RNA
ggcaaaaacagcaattactttc

SEQ ID NO: 4336 - RNA, 21 nt, Homo sapiens
  source 1..21: mol_type = unassigned RNA
taaaactgcagttatttttgc

SEQ ID NO: 4337 - RNA, 21 nt, Homo sapiens
  source 1..21: mol_type = unassigned RNA
gcaaaaataactgcagtttta

SEQ ID NO: 4338 - RNA, 21 nt, Homo sapiens
  source 1..21: mol_type = unassigned RNA
aaaagtaattgcagtttttgc

SEQ ID NO: 4339 - RNA, 21 nt, Homo sapiens
  source 1..21: mol_type = unassigned RNA
gcaaaaactgcaattactttt

SEQ ID NO: 4340 - RNA, 22 nt, Homo sapiens
  source 1..22: mol_type = unassigned RNA
taaaacccacaattatgtttgt

SEQ ID NO: 4341 - RNA, 22 nt, Homo sapiens
  source 1..22: mol_type = unassigned RNA
acaaacataattgtgggtttta

SEQ ID NO: 4342 - RNA, 22 nt, Homo sapiens
  source 1..22: mol_type = unassigned RNA
aaaagtaattgcgggttttgcc

SEQ ID NO: 4343 - RNA, 22 nt, Homo sapiens
  source 1..22: mol_type = unassigned RNA
ggcaaaacccgcaattactttt

SEQ ID NO: 4344 - RNA, 21 nt, Homo sapiens
  source 1..21: mol_type = unassigned RNA
caaaaccgcagtaacttttgt

SEQ ID NO: 4345 - RNA, 21 nt, Homo sapiens
  source 1..21: mol_type = unassigned RNA
acaaaagttactgcggttttg

SEQ ID NO: 4346 - RNA, 22 nt, Homo sapiens
  source 1..22: mol_type = unassigned RNA
aaaagttattgcggttttggct

SEQ ID NO: 4347 - RNA, 22 nt, Homo sapiens
  source 1..22: mol_type = unassigned RNA
agccaaaaccgcaataactttt

SEQ ID NO: 4348 - RNA, 21 nt, Homo sapiens
  source 1..21: mol_type = unassigned RNA
tggcagttacttttgcaccag

SEQ ID NO: 4349 - RNA, 21 nt, Homo sapiens
  source 1..21: mol_type = unassigned RNA
ctggtgcaaaagtaactgcca

SEQ ID NO: 4350 - RNA, 21 nt, Homo sapiens
  source 1..21: mol_type = unassigned RNA
aaaagtaattgcggtttttgc

SEQ ID NO: 4351 - RNA, 21 nt, Homo sapiens
  source 1..21: mol_type = unassigned RNA
gcaaaaaccgcaattactttt

SEQ ID NO: 4352 - RNA, 20 nt, Homo sapiens
  source 1..20: mol_type = unassigned RNA
aaaactgcagttacttttgc

SEQ ID NO: 4353 - RNA, 20 nt, Homo sapiens
  source 1..20: mol_type = unassigned RNA
gcaaaagtaactgcagtttt

SEQ ID NO: 4354 - RNA, 18 nt, Homo sapiens
  source 1..18: mol_type = unassigned RNA
aaaagtacttgcggattt

SEQ ID NO: 4355 - RNA, 18 nt, Homo sapiens
  source 1..18: mol_type = unassigned RNA
aaatccgcaagtactttt

SEQ ID NO: 4356 - RNA, 20 nt, Homo sapiens
  source 1..20: mol_type = unassigned RNA
gtgcaaaagtcatcacggtt

SEQ ID NO: 4357 - RNA, 20 nt, Homo sapiens
  source 1..20: mol_type = unassigned RNA
aaccgtgatgacttttgcac

SEQ ID NO: 4358 - RNA, 22 nt, Homo sapiens
  source 1..22: mol_type = unassigned RNA
gctggtgcaaaagtaatggcgg

SEQ ID NO: 4359 - RNA, 22 nt, Homo sapiens
  source 1..22: mol_type = unassigned RNA
ccgccattacttttgcaccagc

SEQ ID NO: 4360 - RNA, 22 nt, Homo sapiens
  source 1..22: mol_type = unassigned RNA
aaaagtaatcactgtttttgcc

SEQ ID NO: 4361 - RNA, 22 nt, Homo sapiens
  source 1..22: mol_type = unassigned RNA
ggcaaaaacagtgattactttt

SEQ ID NO: 4362 - RNA, 20 nt, Homo sapiens
  source 1..20: mol_type = unassigned RNA
agtgcctgagggagtaagag

SEQ ID NO: 4363 - RNA, 20 nt, Homo sapiens
  source 1..20: mol_type = unassigned RNA
ctcttactccctcaggcact

SEQ ID NO: 4364 - RNA, 22 nt, Homo sapiens
  source 1..22: mol_type = unassigned RNA
tgtcttactccctcaggcacat

SEQ ID NO: 4365 - RNA, 22 nt, Homo sapiens
  source 1..22: mol_type = unassigned RNA
atgtgcctgagggagtaagaca

SEQ ID NO: 4366 - RNA, 23 nt, Homo sapiens
  source 1..23: mol_type = unassigned RNA
agtgcctgagggagtaagagccc

SEQ ID NO: 4367 - RNA, 23 nt, Homo sapiens
  source 1..23: mol_type = unassigned RNA
gggctcttactccctcaggcact

SEQ ID NO: 4368 - RNA, 21 nt, Homo sapiens
  source 1..21: mol_type = unassigned RNA
gcgacccactcttggtttcca

SEQ ID NO: 4369 - RNA, 21 nt, Homo sapiens
  source 1..21: mol_type = unassigned RNA
tggaaaccaagagtgggtcgc

SEQ ID NO: 4370 - RNA, 22 nt, Homo sapiens
  source 1..22: mol_type = unassigned RNA
ttagcttaaggagtaccagatc

SEQ ID NO: 4371 - RNA, 22 nt, Homo sapiens
  source 1..22: mol_type = unassigned RNA
gatctggtactccttaagctaa

SEQ ID NO: 4372 - RNA, 21 nt, Homo sapiens
  source 1..21: mol_type = unassigned RNA
tatggtactccttaagctaac

SEQ ID NO: 4373 - RNA, 21 nt, Homo sapiens
  source 1..21: mol_type = unassigned RNA
gttagcttaaggagtaccata

SEQ ID NO: 4374 - RNA, 19 nt, Homo sapiens
  source 1..19: mol_type = unassigned RNA
tgagctgctgtaccaaaat

SEQ ID NO: 4375 - RNA, 19 nt, Homo sapiens
  source 1..19: mol_type = unassigned RNA
attttggtacagcagctca

SEQ ID NO: 4376 - RNA, 22 nt, Homo sapiens
  source 1..22: mol_type = unassigned RNA
cacatatgaagtgagccagcac

SEQ ID NO: 4377 - RNA, 22 nt, Homo sapiens
  source 1..22: mol_type = unassigned RNA
gtgctggctcacttcatatgtg

SEQ ID NO: 4378 - RNA, 22 nt, Homo sapiens
  source 1..22: mol_type = unassigned RNA
tgctggctcatttcatatgtgt

SEQ ID NO: 4379 - RNA, 22 nt, Homo sapiens
  source 1..22: mol_type = unassigned RNA
acacatatgaaatgagccagca

SEQ ID NO: 4380 - RNA, 22 nt, Homo sapiens
  source 1..22: mol_type = unassigned RNA
ttccatgcctcctagaagttcc

SEQ ID NO: 4381 - RNA, 22 nt, Homo sapiens
  source 1..22: mol_type = unassigned RNA
ggaacttctaggaggcatggaa

SEQ ID NO: 4382 - RNA, 22 nt, Homo sapiens
  source 1..22: mol_type = unassigned RNA
agccttccaggagaaatggaga

SEQ ID NO: 4383 - RNA, 22 nt, Homo sapiens
  source 1..22: mol_type = unassigned RNA
tctccatttctcctggaaggct

SEQ ID NO: 4384 - RNA, 22 nt, Homo sapiens
  source 1..22: mol_type = unassigned RNA
taaaactttaagtgtgcctagg

SEQ ID NO: 4385 - RNA, 22 nt, Homo sapiens
  source 1..22: mol_type = unassigned RNA
cctaggcacacttaaagtttta

SEQ ID NO: 4386 - RNA, 22 nt, Homo sapiens
  source 1..22: mol_type = unassigned RNA
taggcacacttaaagttatagc

SEQ ID NO: 4387 - RNA, 22 nt, Homo sapiens
  source 1..22: mol_type = unassigned RNA
gctataactttaagtgtgccta

SEQ ID NO: 4388 - RNA, 22 nt, Homo sapiens
  source 1..22: mol_type = unassigned RNA
gaatatgggtatattagtttgg

SEQ ID NO: 4389 - RNA, 22 nt, Homo sapiens
  source 1..22: mol_type = unassigned RNA
ccaaactaatatacccatattc

SEQ ID NO: 4390 - RNA, 22 nt, Homo sapiens
  source 1..22: mol_type = unassigned RNA
aaactaatatacccatattctg

SEQ ID NO: 4391 - RNA, 22 nt, Homo sapiens
  source 1..22: mol_type = unassigned RNA
cagaatatgggtatattagttt

SEQ ID NO: 4392 - RNA, 22 nt, Homo sapiens
  source 1..22: mol_type = unassigned RNA
tagttcttccctttgcccaatt

SEQ ID NO: 4393 - RNA, 22 nt, Homo sapiens
  source 1..22: mol_type = unassigned RNA
aattgggcaaagggaagaacta

SEQ ID NO: 4394 - RNA, 22 nt, Homo sapiens
  source 1..22: mol_type = unassigned RNA
cagggaaatgggaagaactaga

SEQ ID NO: 4395 - RNA, 22 nt, Homo sapiens
  source 1..22: mol_type = unassigned RNA
tctagttcttcccatttccctg

SEQ ID NO: 4396 - RNA, 22 nt, Homo sapiens
  source 1..22: mol_type = unassigned RNA
ctgaatagctgggactacaggt

SEQ ID NO: 4397 - RNA, 22 nt, Homo sapiens
  source 1..22: mol_type = unassigned RNA
acctgtagtcccagctattcag

SEQ ID NO: 4398 - RNA, 22 nt, Homo sapiens
  source 1..22: mol_type = unassigned RNA
tgaagtaccagctactcgagag

SEQ ID NO: 4399 - RNA, 22 nt, Homo sapiens
  source 1..22: mol_type = unassigned RNA
ctctcgagtagctggtacttca

SEQ ID NO: 4400 - RNA, 22 nt, Homo sapiens
  source 1..22: mol_type = unassigned RNA
cagagtgacaagctggttaaag

SEQ ID NO: 4401 - RNA, 22 nt, Homo sapiens
  source 1..22: mol_type = unassigned RNA
ctttaaccagcttgtcactctg

SEQ ID NO: 4402 - RNA, 22 nt, Homo sapiens
  source 1..22: mol_type = unassigned RNA
tatccagcttgttactatatgc

SEQ ID NO: 4403 - RNA, 22 nt, Homo sapiens
  source 1..22: mol_type = unassigned RNA
gcatatagtaacaagctggata

SEQ ID NO: 4404 - RNA, 21 nt, Homo sapiens
  source 1..21: mol_type = unassigned RNA
gccccgggcagtgtgatcatc

SEQ ID NO: 4405 - RNA, 21 nt, Homo sapiens
  source 1..21: mol_type = unassigned RNA
gatgatcacactgcccggggc

SEQ ID NO: 4406 - RNA, 18 nt, Homo sapiens
  source 1..18: mol_type = unassigned RNA
atggtcacctccgggact

SEQ ID NO: 4407 - RNA, 18 nt, Homo sapiens
  source 1..18: mol_type = unassigned RNA
agtcccggaggtgaccat

SEQ ID NO: 4408 - RNA, 19 nt, Homo sapiens
  source 1..19: mol_type = unassigned RNA
aagtcccactaatgccagc

SEQ ID NO: 4409 - RNA, 19 nt, Homo sapiens
  source 1..19: mol_type = unassigned RNA
gctggcattagtgggactt

SEQ ID NO: 4410 - RNA, 21 nt, Homo sapiens
  source 1..21: mol_type = unassigned RNA
actggcattagtgggactttt

SEQ ID NO: 4411 - RNA, 21 nt, Homo sapiens
  source 1..21: mol_type = unassigned RNA
aaaagtcccactaatgccagt

SEQ ID NO: 4412 - RNA, 23 nt, Homo sapiens
  source 1..23: mol_type = unassigned RNA
tgcacatggcaacctagctccca

SEQ ID NO: 4413 - RNA, 23 nt, Homo sapiens
  source 1..23: mol_type = unassigned RNA
tgggagctaggttgccatgtgca

SEQ ID NO: 4414 - RNA, 21 nt, Homo sapiens
  source 1..21: mol_type = unassigned RNA
ggctgggtgctcttgtgcagt

SEQ ID NO: 4415 - RNA, 21 nt, Homo sapiens
  source 1..21: mol_type = unassigned RNA
actgcacaagagcacccagcc

SEQ ID NO: 4416 - RNA, 21 nt, Homo sapiens
  source 1..21: mol_type = unassigned RNA
taaagtaaatatgcaccaaaa

SEQ ID NO: 4417 - RNA, 21 nt, Homo sapiens
  source 1..21: mol_type = unassigned RNA
ttttggtgcatatttacttta

SEQ ID NO: 4418 - RNA, 21 nt, Homo sapiens
  source 1..21: mol_type = unassigned RNA
aataaagttcatgtatggcaa

SEQ ID NO: 4419 - RNA, 21 nt, Homo sapiens
  source 1..21: mol_type = unassigned RNA
ttgccatacatgaactttatt

SEQ ID NO: 4420 - RNA, 21 nt, Homo sapiens
  source 1..21: mol_type = unassigned RNA
ttgccatacatagactttatt

SEQ ID NO: 4421 - RNA, 21 nt, Homo sapiens
  source 1..21: mol_type = unassigned RNA
aataaagtctatgtatggcaa

SEQ ID NO: 4422 - RNA, 21 nt, Homo sapiens
  source 1..21: mol_type = unassigned RNA
atacccatagcttagctccca

SEQ ID NO: 4423 - RNA, 21 nt, Homo sapiens
  source 1..21: mol_type = unassigned RNA
tgggagctaagctatgggtat

SEQ ID NO: 4424 - RNA, 21 nt, Homo sapiens
  source 1..21: mol_type = unassigned RNA
tgggagctaagctatgggtat

SEQ ID NO: 4425 - RNA, 21 nt, Homo sapiens
  source 1..21: mol_type = unassigned RNA
atacccatagcttagctccca

SEQ ID NO: 4426 - RNA, 22 nt, Homo sapiens
  source 1..22: mol_type = unassigned RNA
caaagtttaagatccttgaagt

SEQ ID NO: 4427 - RNA, 22 nt, Homo sapiens
  source 1..22: mol_type = unassigned RNA
acttcaaggatcttaaactttg

SEQ ID NO: 4428 - RNA, 22 nt, Homo sapiens
  source 1..22: mol_type = unassigned RNA
atcaaggatcttaaactttgcc

SEQ ID NO: 4429 - RNA, 22 nt, Homo sapiens
  source 1..22: mol_type = unassigned RNA
ggcaaagtttaagatccttgat

SEQ ID NO: 4430 - RNA, 20 nt, Homo sapiens
  source 1..20: mol_type = unassigned RNA
aaagtagctgtaccatttgc

SEQ ID NO: 4431 - RNA, 20 nt, Homo sapiens
  source 1..20: mol_type = unassigned RNA
gcaaatggtacagctacttt

SEQ ID NO: 4432 - RNA, 19 nt, Homo sapiens
  source 1..19: mol_type = unassigned RNA
aggcacggtgtcagcaggc

SEQ ID NO: 4433 - RNA, 19 nt, Homo sapiens
  source 1..19: mol_type = unassigned RNA
gcctgctgacaccgtgcct

SEQ ID NO: 4434 - RNA, 19 nt, Homo sapiens
  source 1..19: mol_type = unassigned RNA
gggcgcctgtgatcccaac

SEQ ID NO: 4435 - RNA, 19 nt, Homo sapiens
  source 1..19: mol_type = unassigned RNA
gttgggatcacaggcgccc

SEQ ID NO: 4436 - RNA, 23 nt, Homo sapiens
  source 1..23: mol_type = unassigned RNA
agtatgttcttccaggacagaac

SEQ ID NO: 4437 - RNA, 23 nt, Homo sapiens
  source 1..23: mol_type = unassigned RNA
gttctgtcctggaagaacatact

SEQ ID NO: 4438 - RNA, 22 nt, Homo sapiens
  source 1..22: mol_type = unassigned RNA
gagaaatgctggactaatctgc

SEQ ID NO: 4439 - RNA, 22 nt, Homo sapiens
  source 1..22: mol_type = unassigned RNA
gcagattagtccagcatttctc

SEQ ID NO: 4440 - RNA, 22 nt, Homo sapiens
  source 1..22: mol_type = unassigned RNA
agaaagggtggcaatacctctt

SEQ ID NO: 4441 - RNA, 22 nt, Homo sapiens
  source 1..22: mol_type = unassigned RNA
aagaggtattgccaccctttct

SEQ ID NO: 4442 - RNA, 22 nt, Homo sapiens
  source 1..22: mol_type = unassigned RNA
aggtattgccaccctttctagt

SEQ ID NO: 4443 - RNA, 22 nt, Homo sapiens
  source 1..22: mol_type = unassigned RNA
actagaaagggtggcaatacct

SEQ ID NO: 4444 - RNA, 22 nt, Homo sapiens
  source 1..22: mol_type = unassigned RNA
gtagcaccttgcaggataaggt

SEQ ID NO: 4445 - RNA, 22 nt, Homo sapiens
  source 1..22: mol_type = unassigned RNA
accttatcctgcaaggtgctac

SEQ ID NO: 4446 - RNA, 24 nt, Homo sapiens
  source 1..24: mol_type = unassigned RNA
tacagatgcagattctctgacttc

SEQ ID NO: 4447 - RNA, 24 nt, Homo sapiens
  source 1..24: mol_type = unassigned RNA
gaagtcagagaatctgcatctgta

SEQ ID NO: 4448 - RNA, 20 nt, Homo sapiens
  source 1..20: mol_type = unassigned RNA
aactctagcctgagcaacag

SEQ ID NO: 4449 - RNA, 20 nt, Homo sapiens
  source 1..20: mol_type = unassigned RNA
ctgttgctcaggctagagtt

SEQ ID NO: 4450 - RNA, 22 nt, Homo sapiens
  source 1..22: mol_type = unassigned RNA
acagcccagcagttatcacggg

SEQ ID NO: 4451 - RNA, 22 nt, Homo sapiens
  source 1..22: mol_type = unassigned RNA
cccgtgataactgctgggctgt

SEQ ID NO: 4452 - RNA, 21 nt, Homo sapiens
  source 1..21: mol_type = unassigned RNA
tatcgtatcgtattgtattgt

SEQ ID NO: 4453 - RNA, 21 nt, Homo sapiens
  source 1..21: mol_type = unassigned RNA
acaatacaatacgatacgata

SEQ ID NO: 4454 - RNA, 22 nt, Homo sapiens
  source 1..22: mol_type = unassigned RNA
ttagaacgttttagggtcaaat

SEQ ID NO: 4455 - RNA, 22 nt, Homo sapiens
  source 1..22: mol_type = unassigned RNA
atttgaccctaaaacgttctaa

SEQ ID NO: 4456 - RNA, 22 nt, Homo sapiens
  source 1..22: mol_type = unassigned RNA
taacaaacacctgtaaaacagc

SEQ ID NO: 4457 - RNA, 22 nt, Homo sapiens
  source 1..22: mol_type = unassigned RNA
gctgttttacaggtgtttgtta

SEQ ID NO: 4458 - RNA, 22 nt, Homo sapiens
  source 1..22: mol_type = unassigned RNA
agcatacacctgtagtcctaga

SEQ ID NO: 4459 - RNA, 22 nt, Homo sapiens
  source 1..22: mol_type = unassigned RNA
tctaggactacaggtgtatgct

SEQ ID NO: 4460 - RNA, 21 nt, Homo sapiens
  source 1..21: mol_type = unassigned RNA
agttaatgaatcctggaaagt

SEQ ID NO: 4461 - RNA, 21 nt, Homo sapiens
  source 1..21: mol_type = unassigned RNA
actttccaggattcattaact

SEQ ID NO: 4462 - RNA, 21 nt, Homo sapiens
  source 1..21: mol_type = unassigned RNA
tcagctactacctctattagg

SEQ ID NO: 4463 - RNA, 21 nt, Homo sapiens
  source 1..21: mol_type = unassigned RNA
cctaatagaggtagtagctga

SEQ ID NO: 4464 - RNA, 22 nt, Homo sapiens
  source 1..22: mol_type = unassigned RNA
ttgctctgagctccgagaaagc

SEQ ID NO: 4465 - RNA, 22 nt, Homo sapiens
  source 1..22: mol_type = unassigned RNA
gctttctcggagctcagagcaa

SEQ ID NO: 4466 - RNA, 22 nt, Homo sapiens
  source 1..22: mol_type = unassigned RNA
caaataataccacagtgggtgt

SEQ ID NO: 4467 - RNA, 22 nt, Homo sapiens
  source 1..22: mol_type = unassigned RNA
acacccactgtggtattatttg

SEQ ID NO: 4468 - RNA, 20 nt, Homo sapiens
  source 1..20: mol_type = unassigned RNA
aataatatcacagtaggtgt

SEQ ID NO: 4469 - RNA, 20 nt, Homo sapiens
  source 1..20: mol_type = unassigned RNA
acacctactgtgatattatt

SEQ ID NO: 4470 - RNA, 22 nt, Homo sapiens
  source 1..22: mol_type = unassigned RNA
aataatatcacagtaggtgtac

SEQ ID NO: 4471 - RNA, 22 nt, Homo sapiens
  source 1..22: mol_type = unassigned RNA
gtacacctactgtgatattatt

SEQ ID NO: 4472 - RNA, 22 nt, Homo sapiens
  source 1..22: mol_type = unassigned RNA
gcagtggctctgaaatgaactc

SEQ ID NO: 4473 - RNA, 22 nt, Homo sapiens
  source 1..22: mol_type = unassigned RNA
gagttcatttcagagccactgc

SEQ ID NO: 4474 - RNA, 21 nt, Homo sapiens
  source 1..21: mol_type = unassigned RNA
cagatcatgggactgtctcag

SEQ ID NO: 4475 - RNA, 21 nt, Homo sapiens
  source 1..21: mol_type = unassigned RNA
ctgagacagtcccatgatctg

SEQ ID NO: 4476 - RNA, 22 nt, Homo sapiens
  source 1..22: mol_type = unassigned RNA
actccaagaagaatctagacag

SEQ ID NO: 4477 - RNA, 22 nt, Homo sapiens
  source 1..22: mol_type = unassigned RNA
ctgtctagattcttcttggagt

SEQ ID NO: 4478 - RNA, 22 nt, Homo sapiens
  source 1..22: mol_type = unassigned RNA
ctcatttaagtagtctgatgcc

SEQ ID NO: 4479 - RNA, 22 nt, Homo sapiens
  source 1..22: mol_type = unassigned RNA
ggcatcagactacttaaatgag

SEQ ID NO: 4480 - RNA, 22 nt, Homo sapiens
  source 1..22: mol_type = unassigned RNA
tcaagtagtttcatgataaagg

SEQ ID NO: 4481 - RNA, 22 nt, Homo sapiens
  source 1..22: mol_type = unassigned RNA
cctttatcatgaaactacttga

SEQ ID NO: 4482 - RNA, 22 nt, Homo sapiens
  source 1..22: mol_type = unassigned RNA
tgggggagtgcagtgattgtgg

SEQ ID NO: 4483 - RNA, 22 nt, Homo sapiens
  source 1..22: mol_type = unassigned RNA
ccacaatcactgcactccccca

SEQ ID NO: 4484 - RNA, 22 nt, Homo sapiens
  source 1..22: mol_type = unassigned RNA
tcctgtctttccttgttggagc

SEQ ID NO: 4485 - RNA, 22 nt, Homo sapiens
  source 1..22: mol_type = unassigned RNA
gctccaacaaggaaagacagga

SEQ ID NO: 4486 - RNA, 22 nt, Homo sapiens
  source 1..22: mol_type = unassigned RNA
taatgcattaaattattgaagg

SEQ ID NO: 4487 - RNA, 22 nt, Homo sapiens
  source 1..22: mol_type = unassigned RNA
ccttcaataatttaatgcatta

SEQ ID NO: 4488 - RNA, 19 nt, Homo sapiens
  source 1..19: mol_type = unassigned RNA
ttattgtcacgttctgatt

SEQ ID NO: 4489 - RNA, 19 nt, Homo sapiens
  source 1..19: mol_type = unassigned RNA
aatcagaacgtgacaataa

SEQ ID NO: 4490 - RNA, 22 nt, Homo sapiens
  source 1..22: mol_type = unassigned RNA
tgagtcagcaacatatcccatg

SEQ ID NO: 4491 - RNA, 22 nt, Homo sapiens
  source 1..22: mol_type = unassigned RNA
catgggatatgttgctgactca

SEQ ID NO: 4492 - RNA, 18 nt, Homo sapiens
  source 1..18: mol_type = unassigned RNA
aggagaagtcgggaaggt

SEQ ID NO: 4493 - RNA, 18 nt, Homo sapiens
  source 1..18: mol_type = unassigned RNA
accttcccgacttctcct

SEQ ID NO: 4494 - RNA, 22 nt, Homo sapiens
  source 1..22: mol_type = unassigned RNA
cgaaaacagcaattacctttgc

SEQ ID NO: 4495 - RNA, 22 nt, Homo sapiens
  source 1..22: mol_type = unassigned RNA
gcaaaggtaattgctgttttcg

SEQ ID NO: 4496 - RNA, 22 nt, Homo sapiens
  source 1..22: mol_type = unassigned RNA
ttaggccatcatcccattatgc

SEQ ID NO: 4497 - RNA, 22 nt, Homo sapiens
  source 1..22: mol_type = unassigned RNA
gcataatgggatgatggcctaa

SEQ ID NO: 4498 - RNA, 23 nt, Homo sapiens
  source 1..23: mol_type = unassigned RNA
tgtttcggggctcatggcctgtg

SEQ ID NO: 4499 - RNA, 23 nt, Homo sapiens
  source 1..23: mol_type = unassigned RNA
cacaggccatgagccccgaaaca

SEQ ID NO: 4500 - RNA, 22 nt, Homo sapiens
  source 1..22: mol_type = unassigned RNA
aaaggtaattgcagtttttccc

SEQ ID NO: 4501 - RNA, 22 nt, Homo sapiens
  source 1..22: mol_type = unassigned RNA
gggaaaaactgcaattaccttt

SEQ ID NO: 4502 - RNA, 22 nt, Homo sapiens
  source 1..22: mol_type = unassigned RNA
ttctggataacatgctgaagct

SEQ ID NO: 4503 - RNA, 22 nt, Homo sapiens
  source 1..22: mol_type = unassigned RNA
agcttcagcatgttatccagaa

SEQ ID NO: 4504 - RNA, 22 nt, Homo sapiens
  source 1..22: mol_type = unassigned RNA
acgtttgaatgctgtacaaggc

SEQ ID NO: 4505 - RNA, 22 nt, Homo sapiens
  source 1..22: mol_type = unassigned RNA
gccttgtacagcattcaaacgt

SEQ ID NO: 4506 - RNA, 20 nt, Homo sapiens
  source 1..20: mol_type = unassigned RNA
atgagcgactgtgcctgacc

SEQ ID NO: 4507 - RNA, 20 nt, Homo sapiens
  source 1..20: mol_type = unassigned RNA
ggtcaggcacagtcgctcat

SEQ ID NO: 4508 - RNA, 19 nt, Homo sapiens
  source 1..19: mol_type = unassigned RNA
gagccagttggacaggagc

SEQ ID NO: 4509 - RNA, 19 nt, Homo sapiens
  source 1..19: mol_type = unassigned RNA
gctcctgtccaactggctc

SEQ ID NO: 4510 - RNA, 23 nt, Homo sapiens
  source 1..23: mol_type = unassigned RNA
ttcatttggtataaaccgcgatt

SEQ ID NO: 4511 - RNA, 23 nt, Homo sapiens
  source 1..23: mol_type = unassigned RNA
aatcgcggtttataccaaatgaa

SEQ ID NO: 4512 - RNA, 22 nt, Homo sapiens
  source 1..22: mol_type = unassigned RNA
ttgagaatgatgaatcattagg

SEQ ID NO: 4513 - RNA, 22 nt, Homo sapiens
  source 1..22: mol_type = unassigned RNA
cctaatgattcatcattctcaa

SEQ ID NO: 4514 - RNA, 23 nt, Homo sapiens
  source 1..23: mol_type = unassigned RNA
ttacagttgttcaaccagttact

SEQ ID NO: 4515 - RNA, 23 nt, Homo sapiens
  source 1..23: mol_type = unassigned RNA
agtaactggttgaacaactgtaa

SEQ ID NO: 4516 - RNA, 21 nt, Homo sapiens
  source 1..21: mol_type = unassigned RNA
caaagaggaaggtcccattac

SEQ ID NO: 4517 - RNA, 21 nt, Homo sapiens
  source 1..21: mol_type = unassigned RNA
gtaatgggaccttcctctttg

SEQ ID NO: 4518 - RNA, 22 nt, Homo sapiens
  source 1..22: mol_type = unassigned RNA
tcagttccaggccaaccaggct

SEQ ID NO: 4519 - RNA, 22 nt, Homo sapiens
  source 1..22: mol_type = unassigned RNA
agcctggttggcctggaactga

SEQ ID NO: 4520 - RNA, 22 nt, Homo sapiens
  source 1..22: mol_type = unassigned RNA
ttatggtttgcctgggactgag

SEQ ID NO: 4521 - RNA, 22 nt, Homo sapiens
  source 1..22: mol_type = unassigned RNA
ctcagtcccaggcaaaccataa

SEQ ID NO: 4522 - RNA, 19 nt, Homo sapiens
  source 1..19: mol_type = unassigned RNA
tgggcgtatctgtatgcta

SEQ ID NO: 4523 - RNA, 19 nt, Homo sapiens
  source 1..19: mol_type = unassigned RNA
tagcatacagatacgccca

SEQ ID NO: 4524 - RNA, 20 nt, Homo sapiens
  source 1..20: mol_type = unassigned RNA
agaccatgggttctcattgt

SEQ ID NO: 4525 - RNA, 20 nt, Homo sapiens
  source 1..20: mol_type = unassigned RNA
acaatgagaacccatggtct

SEQ ID NO: 4526 - RNA, 22 nt, Homo sapiens
  source 1..22: mol_type = unassigned RNA
ttgtgtcaatatgcgatgatgt

SEQ ID NO: 4527 - RNA, 22 nt, Homo sapiens
  source 1..22: mol_type = unassigned RNA
acatcatcgcatattgacacaa

SEQ ID NO: 4528 - RNA, 19 nt, Homo sapiens
  source 1..19: mol_type = unassigned RNA
tgtctctgctggggtttct

SEQ ID NO: 4529 - RNA, 19 nt, Homo sapiens
  source 1..19: mol_type = unassigned RNA
agaaaccccagcagagaca

SEQ ID NO: 4530 - RNA, 25 nt, Homo sapiens
  source 1..25: mol_type = unassigned RNA
aggcaccagccaggcattgctcagc

SEQ ID NO: 4531 - RNA, 25 nt, Homo sapiens
  source 1..25: mol_type = unassigned RNA
gctgagcaatgcctggctggtgcct

SEQ ID NO: 4532 - RNA, 21 nt, Homo sapiens
  source 1..21: mol_type = unassigned RNA
gaagtgtgccgtggtgtgtct

SEQ ID NO: 4533 - RNA, 21 nt, Homo sapiens
  source 1..21: mol_type = unassigned RNA
agacacaccacggcacacttc

SEQ ID NO: 4534 - RNA, 21 nt, Homo sapiens
  source 1..21: mol_type = unassigned RNA
aagcctgcccggctcctcggg

SEQ ID NO: 4535 - RNA, 21 nt, Homo sapiens
  source 1..21: mol_type = unassigned RNA
cccgaggagccgggcaggctt

SEQ ID NO: 4536 - RNA, 20 nt, Homo sapiens
  source 1..20: mol_type = unassigned RNA
gttgtgtcagtttatcaaac

SEQ ID NO: 4537 - RNA, 20 nt, Homo sapiens
  source 1..20: mol_type = unassigned RNA
gtttgataaactgacacaac

SEQ ID NO: 4538 - RNA, 22 nt, Homo sapiens
  source 1..22: mol_type = unassigned RNA
tggtctaggattgttggaggag

SEQ ID NO: 4539 - RNA, 22 nt, Homo sapiens
  source 1..22: mol_type = unassigned RNA
ctcctccaacaatcctagacca

SEQ ID NO: 4540 - RNA, 22 nt, Homo sapiens
  source 1..22: mol_type = unassigned RNA
cacacactgcaattacttttgc

SEQ ID NO: 4541 - RNA, 22 nt, Homo sapiens
  source 1..22: mol_type = unassigned RNA
gcaaaagtaattgcagtgtgtg

SEQ ID NO: 4542 - RNA, 25 nt, Homo sapiens
  source 1..25: mol_type = unassigned RNA
aggggtggtgttgggacagctccgt

SEQ ID NO: 4543 - RNA, 25 nt, Homo sapiens
  source 1..25: mol_type = unassigned RNA
acggagctgtcccaacaccacccct

SEQ ID NO: 4544 - RNA, 21 nt, Homo sapiens
  source 1..21: mol_type = unassigned RNA
tgagctaaatgtgtgctggga

SEQ ID NO: 4545 - RNA, 21 nt, Homo sapiens
  source 1..21: mol_type = unassigned RNA
tcccagcacacatttagctca

SEQ ID NO: 4546 - RNA, 23 nt, Homo sapiens
  source 1..23: mol_type = unassigned RNA
gcgaggacccctcggggtctgac

SEQ ID NO: 4547 - RNA, 23 nt, Homo sapiens
  source 1..23: mol_type = unassigned RNA
gtcagaccccgaggggtcctcgc

SEQ ID NO: 4548 - RNA, 25 nt, Homo sapiens
  source 1..25: mol_type = unassigned RNA
gctgggcagggcttctgagctcctt

SEQ ID NO: 4549 - RNA, 25 nt, Homo sapiens
  source 1..25: mol_type = unassigned RNA
aaggagctcagaagccctgcccagc

SEQ ID NO: 4550 - RNA, 20 nt, Homo sapiens
  source 1..20: mol_type = unassigned RNA
gggaaaaggaagggggagga

SEQ ID NO: 4551 - RNA, 20 nt, Homo sapiens
  source 1..20: mol_type = unassigned RNA
tcctcccccttccttttccc

SEQ ID NO: 4552 - RNA, 20 nt, Homo sapiens
  source 1..20: mol_type = unassigned RNA
gcggaaggcggagcggcgga

SEQ ID NO: 4553 - RNA, 20 nt, Homo sapiens
  source 1..20: mol_type = unassigned RNA
tccgccgctccgccttccgc

SEQ ID NO: 4554 - RNA, 18 nt, Homo sapiens
  source 1..18: mol_type = unassigned RNA
gtgaaggcccggcggaga

SEQ ID NO: 4555 - RNA, 18 nt, Homo sapiens
  source 1..18: mol_type = unassigned RNA
tctccgccgggccttcac

SEQ ID NO: 4556 - RNA, 19 nt, Homo sapiens
  source 1..19: mol_type = unassigned RNA
tgagggagtgggtgggagg

SEQ ID NO: 4557 - RNA, 19 nt, Homo sapiens
  source 1..19: mol_type = unassigned RNA
cctcccacccactccctca

SEQ ID NO: 4558 - RNA, 19 nt, Homo sapiens
  source 1..19: mol_type = unassigned RNA
actggaattggagtcaaaa

SEQ ID NO: 4559 - RNA, 19 nt, Homo sapiens
  source 1..19: mol_type = unassigned RNA
ttttgactccaattccagt

SEQ ID NO: 4560 - RNA, 19 nt, Homo sapiens
  source 1..19: mol_type = unassigned RNA
tgagggagttgggtgtata

SEQ ID NO: 4561 - RNA, 19 nt, Homo sapiens
  source 1..19: mol_type = unassigned RNA
tatacacccaactccctca

SEQ ID NO: 4562 - RNA, 19 nt, Homo sapiens
  source 1..19: mol_type = unassigned RNA
tgagggagtggattgtatg

SEQ ID NO: 4563 - RNA, 19 nt, Homo sapiens
  source 1..19: mol_type = unassigned RNA
catacaatccactccctca

SEQ ID NO: 4564 - RNA, 19 nt, Homo sapiens
  source 1..19: mol_type = unassigned RNA
ggctggtcagatgggagtg

SEQ ID NO: 4565 - RNA, 19 nt, Homo sapiens
  source 1..19: mol_type = unassigned RNA
cactcccatctgaccagcc

SEQ ID NO: 4566 - RNA, 19 nt, Homo sapiens
  source 1..19: mol_type = unassigned RNA
agcagggctggggattgca

SEQ ID NO: 4567 - RNA, 19 nt, Homo sapiens
  source 1..19: mol_type = unassigned RNA
tgcaatccccagccctgct

SEQ ID NO: 4568 - RNA, 19 nt, Homo sapiens
  source 1..19: mol_type = unassigned RNA
tgagggaggaggttgggta

SEQ ID NO: 4569 - RNA, 19 nt, Homo sapiens
  source 1..19: mol_type = unassigned RNA
tacccaacctcctccctca

SEQ ID NO: 4570 - RNA, 19 nt, Homo sapiens
  source 1..19: mol_type = unassigned RNA
tgaggtggtaggatgtaga

SEQ ID NO: 4571 - RNA, 19 nt, Homo sapiens
  source 1..19: mol_type = unassigned RNA
tctacatcctaccacctca

SEQ ID NO: 4572 - RNA, 22 nt, Homo sapiens
  source 1..22: mol_type = unassigned RNA
tccgagcctgggtctccctctt

SEQ ID NO: 4573 - RNA, 22 nt, Homo sapiens
  source 1..22: mol_type = unassigned RNA
aagagggagacccaggctcgga

SEQ ID NO: 4574 - RNA, 22 nt, Homo sapiens
  source 1..22: mol_type = unassigned RNA
gggggtccccggtgctcggatc

SEQ ID NO: 4575 - RNA, 22 nt, Homo sapiens
  source 1..22: mol_type = unassigned RNA
gatccgagcaccggggaccccc

SEQ ID NO: 4576 - RNA, 22 nt, Homo sapiens
  source 1..22: mol_type = unassigned RNA
agtcattggagggtttgagcag

SEQ ID NO: 4577 - RNA, 22 nt, Homo sapiens
  source 1..22: mol_type = unassigned RNA
ctgctcaaaccctccaatgact

SEQ ID NO: 4578 - RNA, 19 nt, Homo sapiens
  source 1..19: mol_type = unassigned RNA
cagcaggaggtgaggggag

SEQ ID NO: 4579 - RNA, 19 nt, Homo sapiens
  source 1..19: mol_type = unassigned RNA
ctcccctcacctcctgctg

SEQ ID NO: 4580 - RNA, 22 nt, Homo sapiens
  source 1..22: mol_type = unassigned RNA
actcaaaacccttcagtgactt

SEQ ID NO: 4581 - RNA, 22 nt, Homo sapiens
  source 1..22: mol_type = unassigned RNA
aagtcactgaagggttttgagt

SEQ ID NO: 4582 - RNA, 22 nt, Homo sapiens
  source 1..22: mol_type = unassigned RNA
agacttcccatttgaaggtggc

SEQ ID NO: 4583 - RNA, 22 nt, Homo sapiens
  source 1..22: mol_type = unassigned RNA
gccaccttcaaatgggaagtct

SEQ ID NO: 4584 - RNA, 23 nt, Homo sapiens
  source 1..23: mol_type = unassigned RNA
aaactctacttgtccttctgagt

SEQ ID NO: 4585 - RNA, 23 nt, Homo sapiens
  source 1..23: mol_type = unassigned RNA
actcagaaggacaagtagagttt

SEQ ID NO: 4586 - RNA, 21 nt, Homo sapiens
  source 1..21: mol_type = unassigned RNA
ggctagcaacagcgcttacct

SEQ ID NO: 4587 - RNA, 21 nt, Homo sapiens
  source 1..21: mol_type = unassigned RNA
aggtaagcgctgttgctagcc

SEQ ID NO: 4588 - RNA, 21 nt, Homo sapiens
  source 1..21: mol_type = unassigned RNA
acagtctgctgaggttggagc

SEQ ID NO: 4589 - RNA, 21 nt, Homo sapiens
  source 1..21: mol_type = unassigned RNA
gctccaacctcagcagactgt

SEQ ID NO: 4590 - RNA, 23 nt, Homo sapiens
  source 1..23: mol_type = unassigned RNA
atcccttgcaggggctgttgggt

SEQ ID NO: 4591 - RNA, 23 nt, Homo sapiens
  source 1..23: mol_type = unassigned RNA
acccaacagcccctgcaagggat

SEQ ID NO: 4592 - RNA, 22 nt, Homo sapiens
  source 1..22: mol_type = unassigned RNA
gtgagtctctaagaaaagagga

SEQ ID NO: 4593 - RNA, 22 nt, Homo sapiens
  source 1..22: mol_type = unassigned RNA
tcctcttttcttagagactcac

SEQ ID NO: 4594 - RNA, 21 nt, Homo sapiens
  source 1..21: mol_type = unassigned RNA
tctagtaagagtggcagtcga

SEQ ID NO: 4595 - RNA, 21 nt, Homo sapiens
  source 1..21: mol_type = unassigned RNA
tcgactgccactcttactaga

SEQ ID NO: 4596 - RNA, 22 nt, Homo sapiens
  source 1..22: mol_type = unassigned RNA
atgctgacatatttactagagg

SEQ ID NO: 4597 - RNA, 22 nt, Homo sapiens
  source 1..22: mol_type = unassigned RNA
cctctagtaaatatgtcagcat

SEQ ID NO: 4598 - RNA, 22 nt, Homo sapiens
  source 1..22: mol_type = unassigned RNA
gttctcccaacgtaagcccagc

SEQ ID NO: 4599 - RNA, 22 nt, Homo sapiens
  source 1..22: mol_type = unassigned RNA
gctgggcttacgttgggagaac

SEQ ID NO: 4600 - RNA, 21 nt, Homo sapiens
  source 1..21: mol_type = unassigned RNA
tgggtttacgttgggagaact

SEQ ID NO: 4601 - RNA, 21 nt, Homo sapiens
  source 1..21: mol_type = unassigned RNA
agttctcccaacgtaaaccca

SEQ ID NO: 4602 - RNA, 19 nt, Homo sapiens
  source 1..19: mol_type = unassigned RNA
gtgtctgcttcctgtggga

SEQ ID NO: 4603 - RNA, 19 nt, Homo sapiens
  source 1..19: mol_type = unassigned RNA
tcccacaggaagcagacac

SEQ ID NO: 4604 - RNA, 23 nt, Homo sapiens
  source 1..23: mol_type = unassigned RNA
ctaatagtatctaccacaataaa

SEQ ID NO: 4605 - RNA, 23 nt, Homo sapiens
  source 1..23: mol_type = unassigned RNA
tttattgtggtagatactattag

SEQ ID NO: 4606 - RNA, 23 nt, Homo sapiens
  source 1..23: mol_type = unassigned RNA
tgtgcttgctcgtcccgcccgca

SEQ ID NO: 4607 - RNA, 23 nt, Homo sapiens
  source 1..23: mol_type = unassigned RNA
tgcgggcgggacgagcaagcaca

SEQ ID NO: 4608 - RNA, 25 nt, Homo sapiens
  source 1..25: mol_type = unassigned RNA
agggatcgcgggcgggtggcggcct

SEQ ID NO: 4609 - RNA, 25 nt, Homo sapiens
  source 1..25: mol_type = unassigned RNA
aggccgccacccgcccgcgatccct

SEQ ID NO: 4610 - RNA, 21 nt, Homo sapiens
  source 1..21: mol_type = unassigned RNA
atgatccaggaacctgcctct

SEQ ID NO: 4611 - RNA, 21 nt, Homo sapiens
  source 1..21: mol_type = unassigned RNA
agaggcaggttcctggatcat

SEQ ID NO: 4612 - RNA, 19 nt, Homo sapiens
  source 1..19: mol_type = unassigned RNA
agtgtggctttcttagagc

SEQ ID NO: 4613 - RNA, 19 nt, Homo sapiens
  source 1..19: mol_type = unassigned RNA
gctctaagaaagccacact

SEQ ID NO: 4614 - RNA, 19 nt, Homo sapiens
  source 1..19: mol_type = unassigned RNA
tctaggctggtactgctga

SEQ ID NO: 4615 - RNA, 19 nt, Homo sapiens
  source 1..19: mol_type = unassigned RNA
tcagcagtaccagcctaga

SEQ ID NO: 4616 - RNA, 19 nt, Homo sapiens
  source 1..19: mol_type = unassigned RNA
aagcagctgcctctgaggc

SEQ ID NO: 4617 - RNA, 19 nt, Homo sapiens
  source 1..19: mol_type = unassigned RNA
gcctcagaggcagctgctt

SEQ ID NO: 4618 - RNA, 21 nt, Homo sapiens
  source 1..21: mol_type = unassigned RNA
gtggctgcactcacttccttc

SEQ ID NO: 4619 - RNA, 21 nt, Homo sapiens
  source 1..21: mol_type = unassigned RNA
gaaggaagtgagtgcagccac

SEQ ID NO: 4620 - RNA, 21 nt, Homo sapiens
  source 1..21: mol_type = unassigned RNA
aggaggcagcgctctcaggac

SEQ ID NO: 4621 - RNA, 21 nt, Homo sapiens
  source 1..21: mol_type = unassigned RNA
gtcctgagagcgctgcctcct

SEQ ID NO: 4622 - RNA, 21 nt, Homo sapiens
  source 1..21: mol_type = unassigned RNA
aatggcgccactagggttgtg

SEQ ID NO: 4623 - RNA, 21 nt, Homo sapiens
  source 1..21: mol_type = unassigned RNA
cacaaccctagtggcgccatt

SEQ ID NO: 4624 - RNA, 25 nt, Homo sapiens
  source 1..25: mol_type = unassigned RNA
caaccctaggagagggtgccattca

SEQ ID NO: 4625 - RNA, 25 nt, Homo sapiens
  source 1..25: mol_type = unassigned RNA
tgaatggcaccctctcctagggttg

SEQ ID NO: 4626 - RNA, 22 nt, Homo sapiens
  source 1..22: mol_type = unassigned RNA
ataatacatggttaacctcttt

SEQ ID NO: 4627 - RNA, 22 nt, Homo sapiens
  source 1..22: mol_type = unassigned RNA
aaagaggttaaccatgtattat

SEQ ID NO: 4628 - RNA, 21 nt, Homo sapiens
  source 1..21: mol_type = unassigned RNA
aatattatacagtcaacctct

SEQ ID NO: 4629 - RNA, 21 nt, Homo sapiens
  source 1..21: mol_type = unassigned RNA
agaggttgactgtataatatt

SEQ ID NO: 4630 - RNA, 25 nt, Homo sapiens
  source 1..25: mol_type = unassigned RNA
ggcggagggaagtaggtccgttggt

SEQ ID NO: 4631 - RNA, 25 nt, Homo sapiens
  source 1..25: mol_type = unassigned RNA
accaacggacctacttccctccgcc

SEQ ID NO: 4632 - RNA, 24 nt, Homo sapiens
  source 1..24: mol_type = unassigned RNA
tgcctgggtctctggcctgcgcgt

SEQ ID NO: 4633 - RNA, 24 nt, Homo sapiens
  source 1..24: mol_type = unassigned RNA
acgcgcaggccagagacccaggca

SEQ ID NO: 4634 - RNA, 22 nt, Homo sapiens
  source 1..22: mol_type = unassigned RNA
aggcggggcgccgcgggaccgc

SEQ ID NO: 4635 - RNA, 22 nt, Homo sapiens
  source 1..22: mol_type = unassigned RNA
gcggtcccgcggcgccccgcct

SEQ ID NO: 4636 - RNA, 22 nt, Homo sapiens
  source 1..22: mol_type = unassigned RNA
ggtggcccggccgtgcctgagg

SEQ ID NO: 4637 - RNA, 22 nt, Homo sapiens
  source 1..22: mol_type = unassigned RNA
cctcaggcacggccgggccacc

SEQ ID NO: 4638 - RNA, 20 nt, Homo sapiens
  source 1..20: mol_type = unassigned RNA
accaggaggctgaggcccct

SEQ ID NO: 4639 - RNA, 20 nt, Homo sapiens
  source 1..20: mol_type = unassigned RNA
aggggcctcagcctcctggt

SEQ ID NO: 4640 - RNA, 20 nt, Homo sapiens
  source 1..20: mol_type = unassigned RNA
gtccctgagtgtatgtggtg

SEQ ID NO: 4641 - RNA, 20 nt, Homo sapiens
  source 1..20: mol_type = unassigned RNA
caccacatacactcagggac

SEQ ID NO: 4642 - RNA, 21 nt, Homo sapiens
  source 1..21: mol_type = unassigned RNA
tccggttctcagggctccacc

SEQ ID NO: 4643 - RNA, 21 nt, Homo sapiens
  source 1..21: mol_type = unassigned RNA
ggtggagccctgagaaccgga

SEQ ID NO: 4644 - RNA, 23 nt, Homo sapiens
  source 1..23: mol_type = unassigned RNA
aggaagccctggaggggctggag

SEQ ID NO: 4645 - RNA, 23 nt, Homo sapiens
  source 1..23: mol_type = unassigned RNA
ctccagcccctccagggcttcct

SEQ ID NO: 4646 - RNA, 20 nt, Homo sapiens
  source 1..20: mol_type = unassigned RNA
ctgtatgccctcaccgctca

SEQ ID NO: 4647 - RNA, 20 nt, Homo sapiens
  source 1..20: mol_type = unassigned RNA
tgagcggtgagggcatacag

SEQ ID NO: 4648 - RNA, 23 nt, Homo sapiens
  source 1..23: mol_type = unassigned RNA
tggtgcggagagggcccacagtg

SEQ ID NO: 4649 - RNA, 23 nt, Homo sapiens
  source 1..23: mol_type = unassigned RNA
cactgtgggccctctccgcacca

SEQ ID NO: 4650 - RNA, 22 nt, Homo sapiens
  source 1..22: mol_type = unassigned RNA
caactagactgtgagcttctag

SEQ ID NO: 4651 - RNA, 22 nt, Homo sapiens
  source 1..22: mol_type = unassigned RNA
ctagaagctcacagtctagttg

SEQ ID NO: 4652 - RNA, 23 nt, Homo sapiens
  source 1..23: mol_type = unassigned RNA
aaggagcttacaatctagctggg

SEQ ID NO: 4653 - RNA, 23 nt, Homo sapiens
  source 1..23: mol_type = unassigned RNA
cccagctagattgtaagctcctt

SEQ ID NO: 4654 - RNA, 22 nt, Homo sapiens
  source 1..22: mol_type = unassigned RNA
gggacccagggagagacgtaag

SEQ ID NO: 4655 - RNA, 22 nt, Homo sapiens
  source 1..22: mol_type = unassigned RNA
cttacgtctctccctgggtccc

SEQ ID NO: 4656 - RNA, 22 nt, Homo sapiens
  source 1..22: mol_type = unassigned RNA
gcagagtgcaaacaattttgac

SEQ ID NO: 4657 - RNA, 22 nt, Homo sapiens
  source 1..22: mol_type = unassigned RNA
gtcaaaattgtttgcactctgc

SEQ ID NO: 4658 - RNA, 20 nt, Homo sapiens
  source 1..20: mol_type = unassigned RNA
cggctctgggtctgtgggga

SEQ ID NO: 4659 - RNA, 20 nt, Homo sapiens
  source 1..20: mol_type = unassigned RNA
tccccacagacccagagccg

SEQ ID NO: 4660 - RNA, 22 nt, Homo sapiens
  source 1..22: mol_type = unassigned RNA
gcagcagggtgaaactgacaca

SEQ ID NO: 4661 - RNA, 22 nt, Homo sapiens
  source 1..22: mol_type = unassigned RNA
tgtgtcagtttcaccctgctgc

SEQ ID NO: 4662 - RNA, 21 nt, Homo sapiens
  source 1..21: mol_type = unassigned RNA
tggaggagaaggaaggtgatg

SEQ ID NO: 4663 - RNA, 21 nt, Homo sapiens
  source 1..21: mol_type = unassigned RNA
catcaccttccttctcctcca

SEQ ID NO: 4664 - RNA, 23 nt, Homo sapiens
  source 1..23: mol_type = unassigned RNA
tctgctcataccccatggtttct

SEQ ID NO: 4665 - RNA, 23 nt, Homo sapiens
  source 1..23: mol_type = unassigned RNA
agaaaccatggggtatgagcaga

SEQ ID NO: 4666 - RNA, 23 nt, Homo sapiens
  source 1..23: mol_type = unassigned RNA
tgcaccatggttgtctgagcatg

SEQ ID NO: 4667 - RNA, 23 nt, Homo sapiens
  source 1..23: mol_type = unassigned RNA
catgctcagacaaccatggtgca

SEQ ID NO: 4668 - RNA, 23 nt, Homo sapiens
  source 1..23: mol_type = unassigned RNA
ctgggatctccggggtcttggtt

SEQ ID NO: 4669 - RNA, 23 nt, Homo sapiens
  source 1..23: mol_type = unassigned RNA
aaccaagaccccggagatcccag

SEQ ID NO: 4670 - RNA, 22 nt, Homo sapiens
  source 1..22: mol_type = unassigned RNA
tgagacctctgggttctgagct

SEQ ID NO: 4671 - RNA, 22 nt, Homo sapiens
  source 1..22: mol_type = unassigned RNA
agctcagaacccagaggtctca

SEQ ID NO: 4672 - RNA, 23 nt, Homo sapiens
  source 1..23: mol_type = unassigned RNA
tccagtaccacgtgtcagggcca

SEQ ID NO: 4673 - RNA, 23 nt, Homo sapiens
  source 1..23: mol_type = unassigned RNA
tggccctgacacgtggtactgga

SEQ ID NO: 4674 - RNA, 22 nt, Homo sapiens
  source 1..22: mol_type = unassigned RNA
ggagactgatgagttcccggga

SEQ ID NO: 4675 - RNA, 22 nt, Homo sapiens
  source 1..22: mol_type = unassigned RNA
tcccgggaactcatcagtctcc

SEQ ID NO: 4676 - RNA, 21 nt, Homo sapiens
  source 1..21: mol_type = unassigned RNA
gcaggaacttgtgagtctcct

SEQ ID NO: 4677 - RNA, 21 nt, Homo sapiens
  source 1..21: mol_type = unassigned RNA
aggagactcacaagttcctgc

SEQ ID NO: 4678 - RNA, 22 nt, Homo sapiens
  source 1..22: mol_type = unassigned RNA
ctgccctggcccgagggaccga

SEQ ID NO: 4679 - RNA, 22 nt, Homo sapiens
  source 1..22: mol_type = unassigned RNA
tcggtccctcgggccagggcag

SEQ ID NO: 4680 - RNA, 21 nt, Homo sapiens
  source 1..21: mol_type = unassigned RNA
cctggaaacactgaggttgtg

SEQ ID NO: 4681 - RNA, 21 nt, Homo sapiens
  source 1..21: mol_type = unassigned RNA
cacaacctcagtgtttccagg

SEQ ID NO: 4682 - RNA, 22 nt, Homo sapiens
  source 1..22: mol_type = unassigned RNA
tatacctcagttttatcaggtg

SEQ ID NO: 4683 - RNA, 22 nt, Homo sapiens
  source 1..22: mol_type = unassigned RNA
cacctgataaaactgaggtata

SEQ ID NO: 4684 - RNA, 22 nt, Homo sapiens
  source 1..22: mol_type = unassigned RNA
tggtggtttacaaagtaattca

SEQ ID NO: 4685 - RNA, 22 nt, Homo sapiens
  source 1..22: mol_type = unassigned RNA
tgaattactttgtaaaccacca

SEQ ID NO: 4686 - RNA, 22 nt, Homo sapiens
  source 1..22: mol_type = unassigned RNA
tggatttctttgtgaatcacca

SEQ ID NO: 4687 - RNA, 22 nt, Homo sapiens
  source 1..22: mol_type = unassigned RNA
tggtgattcacaaagaaatcca

SEQ ID NO: 4688 - RNA, 21 nt, Homo sapiens
  source 1..21: mol_type = unassigned RNA
tcctcttctccctcctcccag

SEQ ID NO: 4689 - RNA, 21 nt, Homo sapiens
  source 1..21: mol_type = unassigned RNA
ctgggaggagggagaagagga

SEQ ID NO: 4690 - RNA, 20 nt, Homo sapiens
  source 1..20: mol_type = unassigned RNA
gtagaggagatggcgcaggg

SEQ ID NO: 4691 - RNA, 20 nt, Homo sapiens
  source 1..20: mol_type = unassigned RNA
ccctgcgccatctcctctac

SEQ ID NO: 4692 - RNA, 22 nt, Homo sapiens
  source 1..22: mol_type = unassigned RNA
gtgaacgggcgccatcccgagg

SEQ ID NO: 4693 - RNA, 22 nt, Homo sapiens
  source 1..22: mol_type = unassigned RNA
cctcgggatggcgcccgttcac

SEQ ID NO: 4694 - RNA, 22 nt, Homo sapiens
  source 1..22: mol_type = unassigned RNA
gactgacacctctttgggtgaa

SEQ ID NO: 4695 - RNA, 22 nt, Homo sapiens
  source 1..22: mol_type = unassigned RNA
ttcacccaaagaggtgtcagtc

SEQ ID NO: 4696 - RNA, 21 nt, Homo sapiens
  source 1..21: mol_type = unassigned RNA
tactcaaaaagctgtcagtca

SEQ ID NO: 4697 - RNA, 21 nt, Homo sapiens
  source 1..21: mol_type = unassigned RNA
tgactgacagctttttgagta

SEQ ID NO: 4698 - RNA, 21 nt, Homo sapiens
  source 1..21: mol_type = unassigned RNA
ttaatatcggacaaccattgt

SEQ ID NO: 4699 - RNA, 21 nt, Homo sapiens
  source 1..21: mol_type = unassigned RNA
acaatggttgtccgatattaa

SEQ ID NO: 4700 - RNA, 22 nt, Homo sapiens
  source 1..22: mol_type = unassigned RNA
atccgcgctctgactctctgcc

SEQ ID NO: 4701 - RNA, 22 nt, Homo sapiens
  source 1..22: mol_type = unassigned RNA
ggcagagagtcagagcgcggat

SEQ ID NO: 4702 - RNA, 20 nt, Homo sapiens
  source 1..20: mol_type = unassigned RNA
gtgagtcagggtggggctgg

SEQ ID NO: 4703 - RNA, 20 nt, Homo sapiens
  source 1..20: mol_type = unassigned RNA
ccagccccaccctgactcac

SEQ ID NO: 4704 - RNA, 22 nt, Homo sapiens
  source 1..22: mol_type = unassigned RNA
tgcccttaaaggtgaacccagt

SEQ ID NO: 4705 - RNA, 22 nt, Homo sapiens
  source 1..22: mol_type = unassigned RNA
actgggttcacctttaagggca

SEQ ID NO: 4706 - RNA, 22 nt, Homo sapiens
  source 1..22: mol_type = unassigned RNA
tcttctctgttttggccatgtg

SEQ ID NO: 4707 - RNA, 22 nt, Homo sapiens
  source 1..22: mol_type = unassigned RNA
cacatggccaaaacagagaaga

SEQ ID NO: 4708 - RNA, 22 nt, Homo sapiens
  source 1..22: mol_type = unassigned RNA
aaattattgtacatcggatgag

SEQ ID NO: 4709 - RNA, 22 nt, Homo sapiens
  source 1..22: mol_type = unassigned RNA
ctcatccgatgtacaataattt

SEQ ID NO: 4710 - RNA, 22 nt, Homo sapiens
  source 1..22: mol_type = unassigned RNA
ttcaacgggtatttattgagca

SEQ ID NO: 4711 - RNA, 22 nt, Homo sapiens
  source 1..22: mol_type = unassigned RNA
tgctcaataaatacccgttgaa

SEQ ID NO: 4712 - RNA, 22 nt, Homo sapiens
  source 1..22: mol_type = unassigned RNA
ctatacaacttactactttccc

SEQ ID NO: 4713 - RNA, 22 nt, Homo sapiens
  source 1..22: mol_type = unassigned RNA
gggaaagtagtaagttgtatag

SEQ ID NO: 4714 - RNA, 22 nt, Homo sapiens
  source 1..22: mol_type = unassigned RNA
tgaggtagtaagttgtattgtt

SEQ ID NO: 4715 - RNA, 22 nt, Homo sapiens
  source 1..22: mol_type = unassigned RNA
aacaatacaacttactacctca

SEQ ID NO: 4716-4733 - skipped (18 entries)

SEQ ID NO: 4734 - DNA, 3131 bp, Adeno-associated virus
  source 1..3131: mol_type = other DNA
gcggccgcgaattcgcccttggctgcgtcaactggaccaatgagaactttcccttcaatgattgcgtcgacaagatggtgatctggtgggaggagggcaagatgacggccaaggtcgtggagtccgccaaggccattctcggcggcagcaaggtgcgcgtggaccaaaagtgcaagtcgtccgcccagatcgaccccacccccgtgatcgtcacctccaacaccaacatgtgcgccgtgattgacgggaacagcaccaccttcgagcaccagcagcctctccaggaccggatgtttaagttcgaactcacccgccgtctggagcacgactttggcaaggtgacaaagcaggaagtcaaagagttcttccgctgggccagtgatcacgtgaccgaggtggcgcatgagttttacgtcagaaagggcggagccagcaaaagacccgcccccgatgacgcggataaaagcgagcccaagcgggcctgcccctcagtcgcggatccatcgacgtcagacgcggaaggagctccggtggactttgccgacaggtaccaaaacaaatgttctcgtcacgcgggcatgcttcagatgctgtttccctgcaaaacgtgcgagagaatgaatcggaatttcaacatttgcttcacacacggggtcagagactgctcagagtgtttccccggcgtgtcagaatctcaaccggtcgtcagaaagaggacgtatcggaaactccgtgcgattcatcatctgctggggcgggctcccgagattgcttgctcggcctgcgatctggtcaacgtggacctggatgactgtgtttctgagcaataaatgacttaaaccaggtatggctgccgatggttatcttccagattggctcgaggacaacctctctgagggcattcgcgagtggtgggcgctgaaacctggagccccgaagcccaaagccaaccagcaaaagcaggacgacggccggggtctggtgcttcctggctacaagtacctcggacccttcaacggactcgacaagggggagcccgtcaacgcggcggacgcagcggccctcgagcacgacaaggcttacgaccagcagctgcaggcgggtgacaatccgtacctgcggtataaccacgccgacgccgagtttcaggagcgtctgcaagaagatacgtcttttgggggcaacctcgggcgagcagtcttccaggccaagaagcgggttctcgaacctctcggtctggttgaggaaggcgctaagacggctcctggaaagaagagaccggtagagccatcaccccagcgttctccagactcctctacgggcatcggcaagaaaggccaacagcccgccagaaaaagactcaattttggtcagactggcgactcagagtcagttccagaccctcaacctctcggagaacctccagcagcgccctctggtgtgggacctaatacaatggctgcaggcggtggcgcaccaatggcagacaataacgaaggcgccgacggagtgggtagttcctcgggaaattggcattgcgattccacatggctgggcgacagagtcatcaccaccagcacccgaacctgggccctgcccacctacaacaaccacctctacaagcaaatctccaacgggacatcgggaggagccaccaacgacaacacctacttcggctacagcaccccctgggggtattttgactttaacagattccactgccacctttcaccacgtgactggcagcgactcatcaacaacaactggggattccgacccaagagactcagcttcaagctcttcaacatccaggtcaaggaggtcacgcagaatgaaggcaccaagaccatcgccaataacctcaccagcaccatccaggtgtttacggactcggagtaccagctgccgtacgttctcggctctgtccaccagggctgcctgcctccgttcccggcggacgtgttcatgattccccagtacggctacctaacactcaacaacggtagtcaggccgtgggacgctcctccttctactgcctggaatactttccttcgcagatgctgagaaccggcaacaacttccagtttacttacaccttcgaggacgtgcctttccacagcagctacgcccacagctagagcttggaccggctgatgaatcctctgattgaccagtacctgtactacttgtctcggactcaaacaacaggaggcacggcaaatacgcagactctgggcttcagccaaggtgggcctaatacaatggccaatcaggcaaagaactggctgccaggaccctgttaccgccaacaacgcgtctcaacgacaaccgggcaaaacaacaatagcaactttgcctggactgctgggaccaaataccatctgaatggaagaaattcattggctaatcctggcatcgctatggcaacacacaaagacgacgaggagcgtttttttcccagtaacgggatcctgatttttggcaaacaaaatgctgccagagacaatgcggattacagcgatgtcatgctcaccagcgaggaagaaatcaaaaccactaaccctgtggctacagaggaatacggtatcgtggcagataacttgcagcagcaaaacacggctcctcaaattggaactgtcaacagccagggggccttacccggtatggtctggcagaaccgggacgtgtacctgcagggtcccatctgggccaagattcctcacacggacggcaacttccacccgtctccgctgatgggcggctttggcctgaaacatcctccgcctcagatcctgatcaagaacacgcctgtacctgcggatcctccgaccaccttcaaccagtcaaagctgaactctttcatcacgcaatacagcaccggacaggtcagcgtggaaattgaatgggagctgcagaaggaaaacagcaagcgctggaaccccgagatccagtacacctccaactactacaaatctataagtgtggactttgctgttaatacagaaggcgtgtactctgaaccccgccccattggcacccgttacctcacccgtaatctgtaattgcctgttaatcaataaaccggttgattcgtttcagttgaactttggtctctgcgaagggcgaattc

SEQ ID NO: 4735 - protein, 728 aa, Adeno-associated virus
MAADGYLPDWLEDNLSEGIREWWDLKPGAPKPKANQQKQDDGRGLVLPGYKYLGPFNGLDKGEPVNEADAAALEHDKAYDKQLEQGDNPYLKYNHADAEFQERLQEDTSFGGNLGRAVFQAKKRVLEPLGLVEEGAKTAPGKKRPIESPDSSTGIGKKGQQPAKKKLNFGQTGDSESVPDPQPLGEPPAAPSGLGSGTMAAGGGAPMADNNEGADGVGNASGNWHCDSTWLGDRVITTSTRTWALPTYNNHLYKQISSQSGATNDNHFFGYSTPWGYFDFNRFHCHFSPRDWQRLINNNWGFRPRKLRFKLFNIQVKEVTTNDGVTTIANNLTSTIQVFSDSEYQLPYVLGSAHQGCLPPFPADVFMIPQYGYLTLNNGSQSMGRSSFYCLEYFPSQMLRTGNNFEFSYTFEEVPFHSSYAHSQSLDRLMNPLIDQYLYYLARTQSTTGSTRELQFHQAGPNTMAEQSKNWLPGPCYRQQRLSKNIDSNNNSNFAWTGATKYHLNGRNSLTNPGVAMATNKDDEGQFFPINGVLVFGKTGAANKTTLENVLMTSEEEIKTTNPVATEEYGVVSSNLQSSTAGPQTQTVNSQGALPGMVWQNRDVYLQGPIWAKIPHTDGNFHPSPLMGGFGLKHPPPQILIKNTPVPANPPGVFTPALFASFITQYSTGQVSVEIEWELQKENSKRWNPEIQYTSNYAKSNNVEFAVNNEGVYTEPRPIGTRYLTRNL

SEQ ID NO: 4736 - protein, 644 aa, Adeno-associated virus
  MOD_RES 434: note = Any amino acid
KAYDQQLKAGDNPYLRYNHADAEFQERLQEDTSFGGNLGRAVFQAKKRVLEPLGLVETPAKTAPGKKRPVDSPDSTSGIGKKGQQPAKKRLNFGQTGDSESVPDPQPIGEPPAGPSGLGSGTMAAGGGAPMADNNEGADGVGNASGNWHCDSTWLGDRVITTSTRTWALPTYNNHLYKQISSQSAGSTNDNVYFGYSTPWGYFDFNRFHCHFSPRDWQRLINNNWGFRPKKLNFKLFNIQVKEVTTNDGVTTIANNLTSTVQVFSDSEYQLPYVLGSAHQGCLPPFPADVFMIPQYGYLTLNNGSQSVGRSSFYCLEYFPSQMLRTGNNFTFSYTFEDVPFHSSYAHSQSLDRLMNPLIDQYLYYLARTQSNAGGTAGNRELQFYQGGPTTMAEQAKNWLPGPCFRQQRVSKTLDQNNNSNFAWTGATKYHLNXRNSLVNPGVAMATHKDDEERFFPSSGVLIFGKTGAANKTTLENVLMTNEEEIRPTNPVATEEYGIVSSNLQAASTAAQTQVVNNQGALPGMVWQNRDVYLQGPIWAKIPHTDGNFHPSPLMGGFGLKHPPPQILIKNTPVPANPPEVFTPAKFASFITQYSTGQVSVEIEWELQKENSKRWNPEIQYTSNFDKQTGVDFAVDSQGVYSEP

SEQ ID NO: 4737 - DNA, 1933 bp, Adeno-associated virus
  source 1..1933: mol_type = other DNA
caaggcctacgaccagcagctcaaagcgggtgacaatccgtacctgcggtataaccacgccgacgccgagtttcaggagtgtcttcaagaagatacgtcttttgggggcaacctcgggcgagcagtcttccaggccaaaaagcgggttctcgaacctcttggtctggttgagacgccagctaagacggcacctggaaagaagcgaccggtagactcgccagactccacctcgggcatcggcaagaaaggccagcagcccgcgaaaaagagactcaactttgggcagactggcgactcagagtcagtccccgaccctcaaccaatcggagaaccaccagcaggcccctctggtctgggatctggtacaatggttgcaggcggtggcgcaccaatggctgacaataacgagggcgccgacggagtgggtaatgcctcaggaaattggcattgcgattccacatggctgggcgacagagtcatcaccaccagcacccgaacctgggccctgcccacctacaacaaccacctctacaagcaaatctccagtcagtcagcagggagcaccaacgataacgtctatttcggctacagcaccccctgggggtattttgacttcaacagattccattgccacttctcaccacgtgactggcagcgacttatcaacaacaactggggattccggcccaagaagctcaacttcaagctcttcaacatccaggtcaaggaggtcacgacgaatgacggtgtcacaaccatcgctaataaccttaccagcacggttcaggtcttttcggactcggaatatcaactgccgtacgtcctcggctccgcgcaccagggctgcctgcctccgttcccggcagacgtgttcatgattccgcagtacggatacctgactctgaacaatggcagccaatcggtaggccgttcctccttctactgcctggagtactttccttctcagatgctgagaacgggcaacaacttcacctttagctacaccttcgaggacgtgcctttccacagcagctacgcgcacagccagagtctggaccggctgatgaatcccctcatcgaccagtacctgtactacttggccagaacacagagcaacgcaggaggtactgctggcaatcgggaactgcagttttatcagggcggacctaccaccatggccgaacaagcaaagaactggctgcccggaccttgcttccggcaacagagagtatccaagacgctggatcaaaataacaacagcaactttgcctggactggtgccacaaaataccatttaaatggaagaaattcattggttaatcccggtgtcgccatggcaacccacaaggacgacgaggaacgcttctccccttcgagcggagttctaatttttggcaaaactggagcagctaataaaactacattagaaaacgtgctcatgacaaatgaagaagaaattcgtcctaccaacccggtagctaccgaggaatacgggattgtaagcagcaacttgcaggcggctagcaccgcagcccagacacaagttgttaacaaccagggagccttacctggcatggtctggcagaaccgggacgtgtacctgcaaggtcccatttgggccaagattcctcacacggacggcaactttcacccgtctcctctaatgggtggctttggactgaaacacccgcctccccagatcctgatcaaaaacacgccggtacctgctaatcctccagaagtgtttactcctgccaagtttgcttccttcatcacgcagtacagcaccgggcaagtcagcgttgagatcgagtgggagctgcagaaagagaacagcaagcgctggaacccagagattcagtacacctccaactttgacaaacagactggagtggactttgctgttgacagccagggtgtttactctgagcct

SEQ ID NO: 4738 - protein, 644 aa, Adeno-associated virus
KAYDQQLKAGDNPYLRYNHADAEFQECLQEDTSFGGNLGRAVFQAKKRVLEPLGLVETPAKTAPGKKRPVDSPDSTSGIGKKGQQPAKKRLNFGQTGDSESVPDPQPIGEPPAGPSGLGSGTMVAGGGAPMADNNEGADGVGNASGNWHCDSTWLGDRVITTSTRTWALPTYNNHLYKQISSQSAGSTNDNVYFGYSTPWGYFDFNRFHCHFSPRDWQRLINNNWGFRPKKLNFKLFNIQVKEVTTNDGVTTIANNLTSTVQVFSDSEYQLPYVLGSAHQGCLPPFPADVFMIPQYGYLTLNNGSQSVGRSSFYCLEYFPSQMLRTGNNFTFSYTFEDVPFHSSYAHSQSLDRLMNPLIDQYLYYLARTQSNAGGTAGNRELQFYQGGPTTMAEQAKNWLPGPCFRQQRVSKTLDQNNNSNFAWTGATKYHLNGRNSLVNPGVAMATHKDDEERFSPSSGVLIFGKTGAANKTTLENVLMTNEEEIRPTNPVATEEYGIVSSNLQAASTAAQTQVVNNQGALPGMVWQNRDVYLQGPIWAKIPHTDGNFHPSPLMGGFGLKHPPPQILIKNTPVPANPPEVFTPAKFASFITQYSTGQVSVEIEWELQKENSKRWNPEIQYTSNFDKQTGVDFAVDSQGVYSEP

SEQ ID NO: 4739 - DNA, 1933 bp, Adeno-associated virus
  source 1..1933: mol_type = other DNA
caaggcctacgaccagcagctcaaagcgggtgacaatccgtacctgcggtataaccacgccgacgccgagtttcaggagcgtcttcaagaagatacgtcttttgggggcaacctcgggcgagcagtcttccaggccaaaaagcgggttctcgaacctcttggtctggttgagacgccagctaagacggcacctggaaagaagcgaccggtagactcgccagactccacctcgggcatcggcaagaaaggccagcagcccgcgaaaaagagactcaactttgggcagactggcgactcagagccagtccccgaccctcaaccaatcggagaaccaccagcaggcccctctggtctgggatctggtacaatggctgcaggcggtggcgcaccaatggctgacaataacgagggcgccgacggagtgggtaatgcctcaggaaattggcattgcgattccacacggctgggcgacagagtcatcaccaccagcacccgaacctgggccctgcccacctacaacaaccacctctacaagcaaatctccagtcagtcagcagggagcaccaacgataacgtctatttcggctacagcaccccctgggggtattttgacttcaacagattccattgccacttctcaccacgtgactggcagcgacttatcaacaacaactggggattccggcccaagaagctcaacttcaagctcttcaacatccaggtcaaggaggtcacgacgaatgacggcgtcacaaccatcgctaataaccttaccagcacggttcaggtcttttcggactcggaatatcaactgccgtacgtcctcggctccgcgcaccagggctgcctgcctccgttcccggcagacgtgttcatgattccgcagtacggatacctgactctgaacaatggcagccaatcggtaggccgttcctccttctactgcctggagtactttccttctcagatgctgagaacgggcaacaacttcacctttagctacaccttcgaggacgtgcctttccacagcagctacgcgcacagccagagtctgggccggctgatgaatcccctcatcgaccagtacctgtactacttggccagaacacagagcaacgcaggaggtactgctggcaatcgggaactgcagttttatcagggcggacctaccaccatggccgaacaagcaaagaactggctgcccggaccttgcttccggcaacagagagtatccaagacgctggatcaaaataacaacagcaactttgcctggactggtgccacaaaataccatttaaatggaagaaattcattggttaatcccggtgtcgccatggcaacccacaaggacgacgaggaacgcttcttcccttcgagcggagttctaatttttggcaaaactggagcagctaataaaactacattagaaaacgtgctcatgacaaatgaagaagaaattcgtcctaccaacccggtagctaccgaggaatacgggattgtaagcagcaacttgcaggcggctagcaccgcagcccagacacaagttgttaacaaccagggagccttacctggcatggtctggcagaaccgggacgtgtacctgcaaggtcccatttgggccaagattcctcacacggacggcaactttcacccgtctcctctaatgggtggctttggactgaaacacccgcctccccagatcctgatcaaaaacacaccggtacctgctaatcctccagaagtgtttactcctgccaagtttgcttccttcatcacgcagtacagcaccgggcaagtcagcgttgagatcgaatgggagctgcagaaagagaacagcaagcgctggaacccagagattcagtacacctccaactttgacaaacagactggagtggactttgctgttgacagccagggtgtttactctgagcct

SEQ ID NO: 4740 - protein, 644 aa, Adeno-associated virus
KAYDQQLKAGDNPYLRYNHADAEFQERLQEDTSFGGNLGRAVFQAKKRVLEPLGLVETPAKTAPGKKRPVDSPDSTSGIGKKGQQPAKKRLNFGQTGDSEPVPDPQPIGEPPAGPSGLGSGTMAAGGGAPMADNNEGADGVGNASGNWHCDSTRLGDRVITTSTRTWALPTYNNHLYKQISSQSAGSTNDNVYFGYSTPWGYFDFNRFHCHFSPRDWQRLINNNWGFRPKKLNFKLFNIQVKEVTTNDGVTTIANNLTSTVQVFSDSEYQLPYVLGSAHQGCLPPFPADVFMIPQYGYLTLNNGSQSVGRSSFYCLEYFPSQMLRTGNNFTFSYTFEDVPFHSSYAHSQSLGRLMNPLIDQYLYYLARTQSNAGGTAGNRELQFYQGGPTTMAEQAKNWLPGPCFRQQRVSKTLDQNNNSNFAWTGATKYHLNGRNSLVNPGVAMATHKDDEERFFPSSGVLIFGKTGAANKTTLENVLMTNEEEIRPTNPVATEEYGIVSSNLQAASTAAQTQVVNNQGALPGMVWQNRDVYLQGPIWAKIPHTDGNFHPSPLMGGFGLKHPPPQILIKNTPVPANPPEVFTPAKFASFITQYSTGQVSVEIEWELQKENSKRWNPEIQYTSNFDKQTGVDFAVDSQGVYSEP

SEQ ID NO: 4741 - DNA, 1933 bp, Adeno-associated virus; identical to SEQ ID NO: 4739
  source 1..1933: mol_type = other DNA

SEQ ID NO: 4742 - protein, 644 aa, Adeno-associated virus; identical to SEQ ID NO: 4740

SEQ ID NO: 4743 - DNA, 1933 bp, Adeno-associated virus
  source 1..1933: mol_type = other DNA
caaggcctacgaccagcagctcaaagcgggtgacaatccgtacctgcggtataaccacgccgacgccgagtttcaggagcgtcttcaagaagatacgtcttttgggggcaacctcgggcgagcagtcttccaggccaaaaagcgggttctcgaacctcttggtctggttgagacgccagctaagacggcacctggaaagaagcgaccggtagactcgccagactccacctcgggcatcggcaagaaaggccagcagcccgcgaaaaagagactcaactttgggcagactggcgactcagagtcagtccccgaccctcaaccaatcggagaaccaccagcaggcccctctggtctgggatctggtacaatggctgcaggcggtggcgcaccaatggctgacaatagcgagggcgccgacggagtgggtaatgcctcaggaaattggcattgcgattccacatggctgggcgacagagtcatcaccaccagcacccgaacctgggccctgcccacctacaacaaccacctctacaagcaaatctccagtcagtcagcagggagcaccaacgataacgtctatttcggctacagcaccccctgggggtattttgacttcaacagattccattgccacttctcaccacgtgactggcagcgacttatcaacaacaactggggattccggcccaagaagctcaacttcaagctcttcaacatccaggtcaaggaggtcacgacgaatgacggtgtcacaaccatcgctaataaccttaccagcacggttcaggtcttttcggactcggaatatcaactgccgtacgtcctcggctccgcgcaccagggctgcctgcctccgttcccggcagacgtgttcatgattccgcagtacggatacctgactctgaacaatggcagccaatcggtaggccgttcctccttctactgcctggagtactttccttctcagatgctgagaacgggcaacaacttcacctttagctacaccttcgaggacgtgcctttccacagcagctacgcgcacagccagagtctggaccggctgatgaatcccctcatcgaccagtacctgtactacttggccagaacacagagcaacgcaggaggtactgctggcaatcgggaactgcagttttatcagggcggacctaccaccatggccgaacaagcaaagaactggctgcccggaccttgcttccggcaacagagagtatccaagacgctggatcaaaataacaacagcaactttgcctggactggtgccacaaaataccatttaaatggaagaaattcattggttaatcccggtgtcgccatggcaacccacaaggacgacgaggaacgcttcttcccttcgagcggagttctaatttttggcaaaactggagcagctaataaaactacattagaaaacgtgctcatgacaaatgaagaagaaattcgtcctaccaacccggtagctaccgaggaatacgggattgtaagcagcaacttgcaggcggctagcaccgcagcccagacacaagttgttaacaaccagggagccttacctggcatggtctggcagaaccgggacgtgtacctgcaaggtcccatttgggccaagattcctcacacggacggcaactttcacccgtctcctctaatgggtggctttggactgaaacacccgcctccccagatcctgatcaaaaacacaccggtacctgctaatcctccagaagtgtttactcctgccaagcttgcttccttcatcacgcagtacagcaccgggcaagtcagcgttgagatcgagtgggagctgcagaaagagaacagcaagcgctggaacccagagattcagtacacctccaactttgacaaacagactggagtggactttgctgttgacagccagggtgtttactctgagcct

SEQ ID NO: 4744 - protein, 644 aa, Adeno-associated virus
KAYDQQLKAGDNPYLRYNHADAEFQERLQEDTSFGGNLGRAVFQAKKRVLEPLGLVETPAKTAPGKKRPVDSPDSTSGIGKKGQQPAKKRLNFGQTGDSESVPDPQPIGEPPAGPSGLGSGTMAAGGGAPMADNSEGADGVGNASGNWHCDSTWLGDRVITTSTRTWALPTYNNHLYKQISSQSAGSTNDNVYFGYSTPWGYFDFNRFHCHFSPRDWQRLINNNWGFRPKKLNFKLFNIQVKEVTTNDGVTTIANNLTSTVQVFSDSEYQLPYVLGSAHQGCLPPFPADVFMIPQYGYLTLNNGSQSVGRSSFYCLEYFPSQMLRTGNNFTFSYTFEDVPFHSSYAHSQSLDRLMNPLIDQYLYYLARTQSNAGGTAGNRELQFYQGGPTTMAEQAKNWLPGPCFRQQRVSKTLDQNNNSNFAWTGATKYHLNGRNSLVNPGVAMATHKDDEERFFPSSGVLIFGKTGAANKTTLENVLMTNEEEIRPTNPVATEEYGIVSSNLQAASTAAQTQVVNNQGALPGMVWQNRDVYLQGPIWAKIPHTDGNFHPSPLMGGFGLKHPPPQILIKNTPVPANPPEVFTPAKLASFITQYSTGQVSVEIEWELQKENSKRWNPEIQYTSNFDKQTGVDFAVDSQGVYSEP

SEQ ID NO: 4745 - DNA, 1933 bp, Adeno-associated virus
  source 1..1933: mol_type = other DNA
caaggcctacgaccagcagctcaaagcgggtgacaatccgtacctgcggtataaccacgccgacgccgagtttcaggagcgtcttcaagaagatacgtcttttgggggcaacctcgggcgagcagtcttccaggccaaaaagcgggttctcgaacctcttggtctggttgagacgccagctaagacggcacctggaaagaagcgaccggtagactcgccagactccacctcgggcatcggcaagaaaggccagcagcccgcgaaaaagagactcaactttgggcagactggcgactcagagtcagtccccgaccctcaaccaatcggagaaccaccagcaggcccctctggtctgggatctggtacaatggctgcaggcggtggcgcaccaatggctgacaataacgagggcgccgacggagtgggtaatgcctcaggaaattggcattgcgattccacatggctgggcgacagagtcatcaccaccagcacccgaacctgggccctgcccacctacaacaaccacctctacaagcaaatctccagtcagtcagcagggagcaccaacgataacgtctatttcggctacagcaccccctgggggtattttgacttcaacagattccattgccacttctcaccacgtgactggcagcgacttatcaacaacaactggggattccggcccaagaagctcaacttcaagctcttcaacatccaggtcaaggaggtcacgacgaatgacggcgtcacaaccatcgctaataaccttaccagcacggttcaggtcttttcggacccggaatatcaactgccgtacgtcctcggctccgcgcaccagggctgcctgcctccgttcccggcagacgtgttcatgattccgcagtacggatacctgactctgaacaatggcagccaatcggtaggccgttcctccttctactgcctggagtactttccttctcagatgctgagaacgggcaacaacttcacctttagctacaccttcgaggacgtgcctttccacagcagctacgcgcacagccagagtctggaccggctgatgaatcccctcatcgaccagtacctgtactacttggccagaacacagagcaacgcaggaggtactgctggcaatcgggaactgcagttttatcagggcggacctaccaccatggccgaacaagcaaagaactggctgcccggaccttgcttccggcaacagagagtatccaagacgctggatcaaaataacaacagcaactttgcctggactggtgccacaaaataccatttaaatggaagaaattcattggttaatcccggtgtcgccatggcaacccacaaggacgacgaggaacgcttcttcccttcgagcggagttctaatttttggcaaaactggagcagctaataaaactacattagaaaacgtgctcatgacaaatgaagaagaaattcgtcctaccaacccggtagctaccgaggaatacgggattgtaagcagcaacttgcaggcggctagcaccgcagcccagacacaagttgttaacaaccagggagccttacctggcatggtctggcagaaccgggacgtgtacctgcaaggtcccatttgggccaagattcctcacacggacggcaactttcacccgtctcctctaatgggtggctttggactgaaacacccgcctccccagatcctgatcaaaaacacaccggtacctgctaatcctccagaagtgtttactcctgccaagattgcttccttcatcacgcagtacagcaccgggcaagtcagcgttgagatcgagtgggagctgcagaaagagaacagcaagcgctggaacccagagattcagtacacctccaactttgacaaacagactggagtggactttgctgttgacagccagggtgtttactctgagcct

SEQ ID NO: 4746 - protein, 644 aa, Adeno-associated virus
KAYDQQLKAGDNPYLRYNHADAEFQERLQEDTSFGGNLGRAVFQAKKRVLEPLGLVETPAKTAPGKKRPVDSPDSTSGIGKKGQQPAKKRLNFGQTGDSESVPDPQPIGEPPAGPSGLGSGTMAAGGGAPMADNNEGADGVGNASGNWHCDSTWLGDRVITTSTRTWALPTYNNHLYKQISSQSAGSTNDNVYFGYSTPWGYFDFNRFHCHFSPRDWQRLINNNWGFRPKKLNFKLFNIQVKEVTTNDGVTTIANNLTSTVQVFSDPEYQLPYVLGSAHQGCLPPFPADVFMIPQYGYLTLNNGSQSVGRSSFYCLEYFPSQMLRTGNNFTFSYTFEDVPFHSSYAHSQSLDRLMNPLIDQYLYYLARTQSNAGGTAGNRELQFYQGGPTTMAEQAKNWLPGPCFRQQRVSKTLDQNNNSNFAWTGATKYHLNGRNSLVNPGVAMATHKDDEERFFPSSGVLIFGKTGAANKTTLENVLMTNEEEIRPTNPVATEEYGIVSSNLQAASTAAQTQVVNNQGALPGMVWQNRDVYLQGPIWAKIPHTDGNFHPSPLMGGFGLKHPPPQILIKNTPVPANPPEVFTPAKIASFITQYSTGQVSVEIEWELQKENSKRWNPEIQYTSNFDKQTGVDFAVDSQGVYSEP

SEQ ID NO: 4747 - protein, 728 aa, Adeno-associated virus
MAADGYLPDWLEDNLSEGIREWWDLKPGAPKPKANQQKQDDGRGLVLPGYKYLRPFNGLDKGEPVNEADAAALEHDKAYDKQLEQGDNPYLKYNHADAEFQERLQEDTSFGGNLGRAVFQAKKRVLEPLGLVEEVAKTAPGKKRPIESPDSSTGIGKKGQQPAKKKLNFGQTGDSESVPDPQPLGEPPAAPSGLGSGTMAAGGGAPMADNNEGADGVGNASGNWHCDSTWLGDRVITTSTRTWALPTYNNHLYKQISSQSGATNDNHFFSYSTPWGYFDFNRFHCHFSPRDWQRLINNNWGFRPRKLRFKLFNIQVKEVTTNDGVTTIANNLTSTIQVFSDSEYQLPYVLGSAHQGCLPPFPADVFMIPQYGYLTLNNGSQSVGRSSFYCLEYFPSQMLRTGNNFEFSYTFEEVPFHSSYVHSQSLDRLMNPLIDQYLYYLARTQSTTGSTRELQFHQAGPNTMAEQSKNWLPGPCYRQQRLSKNIDSNNNSNFAWTGATKYHLNGRNSLTNPGVAMATNKDDEDQFFPINGVLVFGKTGAANKTTLENVLMTSEEEIKTTNPVATEEYGVVSSNLQSSTAGPQTQTVNSQGALPGMVWQNRDVCLQGPIWAKIPHTDGNFHPSPLMGGFGLKHPPPQILIKNTPVPANPPEVFTPAKFASFITQYSTGQVSVEIEWELQKENSKRWNPEIQYTSNYAKSNNVEFAVNNEGVYTEPRPIGTRYLTRNL

SEQ ID NO: 4748 - protein, 728 aa, Adeno-associated virus
MAADGYLPDWLEDNLSEGIREWWDLKPGAPKPKANQQKQDDGRGLVLPGYKYLGPFNGLDKGEPVNEADAAALEHDKAYDKQLEQGDNPYLKYNHADAEFQERLQEDTSFGGNLGRAVFQAKKRVLEPLGLVEEGAKTASGKKRPIESPDSSTGIGKKGQQPAKKKLNFGQTGDSESVPDPQPLGEPPAAPSGLGSGTMAAGGGAPMADNNEGADGVGNASGNWHCDSTWLGDRVITTSTRTWALPTYNNHLYKQISSQSGATNDNHFFGYSTPWGYFDFNRFHCHFSPRDWQRLINNNWGFRPRKLRFKLFNIQVKEVTTNDGVTTIANNLTSTIQVFSDSEYQLPYVLGSAHQGCLPPFPADVFMIPQYGYLTLNNGSQSVGRSSFCCLEYFPSQMLRTGNNFEFSYTFEEVPFHSSYAHSQSLDRLMNPLIDQYLYYLARTQSTTGSTRELQFHQAGPNTVAEQSKNWLPGPCYRQQRLSKNIDSNNNSNFAWTGATKYHLNGRNSLTNPGVAMATNKDDEDQFLPINGVLVFGKTGAANKTTLENVLMTSEEEIKTTNPVATEEYGVVSSNLQSSTAGPRTQTVNSQGALPGMVWQNRDVYLQGPIWAEIPHTDGNFHPSPLMGGFGLKHPPPQILIKNTPVPANPPEVFTPAKFASFITQYSTGQVSVEIEWELQKENSKRWNPEIQYTSNYAKSNNVEFAVNNEGVYTEPRPIGTRYLTRNL

SEQ ID NO: 4749 - protein, 738 aa, Adeno-associated virus
MAADGYLPDWLEDNLSEGIREWWALKPGAPKPKANQQKQDDGRGLVLPGYKYLGPFNGLDKGEPVNAADAAALEHDKAYDQQLKAGDNPYLRYNHADAEFQERLQEDTSFGGNLGRAVFQAKKRVLEPLGLVEEGAKTAPGKKRPVEPSPQRSPDSTTGIGKKGQQPAKKRLNFGQTGDSESVPDPQPIGEPPAGPSGLGSGTMAAGGGAPMADNNEGADGVGSSSGNWHCDSTWLGDRVITTSTRTWALPTYNNHLYKQISNGTSGGSTNDNTYFGYSTPWGYFDFNRFHCHFSPRDWQRLINNNWGFRPKRLNFKLFNIQVKEVTQNEGTKTIANNLTSTIQVFTDSEYQLPYVLGSARQGCLPPFPADVFMIPQYGYLTLNNGSQAVGRSSFYCLEYFPSQMLRTGNNFEFSYQFEDVPFHSSYAHSQSLDRLMNPLIDQYLYYLSRTQSTGGTAGTQQLLFSQAGPNNMSAQAKNWLPGPCYRQQRVSTTLSQNNNSNFAWTGATKYHLNGRDSLVNPGVAMATHKDDEERFFPSSGVLMFGKQGAGKGNVDYSSVMLTSEEEIKTTNPVATEQYGVVADNLQQQNAAPIVGAVNSQGALPGMVWQNRDVYLQGPIWAKIPHTDGNFHPSPLMGGFGLKHPPPQILIKNTPVPADPPTTFSQAKLASFITQYSTGQVSVEIEWELQKENSKRWNPEIQYTSNYYKSTNVDFAVNTDGTYSEPRPIGTRYLTRNL

SEQ ID NO: 4750 - DNA, 3121 bp, Adeno-associated virus
  source 1..3121: mol_type = other DNA
gaattcgcccttcgcagagaccaaagttcaactgaaacgaatcaaccggtttattgattaacaagcaattacagattacgggtgaggtaacgggtgccgatggggcgaggctcagaataagtgccatctgtgttaacagcaaagtccacatttgtagatttgtagtagttggaagtgtattgaatctctgggttccagcgtttgctgttttctttctgcagctcccattcaatttccacgctgacctgtccggtgctgtactgcgtgatgaacgacgccagcttagcttgactgaaggtagttggaggatccgcgggaacaggtgtattcttaatcaggatctgaggaggcgggtgtttcagtccaaagccccccatcagcggcgagggatgaaagtttccgtccgtgtgaggaatcttggcccagataggaccctgcaggtacacgtcccggttctgccagaccatgccaggtaaggctccttgactgttgacggcccctacaataggagcggcgttttgctgttgcaggttatcggccaccacgccgtactgttctgtggccactgggttggtggttttaatttcttcctcactggttagcataacgctgctatagtccacgttgccttttccagctccctgtttcccaaacattaagactccgctggacggaaaaaatcgctcttcgtcgtccttgtgggttgccatagcgacaccgggatttaccagagagtctctgccattcagatgatacttggtggcaccggtccaggcaaagttgctgttgttattttgcgacagtgtcgtggagacgcgttgctgccggtagcagggcccgggtagccagtttttggcctgagccgacatgttattaggcccggcctgagaaaatagcaactgctgagttcctgcggtacctcccgtggactgagtccgagacaggtagtacaggtactggtcgatgagggggttcatcagccggtccaggctttggctgtgcgcgtagctgctgtgaaaaggcacgtcctcaaactggtagctgaactcaaagttgttgcccgttctcagcatttgagaaggaaagtactccaggcagtagaaggaggaacggcccacggcctgactgccattgttcagagtcaggtacccgtactgaggaatcatgaagacgtccgccgggaacggaggcaggcagccctggcgcgcagagccgaggacgtacgggagctggtattccgagtccgtaaagacctgaatcgtgctggtaaggttattggcgatggtcttggtgccttcattctgcgtgacctccttgacctggatgttgaagagcttgaagttgagtctcttgggccggaatccccagttgttgttgatgagtcgctgccagtcacgtggtgagaagtggcagtggaatctgttaaagtcaaaatacccccagggggtgctgtagccgaagtaggtgttgtcgttggtgcttcctcccgaagtcccgttggagatttgcttgtagaggtggttgttgtaggtggggagggcccaggttcgggtgctggtggtgatgactctgtcgcccagccatgtggaatcgcaatgccaatttcctgaggaactacccactccgtcggcgccttcgttattgtctgccattggagcgccaccgcctgcagccattgtaccagatcccagaccagaggggcctgcggggggttctccgattggttgagggtcgggcactgactctgagtcgccagtctgcccaaagttgagtctctttttcgcgggctgctggcctttcttgccgatgcccgtagtggagtctggagaacgctggggtgatggctctaccggtctcttctttccaggagccgtcttagcgccttcctcaaccagaccgagaggttcgagaacccgcttcttggcctggaagactgctcgtccgaggttgcccccaaaagacgtatcttcttgcagacgctcctgaaactcggcgtcggcgtggttataccgcaggtacggattgtcacccgctttgagctgctggtcgtaggccttgtcgtgctcgagggccgctgcgtccgccgcgttgacgggctcccccttgtcgagtccgttgaagggtccgaggtacttgtagccaggaagcaccagaccccggccgtcgtcctgcttttgctggttggctttgggcttcggggctccaggtttcagcgcccaccactcgcgaatgccctcagagaggttgtcctcgagccaatctggaagataaccatcggcagccatacctgatctaaatcatttattgttcaaagatgcagtcatccaaatccacattgaccagatcgcaggcagtgcaagcgtctggcacctttcccatgatatgatgaatgtagcacagtttctgatacgcctttttgacgacagaaacgggttgagattctgacacgggaaagcactctaaacagtctttctgtccgtgagtgaagcagatatttgaattctgattcattctctcgcattgtctgcagggaaacagcatcagattcatgcccacgtgacgagaacatttgttttggtacctgtccgcgtagttgatcgaagcttccgcgtctgacgtcgatggctgcgcaactgactcgcgcacccgtttgggctcacttatatctgcgtcactgggggcgggtcttttcttggctccaccctttttgacgtagaattcatgctccacctcaaccacgtgatcctttgcccaccggaaaaagtctttgacttcctgcttggtgaccttcccaaagtcatgatccagacggcgggtgagttcaaatttgaacatccggtcttgcaacggctgctggtgttcgaaggtcgttgagttcccgtcaatcacggcgcacatgttggtgttggaggtgacgatcacgggagtcgggtctatctgggccgaggacttgcatttctggtccacgcgcaccttgcttcctccgagaatggctttggccgactccacgaccttggcggtcatcttcccctcctcccaccagatcaccatcttgtcgacacagtcgttgaagggaaagttctcattggtccagttgacgcagccgtagaagggcgaattc

SEQ ID NO: 4751 - DNA, 3121 bp, Adeno-associated virus
  source 1..3121: mol_type = other DNA
gaattcgcccttctacggctgcgtcaactggaccaatgagaactttcccttcaacgactgtgtcgacaagatggtgatctggtgggaggaggggaagatgaccgccaaggtcgtggagtcggccaaagccattctcggaggaagcaaggtgcgcgtggaccagaaatgcaagtcctcggcccagatagacccgactcccgtgatcgtcacctccaacaccaacatgtgcgccgtgattgacgggaactcaacgaccttcgaacaccagcagccgttgcaagaccggatgttcaaatttgaactcacccgccgtctggatcatgactttgggaaggtcaccaagcaggaagtcaaagactttttccggtgggcaaaggatcacgtggttgaggtggagcacgaattctacgtcaaaaagggtggagccaagaaaagacccgcccccagtgacgcagatataagtgagcccaaacgggtgcgcgagtcagttgcgcagccatcgacgtcagacgcggaagcttcgatcaactacgcagacaggtaccaaaacaaatgttctcgtcacgcgggcatgaatctgatgctgtttccctgcagacaatgcgagagaatgaatcagaattcaaatatctgcttcactcacggacagaaagactgtttagagtgctttcccgtgtcagaatctcaacccgtttctgtcgtcaaaaaggcgtatcagaaactgtgctacattcatcatatcatgggaaaggtgccagacgcttgcactgcctgcgatctggtcgatgtggatttggatgactgcatctttgaacaataaatgatttaaatcaggtatggctgccgatggttatcttccagattggctcgaggacaacctctctgagggcattcgcgagtggtgggcgctgaaacctggagccccgaagcccaaagccaaccagcaaaagcaggacggcggccggggtctggtgcttcctggctacaagtacctcggacccttcaacggactcgacaagggggagcccgtcaacgcggcggacgcagcggccctcgagcacgacaaggcctacgaccagcagctcaaagcgggtgacaatccgtacctgcggtataaccacgccgacgccgagtttcaggagcgtctgcaagaagatacgtcttttgggggcaacctcgggcgagcagtcttccaggccaagaagcgggttctcgaacctctcggtctggttgaggaaggcgctaagacggctcctggaaagaagagaccggtagagccatcaccccagcgttctccagactcctctacgggcatcggcaagaaaggccagcagcccgcgaaaaagagactcaactttgggcagactggcgactcagagtcagtgcccgaccctcaaccaatcggagaaccccccgcaggcccctctggtctgggatctggtacaatggctgcaggcggtggcgctccaatggcagacaataacgaaggcgccgacggagtgggtagttcctcaggaaattggcattgcgattccacatggctgggcgactgagtcatcaccaccagcacccgaacctgggccctccccacctacaacaaccacctctacaagcaaatctccaacgggacttcgggaggaagcaccaacgacaacacctacttcggctacagcaccccctgggggtattttgactttaacagattccactgccacttctcaccacgtgactggcagcgactcatcaacaacaactggggattccggcccaagagactcaacttcaagctcttcaacatccaggtcaaggaggtcacgcagaatgaaggcaccaagaccatcgccaataaccttaccagcacgattcaggtctttacggactcggaataccagctcccgtacgtcctcggctctgcgcaccagggctgcctgcctccgttcccggcggacgtcttcatgattcctcagtacgggtacctgactctgaacaatggcagtcaggccgtgggccgttcctccttctactgcctggagtactttccttctcaaatgctgagaacgggcaacaactttgagttcagctaccagtttgaggacgtgccttttcacagcagctacgcgcacagccaaagcctggaccggctgatgaaccccctcatcgaccagtacctgtactacctgtctcggactcagtccacgggaggtaccgcaggaactcagcagttgctattttctcaggccgggcctaataacatgtcggctcaggccaaaaactggctacccgggccctgctaccggcagtaacgcgtctccacgacactgtcgcaaaataacaacagcaactttgtctggaccggtgccaccaagtatcatctgaatggcagagactctctggtagatcccggtgtcgctatggcaacccacaaggacgacgaagagcgattttttccgtccagcggagtcataatgtttgggaaacagggagctggaaaagacaacgtggactatagcagcgtcatgctaaccagtgaggaagaaattaaaaccaccaacccagtggccacagaacagtacggcgtggtggccgataacctgcaacagcaaaacgccgctcctattgtaggggccgtcaacagtcaaggagccttacctggcatggtctggcagaaccgggacgtgtacctgcagggtcctacctgggccaagattcctcacacggacggaaactttcatccctcgccgctgatgggaggctttggactgaaacacccgcctcctcagatcctgattaagaatacacctgttcccgcggatcctccaactaccttcagtcaagctaagctggcgtcgttcatcacgcagtacagcaccggacaggtcagcgtggaaattgaatgggagctgcaggaagaaaacagcaaacgctggaacccagagattcaatacacttccaactactacaaatctacaaatgtggactttgctgttaacacagatggcacttattctgagcctcgccccatcggcacccgttacctcacccgtaatctgtaattgcttgttaatcaataaaccggttgattcgtttcagttgaactttggtctctgcgaagggcgaattc

SEQ ID NO: 4752 - protein, 738 aa, Adeno-associated virus
MAADGYLPDWLEDNLSEGIREWWALKPGAPKPKANQQKQDDGRGLVLPGYKYLGPFNGLDKGEPVNAADAAALEHDKAYDQQLKAGDNPYLRYNHADAEFQERLQEDTSFGGNLGRAVFQAKKRVLEPLGLVEEGAKTAPGKKRPVEPSPQRSPDSSTGIGKKGQQPAKKRLNFGQTGDSESVPDPQPIGEPPAGPSGLGSGTMAAGGGAPMADNNEGADGVGSSSGNWHCDSTWLGDGVITTSTRTWALPTYNNHLYKQISNGTSGGSTNDNTYFGYSTPWGYFDFNRFHCHFSPRDWQRLINNNWGFRPKSLNFKLFNIQVKEVTQNEGTKTIANNLTSTIQVFTDSEYQLPYVLGSAHQGCLPPFPADVFMIPQYGYLTLNNGSQAVGRSSFYCLEYFPSQMLRTGNNFEFSYQFEDVPFHSSYAHSQSLDRLMNPLIDQYLYYLSRTQSTGGTAGTQQLLFSQAGPNNMSAQAKNWLPGPCYRQQRVSTTLSQNDNSNFAWTGATKYHLNGRDSLVNPGVAMATHKDDEERFFPSSGVLMFGKQGAGKDNVDYSSVMLTSEEEIKTTNPVATEQYGVVADNLQQQNAAPIVGAVNSQGALPGMVWQNRDVYLQGPIWAKIPHTDGNFHPSPLMGGFGLKHPPPQILIKNTPVPADPPTTFSQAKLASFITQYSTGQVSVEIEWELQKENSKRWNPEIQYTSNYYKSTNVDFAVNTDGTYSEPRPIGTRYLTRNL

SEQ ID NO: 4753 - DNA, 3121 bp, Adeno-associated virus
  source 1..3121: mol_type = other DNA
gaattcgcccttcgcgagaccaaagttcaactgaaacgaatcaaccggtttattgattaacaagcaattacagattacgggtgaggtaacgggtgccgatggggcgaggctcagaataagtgccatctgtgttaacagcaaagtccacatttgtagatttgtagtagttggaagtgtattgaatctctgggttccagcgtttgctgttttctttctgcagctcccattcaatttccacgctgacctgtccggtgctgtactgcgtgatgaacgacgccagcttagcttgactgaaggtagttggaggatccgcgggaacaggtgtattcttaatcaggatctgaggaggcgggtgtttcagtccaaagcctcccatcagcggcgagggatgaaagtttccgtccgtgtgaggaatcttggcccagataggaccctgcaggtacacgtcccggttctgccagaccatgccaggtaaggctccttgactgttgacggcccctacaataggagcggcgttttgctgttgcaggttatcggccaccacgccgtactgttctgtggccactgggttggtggttttaatttcttcctcactggttagcataacgctgctatagtccacgttgtcttttccagctccctgtttcccaaacattaagactccgctggacggaaaaaatcgctcttcgtcgtccttgtgggttgccatagcgacaccgggatttaccagagagtctctgccattcagatgatacttggtggcaccggtccaggcaaagttgctgttgtcattttgcgacagtgtcgtggagacgcgttgctgccggtagcagggcccgggtagccagtttttggcctgagccgacatgttattaggcccggcctgagaaaatagcaactgctgagttcctgcggtacctcccgtggactgagtccgagacaggtagtacaggtactggtcgatgagggggttcatcagccggtccaggctttggctgtgcgcgtagctgctgtgaaaaggcacgtcctcaaactggtagctgaactcaaagttgttgcccgttctcagcatttgagaaggaaagtactccaggcagtagaaggaggaacggcccacggcctgactgccattgttcagagtcaggtacccgtactgaggaatcatgaagacgtccgccgggaacggaggcaggcagccctggtgcgcagagccgaggacgtacgggagctggtattccgagtccgtaaagacctgaatcgtgctggtaaggttattggcgatggtcttggtgccttcattctgcgtgacctccttgacctggatgttgaagagcttgaagttgaggctcttgggccggaatccccagttgttgttgatgagtcgctgccagtcacgtggtgagaagtggcagtggaatctgttaaagtcaaaatacccccagggggtgctgtagccgaagtaggtgttgtcgttggtgcttcctcccgaagtcccgttggagatttgcttgtagaggtggttgttgtaggtggggagggcccaggttcgggtgctggtggtgatgactccgtcgcccagccatgtggaatcgcaatgccaatttcctgaggaactacccactccgtcggcgccttcgttattgtctgccattggagcgccaccgcctgcagccattgtaccagatcccagaccagaggggcctgcggggggttctccgattggttgagggtcgggcactgactctgagtcgccagtctgcccaaagttgagtctctttttcgcgggctgctggcctttcttgccgatgcccgtagaggagtctggagaacgctggggtgatggctctaccggtctcttctttccaggagccgtcttagcgccttcctcaaccagaccgagaggttcgagaacccgcttcttggcctggaagactgctcgcccgaggttgcccccaaaagacgtatcttcttgcagacgctcctgaaactcggcgtcggcgtggttataccgcaggtacggattgtcacccgctttgagctgctggtcgtaggccttgtcgtgctcgagggccgctgcgtccgccgcgttgacgggctcccccttgtcgagtccgttgaagggtccgaggtacttgtagccaggaagcaccagaccccggccgtcgtcctgcttttgctggttggctttgggcttcggggctccaggtttcagcgcccaccactcgcgaatgccctcagagaggttgtcctcgagccaatctggaagataaccatcggcagccatacctgatttaaatcatttattgttcaaagatgcagtcatccaaatccacattgaccagatcgcaggcagtgcaagcgtctggcacctttcccatgatatgatgaatgtagcacagtttctgatacgcctttttgacgacagaaacgggttgagattctgacacgggaaagcactctaaacagtctttctgtccgtgagtgaagcagatatttgaattctgattcattctctcgcattgtctgcagggaaacagcatcagattcatgcccacgtgacgagaacatttgttttggtacctgtctgcgtagttgatcgaagcttccgcgtctgacgtcgatggctgcgcaactgactcgcgcacccgtttgggctcacttatatctgcgtcactgggggcgggtcttttcttggctccaccctttttgacgtagaattcatgctccacctcaaccacgtgatcctttgcccaccggaaaaagtctttgacttcctgcttggtgaccttcccaaagtcatgatccagacggcgggtgagttcaaatttgaacatccggtcttgcaacggctgctggtgttcgaaggtcgttgagttcccgtcaatcacggcgcacatgttggtgttggaggtgacgatcacgggagtcgggtctatctgggccgaggacttgcatttctggtccacgcgcaccttgcttcctccgagaatggctttggccgactccacgaccttggcggtcatcttcccctcctcccaccagatcaccatcttgtcgacacagtcgttgaagggaaagttctcattggtccagttgacgcagccgtagaaagggcgaattc

SEQ ID NO: 4754 - DNA, 2211 bp, Adeno-associated virus
  source 1..2211: mol_type = other DNA
atggctgctgacggttatcttccagattggctcgaggacaacctttctgaaggcattcgtgagtggtgggctctgaaacctggagtccctcaacccaaagcgaaccaacaacaccaggacaaccgtcggggtcttgtgcttccgggttacaaatacctcggacccggtaacggactcgacaaaggagagccggtcaacgaggcggacgcggcagccctcgaacacgacaaagcttacgaccagcagctcaaggccggtgacaacccgtacctcaagtacaaccacgccgacgccgagtttcaggagcgtcttcaagaagatacgtcttttgggggcaaccttggcagagcagtcttccaggccaaaaagaggatccttgagcctcttggtctggttgaggaagcagctaaaacggctcctggaaagaagggggctgtagatcagtctcctcaggaaccggactcatcatctggtgttggcaaatcgggcaaacagcctgccagaaaaagactaaatttcggtcagactggagactcagagtcagtcccagaccctcaacctctcggagaaccaccagcagcccccacaagtttgggatctaatacaatggcttcaggcggtggcgcaccaatggcagacaataacgagggtgccgatggagtgggtaattcctcaggaaattggcattgcgattcccaatggctgggcgacagagtcatcaccaccagcaccagaacctgggccctgcccacttacaacaaccatctctacaagcaaatctccagccaatcaggagcttcaaacgacaaccactactttggctacagcaccccttgggggtattttgactttaacagattccactgccacttctcaccacgtgactggcagcgactcattaacaacaactggggattccggcccaagaaactcagcttcaagctcttcaacatccaagttagaggggtcacgcagaacgatggcacgacgactattgccaataaccttaccagcacggttcaagtgtttacggactcggagtatcagctcccgtacgtgctcgggtcggcgcaccaaggctgtctcccgccgtttccagcggacgtcttcatggtccctcagtatggatacctcaccctgaacaacggaagtcaagcggtgggacgctcatccttttactgcctggagtacttcccttcgcagatgctaaggactggaaataacttccaattcagctataccttcgaggatgtaccttttcacagcagctacgctcacagccagagtttggatcgcttgatgaatcctcttattgatcagtatctgtactacctgaacagaacgcaaggaacaacctctggaacaaccaaccaatcacggctgctttttagccaggctgggcctcagtctatgtctttgcaggccagaaattggctacctgggccctgctaccggcaacagagactttcaaagactgctaacgacaacaacaacagtaactttccttggacagcggccagcaaatatcatctcaatggccgcgactcgctggtgaatccaggaccagctatggccagtcacaaggacgatgaagaaaaatttttccctatgcacggcaatctaatatttggcaaagaagggacaacggcaagtaacgcagaattagataatgtaatgattacggatgaagaagagattcgtaccaccaatcctgtggcaacagagcagtatggaactgtggcaaataacttgcagagctcaaatacagctcccacgactggaactgtcaatcatcagggggccttacctggcatggtgtggcaagatcgtgacgtgtaccttcaaggacctatctgggcaaagattcctcacacggatggacactttcatccttctcctctgatgggaggctttggactgaaacatccgcctcctcaaatcatgatcaaaaatactccggtaccggcaaatcctccgacgactttcagcccggccaagtttgcttcatttatcactcagtactccactggacaggtcagcgtggaaattgagtgggagctacagaaagaaaacagcaaacgttggaatccagagattcagtacacttccaactacaacaagtctgttaatgtggactttactgtagacactaatggtgtttatagtgaacctcgccctattggaacccggtatctcacacgaaacttgtga

SEQ ID NO: 4755 - protein, 737 aa, Adeno-associated virus
MAADGYLPDWLEDNLSEGIREWWDLKPGAPKPKANQQKQDNGRGLVLPGYKYLGPFNGLDKGEPVNAADAAALEHDKAYDQQLNAGDNPYLRYNHADAEFQERLQEDTSFGGNLGRAVFQAKKRVLEPLGLVEEGAKTAPAKKRPVEPSPQRSPDSSTGIGKKGQQPARKRLNFGQTGDSESVPDPQPLGEPPAAPSSVGSGTVAAGGGAPMADNNEGADGVGNASGNWHCDSTWLGDRVITTSTRTWALPTYNNHLYEQISSETAGSTNDNTYFGYSTPWGYFDFNRFHCHFSPRDWQRLINNNWGFRPKKLRFKLFNIQVKEVTTNDGVTTIANNLTSTIQVFSDSEYQLPYVLGSAHQGCLPPFPADVFMIPQYGYLTLNNGSQSVGRSSFYCLEYFPSQMLRTGNNFEFSYSFEDVPFHSSYAHSQSLDRLMNPLIDQYLYYLARTQSDPGGTAGNRELQFYQGGPSTMAEQAKNWLPGPCFRQQRVSKTLDQNNNSNFAWTGATKYHLNGRNSLVNPGVAMATHKDDEDRFFPSSGVLIFGKTGATNKTTLENVLMTNEEEIRPTNPVATEEYGIVSSNLQAANTAAQTQVVNNQGALPGMVWQNRDVYLQGPIWAKIPHTDGNFHPSPLMGGFGLKHPPPQILIKNTPVPANPPEVFTPAKFASFITQYSTGQVSVEIEWELQKENSKRWDPEIQYTSNFEKQTGVDFAVDSQGVYSEPRPIGTRYLTRNL

SEQ ID NO: 4756 - DNA, 2211 bp, Adeno-associated virus
  source 1..2211: mol_type = other DNA
atggctgctgacggttatcttccagattggctcgaggacaacctttctgaaggcattcgtgagtggtgggctctgaaacctggagtccctcaacccaaagcgaaccaacaacaccaggacaaccgtcggggtcttgtgcttccgggttacaaatacctcggacccggtaacggactcgacaaaggagagccggtcaacgaggcggacgcggcagccctcgaacacgacaaagcttacgaccagcagctcaaggccggtgacaacccgtacctcaagtacaaccacgccgacgccgagtttcaggagcgtcttcaagaagatacgtcttttgggggcaaccttggcagagcagtcttccaggccaaaaagaggatccttgagcctcttggtctggttgaggaagcagctaaaacggctcctggaaagaagggggctgtagatcagtctcctcaggaaccggactcatcatctggtgttggcaaatcgggcaaacagcctgccagaaaaagactaaatttcggtcagactggagactcagagtcagtcccagaccctcaacctctcggagaaccaccagcagcccccacaagtttgggatctaatacaatggcttcaggcggtggcgcaccaatggcagacaataacgagggtgccgatggagtgggtaattcctcaggaaattggcattgcgattcccaatggctgggcgacagagtcatcaccaccagcaccagaacctgggccctgcccacttacaacaaccatctctacaagcaaatctccagccaatcaggagcttcaaacgacaaccactactttggctacagcaccccttgggggtattttgactttaacagattccactgccacttctcaccacgtgactggcagcgactcattaacaacaactggggattccggcccaagaaactcagcttcaagctcttcaacatccaagttagaggggtcacgcagaacgatggcacgacgactattgccaataaccttaccagcacggttcaagtgtttacggactcggagtatcagctcccgtacgtgctcgggtcggcgcaccaaggctgtctcccgccgtttccagcggacgtcttcatggtccctcagtatggatacctcaccctgaacaacggaagtcaagcggtgggacgctcatccttttactgcctggagtacttcccttcgcagatgctaaggactggaaataacttccaattcagctataccttcgaggatgtaccttttcacagcagctacgctcacagccagagtttggatcgcttgatgaatcctcttattgatcagtatctgtactacctgaacagaacgcaaggaacaacctctggaacaaccaaccaatcacggctgctttttagccaggctgggcctcagtctatgtctttgcaggccagaaattggctacctgggccctgctaccggcaacagagactttcaaagactgctaacgacaacaacaacagtaactttccttggacagcggccagcaaatatcatctcaatggccgcgactcgctggtgaatccaggaccagctatggccagtcacaaggacgatgaagaaaaatttttccctatgcacggcaatctaatatttggcaaagaagggacaacggcaagtaacgcagaattagataatgtaatgattacggatgaagaagagattcgtaccaccaatcctgtggcaacagagcagtatggaactgtggcaaataacttgcagagctcaaatacagctcccacgactggaactgtcaatcatcagggggccttacctggcatggtgtggcaagatcgtgacgtgtaccttcaaggacctatctgggcaaagattcctcacacggatggacactttcatccttctcctctgatgggaggctttggactgaaacatccgcctcctcaaatcatgatcaaaaatactccggtaccggcaaatcctccgacgactttcagcccggccaagtttgcttcatttatcactcagtactccactggacaggtcagcgtggaaattgagtgggagctacagaaagaaaacagcaaacgttggaatccagagattcagtacacttccaactacaacaagtctgttaatgtggactttactgtagacactaatggtgtttatagtgaacctcgccctattggaacccggtatctcacacgaaacttgtaa

SEQ ID NO: 4757 - protein, 736 aa, Adeno-associated virus
MAADGYLPDWLEDNLSEGIREWWALKPGVPQPKANQQHQDNRRGLVLPGYKYLGPGNGLDKGEPVNEADAAALEHDKAYDQQLKAGDNPYLKYNHADAEFQERLQEDTSFGGNLGRAVFQAKKRILEPLGLVEEAAKTAPGKKGAVDQSPQEPDSSSGVGKSGKQPARKRLNFGQTGDSESVPDPQPLGEPPAAPTSLGSNTMASGGGAPMADNNEGADGVGNSSGNWHCDSQWLGDRVITTSTRTWALPTYNNHLYKQISSQSGASNDNHYFGYSTPWGYFDFNRFHCHFSPRDWQRLINNNWGFRPKKLSFKLFNIQVRGVTQNDGTTTIANNLTSTVQVFTDSEYQLPYVLGSAHQGCLPPFPADVFMVPQYGYLTLNNGSQAVGRSSFYCLEYFPSQMLRTGNNFQFSYTFEDVPFHSSYAHSQSLDRLMNPLIDQYLYYLNRTQGTTSGTTNQSRLLFSQAGPQSMSLQARNWLPGPCYRQQRLSKTANDNNNSNFPWTAASKYHLNGRDSLVNPGPAMASHKDDEEKFFPMHGNLIFGKEGTTASNAELDNVMITDEEEIRTTNPVATEQYGTVANNLQSSNTAPTTGTVNHQGALPGMVWQDRDVYLQGPIWAKIPHTDGHFHPSPLMGGFGLKHPPPQIMIKNTPVPANPPTTFSPAKFASFITQYSTGQVSVEIEWELQKENSKRWNPEIQYTSNYNKSVNVDFTVDTNGVYSEPRPIGTRYLTRNL

SEQ ID NO: 4758 - protein, 728 aa, Adeno-associated virus
MAADGYLPDWLEDNLSEGIREWWDLKPGAPKPKANQQKQDDGRGLVLPGYKYLGPFNGLDKGEPVNEADAAALEHDKAYDKQLEQGDNPYLKYNHADAEFQERLQEDTSFGGNLGRAVFQAKKRVLEPLGLVEEGAKTAPGKKRPIESPDSSTGIGRKGQQPAKKKLNFGQTGDSESVPDPQPIGEPPAGPSGLGSGTMAAGGGAPMADNNEGADGVGNASGNWHCDSTWLGDRVITTSTRTWALPTYNNHLYKQISSQSGATNDNHFFGYSTPWGYFDFNRFHCHFSPRDWQRLINNNWGFRPRKLRFKLFNIQVKEVTTNDGVTTIANNLTSTIQVFSDSEYQLPYVLGSAHQGCLPPFPADVFMIPQYGYLTLNNGSQSVGRSSFYCLEYFPSQMLRTGNNFEFSYTFEEVPFHSSYAHSQSLDRLMNPLIDQYLYYLARTQSTTGSTRELQFHQAGPNTMAEQSKNWLPGPCYRQQRLSKNIDSNNNSNFAWTGATKYHLNGRNSLTNPGVAMATNKDDEDQFFPINGVLVFGKTGAANKTTLENVLMTSEEEIKTTNPVATEEYGVVSSNLQSSTAGPQTQTVNSQGALPGMVWQNRDVYLQGPIWAKIPHTDGNFHPSPLMGGFGLKHPPPQILIKNTPVPANPPEVFTPAKFASFITQYSTGQVSVEIEWELQKENSKRWNPEIQYTSNYAKSNNVEFAVNNEGVYTEPRPIGTRYLTRNL

SEQ ID NO: 4759 - protein, 728 aa, Adeno-associated virus
MAADGYLPDWLEDNLSEGIREWWDLKPGAPKPKANQQKQDDGRGLVLPGYKYLGPFNGLDKGEPVNAADAAALEHDKAYDQQLKAGDNPYLRYNHADAEFQERLQEDTSFGGNLGRAVFQAKKRVLEPLGLVEEGAKTAPGKKRPIESPDSSTGIGKKGQQPAKKKLNFGQTGDSESVPDPQPIGEPPAGPSGLGSGTMAAGGGAPMADNNEGADGVGNASGNWHCDSTWLGDRVITTSTRTWALPTYNNHLYKQISSQSGATNDNHFFGYSTPWGYFDFNRFHCHFSPRDWQRLINNNWGFRPRKLRFKLFNIQVKEVTTNDGVTTIANNLTSTIQVFSDSEYQLPYVLGSAHQGCLPPFPADVFMIPQYGYLTLNNGSQSVGRSSFYCLEYFPSQMLRTGNNFEFSYTFEEVPFHSSYAHSQSLDRLMNPLIDQYLYYLARTQSTTGSTRELQFHQAGPNTMAEQSKNWLPGPCYRRQRLSKDIDSNNNSNFAWTGATKYHLNGRNSLTNPGVAMATNKDDEDQFFPINGVLVFGKTGAANKTTLENVLMTSEEEIKTTNPVATEEYGVVSSNLQSSTAGPQTQTVNSQGALPGMVWQNRDVYLQGPIWAKIPHTDGNFHPSPLMGGFGLKHPPPQILIKNTPVPANPPEVFTPAKFASFITQYSTGQVSVEIEWELQKENSKRWNPEIQYTSNYAKSNNVEFAVNNEGVYTEPRPIGTRYLTRNL

SEQ ID NO: 4760 - protein, 685 aa, Adeno-associated virus
MAADGYLPDWLEDNLSEGIREWWDLKPGAPKPKANQQKQDDGRGLVLPGYKYLGPFNGLDKGEPVNEADAAALEHDKAYDKQLEQGDNPYLKYNHADAEFQERLQEDTSFGGNLGRAVFQAKKRVLEPLGLVEEGAKTAPGKKRPVEPSPQRSPDSSTGIGKTGQQPAKKRLNFGQTGDSESVPDPQPIGEPPAGPSGLGSGTMAAGGGAPMADNNEGADGVGSSSGNWHCDSTWLGDRVITTSTRTWALPTYNNHLYKQISNGTSGGSTNDNTYFGYSTPWGYFDFNRFHCHFSPRDWQRLINNNWGFRPKRLNFKLFNIQVKEVTQNEGTKTIANNLTSTIQVFTDSEYQLPYVLGSAHQGCLPPFPADVFMIPQYGYLTLNNGSQAVGRSSFYCLEYFPSQMLRTGNNFEFSYQFEDVPFHSSYAHSQSLDRLTNPLIDQYLYYLARTQSTTGSTRGLQFHQAGPNTMAEQSKNWLPGPCYRQQRLSKNIDSNNNSNFAWTGATKYHLNGRNSLTNPGVAMATNKDDEDQFFPINGVLVFGKTGAANKTTLENVLMTSEEEIKTTNPVATEEYGVVSSNLQSSTAGPQTQTVNSQGALPGMVWQNRDVYLQGPIWAKIPHTDGNFHPSPLMGGFGLKHPPPQILIKYTSNYYKSTNVDFAVNTEGTYSEPRPIGTRYLTRNL

SEQ ID NO: 4761 - protein, 733 aa, Adeno-associated virus
MAADGYLPDWLEDNLSEGIREWWDLKPGAPKPKANQQKQDDGRGLVLPGYKYLGPFNGLDKGEPVNAADAAALEHDKAYDQQLKAGDNPYLRYNHADAEFQERLQEDTSFGGNLGRAVFQAKKRVLEPLGLVEEGAKTAPGKKRPIESPDSSTGIGKKGQQPAKKKLNFGQTGDSESVPDPQPIGEPPAGPSGLGSGTMAAGGGAPMADNNEGADGVGSSSGNWHCDSTWLGDRVITTSTRTWALPTYNNHLYKQISNGTSGGSTNDNTYFGYSTPWGYFDFNRFHCHFSPRDWQRLINNNWGFRPKRLNFKLFNIQVKEVTQNEGTKTIANNLTSTIQVFTDSEYQLPYVLGSAHQGCLPPFPADVFMIPQYGYLTLNNGSQAVGRSSFYCLEYFPSQMLRTGNNFEFSYQFEDVPFHSSYAHSQSLDRLMNPLIDQYLYYLSRTQSTGGTAGTQQLLFSQAGPNNMSAQAKNWLPGPCYRQQRVSTTVSQNNNSNFAWTGATKYHLNGRDSLVNPGVAMATHKGDEERFFPSSGVLMFGKQGAGKDNVDYSSVMLTSEEEIKTTNPVATEQYGVVADNLQQQNAAPIVGAVNSQGALPGMVWQNRDVYLQGPIWAKIPHTDGNFHPSPLMGGFGLKHPPPQILIKNTPVPADPPTTFSQAKLASFITQYSTGQVSVEIEWELQKENSKRWNPEIQYTSNYYKSTNVDFAVNTEGTYSEPRPIGTRYLTRSL

SEQ ID NO: 4762 - protein, 738 aa, Adeno-associated virus
MAADGYLPDWLEDNLSEGIREWWDLKPGAPKPKANQQKQDDGRGLVLPGYKYLGPFNGLDKGEPVNAADAAALEHDKAYDQQLKAGDNPYLRYNHADAEFQERLQEDTSFGGNLGRAVFQAKKRVLEPLGLVEEGAKTAPGKKRPVEPSPQRSPDSSTGIGKTGQQPAKKRLNFGQTGDSESVPDPQPIGEPPAGPSGLGSGTMAAGGGAPMADNNEGADGVGSSSGNWHCDSTWLGDRVITTSTRTWALPTYNNHLYKQISNGTSGGSTNDNTYFGYSTPWGYFDFNRFHCHFSPRDWQRLINNNWGFRPKRLNFKLFNIQVKEVTQNEGTKTIANNLTSTIQVFTDSEYQLPYVLGSAHQGCPPPFPADVFMIPQYGYLTLNNGSQAVGRSSFYCLEYFPSQMRRTGNNFEFSYQFEDVPFHSSYAHSQSLDRLMNPLIDQYLYYLSRTQSTGGTAGTQQLLFSQAGPNNMSAQAKNWLPGPCYRQQRVSTTLSQNNNSNFAWTGATKYHLNGRDSLVNPGVAMATHKDDEERFFPSSGVLMFGKQGAGKDNVDYSSVMLTSEEEIKTTNPVATEQYGVVADNLQQQNAAPIVGAVNSQGALPGMVWQNRDVYLQGPIWAKIPHTDGNFHPSPLMGGFGLKHPPPQILIKNTPVPADPPTTFSQAKLASFITQYSTGQVSVEIEWELQKENSKRWNPEIQYTSNYYKSTNVDFAVNTEGTYSEPRPIGTRYLTRNL

SEQ ID NO: 4763 - protein, 733 aa, Adeno-associated virus
MAADGYLPDWLEDNLSEGIREWWDLRPGAPKPKANQQKQDDGRGLVLPGYKYLGPFNGLDKGEPVNEADAAALEHDKAYDKQLEQGDNPYLKYNHADAEFQERLQEDTSFGGNLGRAVFQAKKRVLEPLGLVEEGAKTAPGKKRPIESPDSSTGIGKKGQQPAKKRLNFGQTGDSESVPDPQPIGEPPAGPSGLGSGTMAAGGGAPMADNNEGADGVGSSSGNWHCDSTWLGDRVITTSTRTWALPTYNNHLYKQISNGTSGGSTNDNTYFGYSTPWGYFDFNRFHCHFSPRDWQRLINNNWGFRPKRLNFKLFNIQVKEVTQNEGTKTIANNLTSTIQVFTDSEYQLPYVLGSAHQGCLPPFPADVFMIPQYGYLTLNNGSQAVGRSSFYCLEYFPSQMLRTGNNFEFSYQFEDVPFHSSYAHSQSLDRLMNPLIDQYLYYLSRTQSTGGTAGTQQLLFSQAGPNNMSAQAKNWLPGPCYRQQRVSTTVSQNNNSNFAWTGATKYHLNGRDSLVNPGVAMATHKGDEERFFPSSGVLMFGKQGAGKDNVDYSSVMLTSEEEIKTTNPVATEQYGVVADNLQQQNAAPIVGAVNSQGALPGMVWQNRDVYLQGPIWAKIPHTDGNFHPSPLMGGFGLKHPPPQILIKNTPVPADPPTTFSQAKLASFITQYSTGQVSVEIEWELQKENSKRWNPEIQYTSNYYKSTNVDFAVNTEGTYSEPRPIGTRYLTRNL

SEQ ID NO: 4764 - DNA, 3098 bp, Adeno-associated virus
  source 1..3098: mol_type = other DNA
gaattcgccctttctacggctgcgtcaactggaccaatgagaactttcccttcaacgattgcgtcgacaagatggtgatctggtgggaggagggcaagatgacggccaaggtcgtggagtccgccaaggccattctcggcggcagcaaggtgcgcgtggaccaaaagtgcaagtcttccgcccagatcgatcccacccccgtgatcgtcacttccaacaccaacatgtgcgctgtgattgacgggaacagcaccaccttcgagcaccagcagccgttacaagaccggatgttcaaatttgaactcacccgccgtctggagcacgactttggcaaggtgacaaagcaggaagtcaaagagttcttccgctgggcgcaggatcacgtgaccgaggtggcgcatgagttctacgtcagaaagggtggagccaacaagagacccgcccccgatgacgcggataaaagcgagcccaagcgggcctgcccctcagtcgcggatccatcgacgtcagacgcggaaggagctccggtggactttgccgacaggtaccaaaacaaatgttctcgtcacgcgggcatgcttcagatgctgtttccctgcaagacatgcgagagaatgaatcagaatttcaacatttgcttcacgcacgggaccagagactgttcagaatgtttccccggcgtgtcagaatctcaaccggtcgtcagaaagaggacgtatcggaaactctgtgccattcatcatctgctggggcgggctcccgagattgcttgctcggcctgcgatctggtcaacgtggacctggatgaccgtgtttctgagcaataaatgacttaaaccaggtatggctgccgatggttatcttccagattggctcgaggacaacctctctgagggcattcgcgagtggtgggacttgaaacctggagccccgaaacccaaagccaaccagcaaaagcaggacgacggccggggtctggtgcttcctggctacaagtacctcggacccttcaacggactcgacaagggagagccggtcaacgaggcagacgccgcggccctcgagcacgacaaggcctacgacaagcagctcgagcagggggacaacccgtacctcaagtacaaccacgccgacgccgagtttcaggagcgtcttcaagaagatacgtcttttgggggcaacctcgggcgagcagtcttccaggccaagaagcgggttctcgaacctctcggtctggttgaggaaggcgctaagacggctcctggaaagaagagacccatagaatcccccgactcctccacgggcatcggcaagaaaggccagcagcccgctaaaaagaagctcaactttgggcagactggcgactcagagtcagtgcccgacccccaacctctcggagaacctcccgccgcgccctcaggtctgggatctggtacaatggctgcaggcggtggcgcaccaatggcagacaataacgaaggcgccgacggagtgggtaatgcctccggaaattggcattgcgattccacatggctgggcgacagagtcatcaccaccagcacccgcacctgggccctgcccacctacaacaaccacctctacaagcagatatcaagtcagagcggggctaccaacgacaaccacttcttcggctacagcaccccctggggctattttgacttcaacagattccactgccacttctcaccacgtgactggcagcgactcatcaacaacaactggggattccggcccagaaagctgcggttcaagttgttcaacatccaggtcaaggaggtcacgacgaacgacggcgttacgaccatcgctaataaccttaccagcacgattcaggtcttctcggactcggagtaccaactgccgtacgtcctcggctctgcgcaccagggctgcctccctccgttccctgcggacgtgttcatgattcctcagtacggatatctgactctaaacaacggcagtcagtctgtgggacgttcctccttctactgcctggagtactttccttctcagatgctgagaacgggcaataactttgaattcagctacacctttgaggaagtgcctttccacagcagctatgcgcacagccagagcctggaccggctgatgaatcccctcatcgaccagtacctgtactacctggcccggacccagagcactacggggtccacaagggagctgcagttccatcaggctgggcccaacaccatggccgagcaatcaaagaactggctgcccggaccctgttatcggcagcagagactgtcaaaaaacatagacagcaacaacaacagtaactttgcctggaccggggccactaaataccatctgaatggtagaaattcattaaccaacccgggcgtagccatggccaccaacaaggacgacgaggaccagttctttcccatcaacggagtgctggtttttggcgaaacgggggctgccaacaagacaacgctggaaaacgtgctaatgaccagcgaggaggagatcaaaaccaccaatcccgtggctacagaagaatacggtgtggtctccagcaacctgcaatcgtctacggccggaccccagacacagactgtcaacagccagggggctctgcccggcatggtctggcagaaccgggacgtgtacctgcagggtcccatctgggccaaaattcctcacacggacggcaactttcacccgtctcccctgatgggcggatttggactcaaacacccgcctcctcaaattctcatcaaaaacaccccggtacctgctaatcctccagaggtgtttactcctgccaagtttgcctcatttatcacgcagtacagcaccggccaggtcagcgtggagatcgagtgggaactgcagaaagaaaacagcaaacgctggaatccagagattcagtacacctcaaattatgccaagtctaataatgtggaatttgctgtcaacaacgaaggggtttatactgagcctcgccccattggcacccgttacctcacccgtaacctgtaattgcctgttaatcaataaaccggttaattcgtttcagttgaactttggtctctgcgaagggcgaattc

SEQ ID NO: 4765 - protein, 728 aa, Adeno-associated virus
MAADGYLPDWLEDNLSEGIREWWDLKPGAPKPKANQQKQDDGRGLVLPGYKYLGPFNGLDKGEPVNEADAAALEHDKAYDKQLEQGDNPYLKYNHADAEFQERLQEDTSFGGNLGRAVFQAKKRVLEPLGLVEEGAKTAPGKKRPIESPDSSTGIGKKGQQPAKKKLNFGQTGDSESVPDPQPLGEPPAAPSGLGSGTMAAGGGAPMADNNEGADGVGNASGNWHCDSTWLGDRVITTSTRTWALPTYNNHLYKQISSQSGATNDNHFFGYSTPWGYFDFNRFHCHFSPRDWQRLINNNWGFRPRKLRFKLFNIQVKEVTTNDGVTTIANNLTSTIQVFSDSEYQLPYVLGSAHQGCLPPFPADVFMIPQYGYLTLNNGSQSVGRSSFYCLEYFPSQMLRTGNNFEFSYTFEEVPFHSSYAHSQSLDRLMNPLIDQYLYYLARTQSTTGSTRELQFHQAGPNTMAEQSKNWLPGPCYRQQRLSKNIDSNNNSNFAWTGATKYHLNGRNSLTNPGVAMATNKDDEDQFFPINGVLVFGETGAANKTTLENVLMTSEEEIKTTNPVATEEYGVVSSNLQSSTAGPQTQTVNSQGALPGMVWQNRDVYLQGPIWAKIPHTDGNFHPSPLMGGFGLKHPPPQILIKNTPVPANPPEVFTPAKFASFITQYSTGQVSVEIEWELQKENSKRWNPEIQYTSNYAKSNNVEFAVNNEGVYTEPRPIGTRYLTRNL

SEQ ID NO: 4766 - protein, 733 aa, Adeno-associated virus
MAADGHLPDWLEDNLSEGIREWWDLKPGAPKPKANQQKQDDGRGLVLPGYKYLGPFNGLDKGEPVNAADAAALEHDKAYDQQLKAGDNPYLRYNHADAEFQERLQEDTSFGGNLGRAVFQAKKRVLEPLGLVEEGAKTAPGKKRPIESPDSSTGIGKKGQQPAKKKLNFGQTGDSESVPDPQPIGEPPAGPSGLGSGTMAAGGGAPMADNNEGADGVGSSSGNWHCDSTWLGDRVITTSTRTWALPTYNNHLYKQISNGTSGGSTNDNTYFGYSTPWGYFDFNRFHCHFSPRDWQRLINNSWGFRPKRLNFKLFNIQVKEVTQNEGTKTIANNLTSTIQVFTDSEYQLPYVLGSAHQGCLPPFPADVFMIPQYGYLTLNNGSQAVGRSSFYCLEYFPSQMLRTGNNFEFSYQFEDVPFHSSYAHSQSLDRLMNPLIDQYLYYLSRTQSTGGTAGTQQLLFSQAGPNNMSAQAKNWLPGPCYRQQRVSTTLSQNNNSNFAWTGATKYHLNGRDSLVNPGVAMATHKDDEERFFPSSGVLMFGKQGAGKDNVDYSSVMLTSEEEIKTTNPVATEQYGVVADNLQQQNAAPIVGAVNSQGALPGMVWQNRDVYLQGPIWAKIPHTDGNFHPSPLMGGFGLKHPPPQILIKNTPVPADPPTTFSQAKLASFITQYSTGQVSVEIEWELQKENSKRWNPEIQYTSNYYKSTNVDFAVNTEGTYSEPRPIGTRYLTRNL

SEQ ID NO: 4767 - DNA, 2495 bp, Adeno-associated virus
  source 1..2495: mol_type = other DNA
gaattcgccctttctacggctgcgtcaactagaccaatgagaactttcccttcaacgattgcgtcgacaagatggtgatctggtgggaggagggcaagatgacggccaaggtcgtggagtccgccaaggccattcatcatctgctggggcgggctcccgagattgcttgctcggcctgcgatctggtcaacgtggacctggatgactgtgtttctgagcaataaatgacttaaaccaggtatggctgccgatggttatcttccagattggctcgaggacaacctctctgagggcattcgcgagtggtgggacttgaaacctggagccccgaaacccaaagccaaccagcaaaagcaggacgacggccggggtctggtgcttcctggctacaagtacctcggacccttcaacggactcgacaagggagagccggtcaacgaggcagacgccgcggccctcgagcacgacaaggcctacgacaagcagctcgagcagggggacaacccgtacctcaagtacaaccacgccgacgccgagtttcaggagcgtcttcaagaagatacgtcttttgggggcaacctcgggcgagcagtcttccaggccaagaagcgggttctcgaacctctcggtctggttgaggaaggcgctaagacggctcctggaaagaagagacccatagaatcccccgactcctccacgggcatcggcaagaaaggccagcagcccgctaaaaagaagctcaactttgggcagactggcgactcagagtcagtgcccgaccctcaaccaatcggagaaccccccgcaggcccctctggtctgggatctggtacaatggctgcaggcggtggcgctccaatggcagacaataacgaaggcgccgacggagtgggtaatgcctccggaaattggcattgcgattccacatggctgggcgacagagtcatcaccaccagcacccgcacctgggccctgcccacctacaacaaccacctctacaagcagatatcaagtcagagcggggctaccaacgacaaccacttcttcggctacagcaccccctggggctattttgacttcaacagattccactgccacttctcaccacgtgactggcagcgactcatcaacaacaactggggattccggcccagaaagctgcggttcaagttgttcaacatccaggtcaaggaggtcacgacgaacgacggcgttacgaccatcgctaataaccttaccagcacgattcaggtcttctcggactcggagtaccaactgccgtacgtcctcggctctgcgcaccagggctgcctccctccgttccctgcggacgtgttcatgattcctcagtacggatatctgactctaaacaacggcagtcagtctgtgggacgttcctccttctactgcctggagtactttccttctcagatgctgagaacgggcaataactttgaattcagctacacctttgaggaagtgcctttccacagcagctatgcgcacagccagagcctggaccggctgatgaatcccctcatcgaccagtacctgtactacctggcccggacccagagcactacggggtccacaagggagctgcagttccatcaggctgggcccaacaccatggccgagcaatcaaagaactggctgcccggaccctgttatcggcagcagagactgtcaaaaaacatagacagcaacaacaccagtaactttgcctggaccggggccactaaataccatctgaatggtagaaattcattaaccaacccgggcgtagccatggccaccaacaaggacgacgaggaccagttctttcccatcaacggagtgctggtttttggcaaaacgggggctgccaacaagacaacgctggaaaacgtgctaatgaccagcgaggaggagatcaaaaccaccaatcccgtggctacagaacagtacggtgtggtctccagcaacctgcaatcgtctacggccggaccccagacacagactgtcaacagccagggggctctgcccggcatggtctggcagaaccgggacgtgtacctgcagggtcccatctgggccaaaattcctcacacggacggcaactttcacccgtctcccctgatgggcggatttggactcaaacacccgcctcctcaaattctcatcaaaaacaccccggtacctgctaatcctccagaggtgtttactcctgccaagtttgcctcatttatcacgcagtacagcaccggccaggtcagcgtggagatcgagtgggaactgcagaaagaaaacagcaaacgctggaatccagagattcagtacacctcaaattatgccaagtctaataatgtggaatttgctgtcaacaacgaaggggtttatactgagcctcgccccattggcacccgttacctcacccgtaacctgtaattgcctgttaatcaataaaccggttaattcgtttcagttgaactttggtctctgcgaagggcgaattc

SEQ ID NO: 4768 - protein, 728 aa, Adeno-associated virus
MAADGYLPDWLEDNLSEGIREWWDLKPGAPKPKANQQKQDDGRGLVLPGYKYLGPFNGLDKGEPVNEADAAALEHDKAYDKQLEQGDNPYLKYNHADAEFQERLQEDTSFGGNLGRAVFQAKKRVLEPLGLVEEGAKTAPGKKRPIESPDSSTGIGKKGQQPAKKKLNFGQTGDSESVPDPQPIGEPPAGPSGLGSGTMAAGGGAPMADNNEGADGVGNASGNWHCDSTWLGDRVITTSTRTWALPTYNNHLYKQISSQSGATNDNHFFGYSTPWGYFDFNRFHCHFSPRDWQRLINNNWGFRPRKLRFKLFNIQVKEVTTNDGVTTIANNLTSTIQVFSDSEYQLPYVLGSAHQGCLPPFPADVFMIPQYGYLTLNNGSQSVGRSSFYCLEYFPSQMLRTGNNFEFSYTFEEVPFHSSYAHSQSLDRLMNPLIDQYLYYLARTQSTTGSTRELQFHQAGPNTMAEQSKNWLPGPCYRQQRLSKNIDSNNTSNFAWTGATKYHLNGRNSLTNPGVAMATNKDDEDQFFPINGVLVFGKTGAANKTTLENVLMTSEEEIKTTNPVATEQYGVVSSNLQSSTAGPQTQTVNSQGALPGMVWQNRDVYLQGPIWAKIPHTDGNFHPSPLMGGFGLKHPPPQILIKNTPVPANPPEVFTPAKFASFITQYSTGQVSVEIEWELQKENSKRWNPEIQYTSNYAKSNNVEFAVNNEGVYTEPRPIGTRYLTRNL

SEQ ID NO: 4769 - DNA, 2504 bp, Adeno-associated virus
  source 1..2504: mol_type = other DNA
gaattcgccctttctacggctgcgtcaactggaccaatgagaactttcccttcaacgattgcgtcgacaagatggtgatctggtgggaggagggcaagatgacggccaaggtcgtggagtccgccaaggccattcatcatctgctggggcgggctcccgagattgcttgctcggcctgcgatctggtcaacgtggacctggatgactgtgtttctgagcaataaatgacttaaaccaggtatggctgccgatggttatcttccagattggctcgaggacaacctctctgagggcattcgcgagtggtgggacttgaaacctggagccccgaaacccaaagccaaccagcaaaagcaggacgacggccggggtctggtgcttcctggctacaagtacctcggacccttcaacggactcgacaagggagagccggtcaacgaggcagacgccgcggccctcgagcacgacaaggcctacgacaagcagctcgagcagggggacaacccgtacctcaagtacaaccacgccgacgccgagtttcaggagcgtcttcaagaagatacgtcttttgggggcaacctcgggcgagcagtcttccaggccaagaagcgggttctcgaacctctcggtctggttgaggaaggcgctaagacggctcctggaaagaagagacccatagaatcccccgactcctccacgggcatcggcaagaaaggccagcagcccgctaaaaagaagctcaactttgggcagactggcgactcagagtcagtgcccgaccctcaaccaatcggagaaccccccgcaggcccctctggtctgggatctggtacaatggctgcaggcggtggcgctccaatggcagacaataacgaaggcgccgacggagtgggtaatgcctccggaaattggcattgcgattccacatggctgggcgacagagtcatcaccaccagcacccgcacctgggccctgcccacctacaacaaccacctctacaagcagatatcaagtcagagcggggctaccaacgacaaccacttcttcggctacagcaccccctggggctattttgacttcaacagattccactgccacttctcatcacgtgactggcagcgactcatcaacaacaactggggattccggcccaagagactcaacttcaagctcttcaacatccaggtcaaggaggtcacgcagaatgaaggcaccaagaccatcgccaataaccttaccagcacgattcaggtctttacggactcggaataccggctcccgtacgtcctcggctctgcgcaccagggctgcctgcctccgttcccggcggacgtcttcatgattcctcagtacgggtacctgactctgaacaacggcagtcaggccgtgggccgttcctccttctactgcctggagtactttccttctcaaatgctgagaacgggcaacaactttgagttcagctaccagtttgaggacgtgccttttcacagcagctacgcgcacagccaaagcctggaccggctgatgaaccccctcatcgaccagtacctgtactacctgtctcggactcagtccacgggaggtaccgcaggaactcagcagttgctattttctcaggccgggcctaataacatgtcggctcaggccaaaaactggctacccgggccctgctaccggcagcaacgcgtctccacgacactgtcgcaaaataacaacagcaactttgcttggaccggtgccaccaagtatcatctgaatggcagagactctctggtaaatcccggtgtcgctatggcaacgcacaaggacgacgaagagcgattttttccatccagcggagtcttgatgtttgggaaacagggagctggaaaagacaacgtggactatagcagcgttatgctaaccagtgaggaagaaatcaaaaccaccaacccagtggccacagaacagtacggcgtggtggccgataacctgcaacagcaaaacgccgctcctattgtaggggccgtcaacagtcaaggagccttacctggcatggtctggcagaaccgggacgtgtacctgcagggtcctatctgggccaagattcctcacacggacggcaactttcatccttcgccgctgatgggaggctttggactgaaacacccgcctcctcagatcctgattaagaatacacctgttcccgcggatcctccaactaccttcagtcaagccaagccggcgtcgttcatcacgcagtacagcaccggacaggtcagcgtggaaattgaatgggagctgcagaaagagaacagcaagcgctggaacccagagattcagtatacttccaactactacaaatctacaaatgtggactttgctgtcaatactgagggtacttattcagagcctcgccccattggcacccgttacctcacccgtaacctgtaattgcctgttaatcaataaaccggttaattcgtttcagttgaactttggtctctgcgaagggcgaattc

SEQ ID NO: 4770 - protein, 731 aa, Adeno-associated virus
MAADGYLPDWLEDNLSEGIREWWDLKPGAPKPKANQQKQDDGRGLVLPGYKYLGPFNGLDKGEPVNEADAAALEHDKAYDKQLEQGDNPYLKYNHADAEFQERLQEDTSFGGNLGRAVFQAKKRVLEPLGLVEEGAKTAPGKKRPIESPDSSTGIGKKGQQPAKKKLNFGQTGDSESVPDPQPIGEPPAGPSGLGSGTMAAGGGAPMADNNEGADGVGNASGNWHCDSTWLGDRVITTSTRTWALPTYNNHLYKQISSQSGATNDNHFFGYSTPWGYFDFNRFHCHFSSRDWQRLINNNWGFRPKRLNFKLFNIQVKEVTQNEGTKTIANNLTSTIQVFTDSEYRLPYVLGSAHQGCLPPFPADVFMIPQYGYLTLNNGSQAVGRSSFYCLEYFPSQMLRTGNNFEFSYQFEDVPFHSSYAHSQSLDRLMNPLIDQYLYYLSRTQSTGGTAGTQQLLFSQAGPNNMSAQAKNWLPGPCYRQQRVSTTLSQNNNSNFAWTGATKYHLNGRDSLVNPGVAMATHKDDEERFFPSSGVLMFGKQGAGKDNVDYSSVMLTSEEEIKTTNPVATEQYGVVADNLQQQNAAPIVGAVNSQGALPGMVWQNRDVYLQGPIWAKIPHTDGNFHPSPLMGGFGLKHPPPQILIKNTPVPADPPTTFSQAKPASFITQYSTGQVSVEIEWELQKENSKRWNPEIQYTSNYYKSTNVDFAVNTEGTYSEPRPIGTRYLTRNL

SEQ ID NO: 4771 - protein, 731 aa, Adeno-associated virus
MAADGYLPDWLEDNLSEGIREWWDLKPGAPKPKANQQKQDDGRGLVLPGYKYLGPFNGLDKGEPVNEADAAALEHDKAYDKQLEQGDNPYLKYNHADAEFQERLQEDTSFGGNLGRAVFRAKKRVLEPLGLVEEGAKTAPGKKRPIESPDSSTGIGKKGQQPAKKKLNFGQTGDSESVPDPQPLGEPPAAPSGLGSGTMAAGGGAPMADNNEGADGVGNASGNWHCDSTWLGDRVITTSTRTWALPTYNNHLYKQISSQSGATNDNHFFGYSTPWGYFDFNRFHCHFSPRDWQRLINNNRGFRPRKLRFKLFNIQVKEVTTNDGVTTIANNLTSTIQVFSDSEYQLPYVLGSAHQGCLPPFPADVFMIPQYGYLTLNNGSQSVGRSSFYCLEYFPSQMLRTGNNFEFSYQFEDVPFHSSYAHSQSLDRLMNPLIDQYLYYLSRTQSTGGTAGTQQLLFSQAGPNNMSAQAKNWLPGPCYRQQRVSTTLSQNNNSNFAWTGATKYHLNGRDSLVNPGVAMATHKDDEERFFPSSGVLMFGKQGAGKDNVDYSSVMLTSEEEIKTTNPVATEQYGVVADNLQQQNAAPIVGAVNSQGALPGMAWQNRDVYLQGPIWAKIPHTDGNFHPSPLMGGFGLKHPPPQILIKNTPVPADPPTTFSQAKLASFITQYSTGQVSVEIEWELQKENSKRWNPEIQYTSNYYKSTNVDFAVNTEGTYSEPRPIGTRYLTRNL

SEQ ID NO: 4772 - protein, 738 aa, Adeno-associated virus
MAADGYLPDWLEDNLSEGIREWWDLKPGAPKPKANQQKQDDGRGLVLPGYKYLGPFNGLDKGEPVNEADAAALEHDKAYDKQLEQGDNPYLKYNHADAEFQERLQEDTSFGGNLGRAVFQAKKRVLEPLGLVEEGAKTAPGKKRPVEPSPQRSPDSSTGIGKTGQQPAKKRLNFGQTGDSESVPDPQPIGEPPAGPSGLGSGTMAAGGGAPMADNNEGADGVGSSSGNWHCDSTWLGDRVITTSTRTWALPTYNNHLYKQISNGTSGGSTNDNTYFGYSTPWGYFDFNRFHCHFSPRDWQRLINNNWGFRPKRLNFKLFNIQVKEVTQNEGTKTIANNLTSTIQVFTDSEYQLPYVLGSAHQGCLPPFPADVFMIPQYGYLTLNNGSQAVGRSSFYCLEYFPSQMLRTGNNFEFSYQFEDVPFHSSYAHSQSLDRLMNPLIDQYLYYLSRTQSTGGTAGTQQLLFSQAGPNNMSAQAKNWLPGPCYRQQRVSTTLSQNNNSNFAWTGATKYHLNGRDSLVNPGVAMATHKDDEERFFPSSGVLMFGKQGAGKDNVDYSSVMLTSEEEIKTTNPVATEQYGVVADNLQQQNAAPIVGAVNSQGALPGMVWQNRDVYLQGPIWAKIPHTDGNFHPSPLMGGFGLKHPPPQILIKNTPVPADPPTTFSQAKLASFITQYSTGQVSVEIEWELQKENSKRWNPEIQYTSNYYKSTNVDFAVNTEGTYSEPRPIGTRYLTRNL

SEQ ID NO: 4773 - protein, 735 aa, Adeno-associated virus
MAADGYLPDWLEDNLSEGIREWWDLKPGAPKPKANQQKQDDGRGLVLPGYKYLGPFNGLDKGEPVNEADAAALEHDKAYDKQLEQGDNPYLKYNHADAEFQERLQEDTSFGGNLGRAVFQAKKRVLEPLGLVEEGAKTAPGKKRPVEPSPQRSPDSSTGIGKTGQQPAKKRLNFGQTGDSESVPDPQPIGEPPAGPSGLGSGTMAAGGGAPMADNNEGADGVGSSSGNWHCDSTWLGDRVITTSTRTWALPTYNNHLYKQISNGTSGGSTNDNTYFGYSTPWGYFDFNRFHCHFSPRDWQRLINNNWGFRPRKLRFKLFNIQVKEVTTDDGVTTIANNLTSTIQVFSDSEYQLPYVLGSAHQGCLPPFPADVFMIPQYGYLTLNNGSQSVGRSSFYCLEYFPSQMLRTGNNFEFSYTFEEVPFHSSYAHSQSLDRLMNPLIDQYLYYLARTQSTTGSTRELQFHQAGPNTMAEQSKNWLPGPCYRQQRLSKNIDSNNNSNFAWTGATKYHLNGRNSLTNPGVAMATNKDDEDQFFPINGVLVFGKTGAANKTTLENVLMTSEEEIKTTNPVATEEYGVVSSNLQSSTAGPQTQTVNSQGALPGMVWQNRDVYLQGPIWAKIPHTDGNFHPSPLMDGFGLKHPPPQILIKNTPVPANPPEVFTPAKFASFITQYSTGQVSVEIEWELQKENSKRWNPEIQYTSNYAKSNNVEFAVNNEGVYTEPRPIGTRYLTRNL

SEQ ID NO: 4774 - DNA, 3128 bp, Adeno-associated virus
  source 1..3128: mol_type = other DNA
gaattcgccctttctacggctgcgtcaactggaccaatgagaactttcccttcaacgattgcgtcgacaagatggtgatctggtgggaggagggcaagatgacggccaaggtcgtggagtccgccaaggccattctcggcggcagcaaggtgcgcgtggaccaaaagtgcaagtcttccgcccagatcgatcccacccccgtgatcgtcacttccaacaccaacatgtgcgccgtgattgacgggaacagcaccaccttcgagcaccagcagccgttacaagaccggatgttcaaatttgaactcacccgccgtctggagcacgactttggcaaggtgacaaagcaggaagtcaaagagttcttccgctgggcgcaggatcacgtgaccgaggtggcgcatgagttctacgtcagaaagggtggagccaacaagagacccgcccccgatgacgcggataaaagcgagcccaagcgggcctgcccctcagtcgcggatccatcgacgtcagacgcggaaggagctccggtggactttgccgacaggtaccaaaacaaatgttctcgtcacgcgggcatgcttcagatgctgtttccctgcaagacatgcgagagaatgaatcagaatttcaacatttgcttcacgcacgggaccagagactgttcagaatgtttccccggcgtgtcagaatctcaaccggtcgtcagaaagaggacgtatcggaaactctgtgccattcatcatctgctagggcgggctcccgagattgcttgctcggcctgcgatctggtcaacgtggacctggatgactgtgtttctgagcaataaatgacttaaaccaggtatggctgccgatggttatcttccagattggctcgaggacaacctctctgagggcattcgcgagtggtgggacttgaaacctggagccccgaaacccaaagccaaccagcaaaagcaggacgacggccggggtctggtgcttcctggctacaagtacctcggacccttcaacggactcgacaagggggagcccgtcaacgcggcggacgcagcggccctcgagcacgacaaggcctacgaccagcagctcaaagcgggtgacaatccgtacctgcggtataaccacgccgacgccgagtttcaggagcgtctgcaagaagatacgtcttttgggggcaacctcgggcgagcagtcttccaggccaagaagcgggttctcgaacctctcggtctggttgaggaaggcgctaagacggctcctggaaagaagagaccggtagagccatcaccccagcgttctccagactcctctacgggcatcggcaagacaggccagcagcccgcgaaaaagagactcaactttgggcagactggcgactcagagtcagtgcccgaccctcaaccaatcggagaaccccccgcaggcccctctggtctgggatctggtacaatggctgcaggcggtggcgctccaatggcagacaataacgaaggcgccgacggagtgggtagttcctcaggaaattggcattgcgattccacatggctgggcgacagagtcatcaccaccagcacccgaacctgggccctccccacctacaacaaccacctctacaagcaaatctccaacgggacatcgggaggaagcaccaacgacaacacctacttcggctacagcaccccctgggggtattttgactttaacagattccactgccacttctcaccacgtgactggcagcgactcatcaacaacaactggggattccggcccaagagactcaacttcaagctcttcaacatccaggtcaaggaggtcacgcagaatgaaggcaccaagaccatcgccaataaccttaccagcacgattcaggtctttacggactcggaataccagctcccgtacgtcctcggctctgcgcaccagggctgcctgcctccgttcccggcggacgtcttcatgattcctcagtacgggtacctgactctgaacaacggcagtcaggccgtgggccgttcctccttctactgcctggagtactttccttctcaaatgctgagaacgggcaacaactttgagttcagctaccagtttgaggacgtgccttttcacagcagctacgcgcacagccaaagcctggaccggctgatgaaccccctcatcgaccagtacctgtactacctgtctcggactcagtccacgggaggtaccgcaggaactcagcagttgctattttctcaggccgggcctaataacatgtcggctcaggccaaaaactggctacccgggccctgctaccggcagcaacgcgtctccacgacactgtcgcaaaataacaacagcaactttgcttggaccggtgccaccaagtatcatctgaatggcagagactctctggtaaatcccggtgtcgctatggcaacgcacaaggacgacgaagagcgattttttccatccagcggagtcttgatgtttgggaaacagggagctggaaaagacaacgtggactatagcagcgttatgctaaccagtgaggaagaaatcaaaaccaccaacccagtggccacagaacagtacggcgtggtggccgataacctgcaacagcaaaacgccgctcctattgtaggggccgtcaacagtcaaggagccttacctggcatggtctggcagaaccgggacgtgtacctgcagggtcctatctgggccaagattcctcacacggacggcaactttcatccttcgccgctgatgggaggctttggactgaaacacccgcctcctcagatcctgattaagaatacacctgttcccgcggatcctccaactaccttcagtcaagccaagctggcgtcgttcatcacgcagtacagcaccggacaggtcagcgtggaaattgaatgggagctgcagaaagagaacagcaagcgctggaacccagagattcagtatacttccaactactacaaatctacaaatgtggactttgctgtcaatactgagggtacttattcagagcctcgccccattggcacccgttacctcacccgtaacctgtaattgcctgttaatcaataaaccggctaattcgtttcagttgaactttggtctctgcgaagggcgaattc

SEQ ID NO: 4775 - protein, 738 aa, Adeno-associated virus
MAADGYLPDWLEDNLSEGIREWWDLKPGAPKPKANQQKQDDGRGLVLPGYKYLGPFNGLDKGEPVNAADAAALEHDKAYDQQLKAGDNPYLRYNHADAEFQERLQEDTSFGGNLGRAVFQAKKRVLEPLGLVEEGAKTAPGKKRPVEPSPQRSPDSSTGIGKTGQQPAKKRLNFGQTGDSESVPDPQPIGEPPAGPSGLGSGTMAAGGGAPMADNNEGADGVGSSSGNWHCDSTWLGDRVITTSTRTWALPTYNNHLYKQISNGTSGGSTNDNTYFGYSTPWGYFDFNRFHCHFSPRDWQRLINNNWGFRPKRLNFKLFNIQVKEVTQNEGTKTIANNLTSTIQVFTDSEYQLPYVLGSAHQGCLPPFPADVFMIPQYGYLTLNNGSQAVGRSSFYCLEYFPSQMLRTGNNFEFSYQFEDVPFHSSYAHSQSLDRLMNPLIDQYLYYLSRTQSTGGTAGTQQLLFSQAGPNNMSAQAKNWLPGPCYRQQRVSTTLSQNNNSNFAWTGATKYHLNGRDSLVNPGVAMATHKDDEERFFPSSGVLMFGKQGAGKDNVDYSSVMLTSEEEIKTTNPVATEQYGVVADNLQQQNAAPIVGAVNSQGALPGMVWQNRDVYLQGPIWAKIPHTDGNFHPSPLMGGFGLKHPPPQILIKNTPVPADPPTTFSQAKLASFITQYSTGQVSVEIEWELQKENSKRWNPEIQYTSNYYKSTNVDFAVNTEGTYSEPRPIGTRYLTRNL

SEQ ID NO: 4776 - DNA, 3084 bp, Adeno-associated virus
  source 1..3084: mol_type = other DNA
gaattcgccctttctacggctgcatcaactggaccaatgagaactttcccttcaacgattgcgtcgacaagatggtgatctggtgggaggagggcaagatgacggccaaggtcgtggagtccgccaaggccattctcggcggcagcaaggtgcgcgtggaccaaaagtgcaagtcgtccgcccagatcgaccccacccccgtgatcgtcacctccaacaccaacatgtgcgccgtgattgacgggaacagcaccaccttcgagcaccagcagccgttgcaggaccggatgttcaagttcgaactcacccgccgtctggagcacgactttggcaaggtgaccaagcaggaagtcaaagagttcttccgctgggcgcaggatcacgtgaccgaggtggcgcatgagttctacgtcagaaagggcggagccagcaaaagacccgcccccgatgacgcggatataagcgagcccaagcgggcctgcccctcagtcgcggatccatcgacgtcagacgcggaaggagctccggtggactttgccgacaggtaccaaaacaaatgttctcgtcacgcgggcatgcttcagatgctgtttccctgcaaaacgtgcgagaaaatgaatcagaatttcaacatttgcttcacgcacggggtcagagactgctcagaatgtttccccggtgcatcagaatctcaaccggtcgtcagaaaaaaaacgtatcagaaactgtgtgccattcatcatctgctggggcgggcacccgagattgcttgctcggcctgcgatctggtcaacgtggacctggacgactgtgtttctgagcaataaatgacttaaaccaggtatggctgccgatggttatcttccagattggcttgaggacaacctctctgagggcattcgcgagtggtgggacctgaaacctggagccccgaaacccaaagccaaccagcaaaagcaggacgacggccggggtctggtgcttcctggctacaagtacctcggacccttcaacggactcgacaagggggagcccgtcaacgcggcggacgcagcggccctcgagcacgacaaggcctacgaccagcagctcaaagcgggtgacaatccgtacctgcggtataaccacgccgacgccgagtttcaggagcgtctgcaagaagatacgtcttttgggggcaacctcgggcgagcagtcttccaggccaagaagcgggttctcgaacctctcggtctggttgaggaaggcgctaagacggctcctggaaagaagagaccggtagagccatcacctcagcgttcccccgactcctccacgggcatcggcaagaaaggccaccagcccgcgagaaagagactgaactttgggcagactggcgactcggagtcagtccccgaccctcaaccaatcggagaaccaccagcaggcccctctggtctgggatctggtacaatggctgcaggcggtggcgctccaatggcagacaataacgaaggcgccgacggagtgggtagttcctcaggaaattggcattgcgattccacatggctgggcgacagagtcatcaccaccagcacccgaacctgggccctgcccacctacaacaaccatctctacaagcaaatctccaacgggacatcgggaggaagcactaacgacaacacctactttggctacagcaccccctgggggtattttgacttcaacagattccactgccacttctcaccacgtgactggcagcgactcatcaacaataactggggattccggcccaagagactcaacttcaagctcttcaacatccaggtcaaggaggtcacgcagaatgaaggcaccaagaccatcgccaataaccttaccagcacgattcaggtgtttacggactcggaataccagctcccgtacgtccccggctctgcgcaccagggctgcctccctccgttcccggcggacgtcttcatgattcctcagtacgggtatctgaccctaaacaatggcagtcaggctgtgggccgttcctccttctactgcctggaatacttcccttctcaaatgctgaggacgggcaacaactttgaattcagctacaccttcgaggacgtgcctttccacagcagctacgcgcacagccagagcctggaccggctgatgaaccctctcatcgaccagtacctgtattacttatccagaactcagtccacaggaggaactcaaggtactcagcaattgttattttctcaagccgggcccgcaaacatgtcggctcaggccaagaactggctacctggaccgtgttaccgtcagcaacgagtttccacgacactgtcgcaaaacaacaacagcaattttgcttggaccggtgccaccaagtatcacctgaatggcagagactccctggttaatcccggcgttgccatggctacccacaaggacgacgaggagcgcttcttcccgtcaagcggagttctaatgtttggcaagcagggggctggaaaagacaatgtggactacagcagcgtgatgctcaccagcgaagaagaaattaaaactactaacccagtggctacagagcagtatggtgtggtggcagacaacctgcagcagaccaacggagctcccattgtgggaactgtcaacagccagggggccttacctggtatggtctggcaaaaccgggacgtgtacctgcagggccccatctgggccaaaattcctcacacggacggcaactttcatccttcgccgctgatgggaggctttggactgaaacacccgcctcctcagatcctggtgaaaaacactcctgttcctgcggatcctccgaccaccttcagccaggccaagctggcttcttttatcacgcagtacagcaccggacaggtcagcgtggaaatcgaatgggagctgcagaaagaaaacagcaagcgctggaacccagagattcagtatacttccaactactacaaatctacaaatgtggactttgctgtcaatactgagggtacttattcagagcctcgccccattggcactcgttatctcacccgtaatctgtaattgcttgttaatcaataaaccggt

SEQ ID NO: 4777 - protein, 738 aa, Adeno-associated virus
MAADGYLPDWLEDNLSEGIREWWDLKPGAPKPKANQQKQDDGRGLVLPGYKYLGPFNGLDKGEPVNAADAAALEHDKAYDQQLKAGDNPYLRYNHADAEFQERLQEDTSFGGNLGRAVFQAKKRVLEPLGLVEEGAKTAPGKKRPVEPSPQRSPDSSTGIGKKGHQPARKRLNFGQTGDSESVPDPQPIGEPPAGPSGLGSGTMAAGGGAPMADNNEGADGVGSSSGNWHCDSTWLGDRVITTSTRTWALPTYNNHLYKQISNGTSGGSTNDNTYFGYSTPWGYFDFNRFHCHFSPRDWQRLINNNWGFRPKRLNFKLFNIQVKEVTQNEGTKTIANNLTSTIQVFTDSEYQLPYVPGSAHQGCLPPFPADVFMIPQYGYLTLNNGSQAVGRSSFYCLEYFPSQMLRTGNNFEFSYTFEDVPFHSSYAHSQSLDRLMNPLIDQYLYYLSRTQSTGGTQGTQQLLFSQAGPANMSAQAKNWLPGPCYRQQRVSTTLSQNNNSNFAWTGATKYHLNGRDSLVNPGVAMATHKDDEERFFPSSGVLMFGKQGAGKDNVDYSSVMLTSEEEIKTTNPVATEQYGVVADNLQQTNGAPIVGTVNSQGALPGMVWQNRDVYLQGPIWAKIPHTDGNFHPSPLMGGFGLKHPPPQILVKNTPVPADPPTTFSQAKLASFITQYSTGQVSVEIEWELQKENSKRWNPEIQYTSNYYKSTNVDFAVNTEGTYSEPRPIGTRYLTRNL

SEQ ID NO: 4778 - DNA, 3123 bp, Adeno-associated virus
  source 1..3123: mol_type = other DNA
gaattcgcccttggctgcgtcaactggaccaatgagaactttcccttcaacgattgcgtcgacaagatggtgatctggtgggaggagggcaagatgacggccaaggtcgtggagtccgccaaggccattctcggcggcagcaaggtgcgcgtggaccaaaagtgcaagtcgtccgcccagatcgaccccacccccgtgatcgtcacctccaacaccaacatgtgcgccgtgattgacgggaacagcaccaccttcgagcaccagcagccgttgcaggaccggatgttcaagttcgaactcacccgccgtctggagcacgactttggcaaggtgaccaagcaggaagtcaaagagttcttccgctgggcgcaggatcacgtgaccgaggtggcgcatgagttctacgtcagaaagggcggagccagcaaaagacccgcccccgatgacgcggatataagcgagcccaagcgggcctgcccctcagtcgcggatccatcgacgtcagacgcggaaggagctccggtggactttgccgacaggtaccaaaacaaatgttctcgtcacgcgggcatgctccagatgctgtttccctgcaaaacgtgcgagagaatgaatcagaatttcaacatttgcttcacgcacggggtcagagactgctcagaatgtttccccggtgcatcagaatctcaaccggtcgtcagaaaaaaaacgtatcagaaactgtgtgccattcatcatctgctggggcgggcacccgagattgcttgctcggcctgcgatctggtcaacgtggacctggacgactgtgtttctgagcaataaatgacttaaaccaggtatggctgccgatggttatcttccagattggcttgaggacaacctctctgagggcattcgcgagtggtgggacctgaaacctggagccccgaaacccaaagccaaccagcaaaagcaggacgacggccggggtctggtgcttcctggctacaagtacctcggacccttcaacggactcgacaagggggagcccgtcaacgcggcggacgcagcggccctcgagcacgacaaggcctacgaccagcagctcaaagcgggtgacaatccgtacctgcggtataaccacgccgacgccgagtttcaggagcgtctgcaagaagatacgtcttttgggggcaacctcgggcgagcagtcttccaggccaagaagcgggttctcgaacctctcggtctggttgaggaaggcgctaagacggctcctggaaagaagagaccggtagagccatcacctcagcgttcccccgactcctccacgggcatcggcaagaaaggccaccagcccgcgagaaagagactgaactttgggcagactggcgactcggagtcagtccccgaccctcaaccaatcggagaaccaccagcaggcccctctggtctgggatctggtacaatggctgcaggcggtggcgctccaatggcagacaataacgaaggcgccgacggagtgggtagttcctcaggaaattggcattgcgattccacatggctgggcgacagagtcatcaccaccagcacccgaacctgggccctgcccacctacaacaaccatctctacaagcaaatctccaacgggacatcgggaggaagcactaacgacaacacctactttggctacagcaccccctgggggtattttgacttcaacagattccactgccacttctcaccacgtgactggcagcgactcatcaacaataactggggattccggcccaagagactcaacttcaagctcttcaacatccaggtcaaggaggtcacgcagaatgaaggcaccaagaccatcgccaataaccttaccagcacgattcaggtgtttacggactcggaataccagctcccgtacgtcctcggctctgcgcaccagggctgcctccctccgttcccggcggacgtcttcatgattcctcagtacgggtatctgaccctaaacaatggcagtcaggctgtgggccgttcctccttctactgcctggaatacttcccttctcaaatgctgaggacgggcaacaactttgaattcagctacaccttcgaggacgtgcctttccacagcagctacgcgcacagccagagcctggaccggctgatgaaccctctcatcgaccagtacctgtattacttatccagaactcagtccacaggaggaactcaaggtactcagcaattgttattttctcaagccgggcccgcaaacatgtcggctcaggccaagaactggctacctggaccgtgttaccgtcagcaacgagtttccacgacactgtcgcaaaacaacaacagcaattttgcttggaccggtgccaccaagtatcacctgaatggcagagactccctggttaatcccggcgttgccatggctacccacaaggacgacgaggagcgcttcttcccgtcaagcggagttctaatgtttggcaagcagggggctggaaaagacaatgtggactacagcagcgtgatgctcaccagcgaagaagaaattaaaactactaacccagtggctacagagcagtatggtgtggtggcagacaacctgcagcagaccaacggagctcccattgtgggaactgtcaacagccagggggccttacctggtatggtctggcaaaaccgggacgtgtacctgcagggccccatctgggccaaaattcctcacacggacggcaactttcatccttcgccgctgatgggaggctttggactgaaacacccgcctcctcagatcctggtgaaaaacactcctgttcctgcggatcctccgaccaccttcagccaggccaagctggcttcttttatcacgcagtacagcaccggacaggtcagcgtggaaatcgaatgggagctgcagaaagaaaacagcaagcgctggaacccagagattcagtatacttccaactactacaaatctacaaatgtggactttgctgtcaatactgagggtacttattcagagcctcgccccattggcactcgttatctcacccgtaatctgtaattgcttgttaatcaataaaccggttaattcgtttcagttgaactttggtctctgcgaagggcgaattc

SEQ ID NO: 4779 - protein, 738 aa, Adeno-associated virus
MAADGYLPDWLEDNLSEGIREWWDLKPGAPKPKANQQKQDDGRGLVLPGYKYLGPFNGLDKGEPVNAADAAALEHDKAYDQQLKAGDNPYLRYNHADAEFQERLQEDTSFGGNLGRAVFQAKKRVLEPLGLVEEGAKTAPGKKRPVEPSPQRSPDSSTGIGKKGHQPARKRLNFGQTGDSESVPDPQPIGEPPAGPSGLGSGTMAAGGGAPMADNNEGADGVGSSSGNWHCDSTWLGDRVITTSTRTWALPTYNNHLYKQISNGTSGGSTNDNTYFGYSTPWGYFDFNRFHCHFSPRDWQRLINNNWGFRPKRLNFKLFNIQVKEVTQNEGTKTIANNLTSTIQVFTDSEYQLPYVLGSAHQGCLPPFPADVFMIPQYGYLTLNNGSQAVGRSSFYCLEYFPSQMLRTGNNFEFSYTFEDVPFHSSYAHSQSLDRLMNPLIDQYLYYLSRTQSTGGTQGTQQLLFSQAGPANMSAQAKNWLPGPCYRQQRVSTTLSQNNNSNFAWTGATKYHLNGRDSLVNPGVAMATHKDDEERFFPSSGVLMFGKQGAGKDNVDYSSVMLTSEEEIKTTNPVATEQYGVVADNLQQTNGAPIVGTVNSQGALPGMVWQNRDVYLQGPIWAKIPHTDGNFHPSPLMGGFGLKHPPPQILVKNTPVPADPPTTFSQAKLASFITQYSTGQVSVEIEWELQKENSKRWNPEIQYTSNYYKSTNVDFAVNTEGTYSEPRPIGTRYLTRNL

SEQ ID NO: 4780 - DNA, 3122 bp, Adeno-associated virus
  source 1..3122: mol_type = other DNA
gaattcgccctttctacggctgcgtcaactggaccaatgagaactttcccttcaacgattgcgtcgacaagatggtgatctggtgggaggagggcaagatgacggccaaggtcgtggagtccgccaaggccattctcggcggcagcaaggtgcgtgtggaccaaaagtgcaagtcttccgcccagatcgatcccacccccgtgatcgtcacctccaacaccaacatgtgcgccgtgattgacgggaacagcgccaccttcgagcaccagcagccgttgcaggaccggatgttcaaatttgaactcacccgccgtctggagcatgactttggcaaggtgacgaagcaggaagtcaaagagttcttccgctgggcgcaggatcacgtgaccgaggtggcgcatgagttccacgtcagaaagggtggagccaacaagagacccgcccccgatgacgcggatataagcgagcccaagcgggcctgcccctcagtcgcggatccatcgacgtcagacgcggaaggagctccggtggactttgccgacaggtaccaaaacaaatgttctcgtcacgcgggcatgcttcagatgctgtttccctgcaagacatgcgagagaatgaatcagaatttcaacatttgcttcacgcacgggaccagagactgttcagaatgtttccccggcgtgtcagaatctcaaccggtcgtcagaaagaggacgtatcggaaactctgtgcgattcatcatctgctggggcgggctcccgagattgcttgctcggcctgcgatctggtcaacgtggacctggatgactgtgtttctgagcaataaatgacttaaaccaggtatggctgccgatggttatcttccagattggctcgaggacaacctctctgagggcattcgcgagtggtgggacttgaaacctggagccccgaaacccaaagccaaccagcaaaagcaggacgacggccggggtctggtgcttcctggctacaagtacctcggacccttcaacggactcgacaagggggagcccgtcaacgcggcggacgcagcggccctcgagcacgacaaagcctacgaccagcagctcaaagcgggtgacaatccgtacctgcggtataatcacgccgacgccgagtttcaggagcgtctgcaagaagatacgtcttttgggggcaacctcgggcgagcagtcttccaggccaagaagcgggttctcgaacctctcggtctggttgaggaaggcgctaagacggctcctggaaagaagagactggtagagcagtcgccacaagagccagactcctcctcgggcatcggcaagacaggccagcagcccgctaaaaagagactcaattttggtcagactggcgactcagagtcagtccccgacccacaacctctcggagaacctccagcagccccctcaggtctgggacctaatacaatggcttcaggcggtggcgctccaatggcagacaataacgaaggcgccgacggagtgggtaattcctcgggaaattggcattgcgattccacatggctgggggacagagtcatcaccaccagcacccgaacctgggccctgcccacctacaacaaccacctctacaagcaaatctccaacggcacctcgggaggaagcaccaacgacaacacctattttggctacagcaccccctgggggtattttgacttcaacagattccactgtcacttttcaccacgtgactggcaacgactcatcaacaacaattggggattccggcccaaaagactcaacttcaagctgttcaacatccaggtcaaggaagtcacgacgaacgaaggcaccaagaccatcgccaataatctcaccagcaccgtgcaggtctttacggactcggagtaccagttaccgtacgtgctaggatccgctcaccagggatgtctgcctccgttcccggcggacgtcttcacggttcctcagtacggctatttaactttaaacaatggaagccaagccctgggacgttcctccttctactgtctggagtatttcccatcgcagatgctgagaaccggcaacaactttcagttcagctacaccttcgaggacgtgcctttccacagcagctacgcgcacagccagagcctggacaggctgatgaatcccctcatcgaccagtacctgtactacctggtcagaacgcaaacgactggaactggagggacgcagactctggcattcagccaagcgggtcctagctcaatggccaaccaggctagaaattgggtgcccggaccttgctaccggcagcagcgcgtctccacgacaaccaaccagaacaacaacagcaactttgcctggacgggagctgccaagtttaagctgaacggccgagactctctaatgaatccgggcgtggcaatggcttcccacaaggatgacgacgaccgcttcttcccttcgagcggggtcctgatttttggcaagcaaggagccgggaacgatggagtggattacagccaagtgctgattacagatgaggaagaaatcaaggctaccaaccccgtggccacagaagaatatggagcagtggccatcaacaaccaggccgccaatacgcaggcgcagaccggactcgtgcacaaccagggggtgattcccggcatggtgtggcagaatagagacgtgtacctgcagggtcccatctgggccaaaattcctcacacggacggcaactttcacccgtctcccctgatgggcggctttggactgaagcacccgcctcctcaaattctcatcaagaacacaccggttccagcggacccgccgcttaccttcaaccaggccaagctgaactctttcatcacgcagtacagcaccggacaggtcagcgtggaaatcgagtgggagctgcagaaagaaaacagcaaacgctggaatccagagattcaatacacttccaactactacaaatctacaaatgtggactttgctgtcaacacggaaggagtttatagcgagcctcgccccattggcacccgttacctcacccgcaacctgtaattacatgttaatcaataaaccggttaattcgtttcagttgaactttggtctctgcgaagggcgaattc

SEQ ID NO: 4781 - protein, 736 aa, Adeno-associated virus
MAADGYLPDWLEDNLSEGIREWWDLKPGAPKPKANQQKQDDGRGLVLPGYKYLGPFNGLDKGEPVNAADAAALEHDKAYDQQLKAGDNPYLRYNHADAEFQERLQEDTSFGGNLGRAVFQAKKRVLEPLGLVEEGAKTAPGKKRLVEQSPQEPDSSSGIGKTGQQPAKKRLNFGQTGDSESVPDPQPLGEPPAAPSGLGPNTMASGGGAPMADNNEGADGVGNSSGNWHCDSTWLGDRVITTSTRTWALPTYNNHLYKQISNGTSGGSTNDNTYFGYSTPWGYFDFNRFHCHFSPRDWQRLINNNWGFRPKRLNFKLFNIQVKEVTTNEGTKTIANNLTSTVQVFTDSEYQLPYVLGSAHQGCLPPFPADVFTVPQYGYLTLNNGSQALGRSSFYCLEYFPSQMLRTGNNFQFSYTFEDVPFHSSYAHSQSLDRLMNPLIDQYLYYLVRTQTTGTGGTQTLAFSQAGPSSMANQARNWVPGPCYRQQRVSTTTNQNNNSNFAWTGAAKFKLNGRDSLMNPGVAMASHKDDDDRFFPSSGVLIFGKQGAGNDGVDYSQVLITDEEEIKATNPVATEEYGAVAINNQAANTQAQTGLVHNQGVIPGMVWQNRDVYLQGPIWAKIPHTDGNFHPSPLMGGFGLKHPPPQILIKNTPVPADPPLTFNQAKLNSFITQYSTGQVSVEIEWELQKENSKRWNPEIQYTSNYYKSTNVDFAVNTEGVYSEPRPIGTRYLTRNL

SEQ ID NO: 4782 - DNA, 3117 bp, Adeno-associated virus
  source 1..3117: mol_type = other DNA
gaattcgcccttggctgcgtcaactggaccaatgagaactttcccttcaacgattgcgtcgacaagatggtgatctggtgggaggagggcaagatgacggccaaggtcgtggagtccgccaaggccattctcggcggcagcaaggtgcgtgtggaccaaaagtgcaagtcttccgcccagatcgatcccacccccgtgatcgtcacctccaacaccaacatgtgcgccgtgattgacgggaacagcaccaccttcgagcaccagcagccgttgcaggaccggatgttcaaatttgaactcacccgccgtctggagcatgactttggcaaggtgacgaagcaggaagtcaaagagttcttccgctgggcgcaggatcacgtgaccgaggtggcgcatgagttccacgtcagaaagggtggagccaacaagagacccgcccccgatgacgcggatataagcgagcccaagcgggcctgcccctcagtcgcggatccatcgacgtcagacgcggaaggagctccggtggactttgccgacaggtaccaaaacaaatgttctcgtcacgcgggcatgcttcagatgctgtttccctgcaagacatgcgagagaatgaatcagaatttcaacatttgcttcacgcacgggaccagagactgttcagaatgtttccccggcgtgtcagaatctcaaccggtcgtcagaaagaggacgtatcggaaactctgtgcgattcatcatctgctggggcgggctcccgagattgcttgctcggcctgcgatctggtcaacgtggacctggatgactgtgtttctgagcaataaatgacttaaaccaggtatggctgccgatggttatcttccagattggctcgaggacaacctctctgagggcattcgcgagtggtgggacttgaaacctggagccccgaaacccaaagccaaccagcaaaagcaggacgacggccggggtctggtgcttcctggctacaagtacctcggacccttcaacggactcgacaagggggagcccgtcaacgcggcggacgcagcggccctcgagcacgacaaagcctacgaccagcagctcaaagcgggtgacaatccgtacctgcggtataatcacgccgacgccgagtttcaggagcgtctgcaagaagatacgtcttttgggggcaacctcgggcgagcagtcttccaggccaagaagcgggttctcgaacctctcggtctggttgaggaaggcgctaagacggctcctggaaagaagagaccggtagagcagtcgccacaagagccagactcctcctcgggcatcggcaagacaggccagcagcccgctaaaaagagactcaattttggtcagactggcgactcagagtcagtccccgacccacaacctctcggagaacctccagcagccccctcaggtctgggacctaatacaatggcttcaggcggtggcgctccaatggcagacaataacgaaggcgccgacggagtgggtaattcctcgggaaattggcattgcgattccacatggctgggggacagagtcatcaccaccagcacccgaacctgggccctgcccacctacaacaaccacctctacaagcaaatctccaacggcacctcgggaggaagcaccaacgacaacacctattttggctacagcaccccctgggggtattttgacttcaacagattccactgtcacttttcaccacgtgactggcaacgactcatcaacaacaattggggattccggcccaaaagactcaacttcaagctgttcaacatccaggtcaaggaagtcacgacgaacgaaggcaccaagaccatcgccaataatctcaccagcaccgtgcgggtctttacggactcggagtaccagttaccgtacgtgctaggatccgctcaccagggatgtctgcctccgttcccggcggacgtcttcatggttcctcagtacggctatttaactttaaacaatggaagccaagccctgggacgttcctccttctactgtctggagtatttcccatcgcagatgctgagaaccggcaacaactttcagttcagctacaccttcgaggacgtgcctttccacagcagctacgcgcacagccagagcctggacaggctgatgaatcccctcatcgaccagtacctgtactacctggtcagaacgcaaacgactggaactggagggacgcagactctggcattcagccaagcgggtcctagctcaatggccaaccaggctagaaattgggtgcccggaccttgctaccggcagcagcgcgtctccacgacaaccaaccagagcaacaacagcaactttgcctggacgggagctgccaagtttaagctgaacggccgagactctctaatgaatccgggcgtggcaatggcttcccacaaggatgacgacgaccgcttcttcccttcgagcggggtcctgatttttggcaagcaaggagccgggaacgatggagtggattacagccaagtgctgattacagatgaggaagaaatcaaggctaccaaccccgtggccacagaagaatatggagcagtggccatcaacaaccaggccgccaatacgcaggcgcagaccggactcgtgcacaaccagggggtgattcccggcatggtgtggcagaatagagacgtgtacctgcagggtcccatctgggccaaaattcctcacacggacggcaactttcacccgtctcccctgatgggcggctttggactgaagcacccgcctcctcaaattctcatcaagaacacaccggttccagcggacccgccgcttaccttcaaccaggccaagctgaactctttcatcacgcagtacagcaccggacaggtcagcgtggaaatcgagtgggagctgcagaaagaaaacagcaaacgctggaatccagagattcaatacacttccaactactacaaatctacaaatgtggactttgctgtcaacacggaaggagtttatagcgagcctcgccccattggcacccgttacctcacccgcaacctgtaattacatgttaatcaataaaccggttaattcgtttcagttgaactttggtctctgcgaagggcgaattc

SEQ ID NO: 4783 - protein, 736 aa, Adeno-associated virus
MAADGYLPDWLEDNLSEGIREWWDLKPGAPKPKANQQKQDDGRGLVLPGYKYLGPFNGLDKGEPVNAADAAALEHDKAYDQQLKAGDNPYLRYNHADAEFQERLQEDTSFGGNLGRAVFQAKKRVLEPLGLVEEGAKTAPGKKRPVEQSPQEPDSSSGIGKTGQQPAKKRLNFGQTGDSESVPDPQPLGEPPAAPSGLGPNTMASGGGAPMADNNEGADGVGNSSGNWHCDSTWLGDRVITTSTRTWALPTYNNHLYKQISNGTSGGSTNDNTYFGYSTPWGYFDFNRFHCHFSPRDWQRLINNNWGFRPKRLNFKLFNIQVKEVTTNEGTKTIANNLTSTVRVFTDSEYQLPYVLGSAHQGCLPPFPADVFMVPQYGYLTLNNGSQALGRSSFYCLEYFPSQMLRTGNNFQFSYTFEDVPFHSSYAHSQSLDRLMNPLIDQYLYYLVRTQTTGTGGTQTLAFSQAGPSSMANQARNWVPGPCYRQQRVSTTTNQSNNSNFAWTGAAKFKLNGRDSLMNPGVAMASHKDDDDRFFPSSGVLIFGKQGAGNDGVDYSQVLITDEEEIKATNPVATEEYGAVAINNQAANTQAQTGLVHNQGVIPGMVWQNRDVYLQGPIWAKIPHTDGNFHPSPLMGGFGLKHPPPQILIKNTPVPADPPLTFNQAKLNSFITQYSTGQVSVEIEWELQKENSKRWNPEIQYTSNYYKSTNVDFAVNTEGVYSEPRPIGTRYLTRNL

SEQ ID NO: 4784 - DNA, 3121 bp, Adeno-associated virus
  source 1..3121: mol_type = other DNA
gaattcgcccttctacggctgcgtcaactggaccaatgagaactttcccttcaacgattgcgtcgacaagatggtgatctggtgggaggagggcaagatgacggccaaggtcgtggagtccgccaaggccattctcggcggcagcaaggtgcgtgtggaccaaaagtgcaagtcttccgcccagatcgatcccacccccgtgatcgtcacctccaacaccaacatgtgcgccgtgattgacgggaacagcaccaccttcgagcaccagcagccgttgcaggaccggatgttcaaatttgaactcacccgccgtctggagcatgactttggcaaggtgacgaagcaggaagtcaaagagttcttccgctgggcgcaggatcacgtgaccgaggtggcgcatgagttccacgtcagaaagggtggcgccaacaagagacccgcccccgatgacgcggatataagcgagcccaagcgggcctgcccctcagtcgcggatccatcgacgtcagacgcggaaggagctccggtggactttgccgacaggtaccaaaacaaatgttctcgtcacgcgggcatgcttcagatgctgtttccctgcaagacatgcgagagaatgaatcagaatttcaacatttgcttcacgcacgggaccagagactgttcagaatgtttccccggcgtgtcagaatctcaaccggtcgtcagaaagaggacgtatcggaaactctgtgcgattcatcatctgctggggcgggctcccgagattgcttgctcggcctgcgatctggtcaacgtggacctggatgactgtgtttctgagcaataaatgacttaaaccaggtatggctgccgatggttatcttccagattggctcgaggacaacctctctgagggcattcgcgagtggtgggacttgaaacctggagccccgaaacccaaagccaaccagcaaaagcaggacgacggccggggtctggtgcttcctggctacaagtacctcggacccttcaacggactcgacaagggggagcccgtcaacgcggcggacgcagcggccctcgagcacgacaaagcctacgaccagcagctcaaagcgggtgacaatccgtacctgcggtataatcacgccgacgccgagtttcaggagcgtctgcaagaagatacgtcctttgggggcaacctcgggcgagcagtcttccaggccaagaagcgggttctcgaacctctcggtctggttgaggaaggcgctaagacggctcctggaaagaagagaccggtagagcagtcgccacaagagccagactcctcctcgggcatcggcaagacaggccagcagcccgctaaaaagagactcaattttggtcagactggcgactcagagtcagtccccgacccacaacctctcggagaacctccagcagccccctcaggtctgggacctaatacaatggcttcaggcggtggcgctccaatggcagacaataacgaaggcgccgacggagtgggtaattcctcgggaaattggcattgcgattccacatggctgggggacagagtcatcaccaccagcacccgaacctgggccctgcccacctacaacaaccacctctacaagcaaatctccaacggcacctcgggaggaagcaccaacgacaacacctattttggctacagcaccccctgggggtattttgacttcaacagattccactgtcacttttcaccacgtgactggcaacgactcatcaacaacaattggggattccggcccaaaagactcaacttcaagctgttcaacatccaggtcaaggaagtcacgacgaacgaaggcaccaagaccatcgccaataatctcaccagcaccgtgcaggtctttacggacttggagtaccagttaccgtacgtgctaggatccgctcaccagggatgtctgcctccgttcccggcggacgtcttcatggttcctcagtacggctatttaactttaaacaatggaagccaagccctgggacgttcctccttctactgtctggagtatttcccatcgcagatgccgagaaccggcaacaactttcagttcagctacaccttcgaggacgtgcctttccacagcagctacgcgcacagccagagcctggacaggctgatgaatcccctcatcgaccagtacctgtactacctggtcagaacgcaaacgactggaactggagggacgcagactctggcattcagccaagcgggtcctagctcaatggccaaccaggctagaaattgggtgcccggaccttgctaccggcagcagcgcgtctccacgacaaccaaccagaacaacaacagcaactttgcctggacgggagctgccaagtttaagctgaacggccgagactctctaatgaatccgggcgtggcaatggcttcccacaaggatgacgacgaccgcttcttcccttcgagcggggtcctgatttttggcaagcaaggagccgggaacgatggagtggattacagccaagtgctgattacagatgaggaagaaatcaaggctaccaaccccgtggccacagaagaatatggagcagtggccatcaacaaccaggccgccaatacgcaggcgcagaccggactcgtgcacaaccagggggtgattcccggcatggtgtggcagaatagagacgtgtacctgcagggtcccatctgggccaaaattcctcacacggacggcaactttcacccgtctcccctgatgggcggctttggactgaagcacccgcctcctcaaattctcatcaagaacacaccggttccagcggacccgccgcttaccttcaaccaggccaagctgaactctttcatcacgcagtacagcaccggacaggtcagcgtggaaatcgagtgggagctgcagaaagaaaacagcaaacgctggaatccagagattcaatacacttccaactactacaaatctacaaatgtggactttgctgtcaacacggaaggagtttatagcgagcctcgccccattggcacccgttacctcacccgcaacctgtaattacatgttaatcaataaaccggttaattcgtttcagttgaactttggtctctgcgaagggcgaattc

SEQ ID NO: 4785 - protein, 736 aa, Adeno-associated virus
MAADGYLPDWLEDNLSEGIREWWDLKPGAPKPKANQQKQDDGRGLVLPGYKYLGPFNGLDKGEPVNAADAAALEHDKAYDQQLKAGDNPYLRYNHADAEFQERLQEDTSFGGNLGRAVFQAKKRVLEPLGLVEEGAKTAPGKKRPVEQSPQEPDSSSGIGKTGQQPAKKRLNFGQTGDSESVPDPQPLGEPPAAPSGLGPNTMASGGGAPMADNNEGADGVGNSSGNWHCDSTWLGDRVITTSTRTWALPTYNNHLYKQISNGTSGGSTNDNTYFGYSTPWGYFDFNRFHCHFSPRDWQRLINNNWGFRPKRLNFKLFNIQVKEVTTNEGTKTIANNLTSTVQVFTDLEYQLPYVLGSAHQGCLPPFPADVFMVPQYGYLTLNNGSQALGRSSFYCLEYFPSQMPRTGNNFQFSYTFEDVPFHSSYAHSQSLDRLMNPLIDQYLYYLVRTQTTGTGGTQTLAFSQAGPSSMANQARNWVPGPCYRQQRVSTTTNQNNNSNFAWTGAAKFKLNGRDSLMNPGVAMASHKDDDDRFFPSSGVLIFGKQGAGNDGVDYSQVLITDEEEIKATNPVATEEYGAVAINNQAANTQAQTGLVHNQGVIPGMVWQNRDVYLQGPIWAKIPHTDGNFHPSPLMGGFGLKHPPPQILIKNTPVPADPPLTFNQAKLNSFITQYSTGQVSVEIEWELQKENSKRWNPEIQYTSNYYKSTNVDFAVNTEGVYSEPRPIGTRYLTRNL

SEQ ID NO: 4786 - DNA, 3122 bp, Adeno-associated virus
  source 1..3122: mol_type = other DNA
gaattcgccctttctacggctgcgtcaactggaccaatgagaactttcccttcaacgattgcgtcgacaagatggtgatctggtgggaggagggcaagatgacggccaaggtcgtggagtccgccaaggccattctcggcggcagcaaggtgcgtgtggaccaaaagtgcaagtcttccgcccagatcgatcccacccccgtgatcgtcacctccaacaccaacatgtgcgccgtgattgacgggaacagcaccaccttcgagcaccagcagccgttgcaggaccggatgttcaaatttgaactcacccgccgtctggagcatgactttggcaaggtgacgaagcaggaagtcaaagggttcttccgctgggcgcaggatcacgtgaccgaggtggcgcatgagttccacgtgcgagcccaagcgggcctgcccctcagtcgcggatccatcgacgtcagaccagaaagggtggagccaacaagagacccgcccccgatgacgcggatataagcggaaggagctccggtggactttgccgacaggtaccaaaacaaatgttctcgtcacgcgggcatgcttcagatgctgtttccctgcaagacatgcgagagaatgaatcagaatttcaacatttgcttcacgcacgggaccagagactgttcagaatgtttccccggcgtgtcagaatctcaaccggtcgtcagaaagaggacgtatcggaaactctgtgcgattcatcatctgctggggcgggctcccgagattgcttgctcggcctgcgatctggtcaacgtggacctggatgactgtgtttctgagcaataaatgacttaaaccaggtatggctgccgatggttatcttccagattggctcgaggacaacctctctgagggcattcgcgagtggtgggacttgaaacctggagccccgaaacccaaagccaaccagcaaaagcaggacgacggccggggtctggtgcttcctggctacaagtacctcggacccttcaacggactcgacaagggggagcccgtcaacgcggcggacgcagcggccctcgagcacgacaaagcctacgaccagcagctcaaagcgggtgacaatccgtacctgcggtataatcacgccgacgccgagtttcaggagcgtctgcaagaagatacgtcttttgggggcaacctcgggcgagcagtcttccaggccaagaagcgggttctcgaacctctcggtctggttgaggaaggcgctaagacggctcctggaaagaagagaccggtagagcagtcgccacaagagccagactcctcctcgggcatcggcaagacaggccagcagcccgctaaaaagagactcaattttggtcagactggcgactcagagtcagtccccgacccacaacctctcggagaacctccagcagccccctcaggtctgggacctaatacaatggcttcaggcggtggcgctccaatggcagacaataacgaaggcgccgacggagtgggtaattcctcgggaaattggcattgcgattccacatggctgggggacagagtcatcaccaccagcacccgaacctgggccctgcccacctacaacaaccacctctacaagcaaatctccaacggcacctcgggaggaagcaccaacgacaacacctattttggctacagcaccccctgggggtattttgacttcaacagattccactgtcacttttcaccacgtgactggcaacgactcatcaacaacaattggggattccggcccaaaagactcaacttcaagctgttcaacatccaggtcaaggaagtcacgacgaacgaaggcaccaagaccatcgccaataatctcaccagcaccgtgcaggtctttacggactcggagtaccagttaccgtacgtgctaggatccgctcaccagggatgtctgcctccgttcccggcggacgtcttcatggttcctcagtacggctatttaactttaaacaatggaagccaagccctgggacgttcctccttctactgtctggagtatttcccatcgcagatgctgagaaccggcaacaactttcagttcagctacaccttcgaggacgtgcctttccacagcagctacgcgcacagccagagcctggacaggctgatgaatcccctcatcgaccagtacctgtactacctggtcagaacgcaaacgactggaactggagggacgcagactctggcattcagccaagcgggtcctagctcaatggccaaccaggctagaaattgggtgcccggaccttgctaccggcagcagcgcgtctccacgacaaccaaccagaacaacaacagcaactttgcctggacgggagctgccaagtttaagctgaacggccgagactctctaatgaatccgggcgtggcaatggcttcccacaaggatgacgacgaccgcttcttcccttcgagcggggtcctgatttttggcaagcaaggagccgggaacgatggagtggattacagccaagtgctgattacagatgaggaagaaatcaaggctaccaaccccgtggccacagaagaatatggagcagtggccatcaacaaccaggccgccaatacgcaggcgcagaccggactcgtgcacaaccagggggtgattcccggcatggtgtggcagaatagagacgtgtacctgcagggtcccatctgggccaaaattcctcacacggacggcaactttcacccgtctcccctgatgggcggctttggactgaagcacccgcctcctcaaattctcatcaagaacacaccggttccagcggacccgccgcttaccttcaaccaggccaagctgaactctttcatcacgcagtacagcaccggacaggtcagcgtggaaatcgagtgggagctgcagaaagaaaacagcaaacgctggaatccagagattcaatacacttccaactactacaaatctacaaatgtggactttgctgtcaacacggagggggtttatagcgagcctcgccccattggcacccgttacctcacccgcaacctgtaattacatgttaatcaataaaccggttaattcgtttcagttgaactttggtctctgcgaagggcgaattc

SEQ ID NO: 4787 - protein, 736 aa, Adeno-associated virus
MAADGYLPDWLEDNLSEGIREWWDLKPGAPKPKANQQKQDDGRGLVLPGYKYLGPFNGLDKGEPVNAADAAALEHDKAYDQQLKAGDNPYLRYNHADAEFQERLQEDTSFGGNLGRAVFQAKKRVLEPLGLVEEGAKTAPGKKRPVEQSPQEPDSSSGIGKTGQQPAKKRLNFGQTGDSESVPDPQPLGEPPAAPSGLGPNTMASGGGAPMADNNEGADGVGNSSGNWHCDSTWLGDRVITTSTRTWALPTYNNHLYKQISNGTSGGSTNDNTYFGYSTPWGYFDFNRFHCHFSPRDWQRLINNNWGFRPKRLNFKLFNIQVKEVTTNEGTKTIANNLTSTVQVFTDSEYQLPYVLGSAHQGCLPPFPADVFMVPQYGYLTLNNGSQALGRSSFYCLEYFPSQMLRTGNNFQFSYTFEDVPFHSSYAHSQSLDRLMNPLIDQYLYYLVRTQTTGTGGTQTLAFSQAGPSSMANQARNWVPGPCYRQQRVSTTTNQNNNSNFAWTGAAKFKLNGRDSLMNPGVAMASHKDDDDRFFPSSGVLIFGKQGAGNDGVDYSQVLITDEEEIKATNPVATEEYGAVAINNQAANTQAQTGLVHNQGVIPGMVWQNRDVYLQGPIWAKIPHTDGNFHPSPLMGGFGLKHPPPQILIKNTPVPADPPLTFNQAKLNSFITQYSTGQVSVEIEWELQKENSKRWNPEIQYTSNYYKSTNVDFAVNTEGVYSEPRPIGTRYLTRNL

SEQ ID NO: 4788 - DNA, 2370 bp, Adeno-associated virus
  source 1..2370: mol_type = other DNA
gaattcgccctttctacggctgcgtcaactggaccaatgagaactttcccttcaacgattgcgtcgacaagatggtgatctggtgggaggagggcaagatgacggccaaggtcgtggagtccgccaaggccattctcggcggcagcaaggtgcgcgtggaccaaaagtgcaagtcgtccgcccagatcgaccccacccccgtgatcgtcacctccaacaccaacatgtgcgccgtgattgacgggaacagcaccaccttcgagcaccagcagccgttgcaggaccggatgttcaagttcgaactcacccgccgtctggagcacgactttggcaaggtgaccaagcaggaagtcaaagagttcttccgctgggcgcaggatcacgtgaccgaggtggcgcatgagttctacgtcagaaagggcggagccagcaaaagacccgcccccgatgacgcggatataagcgagcccaagcgggcctgcccctcagtcgcggatccatcgacgtcagacgcggaaggagctccggtggactttgccgacaggtaccaaaacaaatgttctcgtcacgcgggcatgcttcagacgctgtttccctgcaaaacgtgcgagagaatgaatcagaatttcaacatttgcttcacgcacggggtcagagactgctcagaatgtttccccggtgcatcagaatctcaaccggtcgtcagaaaaaaaacgtatcagaaactgtgtgccattcatcatctgctggggcgggcacccgagattgcttgctcggcctgcgatctggtcaacgtggacctggacgactgtgtttctgagcaataaatgacttaaaccaggtatggctgccgatggttatcttccagattggcttgaggacaacctctctgagggcattcgcgagtggtgggacctgaaacctggagccccgaaacccaaagccaaccagcaaaagcaggacgacggccggggtctggtgcttcctggctacaagtacctcggacccttcaacggactcgacaagggggagcccgtcaacgcggcggacgcagcggccctcgagcacgacaaggcctacgaccagcagctcaaagcgggtgacaatccgtacctgcggtataaccacgccgacgccgagtttcaggagcgtctgcaagaagatacgtcttttgggggcaacctcgggcgagcagtcttccaggccaagaagcgggttctcgaacctctcggtctggttgaggaaggcgctaagacggctcctggaaagaagagaccggtagagccatcacctcagcgttcccccgactcctccacgggcatcggcaagaaaggccaccagcccgcgagaaagagactgaactttgggcagactggcgactcggagtcagtccccgaccctcaaccaatcggagaaccaccagcaggcccctctggtctgggatctggtacaatggctgcaggcggtggcgctccaatggcagacaataacgaaggcgccgacggagtgggtagttcctcaggaaattggcattgcgattccacatggctgggcgacagagtcatcaccaccagcacccgaacctgggccctgcccacctacaacaaccatctctacaagcaaatctccaacgggacatcgggaggaagcactaacgacaacacctactttggctacagcaccccctgggggtattttgacttcaacagattccactgccacttctcaccacgtgactggcagcgactcatcaacaataactggggattccggcccaagagactcaacttcaagctcttcaacatccaggtcaaggaggtcacgcagaatgaaggcaccaagaccatcgccaataaccttaccagcacgattcaggtgtttacggactcggaataccagctcccgtacgtcctcggctctgcgcaccagggctgcctccctccgttcccggcggacgtcttcatgattcctcagtacgggtatctgaccctaaacaatggcagtcaggctgtgggccgttcctccttctactgcctggaatacttcccttctcaaatgctgaggacgggcaacaactttgaattcagctacaccttcgaggacgtgcctttccacagcagctacgcgcacagccagagcctggaccggctgatgaaccctctcatcgaccagtacctgtattacttatccagaactcagtccacaggaggaactcaaggtactcagcaattgttattttctcaagccgggcccgcaaacatgtyggctcaggccaagaactggctacctggaccgtgttaccgtcagcaacgagtttccacgacactgtcgcaaaacaacaacagcaattttgctggaccggtgccacca

SEQ ID NO: 4789 - protein, 738 aa, Adeno-associated virus; identical to SEQ ID NO: 4779

SEQ ID NO: 4790 - DNA, 2205 bp, Adeno-associated virus
  source 1..2205: mol_type = other DNA
atgactgacggttaccttccagattggctagaggacaacctctctgaaggcgttcgagagtggtgggcgctgcaacctggagcccctaaacccaaggcaaatcaacaacatcaggacaacgctcggggtcttgtgcttccgggttacaaatacctcggacccggcaacggactcgacaagggggaacccgtcaacgcagcggacgcggcagccctcgagcacgacaaggcctacgaccagcagctcaaggccggtgacaacccctacctcaagtacaaccacgccgacgcggagttccagcagcggcttcagggcgacacatcgtttgggggcaacctcggcagagcagtcttccaggccaaaaagagggttcttgaacctcttggtctggttgagcaagcgggtgagacggctcctggaaagaagagaccgttgattgaatccccccagcagcccgactcctccacgggtatcggcaaaaaaggcaagcagccggctaaaaagaagctcgttttcgaagacgaaactggagcaggcgacggaccccctgagggatcaacttccggagccatgtctgatgacagtgagatgcgtgcagcagctggcggagctgcagtcgagggcggacaaggtgccgatggagtgggtaatgcctcgggtgattggcattgcgattccacctggtctgagggccacgtcacgaccaccagcaccagaacctgggtcttgcccacctacaacaaccacctctacaagcgactcggagagagcctgcagtccaacacctacaacggattctccaccccctggggatactttgacttcaaccgcttccactgccacttctcaccacgtgactggcagcgactcatcaacaacaactggggcatgcgacccaaagccatgcgggtcaaaatcttcaacatccaggtcaaggaggtcacgacgtcgaacggcgagacaacggtggctaataaccttaccagcacggttcagatctttgcggactcgtcgtacgaactgccgtacgtgatggatgcgggtcaagagggcagcctgcctccttttcccaacgacgtctttatggtgccccagtacggctactgtggactggtgaccggcaacacttcgcagcaacagactgacagaaatgccttctactgcctggagtactttccttcgcagatgctgcggactggcaacaactttgaaattacgtacagttttgagaaggtgcctttccactcgatgtacgcgcacagccagagcctggaccggctgatgaaccctctcatcgaccagtacctgtggggactgcaatcgaccaccaccggaaccaccctgaatgccgggactgccaccaccaactttaccaagctgcggcctaccaacttttccaactttaaaaagaactggctgcccgggccttcaatcaagcagcagggcttctcaaagactgccaatcaaaactacaagatccctgccaccgggtcagacagtctcatcaaatacgagacgcacagcactctggacggaagatggagtgccctgacccccggacctccaatggccacggctggacctgcggacagcaagttcagcaacagccagctcatctttgcggggcctaaacagaacggcaacacggccaccgtacccgggactctgatcttcacctctgaggaggagctggcagccaccaacgccaccgatacggacatgtggggcaacctacctggcggtgaccagagcaacagcaacctgccgaccgtggacagactgacagccttgggagccgtgcctggaatggtctggcaaaacagagacatttactaccagggtcccatttgggccaagattcctcataccgatggacactttcacccctcaccgctgattggtgggtttgggctgaaacacccgcctcctcaaatttttatcaagaacaccccggtacctgcgaatcctgcaacgaccttcagctctactccggtaaactccttcattactcagtacagcactggccaggtgtcggtgcagattgactgggagatccagaaggagcggtccaaacgctggaaccccgaggtccagtttacctccaactacggacagcaaaactctctgttgtgggctcccgatgcggctgggaaatacactgagcctagggctatcggtacccgctacctcacccaccacctgtaa

SEQ ID NO: 4791 - protein, 734 aa, Adeno-associated virus
MTDGYLPDWLEDNLSEGVREWWALQPGAPKPKANQQHQDNARGLVLPGYKYLGPGNGLDKGEPVNAADAAALEHDKAYDQQLKAGDNPYLKYNHADAEFQQRLQGDTSFGGNLGRAVFQAKKRVLEPLGLVEQAGETAPGKKRPLIESPQQPDSSTGIGKKGKQPAKKKLVFEDETGAGDGPPEGSTSGAMSDDSEMRAAAGGAAVEGGQGADGVGNASGDWHCDSTWSEGHVTTTSTRTWVLPTYNNHLYKRLGESLQSNTYNGFSTPWGYFDFNRFHCHFSPRDWQRLINNNWGMRPKAMRVKIFNIQVKEVTTSNGETTVANNLTSTVQIFADSSYELPYVMDAGQEGSLPPFPNDVFMVPQYGYCGLVTGNTSQQQTDRNAFYCLEYFPSQMLRTGNNFEITYSFEKVPFHSMYAHSQSLDRLMNPLIDQYLWGLQSTTTGTTLNAGTATTNFTKLRPTNFSNFKKNWLPGPSIKQQGFSKTANQNYKIPATGSDSLIKYETHSTLDGRWSALTPGPPMATAGPADSKFSNSQLIFAGPKQNGNTATVPGTLIFTSEEELAATNATDTDMWGNLPGGDQSNSNLPTVDRLTALGAVPGMVWQNRDIYYQGPIWAKIPHTDGHFHPSPLIGGFGLKHPPPQIFIKNTPVPANPATTFSSTPVNSFITQYSTGQVSVQIDWEIQKERSKRWNPEVQFTSNYGQQNSLLWAPDAAGKYTEPRAIGTRYLTHHL

SEQ ID NO: 4792 - DNA, 3128 bp, Adeno-associated virus
  source 1..3128: mol_type = other DNA
gaattcgccctttctacggctgcgtcaactggaccaatgagaactttcccttcaacgattgcgtcgacaagatgttgatctggtgggaggagggcaagatgacggccaaggtcgtggagtccgccaaggccattctcggcggcagcaaagtgcgcgtggaccaaaagtgcaagccgtccgcccagatcgaccccacccccgtgatcgtcacctccaacaccaacatgtgcgccgtgattgacgggaacagcaccaccttcgagcaccagcagccgttgcgggaccggatgttcaagtttgaactcacccgccgtctggagcacgactttggcaaggtgacaaagcaggaagtcagagagttcttccgctgggcgcaggatcacgtgaccgaggtggcgcacgagttctacgtcagaaagggtggagccaacaagagacccgcccccgatgacgcggataaaagcgagcccaagcgggcctgcccctcagtcgcggatccatcgacgtcagacgcggaaggagctccggtggactttgccgacaggtaccaaaacaaatgttctcgtcacgcgggcatgcttcagatgctgtttccctgcaaaacatgcgagagaatgaatcagaatttcaacatttgcttcacgcacgggaccagagactgttcagaatgtttccccggcgtgtcagaatctcaaccggtcgtcagaaaaaagacgtatcggaaactctgtgcgattcatcatctgctggggcgggcacccgagattgcttgctcggcctgcgatctggtcaacgtggacctagatgactgtgtttctgagcaataaatgacttaaaccaggtatggctgccgatggttatcttccagattggctcgaggacaacctctctgagggcattcgcgagtggtgggacttgaaacctggagccccgaaacccaaagccaaccagcaaaagcaggacgacggccggggtctggtgcttcctggctacaagtacctcggacccttcaacggactcgacaagggggagcccgtcaacgcggcggacgcagcggccctcgagcacgacaaggcctacgaccagcagctcaaagcgggtgacaatccgtacctgcggtataaccacgccgacgccgagtttcaggagcgtctgcaagaagatacgtcttttgggggcaacctcgggcgagcagtcttccaggccaagaagcgggttctcgaacctctcggtctggttgaggaaggcgctaagacggctcctggaaagaagagaccggtagagccatcaccccagcgttctccagactcctctacgggcatcggcaagaaaggccagcagcccgcgaaaaagagactcaactttgggcagactggcgactcagagtcagtgcccgaccctcaaccaatcggagaaccccccgcaggcccctctggtctgggatctggtacaatggctgcaggcggtggcgctccaatggcagacaataacgaaggcgccgacggagtgggtagttcctcaggaaattggcattgcgattccacatggctgggcgacagagtcatcaccaccagcacccgaacctgggccctccccacctacaacaaccacctctacaagcaaatctccaacgggacttcgggaggaagcaccaacgacaacacctacttcggctacagcaccccctgggggtattttgactttaacagattccactgccacttctcaccacgtgactggcagcgactcatcaacaacaactggggattccggcccaagagactcaacttcaagctcttcaacatccaggtcaaggaggtcacgcagaatgaaggcaccaagaccatcgccaataaccttaccagcacgattcaggtctttacggactcggaataccagctcccgtacgtcctcggctctgcgcaccagggctgcctgcctccgttcccggcggacgtcttcatgattcctcagtacgggtacctgactctgaacaatggcagtcaggccgtgggccgttcctccttctactgcctggagtactttccttctcaaatgctgagaacgggcaacaactttgagttcagctaccagtttgaggacgtgccttttcacagcagctacgcgcacagccaaagcctggaccggctgatgaaccccctcatcgaccagtacctgtactacctgtctcggactcagtccacgggaggtaccgcaggaactcagcagttgctattttctcaggccgggcctaataacatgtcggctcaggccaaaaactggctacccgggccctgctaccggcagcaacgcgtctccacgacactgtcgcaaaataacaacagcaactgtaaatcccggtgtcgctatggcaacccacaaggacgacgaagagcgattttgcctggaccggtgccaccaagtatcatctgaatggcagagactctctgttttccgtccagcggagtcttaatgtttgggaaacagggagctggaaaagacaacgtggactatagcagcgttatgctaaccagtgaggaagaaattaaaaccaccaacccagtggccacggaacagtacggcgtggtggccgataacctgcaacagcaaaacgccgctcctattgtaggggccgtcaacagtcaaggagccttacctggcatggtctggcagaaccgggacgtgtacctgcagggtcctatctgggccaagattcctcacacggacggaaactttcatccctcgccgctgatgggaggctttggactgaaacacccgcctcctcagatcctgattaagaatacacctgttcccgcggatcctccaactaccttcagtcaagctaagctggcgtcgttcatcacgcagtacagcaccggacaggtcagcgtggaaattgaatgggagctgcagaaagaaaacagcaaacgctggaacccagagattcaatacacttccaactactacaaatctacaaatgtggacttcgctgttaacacagatggcacttattctgagcctcgccccattggcacccgttacctcacccgtaatctgtaattgctcgttaatcaataaaccggttgattcgtttcagttgaactttggtctctgcgaagggcgaattc

SEQ ID NO: 4793 - protein, 738 aa, Adeno-associated virus
MAADGYLPDWLEDNLSEGIREWWDLKPGAPKPKANQQKQDDGRGLVLPGYKYLGPFNGLDKGEPVNAADAAALEHDKAYDQQLKAGDNPYLRYNHADAEFQERLQEDTSFGGNLGRAVFQAKKRVLEPLGLVEEGAKTAPGKKRPVEPSPQRSPDSSTGIGKKGQQPAKKRLNFGQTGDSESVPDPQPIGEPPAGPSGLGSGTMAAGGGAPMADNNEGADGVGSSSGNWHCDSTWLGDRVITTSTRTWALPTYNNHLYKQISNGTSGGSTNDNTYFGYSTPWGYFDFNRFHCHFSPRDWQRLINNNWGFRPKRLNFKLFNIQVKEVTQNEGTKTIANNLTSTIQVFTDSEYQLPYVLGSAHQGCLPPFPADVFMIPQYGYLTLNNGSQAVGRSSFYCLEYFPSQMLRTGNNFEFSYQFEDVPFHSSYAHSQSLDRLMNPLIDQYLYYLSRTQSTGGTAGTQQLLFSQAGPNNMSAQAKNWLPGPCYRQQRVSTTLSQNNNSNFAWTGATKYHLNGRDSLVNPGVAMATHKDDEERFFPSSGVLMFGKQGAGKDNVDYSSVMLTSEEEIKTTNPVATEQYGVVADNLQQQNAAPIVGAVNSQGALPGMVWQNRDVYLQGPIWAKIPHTDGNFHPSPLMGGFGLKHPPPQILIKNTPVPADPPTTFSQAKLASFITQYSTGQVSVEIEWELQKENSKRWNPEIQYTSNYYKSTNVDFAVNTDGTYSEPRPIGTRYLTRNL

SEQ ID NO: 4794 - DNA, 3129 bp, Adeno-associated virus
  source 1..3129: mol_type = other DNA
gaattcgccctttctacggctgcgtcaactggaccaatgagaactttcccttcaacgattgcgtcgacaagatggtgatctggtgggaggagggcaagatgacggccaaggtcgtggagtccgccaaggccattctcggcggcagcaaagtgcgcgtggaccaaaagtgcaagtcgtccgcccagatcgaccccacccccgtgatcgtcacctccaacaccaacatgtgcgccgtgattgacgggaacagcaccaccttcgagcaccagcagccgttgcaggaccggatgttcaagtttgaactcacccgccgtctggagcacgactttggcaaggtgacaaagcaggaagtcagagagttcttccgctgggcgcaggatcacgtgaccgaggtggcgcacgagttctacgtcagaaagggtggagccaacaagagacccgcccccgatgacgcggataaaagcgagcccaagcgggcctgcccctcagtcgcggatccatcgacgtcagacgcggaaggagctccggtggactttgccgacaggtaccaaaacaaatgttctcgtcacgcgggcatgcttcagatgctgtttccctgcaaaacatgcgagagaatgaatcagaatttcaacatttgcttcacgcacgggaccagagactgttcagaatgtttccccggcgtgtcagaatctcaaccggtcgtcagaaaaaagacgtatcggaaactctgtgcgattcatcatctgctgggggcgggcacccgagattgcttgctcggcctgcgatctggtcaacgtggacctagatgactgtgtttctgagcaataaatgacttaaaccaggtatggctgccgatggttatcttccagattggctcgaggacaacctctctgagggcattcgcgagtggtgggacttgaaacctggagccccgaaacccaaagccaaccagcaaaagcaggacgacggccggggtctggtgcttcctggctacaagtacctcggacccttcaacggactcgacaagggggagcccgtcaacgcggcggacgcagcggccctcgagcacgacaaggcctacgaccagcagctcaaagcgggtgacaatccgtacctgcggtataaccacgccgacgccgagtttcaggagcgtctgcaagaagatacgtcttttgggggcaacctcgggcgagcagtcttccaggccaagaagcgggttctcgaacctctcggtctggttgaggaaggcgctaagacggctcctggaaagaagagaccggtagagccatcaccccagcgttctccagactcctctacgggcatcggcaagaaaggccagcagcccgcgaaaaagagactcaactttgggcagactggcgactcagagtcagtgcccgaccctcaaccaatcggagaaccccccgcaggcccctctggtctgggatctggtacaatggctgcaggcggtggcgctccaatggcagacaataacgaaggcgccgacggagtgggtagttcctcaggaaattggcattgcgattccacatggctgggcgacagagtcatcaccaccagcacccgaacctgggccctccccacctacaacaaccacctctacaagcaaatctccaacgggacttcgggaggaagcaccaacgacaacacctacttcggctacagcaccccctgggggtattttgactttaacagattccactgccacttctcaccacgtgactggcagcgactcatcaacaacaactggggattccggcccaagagactcaacttcaagctcttcaacatccaggtcaaggaggtcacgcagaatgaaggcaccaagaccatcgccaataaccttaccagcacgattcaggtctttacggactcggaataccagctcccgtacgtcctcggctctgcgcaccagggctgcctgcctccgttcccggcggacgtcttcatgattcctcagtacgggtacctgactctgaacaatggcagtcaggccgtgggccgttcctccttctactgcctggagtactttccttctcaaatgctgagaacgggcaacaactttgagttcagctaccagtttgaggacgtgccttttcacagcagctacgcgcacagccaaagcctggaccggctgatgaaccccctcatcgaccagtacctgtactacctgtctcggactcagtccacgggaggtaccgcaggaactcagcagttgctattttctcaggccgggcctaataacatgtcggctcaggccaaaaactggctacccgggccctgctaccggcagcaacgcgtctccacgacactgtcgcaaaataacaacagcaactttgcctggaccggtgccaccaagtatcatctgaatggcagagactctctggtaaatcccggtgtcgctatggcaacccacaaggacgacgaagagcgattttttccgtccagcggagtcttaatgtttgggaaacagggagctggaaaagacaacgtggactatagcagcgttatgctaaccagtgaggaagaaattaaaaccaccaacccagtggccacagaacagtacggcgtggtggccgataacctgcaacagcaaaacgccgctcctattgtaggggccgtcaacagtcaaggagccttacctggcatggtctggcagaaccgggacgtgtacctgcagggtcctatctgggccaagattcctcacacggacggaaactttcatccctcgccgctgatgggaggctttggactgaaacacccgcctcctcagatcctgattaagaatacacctgttcccgcggatcctccaactaccttcagtcaagctaagctggcgtcgttcatcacgcagtacagcaccggacaggtcagcgtggaaattgaatgggagctgcagaaagaaaacagcaaacgctggaacccagagattcaatacacttccaactactacaaatctacaaatgtggactttgctgttaacacagatggcacttattctgagcctcgccccatcggcacccgttacctcacccgtaatctgtaattgcttgttaatcaataaaccggttgattcgtttcagttgaactttggtctctgcgaagggcgaattc

SEQ ID NO: 4795 - DNA, 3128 bp, Adeno-associated virus
  source 1..3128: mol_type = other DNA
gaattcgccctttctacggctgcgtcaactggaccaatgagaactttcccttcaacgattgcgtcgacaagatggtgatctggtgggaggagggcaagatgacggccaaggtcgtggagtccgccaaggccattctcggcggcagcaaagtgcgcgtggaccaaaagtgcaagtcgtccgcccagatcgaccccacccccgtgatcgtcacctccaacaccaacatgtgcgccgtgattgacgggaacagcaccaccttcgagcaccagcagccgttgcaggaccggatgttcaagtttgaactcacccgccgtctggagcacgactttggcaaggtgacaaagcaggaagtcagagagttcttccgctgggcgcaggatcacgtgaccgaggtggcgcacgagttctacgtcagaaagggtggagccaacaagagacccgcccccgatgacgcggataaaagcgagcccaagcgggcctgcccctcagtcgcggatccatcgacgtcagacgcggaaggagctccggtggactttgccgacaggtaccaaaacaaatgttctcgtcacgcgggcatgcttcagatgctgtttccctgcaaaacatgcgagagaatgaatcagaatttcaacatttgcttcacgcacgggaccagagactgttcagaatgtttccccggcgtgtcagaatctcaaccggttgtcagaaaaaagacgtatcggaaactctgtgcgattcatcatctgctggggcgggcacccgagattgcttgctcggcctgcgatctggtcaacgtggacctagatgactgtgtttctgagcaataaatgacttaaaccaggtatggctgccgatggttatcttccagattggctcgaggacaacctctctgagggcattcgcgagtggtgggacttgaaacctggagccccgaaacccaaagccaaccagcaaaagcaggacgacggccggggtctggtgcttcctggctacaagtacctcggacccttcaacggactcgacaagggggagcccgtcaacgcggcggacgcagcggccctcgagcacgacaaggcctacgaccagcagctcaaagcgggtgacaatccgtacctgcggtataaccacgccgacgccgagtttcaggagcgtctgcaagaagatacgtcttttgggggcaacctcgggcgagcagtcttccaggccaagaagcgggttctcgaacctctcggtctggttgaggaaggcgctaagacggctcctggaaagaagagaccggtagagccatcaccccagcgttctccagactcctctacgggcatcggcaagaaaggccagcagcccgcgaaaaagagactcaactttgggcagactggcgactcagagtcagtgcccgaccctcaaccaatcggagaaccccccgcaggcccctctggtctgggatctggtacaatggctgcaggcggtggcgctccaatggcagacaataacgaaggcgccgacggagtgggtagttcctcaggaaattggcattgcgattccacatggctgggcgacagagtcatcaccaccagcacccgaacctgggccctccccacctacaacaaccacctctacaagcaaatctccaacgggacttcgggaggaagcaccaacgacaacacctacttcggctacagcaccccctgggggtattttgactttaacagattccactgccacttctcaccacgtgactggcagcgactcatcaacaacaactggggattccggcccaagagacccaacttcaagctcttcaacatccaggtcaaggaggtcacgcagaatgaaggcaccaagaccatcgccaataaccttaccagcacgattcaggtctttacggactcggaataccagctcccgtacgtcctcggctctgcgcaccagggctgcctgcctccgttcccggcggacgtcttcatgattcctcagtacgggtacctgactctgaacaatggcagtcaggccgtgggccgttcctccttctactgcctggagtactttccttctcaaatgctgagaacgggcaacaactttgagttcagctaccagtttgaggacgtgccttttcacagcagctacgcgcacagccaaagcctggaccggctgatgaaccccctcatcgaccagtacctgtactacctgtctcggactcagtccacgggaggtaccgcaggaactcagcagttgctattttctcaggccgggcctaataacatgtcggctcaggccaaaaactggctacccgggccctgctaccggcagcaacgcgtctccacgacactgtcgcaaaataacaacagcaactttgcctggaccggtgccaccaagtatcatctgaatggcagagactctctggtaaatcccggtgtcgctatggcaacccacaaggacgacgaagagcgattttttccgtccagcggagtcttaatgtttgggaaacagggagctggaaaagacaacgtggactatagcagcgttatgctaaccagtgaggaagaaattaaaaccaccaacccagtggccacagaacagtacggcgtggtggccgataacctgcaacagcaaaacgccgctcctattgtaggggccgtcaacagtcaaggagccttacctggcatggtctggcagaaccgggacgtgtacctgcagggtcctatctgggccaagattcctcacacggacggaaactttcatccctcgccgctgatgggaggctttggactgaaacacccgcctcctcagatcctgattaagaatacacctgttcccgcggatcctccaactaccttcagtcaagctaagctggcgtcgttcatcacgcagtacagcaccggacaggtcagcgtggaaattgaatgggagctgcagaaagaaaacagcaaacgctggaacccagagattcaatacacttccaactactacaaatctacaaatgtggactttgctgttaacacagatggcacttattctgagcctcgccccattggcacccgttacctcacccgtaatctgtaattgcttgttaatcaataaaccggttgattcgtttcagttgaactttggtctctgcgaagggcgaattc

SEQ ID NO: 4796 - protein, 738 aa, Adeno-associated virus
MAADGYLPDWLEDNLSEGIREWWDLKPGAPKPKANQQKQDDGRGLVLPGYKYLGPFNGLDKGEPVNAADAAALEHDKAYDQQLKAGDNPYLRYNHADAEFQERLQEDTSFGGNLGRAVFQAKKRVLEPLGLVEEGAKTAPGKKRPVEPSPQRSPDSSTGIGKKGQQPAKKRLNFGQTGDSESVPDPQPIGEPPAGPSGLGSGTMAAGGGAPMADNNEGADGVGSSSGNWHCDSTWLGDRVITTSTRTWALPTYNNHLYKQISNGTSGGSTNDNTYFGYSTPWGYFDFNRFHCHFSPRDWQRLINNNWGFRPKRPNFKLFNIQVKEVTQNEGTKTIANNLTSTIQVFTDSEYQLPYVLGSAHQGCLPPFPADVFMIPQYGYLTLNNGSQAVGRSSFYCLEYFPSQMLRTGNNFEFSYQFEDVPFHSSYAHSQSLDRLMNPLIDQYLYYLSRTQSTGGTAGTQQLLFSQAGPNNMSAQAKNWLPGPCYRQQRVSTTLSQNNNSNFAWTGATKYHLNGRDSLVNPGVAMATHKDDEERFFPSSGVLMFGKQGAGKDNVDYSSVMLTSEEEIKTTNPVATEQYGVVADNLQQQNAAPIVGAVNSQGALPGMVWQNRDVYLQGPIWAKIPHTDGNFHPSPLMGGFGLKHPPPQILIKNTPVPADPPTTFSQAKLASFITQYSTGQVSVEIEWELQKENSKRWNPEIQYTSNYYKSTNVDFAVNTDGTYSEPRPIGTRYLTRNL

SEQ ID NO: 4797 - protein, 738 aa, Adeno-associated virus
MAADGYLPDWLEDNLSEGIREWWDLKPGAPKPKANQQKQDDGRGLVLPGYKYLGPFNGLDKGEPVNAADAAALEHDKAYDQQLKAGDNPYLRYNHADAEFQERLQEDTSFGGNLGRAVFQAKKRVLEPLGLVEEAAKTAPGKKRPVEPSPQRSPDSSTGIGKKGQQPAKKRLNFGQTGDSESVPDPQPIGEPPAGPSGLGSGTMAAGGGAPMADNNEGADGVGSSSGNWHCDSTWLGDRVITTSTRTWALPTYNNHLYKQISNGTSGGSTNDNTYFGYSTPWGYFDFNRFHCHFSPRDWQRLINNNWGFRPKRLSFKLFNIQVKEVTQNEGTKTIANNLTSTIQVFTDSEYQLPYVLGSAHQGCLPPFPADVFMIPQYGYLTLNNGSQAVGRSSFYCLEYFPSQMLRTGNNFEFSYTFEDVPFHSSYAHSQSLDRLMNPLIDQYLYYLSRTQSTGGTQGTQQLLFSQAGPANMSAQAKNWLPGPCYRQQRVSTTLSQNNNSNFAWTGATKYHLNGRDSLVNPGVAMATHKDDEERFFPSSGVLMFGKQGAGRDNVDYSSVMLTSEEEIKTTNPVATEQYGVVADNLQQTNTGPIVGNVNSQGALPGMVWQNRDVYLQGPIWAKIPHTDGNFHPSPLMGGFGLKHPPPQILIKNTPVPADPPTTFSQAKLASFITQYSTGQVSVEIEWELQKENSKRWNPEIQYTSNYYKSTNVDFAVNTEGTYSEPRPIGTRYLTRNL

SEQ ID NO: 4798 - protein, 720 aa, Adeno-associated virus
MSFVDHPPDWLEEVGEGLREFLGLEAGPPKPKPNQQHQDQARGLVLPGYNYLGPGNGLDRGEPVNRADEVAREHDISYNEQLEAGDNPYLKYNHADAEFQEKLADDTSFGGNLGKAVFQAKKRVLEPFGLVEEGAKTAPTGKRIDDHFPKRKKARTEEDSKPSTSSDAEAGPSGSQQLQIPAQPASSLGADTMSAGGGGPLGDNNQGADGVGNASGDWHCDSTWMGDRVVTKSTRTWVLPSYNNHQYREIKSGSVDGSNANAYFGYSTPWGYFDFNRFHSHWSPRDWQRLINNYWGFRPRSLRVKIFNIQVKEVTVQDSTTTIANNLTSTVQVFTDDDYQLPYVVGNGTEGCLPAFPPQVFTLPQYGYATLNRDNTENPTERSSFFCLEYFPSKMLRTGNNFEFTYNFEEVPFHSSFAPSQNLFKLANPLVDQYLYRFVSTNNTGGVQFNKNLAGRYANTYKNWFPGPMGRTQGWNLGSGVNRASVSAFATTNRMELEGASYQVPPQPNGMTNNLQGSNTYALENTMIFNSQPANPGTTATYLEGNMLITSESETQPVNRVAYNVGGQMATNNQSSTTAPATGTYNLQEIVPGSVWMERDVYLQGPIWAKIPETGAHFHPSPAMGGFGLKHPPPMMLIKNTPVPGNITSFSDVPVSSFITQYSTGQVTVEMEWELKKENSKRWNPEIQYTNNYNDPQFVDFAPDSTGEYRTTRPIGTRYL

SEQ ID NO: 4799 - protein, 736 aa, Adeno-associated virus
MAADGYLPDWLEDNLSEGIREWWDLKPGAPKPKANQQKQDDGRGLVLPGYKYLGPFNGLDKGEPVNAADAAALEHDKAYDQQLKAGDNPYLRYNHADAEFQERLQEDTSFGGNLGRAVFQAKKRVLEPFGLVEEGAKTAPGKKRPVEQSPQEPDSSSGIGKTGQQPAKKRLNFGQTGDSESVPDPQPLGEPPATPAAVGPTTMASGGGAPMADNNEGADGVGNASGNWHCDSTWLGDRVITTSTRTWALPTYNNHLYKQISSASTGASNDNHYFGYSTPWGYFDFNRFHCHFSPRDWQRLINNNWGFRPKRLNFKLFNIQVKEVTTNDGVTTIANNLTSTVQVFSDSEYQLPYVLGSAHQGCLPPFPADVFMIPQYGYLTLNNGSQAVGRSSFYCLEYFPSQMLRTGNNFTFSYTFEDVPFHSSYAHSQSLDRLMNPLIDQYLYYLNRTQNQSGSAQNKDLLFSRGSPAGMSVQPKNWLPGPCYRQQRVSKTKTDNNNSNFTWTGASKYNLNGRESIINPGTAMASHKDDKDKFFPMSGVMIFGKESAGASNTALDNVMITDEEEIKATNPVATERFGTVAVNLQSSSTDPATGDVHVMGALPGMVWQDRDVYLQGPIWAKIPHTDGHFHPSPLMGGFGLKHPPPQILIKNTPVPANPPAEFSATKFASFITQYSTGQVSVEIEWELQKENSKRWNPEVQYTSNYAKSANVDFTVDNNGLYTEPRPIGTRYLTRPL

SEQ ID NO: 4800 - protein, 736 aa, Adeno-associated virus
MAADGYLPDWLEDNLSEGIREWWDLKPGAPKPKANQQKQDDGRGLVLPGYKYLGPFNGLDKGEPVNAADAAALEHDKAYDQQLKAGDNPYLRYNHADAEFQERLQEDTSFGGNLGRAVFQAKKRVLEPFGLVEEGAKTAPGKKRPVEQSPQEPDSSSGIGKTGQQPAKKRLNFGQTGDSESVPDPQPLGEPPATPAAVGPTTMASGGGAPMADNNEGADGVGNASGNWHCDSTWLGDRVITTSTRTWALPTYNNHLYKQISSASTGASNDNHYFGYSTPWGYFDFNRFHCHFSPRDWQRLINNNWGFRPKRLNFKLFNIQVKEVTTNDGVTTIANNLTSTVQVFSDSEYQLPYVLGSAHQGCLPPFPADVFMIPQYGYLTLNNGSQAVGRSSFYCLEYFPSQMLRTGNNFTFSYTFEDVPFHSSYAHSQSLDRLMNPLIDQYLYYLNRTQNQSGSAQNKDLLFSRGSPAGMSVQPKNWLPGPCYRQQRVSKTKTDNNNSNFTWTGASKYNLNGRESIINPGTAMASHKDDEDKFFPMSGVMIFGKESAGASNTALDNVMITDEEEIKATNPVATERFGTVAVNLQSSSTDPATGDVHVMGALPGMVWQDRDVYLQGPIWAKIPHTDGHFHPSPLMGGFGLKHPPPQILIKNTPVPANPPAEFSATKFASFITQYSTGQVSVEIEWELQKENSKRWNPEVQYTSNYAKSANVDFTVDNNGLYTEPRPIGTRYLTRPL

SEQ ID NO: 4801 - protein, 736 aa, Adeno-associated virus
MAADGYLPDWLEDNLSEGIREWWDLKPGAPKPKANQQKQDDGRGLVLPGYKYLGPFNGLDKGEPVNAADAAALEHDKAYDQQLKAGDNPYLRYNHADAEFQERLQEDTSFGGNLGRAVFQAKKRVLEPLGLVEEGAKTAPGKKRPVEQSPQEPDSSSGIGKTGQQPAKKRLNFGQTGDSESVPDPQPLGEPPATPAAVGPTTMASGGGAPMADNNEGADGVGNASGNWHCDSTWLGDRVITTSTRTWALPTYNNHLYKQISSASTGASNDNHYFGYSTPWGYFDFNRFHCHFSPRDWQRLINNNWGFRPKRLNFKLFNIQVKEVTTNDGVTTIANNLTSTVQVFSDSEYQLPYVLGSAHQGCLPPFPADVFMIPQYGYLTLNNGSQAVGRSSFYCLEYFPSQMLRTGNNFTFSYTFEDVPFHSSYAHSQSLDRLMNPLIDQYLYYLNRTQNQSGSAQNKDLLFSRGSPAGMSVQPKNWLPGPCYRQQRVSKTKTDNNNSNFTWTGASKYNLNGRESIINPGTAMASHKDDEDKFFPMSGVMIFGKESAGASNTALDNVMITDEEEIKATNPVATERFGTVAVNLQSSSTDPATGDVHVMGALPGMVWQDRDVYLQGPIWAKIPHTDGHFHPSPLMGGFGLKHPPPQILIKNTPVPANPPAEFSATKFASFITQYSTGQVSVEIEWELQKENSKRWNPEVQYTSNYAKSANVDFTVDNNGLYTEPRPIGTRYLTRPL

SEQ ID NO: 4802 - protein, 736 aa, Adeno-associated virus
MAADGYLPDWLEDNLSEGIREWWDLKPGAPKPKANQQKQDDGRGLVLPGYKYLGPFNGLDKGEPVNAADAAALEHDKAYDQQLKAGDNPYLRYNHADAEFQERLQEDTSFGGNLGRAVFQAKKRVLEPLGLVEEGAKTAPGKKRPVEQSPQEPDSSSGIGKTGQQPAKKRLNFGQTGDSESVPDPQPLGEPPATPAAVGPTTMASGGGAPMADNNEGADGVGNASGNWHCDSTWLGDRVITTSTRTWALPTYNNHLYKQISSASTGASNDNHYFGYSTPWGYFDFNRFHCHFSPRDWQRLINNNWGFRPKRLNFKLFNIQVKEVTTNDGVTTIANNLTSTVQVFSDSEYQLPYVLGSAHQGCLPPFPADVFMIPQYGYLTLNNGSQAVGRSSFYCLEYFPSQMLRTGNNFTFSYTFEDVPFHSSYAHSQSLDRLMNPLIDQYLYYLNRTQNQSGSAQNKDLLFSRGSPAGMSVQPKNWLPGPCYRQQRVSKTKTDNNNSNFTWTGASKYNLNGRESIINPGTAMASHKDDKDKFFPMSGVMIFGKESAGASNTALDNVMITDEEEIKATNPVATERFGTVAVNLQSSSTDPATGDVHVMGALPGMVWQDRDVYLQGPIWAKIPHTDGHFHPSPLMGGFGLKHPPPQILIKNTPVPANPPAEFSATKFASFITQYSTGQVSVEIEWELQKENSKRWNPEVQYTSNYAKSANVDFTVDNNGLYTEPRPIGTRYLTRPL

SEQ ID NO: 4803 - protein, 728 aa, Adeno-associated virus
MAADGYLPDWLEGNLSEGIREWWDLKPGAPKPKANQQKQDDGRGLVLPGYRYLGPFNGLDKGEPVNEADAAALEHDKAYDKQLEQGDNPYLKYNHADAEFQERLQEDTSFGGNLGRAVFQAKKRVLEPLGLVEEGAKTAPGKKRPIESPDSSTGIGKNGQPPAKKKLNFGQTGDSESVPDPQPLGEPPAAPSGLGSGTMAAGGGAPMADNNEGADGVGNASGNWHCDSTWLGDRVITTSTRTWALPTYNNHLYKQISSQSGATNDNHFFGYSTPWGYFDFNRFHCHFSPRDWQRLINNNWGFRPRKLRFKLFNIQVKEVTTNDGVTTIANNLTSTIQVFSDSEYQLPYVLGSAHQGCLPPFPADVFMIPQYGYLTLNNGSQSVGRSSFYCLEYFPSQMLRTGDNFEFSYTFEEVPFHSSYAHSQSLDRLMNPLIDQYLYYLARTQSTTGSTRELQFHQAGPNTMAEQSKNWLPGPCYRQQRLSKNIDSNNNSNFAWTGATKYHLNGRNSLTNPGVAMATNKDDEDQFFPINGVLVFGKTGAANKTTLENVLMTSEEEIKTTNPVATEEYGVVSSNLQSSTAGPQTQTVNSQGALPGMVWQNRDVYLQGPIWAKIPHTDGNFHPSPLMGGFGLKHPPPQILIKNTPVPANPPEVFTPAKFASFITQYSTGQVSVEIEWELQKENSKRWNPEIQYTSNYAKSNNVEFAVNNEGVYTEPRPIGTRYLTRNL

SEQ ID NO: 4804 - DNA, 2211 bp, Adeno-associated virus
  source 1..2211: mol_type = other DNA
atggctgccgatggttatcttccagattggctcgaggacaaccttagtgaaggaattcgcgagtggtgggctttgaaacctggagcccctcaacccaaggcaaatcaacaacatcaagacaacgctcgaggtcttgtgcttccgggttacaaataccttggacccggcaacggactcgacaagggggagccggtcaacgcagcagacgcggcggccctcgagcacgacaaggcctacgaccagcagctcaaggccggagacaacccgtacctcaagtacaaccacgccgacgccgagttccaggagcggctcaaagaagatacgtcttttgggggcaacctcgggcgagcagtcttccaggccaaaaagaggcttcttgaacctcttggtctggttgaggaagcggctaagacggctcctggaaagaagaggcctgtagagcagtctcctcaggaaccggactcctccgcgggtattggcaaatcgggtgcacagcccgctaaaaagagactcaatttcggtcagactggcgacacagagtcagtcccagaccctcaaccaatcggagaacctcccgcagccccctcaggtgtgggatctcttacaatggcttcaggtggtggcgcaccagtggcagacaataacgaaggtgccgatggagtgggtagttcctcgggaaattggcattgcgattcccaatggctgggggacagagtcatcaccaccagcacccgaacctgggccctgcccacctacaacaatcacctctacaagcaaatctccaacagcacatctggaggatcttcaaatgacaacgcctacttcggctacagcaccccctgggggtattttgacttcaacagattccactgccacttctcaccacgtgactggcagcgactcatcaacaacaactggggattccggcctaagcgactcaacttcaagctcttcaacattcaggtcaaagaggttacggacaacaatggagtcaagaccatcgccaataaccttaccagcacggtccaggtcttcacggactcagactatcagctcccgtacgtgctcgggtcggctcacgagggctgcctcccgccgttcccagcggacgttttcatgattcctcagtacgggtatctgacgcttaatgatggaagccaggccgtgggtcgttcgtccttttactgcctggaatatttcccgtcgcaaatgctaagaacgggtaacaacttccagttcagctacgagtttgagaacgtacctttccatagcagctacgctcacagccaaagcctggaccgactaatgaatccactcatcgaccaatacttgtactatctctcaaagactattaacggttctggacagaatcaacaaacgctaaaattcagtgtggccggacccagcaacatggctgtccagggaagaaactacatacctggacccagctaccgacaacaacgtgtctcaaccactgtgactcaaaacaacaacagcgaatttgcttggcctggagcttcttcttgggctctcaatggacgtaatagcttgatgaatcctggacctgctatggccagccacaaagaaggagaggaccgtttctttcctttgtctggatctttaatttttggcaaacaaggaactggaagagacaacgtggatgcggacaaagtcatgataaccaacgaagaagaaattaaaactactaacccggtagcaacggagtcctatggacaagtggccacaaaccaccagagtgcccaagcacaggcgcagaccggctgggttcaaaaccaaggaatacttccgggtatggtttggcaggacagagatgtgtacctgcaaggacccatttgggccaaaattcctcacacggacggcaactttcacccttctccgctgatgggagggtttggaatgaagcacccgcctcctcagatcctcatcaaaaacacacctgtacctgcggatcctccaacggccttcaacaaggacaagctgaactctttcatcacccagtattctactggccaagtcagcgtggagatcgagtgggagctgcagaaggaaaacagcaagcgctggaacccggagatccagtacacttccaactattacaagtctaataatgttgaatttgctgttaatactgaaggtgtatatagtgaaccccgccccattggcaccagatacctgactcgtaatctgtaa

SEQ ID NO: 4805 - protein, 736 aa, Adeno-associated virus
MAADGYLPDWLEDNLSEGIREWWALKPGAPQPKANQQHQDNARGLVLPGYKYLGPGNGLDKGEPVNAADAAALEHDKAYDQQLKAGDNPYLKYNHADAEFQERLKEDTSFGGNLGRAVFQAKKRLLEPLGLVEEAAKTAPGKKRPVEQSPQEPDSSAGIGKSGAQPAKKRLNFGQTGDTESVPDPQPIGEPPAAPSGVGSLTMASGGGAPVADNNEGADGVGSSSGNWHCDSQWLGDRVITTSTRTWALPTYNNHLYKQISNSTSGGSSNDNAYFGYSTPWGYFDFNRFHCHFSPRDWQRLINNNWGFRPKRLNFKLFNIQVKEVTDNNGVKTIANNLTSTVQVFTDSDYQLPYVLGSAHEGCLPPFPADVFMIPQYGYLTLNDGSQAVGRSSFYCLEYFPSQMLRTGNNFQFSYEFENVPFHSSYAHSQSLDRLMNPLIDQYLYYLSKTINGSGQNQQTLKFSVAGPSNMAVQGRNYIPGPSYRQQRVSTTVTQNNNSEFAWPGASSWALNGRNSLMNPGPAMASHKEGEDRFFPLSGSLIFGKQGTGRDNVDADKVMITNEEEIKTTNPVATESYGQVATNHQSAQAQAQTGWVQNQGILPGMVWQDRDVYLQGPIWAKIPHTDGNFHPSPLMGGFGMKHPPPQILIKNTPVPADPPTAFNKDKLNSFITQYSTGQVSVEIEWELQKENSKRWNPEIQYTSNYYKSNNVEFAVNTEGVYSEPRPIGTRYLTRNL

SEQ ID NO: 4806 - DNA, 2460 bp, Adeno-associated virus
  source 1..2460: mol_type = other DNA
ggtaattcctccggaaattggcattgcgattccacatggctgggcgaccgagtcattaccaccagcacccggacttgggccctgcccacctacaacaaccacctctacaagcaaatctccagccaatcgggtgccaccaacgacaaccactacttcggctacagcaccccttgggggtattttgatttcaacagattccactgccatttctcaccacgtgactggcagcgactcatcaacaacaactggggattcatggctgccgatggttatcttccagattggctcgaggacactctctctgaaggaatcagacagtggtggaagctcaaacctggcccaccaccgccgaaacctaaccaacaacaccgggacgacagtaggggtcttgtgcttcctgggtacaagtacctcggacccttcaacggactcgacaaaggagagccggtcaacgaggcagacgccgcggccctcgagcacgacaaagcctacgaccaccagctcaagcaaggggacaacccgtacctcaaatacaaccacgcggacgctgaatttcaggagcgtcttcaagaagatacgtctttcgggggcaacctcgggcgagcagtcttccaggccaaaaagagggtactcgagcctcttggtctggttgaggaagctgttaagacggctcctggaaaaaagagacctatagagcagtctcctgcagaaccggactcttcctcgggcatcggcaaatcaggccagcagcccgctaagaaaagactcaattttggtcagactggcgacacagagtcagtcccagaccctcaaccaatcggagaaccccccgcagccccctctggtgtgggatctaatacaatggcttcaggcggtggggcaccaatggcagacaataacgaaggcgccgacggagtgggtaattcctcgggaaattggcattgcgattccacatggatgggcgacagagttatcaccaccagcacaagaacctgggccctccccacctacaataatcacctctacaagcaaatctccagcgaatcgggagccaccaacgacaaccactacttcggctacagcaccccctgggggtattttgactttaacagattccactgtcacttctcaccacgtgactggcagcgactcatcaacaacaactggggatttagacccaagaaactcaatttcaagctcttcaacatccaagtcaaggaggtcacgcagaatgatggaaccacgaccatcgccaataaccttaccagcacggtgcaggtcttcacagactctgagtaccagctgccctacgtcctcggttcggctcaccagggctgccttccgccgttcccagcagacgtcttcatgattcctcagtacggctacttgactctgaacaatggcagccaagcggtaggacgttcttcattctactgtctagagtattttccctctcagatgctgaggacgggaaacaacttcaccttcagctacacttttgaagacgtgcctttccacagcagctacgcgcacagccagagtctggatcggctgatgaatcctctcattgaccagtacctgtattacctgagcaaaactcagggtacaagtggaacaacgcagcaatcgagactgcagttcagccaagctgggcctagctccatggctcagcaggccaaaaactggctaccgggacccagctaccgacagcagcgaatgtctaagacggctaatgacaacaacaacagtgaatttgcttggactgcagccaccaaatattacctgaatggaagaaattctctggtcaatcccgggcccccaatggccagtcacaaggacgatgaggaaaagtatttccccatgcacggaaatctcatctttggaaaacaaggcacaggaactaccaatgtggacattgaatcagtgcttattacagacgaagaagaaatcagaacaactaatcctgtggctacagaacaatacggacaggttgccaccaaccatcagagtcagaacaccacagcttcctatggaagtgtggacagccagggaatcttacctggaatggtgtggcaggaccgcgatgtctatcttcaaggtcccatttgggccaaaactcctcacacggacggacactttcatccttctccgctcatgggaggctttggactgaaacaccctcctccccagatcctgatcaaaaacacacctgtgccagcgaatcccgcgaccactttcactcctggaaagtttgcttcgttcattacccagtattccaccggacaggtcagcgtggaaatagagtgggagctgcagaaagaaaacagcaaacgctggaacccagaaattcagtacacctccaactacaacaagtcggtgaatgtggagtttaccgtggacgcaaacggtgtttattctgaaccccgccctattggcactcgttaccttacccggaacttg

SEQ ID NO: 4807 - DNA, 3123 bp, Adeno-associated virus
  source 1..3123: mol_type = other DNA
gaattcgccctttctacggctgcgtcaactggaccaatgaaaactttcccttcaacgattgcgtcgacaagatggtgatctggtgggaggagggaaagatgaccgccaaggtcgtggaatctgccaaagccattctgggtggaggcaaggttcgtgtggaccagaaatgcaagtcttcggcccagatcgacccgactccggtgattgtcacctctaacaccaacatgtgcgccgtgattgacggaaactcgaccaccttcgagcaccagcagccgttgcaagaccggatgttcaaatttgaacttacccgccgtttggatcatgactttgggaaggtcaccaagcaggaagtcaaagactttttccggtgggctcaagatcacgtgactgaggtggagcatgagttctacgtcaaaaagggtggagccaagaaaaggcccgcccccgatgatgtatatataaatgagcccaagcgggcgcgcgagtcagttgcgcagccatcgacgtcagacgcggaagcttcgataaactacgcggacaggtaccaaaacaaatgttctcgtcacgtgggcatgaatctgatgctgtttccctgtcgacaatgcgaaagaatgaatcagaattcaaatatctgcttcacacacgggcaaaaagactgtttggaatgctttcccgtgtcagaatctcaacccgtttctgtcgtcagaaaaacgtatcagaaactttgttacattcatcatatcatgggaaaagtaccagacgcctgcactgcctgcgacctggtaaatgtggacttggatgactgtatttctgagcaataaatgacttaaatcaggtatggctgctgacggttatcttccagattggctcgaggacactctctctgaaggaatcagacagtggtggaagctcaaacctggcccaccaccgccgaaacctaaccaacaacaccgggacgacagtaggggtcttgtgcttcctgggtacaagtacctcggacccttcaacggactcgacaaaggagagccggtcaacgaggcagacgccgcggccctcgagcacgacaaagcctacgaccaccagctcaagcaaggggacaacccgtacctcaaatacaaccacgcggacgctgaatttcaggagcgtcttcaagaagatacgtctttcgggggcaacctcgggcgagcagtcttccaggccaaaaagagggtactcgagcctcttggtctggttgaggaagctgttaagacggctcctggaaaaaagagacctatagagcagtctcctgcagaaccggactcttcctcgggcatcggcaaatcaggccagcagcccgctaagaaaagactcaattttggtcagactggcgacacagagtcagtcccaggccctcaaccaatcggagaaccccccgcagccccctctggtgtgggatctaatacaatggcttcaggcggtggggcaccaatggcagacaataacgaaggcgccgacggagtgggtaattcctcgggaaattggcattgcgattccacatggatgggcgacagagttatcaccaccagcacaagaacctgggccctccccacctacaataatcacctctacaagcaaatctccagcgaatcgggagccaccaacgacaaccactacttcggctacagcaccccctgggggtattttgactttaacagattccactgtcacttctcaccacgtgactggcagcgactcatcaacaacaactggggatttagacccaagaaactcaatttcaagctcttcaacatccaagtcaaggaggtcacgcagaatgatggaaccacgaccatcgccaataaccttaccagcgcggtgcaggtcttcacagactctgagtaccagctgccctacgtcctcggttcggctcaccagggctgccttccgccgttcccagcagacgtcttcatgattcctcagtacggctacttgactctgaacaatggcagccaagcggtaggacgttcttcattctactgtctagagtattttccctctcagatgctgaggacgggaaacaacttcaccttcagctacacttttgaagacgtgcctttccacagcagctacgcgcacagccagagtctggatcggctgatgaatcctctcattgaccagtacctgtattacctgagcaaaactcagggtacaagtggaacaacgcagcaatcgagactgcagttcagccaagctgggcctagctccatggctcagcaggccaaaaactggctaccgggacccagctaccgacagcagcgaatgtctaagacggctaatgacaacaacaacagtgaatttgcttggactgcagccaccaaatattacctgaatggaagaaattctctggtcaatcccgggcccccagtggccagtcacaaggacgatgaggaaaagtatttccccatgcacggaaatctcatctttggaaaacaaggcacaggaactaccaatgtggacattgaatcagtgcttattacagacgaagaagaaatcagaacaactaatcctgtggctacagaacaatacggacaggttgccaccaaccatcagagtcagaacaccacagcttcctatggaagtgtggacagccagggaatcttacctggaatggtgtggcaggaccgcgatgtctatcttcaaggtcccatttgggccaaaactcctcacacggacggacactttcatccttctccgctcatgggaggctttggactgaaacaccctcctccccagatcctgatcaaaaacacacctgtgccagcgaatcccgcgaccactttcactcctggaaagtttgcttcgttcattacccagtattccacctgacaggtcagcgtggaaatagagtgggagctgcagaaagaaaacagcaaacgctggaacccagaaattcagtacacctccaactacaacaagtcggtgaatgtggagtttaccgtggacgcaaacggtgtttattctgaaccccgccctattggcactcgttaccttacccggaacttgtaatttcctgttaatgaataagccgatttatgcgtttcagttgaactttggtctctgcgaagggcgaattcgtttaaacct

SEQ ID NO: 4808 - protein, 735 aa, Adeno-associated virus
MAADGYLPDWLEDTLSEGIRQWWKLKPGPPPPKPNQQHRDDSRGLVLPGYKYLGPFNGLDKGEPVNEADAAALEHDKAYDHQLKQGDNPYLKYNHADAEFQERLQEDTSFGGNLGRAVFQAKKRVLEPLGLVEEAVKTAPGKKRPIEQSPAEPDSSSGIGKSGQQPAKKRLNFGQTGDTESVPGPQPIGEPPAAPSGVGSNTMASGGGAPMADNNEGADGVGNSSGNWHCDSTWMGDRVITTSTRTWALPTYNNHLYKQISSESGATNDNHYFGYSTPWGYFDFNRFHCHFSPRDWQRLINNNWGFRPKKLNFKLFNIQVKEVTQNDGTTTIANNLTSAVQVFTDSEYQLPYVLGSAHQGCLPPFPADVFMIPQYGYLTLNNGSQAVGRSSFYCLEYFPSQMLRTGNNFTFSYTFEDVPFHSSYAHSQSLDRLMNPLIDQYLYYLSKTQGTSGTTQQSRLQFSQAGPSSMAQQAKNWLPGPSYRQQRMSKTANDNNNSEFAWTAATKYYLNGRNSLVNPGPPVASHKDDEEKYFPMHGNLIFGKQGTGTTNVDIESVLITDEEEIRTTNPVATEQYGQVATNHQSQNTTASYGSVDSQGILPGMVWQDRDVYLQGPIWAKTPHTDGHFHPSPLMGGFGLKHPPPQILIKNTPVPANPATTFTPGKFASFITQYSTGQVSVEIEWELQKENSKRWNPEIQYTSNYNKSVNVEFTVDANGVYSEPRPIGTRYLTRNL

SEQ ID NO: 4809 - DNA, 3123 bp, Adeno-associated virus
  source 1..3123: mol_type = other DNA
gaattcgccctttctacggctgcgtcaactggaccaatgaaaactttcccttcaacgattgcgtcgacaagatggtgatctggtgggaggagggaaagatgaccgccaaggtcgtggaatctgccaaagccattctgggtggaagcaaggttcgtgtggaccagaaatgcaagtcttcggcccagatcgacccgactccggtgattgtcacctctaacaccaacatgtgcgccgtgattgacggaaactcgaccaccttcgagcaccagcagccgttgcaagaccggatgttcaaatttgaacttacccgccgtttggatcatgactttgggaaggtcaccaagcaggaagtcaaagactttttccggtgggctcaagatcacgtgactgaggtggagcatgagttctacgtcaaaaagggtggagccaagaaaaggcccgcccccgatgatgtatatataaatgagcccaagcgggcgcgcgagtcagttgcgcagccatcgacgtcagacgcggaagcttcgataaactacgcgggcaggtaccaaaacaaatgttctcgtcacgtgggcatgaatctgatgctgtttccctgtcgacaatgcgaaagaatgaatcagaattcaaatatctgcttcacacacgggcaaaaagactgtttggaatgctttcccgtgtcagaatctcaacccgtttctgtcgtcagaaaaacgtatcagaaactttgttacattcatcatatcatgggaaaagaaccagacgcctgcactgcctgcgacctggtaaatgtggacttggatgactgtatttctgagcaataaatgacttaaatcaggtatggctgctgacggttatcttccagattggctcgaggacactctctctgaaggaatcagacagtggtggaagctcaaacctggcccaccaccgccgaaacctaaccaacaacaccgggacgacagtaggggtcttgtgcttcctgggtacaagtacctcggacccttcaacggactcgacaaaggagagccggtcaacgaggcagacgccgcggccctcgagcacgacaaagcctacgaccaccagctcaagcaaggggacaacccgtacctcaaatacaaccacgcggacgctgaatttcaggagcgtcttcaagaagatacgtctttcgggggcaacctcgggcgagcagtcttccaggccaaaaagagggtactcgagcctcttggtctggttgaggaagctgttaagacggctcctggaaaaaagagacctatagagcagtctcctgcagaaccggactcttcctcgggcatcggcgaatcaggccagcagcccgctaagaaaagactcaattttggtcagactggcgacacagagtcagtcccagaccctcaaccaatcggagaaccccccgcagccccctctggtgtgggatctaatacaatggcttcaggcggtggggcaccaatggcagacgataacgaaggcgccgacggagtgggtaattcctcgggaaattggcattgcgattccacatggatgggcgacagagttatcaccaccagcacaagaacctgggccctccccacctacaataatcacctctacaagcaaatctccagcgaatcgggagccaccaacgacaaccactacttcggctacagcaccccctgggggtattttgactttaacagattccactgtcacttctcaccacgtgactggcagcgactcatcaacaacaactggggatttagacccaagaaactcaatttcaagctcttcaacatccaagtcaaggaggtcacgcagaatgatggaaccacgaccatcgccaataaccttaccagcacggtgcaggtcttcacagactctgagtaccagctgccctacgtcctcggttcggctcaccagggctgccttccgccgttcccagcagacgtcttcatgattcctcagtacggctacttgactctgaacaatggcagccaagcggtaggacgttcttcattctactgtctagagtattttccctctcagatgctgaggacgggaaacaacttcaccttcagctacacttttgaagacgtgcctttccacagcagctacgcgcacagccagagtctggatcggctgatgaatcctctcattgaccagtacctgtattacctgagcaaaactcagggtacaagtggaacaacgcagcaatcgagactgcagttcagccaagctgggcctagctccatggctcagcaggccaaaaactggctaccgggacccagctaccgacagcagcgaatgtctaagacggctaatgacaacaacaacagtgaatttgcttggactgcagccaccaaatattacctgaatggaagaaattctctggtcaatcccgggcccccaatggccagtcacaaggacgatgaggaaaagtatttccccatgcacggaaatctcatctttggaaaacaaggcacaggaactaccaatgtggacattgaatcagtgcttattacagacgaagaagaaatcagaacaactaatcctgtggctacagaacaatacggacaggttgccaccaaccatcagagtcaggacaccacagcttcctatggaagtgtggacagccagggaatcttacctggaatggtgtggcaggaccgcgatgtctatcttcaaggtcccatttgggccaaaactcctcacacggacggacactttcatccttctccgctcatgggaggctttggactgaaacaccctcctccccagatcctgatcaaaaacacacctgtgccagcgaatcccgcgaccactttcactcctggaaagtttgcttcgttcattacccagtattccaccggacaggtcagcgtggaaatagagtgggagctgcagaaagaaaacagcaaacgctggaacccagaaattcagtacacctccaactacaacaagtcggtgaatgtggagtttaccgtggacgcaaacggtgtttattctgaaccccgccctattggcactcgttaccttacccggaacttgtaatttcctgttaatgaataaaccgatttatgcgtttcagttgaactttggtctctgcgaagggcgaattcgcggccgcta

SEQ ID NO: 4810 - protein, 735 aa, Adeno-associated virus
MAADGYLPDWLEDTLSEGIRQWWKLKPGPPPPKPNQQHRDDSRGLVLPGYKYLGPFNGLDKGEPVNEADAAALEHDKAYDHQLKQGDNPYLKYNHADAEFQERLQEDTSFGGNLGRAVFQAKKRVLEPLGLVEEAVKTAPGKKRPIEQSPAEPDSSSGIGESGQQPAKKRLNFGQTGDTESVPDPQPIGEPPAAPSGVGSNTMASGGGAPMADDNEGADGVGNSSGNWHCDSTWMGDRVITTSTRTWALPTYNNHLYKQISSESGATNDNHYFGYSTPWGYFDFNRFHCHFSPRDWQRLINNNWGFRPKKLNFKLFNIQVKEVTQNDGTTTIANNLTSTVQVFTDSEYQLPYVLGSAHQGCLPPFPADVFMIPQYGYLTLNNGSQAVGRSSFYCLEYFPSQMLRTGNNFTFSYTFEDVPFHSSYAHSQSLDRLMNPLIDQYLYYLSKTQGTSGTTQQSRLQFSQAGPSSMAQQAKNWLPGPSYRQQRMSKTANDNNNSEFAWTAATKYYLNGRNSLVNPGPPMASHKDDEEKYFPMHGNLIFGKQGTGTTNVDIESVLITDEEEIRTTNPVATEQYGQVATNHQSQDTTASYGSVDSQGILPGMVWQDRDVYLQGPIWAKTPHTDGHFHPSPLMGGFGLKHPPPQILIKNTPVPANPATTFTPGKFASFITQYSTGQVSVEIEWELQKENSKRWNPEIQYTSNYNKSVNVEFTVDANGVYSEPRPIGTRYLTRNL

SEQ ID NO: 4811 - DNA, 3113 bp, Adeno-associated virus
  source 1..3113: mol_type = other DNA
gaattcgccctttctacggctgcgtcaactggaccaatgaaaactttcccttcaacgattgcgtcgacaagatggtgatctggtgggaggagggaaagatgaccgccaaggtcgtggaatctgccaaagccattctgggtggaagcaaggttcgtgtggaccagaaatgcaagtcttcggcccagatcgacccgactccggtgattgtcacctctaacaccaacatgtgcgccgtgattgacggaaactcgaccaccttcgagcaccagcagccgttgcaagaccggatgttcaaatttgaacttacccgccgtttggatcatgactttgggaaggtcaccaagcaggaagtcaaagactttttccggtgggctcaagatcacgtgactgaggtggagcatgagttctacgtcaaaaagggtggagccaagaaaaggcccgcccccgatgatgtatatataaatgagcccaagcgggcgcgcgagtcagttgcgcagccatcgacgtcagacgcggaagcttcgataaactacgcggacaggtaccaaaacaaatgttctcgtcacgtgggcatgaatctgatgctgtttccctgtcgacaatgcgaaagaatgaatcagaattcaaatatctgcttcacacacgggcaaaaagactgtttggaatgctttcccgtgtcagaatctcaacccgttcctgtcgtcagaaaaacgtatcagaaactttgttacattcatcatatcatgggaaaagtaccagacgcctgcactgcctgcgacctggtaaatgtggacttggatgactgtatttctgagcaataaatgacttaaatcaggtatggctgctgacggttatcttccagattggctcgaggacactctctctgaaggaatcagacagtggtggaagctcaaacctggcccaccaccgccgaaacctaaccaacaacaccgggacgacagtaggggtcttgtgcttcctgggtacaagtacctcggacccttcaacggactcgacaaaggagagccggtcaacgaggcagacgccgcggccctcgagcacgacaaagcctacgaccaccagctcaagcaaggggacaacccgtacctcaaatacaaccacgcggacgctgaatttcaggagcgtcttcaagaagatacgtctttcgggggcaacctcgggcgagcagtcttccaggccaaaaagagggtactcgagcctcttggtctggttgaggaagctgttaagacggctcctggaaaaaagagacctatagagcagtctcctgcagaaccggactcttcctcgggcatcggcaaatcaggccagcagcccgctaagaaaagactcaattttggtcagactggcgacacagagtcagtcccagaccctcaaccaatcggagaaccccccgcagccccctctggtgtgggatctaatacaatggcttcaggcggtggggcaccaatggcagacaataacgaaggcgccgacggagtgggtaattcctcgggaaattggcattgcgattccacatggatgggcgacagagttatcaccaccagcacaagaacctgggccctccccacctacaataatcacctctacaagcaaatctccagcgaatcgggagccaccaacgacaaccactacttcggctacagcaccccctgggggtattttgactttaacagattccactgtcacttctcaccacgtgactggcagcgactcatcaataacaactggggatttagacccaagaaactcaatttcaagctcttcaacatccaagtcaaggaggtcacgcagaatgatggaaccacgaccatcgccaataaccttaccagcacggtgcaggtcttcacagactctgagtaccagctgccctacgtcctcggttcggctcaccagggctgccttccgccgttcccagcagacgtcttcatgattcctcagtacggctacttgactctgaacaatggcagccaagcggtaggacgttcttcattctactgtctagagtattttccctctcagatgctgaggacgggaaacaacttcaccttcagctacacttttgaagacgtgcctttccacagcagctacgcgcacagccagagtctggatcggctgatgaatcctctcattgaccagtacctgtattacctgagcaaaactcagggtacaagtggaacaacgcagcaatcgagactgcagttcaaccaagctgggcctagctccatggctcagcaggccaaaaactggctaccgggacccagctaccgacagcagcgaatgtctaagacggctaatgacaacaacaacagtgaatttgcttggactgcagccaccaaatattacccgaatggaagaaattctctggtcaatcccgggcccccaatggccagtcacaaggacgatgaggaaaagtatttccccatgcacggaaatctcatctttggaaaacaaggcacaggaactaccaatgtggacattgaatcagtgcttattacagacgaagaagaaatcagaacgactaatcctgtggctacagaacaatacggacaggttgccaccaaccgtcagagtcagaacaccacagcttcctatggaagtgtggacagccagggaatcttacctggaatggtgtggcaggaccgcgatgtctatcttcaaggtcccatttgggccaaaactcctcacacggacggacactttcatccttctccgctcatgggaggctttggactgaaacaccctcctccccagatcctgatcaaaaacacacctgtgccagcgaatcccgcgaccactttcactcctggaaagtttgcttcgttcattacccagtattccaccggacaggtcagcgtggaaatagagtgggagctgcagaaagaaaacagcaaacgctggaacccggaaattcagtacacctccaactacaacaagtcggtgaatgtggagtttaccgtggacgcaaacggtgtttattctgaaccccgccctattggcactcgttaccttacccggaacttgtaatttcctgttaatgaataaaccgatttatgcgtttcagttgaactttggtctctgcgaagggcgaattc

SEQ ID NO: 4812 - protein, 735 aa, Adeno-associated virus
MAADGYLPDWLEDTLSEGIRQWWKLKPGPPPPKPNQQHRDDSRGLVLPGYKYLGPFNGLDKGEPVNEADAAALEHDKAYDHQLKQGDNPYLKYNHADAEFQERLQEDTSFGGNLGRAVFQAKKRVLEPLGLVEEAVKTAPGKKRPIEQSPAEPDSSSGIGKSGQQPAKKRLNFGQTGDTESVPDPQPIGEPPAAPSGVGSNTMASGGGAPMADNNEGADGVGNSSGNWHCDSTWMGDRVITTSTRTWALPTYNNHLYKQISSESGATNDNHYFGYSTPWGYFDFNRFHCHFSPRDWQRLINNNWGFRPKKLNFKLFNIQVKEVTQNDGTTTIANNLTSTVQVFTDSEYQLPYVLGSAHQGCLPPFPADVFMIPQYGYLTLNNGSQAVGRSSFYCLEYFPSQMLRTGNNFTFSYTFEDVPFHSSYAHSQSLDRLMNPLIDQYLYYLSKTQGTSGTTQQSRLQFNQAGPSSMAQQAKNWLPGPSYRQQRMSKTANDNNNSEFAWTAATKYYPNGRNSLVNPGPPMASHKDDEEKYFPMHGNLIFGKQGTGTTNVDIESVLITDEEEIRTTNPVATEQYGQVATNRQSQNTTASYGSVDSQGILPGMVWQDRDVYLQGPIWAKTPHTDGHFHPSPLMGGFGLKHPPPQILIKNTPVPANPATTFTPGKFASFITQYSTGQVSVEIEWELQKENSKRWNPEIQYTSNYNKSVNVEFTVDANGVYSEPRPIGTRYLTRNL

SEQ ID NO: 4813 - DNA, 3122 bp, Adeno-associated virus
  source 1..3122: mol_type = other DNA
agcggccgcgaattcgccctttctacggctgcgtcaactggaccaatgaaaactttcccttcaacgattgcgtcgacaagatggtgatctggtgggaggagggaaagatgaccgccaaggtcgtggaatctgccaaagccattctgggtggaagcaaggttcgtgtggaccagaaatgcaggtcttcggcccagatcgacccgactccggtgattgtcacctctaacaccaacatgtgcgccgtgattgacggaaactcgaccaccttcgagcaccagcagccgttgcaagaccggatgttcaaatttgaacttacccgccgtttggatcatgactttgggaaggtcaccaagcaggaagtcaaagactttttccggtgggctcaagatcacgtgactgaggtggagcatgagttctacgtcaaaaagggtggagccaagaaaaggcccgcccccgatgatgtatatataaatgagcccaagcgggcgcgcgagtcagttgcgcagccatcgacgtcagacgcggaagcttcgataaactacgcggacaggtaccaaaacaaatgttctcgtcacgtgggcatgaatctgatgctgtttccctgtcgacaatgcgaaagaatgaatcagaattcaaatatctgcttcacacacgggcaaaaagactgtttggaatgctttcccgtgtcagaatctcaacccgtttctgtcgtcagaaaaacgtatcagaaactttgttacattcatcatatcatgggaaaagtaccagacgcctgcactgcctgcgacctggtaaatgtggacttggatgactgtatttctgagcaataaatgacttaaatcaggtatggctgctgacggttatcttccagattggctcgaggacactctctctgaaggaatcagacagtggtggaagctcaaacctggcccaccaccgccgaaacctaaccaacaacaccgggacgacagtaggggtcttgtgcttcctgggtacaagtacctcggacccttcaacggactcgacaaaggagagccggtcaacgaggcagacgccgcggccctcgagcacgacaaagcctacgaccaccagctcaagcaaggggacaacccgtacctcaaatacaaccacgcggacgctgaatttcaggagcgtcttcaagaagatacgtctttcgggggcaacctcgggcgagcagtcttccaggccaaaaagagggtactcgagcctcttggtctggttgaggaagctgttaagacggctcctggaaaaaagagacctatagagcagtctcctgcagaaccggactcttcctcgggcatcggcaaatcaggccagcagcccgctaagaaaagactcaattttggtcagactggcgacacagagtcagtcccagaccctcaaccaatcggagaaccccccgcagccccctctggtgtgggatctaatacaatggcttcaggcggtggggcaccaatggcagacaataacgaaggcgccgacggagtgggtaattcctcgggaaattggcattgcgattccacatggatgggcgacagagttatcaccaccagcacaagaacctgggccctccccacctacaataatcgcctctacaagcaaatctccagcgaatcgggagccaccaacgacaaccactacttcggctacagcaccccctgggggtattttgactttaacagattccactgtcacttctcaccacgtgactggcagcgactcatcaacaacaactggggatttagacccaagaaactcaatttcaagctcttcaacatccaagtcaaggaggtcacgcagaatgatggaaccacgaccatcgccaataaccttaccagcacggtgcaggtcttcacagactctgagtaccagctgccctacgtcctcggttcggctcaccagggctgccttccgccgttcccagcagacgtcttcatgattcctcagtacggctacttgactctgaacaatggcagccaagcggtaggacgttcttcattctactgtctagagtattttccctctcagatgctgaggacgggaaacaacttcaccttcagctacacttttgaagacgtgcctttccacagcagctacgcgcacagccagagtctggatcggctgatgaatcctctcattgaccagtacctgtattacctgagcaaaactcagggtacaagtggaacaacgcagcaatcgagactgcagttcagccaagctgggcctagctccatggctcagcaggccaaaaactggctaccgggacccagctaccgacagcagcgaatgtctaagacggctaatgacaacaacaacagtgaatttgcttggactgcagccaccaaatattacctgaatggaagaaattctctggtcaatcccgggcccccaatggccagtcacaaggacgatgaggaaaagtatttccccatgcacggaaatctcatctttggaaaacaaggcacaggaactaccaatgtggacattgaatcagtgcttattacagacgaagaagaaatcagaacaactaatcctgtggctacagaacaatacggacaggttgccaccaaccatcagagtcagaacaccacagcttcctatggaagtgtggacagccagggaatcttacctggaatggtgtggcaggaccgcgatgtctatcttcaaggtcccatttgggccaaaactcctcacacggacggacactttcatccttctccgctcatgggaggctttggactgaaacaccctcctccccagatcctgatcaaaaacacacctgtgccagcgaatcccgcgaccactttcactcctggaaagtttgcttcgttcattacccagtattccaccggacaggtcagcgtggaaatagagtgggagctgcagaaagaaaacagcaaacgctggaacccagaaattcagtacacctccaactacaacaagtcggtgaatgtggagtttaccgtggacgcaaacggtgtttattctgaaccccgccctattggcactcgttaccttacccggaacttgtaatttcctgttaatgaataaaccgatttatgcgtttcagttgaactttggtctctgcgaagggcgaattc

SEQ ID NO: 4814 - protein, 735 aa, Adeno-associated virus
MAADGYLPDWLEDTLSEGIRQWWKLKPGPPPPKPNQQHRDDSRGLVLPGYKYLGPFNGLDKGEPVNEADAAALEHDKAYDHQLKQGDNPYLKYNHADAEFQERLQEDTSFGGNLGRAVFQAKKRVLEPLGLVEEAVKTAPGKKRPIEQSPAEPDSSSGIGKSGQQPAKKRLNFGQTGDTESVPDPQPIGEPPAAPSGVGSNTMASGGGAPMADNNEGADGVGNSSGNWHCDSTWMGDRVITTSTRTWALPTYNNRLYKQISSESGATNDNHYFGYSTPWGYFDFNRFHCHFSPRDWQRLINNNWGFRPKKLNFKLFNIQVKEVTQNDGTTTIANNLTSTVQVFTDSEYQLPYVLGSAHQGCLPPFPADVFMIPQYGYLTLNNGSQAVGRSSFYCLEYFPSQMLRTGNNFTFSYTFEDVPFHSSYAHSQSLDRLMNPLIDQYLYYLSKTQGTSGTTQQSRLQFSQAGPSSMAQQAKNWLPGPSYRQQRMSKTANDNNNSEFAWTAATKYYLNGRNSLVNPGPPMASHKDDEEKYFPMHGNLIFGKQGTGTTNVDIESVLITDEEEIRTTNPVATEQYGQVATNHQSQNTTASYGSVDSQGILPGMVWQDRDVYLQGPIWAKTPHTDGHFHPSPLMGGFGLKHPPPQILIKNTPVPANPATTFTPGKFASFITQYSTGQVSVEIEWELQKENSKRWNPEIQYTSNYNKSVNVEFTVDANGVYSEPRPIGTRYLTRNL

SEQ ID NO: 4815 - protein, 733 aa, Adeno-associated virus
MAADGYLPDWLEDNLSEGIREWWDLKPGAPKPKANQQKQDDGRGLVLPGYKYLGPFNGLDKGEPVNAADAAALEHDKAYDQQLKAGDNPYLRYNHADAEFQERLQEDTSFGGNLGRAVFQAKKRVLEPLGLVEEGAKTAPGKKRPLESPQEPDSSSGIGKKGKQPAKKRLNFEEDTGAGDGPPEGSDTSAMSSDIEMRAAPGGNAVDAGQGSDGVGNASGDWHCDSTWSEGKVTTTSTRTWVLPTYNNHLYLRLGTTSNSNTYNGFSTPWGYFDFNRFHCHFSPRDWQRLINNNWGLRPKAMRVKIFNIQVKEVTTSNGETTVANNLTSTVQIFADSSYELPYVMDAGQEGSLSPFPNDVFMVPQYGYCGIVTGENQNQTDRNAFYCLEYFPSQMLRTGNNFEMAYNFGKVPFHSMYAYSQSPDRLMNPLLDQYLWHLQSTTSGETLNQGNAATTFGKIRSGDFAFYRKNWLPGPCVKQQRLSKTASQNYKIPASGGNALLKYDTHYTLNNRWSNIAPGPPMATAGPSDGDFSNAQLIFPGPSVTGNTTTSANNLLFTSEEEIAATNPRDTDMFGQIADNNQNATTAPITGNVTAMGVLPGMVWQNRDIYYQGPIWAKIPHADGHFHPSPLIGGFGLKHPPPQIFIKNTPVPANPATTFTAARVDSFITQYSTGQVAVQIEWEIEKERSKRWNPEVQFTSNYGNQSSMLWAPDTTGKYTEPRVIGSRYLTNHL

SEQ ID NO: 4816 - protein, 733 aa, Adeno-associated virus
MAADGYLPDWLEDNLSEGIREWWDLKPGAPKLKANQQKQDDGRGLVLPGYKYLGPFHGLDKGEPVNAADAAALEHDKAYDQQLKAGDNPYLRYNHADAEFQERLQEDTSFGGNLGRAVFQAKKRVLEPLGLVEEGAKTAPGKKRPLESPQEPDSSSGIGKKGKQPAKKRLNFEEDTGAGDGPPEGSDTSAMSSDIEMRAAPGGNAVDAGQGSDGVGNASGDWHCDSTWSEGKVTTTSTRTWVLPTYNNHLYLRLGTTSNSNTYNGFSTPWGYFDFNRFHCHFSPRDWQRLINNNWGLRPKAMRVKIFNIQVKEVTTSNGETTVANNLTSTVQIFADSSYELPYVMDAGQEGSLPPFPNDVFMVPQYGYCGIVTGENQNQTDRNAFYCLEYFPSQMLRTGNNFEMAYNFEKVPFHSMYAHSQSLDRLMNPLLDQYLWHLQSTTSGETLNQGNAATTFGKIRSGDFAFYRKNWLPGPCVKQQRFSKTASQNYKIPASGGNALLKYDTHYTLNNRWSNIAPGPPMATAGPSDGDFSNAQLIFPGPSVTGNTTTSANNLLFTSEGEIAATNPRDTDMFGQIADNNQNATTAPITGNVTAMGVLPGMVWQNRDIYYQGPIWAKIPHADGHFHPSPLIGGFGLKHPPPQIFIKNTPVPANPATTFTAARVDSFITQYSTGQVAVQIEWEIEKERSKRRNPEVQFTSNYGNQSSMLWAPDTTGKYTEPRVIGSRYLTNHL

SEQ ID NO: 4817 - protein, 733 aa, Adeno-associated virus
MAADGYLPDWLEDNLSEGIREWWDLKPGAPKPKANQQKQDDGRGLVLPGYEYLGPFNGLDKGEPVNAADAAALEHDKAYDQQLKAGDNPYLRYNHADAEFQERLQEDTSFGGNLGRAVFQAKKRVLEPLGLVEEGAKTAPGKKRPLESPQEPDSSSGIGKKGKQPAKKRLNFEEDTGAGDGPPEGSDTSAMSSDIEMRAAPGGNAVDAGQGSDGVGNASGDWHCDSTWSEGKVTTTSTRTWVLPTYNNHLYLRLGTTSNSNTYNGFSTPWGYFDFNRFHCHFSPRDWQRLINNNWGLRPKAMRVKIFNIQVKEVTTSNGETTVANNLTSTVQIFADSSYELPYVMDAGQEGSLPPFPNDVFMVPQYGYCGIVTGENQNQTDRNAFYCLEYFPSQMLRTGNNFETAYNFEKVPFHSMYAHSQSLDGLMNPLLDQYLWHLQSTTSGETLNQGNAATTFGKIRSGDFAFYRKNWLPGPCVKQQRFSKTASQNYKIPASGGNALLKYDTHYTLNNRWSNIAPGPPMATAGPSDGDFSNAQLIFPGPSVTGNTTTSANNLLFTSEEEIAATNPRDTDMFGQIADNNQNATTAPITGNVTAMGVLPGMVWQNRDIYYQGPIWAKIPHADGHFHPSPLIGGFGLKHPPPQIFIKNTPVPAYPATTFTAARVDSFITQYSTGQVAVQIEWEIEKERSKRWNPEVQFTSNCGNQSSMLWAPDTTGKYTEPRVIGSRYLTNHL

SEQ ID NO: 4818 - protein, 735 aa, Adeno-associated virus
MAADGYLPDWLEDTLSEGIRQWWKLKPGPPPPKPNQQHRDDSRGLVLPGYKYLGPFNGLDKGEPVNEADAAALEHDKAYDHQLKQGDNPYLKYNHADAEFQERLQEDTSFGGNLGRAVFQAKKRVLEPLGLVEEAVKTAPGKKRPIEQSPAEPDSSSGIGKSGQQPAKKRLNFGQTGDTESVPDPQPIGEPPAAPSGVGSNTMASGGGAPMADNNEGADGVGNSSGNWHCDSTWMGDRVITTSTRTWALPTYNNHLYKQISSESGATNDNHYFGYSTPWGYFDFNRFHCHFSPRDWQRLINNNWGFRPKKLNFKLFNIQVKEVTQNDGTTTIANNLTSTVQVFTDSEYQLPYVLGSAHQGCLPPFPADVFMIPQYGYLTLNNGSQAVGRSSFYCLEYFPSQMLRTGNNFTFSYTFEDVPFHSSYAHSQSLDRLMNPLIDQYLYYLSKTQGTSGTTQQSRLQFSQAGPSSMAQQAKNWLPGPSYRQQRMSKTANDNNNSEFAWTAATKYYLNGRNSLVNPGPPMASHKDDEEKYFPMHGNLIFGKQGTGTTNVDIESVLITDEEEIRTTNPVATEQYGQVATNHQSQNTTASYGSVDSQGILPGMVWQDRDVYLQGPIWAKIPHTDGHFHPSPLMGGFGLKHPPPQILIKNTPVPANPATTFTPGKFASFITQYSTGQVSVEIEWELQKENSKRWNPEIQYTSNYNKSVNVEFTVDANGVYSEPRPIGTRYLTRNL

SEQ ID NO: 4819 - DNA, 3127 bp, Adeno-associated virus
  source 1..3127: mol_type = other DNA
gcggccgcgaattcgcccttcgcagagaccaaagttcaactgaaacgaatcaaccggtttattgattaacatgcaattacagattacgggtgaggtaacgagtgccaatagggcgaggctcagagtaaacaccctggctgtcaacggcaaagtccacaccagtctgcttttcaaagttggaggtgtactgaatctccgggtcccagcgcttgctgttttccttctgcagctcccactcgatttccacgctgacttgtccggtgctgtactgtgtgatgaacgaagcaaacttggcaggagtaaacacctccggaggattagcgggaacgggagtgttcttgatcaggatctgaggaggcggatgtttaagtccaaagccgcccatcaaaggagacgggtgaaagttgccatccgtgtgaggaatcttggcccagatgggaccctgcaggtacacgtcccggttctgccagaccatgccaggtaaggctccctggttgttgacaacttgtgtctgggctgcagtattagccgcttgtaagttgctgctgactatcccgtattcttccgtggctacaggattagtaggacgaatttcttcttcatttgtcattaacacattttccaatgtagttttgttagttgctccagtttttccaaaaatcaggactccgctggatgggaaaaagcggtcctcgtcgtccttgtgagttgccatggcgacgccgggattaaccaacgagtttctgccgttcaggtgatatttggtggcaccagtccaagcaaagttgctgttgttgttttgatccagcgttttggagaccctttgttgccggaagcagggtccaggtaaccaattcttggcttgttcggccatagttgaaggcccgccctggtaaaactgcagttcccgattgccagctgtgcctcctgggtcactctgtgttctggccaggtagtacaagtactggtcgatgaggggattcatcagccggtccaggctctggctgtgtgcgtagctgctgtggaaaggcacgtcctcgaagctgtagctgaactcaaagttgttgcccgttctcagcatctgagaggggaagtactccaggcagtagaaggaggaacgtcccacagactgactgccattgttgagagtcaggtagccgtactgaggaatcatgaagacgtccgccgggaacggaggcaggcagccctggtgcgcagagccgaggacgtacggcagctggtattccgagtccgagaatacctgaatcgtgctggtaaggttattagcgatggtcgtaacgccgtcattcgtcgtgacctccttgacctggatgttgaagagcttgaaccgcagcttcttgggccggaatccccagttgttgttgatgagtcgctgccagtcacgtggtgagaagtggcagtggaatctgttaaagtcaaaatacccccagggggtgctgtagccgaagtaggtgttgtcgttggtactacctgcagtttcactggagatttgctcgtagaggtggttgttgtaggtgggcagggcccaggttcgggtgctggtggtaatgactctgtcgcccagccatgtggaatcgcaatgccaatttcctgaggcattacccactccgtcggcaccttcgttattgtctgccattggtgcgccaccgcctgcagccactgtaccagatcccacactagagggcgctgctggaggttctccgagaggttgagggtcggggactgactctgagtcgccagtctgaccgaaattgagtctctttctggcgggctgctggcccttcttgccgatgcccgtggaggagtcgggggaacgctgaggtgacggctctaccggtctcttctttgcaggagccgtcttagcgccttcctcaaccagaccgagaggttcgagaacccgcttcttggcctggaagactgctcgcccgaggttgcccccaaatgacgtatcttcttgcagacgctcctgaaactcggcgtcggcgtggttataccgcaggtacgggttgtcacccgcattgagctgctggtcgtaggccttgtcgtgctcgagggccgctgcgtccgccgcgttgacgggctcccccttgtcgagtccgttgaagggtccgaggtacttgtagccaggaagcaccagaccccggccgttgtcctgcttttgctggttggctttgggtttcggggctccaggtttcaggtcccaccactcgcgaatgccctcagagaggttgtcctcgagccaatctggaagataaccatcggcagccatacctgatttaaatcatttattgttcaaagatgcagtcatccaaatccacattgaccagatcgcaggcagtgcaagcgtctggcacctttcccatgatatgatgaatgtagcacagtttctgatacgcctttttgacgacagaaacgggtttagattctgacacgggaaagcactctaaacagtctttctgtccgtgagtgaagcagatatttgaattctgattcattctctcgcattgtctgcagggaaacagcatcagattcatgcccacgtgacgagaacatttgttttggtacctgtctgcgtagttgatcgaagcttccgcgtctgacgtcgatggctgcgcaactgactcgcgcacccgtttgggctcacttatatctgcgtcactgggggcgggtcttttcttggctccaccctttttgacgtagaattcatgctccacctcaaccacgtaatcctttgcccaccggaaaaagtctttgacttcctgcttggtgaccttcccaaagtcatgatccagacggcgggtgagttcaaatttgaacatccggtcttgcaacggctgctggtgttcgaaggtcgttgagttcccgtcgatcacggcgcacatgttggtgttggagatgacgatcgcgggagtcgggtctatctgggccgaggacttgcatttctggtccacgcgcaccttgcttcctccgagaatggctttggccgactccacgaccttggcggtcatcttcccctcctcccaccagatcaccatcttgtcgacacagtcgttgaagggaaagttctcattggtccagttgacgcagccgtagaaagggcgaattc

SEQ ID NO: 4820 - DNA, 3106 bp, Adeno-associated virus
  source 1..3106: mol_type = other DNA
gcggccgcgaattcgcccttcgcagagaccaaagttcaactgaaacgaatcaaccggtttattgattaacaagtaattacaggttacgggtgaggtaacgggtgccaatggggcgaggctcagtataaaccccttcgttgttgacagcaaattccacattattagacttggcataatttgaggtgtactgaatctctggattccagcgtttgctgttttctttctgcagttcccactcgatctccacgctgacctggccggtgctgtactgcgtgataaatgaggcaaacttggcaggagtaaacacctctggaggattagcaggtaccggggtgtttttgatgagaatttgaggaggcgggtgtttgagtccaaatccgcccatcaggggagacgggtgaaagttgccgtccgtgtgaggaattttggcccagatgggaccctgcaggcacacgtcccggttctgccagaccatgccgggcagagccccctggctgttgacagtctgtgtctggggtccggccgtagacgattgcaggttgctggagaccacaccgtattcttctgtagccacgggattggtggttttgatctcctcctcgctggtcattagcacgttttccagcgttgtcttgttggcagcccccgttttgccaaaaaccagcactccgttgatgggaaagaactggtcctcgtcgtccttgttggtggccatggctacgcccgggttggttaatgaatttctaccattcagatggtatttagtggccccggtccaggcaaagttactgttgttgttgctgtctatgttttttgacagtctctgctgccgataacagggtccgggcagccagttctttgattgctcggccatggtgttgggcccagcctgatggaactgcagctcccttgtggaccccgtagtgctctgggtccgggccaggtagtacaggtactggtcgatgaggggattcatcagccggtctaggctctggctgtgcacatagctgctgtggaaaggcacttcctcaaaggtgtagctgaattcaaagttattgcccgttctcagcatctgagaaggaaagtactccaggcagtagaaggaggaacgtcccacagactgactgccgttgtttagagtcagatatccgtactgaggaatcatgaacacgtccgcagggaacggagggaggcagccctggtgcgcagagccgaggacgtacggcagttggtactccgagtccgagaagacctgaatcgtgctggtaaggttattagcgatggtcgtaacgccgtcgttcgtcgtgacctccttgacctggatgttgaacaacttgaaccgcagctttctgggccggaatccccagttgttgttgatgagtcgctgccagtcacgtggtgagaagtggcagtggaatctgttgaagtcaaaatagccccagggggtgctgtagctgaagaagtggttgtcgttggtagccccgctctgacttgatatctgcttgtagaggtggttgttgtaggtgggcagggcccaggtgcgggtgctggtggtgatgactctgtcgcccagccatgtggaatcgcaatgccaatttccggaggcattacccactccgtcggcgccttcgttattgtctgccattggtgcgccaccgcctgcagccattgtaccagatcccagacctgagggcgcggcgggaggttctccgagaggttgggggtcgggcactgactctgagtcgccagtctgcccaaagttgagcttctttttagcgggctgctggcctttcttgccgatgcccgtggaggagtcgggggattctatgggtctcttctttccaggagccgtcttagcgacttcctcaaccagaccgagaggttcgagaacccgcttcttggcctggaagactgctcgcccgaggttgcccccaaaagacgtatcttcttgaagacgctcctgaaactcggcgtcggcgtggttgtacttgaggtacgggttgtccccctgctcgagctgcttgtcgtaggccttgtcgtgctcgagggccgcggcgtctgcctcgttgaccggctctcccttgtcgagtccgttgaagggtctgaggtacttgtagccaggaagcaccagaccccggccgtcgtcctgcttttgctggttggctttgggtttcggggctccaggtttcaagtcccaccactcgcgaatgccctcagagaggttgtcctcgagccaatctggaagataaccatcggcagccatacctggtttaagtcatttattgctcagaaacacagtcatccaggtccacgttgaccagatcgcaggccgagcaagcaatctcgggagcccgccccagcagatgatgaatggcacagagtttccgatacgtcctctttctgacgaccggttgagattctgacacgccggggaaacattctgaacagtctctggtcccgtgcgtgaagcaaatgttgaaattctgattcactctctcgcatgtcttgcagggaaacagcatctgaagcatgcccgcgtgacgagaacatttgttttggtacctgtcggcaaagtccaccggagctccttccgcgtctgacgtcgatggattcgcgactgaggggcaggcccgcttgggctcgcttttatccgcgtcatcgggggcgggtctcttgttggccccaccctttctgacgtagaacccatgcgccacctcggtcacgtgatcctgcgcccagcggaagaaccttttgacttcctgctttgtcaccttgccaaagttatgctccagacggcgggtgggttcaaatttgaacatccggtcctgcaacggctgctggtgctcgaaggtggcgctgttcccgtcaatcacggcgcacatgttggtgttggaggtgacggtcacgggggtggggtcgatctgggcggacgacttgcacttttggtccacgcgcaccttgctgccgccgagaatggccttggcggactccacgaccttggccgtcatcttgccctcctcccaccagatcaccatcttgtcggcgcaatcgttgaagggaaagttctcattggtccagttgacgcagccgtagaaagggcgaattc

SEQ ID NO: 4821 - DNA, 3102 bp, Adeno-associated virus
  source 1..3102: mol_type = other DNA
gcggccgcgaattcgcccttcgcagagaccaaagttcaactgaaacgaatcaaccggtttattgattaacaagtaattacaggttacgggtgaggtaacgggtgccaatggggcgaggctcagtataaaccccttcgttgttgacagcaaattccacattattagacttggcataatttgaggtgtactgaatctctggattccagcgtttgctgttttctttctgcagttcccactcgatctccacgctgacctggccggtgctgtactgcgtgataaatgaggcaaacttggcaggagtaaacacctctggaggattagcaggtaccggggtgtttttgatgagaatttgaggaggcgggtgtttgagtccaaatccgcccatcaggggagacgggtgaaagttgccgtccgtgtgaggaatttcggcccagatgggaccctgcaggtacacgtcccggttctgccagaccatgccgggcagagccccctggctgttgacagtctgtgtccggggtccggccgtagacgattgcaggttgctggagaccacaccgtattcttctgtagccacgggattggtggttttgatctcctcctcgctggtcattagcacgttttccagcgttgtcttgttggcagcccccgttttgccaaaaaccagcactccgttgatgggaaggaactggtcctcgtcgtccttgttggtggccatggctacgcccgggttggttaatgaatttctaccattcagatggtatttagtggccccggtccaggcaaagttactgttgttgttgctgtctatgttttttgacagtctctgctgccgataacagggtccgggcagccagttctttgattgctcggccacggtgttgggcccagcctgatggaactgcagctcccttgtggaccccgtagtgctctgggtccgggccaggtagtacaggtactggtcgatgaggggattcatcagccggtccaggctctggctgtgcgcatagctgctgtggaaaggcacttcctcaaaggtgtagctgaattcaaagttattgcccgttctcagcatctgagaaggaaagtactccaggcagcagaaggaggaacgtcccacagactgactgccgttgtttagagtcagatatccgtactgaggaatcatgaacacgtccgcagggaacggagggaggcagccctggtgcgcagagccgaggacgtacggcagttggtactccgagtccgagaagacctgaatcgtgctggtaaggttattagcgatggtcgtaacgccgtcgttcgtcgtgacctccttgacctggatgttgaacaacttgaaccgcagctttctgggccggaatccccagttgttgttgatgagtcgctgccagtcacgtggtgagaagtggcagtggaatctgttgaagtcaaaatagccccagggggtgctgtagccgaagaagtggttgtcgttggtagccccgctctgacttgatatctgcttgtagaggtggttgttgtaggtgggcagggcccaggtgcgggtgctggtggtgatgactctgtcgcccagccatgtggaatcgcaatgccaatttccggaggcattacccactccgtcggcgccttcgttattgtctgccattggtgcgccaccgcctgcagccattgtaccagatcccagacctgagggcgcggcgggaggttctccgagaggttgggggtcgggcactgactctgagtcgccagtctgcccaaagttgagcttctttttagcgggctgctggcctttcttgccgatgcccgtggaggagtcgggggattctatgggtctcttctttccggaagccgtcttagcgccttcctcaaccagaccgagaggttcgagaacccgcttcttggcctggaagactgctcgcccgaggttgcccccaaaagacgtatcttcttgaagacgctcctgaaactcggcgtcggcgtggttgtacttgaggtacgggttgtccccctgctcgagctgcttgtcgtaggccttgtcgtgctcgagggccgcggcgtctgcctcgttgaccggctctcccttgtcgagtccgttgaagggtccgaggtacttgtagccaggaagcaccagaccccggccgtcgtcctgcttttgctggttggctttgggtttcggggctccaggtttcaagtcccaccactcgcgaatgccctcagagaggttgtcctcgagccaatctggaagataaccatcggcagccatacctggtttaagtcatttattgctcagaaacacagtcatccaggtccacgttgaccagatcgcaggccgagcaagcaatctcgggagcccgccccagcagatgatgaatggcacagagtttccgatacgtcctctttctgacgaccggttgagattctgacacgccggggaaacattctgaacagtctctggtcccgtgcgtgaagcaaatgttgaaattctgattcattctctcgcatgtcttgcagggaaacagcatctgaagcatgcccgcgtgacgagaacatttgttttggtacctgtcggcaaagtccaccggagctccttccgcgtctgacgtcgatggatccgcgactgaggggcaagcccgcttgggctcgcttttatccgcgtcatcgggggcgggtctcttgttggctccaccctttctgacgtagaactcatgcgccacctcggtcacgtgatcctgcgcccagcggaagaactctttgacttcctgctttgtcaccttgccaaagtcatgctccagacggcgggtgagttcaaatttgaacatccggtcttgtaacggctgctggtgctcgaaggtggtgctgttcccgtcaatcacggcgcacatgttggtgttggaagtgacgatcacgggggtgggatcgatctgggcggacgacttgcacttttggtccacgcgcaccttgctgccgccgagaatggccttggcggactccacgaccttggccgtcatcttgccctcctcccaccagatcaccatcttgtcgacgcaatcgttgaagggaaagttctcattggtccagttgacgcagccgaagggcgaattc

SEQ ID NO: 4822 - protein, 728 aa, Adeno-associated virus
MAADGYLPDWLEDNLSEGIREWWDLKPGAPKPKANQQKQDDGRGLVLPGYRYLGPFNGLDKGEPVNEADAAALEHDKAYDKQLEQGDNPYLKYNHADAEFQERLQEDTSFGGNLGRAVFQAKKRVLEPLGLVEEGAKTAPGKKRPIESPDSSTGIGKNGQPPAKKKLNFGQTGDSESVPDPQPLGEPPAAPSGLGSGTMAAGGGAPMADNNEGADGVGNASGNWHCDSTWLGDRVITTSTRTWALPTYNNHLYKQISSQSGATNDNHFFGYSTPWGYFDFNRFHCHFSPRDWQRLINNNWGFRPRKLRFKLFNIQVKEVTTNDGVTTIANNLTSTIQVFSDSEYQLPYVLGSAHQGCLPPFPADVFMIPQYGYLTLNNGSQSVGRSSFYCLEYFPSQMLRTGNNFEFSYTFEEVPFHSSYAHSQSLDRLMNPLIDQYLYYLARTQSTTGSTRELQFHQAGPNTMAEQSKNWLPGPCYRQQRLSKNIDSNNNSNFAWTGATKYHLNGRNSLTNPGVAMATNKDDEDQFFPINGVLVFGKTGAANKTTLENVLMTSEEEIKTTNPVATEEYGVVSSNLQSSTAGPQTQTVNSQGALPGMVWQNRDVYLQGPIWAKIPHTDGNFHPSPLMGGFGLKHPPPQILIKNTPVPANPPEVFTPAKFASFITQYSTGQVSVEIEWELQKENSKRWNPEIQYTSNYAKSNNVEFAVNNEGVYTEPRPIGTRYLTRNL

SEQ ID NO: 4823 - DNA, 2187 bp, Adeno-associated virus
  source 1..2187: mol_type = other DNA
atggctgccgatggttatcttccagattggctcgagggcaacctctctgagggcattcgcgagtggtgggacttgaaacctggagccccgaaacccaaagccaaccagcaaaagcaggacgacggccggggtctggtgcttcctggctacaggtacctcggacccttcaacggactcgacaagggagagccggtcaacgaggcagacgccgcggccctcgagcacgacaaggcctacgacaagcagctcgagcagggggacaacccgtacctcaagtacaaccacgccgacgccgagtttcaggagcgtcttcaagaagatacgtcttttgggggcaacctcgggcgagcagtcttccaggccaagaagcgggttctcgaacctctcggtctggttgaggaaggcgctaagacggctcctggaaagaagagacccatagaatcccccgactcctccacgggcatcggcaagaacggccagccgcccgctaaaaagaagctcaactttgggcagactggcgactcagagtcagtgcccgacccccaacctctcggagaacctcccgccgcgccctcaggtctgggatctggtacaatggctgcaggcggtggcgcaccaatggcagacaataacgaaggcgccgacggagtgggtaatgcctccggaaattggcattgcgattccacatggctgggcgacagagtcatcaccaccagcacccgcacctgggccctgcccacctacaacaaccacctctacaagcagatatcaagtcagagcggggctaccaacgacaaccacttcttcggctacagcaccccctggggctattttgacttcaacagattccactgccacttctcaccacgtgactggcagcgactcatcaacaacaactggggattccggcccagaaagctgcggttcaagttgttcaacatccaggtcaaggaggtcacgacgaacgacggcgttacgaccatcgctaataaccttaccagcacgattcaggtcttctcggactcggagtaccaactgccgtacgtcctcggctctgcgcaccagggctgcctccctccgttccctgcggacgtgttcatgattcctcagtacggatatctgactctaaacaacggcagtcagtctgtgggacgttcctccttctactgcctggagtactttccttctcagatgctgagaacgggcgataactttgaattcagctacacctttgaggaagtgcctttccacagcagctatgcgcacagccagagcctggaccggctgatgaatcccctcatcgaccagtacctgtactacctggcccggacccagagcactacggggtccacaagggagctgcagttccatcaggctgggcccaacaccatggccgagcaatcaaagaactggctgcccggaccctgttatcggcagcagagactgtcaaaaaacatagacagcaacaacaacagtaactttgcctggaccggggccactaaataccatctgaatggtagaaattcattaaccaacccgggcgtagccatggccaccaacaaggacgacgaggaccagttctttcccatcaacggagtgctggtttttggcaaaacgggggctgccaacaagacaacgctggaaaacgtgctaatgaccagcgaggaggagatcaaaaccaccaatcccgtggctacagaagaatacggtgtggtctccagcaacctgcaatcgtctacggccggaccccagacacagactgtcaacagccagggggctctgcccggcatggtctggcagaaccgggacgtgtacctgcagggtcccatctgggccaaaattcctcacacggacggcaactttcacccgtctcccctgatgggcggatttggactcaaacacccgcctcctcaaattctcatcaaaaacaccccggtacctgctaatcctccagaggtgtttactcctgccaagtttgcctcatttatcacgcagtacagcaccggccaggtcagcgtggagatcgagtgggaactgcagaaagaaaacagcaaacgctggaatccagagattcagtacacctcaaattatgccaagtctaataatgtggaatttgctgtcaacaacgaaggggtttatactgagcctcgccccattggcacccgttacctcacccgtaacctgtaa

SEQ ID NO: 4824 - protein, 728 aa, Adeno-associated virus; identical to SEQ ID NO: 4803

SEQ ID NO: 4825 - DNA, 3106 bp, Adeno-associated virus
  source 1..3106: mol_type = other DNA
gcggccgcgaattcgcccttcgcagagaccaaagttcaactgaaacgaatcagccggtttattgattaacaagtaattacaggttacgggtgaggtaacgggtgccaatggggcgaggctcagtataaaccccttcgttgttgacagcaaattccacattattagacttggcataatttgaggtgtactgaatctctggattccagcgtttgctgttttctttctgcagttcccactcgatctccacgctgacctggccggtgctgtactgcgtgataaatgaggcaaacttggcaggagtaaacacctctggaggattagcaggtaccggggtgtttttgatgagaatttgaggaggcgggtgtttgagtccaaatccgcccatcaggggagacgggtgaaagttgccgtccgtgtgaggaattttggcccagatgggaccctgcaggtacacgtcccggttctgccagaccatgccgggcagagccccctggctgttgacagtctgtgtctggggtccggccgtagacgattgcaggttgctggagaccacaccgtattcttctgtagccacgggattggtggttttgatctcctcctcgctggtcattagcacgttttccagcgttgtcttgttggcagcccccgttttgccaaaaaccagcactccgttgatgggaaagaactggtcctcgtcgtccttgttggtggccatggctacgcccgggttggttaatgaatttctaccattcagatggtatttagtggccccggtccaggcaaagttactgttgttgttgctgtctatgttttttgacagtctctgctgccgataacagggtccgggcagccagttctttgattgctcggccatggtgttgggcccagcctgatggaactgcagctcccttgtggaccccgtagtgctctgggtccgggccaggtagtacaggtactggtcgatgaggggattcatcagccggtccaggctctggctgtgcgcatagctgctgtggaaaggcacttcctcaaaggtgtagctgaattcaaagttatcgcccgttctcagcatctgagaaggaaagtactccaggcagtagaaggaggaacgtcccacagactgactgccgttgtttagagtcagatatccgtactgaggaatcatgaacacgtccgcagggaacggagggaggcagccctggtgcgcagagccgaggacgtacggcagttggtactccgagtccgagaagacctgaatcgtgctggtaaggttattagcgatggtcgtaacgccgtcgttcgtcgtgacctccttgacctggatgttgaacaacttgaaccgcagctttctgggccggaatccccagttgttgttgatgagtcgctgccagtcacgtggtgagaagtggcagtggaatctgttgaagtcaaaatagccccagggggtgctgtagccgaagaagtggttgtcgttggtagccccgctctgacttgatatctgcttgtagaggtggttgttgtaggtgggcagggcccaggtgcgggtgctggtggtgatgactctgtcgcccagccatgtggaatcgcaatgccaatttccggaggcattacccactccgtcggcgccttcgttattgtctgccattggtgcgccaccgcctgcagccattgtaccagatcccagacctgagggcgcggcgggaggttctccgagaggttgggggtcgggcactgactctgagtcgccagtctgcccaaagttgagcttctttttagcgggcggctggccgttcttgccgatgcccgtggaggagtcgggggattctatgggtctcttctttccaggagccgtcttagcgccttcctcaaccagaccgagaggttcgagaacccgcttcttggcctggaagactgctcgcccgaggttgcccccaaaagacgtatcttcttgaagacgctcctgaaactcggcgtcggcgtggttgtacttgaggtacgggttgtccccctgctcgagctgcttgtcgtaggccttgtcgtgctcgagggccgcggcgtctgcctcgttgaccggctctcccttgtcgagtccgttgaagggtccgaggtacctgtagccaggaagcaccagaccccggccgtcgtcctgcttttgctggttggctttgggtttcggggctccaggtttcaagtcccaccactcgcgaatgccctcagagaggttgccctcgagccaatctggaagataaccatcggcagccatacctggtttaagtcatttattgctcagaaacacagtcatccaggtccacgttggccagatcgcaggccgagcaagcaatctcgggagcccgccccagcagatgatgaatggcacagagtttccgatacgtcctctttctgacgaccggttgagattctgacacgccggggaaacattctgaacagtctctggtcccgtgcgtgaagcaaatgttgaaattctgattcattctctcgcatgtcttgcaggggaacagcatctgaagcatgcccgcgtgacgagaacatttgttttggtacctgtcggcaaagtccaccggagctccttccgcgtctgacgtcgatggatccgcgactgaggggcaggcccgcttgggctcgcttttatccgcgtcatcgggggcgggtctcttgttggctccaccctttctgacgtagaactcatacgccacctcggtcacgtgatcctgcgcccagcggaagaactctttgacttcctgctttgtcaccttgccaaagtcatgctccagacggcgggtgagttcaaatttgaacatccggtcttgtaacggctgctggtgctcgaaggtggtgctgttcccgtcaatcacggcgcacatgttggtgttggaagtgacgatcacgggggtgggatcgatctgggcggacgacttgcacttttggtccacgcgcaccttgctgccgccgagaatggccttggcggactccacgaccttggccgtcatcctgccctcctcccaccagatcaccatcttgtcgacgcaatcgttgaagggaaagttctcattggtccagttgacgcagccgtagaaagggcgaattc

SEQ ID NO: 4826 - protein, 728 aa, Adeno-associated virus
MAADGYLPDWLEDNLSEGIREWWDLKPGAPKPKANQQKQDDGRGLVLPGYRYLGPFNGLDKGEPVNEADAAALEHDKAYDKQLEQGDNPYLKYNHADAEFQERLQEDTSFGGNLGRAVFQAKKRVLEPLGLVEEGAKTAPGKKRPIESPDSSTGIGKNGQPPAKKKLNFGQTGDSESVPDPQPLGEPPAAPSGLGSGTMAAGGGAPMADNNEGADGVGNASGNWHCDSTWLGDRVITTSTRTWALPTYNNHLYKQISSQSGATNDNHFFGYSTPWGYFDFNRFHCHFSPRDWQRLINNNWGFRPRKLRFKLFNIQVKEVTTNDGVTTIANNLTSTIQVFSDSEYQLPYVLGSAHQGCLPPFPADVFMIPQYGYLTLNNGSQSVGRSSFYCLEYFPSQMLRTGDNFEFSYTFEEVPFHSSYAHSQSLDRLMNPLIDQYLYYLARTQSTTGSTRELQFHQAGPNTMAEQSKNWLPGPCYRQQRLSKNIDSNNNSNFAWTGATKYHLNGRNSLTNPGVAMATNKDDEDQFFPINGVLVFGKTGAANKTTLENVLMTSEEEIKTTNPVATEEYGVVSSNLQSSTAGPQTQTVNSQGALPGMVWQNRDVYLQGPIWAKIPHTDGNFHPSPLMGGFGLKHPPPQILIKNTPVPANPPEVFTPAKFASFITQYSTGQVSVEIEWELQKENSKRWNPEIQYTSNYAKSNNVEFAVNNEGVYTEPRPIGTRYLTRNL

SEQ ID NO: 4827 - protein, 728 aa, Adeno-associated virus; identical to SEQ ID NO: 4822

SEQ ID NO: 4828 - protein, 728 aa, Adeno-associated virus
MAADGYLPDWLEDNLSEGIREWWDLKPGAPKPKANQQKQDDGRGLVLPGYKYLGPFNGLDKGEPVNEADAAALEHDKAYDKQLEQGDNPYLKYNHADAEFQERLQEDTSFGGNLGRAVFQAKKRVLEPLGLVEEGAKTAPGKKRPIESPDSSTGIGKNGQPPAKKKLNFGQTGDSESVPDPQPLGEPPAAPSGLGSGTMAAGGGAPMADNNEGADGVGNASGNWHCDSTWLGDRVITTSTRTWALPTYNNHLYKQISSQSGATNDNHFFGYSTPWGYFDFNRFHCHFSPRDWQRLINNNWGFRPRKLRFKLFNIQVKEVTTNDGVTTIANNLTSTIQVFSDSEYQLPYVLGSAHQGCLPPFPADVFMIPQYGYLTLNNGSQSVGRSSFYCLEYFPSQMLRTGNNFEFSYTFEEVPFHSSYAHSQSLDRLMNPLIDQYLYYLARTQSTTGSTRELQFHQAGPNTMAEQSKNWLPGPCYRQQRLSKNIDSNNNSNFAWTGATKYHLNGRNSLTNPGVAMATNKDDEDQFFPINGVLVFGKTGAANKTTLENVLMTSEEEIKTTNPVATEEYGVVSSNLQSSTAGPQTQTVNSQGALPGMVWQNRDVYLQGPIWAKIPHTDGNFHPSPLMGGFGLKHPPPQILIKNTPVPANPPEVFTPAKFASFITQYSTGQVSVEIEWELQKENSKRWNPEIQYTSNYAKSNNVEFAVNNEGVYTEPRPIGTRYLTRNL

SEQ ID NO: 4829 - protein, 728 aa, Adeno-associated virus
MAADGYLPDWLEDNLSEGIREWWDLKPGAPKPKANQQKQDDGRGLVLPGYKYLGPFNGLDKGEPVNEADAAALEHDKAYDKQLEQGDNPYLKYNHADAEFQERLQEDTSFGGNLGRAVFQAKKRVLEPLGLVEEGAKTAPGKKRPIESPDSSTGIGKKGQQPAKKKLNFGQTGDSESVPDPQPLGEPPAAPSGLGSGTMAAGGGAPMADNNEGADGVGNASGNWHCDSTWLGDRVITTSTRTWALPTYNNHLYKQISSQSGATNDNHFFGYSTPWGYFDFNRFHCHFSPRDWQRLINNNWGFRPRKLRFKLFNIQVKEVTTNDGVTTIANNLTSTIQVFSDSEYQLPYVLGSAHQGCLPPFPADVFMIPQYGYLTLNNGSQSVGRSSFYCLEYFPSQMLRTGNNFEFSYTFEEVPFHSSYAHSQSLDRLMNPLIDQYLYYLARTQSTTGSTRELQFHQAGPNTMAEQSKNWLPGPCYRQQRLSKNIDSNNNSNFAWTGATKYHLNGRNSLTNPGVAMATNKDDEDQFFPINGVLVFGKTGAANKTTLENVLMTSEEEIKTTNPVATEEYGVVSSNLQSSTAGPQTQTVNSQGALPGMVWQNRDVYLQGPIWAKIPHTDGNFHPSPLMGGFGLKHPPPQILIKNTPVPANPPEVFTPAKFASFITQYSTGQVSVEIEWELQKENSKRWNPEIQYTSNYAKSNNVEFAVNNEGVYTEPRPIGTRYLTRNL

SEQ ID NO: 4830 - DNA, 3098 bp, Adeno-associated virus
  source 1..3098: mol_type = other DNA
gaattcgcccttcgcagagaccaaagttcaactgaaacgaatcaaccggtttattgattaacaagtaattacaggttacgggtgaggtaacgggtgccaatggggcgaggctcagtataaaccccttcgttgttgacagcaaattccacattattagacttggcataatttgaggtgtactgaatctctggattccagcgtttgctgttttctttctgcagttcccactcgatctccacgctgacctggccggtgctgtactgcgtgataaatgaggcaaactaggcaggagtaaacacccctggaggattagcaggtaccggggtgtttttgatgagaatttgaggaggcgggtgtttgagtccaaatccgcccatcaggggagacgggtgaaagttgccgtccgtgtgaggaattttggcccagatgggaccctgcaggtacacgtcccggttctgccagaccatgccgggcagagccccctggctgttgacagtctgtgtctggggtccggccgtagacgattgcaggttgctggagaccacaccgtattcttctgtagccacgggattggtggttttgatctcctcctcgctggtcattagcacgttttccagcgttgtcttgttggcagcccccgttttgccaaaaaccagcactccgttgatgggaaagaactggccctcgtcgtccttgttggtggccatggctacgcccgggttggttaatgaatttctaccattcagatggtatttagtggccccggtccaggcaaagttactgttgttgttgctgtctatgttttttgacagtctctgctgccgataacagggtccgggcagccagttctttgattgctcggccatggtgttgggcccagcctgatggaactgcagctcccttgtggaccccgtagtgctctgggtccgggccaggtagtacaggtactggtcgatgaggggattcatcagccggtccaggctctggctgtgcgcatagctgctgtggaaaggcacttcctcaaaggtgtagctgaattcaaagttattgcccgttctcagcatctgagaaggaaagtactccaggcagtagaaggaggaacgtcccatagactgactgccgttgtttagagtcagatatccgtactgaggaatcatgaacacgtccgcagggaacggagggaggcagccctggtgcgcagagccgaggacgtacggcagttggtactccgagtccgagaagacctgaatcgtgctggtaaggttattagcgatggtcgtaacgccgtcgttcgtcgtgacctccttgacctggatgttgaacaacttgaaccgcagctttctgggccggaatccccagttgttgttgatgagtcgctgccagtcacgtggtgagaagtggcagtggaatctgttgaagtcaaaatagccccagggggtgctgtagccgaagaagtggttgtcgttggtagccccgctctgacttgatatctgcttgtagaggtggttgttgtaggtgggcagggcccaggtgcgggtgctggtggtgatgactctgtcgcccagccatgtggaatcgcaatgccaatttccggaggcattacccactccgtcggcgccttcgttattgtctgccattggtgcgccaccgcctgcagccattgtaccagatcccagacctgagggcgcggcgggaggttctccgagaggttgggggtcgggcactgactctgagtcgccagtctgcccaaagttgagcttctttttagcgggctgctggcctttcttgccgatgcccgtggaggagtcgggggattctatgggtctcttctttccaggagccgtcttagcgccttcctcaaccagaccgagaggttcgagaacccgcttcttggcctggaagactgctcgcccgaggttgcccccaaaagacgtatcttcttgaagacgctcctgaaactcagcgtcggcgtggttgtacttgaggtacgggttgtccccctgctcgagctgcttgtcgtaggccttgtcgtgctcgagggccgcggcgtctgcctcgttgaccggctctcccttgtcgagtccgttgaagggtccgaggtacttgtagccaggaagcaccagaccccggccgtcgtcctgcttttgctggttggctttgggtttcggggctccaggtttcaagtcccaccactcgcgaatgccctcagagaggttgtcctcgagccaatctggaagataaccatcggcagccatacctggtttaagtcatttattgctcagaaacacagtcatccaggtccacgttgaccagatcgcaggccgagcaagcaatctcgggagcccgccccagcagatgatgaatggcacagagtttccgatacgtcctctttctgacgaccggttgagattctgacacgccggggaaacattctgaacagtctctggtcccgtgcgtgaagcaaatgttgaaattctgattcattctctcgcatgtcttgcagggaaacagcatctgaagcatgcccgcgtgacgagaacatttgttttggtacctgtcggcaaagtccaccggagctccttccgcgtctgacgtcgatggatccgcgactgaggggcaggcccgcttgggctcgcttttatccgcgtcatcgggggcgggcctcttgttggctccaccctttctgacgtagaactcatgcgccacctcggtcacgtgatcctgcgcccagcggaagaactctttgacttcctgctttgtcaccttgccaaagtcctgctccagacggcgggtgagttcaaatttgaacatccggtcttgtaacggctgctggtgctcgaaggtggtgctgttcccgtcaatcacggcgcacatgttggtgttggaagtgacgatcacgggggtgggatcgatctgggcggacgacttgcacttttggtccacgcgcaccttgctgccgccgagaatggccttggcggactccacgaccttggccgtcatcttgccctcctcccaccagatcaccatcttgtcgacgcaatcgttgaagggaaagttctcattggtccagttgacgcagccgtagaaagggcgaattc

SEQ ID NO: 4831 - protein, 729 aa, Adeno-associated virus
MAADGYLPDWLEDNLSEGIREWWDLKPGAPKPKANQQKQDDGRGLVLPGYKYLGPFNGLDKGEPVNAADAAALEHDKAYDQQLKAGDNPYLRYNHADAEFQERLQEDTSFGGNLGRAVFQAKKRVLEPLGLVEEGAKTAPGKKRPIDSPDSSTGIGKKGQQPAKKKLNFGQTGDSESVPDPQPLGEPPAAPSSVGSGTMAAGGGAPMADNNEGADGVGNASGNWHCDSTWLGDRVITTSTRTWALPTYNNHLYKQISSSSSGATNDNHYFGYSTPWGYFDFNRFHCHFSPRDWQRLINNNWGFRPKKLRFKLFNIQVKEVTTNDGVTTIANNLTSTVQVFSDSEYQLPYVLGSAHQGCLPPFPADVFMIPQYGYLTLNNGSQSVGRSSFYCLEYFPSQMLRTGNNFEFSYSFEDVPFHSSYAHSQSLDRLMNPLIDQYLYYLARTQSTTGSTRELQFHQAGPNTMAEQSKNWLPGPCYRQQGLSKNLDFNNNSNFAWTAATKYHLNGRNSLTNPGIPMATNKDDEDQFFPINGVLVFGKTGAANKTTLENVLMTSEEEIKTTNPVATEEYGVVSSNLQPSTAGPQSQTINSQGALPGMVWQNRDVYLQGPIWAKIPHTDGNFHPSPLMGGFGLKHPPPQILIKNTPVPANPPEVFTPAKFASFITQYSTGQVSVEIEWELQKENSKRWNPEIQYTSNYAKSNNVEFAVNPDGVYTEPRPIGTRYLPRNL

SEQ ID NO: 4832 - protein, 1458 aa, Adeno-associated virus
MAADGYLPDWLEDNLSEGIREWWDLKPGAPKPKANQQKQDDGRGLVLPGYKYLGPFNGLDKGEPVNAADAAALEHDKAYDQQLKAGDNPYLRYNHADAEFQERLQEDTSFGGNLGRAVFQAKKRVLEPLGLVEEGAKTAPGKKRPIDSPDSSTGIGKKGQQPAKKKLNFGQTGDSESVPDPQPLGEPPAAPSSVGSGTMAAGGGAPTADNNEGADGVGNASGNWHCDSTWLGDRVITTSTRTWALPTYNNHLYKQISSSSSGATNDNHYFGYSTPWGYFDFNRFHCHFSPRDWQRLINNNWGFRPKKLRFKLFNIQVKEVTTNDGVTTIANNLTSTVQVFSDSEYQLPYVLGSAHQGCLPPFPADVFMIPQYGYLTLNNGSQSVGRSSFYCLEYFPSQMLRTGNNFEFSYSFEDVPFHSSYAHSQSLDRLMNPLIDQYLYYLARTQSTTGSTRELQFHQAGPNTMAEQSKNWLPGPCYRQQRLSKNLDFNNNSNFAWTAATKYHLNGRNSLTNPGIPMATNKDDEDQFFPINGVLVFGKTGAANKTTLENVLMTSEEEIKTTNPVATEEYGVVSSNLQSSTAGPQSQTINSQGALPGMVWQNRDVYLQGPIWAKIPHTDGNFHPSPLMGGFGLEHPPPQILIKNTPVPANPPEVFTPAKFASFITQYSTGQVSVEIEWELQKENSKRWNPEIQYTSNYAKSNNVEFAVNPDGVYTEPRPIGTRYLTRNLMAADGYLPDWLEDNLSEGIREWWDLKPGAPKPKANQQKQDDGRGLVLPGYKYLGPFNGLDKGEPVNAADAAALEHDKAYDQQLKAGDNPYLRYNHADAEFQERLQEDTSFGGNLGRAVFQAKKRVLEPLGLVEEGAKTAPGKKRPIGSPDSSTGIGKKGQQPAKKKLNFGQTGDSESVPDPQPLGEPPAAPSSVGSGTMAAGGGAPMADNNEGADGVGNASGNWHCDSTWLGDRVITTSTRTWALPTYNNHLYKQISSSSSGATNDNHYFGYSTPWGYFDFNRFHCHFSPRDWQRLINNNWGFRPKKLRFKLLNIQVKEVTTNDGVTTIANNLTSTVQVFSDSEYQLPYVLGSAHQGCLPPFPADVFMIPQYGYLTLDNGSQSVGRSSFYCLEYFPSQMLRTGNNFEFSYSFEDVPFHSSYAHSQSLDRLMNPLIDQYLYYLARTQSTTGSTRELQFHQAGPNTMAEQSKNWLPGPCYRQQRLSKNLDFNNNSNFAWTAATKYHLNGRNSLTNPGIPMATNKDDEDQFFPINGVLVFGKTGAANKTTLENVLMTSEEEIKTTNPVATEEYGVVSSNLQSSTAGPQSQTINSQGALPGMVWQNRDVYLQGPIWAKIPHTDGNFHPSPLMGGFGLKHPPPQILIKNTPVPANPPEVFTPAKFASFITQYSTGQVSVEIEWELQKENSKRWNPEIQYTSNYAKSNNVEFAVNPDGVYTEPRPIGTRYLTRNL

SEQ ID NO: 4833 - protein, 729 aa, Adeno-associated virus
MAADGYLPDWLEDNLSEGIREWWDLKPGAPKPKANQQKQDDGRGLVLPGYKYLGPFNGLDKGEPVNAADAAALEHDKAYDQQLKAGDNPYLRYNHADAEFQERLQEDTSFGGNLGRAVFQAKKRVLEPLGLVEEGAKTAPGKKRPIDSPDSSTGIGKKGQQPAKKKLNFGQTGDSESVPDPQPLGEPPAAPSSVGSGTMAAGGGAPTADNNEGADGVGNASGNWHCDSTWLGDRVITTSTRTWALPTYNNHLYKQISSSSSGATNDNHYFGYSTPWGYFDFNRFHCHFSPRDWQRLINNNWGFRPKKLRFKLFNIQVKEVTTNDGVTTIANNLTSTVQVFSDSEYQLPYVLGSAHQGCLPPFPADVFMIPQYGYLTLNNGSQSVGRSSFYCLEYFPSQMLRTGNNFEFSYSFEDVPFHSSYAHSQSLDRLMNPLIDQYLYYLARTQSTTGSTRELQFHQAGPNTMAEQSKNWLPGPCYRQQRLSKNLDFNNNSNFAWTAATKYHLNGRNSLTNPGIPMATNKDDEDQFFPINGVLVFGKTGAANKTTLENVLMTSEEEIKTTNPVATEEYGVVSSNLQSSTAGPQSQTINSQGALPGMVWQNRDVYLQGPIWAKIPHTDGNFHPSPLMGGFGLEHPPPQILIKNTPVPANPPEVFTPAKFASFITQYSTGQVSVEIEWELQKENSKRWNPEIQYTSNYAKSNNVEFAVNPDGVYTEPRPIGTRYLTRNL

SEQ ID NO: 4834 - DNA, 3075 bp, Adeno-associated virus
  source 1..3075: mol_type = other DNA
tgagaactttcctttcaacgattgcgtcggacaagatggtgatctggtgggaggaggggaagatgaccgccaaggtcgtggagtcggccaaagccattcttggaggaagcaaggtgcgtgtggaccagaaatgcaagtcctcggcccagatagacccgactcccgtgatcgtcacctccaacaccaacatgtgcgccgtgattgacgggaactcaacgaccttcgagcaccagcagccgttgcaagaccggatgttcaaatttgaacttacccgccgtctggatcatgactttggaaaggtcaccaagcaggaagtgaaagactttttccggtgggcaaaggatcacgtggttgaggtggagcatgaattctacgtcaaaaagggtggagctaagaaaagacccgcccccagtgacgcagatataagtgagcccaaacgggcgcgcgagtcagttgcgcagccatcaacgtcagacgcggaagcttcgatcaactacgcggacaggtaccaaaaacaaatgttctcgtcacgtgggcatgaatctgatgctgtttccctgcagacaatgcgagagaatgaatcagaattcaaatatctgcttcactcacggacagaaagactgtttagagtgctttcccgtgtcagaatctcaacccgtttctgtcgtcaaaaaggcgtatcagaaactgtgctacattcatcatatcatgggaaaggtgccagacgcttgcactgcctgcgatctggtcaatgtggatttggatgactgcatctctgaacaataaatgatttaaatcaggtatggctgccgatggttatcctccagattggctcgaggacactctctctgaagggataagacagtggtggaagctcaaacctggcccaccaccaccaaagcccgcagagcggcataaggacgacagcaggggtcttgtgcttcctgggtacaagtacctcggacccttcaacggactcgacaagggggagccggtcaacgaggcagacgccgcggccctcgagcacgacaaggcctacgaccggcagctcgacagcggagacaacccgtacctcaagtacaaccacgccgacgcagagtttcaggagcgccttaaagaagatacgtcttttgggggcaacctcggacgagcagtcttccaggcgaaaaagagggttcttgaacctctgggcctggttgaggaacctgttaagacggctccgggaaaaaagaggccggtagagcactctcctgtggagccagactcctcctcgggaaccggaaaagcgggccagcggcctgcaagaaaaagattaaattttggtcagactggagacgcagactccgtacctgacccccagcctctcggacagccaccagcagccccctctggtctgggatctactacaatggctacaggcagtggcgcaccaatggcagacaataacgagggtgccgatggagtgggtaattcctcaggaaattggcattgcgattcccaatggctgggcgacagagtcatcaccaccagcacccgaacctgggccctgcccacatacaacaaccacctctacaagcaaatctccagccaatcaggagccagcaacgacaaccactactttggctacagcaccccctgggggtattttgacttcaacagattccactgccacttttcaccacgtgactggcaaagactcatcaacaacaactggggattccggcccaaaagactcaacttcaagctctttaatattcaagtcaaagaggtcacgcagaatgacggtacgacgacgattgccaataaccttaccagcacggttcaggtgtttactgactcggagtaccagctcccgtacgtcctgggctcggcgcatcaaggatgcctcccgccgtttccagcggacgtcttcatggtcccacagtatggatacctcaccctgaacaacgggagtcaggcggtaggacgctcttccttttactgcctggagtactttccttctcagatgctgcgtactggaaacaactttcagttcagctacacttttgaagacgtgcctttccacagcagctacgctcacagccagagtctggatcggctgatgaatcctctgatcgaccagtacctgtattatctgaacaagacacaaacaaatagtggaactcttcagcagtctcggctactgtttagccaagctggaccaaccaacatgtctcttcaagctaaaaactggctgcctggaccttgctacagacagcagcgtctgtcaaaacaggcaaacgacaacaacaacagcaactttccctggactgcagctacaaagtatcatctaaatggccgggactcgttggttaatccaggaccagctatggccagtcacaaggatgacgaagaaaagtttttccccatgcatggaaccctgatatttggtaaacaaggaacaaatgccaacgacgcggatttggaaaatgtcatgattacagatgaagaagaaatcagggccaccaatcccgtggctacggagcagtacgggactgtgtcaaataatttgcaaaactcaaacactggtccaactactggaactgtcaatcgccaaggagcgttacctggtatggtgtggcaggatcgagacgtgtacctgcagggacccatttgggccaagattcctcacaccgatggacactttcatccttctccactgatgggaggttttggactcaaacacccgcctcctcagatcatgatcaaaaacactcccgttccagccaatcctcccacaaacttcagttctgccaagtttgcttctttcatcacacagtattccacgggacaggtcagcgtggagatcgagtgggagctgcagaaggagaacagcaaacgctggaatcccgaaattcagtacacttccaactacaacaagtctgttaatgtggactttactgtggacactaatggtgtgtattcagagcctcgccccattggcaccagatacctgactcgtaatctgtaattgcttgttaatcaataaaccgtttaattcgtttcagttgaactttggtctctgcgaagggcgaa

SEQ ID NO: 4835 - DNA, 3142 bp, Adeno-associated virus
  source 1..3142: mol_type = other DNA
aaaacgacgggccagtgattgtaatacgactcactatagggcgaaattgaaattagcggccgcgaattcgcctttcgcagagaccaaagttcaactgaaacgaattaaacggtttattgattaacaagcaattacagattacgagtcaggtatctggtgccaatggggcgaggctctgaatacacaccattagtgtccacagtaaagtccacattaacagacttgttgtagttggaagtgtactgaatttcgggattccagcgtttgctgttctccttctgcagctcccactcgatctccacgctgacctgtcccgtggaatactgtgtgatgaaagaagcaaacttggcagaactgaagtttgtgggaggattggctggaacgggagtgtttttgatcatgatctgaggaggcgggtgtttgagtccaaaacctcccatcagtggagaaggatgaaagtgtccatcggtgtgaggaatcttggcccaaatgggtccctgcaggtacacgtctcgatcctgccacaccataccaggtaacgctccttggtgattgacagttccagtagttggaccagtgtttgagttttgcaaattatttgacacagtcccgtactgctccgtagccacgggattggtggccctgatttcttcttcatctgtaatcatgacattttccaaatccgcgtcgttggcatttgttccttgtttaccaaatatcagggttccatgcatggggaaaaacttttcttcgtcatccttgtgactggccatagctggtcctggattaaccaacgagtcccggccatttagatgatactttgtagctgcagtccagggaaagttgctgttgttgttgtcgtttgcctgttttgacagacgctgctgtctgtagcaaggtccaggcagccagtttttagcttgaagagacatgttggttggtccagcttggctaaacagtagccgagactgctgaagagttccactatttgtttgtgtcttgttcagataatacaggtactggtcgatcagaggattcatcagccgatccagactctggctgtgagcgtagctgctgtggaaaggcacgtcttcaaaagtgtagctgaactgaaagttgtttccagtacgcagcatctgagaaggaaagtactccaggcagtaaaaggaagagcgtcctaccgcctgactcccgttgttcagggtgaggtatccatactgtgggaccatgaagacgtccgctggaaacggcgggaggcatccttgatgcgccgagcccaggacgtacgggagctggtactccgagtcagtaaacacctgaaccgtgctggtaaggttattggcaatcgtcgtcgtaccgtcattctgcgtgacctctttgacttgaatattaaagagcttgaagttgagtcttttgggccggaatccccggttgttgttgacgagtctttgccagtcacgtggtgaaaagtggcagtggaatctgttgaagtcaaaatacccccagggggtgctgtagccaaagtagtggttgtcgttgctggctcctgattggctggagatttgcttgtagaggtggttgttgtatgtgggcagggcccaggttcgggtgctggtggtgatgactctgtcgcccagccattgggaatcgcaatgccaatttcctgaggaattacccactccatcggcaccctcgttattgtctgccattggtgcgccactgcctgtagccattgtagtagatcccagaccagagggggctgctggtggctgtccgagaggctgggggtcaggtacggagtctgcgtctccagtctgaccaaaatttaatctttttcttgcaggctgctggcccgcttttccggttcccgaggaggagtctggctccacaggagagtgctctaccggcctcttttttcccggagccgtcttaacaggctcctcaaccaggcccagaggttcaagaaccctctttttcgcctggaagactgctcgtccgaggttgcccccaaaagacgtatcttctttaaggcgctcctgaaactctgcgtcggcgtggttgtacttgaggtacgggttgtctccgctgtcgagctgccggtcgtaggccttgtcgtgctcgagggccgcggcgtctgcctcgttgaccggctcccccttgtcgagtccgttgaagggtccgaggtacttgtacccaggaagcacaagacccctgctgtcgtccttatgccgctctgcgggctttggtggtggtgggccaggtttgagcttccaccactgtcttattccttcagagagagtgtcctcgagccaatctggaagataaccatcggcagccatacctgatttaaatcatttattgttcagagatgcagtcatccaaatccacattgaccagatcgcaggcagtgcaagcgtctggcacctttcccatgatatgatgaatgtagcacagtttctgatacgcctttttgacgacagaaacgggttgagattctgacacgggaaagcactctaaacagtctttctgtccgtgagtgaagcagatatttgaattctgattcattctctcgcattgtctgcagggaaacagcatcagattcatgcccacgtgacgagaacatttgttttggtacctgtccgcgtagttgatcgaagcttccgcgtctgacgtcgatggctgcgcaactgactcgcgcgcccgtttgggctcacttatatctgcgtcactgggggcgggtcttttcttagctccaccctttttgacgtagaattcatgctccacctcaaccacgtgatcctttgcccaccggaaaaagtctttcacttcctgcttggtgacctttccaaagtcatgatccagacggcgggtaagttcaaatttgaacatccggtcttgcaacggctgctggtgctcgaaggtcgttgagttcccgtcaatcacggcgcacatgttggtgttggaggtgacgatcacgggagtcgggtctatctgggccgaggacttgcatttctggtccacacgcaccttgcttcctccaagaatggctttggccgactccacgaccttggcggtcatcttcccctcctcccaccagatcaccatcttgtcgacgcaatggtaaaaggaaagttctcattgg

SEQ ID NO: 4836 - DNA, 2208 bp, Adeno-associated virus
  source 1..2208: mol_type = other DNA
atggctgccgatggttatcttccagattggctcgaggacactctctctgaaggaataagacagtggtggaagctcaaacctggcccaccaccaccaaagcccgcagagcggcataaggacgacagcaggggtcttgtgcttcctgggtacaagtacctcggacccttcaacggactcgacaagggggagccggtcaacgaggcagacgccgcggccctcgagcacgacaaggcctacgaccggcagctcgacagcggagacaacccgtacctcaagtacaaccacgccgacgcagagtttcaggagcgccttaaagaagatacgtcttttgggggcaacctcggacgagcagtcttccaggcgaaaaagagggttcttgaacctctgggcctggttgaggaacctgttaagacggctccgggaaaaaagaggccggtagagcactctcctgtggagccagactcctcctcgggaaccggaaaagcgggccagcagcctgcaagaaaaagattaaattttggtcagactggagacgcagactccgtacctgacccccagcctctcggacagccaccagcagccccctctggtctgggatctactacaatggctacaggcagtggcgcaccaatggcagacaataacgagggtgccgatggagtgggtaattcctcaggaaattggcattgcgattcccaatggctgggcgacagagtcatcaccaccagcacccgaacctgggccctgcccacatacaacaaccacctctacaagcaaatctccagccaatcaggagccagcaacgacaaccactactttggctacagcaccccctgggggtattttgacttcaacagattccactgccacttttcaccacgtgactggcaaagactcatcaacaacaactggggattccggcccaaaagactcaacttcaagctctttaatattcaagtcaaagaggtcacgcagaatggcggtacgacgacgattgccaataaccttaccagcacggttcaggtgtttactgactcggagtaccagctcccgtacgtcctgggctcggcgcatcaaggatgcctcccgccgtttccagcggacgtcttcatggtcccacagtatggatacctcaccctgaacaacgggagtcaggcggtaggacgctcttccttttactgcctggagtactttccttctcagatgctgcgtactggaaacaactttcagttcagctacacttttgaagacgtgcctttccacagcagctacgctcacagccagagtctggatcggctgatgaatcctctgatcgaccagtacctgtattatctgaacaagacacaaacaaatagtggaactcttcagcagtctcggctactgtttagccaagctggaccaaccaacatgtctcttcaagctaaaaactggctgcctggaccttgctacagacagcagcgtctgtcaaaacaggcaaacggcaacaacaacagcaactttccctggactgcagctacaaagtatcatctaaatggccgggactcgttggttaatccaggaccagctatggccagtcacaaggatgacgaagaaaagtttttccccatgcatggaaccctgatatttggtaaacaaggaacaaatgccaacgacgcggatttggaaaatgtcatgattacagatgaagaagaaatcagggccaccaatcccgtggctacggagcagtacgggactgtgtcaaataatttgcaaaactcaaacactggtccaactactggaactgtcaatcaccaaggagcgttacctggtatggtgtggcaggatcgagacgtgtacctgcagggacccatttgggccaagattcctcacaccgatggacactttcatccttctccactgacgggaggttttggactcaaacacccgcctcctcagatcatgatcaaaaacactcccgttccagccaatcctcccacaaacttcagttctgccaagtttgcttctttcatcacacagtattccacgggacaggtcagcgtggagatcgagtgggagctgcagaaggagaacagcaaacgctggaatcccgaaattcagtacacttccaactacaacaagtctgttaatgtggactttactgtggacactaatggtgtgtattcagagcctcgccccattggcaccagatacctgactcgtaatctgtaa

SEQ ID NO: 4837 - protein, 735 aa, Adeno-associated virus
MAADGYLPDWLEDTLSEGIRQWWKLKPGPPPPKPAERHKDDSRGLVLPGYKYLGPFNGLDKGEPVNEADAAALEHDKAYDRQLDSGDNPYLKYNHADAEFQERLKEDTSFGGNLGRAVFQAKKRVLEPLGLVEEPVKTAPGKKRPVEHSPVEPDSSSGTGKAGQQPARKRLNFGQTGDADSVPDPQPLGQPPAAPSGLGSTTMATGSGAPMADNNEGADGVGNSSGNWHCDSQWLGDRVITTSTRTWALPTYNNHLYKQISSQSGASNDNHYFGYSTPWGYFDFNRFHCHFSPRDWQRLINNNWGFRPKRLNFKLFNIQVKEVTQNGGTTTIANNLTSTVQVFTDSEYQLPYVLGSAHQGCLPPFPADVFMVPQYGYLTLNNGSQAVGRSSFYCLEYFPSQMLRTGNNFQFSYTFEDVPFHSSYAHSQSLDRLMNPLIDQYLYYLNKTQTNSGTLQQSRLLFSQAGPTNMSLQAKNWLPGPCYRQQRLSKQANGNNNSNFPWTAATKYHLNGRDSLVNPGPAMASHKDDEEKFFPMHGTLIFGKQGTNANDADLENVMITDEEEIRATNPVATEQYGTVSNNLQNSNTGPTTGTVNHQGALPGMVWQDRDVYLQGPIWAKIPHTDGHFHPSPLTGGFGLKHPPPQIMIKNTPVPANPPTNFSSAKFASFITQYSTGQVSVEIEWELQKENSKRWNPEIQYTSNYNKSVNVDFTVDTNGVYSEPRPIGTRYLTRNL

SEQ ID NO: 4838 - DNA, 2208 bp, Adeno-associated virus
  source 1..2208: mol_type = other DNA
atggctgccgatggttatcttccagattggctcgaggacactctctctgaaggaataagacagtggtggaagctcaaacctggcccaccaccaccaaagctcgcagagcggcatcaggacgacagcaggggtcttgtgcttcctgggtacaagtacctcggacccttcaacggactcgacaaaggagagccggtcaacgaggcagacgccgcggccctcgagcacgacaaggcctacgaccggcagctcgacagcggagacaacccgtacctcaagtacaaccacgccgacgcggagtttcaggagcgtcttaaagaagatacgtcttttgggggcaacctcggacgagcagtcttccaggcgaaaaagagggttcttgaacctctgggcctggttgaggaacctgttaagacggctccgggaaaaaagaggccggtagagcactctcctgtggagccagactcctcctcgggaaccggaaaggcgggccatcagcctgcgagaaagagattgaattttggtcagactggagacgcagactccgtacctgacccccagcctctcggacagccaccagcagcccccacaagtctgggatctactacaatggctacaggcagtggcgcaccaatggcagacaataacgagggtgccgatggagtgggtaattcctcaggaaattggcattgcgattcccaatggctgggcgacagagtcatcaccaccagcacccgaacctgggccctgcccacctacaacaaccacctctacaagcaaatctccagccaatcaggagcctcgaacgacaaccactactttggctacagcaccccctgggggtattttgacttcaacagattccactgtcacttctccccacgtgattggcaaagactcatcaacaacaactggggattccgacccaagagactcaacttcaagctctttaacattcaagtcaaagaggtcacgcagaatgacggtacgacgacgattgccaataaccttaccagcacggttcaggtgtttactgactcggagtaccagctcccgtacgtcctcggctcggcgcatcaaggatgcctcccgccgtttccagcggacgtcttcacggtcccacagtatggatacctcaccctgaacaacgggagtcaggcggtaggacgctcttccttttactgcctggagtactttccttctcagatgctgcgtactggaaacaaccttaccttcagctacacctttgaggacgttcctttccacagcagctacgctcacagccagagtttggaccggctgatgaatcctctgatcgaccagtatctatattatctgaacaggacacaatcaaatagtggaactcttcagcagtctaggctactgtttagccaagctggacccaccagcatgtctcttcaagctaaaaactggctgcctggaccttgctacagacagcagcgtctttcaaagcaggcaaacgacaacaacaacagcaactttccctggactgcggctacaaagtatcatctaaatggccgggactcgttggttaatccaggaccagctatggccagccacaaagacgatgaagaaaagtttttccccatgcatggaaccctgatatttggtaaacaaggaacaaatgctaacgacgcggatttggagcatgttatgattacagatgaagaagaaatcaggaccaccaatcctgtggctacagagcagtacggaaacgtgtcaaataatttgcaaaactcaaatactggtccaactacagaaaatgtcaatcaccagggagcgttacctggtatggtgtggcaggatcgagacgtgtacctgcagggacccatttgggccaagattcctcacaccgacggacactttcacccttctccactgatgggaggttttggactcaaacacccgcctcctcaaatcatgatcaaaaacactcccgttccagccaatcctcccacaaactacagttctgccaagtttgcttctttcatcacacagtattccacgggccaggtcagcgtggagattgagtgggagctgcggaaggagaacagcaaacgctggaaccccgagatccagtatacttccaactacaacaaatctgttaatgtggactttactgtggacactaatggtgtgtattcagagcctcgccccattggcaccagatacctgactcgtaatctgtaa

SEQ ID NO: 4839 - protein, 735 aa, Adeno-associated virus
MAADGYLPDWLEDTLSEGIRQWWKLKPGPPPPKLAERHQDDSRGLVLPGYKYLGPFNGLDKGEPVNEADAAALEHDKAYDRQLDSGDNPYLKYNHADAEFQERLKEDTSFGGNLGRAVFQAKKRVLEPLGLVEEPVKTAPGKKRPVEHSPVEPDSSSGTGKAGHQPARKRLNFGQTGDADSVPDPQPLGQPPAAPTSLGSTTMATGSGAPMADNNEGADGVGNSSGNWHCDSQWLGDRVITTSTRTWALPTYNNHLYKQISSQSGASNDNHYFGYSTPWGYFDFNRFHCHFSPRDWQRLINNNWGFRPKRLNFKLFNIQVKEVTQNDGTTTIANNLTSTVQVFTDSEYQLPYVLGSAHQGCLPPFPADVFTVPQYGYLTLNNGSQAVGRSSFYCLEYFPSQMLRTGNNLTFSYTFEDVPFHSSYAHSQSLDRLMNPLIDQYLYYLNRTQSNSGTLQQSRLLFSQAGPTSMSLQAKNWLPGPCYRQQRLSKQANDNNNSNFPWTAATKYHLNGRDSLVNPGPAMASHKDDEEKFFPMHGTLIFGKQGTNANDADLEHVMITDEEEIRTTNPVATEQYGNVSNNLQNSNTGPTTENVNHQGALPGMVWQDRDVYLQGPIWAKIPHTDGHFHPSPLMGGFGLKHPPPQIMIKNTPVPANPPTNYSSAKFASFITQYSTGQVSVEIEWELRKENSKRWNPEIQYTSNYNKSVNVDFTVDTNGVYSEPRPIGTRYLTRNL

SEQ ID NO: 4840 - DNA, 2208 bp, Adeno-associated virus
  source 1..2208: mol_type = other DNA
atggctgccgatggttatcttccagattggctcgaggacactctctctgaaggaataagacagtggtggaagctcaaacctggcccaccaccaccaaagcccgcagagcggcatcaggacgacagcaggggtcttgtgcttcctgggtacaagtacctcggacccttcaacggactcgacaaaggagagccggtcaacgaggcagacgccgcggccctcgagcacgacaaggcctacgaccggcagctcgacagcggagacaacccgtacctcaagtacaaccacgccgacgcggagtttcaggagcgtcttaaagaagatacgtcttttgggggcaacctcggacgagcagtcttccaggcgaaaaagagggttcttgaacctctgggcctggttgaggaacctgttaagacggctccgggaaaaaagaggccggtagagcactctcctgtggagccagactcctcctcgggaaccggaaaagcgggccatcagcctgcgagaaagagattgaattttggtcagactggagacgcagactccgtacctgacccccagcctctcggacagccaccagcagcccccacaagtttgggatctactacaatggctacaggcagtggcgcaccaatggcagacaataacgagggtgccgatggagtgggtaattcctcaggaaattggcattgcgattcccaatggctgggcgacagagtcatcaccaccagcacccgaacctgggccctgcccacctacaacaaccacctctacaagcaaatctccagccaatcaggagcctcgaacgacaaccactactttggctacagcaccccctgggggtattttgacttcaacagattccactgtcacttctccccacgtgattggcaaagactcatcaacaacaactggggattccgacccaagagactcaacttcaagctctttaacattcaagtcaaggaggtcacgcagaatgacggtacgacgacgattgccaataaccttaccagcacggttcaggtgtttactgactcggagtaccagctcccgtacgtcctcggctcggcgcatcaaggatgcctcccgccgtttccagcggacgtcttcatggtcccacagtatggatacctcaccctgaacaacgggagtcaggcggtaggacgctcttccttttactgcctggagtactttccttctcagatgctgcgtactggaaacaactttaccttcagctacacctttgaggacgttcctttccacagcagctacgctcacagccagagtttggaccggctgatgaatcctctgatcgaccagtatctatattatctgaacaggacacaatcaaatagtggaactcttcagcagtctaggctactgtttagccaagctggacccaccagcatgtctcttcaagctaaaaactggctgcctggaccttgctacagacagcagcgtctttcaaagcaggcaaacgacaacaacaacagcaactttccctggactgcggctacaaagtatcgtctaaatggccgggactcgttggttaatccaggaccagctatggccagccacaaagacgatgaagaaaagtttttccccatgcatggaaccctgatatttggtaaacaaggaacaaatgctaacgacgcggatttggagcatgttatgattacagatgaagaagaaatcaggaccaccaatcctgtggctacagagcagtacggaaacgtgtcaaataatttgcaaaactcaaatactggtccaactacagaaaatgtcaatcaccagggagcgttacctggtatggtgtggcaggatcgagacgtgtacctgcagggacccatttgggccaagattcctcacaccgacggacactttcacccttctccactgatgggaggttttggactcaaacacccgcctcctcaaatcatgatcaaaaacactcccgttccagccaatcctcccacaaacttcagttctgccaagtttgcttctttcatcacacagtattccacgggccaggtcagcgtggagattgagtgggagctgcagaaggagaacagcaaacgctggaaccccgagatccagtatacttccaactacaacaaatctgttaatgtggactttactgtggacactaatggtgtgtattcagagcctcgccccattggcaccagatacctgactcgtaatctgtaa

SEQ ID NO: 4841 - protein, 735 aa, Adeno-associated virus
MAADGYLPDWLEDTLSEGIRQWWKLKPGPPPPKPAERHQDDSRGLVLPGYKYLGPFNGLDKGEPVNEADAAALEHDKAYDRQLDSGDNPYLKYNHADAEFQERLKEDTSFGGNLGRAVFQAKKRVLEPLGLVEEPVKTAPGKKRPVEHSPVEPDSSSGTGKAGHQPARKRLNFGQTGDADSVPDPQPLGQPPAAPTSLGSTTMATGSGAPMADNNEGADGVGNSSGNWHCDSQWLGDRVITTSTRTWALPTYNNHLYKQISSQSGASNDNHYFGYSTPWGYFDFNRFHCHFSPRDWQRLINNNWGFRPKRLNFKLFNIQVKEVTQNDGTTTIANNLTSTVQVFTDSEYQLPYVLGSAHQGCLPPFPADVFMVPQYGYLTLNNGSQAVGRSSFYCLEYFPSQMLRTGNNFTFSYTFEDVPFHSSYAHSQSLDRLMNPLIDQYLYYLNRTQSNSGTLQQSRLLFSQAGPTSMSLQAKNWLPGPCYRQQRLSKQANDNNNSNFPWTAATKYRLNGRDSLVNPGPAMASHKDDEEKFFPMHGTLIFGKQGTNANDADLEHVMITDEEEIRTTNPVATEQYGNVSNNLQNSNTGPTTENVNHQGALPGMVWQDRDVYLQGPIWAKIPHTDGHFHPSPLMGGFGLKHPPPQIMIKNTPVPANPPTNFSSAKFASFITQYSTGQVSVEIEWELQKENSKRWNPEIQYTSNYNKSVNVDFTVDTNGVYSEPRPIGTRYLTRNL

SEQ ID NO: 4842 - DNA, 2208 bp, Adeno-associated virus
  source 1..2208: mol_type = other DNA
atggctgccgatggttatcttccagattggctcgaggacactctctctgaaggaataagacagtggtggaagctcaaacctggcccaccaccaccaaagcccgcagagcggcatcaggacgacagcaggggtcttgtgcttcctgggtacaagtacctcggacccttcaacggactcgacaaaggagagccggtcaacgaggcagacgccgcggccctcgagcacgacaaggcctacgaccggcagctcgacagcggagacaacccgtacctcaagtacaaccacgccgacgcggagtttcaggagcgtcttaaagaagatacgtcttttgggggcaacctcggacgagcagtcttccaggcgaaaaagagggttcttgaacctctgggcctggttgaggaacctgttaagacggctccgggaaaaaagaggccggtagagcactctcctgtggagccagactcctcctcgggaaccggaaaagcgggccatcagcctgcgagaaagagattgaattttggtcagactggagacgcagactccgtacctgacccccagcctctcggacagccaccagcagcccccacaagtttgggatctactacaatggctacaggcagtggcgcaccaatggcagacaataacgagggtgccgatggagtgggtaattcctcaggaaattggcattgcgattcccaatggctgggcgacagagtcatcaccaccagcacccgaacctgggccctgcccacctacaacaaccacctctacaagcaaatctccagccaatcaggagcctcgaacgacaaccactactttggctacagcaccccctgggggtattttgacttcaacagattccactgtcacttctccccacgtgattggcaaagactcatcaacaacaactggggattccgacccaagagactcaacttcaagctctttaacattcaagtcaaagaggtcacgcagaatgacggtacgacgacgattgccaataaccttaccagcacggttcaggtgtttactgactcggagtaccagctcccgtacgtcctcggctcggcgcatcaaggatgcctcccgccgtttccagcggacgtcttcatggtcccacagtatggatacctcaccctgaacaacgggagtcaggcggtaggacgcccttccttttactgcctggagtactttccttctcagatgctgcgtactggaaacaactttaccttcagctacacctttgaggacgttcctttccacagcagctacgctcacagccagagtttggaccggctgatgaatcctctgatcgaccagtatctatattatctgaacaggacacaatcaaatagtggaactcttcagcagtctaggctactgtttagccaagctggacccaccagcatgtctcttcaagctaaaaactggctgcctggaccttgctacagacagcagcgtctttcaaagcaggcaaacgacaacaacaacagcaactttccctggactgcggctacaaagtatcatctaaatggccgggactcgttggttaatccaggaccagctatggccagccacaaagacgatgaagaaaagtttttccccatgcatgggaccctgatatttggtaaacaaggaacaaatgctaacgacgcggatttggagcatgttatgattacagatgaagaagaaatcaggaccaccaatcctgtggctacagagcagtacggaaacgtgtcaaataatttgcaaaactcaaatactggtccaactacagaaaatgtcaatcaccagggagcgttacctggtatggtgtggcaggatcgagacgtgtacctgcagggacccatttgggccaagattcctcacaccgacggacactttcacccttctccactgatgggaggttttggactcaaacacccgcctcctcaaatcatgatcaaaaacactcccgttccagccaatcctcccacaaacttcagttctgccaagtttgcttctttcatcacacagtattccacgggccaggtcagcgtggagattgagtgggagctgcagaaggagaacagcaaacgctggaaccccgagatccagtatacttccaactacaacaaatctgttaatgtggactttactgtggacactaatggtgtgtattcagagcctcgccccattggcaccagatacctgactcgtaatctgtaa

SEQ ID NO: 4843 - protein, 735 aa, Adeno-associated virus
MAADGYLPDWLEDTLSEGIRQWWKLKPGPPPPKPAERHQDDSRGLVLPGYKYLGPFNGLDKGEPVNEADAAALEHDKAYDRQLDSGDNPYLKYNHADAEFQERLKEDTSFGGNLGRAVFQAKKRVLEPLGLVEEPVKTAPGKKRPVEHSPVEPDSSSGTGKAGHQPARKRLNFGQTGDADSVPDPQPLGQPPAAPTSLGSTTMATGSGAPMADNNEGADGVGNSSGNWHCDSQWLGDRVITTSTRTWALPTYNNHLYKQISSQSGASNDNHYFGYSTPWGYFDFNRFHCHFSPRDWQRLINNNWGFRPKRLNFKLFNIQVKEVTQNDGTTTIANNLTSTVQVFTDSEYQLPYVLGSAHQGCLPPFPADVFMVPQYGYLTLNNGSQAVGRPSFYCLEYFPSQMLRTGNNFTFSYTFEDVPFHSSYAHSQSLDRLMNPLIDQYLYYLNRTQSNSGTLQQSRLLFSQAGPTSMSLQAKNWLPGPCYRQQRLSKQANDNNNSNFPWTAATKYHLNGRDSLVNPGPAMASHKDDEEKFFPMHGTLIFGKQGTNANDADLEHVMITDEEEIRTTNPVATEQYGNVSNNLQNSNTGPTTENVNHQGALPGMVWQDRDVYLQGPIWAKIPHTDGHFHPSPLMGGFGLKHPPPQIMIKNTPVPANPPTNFSSAKFASFITQYSTGQVSVEIEWELQKENSKRWNPEIQYTSNYNKSVNVDFTVDTNGVYSEPRPIGTRYLTRNL

SEQ ID NO: 4844 - DNA, 2208 bp, Adeno-associated virus
  source 1..2208: mol_type = other DNA
atggctgccgatggttatcttccagattggctcgaggacactctctctgaaggaataagacagtggtggaagctcaaacctggcccaccaccaccaaagcccgcagagcggcataaggacgacagcaggggtcttgtgcttcctgggtacaagtacctcggacccttcaacggactcgacaagggagagccggtcaacgaggcagacgccgcggccctcgagcacgacaaggcctacgaccggcagctcgacagcggagacaacccgtacctcaagtacaaccacgccgacgcggagtttcaggagcgccttaaagaagatacgtcttttgggggcaacctcggacgagcagtcttccaggcaaaaaagagggttcttgaacctctgggcctggttgaggagcctgttaaaacggctccgggaaaaaagaggccggtagagcactctcctgcggagccagactcctcctcgggaaccggaaaagcgggccagcagcctgcaagaaaaagattgaatttcggtcagactggagacgcagactccgtacctgacccccagcctctcggacagccaccagcagccccctctggtctgggaactaatacgatggcttcaggcagtggcgcaccaatggcagacaataacgagggcgccgacggagtgggtaattcctcgggaaattggcattgcgattccacatggatgggcgacagagtcatcaccaccagcacccgaacttgggccctgcccacctacaacaaccatctctacaagcaaatctccagccaatcaggagccagcaacgacaaccactactttggctacagcaccccttgggggtattttgacttcaacagattccactgccacttttcaccacgtgactggcaaagactcatcaacaacaactggggattccggcccaagagactcaacttcaagctctttaacattcaagtcaaagaggtcacgcagaatgacggtacgacgacgattgccaataaccttaccagcacggttcaggtgtttactgactcggagtaccagctcccgtacgtcctcggctcggcgcatcaaggatgcctcccgccgttcccagcagacgtcttcatggtgccacagtatggatacctcaccctgaacaacgggagtcaggcagtaggacgctcttcattttactgcctggagtactttccttctcagatgctgcgtaccggaaacaactttaccttcagctacacctttgaggacgttcctttccacagcagctacgctcacagccagagtttggaccgtctcatgaatcctctcatcgaccagtacctgtattacttgagcagaacaaacactccaagcggaaccaccacgcagtccaggcttcagttttctcaggccggagcaagtgacattcgggaccagtctaggaactggcttcctggaccctgttaccgccagcagcgagtatcaaagacatctgcggataacaacaacagtgaatactcgtggactggagctaccaagtaccacctcaatggcagagactctctggtgaatccgggcccggccatggccagccacaaggacgatgaagaaaagttttttcctcagagcggggttctcatctttgggaagcaaggctcagagaaaacaaatgtggacattgaaaaggtcatgattacagacgaagaggaaatcaggaccaccaatcccgtggctacggagcagtatggttctgtatctaccaacctgcagggcggcaacacacaagcagctaccgcagatgtcaacacacaaggcgttcttccaggcatggtctggcaggacagagacgtgtacctgcaggggcccatctgggcaaagattccacacacggacggacattttcacccctctcccctcatgggcggattcggacttaaacaccctcctccacagattctcatcaagaacaccccggtacctgcgaatccttcgaccaccttcagtgcggcaaagtttgcttctttcatcacacagtattccacggggcaggtcagcgtggagatcgagtgggagctgcagaaggagaacagcaaacgctggaatcccgagatccagtacacttccaactacaacaaatctgttaatgtggactttactgttgacactaatggcgtgtattcagagcctcgccccattggcaccagatacctgactcgtaatctgtaa

SEQ ID NO: 4845 - protein, 735 aa, Adeno-associated virus
MAADGYLPDWLEDTLSEGIRQWWKLKPGPPPPKPAERHKDDSRGLVLPGYKYLGPFNGLDKGEPVNEADAAALEHDKAYDRQLDSGDNPYLKYNHADAEFQERLKEDTSFGGNLGRAVFQAKKRVLEPLGLVEEPVKTAPGKKRPVEHSPAEPDSSSGTGKAGQQPARKRLNFGQTGDADSVPDPQPLGQPPAAPSGLGTNTMASGSGAPMADNNEGADGVGNSSGNWHCDSTWMGDRVITTSTRTWALPTYNNHLYKQISSQSGASNDNHYFGYSTPWGYFDFNRFHCHFSPRDWQRLINNNWGFRPKRLNFKLFNIQVKEVTQNDGTTTIANNLTSTVQVFTDSEYQLPYVLGSAHQGCLPPFPADVFMVPQYGYLTLNNGSQAVGRSSFYCLEYFPSQMLRTGNNFTFSYTFEDVPFHSSYAHSQSLDRLMNPLIDQYLYYLSRTNTPSGTTTQSRLQFSQAGASDIRDQSRNWLPGPCYRQQRVSKTSADNNNSEYSWTGATKYHLNGRDSLVNPGPAMASHKDDEEKFFPQSGVLIFGKQGSEKTNVDIEKVMITDEEEIRTTNPVATEQYGSVSTNLQGGNTQAATADVNTQGVLPGMVWQDRDVYLQGPIWAKIPHTDGHFHPSPLMGGFGLKHPPPQILIKNTPVPANPSTTFSAAKFASFITQYSTGQVSVEIEWELQKENSKRWNPEIQYTSNYNKSVNVDFTVDTNGVYSEPRPIGTRYLTRNL

SEQ ID NO: 4846 - DNA, 3161 bp, Adeno-associated virus
  source 1..3161: mol_type = other DNA
gattgaatttagcggccgcgaattcgcccttgctgcgtcaactggaccaatgagaactttccattcaatgattgcgtcgacaagatggtgatctggtgggaggagggaaagatgaccgccaaggtcatggagtcggccaaagccattctcggaggaagcaaggtgcgcgtggaccagaaatgtaagtcctcggcccagatagacccgactcccgtgattgtcacctccaacaccaacatgtgcgccgtgattgacgggaactcaacgaccttcgagcaccagcagccgttgcaagaccggatgttcaaatttgaactcacccgccgtctggatcatgactttgggaaggtcaccaagcaggaagtcaaagactttttccggtgggcaaaggatcacgtggttgaggtggagcatgaattctacgtcaaaaagggtggagccaagaaaagacccgcccccagtgacgcagatataagtgagcccaaacgggcgcgcgggtcagttgcgcagccatcgacgtcagacgcggaagcttcgatcaactacgcggacaggtaccaaaacaaatgttctcgtcacgtgggcatgaatctgatgctgtttccctgcagacaatgcgagagaatgaatcaaaattcaaatatctgcttcactcacggacagaaggactgtttagagtgctttcccgtgtcagaatctcaacccgtttctgtcgtcaaaaaggcgtatcagaaactttgctacattcatcatatcatgggaaaggtgccagacgcttgcactgcctgcgatctggtcaatgtggatttggatgactgcatctctgaacaataaatgatttaaatcaggtatggctgccgatggttatcttccagattggctcaaggacactctctctgaaggaataagacagtggtggaagctcaaacctggcccaccaccaccaaagcccgcagagcggcataaggacgacagcgggggtcttgtgcttcctgggtacaagtacctcggacccttcaacggactcgacaagggagagccggtcaacgaggcagacgccgcggccctcgagtacgacaaggcctacgaccggcagctcgacagcggagacaacccgtacctcaagtacaaccacgccgacgcggagtttcaggagcgccttaaagaagatacgtcttttgggggcaacctcggacgagcagtcttccaggcgaaaaagagggttcttgaacctctgggcctggttgaggaacctgttaagacggctccgggaaaaaagaggccggtagagcactctcctgtggagccagactcctcctcgggaacaggaaaagcgggccagcagcctgcgagaaagagattgaattttggtcagactggagacgcagactccgtacctgacccccagcctctcggacagccaccagcagccccctctggtctgggaactaatacgatggctacaggcagtggcgcaccaatggcagacaataacgagggcgccgacggagtgggtaattcctcgggaagttggcattgcgattccacatggatgggcgacagagtcatcaccaccagcacccgaacctgggctctgcccacctacaacaaccatctgtacaagcagatctccagccaatcaggagccagcaacgacaaccactactttggctacagcaccccttgggggtattttgacttcaacagattccactgccacttttcaccacgtgactggcaaagactcatcaacaacaactggggattccggcccaagagactcaacttcaagctctttaacattcaagtcaaggaggtcacgcagaatgacggtacgacgacgattgccaataaccttaccagcacggttcaggtgtttactgactcggagtaccagctcccgtacgtccccggctcggcgcatcaaggatgcctcccgccgttcccagcagacgtcttcatggtgccacagtatggatacctcaccctgaacaacgggagtcaggcagtaggacgctcttcattttactgcctggagtactttccttctcagatgcttcgtaccggaaacaactttaccttcagctacacctttgaggatgttcctttccacagcagctacgctcacagccagagtttggaccgtctcatgaatcctctcatcgaccagtacctgtattacttgagcagaacaaacactccaagcggaaccaccacgcagtccaggcttcagttttctcaggccggagcaagtgacattcgggaccagtctaggaactggcttcctggaccctgttaccgccagcagcgagtatcaaagacagctgcggacaacaacaacagtgaatactcgtggactggagctaccaagtaccacctcaatggcagagactctctggtgaatccgggcccggccatggccagccacaaggacgatgaagaaaagttttttcctcaaagcggggttctcatctttgggaagcaaggctcagagaaaacaaatgtggacattgaaaaggtcatgattacagacgaagaggaaatcagaaccaccaatcccgtggccacggagcagtatggttctgtatctaccaacctccagagcggcaacacacaagcagctactgcagatgtcaacacacaaggcgttcttccaggcatggtctggcaggacagagacgtgcacctgcaggggcctatctgggcaaagattccacacacggacggacattttcacccctctcccctcatgggcggatttggacttaaacaccctcctccacagattctcatcaagaacaccccggtacctgcaaatccttcgaccaccttcagtgcggcaaagtttgcttccttcatcacacagtattccacagggcaggtcagcgtggagatcgagtgggagctgcagaaggagaacagcaaacgctggaaccccgagatccagtacacttccaactacaacaaatctgttaatgtggactttactgtggacactaatggtgtgtattcagagcctcgccccattggcaccagatacctgactcgtaatctgtaattgcttgttaatcaataaaccgtttaattcgtttcagttgaactttggtctctgcgaagggcgaattcgtttaaaccctgcaggactagtccctttagtgagg

SEQ ID NO: 4847 - DNA, 3162 bp, Adeno-associated virus
  source 1..3162: mol_type = other DNA
gaattgaatttagcggccgcgaattcgcccttcgcagagaccaaagttcaactgaaacgaattaaacggtttattgattaacaagcaattacagattacgagtcaggtatctggtgccaatggggcgaggctctgaatacacgccattagtgtccacagtaaagtccacattaacagacttgttgtagttggaagtgtactgaatttcgggattccagcgtttgctgttttccttctgcagctcccactcgatctccacgctgacctgtcccgtggagtactgtgtgatgaaggaagcaaactttgccgcactgaaggtggtcgaaggattcgcaggtaccggggtgttcttgatgagaatctgtggaggagggtgtttaagtccgaatccacccatgaggggagaggggtgaaaatgtccgtccgtgtgtggaatctttgcccagatgggcccctgaaggtacacatctctgtcctgccagaccatgcctggaagaacgccttgtgtgttgacatctgcggtagctgcttgtctgttgcctctctggaggttggtagatacagaaccgtactgctccgtagccacgggattggttgtcctgatttcctcttcgtctgtaatcatgaccttttcaatgtccacatttgttttctctgagccttgcttcccaaagatgagaaccccgctctgaggaaaaaacttttcttcattgtccttgtggcttgccatggccgggcccggattcaccagagagtctctgccattgaggtggtacttggtagctccagtccacgagtattcactgttgttgttatccgcagatgtctttgatactcgctgctggcggtaacagggtccaggaagccagttcctagactggtcccgaatgtcactcgctccggcctgagaaaactgaagccttgactgcgtggtggttccacttggagtgtttgttgtgctcaagtaatacaggtactggtcgatgagaggattcatgagacggtccagactctggctgtgagcgtagccgctgtggaaaggaacgtcctcaaaagtgtagctgaaggtaaagttgtttccggtacgcagcatctgagaaggaaagtactccaggcagtaaaatgaagagcgtcctactgcctgactcccgttgttcagggtgaggtatccatactgtggcaccatgaagacgtctgctgggaacggcgggaggcatccttgatgcgccgagccgaggacgtacgggagctggtactccgagtcagtaaacacctgaaccgtgctggtaaggttattggcaatcgtcgtcgtaccgtcattctgcgtgacctctttgacttgaatgttaaagagcttgaagttgagtctcttgggtcggaatccccagttgttgttgatgagtctttgccagtcacgtggtgaaaagtggcagtggaatctgttgaagtcaaaatacccccaaggggtgctgtagccaaagtagtgattgtcgttcgaggctcctgattggctggaaatttgtttgtagaggtggttgttgtaggtgggcagggcccaggttcgggtgctggtggtgatgactctgtcgcccatccatgtggaatcgcaatgccaatttcccgaggaattacccactccgtcggcgccctcgttattgtctgccattggtgcgccactgcctgtagccatcgtattagttcccagaccagagggggctgctggtggctgtccgagaggctgggggtcaggtactgagtctgcgtctccagtctgaccaaaattcaatctttttcttgcaggctgctggcccgcctttccggttcccgaggaggagtctggctccacaggagagtgctctaccggcctcttttttcctggagccgtcttgacaggttccccaaccaggcccagaggttcaagaaccctctttttcgcctggaagactgctcgtccgaggttgcccccaaaagacgtatcttctttaaggcgctcctgaaactccgcgtcggcgtggttgtacttgaggtacgggttgtctccgctgtcgagctgccggtcgtaggctttgtcgtgctcgagggccgcggcgtctgcctcgttgaccggctctcccttgtcgagtccgttgaagggtccgaggtacttgtacccaggaagcacaagacccctgctgtcgtccttatgccgctctgcgggctttggtggtggtgggccaggtttgagcttccaccactgtcttattccttcagagagagtgtcctcgagccaatctggaagataaccatcggcagccatacctgatttaaatcatttattgttcaaagatgcagtcatccaaatccacattgaccagatcgcaggcagtgcaagcgtctggcacctttcccatgatatgatgaatgtagcacagtttctgatacgcctttttgacgacagaaacgggttgagattctgacacgggaaagcactctaaacagtctttctgtccgtgagtgaagcagatatttgaattctgattcattctctcgcattgtctgcagggaaacagcatcagattcatgcccacgtgacgagaacatttgttttggtacctgtctgcgtagttgatcgaagcttccgcgtctgacgtcgatggctgcgcaactgactcgcgcacccgtttgggctcacttatatctgcgtcactgggggcgggtcttttcttggctccaccctttttgacgtagaattcatgctccacctcaaccacgtgatcctttgcccaccggaaaaagtctttgacttcctgcttggtgaccttcccaaagtcatgatccagacggcgggtgagttcaaatttgaacatccggtcttgcaacggctgctggtgttcgaaggtcgttgagttcccgtcaatcacggcgcacatgttggtgttggaggtgacgatcacgggagtcgggtctatctgggccgaggacttgcatttctggtccacgcgcaccttgcttcctccgagaatggctttggccgactccacgaccttggcggtcatcttcccctcctcccaccagatcaccatcttgtcgacacagtcgttgaagggaaagttctcattggtccagttgacgcagcaagggcgaattcgtttaaacctgcaggactagtccctttagtgaggg

SEQ ID NO: 4848 - DNA, 3164 bp, Adeno-associated virus
  source 1..3164: mol_type = other DNA
gcgaattgaatttagcggccgcgaattcgcccttcgcagagaccaaagttcaactgaaacgaattaaacggtttattgattaacaagcaattacaaattacgagtcaggtatctggtgccaatggggcgaggctctgaatacacgccattagtgtccacagtaaagtccacattaacagacttgttgtagttggaagtgtactgaatttcgggattccagcgtttgctgttttccttctgcagctcccactcgatctccacgctgacctgtcccgtggagtactgtgtgatgaaggaagcaaactttgccgcactgaaggtggtcgaaggattcgcaggtaccggggtgttcttgatgagaatctgtggaggagggtgtttaggtccgaatccacccatgaggggagaggggtgaaaatgtccgtccgtgtgtggaatctttgcccagatgggcccctgaaggtacacatctctgtcctgccagaccatgcctggaagaacgccttgtgtgttgacatctgcggtagctgcttgtctgttgcctctctggaggttggtagatacagaaccatactgctccgtagccacgggattggttgtcctgatttcctcttcgtctgtaatcatgaccttttcaatgtccacatttgttttctctgagccttgcttcccaaagatgagaaccccgctctgaggaaaaaacttttcttcattgtccttgtggcttgccatggccgggcccggattcaccagagagtctctgccattgaggtggtacttggtagctccagtccacgagtattcactgttgttgttatccgcagatgtctttgatactcgctgctggcggtaacagggtccaggaagccagttcctagactggtcccgaatgtcactcgctccggcctgagaaaactgaagccttgactgcgtggtggttccacttggagtgtttgttgtgctcaagtaatacaggtactggtcgatgagaggattcatgagacggtccagactctggctgtgagcgtagctgctgtggaaaggaacgtcctcaaaagtgtagctgaaggtaaagttgtttccggtacgcagcatctgagaaggaaagtactccgggcagtaaaatgaagagcgtcctactgcctgactcccgttgctcagggtgaggtatccatactgtggcaccatgaagacgtctgctgggaacggcgggaggcatccttgatgcgccgagccgaggacgtacgggagctggtactccgagtcagtaaacacctgaaccgtgctggtaaggttattggcaatcgtcgtcgtaccgtcattctgcgtgacctctttgacttgaatgttaaagagcttgaagttgagtctcttgggtcggaatccccagttgttgttgatgagtctttgccagtcacgtggtgaaaagtggcagtggaatctgttgaagtcaaaatacccccaaggggtgctgtagccaaagtagtgattgtcgttcgaggctcctgattggctggaaatttgtctgtagaggtggttgttgtaggtgggcagggcccaggttcgggtgctggtggtgatgactctgtcgcccatccatgtggaatcgcaatgccgatttcccgaggaattacccactccgtcggcgccctcgttattgtctgccattggtgcgccactgcctgtagccatcgtattagttcccagaccagagggggctgctggtggctgtccgagaggctgggggtcaggtactgagtctgcgtctccagtctgaccaaaattcaatctttttcttgcaggctgctggcccgcctttccggttcccgaggaggagtctggctccacaggagagtgctctaccggcctcttttttcccggagccgtcttaacaggttccccaaccaggcccagaggttcaagaaccctctttttcgcctggaagactgctcgtccgaggttgcccccaaaagacgtatcttctttaaggcgctcctgaaactccgcgtcggcgtggttgtacttgaggtacgggttgtctccgctgtcgagctgccggtcgtaggctttgtcgtgctcgagggccgcggcgtctgcctcgttgaccggctctcccttgtcgagtccgttgaagggtccgaggtacttgtacccaggaagcacaagacccctgctgtcgtccttatgccgctctgcgggctttggtggtggtgggccaggtttgagcttccaccactgtcttattccttcagagagagtgtcctcgagccaatctggaagataaccatcggcagccatacctgatttaaatcatttattgttcaaagatgcagtcatccaaatccacattgaccagatcgcaggcagtgcaagcgtctggcacctttcccatgatatgatgaatgtagcacagtttctgatacgcctttttgacgacagaaacgggttgagattctgacacgggaaagcactctaaacagtctttctgtccgtgagtgaagcagatatttgaattctgattcattctctcgcattgtctgcagggaaacagcatcagattcatgcccacgtgacgagaacatttgttttggtacctgtctgcgtagttgatcgaagcttccgcgtctgacgtcgatggctgcgcaactgactcgcgcacccgtttgggcccacttatatctgcgtcactgggggcgggtcttttcttggctccaccctttttgacgtagaattcatgctccacctcaaccacgtgatcctttgcccaccggaaaaagtctttgacttcctgcttggtgaccttcccaaagtcatgatccagacggcgggtgagttcaaatttgaacatccggtcttgcaacggctgctggtgttcgaaggtcgttgagttcccgtcaatcacggcgcacatgttggtgttggaggtgacgatcacgggagtcgggtctatctgggccgaggacttgcatttctggtccacgcgcaccttgcttcctccgagaatggctttggccgactccacgaccttggcggtcatcttcccctcctcccaccagatcaccatcttgtcgacacagtcgttgaagggaaagttctcattggtccagttgacgcagcaagggcgaattcgtttaaacctgcaggactagtccctttagtgaggg

SEQ ID NO: 4849 - DNA, 3163 bp, Adeno-associated virus
  source 1..3163: mol_type = other DNA
accctcactaaagggactagtcctgcaggtttaaacgaattcgcccttgctgcgtcaactggagcaatgagaactttcccttcaacgactgtgtcgacaagatggtgatttggtgggaggaggggaagatgaccgccaaggtcgtggagtcggccaaagccattctcggaggaagcaaggtgcgcgtggaccagaaatgcaagtcctcggcccagatagatccgactcccgtgatcgtcacctccaacaccaacatgtgcgccgtgattgacgggaactcaacgaccttcgaacaccagcagccgttgcaagaccggatgttcaaatttgaactcacccgccgtctggatcatgactttgggaaggtcaccaagcaggaagtcaaagactttttccggtgggcaaaggatcacgtggttgaggtggagcatggattctacgtcaaaaagggtggagccaagaaaagacccgcccctagtgacgcagatataagtgagcccaaacgggtgcgcgagtcagttgcgcagccatcgacgtcggacgcggaagcttcgatcaactacgcggacaggtaccaaaacaaatgttctcgtcacgtgggcatgaatctgatgctgtttccctgcagacaatgcgagagaatgaatcaaaattcaaatatctgcttcactcacggacagaaagactgtttagagtgctttcccgtgtcagaatctcaacctgtttctgtcgtcaaaaaggcgtatcagaaactgcgctacattcatcatatcatgggaaaggtgccagacgcttgcactgcctgcgatctggtcaatgtggatttggatgactgcatctctgaacaataaatgatttaaatcaggtatggctgccgatggttatcttccagattggctcgaggacactctctctgaaggaataagacagtggtggaagctcaaacctggcccaccaccaccaaagcccgcagagcggcataaggacgacagcaggggtcttgtgcttcctgggtacaagtacctcggacccttcaacggactcgacaagggagagccggtcaacgaggcagacgccgcggccctcgagcacgacaaggcctacgaccggcagctcgacagcggagacaacccgtacctcaagtacaaccacgccgacgcggagtttcaggagcgtcttaaagaagatacgtcttttgggggcaacctcggacgagcagtcttccaggcgaaaaagagggttcttgaacctctgggcctggttgaggaacctgttaagacggctccgggaaaaaagaggccggtagagcactctcctgcggagccagactcctcctcgggaaccggaaaagcgggccagcagcctgcaagaaaaagactgaatttcggtcagactggagacgcagactccgtacctgacccccagcctctcggacagccaccagcagcccccacaagtttgggatctactacaatggctacaggcagtggcgcaccaatggcagacaataacgagggtgccgatggagtgggtaattcctcaggaaattggcattgcgattcccaatggctgggcgacagagtcatcaccaccagcacccgaacctgggccctgcccacctacaacaaccacctttacaagcaaatctccagccaatcaggagcctcaaacgacaaccactactttggctacagcaccccctgggggtattttgacttcaacagattccactgccacttttcaccacgtgactggcaaagactcatcaacaacaactggggattccgacccaagagactcaacttcaagctctttaacattcaagtcaaagaggtcacgcagaatgacggtacgacgacgattgccaataaccttaccagcacggttcaggtgtttactgactcggagtaccagctcccgtacgtcctcggctcggcgcatcaaggatgcctcccgccgtttccagcggacgtcttcatggtcccacagtatggatacctcaccctgaacaacgggagtcaggcggtaggacgctcttccttttactgcctggagtgctttccttctcagatgctgcgtactggaaacaactttcagttcagctacacttttgaagacgtgcctttccacagcagctacgctcacagccagagtttggatcggctgatgaatcctctgatcgaccagtacctgtattatctaaacagaacacaaacagctagtggaactcagcagtctcggctactgtttagccaagctggacccacaagcatgtctcttcaagctaaaaactggctgcctggaccgtgttatcgccagcagcgtttgtcaaagcaggcaaacgacaacaacaacagcaactttccctggactggagctaccaagtaccacctcaatggcagagactctttggtgaacccgggcccggccatggccagccacaaggacgatgaagaaaagtttttccccatgcatggaaccctaatatttggtaaagaaggaacaaatgctaccaacgcggaattggaaaatgtcatgattacagatgaagaggaaatcaggaccaccaatcccgtggctacagagcagtacggatatgtgtcaaataatttgcaaaactcaaatactgctgcaagtactgaaactgtgaatcaccaaggagcattacctggtatggtgtggcaggatcgagacgtgtacctgcagggacccatttgggccaagattcctcacaccgatggacactttcatccttctccactgatgggaggttttggactcaaacacccgcctcctcagattatgatcaaaaacactcccgttccagccaatcctcccacaaacttcagttctgccaagtttgcttccttcatcacacagtattccacgggacaggtcagcgtggagatcgagtgggagctgcagaaggagaacagcaaacgctggaatcccgaaattcagtacacttccaactacaacaaatctgttaatgtggactttactgtggacactaatggtgtgtattcagagcctcgccccattggcaccagatacctgactcgtaatctgtaattgcttgttaatcaataaaccgtttaattcgtttcagttgaactttggtctctgcgaagggcgaattcgcggccgctaaattcaattcgcc

SEQ ID NO: 4850 - protein, 735 aa, Adeno-associated virus
MAADGYLPDWLEDTLSEGIRQWWKLKPGPPPPKPAERHKDDSRGLVLPGYKYLGPFNGLYKGEPVDEADAAALEHDKAYDRQLDSGDNPYLKYNHADAEFQERLKEDTSFGGNLGRAVFQAKKRVLEPLGLVGEPVKTAPGKKRPVEHSPVEPDSSSGTGKAGNQPARKRLNFGQTGDADSVPDPQPLGQPPAAPSGLGSTTMATGSGAPVADNNEGADGVGNSSGNWHCDSQWLGDRVITTSTRTWALPTYNNHLYKQISSQSGASNDNHYFGYSTPWGYFDFNRFHCHFSPRDRQRLINNNWGFRPKRLNFKLFNIQVKEVTQNDGTTTIANNLTSTVQVFTDSGYQLPYVLGLAHQGCLPPFPADVFMVPQYGYLTLNNGSQAVGRSSFYCLEYFPSQMLRTGNNFQFSYTFEDVPFHSSYAHSQSLDRLMNPLIDQYLYYLNKTQSNSGTLQQSRLLFSQAGPTSMSLQAKNWLPGPCYRQQRLSKQANDNNNSNFPWTAATKYHLNGRDSLVNPGPAMASHKDDEEKFFPMHGTLIFGKQGTNANDADLDNVMITDEEEIRTTNPVATEQYGYVSNNLQNSNTGPTTGTVNHQGALPGMVWQDRDVYLQGPIWAKIPHTDGHFHPSPLMGGFGLKHPPPQIMIKNTPVPANPPTNFSSAKFASFITQYSTGQVSVEIEWELQKEDSKRWNPEIQYTSNYNKPVNVDFTVDTNGVYSEPRPIGTRYLTRNL

SEQ ID NO: 4851 - DNA, 2208 bp, Adeno-associated virus
  source 1..2208: mol_type = other DNA
atggctgccgatggttatcttccagattggctcgaggacactctctctgaaggaataagacagtggtggaagctcaaacctggcccaccaccaccaaagcccgcagagcggcataaggacgacagcaggggtcttgtgcttcctgggtacaagtacctcggacccttcaacggactctacaagggagagccggtcgacgaggcagacgccgcggccctcgagcacgacaaggcctacgaccggcagctcgacagcggagacaacccgtacctcaagtacaaccacgccgacgcggagtttcaggagcgccttaaagaagatacgtcttttgggggcaacctcggacgagcagtcttccaggccaaaaagagggttcttgaacctctgggcttggttggggagcctgttaaaacggctccgggaaaaaagaggccggtagagcactctcctgtggagccagactcctcctcgggaaccggaaaagcgggcaaccagcctgcaagaaaaagattgaattttggtcagactggagacgcagactccgtacctgacccccagcctctcggacagccaccagcagccccctctggtctgggatctactacaatggctacaggcagtggcgcaccagtggcagacaataacgagggtgccgatggagtgggtaattcctcaggaaattggcattgcgattcccaatggctgggcgacagagtcatcaccaccagcacccgaacctgggctctgcccacctacaataaccacctctacaagcaaatctccagccaatcaggagcctcaaacgacaaccactactttggctacagcaccccctgggggtattttgacttcaacagattccactgccacttttcaccacgtgaccggcaaagactcatcaacaacaactggggattccgaccaaaaagactcaacttcaagctctttaacattcaagtcaaagaggtcacgcagaatgacggtacgacgacgattgccaataaccttaccagcacggttcaggtgtttactgactcggggtaccagctcccgtacgtcctcggcttggcgcatcaaggatgcctcccgccgttcccagcagacgtcttcatggtgccacagtatggatacctcaccctgaacaacgggagtcaggcggtaggacgctcttccttttactgcctggagtactttccttctcagatgctgcgtactggaaacaactttcagttcagctacacctttgaagacgttcctttccacagcagctacgctcacagccagagtctggatcggctgatgaatcctctgatcgaccagtacctgtattatctgaacaagacacaatcaaatagtggaactcttcagcagtctcggctactgtttagccaagctggacccaccagcatgtctcttcaagctaaaaactggctgcctggaccttgctacagacagcagcgtctgtcaaagcaggcaaacgacaacaacaacagcaactttccctggactgcggctacaaagtatcatctaaatggccgggactcgttggttaatccaggaccagctatggccagccacaaagacgatgaagaaaagtttttccccatgcatggaaccctgatatttggtaaacaaggaacaaatgctaacgacgcggatttggacaatgtcatgattacagatgaagaagaaatccgcaccaccaatcccgtggctacggagcagtacggatatgtgtcaaataatttgcaaaactcaaatactggtccaactactggaactgtcaatcaccaaggagcgttacctggtatggtgtggcaggatcgagacgtgtacctgcagggacccatttgggccaagattcctcacaccgatggacactttcatccttctccacttatgggaggttttggactcaaacacccacctcctcagatcatgattaaaaacactcccgttccagccaatcctcccacaaacttcagttctgccaagtttgcttctttcatcacacagtattccacgggacaagtcagcgtggagatcgagtgggagctgcagaaggaggacagcaaacgctggaaccccgagatccagtacacttccaactataacaaacctgttaatgtggactttactgtggacactaatggtgtgtattcagagcctcgccccattggcaccagatacctgactcgtaatctgtaa

SEQ ID NO: 4852 - DNA, 3161 bp, Adeno-associated virus
  source 1..3161: mol_type = other DNA
cgaattgatttagcggccgcgaattcgcccttcgcagagaccaaagttcaactgaaacgaattaaacggtttattgattaacaagcaattacagattacgagtcaggtatctggtgccaatggggcgaggctctgaatacacaccattagtgtccacagtaaagtccacattaacagatttgttgtagttggaagtgtactggatctcgggattccagcgtttgctgttctccttctgtagctcccactcgatctccacgctgacccgccccgtggaatactgtgtgatgaaggaagcaaactttgccgcactgaaggtggtcgaaggattcgcaggtaccggggtgtttttgatgagaatctgtggaggagggtgtttaagtccgaatccgcccatgaggggagaggggtgaaaatgtccgtccgtgtgcggaatctttgcccagataggcccctgcaggtacacgtctctgtcctgccagaccatgcctggaagaacgccttgtgtgttgacatctgcagtagatgcttgtgtgttgccgctctggaggttggtagatacagaaccatactgctccgtggccacgggattggtggttctgatttcctcttcgtctgtaatcatgaccttttcaatgtccacatttgttttctctgatccttgttttccaaagatgagaaccccgctctgaggaaaaaacttttcttcatcgtccttgtggctggccattgccgggcccggattcaccagagagtctctgccattgaggtggtacttggtagctccaatccacgagtattcactgttgttgttgtccgcagatgtctttgatactcgctgctggcggtaacagggtccaggaagccagttcctagactgatcccgaatgtcactcgctccggcctgagaaaactgaagcctggactgcgtggtggttccgcttggagtgtttgttctgctcaagtaatacaggtactggtcgatgagaggattcatgagacggtccaaactctggctgtgagcgtagctgctgtggaaaggaacatcctcaaaggtgtagctgaaggtaaagttgtttccggtacgcagcatctgagaagggaagtactccaggcagtaaaatgaagagcgtcctactgcctgactcccgttgttcagggtgaggtatccatactgtggcaccatgaagacgtctgctgggaacggcgggaggcatccttgatgcgccgagccgaggacgtacgggagctggtactccgagtcagtaaacacctgaaccgtgctggtaaggttattggcaatcgtcgtcgtaccatcattctgcgtgacctctctgacttgaatgttaaagagcttgaagttgagtctcttgggccggaatccccagttgttgttgatgagtctttgccagtcacgtggtgaaaagtggcagtggaatctgttgaagtcaaaatacccccaaggggtgctgtagccaaagtagtggttgtcgttgctggctcctgattggctggaaatctgcttgtacagatggttgttgtaggtgggcagagcccaggttcgggtgctggtggtgatgactctgtcgcccatccatgtggaatcgcaatgccaatttcccgaggaattacccactccgtcggcgccatcgttattgtctgccattggtgcgccactgcctgtagccatcgtattagttcccagaccagagggggctgctggtggctgtccgagaggctgggggtcaggtacggagtctgcgtctccagtctgaccgaaattcaatctctttcttgcaggctggttgcccgcttttccggttcccgaggaggagtctggctccacaggagagtgctctaccggcctcttttttcccggagccgtcttaacaggctcctcaaccaggcccagaggttcaagaaccctcttttttgcctggaagactgctcgtccgaggttgcccccaaaagacgtatcttctttaaggcgctcctgaaactccgcgtcggcgtggtcgtacttgaggtacgggttgtctccgctgtcgagctgccggtcgtaggccttgtcgtgctcgagggccgcggcgtctgcctcgttgaccggctctcccttgtcgagtccgttgaagggtccgaggtacttgtacccaggaagcacaagacccctgctgtcgtccttatgccgctctgcgggctttggtggtggtgggccaggtttgagcttccaccactgtcttattccttcagagagagtgtcctcgagccaatctggaagataaccatcggcagccatacctgatttaaatcatttattgttcagagatgcagtcatccaaatccacattgaccagatcgcaggcagtgcaagcgtctggcacctttcccatgatatgatgaatgtagcaaagtttctgatacgcctttttgacgacagaaacgggttgagattctgacacgggaaagcactctaaacagtctttctgtccgtgagtgaagcagatatttgaattctgattcattctctcgcattgtctgcagggaaacagcatcagattcatgcccacgtgacgagaacatttgttttggtacctgtccgcgtagttgatcgaagcttccgcgtctgacgtcgatggctgcgcaactgactcgcgcgcccgtttgggctcacttatatctgcgtcactgggggcgggtcttttcttggctccaccctttttgacgtagaattcatgctccacctcaaccacgtgatcctttgcccaccggaaaaagtctttcacttcctgcttggtgaccttcccaaagtcatgatccagacggcgggttagttcaaatttgaacatccggtcttgcaacggctgctggtgttcgaaggtcgttgagttcccgtcaatcacggcgcacatgttggtgttggaggtggcgatcacgggagtcgggtctatctgggccgaggacttgcacttttggtccacgcgcaccttgcttcctccgagaatggcttcggccgattccacgaccttggcggtcatctttccctcctcccaccagatcaccatcttgtcgacacagtcgttgaagggaaagttctcattggtccagttgacgcagcaagggcgaattcgtttaaacctgcaggaactagtcccttagtgagg

SEQ ID NO: 4853 - protein, 735 aa, Adeno-associated virus
MAADGYLPDWLEDTLSEGIRQWWKLKPGPPPPKPAERHKDDSRGLVLPGYKYLGPFNGLYKGEPVNEADAAALEHDKAYDRQLDSGDNPYLKYNHAGAEFQERLKEDTSFGGNLGRAVFQAKKRVLEPLGLVEEPVKTAPGKKRPVEHSPVEPDSSSGTGKAGNQPARKRLNFGQTGDADSVPDPQPLGQPPAAPSGLGSTTMATGSGAPVADNNEGADGVGNSSGNWHCDSQWLGDRVITTSTRTWALPTYNNHLYKQISSQSGASNDNHYFGYSTPWGYFDFNRFHCHFSPRDWQRLINNNWGFRPKRLNFKLFNIQVKEVTQNDGTTTIANNLTSTVQVFTDSEYQLPYVLGSAHQGCLPPFPADVFMVPQYGYLTLNNGSQAVGRSSFYCLEYFPSQMLRTGNNFQFSYTFEDVPFHSSYAHSQSLDRLMNPLIDQYLYYLNKTQSNSGTLQQSRLLFSQAGPTSMSLQAKNWLPGPCYRQQRLSKQANDNNNSNFPWTAATKYHLNGRDSLVNPGPAMASHKDDEEKFFPMHGTLIFGKQGTNANDADLDNVMITDEEEIRTTNPVATEQYGYVSNNLQDSNTGPTTGTVNHQGALPGMVWQDRDVYLQGPIWAKIPHTDGHFHPSPLMGGFGLKHPPPQIMIKNTPVPANPPTNFSSAKFASFITQYSTGQVSVEIEWELQKENSKRWNPEIQYTSNYNKSVNVDFTVDTNGVYSEPRPIGTRYLTRNL

SEQ ID NO: 4854 - DNA, 2208 bp, Adeno-associated virus
  source 1..2208: mol_type = other DNA
atggctgccgatggttatcttccagattggctcgaggacactctctctgaaggaataagacagtggtggaagctcaaacctggcccaccaccgccaaagcccgcagagcggcataaggacgacagcaggggtcttgtgcttcctgggtacaagtacctcggacccttcaacggactctacaagggagagccggtcaacgaggcagacgccgcggccctcgagcacgacaaggcctacgaccggcagctcgacagcggagacaacccgtacctcaagtacaaccacgccggcgcggagtttcaggagcgccttaaagaagatacgtcttttgggggcaacctcggacgagcagtcttccaggccaaaaagagggttcttgaacctctgggcttggttgaggagcctgttaaaacggctccgggaaaaaagaggccggtagagcactctcctgtggagccagactcctcctcgggaaccggaaaagcgggcaaccagcctgcaagaaaaagattgaattttggtcagactggagacgcagactccgtacctgacccccagcctctcggacagccaccagcagccccctctggtctgggatctactacaatggctacaggcagtggcgcaccagtggcagacaataacgagggtgccgatggagtgggtaattcctcaggaaattggcattgcgattcccaatggctgggcgacagagtcatcaccaccagcacccgaacctgggctctgcccacctacaacaaccacctctacaagcaaatctccagccaatcaggagcctcaaacgacaaccactactttggctacagcaccccctgggggtattttgacttcaacagattccactgccacttttcaccacgtgactggcaaagactcatcaacaacaactggggattccgaccaaagagactcaacttcaagctctttaacattcaagtcaaagaggtcacgcagaatgacggtacgacgacgattgccaataaccttaccagcacggttcaggtgtttactgactcggagtaccagctcccgtacgtcctcggctcggcgcatcaaggatgcctcccgccgttcccagcagacgtcttcatggtgccacagtatggatacctcaccctgaacaacgggagtcaggcggtaggacgctcttccttttactgcctggagtactttccttctcagatgctgcgtactggaaacaactttcagttcagctacacctttgaagacgttcctttccacagcagctacgctcacagccagagtctggatcggctgatgaatcctctgatcgaccagtacctgtattatctgaacaagacacaatcaaatagtggaacccttcagcagtctcggctactgtttagccaagctggacccaccagcatgtctcttcaagctaaaaactggctgcctggaccttgctacagacagcagcgtctgtcaaagcaggcaaacgacaacaacaacagcaactttccctggactgcggctacaaagtatcatctaaatggccgggactcgttggttaatccaggaccagctatggccagccacaaagacgatgaagaaaagtttttccccatgcatggaaccctgatatttggtaaacaaggaacaaatgctaacgacgcggatttggacaatgtcatgattacagatgaagaagaaatccgcaccaccaatcccgtggctacggagcagtacggatatgtgtcaaataatttgcaagactcaaatactggtccaactactggaactgtcaatcaccaaggagcgttacctggtatggtgtggcaggatcgagacgtgtacctgcagggacccatttgggccaagattcctcacaccgatggacactttcatccttctccacttatgggaggttttggactcaaacacccacctcctcagatcatgattaaaaacactcccgttccagccaatcctcccacaaacttcagttctgccaagtttgcttctttcatcacacagtattccacgggacaagtcagcgtagagatcgagtgggagctgcagaaggagaacagcaaacgctggaaccccgagatccagtacacttccaactataacaaatctgttaatgtggactttactgtggacactaatggtgtgtattcagagcctcgccccattggcaccagatacctgactcgtaatctgtaa

SEQ ID NO: 4855 - protein, 738 aa, Adeno-associated virus
MAADGYLPDWLEDNLSEGIREWWDLKPGAPKPKANQQKQDDGRGLVLPGCKYLGPFNGLDKGEPVNAADAAALEHDKAYDQQLKAGDNPYLRYNHADAEFQERLQEDTSFGGNLGRAVFQAKKRVLEPLGLVEEGAKTAPGKKRPVEPSPQRSPDSSTGIGKTGQQPAKKRLNFGQTGDSESVPDPQPIGEPPAGPSGLGSGTMAAGGGAPMADNNEGADGVGSSSGNWHCDSTWLGDRVITTSTRTWALPTYNNHLYKQISNGTSGGSTNDNTYFGYSTPWGYFDFNRFHCHFSPRDWQRLINNNWGFRPKRLNFKLFNIQVKEVTQNEGTKTIANNLTSTIQVFTDSEYQLPYVLGSAHQGCPPPFPADVFMIPQYGYLTLNNGSQAVGRSSFYCLEYFPSQMRRTGNNFEFSYQFEDVPFHSSYAHSQSLDRLMNPLIDQYLYYLSRTQSTGGTAGTQQLLFSQAGPNNMSAQAKNWLPGPCYRQQRVSTTLSQNNNSNFAWTGATKYHLNGRDSLVNPGVAMATHKDDEERFFPSSGVLMFGKQGAGKDNVDYSSVMLTSEEEIKTTNPVATEQYGVVADNLQQQNAAPIVGAVNSQGALPGMVWQNRDVYLQGPIWAKIPHTDGNFHPSPLMGGFGLKHPPPQILIKNTPVPADPPTTFSQAKLASFITQYSTGQVSVEIEWELQKENSKRWNPEIQYTSNYNKSVNVDFTVDTNGVYSEPRPIGTRYLTRNL

SEQ ID NO: 4856 - DNA, 2217 bp, Adeno-associated virus
  source 1..2217: mol_type = other DNA
atggctgccgatggttatcttccagattggctcgaggacaacctctctgagggcattcgcgagtggtgggacttgaaacctggagccccgaaacccaaagccaaccagcaaaagcaggacgacggccggggtctggtgcttcctggctgcaagtacctcggacccttcaacggactcgacaagggggagcccgtcaacgcggcggacgcagcggccctcgagcacgacaaggcctacgaccagcagctcaaagcgggtgacaatccgtacctgcggtataaccacgccgacgccgagtttcaggagcgtctgcaagaagatacgtcttttgggggcaacctcgggcgagcagtcttccaggccaagaagcgggttctcgaacctctcggtctggttgaggaaggcgctaagacggctcctggaaagaagagaccggtagagccatcaccccagcgttctccagactcctctacgggcatcggcaagacaggccagcagcccgcgaaaaagagactcaactttgggcagactggcgactcagagtcagtgcccgaccctcaaccaatcggagaaccccccgcaggcccctctggtctgggatctggtacaatggctgcaggcggtggcgctccaatggcagacaataacgaaggcgccgacggagtgggtagttcctcaggaaattggcattgcgattccacatggctgggcgacagagtcatcaccaccagcacccgaacctgggccctccccacctacaacaaccacctctacaagcaaatctccaacgggacatcgggaggaagcaccaacgacaacacctacttcggctacagcaccccctgggggtattttgactttaacagattccactgccacttctcaccacgtgactggcagcgactcatcaacaacaactggggattccggcccaagagactcaacttcaagctcttcaacatccaggtcaaggaggtcacgcagaatgaaggcaccaagaccatcgccaataaccttaccagcacgattcaggtctttacggactcggaataccagctcccgtacgtcctcggctctgcgcaccagggctgcccgcctccgttcccggcggacgtcttcatgattcctcagtacgggtacctgactctgaacaacggcagtcaggccgtgggccgttcctccttctactgcctggagtactttccttctcaaatgcggagaacgggcaacaactttgagttcagctaccagtttgaggacgtgccttttcacagcagctacgcgcatagccaaagcctggaccggctgatgaaccccctcatcgaccagtacctgtactacctgtctcggactcagtccacgggaggtaccgcaggaactcagcagttgctattttctcaggccgggcctaataacatgtcggctcaggccaaaaactggctacccgggccctgctaccggcagcaacgcgtctccacgacactgtcgcaaaataacaacagcaactttgcttggaccggtgccaccaagtatcatctgaatggcagagactctctggtaaatcccggtgtcgctatggcaacgcacaaggacgacgaagagcgattttttccatccagcggagtcttgatgtttgggaaacagggagctggaaaagacaacgtggactatagcagcgttatgctaaccagtgaggaagaaatcaaaaccaccaacccagtggccacagaacagtacggcgtggtggccgataacctgcaacagcaaaacgccgctcctattgtaggggccgtcaacagtcaaggagccttacctggcatggtctggcagaaccgggacgtgtacctgcagggtcctatctgggccaagattcctcacacggacggcaactttcatccttcgccgctgatgggaggctttggactgaaacacccgcctcctcagatcctgattaagaatacacctgttcccgcggatcctccaactaccttcagtcaagccaagctggcgtcgttcatcacgcagtacagcaccggacaggtcagcgtggaaattgaatgggagctgcagaaagagaacagcaagcgctggaacccagagattcagtatacttccaactataacaaatctgttaatgtggactttactgtggacactaatggtgtgtattcagagcctcgccccattggcaccagatacctgactcgtaatctgtaa

SEQ ID NO: 4857 - DNA, 3167 bp, Adeno-associated virus
  source 1..3167: mol_type = other DNA
attgaatttagcggccgcgaattcgcccttcgcagagaccaaagttcaactgaaacgaattaaacggtttattgattaacaagcaattacagattacgagtcaggtacctggtgccaatggggcgaggctctgaatacacaccattagtgtccacagtaaagtccacattaacagatttgttgtagttggaagtgtactgaatctcgggattccagcgtttgctgttctccttctgcagctcccactcgatctccacgctgacctgccccgtggagtactgtgtaatgaaggaagcaaactttgccgcactgaaggtagtcgaaggattcgcaggtaccggggtgttcttgatgagaatctgcgggggagggtgtttaagtccgaatccgcccatgaggggagaggggtgaaaatgtccgtccgtgtgtggaatctttgcccagatgggcccctgcaggtacacgtctctgtcctgccacaccatgcctggaagaacgccttgtgtgttgacatctgaggtagctgcttgtgtgttgccgctctggaggttggtagatacagaaccatactgctccgtagccacgggattggtggtcctgatttcctcttcgtctgtaatcatgaccttttcaatgtccacattagtttttcccgagtcttgttttccaaagatgagaaccccgctctgaggaaaaaacttttcttcatcgtccttgtggctggccatggccgggcccggattcaccagagagtctcttccattaaggtggtacttggtagctccagtccacgagtattcactgttgttgttatccgcagatgtctttgatactcgctgctggcggtaacagggtccaggaagccagttcctagactggtcccgaatgtcacttgctccggcctgagaaaactgaagccttgactgcgtggtggttccgcttggagtgtttgttctgctcaagtaatacaggtactggtcgatgagaggattcatgagacggtccaaactctggctgtgggcgtagctgctgtggaaaggaacgtcctcaaaggtgtagctgaaggtaaagttgtttccggtacgcagcatctgagaaggaaagtactccaggcagtaaaatgaagagcgtcctactgcctgactcccgttgttcagggtgaggtatccatactgtggcaccatgaagacgtctgctgggaacggcgggaggcatccttgatgcgccgagccgaggacgtacgggagctggtactccgagtcagtaaacacctgaaccgtgctggtaaggttattggcaatcgtcgtcgtaccgtcattctgcgtgacctccttgacttgaatgttaaagagcttgaagttgagtcttttgggccggaatccccaattgttgttgatgagtctttgccagtcacgtggcgaaaagtggcagtggaatctgttgaagtcaaaatacccccaaggggtgctgtagccaaagtagtggttgtcgtttgaggctcctgattggctggaaatctgcttgtagaggtggttgttgtaggtgggcagagcccaggtgcgggtgctggtggtgatgactctgtcgcccatccatgtggaatcgcaatgccaatttcccgaggaattacccactccgtcggcgccctcgttattgtctgccattggtgcgccactgcctgtagccatcgtattagttcccagaccagagggggctgctggtggctgtccgagaggctgggggtcaggtacggagtctgcgtctccagtctgaccgaaattcaatctctttcttgcaggctgctggcccgcttttccggttcccgaggaggagtctggctccgcaggagagtgctctaccggcctcttttttcccggagccgtcttaacaggttcctcaaccaggcccagaggttcaagaaccctctttttcgcctggaagactgctcgtccgaggttgcccccaaaagacgtatcttctttaagacgctcctggaactccgcgtcggcgtggttgtacttggggtacgggttgtctccgctgtcgagctgccggtcgtaggccttgtcgtgctcgagggccgcggcgtctgcctcgttgaccggctctcccttgtcgagtccgttgaagggtccaaggtacttgtacccaggaagcacaagacccctgctgtcgtccttatgccgctctgcgggctttggtggtggtgggccaggtttgagcttccaccactgtcttattccttcagagagagtgtcctcgagccaatctggaagataaccatcggcagccatacctgatttaaatcatttattgttcagagatgcagtcatccaaatccacattgaccagatcgcaagcagtgcaagcgtctggcacctttcccatgatatgatgaatgtagcacagtttctgatacgcctttttgacgacagaaacgggttgagattctgacacgggaaagcactctaaacagtctttctgtccgtgagtgaagcagatatttgaattctgattcattctctcgcattgtctgcagggaaacagcatcagattcatgcccacgtgacgagaacatttgttttggtacctgtccgcgtagttgattgaagcttccgcgtctgacgtcgatggctgcgcaactgactcgcgcgcccgtttgggctcacttatatctgcgtcactgggggcgggtctttttttggctccaccctttttgacgtagaattcatgctctacctcaaccacgtgatcctttgcccaccggaaaaagtctttgacttcctgcttggtgaccttcccaaagtcatgatccagacggcgggtgagttcaaatttgaacatccggtcttgcaacggctgctggtgttcgaaggtcgttgagttcccgtcaatcactgcgcacatgttggtgttggaggtgacaatcacgggagtcgggtctatctgggccgaggacttgcatttctggtccacgcgcaccttgcttcctccgagaatggctttggccgactccacgaccttggcggtcatcttcccctcctcccaccagatcaccatcttgtcgacgcaatcattgaaaggaaagttctcattggtccagttgacgcagccgtagaaagggcgaattcgtttaaacctgcaggactagtccctttagtgagggt

SEQ ID NO: 4858 - DNA, 3161 bp, Adeno-associated virus
  source 1..3161: mol_type = other DNA
aattgaatttagcggccgcgaattcgcccttcgcagagaccaaagttcaactgaaacgaattaaacggtttattgattaacaagcaattacagattacgagtcaggtatctggtgccaatggggcgaggctctgaatacacaccattagtgtccacagtaaagtccacattaacagatttgttgtagttggaagtgtactgaatctcgggattccagcgtttgctgttctccttctgcagctcccactcgatctccacgctgacctgccccgtggagtactgtgtaatgaaggaagcaaactttgccgcactgaaggtagtcgaaggattcgcaggtaccggggtgttcttgatgagaatctgcgggggagggtgtttaagtccgaatccgcccatgaggggagaggggtgaaaatgtccgtccgtgtgtggaatctttgcccagatgggcccctgcaggtacacgtctctgtcctgccacaccatgcctggaagaacgccttgtgtgttgacatctgaggtagctgcttgtgtgttgccgctctggaggttggtagatacagaaccatactgctccgtagccacgggattggtggtcctgatttcctcttcgtctgtaatcatgaccttttcaatgtccacattagtttttcccgagtcttgttttccaaagatgagaaccccgctctgaggaaaaaacttttcttcatcgtccttgtggctggccatggccgggcccggattcaccagagagtctcttccattaaggtggtacttggtagctccagtccacgagtattcactgttgttgttatccgcagatgtctttgatactcgctgctggcggtaacagggtccaggaagccagttcctagactggtcccgaatgtcacttgctccggcctgagaaaactgaagccttgactgcgtggtggttccgcttggagtgtttgttctgctcaagtaatacaggtactggtcgacgagaggattcatgagacggtccaaactctggctgtgggcgtagctgctgtggaaaggaacgtcctcaaaggtgtagctgaaggtaaagttgtttccggtacgcagcatctgagaaggaaagtactccaggcagtaaaatgaagagcgtcctactgcctgactcccgttgttcagggtgaggtatccatactgtggcaccatgaagacgtctgctgggaacggcgggaggcatccttgatgcgccgagccgaggacgtacgggagctggtactccgagtcagtaaacacctgaaccgtgctggtaaggttattggcaatcgtcgtcgtaccgtcattctgcgtgacctccttgacttgaatgttaaagagcttgaagttgagtcttttgggccgggatccccaattgttgttgatgagtctttgccagtcacgtggcgaaaagtggcagtggaatctgttgaagtcaaaatacccccaaggggtgctgtagccaaagtagtggttgtcgtttgaggctcctgattggctggaaatctgcctgtagaggtggttgttgtaggtgggcagagcccaggtgcgggtgctggtggtgatgactctgtcgcccatccatgtggaatcgcaatgccaatttcccgaggaattacccactccgtcggcgccctcgttattgtctgccattggtgcgccactgcctgtagccatcgtattagttcccagaccagagggggctgctggtggctgtccgagaggctgggggtcaggtacggagtctgcgtctccagtctgaccgaaattcaatctccttcttgcaggctgctggcccgcttttccggttcccgaggaggagtctggctccgcaagagagtgctctaccggcctcttttttcccggagccgtcttaacaggttcctcaaccaggcccagaggttcaagaaccctctttttcgcctggaagactgctcgtccgaggttgcccccaaaagacgtatcttctttaagacgctcctggaactccgcgtcggcgtggttgtacttgaggtacgggttgtctccgccgtcgagctgccggtcgtaggccttgtcgtgctcgagggccgcggcgtctgcctcgttgaccggctctcccttgtcgagtccgttgaagggtccaaggtacttgtacccaggaagcacaagacccctgctgtcgtccttatgccgctctgcgggctttggtggtggtgggccaggtttgagcttccaccactgtcttattccttcagagagagtgtcctcgagccaatctggaagataaccatcggcagccatacctgatttaaatcatttattgttcagagatgcagtcatccaaatccacattgaccagatcgcaagcagtgcaagcgtctggcacctttcccatgatatgatgaatgtagcacagtttctgatacgcctttttgacgacagaaacgggttgagattctgacacgggaaagcactctaaacagtctttctgtccgtgagtgaagcagatatttgaattctgattcattctctcgcattgtctgcagggaaacagcatcagattcatgcccacgtgacgagaacatttgttttggtacctgtccgcgtagttgattgaagcttccgcgtctgacgtcgatggctgcgcaactgactcgcgcgcccgtttgggctcacttatatctgcgtcactgggggcgggtctttttttggctccaccctttttgacgtagaattcatgctctacctcaaccacgtgatcctttgcccaccggaaaaagtctttgacttcctgcttggtgaccttcccaaagtcatgatccagacggcgggtgagttcaaatttgaacatccggtcttgcaacggctgctggtgttcgaaggtcgttgagttcccgtcaatcactgcgcacatgttggtgttggaggtgacaatcacgggagtcgggtctatctgggccgaggacttgcatttctggtccacgcgcaccttgcttcctccgagaatggctttggccgactccacgaccttggcggtcatcttcccctcctcccaccagatcaccatcttgtcgacgcaatcattgaaaggaaagttctcattggtccagttgacgcagcaagggcgaattcgtttaaacctgcaggactagtccctttagtgaggg

SEQ ID NO: 4859 - DNA, 3172 bp, Adeno-associated virus
  source 1..3172: mol_type = other DNA
gattgaatttagcggccgcgaattcgcccttgctgcgtcaactggaccaatgagaactttcccttcaacgattgcgtcgacaagatggtgatctggtgggaggagggcaagatgaccgccaaggtcgtggagtccgccaaggccattctgggtggaagcaaggtgcgcgtggaccaaaagtgcaagtcatcggcccagatcgaccccacgcccgtgatcgtcacctccaacaccaacatgtgcgccgtgatcgacgggaacagcaccaccttcgagcaccagcagcccctgcaggaccgcatgttcaagttcgagctcacccgccgtctggagcacgactttggcaaggtgaccaagcaggaagtcaaagagttcttccgctgggctcaggatcacgtgactgaggtggcgcatgagttctacgtcagaaagggcggagccaccaaaagacccgcccccagtgacgcggatataagcgagcccaagcgggcctgcccctcagttgcggagccatcgacgtcagacgcggaagcaccggtggactttgcggacaggtaccaaaacaaatgttctcgtcacgcgggcatgcttcagatgctgtttccctgcaagacatgcgagagaatgaatcagaatttcaacgtctgcttcacgcacggggtcagagactgctcagagtgcttccccggcgcgtcggaatctcaacccgtcgtcagaaaaaagacgtatcagaaactgtgcgcgattcatcatctgctggggcgggcacccgagattgcgtgttcggcctgcgatctcgtcaacgtggacttggatgactgtgtttctgagcaataaatgacttaaaccaggtatggctgctgacggttatcttccagattggctcgaggacaacctctctgagggcattcgcgagtggtgggacctgaaacctggagcccccaagcccaaggccaaccagcagaagcaggacgacggccggggtctggtgcttcctggctacaagtacctcggacccttcaacggactcgacaagggggagcccgtcaacgcggcggacgcagcggccctcgagcacgacaaggcctacgaccagcagctcaaagcgggtgacaatccgtacctgcggtataaccacgccgacgccgagtttcaggagcgtctgcaagaagatacgtcttttgggggcaacctcgggcgagcagtcttccaggccaagaagcgggttctcgaacctctcggtctggttgaggaagctgctaagacggctcctggaaagaagagaccggtagaaccgtcacctcagcgttcccccgactcctccgcgggcatcggcaagaaaggccagcagcccgctaaaaagagactgaactttggtcagactggcgactcagagtcagtccccgaccctcaaccaatcggagaaccaccagcaggcccctctggtctgggatctggtacaatggctgcaggcggtggcgctccaatggcagacaataacgaaggcgccgacggagtgggtagttcctcaggaaattggcattgcgattccacatggctgggcgacagagtcatcaccaccagcacccgaacctgggccctgcccacctacaacaaccacctctacaagcaaatatccaatgggacatcgggaggaagcaccaacgacaacacctacttcggctacagcaccccctgggggtattttgacttcaacagattccactgccacttctcaccacgtgactggcagcgactcatcaacaacaactggggattccggccaaaaagactcagcttcaagctcttcaacatccaggtcaaggaggtcacgcagaatgaaggcaccgagaccatcgccaataaccttaccagcacgattcaggtatttacggactcggaataccagctgccgtacgtcctcggctccgcgcaccagggctgcctgcctccgttcccggcggacgtcttcatgattccccagtacggctaccttacactgaacaatggaagtcaagccgtaggccgttcctccttctactgcctggaatattttccatctcaaatgctgcgaactggaaacaattttgaattcagctacaccttcgaggacgtgcctttccacagcagctgcgcacacagccagagctcggaccgactgatgaatcctctcatcgaccagtacctgtactacttatccagaactcggtccacaggaggaactcaaggtacccagcaattgttattttctcaagctgggcctgcaaacatgtcggctcaggctaagaactggctacctggaccttgctaccggcagcagcgagtctctacgacactgtcgcaaaacaacaacagcaactttgcttggactggtgccaccaaatatcacctgaacggaagagactctttggtaaatcccggtgtcgccatggcaacccacaaggacgacgaggaacgcttcttcccgtcgagtggagtcctgatgtttggaaaacagggtgctggaagagacaatgtggactacagcagcgttatgctaaccagcgaagaagaaattaaaaccactaaccctgtagccacagaacaatacggtgtggtggctgacaacttgcagcaaaccaatacagggcctattgtgggaaatgtcaacagccaaggagccttacctggcatggtctggcagaaccgagacgtgtacctgcagggtcccatctgggccaagattcctcacacggacggcaacttccacccttcaccgctaatgggaggatttggactgaagcacccacctcctcagatcctgatcaagaacacgccggtacctgcggatcctccaacaacgttcagccaggcgaaattggcttccttcattacgcagtacagcaccggacaggtcagcgtggaaatcgagtgggagctgcagaaggagaacagcaaacgctggaacccagagattcagtacacttcaaactactacaaatctacaaatgtggactttgctgtcaatacagagggaacttattctgagcctcgccccattggtactcgttacctcacccgtaatctgtaattgctggttaatcaataaaccgtttgattcgtttcagttgaactttggtctctgcgaagggcgaattcgtttaaacctgcaggactagtccctttagtgagg

SEQ ID NO: 4860 - DNA, 3172 bp, Adeno-associated virus
  source 1..3172: mol_type = other DNA
gattgaatttagcggccgcgaattcgcccttgctgcgtcaactggaccaatgagaactttcccttcaacgattgcgtcgacaagatggtgatctggtgggaggagggcaagatgaccgccaaggtcgtggagtccgccaaggccattctgggtggaagcaaggtgcgcgtggaccaaaagtgcaagtcatcggcccagatcgaccccacgcccgtgatcgtcacctccaacaccaacatgtgcgccgtgatcggcgggaacagcaccaccttcgagcaccagcagcccctgcaggaccgcatgttcaagttcgagctcacccgccgtctggagcacgactttggcaaggtgaccaagcaggaagtcaaagagttcttccgctgggctcaggatcacgtgactgaggtggcgcatgagttctacgtcagaaagggcggagccaccaaaagacccgcccccagtgacgcggatataagcgagcccaagcgggcctgcccctcagttgcggagccatcgacgtcagacgcggaagcaccggtggactttgcggacaggtaccaaaacaaatgttctcgtcacgcgggcatgcttcagatgctgtttccctgcaagacatgcgagagaatgaatcagaatttcaacgtctgcttcacgcacggggtcagagactgctcagagtgcctccccggcgcgtcagaatctcaacccgtcgtcagaaaaaagacgtatcagaaactgtgcgcgattcatcatctgctggggcgggcacccgagattgcgtgttcggcctgcgatctcgtcaacgtggacttggatgactgtgtttctgagcaataaatgacttaaaccaggtatggctgctgacggttatcttccagattggctcgaggacaacctctctgagggcattcgcgagtggtgggacctgaaacctggagcccccaagcccaaggccaaccagcagaagcaggacgacggccggggtctggtgcttcttggctacaagtacctcggacccttcaacggactcgacaagggggagcccgtcaatgcggcggacgcagcggccctcgagcacgacaaggcctacgaccagcagctcaaagcgggtgacaatccgtacctgcggtataaccacgccgacgccgagtttcaggagcgtctgcaagaagatacgtcttttgggggcaacctcgggcgagcagtcttccaggccaagaagcgggttctcgaacctctcggtctggttgaggaagctgctaagacggctcctggaaagaagagaccggtagaaccgtcacctcagcgttcccccgactcctccacgggcatcggcaagaaaggccagcagcccgctaaaaagagactgaactttggtcagactggcgactcagagtcagtccccgaccctcaaccaatcggagaaccaccagcaggcccctctggtctgggatctggtacaatggctgcaggcggtggcgctccaatggcagacaataacgaaggcgccgacggagtgggtagttcctcaggaaattggcattgcgattccacatggctgggcgacagagtcatcaccaccagcacccgaacctgggccctgcccacctacaacaaccacctctacaagcaaatatccaatgggacatcgggaggaagcaccaacgacaacacctacttcggctacagcaccccctgggggtattttgacttcaacagattccactgccacttctcaccacgtgactggcagcgactcatcaacaacaactggggattccggccaaaaagactcagcttcaagctcttcaacatccaggtcaaggaggtcacgcagaatgaaggcaccaagaccatcgccaataaccttaccagcacgattcaggtatttacggactcggaataccagctgccgtacgtcctcggctccgcgcaccagggctgcctgcctccgttcccggcggacgtcttcatgattccccagtacggctaccttacactgaacaatggaagtcaagccgtaggccgttcctccttctactgcctggaatattttccatctcaaatgctgcgaactggaaacaattttgaattcagctacaccttcgaggacgtgcctttccacagcggctacgcacacagccagagcttggaccgactgatgaatcctctcatcgaccagtacctgtactacttatccagaactcagtccacaggaggaactcaaggtacccagcaattgttattttctcaagctgggcctgcaaacatgtcggctcaggctaagaactggctacctggaccttgctaccggcagcagcgagtctctacgacactgtcgcaaaacaacaacagcaactttgcttggactggtgccaccaaatatcacctgaacggaagagactctttggtaaatcccggtgtcgccatggcaacccacaaggacgacgaggaacgcttcttcccgtcgagtggagtcctgatgtttggaaaacagggtgctggaagagacaatgtggactacagcagcgttatgctaaccagcgaagaagaaattaaaaccactaaccctgtagccacagaacaatacggtgtggtggctgacaacttgcagcaaaccaatacagggcctattgtgggaaatgtcaacagccaaggagccttacctggcatggtctggcagaaccgagacgtgtacctgcagggtcccatctgggccaagattcctcacacggacggcaacttccacccttcaccgctaatgggaggatttggactgaagcacccacctcctcagatcctgatcaagaacacgccggtacctgcggatcctccaacgacgttcagccaggcgaaattggcttccttcattacgcagtacagcaccggacaggtcagcgtggaaatcgagtgggagctgcagaaggagaacagcaaacgctggaacccagagattcagtacacttcaaactactacaaatctacaaatgtggactttgctgtcaatacagagggaacttattctgagcctcgccccattggtactcgttacctcacccgtaatctgtaattgctggttaatcaataaaccgtttgattcgtttcagttgaactttggtctctgcgaagggcgaattcgtttaaacctgcaggactagtccctttagtgagg

SEQ ID NO: 4861 - DNA, 2208 bp, Adeno-associated virus
  source 1..2208: mol_type = other DNA
atggctgccgatggttatcttccagattggctcgaggacactctctctgaaggaataagacagtggtggaagctcaaacctggcccaccaccaccaaagcccgcagagcggcataaggacgacagcaggggtcttgtgcttcctgggtacaagtacctcggacccttcaacggactcgacaagggagagccggtcaacgaggcagacgccgcggccctcgagcacgacaaggcctacgaccggcagctcgaaagcggagacaacccgtacctcaagtacaaccacgccgacgcggagtttcaggagcgtcttaaagaagatacgtcttttgggggcaacctcggacgagcagtcttccaggcgaaaaagagggttcttgaacctctgggcctggttgaggagcctgttaaaacggctccgggaaaaaagaggccggtagagcactctcctgtggagccagactcctcctcgggaaccggaaaagcgggccagcagcctgcgagaaaaagattgaattttggtcagactggagacgcagactccgtacctgacccccagcctctcggacagccaccagcagccccctctggtctgggatctactacaatggcttcaggcagtggcgcaccagtggcagacaataacgagggtgccgatggagtgggtaattcctcaggaaattggcattgcgattcccaatggctgggcgacagagtcatcaccaccagcacccgaacctgggccctgcccacctacaacaaccacctctacaagcaaatctccagccaatcaggagcctcaaacgacaaccactactttggctacagcaccccctgggggtattttgacttcaacagattccactgccacttttcaccacgtgactggcaaagactcatcaacaacagctggggattccgacccaaaagactcaacttcaagctctttaacattcaagtcaaagaggtcacgcagaatgacggtacgacgacgattgccaataaccttaccagcacggttcaagtgtttaccgactcggagtaccagctcccgtacgtcctcggctcggcgcatcaaggatgcctcccgccgttcccagcagacgtctttatggtcccacagtatggatacctcaccctgaacaacgggagtcaggcggtaggacgctcttccttttactgcctggagtactttccttctcagatgctgcgtactggaaacaactttcagttcagctacacctttgaagacgttcccttccacagcagctacgctcacagccagagtctggatcggctgctgaatcctctgatcgaccagtacctatattatctgaacaagacacaatcaaatagtggaactcttcagcagtctcggctactgtttagccaagctggacccaccagcatgtctcttcaagctaaaaactggctgcctggaccttgctacagacagcagcgtctgtcaaagcaggcaaacgacaacaacaacagcaactttccctggactgcggctacaaagtatcatctaaatggccgggactcgttggttaatccaggaccagctatggccagccacaaagacgatgaagaaaagtttttccccatgcatggaaccctgatatttggtaaacaaggaacaaatgctaacgacgcggatttggacaatgtcatgattacagatgaagaagaaatccgcaccaccaatcccgtggctacggagcagtacggatatgtgtcaaataatttgcaaaactcaaatactggtccaactactggaactgtcaatcaccaaggagcgttacctggtatggtgtggcaggatcgagacgtgtacctgcagggacccatttgggccaagattcctcacacggacgggcactttcatccttctccactaatgggaggttttgggctcaaacacccgcctcctcagatcatgatcaaaaacactcccgttccagccaatcctcctacaaacttcagttcttccaagtttgcttctttcatcacacagtattccacggggcaggtcagcgtggagatcgagtgggagctgcagaaggagaacagcaaacgctggaatcccgaaattcagtatacttccaactacaacaaatctgttaatgtggactttactgtggacactaatggtgtgtattcagagcctcgccccattggcaccagatacccgactcgtaatctgtaa

SEQ ID NO: 4862 - protein, 735 aa, Adeno-associated virus
MAADGYLPDWLEDTLSEGIRQWWKLKPGPPPPKPAERHKDDSRGLVLPGYKYLGPFNGLDKGEPVNEADAAALEHDKAYDRQLESGDNPYLKYNHADAEFQERLKEDTSFGGNLGRAVFQAKKRVLEPLGLVEEPVKTAPGKKRPVEHSPVEPDSSSGTGKAGQQPARKRLNFGQTGDADSVPDPQPLGQPPAAPSGLGSTTMASGSGAPVADNNEGADGVGNSSGNWHCDSQWLGDRVITTSTRTWALPTYNNHLYKQISSQSGASNDNHYFGYSTPWGYFDFNRFHCHFSPRDWQRLINNSWGFRPKRLNFKLFNIQVKEVTQNDGTTTIANNLTSTVQVFTDSEYQLPYVLGSAHQGCLPPFPADVFMVPQYGYLTLNNGSQAVGRSSFYCLEYFPSQMLRTGNNFQFSYTFEDVPFHSSYAHSQSLDRLLNPLIDQYLYYLNKTQSNSGTLQQSRLLFSQAGPTSMSLQAKNWLPGPCYRQQRLSKQANDNNNSNFPWTAATKYHLNGRDSLVNPGPAMASHKDDEEKFFPMHGTLIFGKQGTNANDADLDNVMITDEEEIRTTNPVATEQYGYVSNNLQNSNTGPTTGTVNHQGALPGMVWQDRDVYLQGPIWAKIPHTDGHFHPSPLMGGFGLKHPPPQIMIKNTPVPANPPTNFSSSKFASFITQYSTGQVSVEIEWELQKENSKRWNPEIQYTSNYNKSVNVDFTVDTNGVYSEPRPIGTRYPTRNL

SEQ ID NO: 4863 - DNA, 2208 bp, Adeno-associated virus
  source 1..2208: mol_type = other DNA
atggctgccgatggttatcttccagattggctcgaggacactctctctgaaggaataagacagtggtggaagctcaaacctggcccaccaccaccaaagcccgcagagcggcataaggacgacagcaggggtcttgtgcttcctgggtacaagtacctcggacccttcaacggactcgacaagggagagccggtcaacgaggcagacgccgcggccctcgagcacgacaaggcctacgaccggcagctcgacagcggagacaacccgtacctcaagtacaaccacgccgacgcggagtttcaggagcgtcttaaagaagatacgtcttttgggggcaacctcggacgagcagtcttccaggccaaaaagaggattcttgaacctctgggcctggttgaggaacctgttaagacggctccgggagaaaagaggccggtagagcactctcctgcggagccagactcctcctcgggaaccggaaaagcgggccagcagcctgcaagaaagagattgaattttggccagactggagacgcagactcagtacctgacccccagcctctcggacagccaccagcagccccctctggtctgggaactaatacgatggcttcaggcagtggcgcaccaatggcagacaataacgagggcgccgacggagtgggtaattcctcgggaaattggtattgcgattccacatggatgggcgacagagtcatcaccaccagcacccgcacctgggccctgcccacctacaacaaccatctgtacaagcaaatctccagccagtctggagccagcaacgacaaccactactttggctacagcaccccctgggggtattttgacttcaacagattccactgccacttctccccacgtgactggcaaagactcatcaacaacaactggggattccggcccaagagactcagcttcaagctctttaacattcaagtcaaagaggtcacgcagaatgacggtacgacgacgattgccaataaccttaccagcacggttcaggtgtttactgactcggagtaccagctcccgtacgtcctcggctcggcgcatcaaggatgcctcccgccgttcccagcagacgtcttcatggtgccacagtatggatacctcaccctgaacaacggcagtcaggcggtaggacgctcttccttttactgcctggagtactttccttctcagatgcttcgtaccggaaacaactttaccttcagctacacctttgaagacgttcctttccatagcagctacgctcacagccaaagtctggaccgtctcatgaatcctctcatcgaccagtacctgtattacttgagcagaacaaacactccaagcggaaccaccacgatgtccaggcttcagttttctcaggccggagcaagtgacattcgggaccagtctagaaactggcttcctggaccctgttaccgccagcagcgagtatcaaagacagctgcggacaacaacaacagtgattactcgtggactggagctaccaagtaccacctcaatggaagagactctctggtgaatccgggcccagctatggccagccacaaggacgatgaagaaaaatattttcctcagagcggggttctcatctttggaaaacaagactcgggaaaaactaatgtggacattgaaaaggttatgattacagacgaagaggaaatcaggaccaccaatcccgtggctacggagcagtatggttctgtatctaccaacctccagagcggcaacacacaagcagctacctcagatgtcaacacacaaggcgttcttccaggcatggtctggcaggacagagacgtgtacctgcaggggcccatctgggcaaagattccacacacggacggacattttcacccctctcccctcgtgggcggattcggacttaaacaccctcctccacaaattctcatcaagaacaccccggtacctgcgaatccttcgaccactttcagtgcggcaaagtttgcttccttcatcacacagtactccacggggcaggtcagcgtggagatcgagtgggagctgcagaaggagaacagcaaacgctggaatcccgaaattcagtacacttccaactacaacaaatctgttaatgtggactttactgtggacactaatggtgtgtattcagagcctcgccccattggcaccagatacctgactcgtaatctgtaa

SEQ ID NO: 4864 - protein, 735 aa, Adeno-associated virus
MAADGYLPDWLEDTLSEGIRQWWKLKPGPPPPKPAERHKDDSRGLVLPGYKYLGPFNGLDKGEPVNEADAAALEHDKAYDRQLDSGDNPYLKYNHADAEFQERLKEDTSFGGNLGRAVFQAKKRILEPLGLVEEPVKTAPGEKRPVEHSPAEPDSSSGTGKAGQQPARKRLNFGQTGDADSVPDPQPLGQPPAAPSGLGTNTMASGSGAPMADNNEGADGVGNSSGNWYCDSTWMGDRVITTSTRTWALPTYNNHLYKQISSQSGASNDNHYFGYSTPWGYFDFNRFHCHFSPRDWQRLINNNWGFRPKRLSFKLFNIQVKEVTQNDGTTTIANNLTSTVQVFTDSEYQLPYVLGSAHQGCLPPFPADVFMVPQYGYLTLNNGSQAVGRSSFYCLEYFPSQMLRTGNNFTFSYTFEDVPFHSSYAHSQSLDRLMNPLIDQYLYYLSRTNTPSGTTTMSRLQFSQAGASDIRDQSRNWLPGPCYRQQRVSKTAADNNNSDYSWTGATKYHLNGRDSLVNPGPAMASHKDDEEKYFPQSGVLIFGKQDSGKTNVDIEKVMITDEEEIRTTNPVATEQYGSVSTNLQSGNTQAATSDVNTQGVLPGMVWQDRDVYLQGPIWAKIPHTDGHFHPSPLVGGFGLKHPPPQILIKNTPVPANPSTTFSAAKFASFITQYSTGQVSVEIEWELQKENSKRWNPEIQYTSNYNKSVNVDFTVDTNGVYSEPRPIGTRYLTRNL

SEQ ID NO: 4865 - DNA, 2209 bp, Adeno-associated virus
  source 1..2209: mol_type = other DNA
atggctgccgatggttatcctccagattggctcgaggacactctctctgaagggataagacagtggtggaagctcaaacctggcccaccaccaccaaagcccgcagagcggcataaggacgacagcaggggtcttgtgcttcctgggtacaagtacctcggacccttcaacggactcgacaagggggagccggtcaacgaggcagacgccgcggccctcgagcacgacaaggcctacgaccggcagctcgacagcggagacaacccgtacctcaagtacaaccacgccgacgcagagtttcaggagcgccttaaagaagatacgtcttttgggggcaacctcggacgagcagtcttccaggcgaaaaagagggttcttgaacctctgggcctggttgaggaacctgttaagacggctccgggaaaaaagaggccggtagagcactctcctgtggagccagactcctcctcgggaaccggaaaagcgggccagcggcctgcaagaaaaagattaaattttggtcagactggagacgcagactccgtacctgacccccagcctctcggacagccaccagcagccccctctggtctgggatctactacaatggctacaggcagtggcgcaccaatggcagacaataacgagggtgccgatggagtgggtaattcctcaggaaattggcattgcgattcccaatggctgggcgacagagtcatcaccaccagcacccgaacctgggccctgcccacatacaacaaccacctctacaagcaaatctccagccaatcaggagccagcaacgacaaccactactttggctacagcaccccctgggggtattttgacttcaacagattccactgccacttttcaccacgtgactggcaaagactcatcaacaacaactggggattccggcccaaaagactcaacttcaagctctttaatattcaagtcaaagaggtcacgcagaatgacggtacgacgacgattgccaataaccttaccagcacggttcaggtgtttactgactcggagtaccagctcccgtacgtcctgggctcggcgcatcaaggatgcctcccgccgtttccagcggacgtcttcatggtcccacagtatggatacctcaccctgaacaacgggagtcaggcggtaggacgctcttccttttactgcctggagtactttccttctcagatgctgcgtactggaaacaactttcagttcagctacacttttgaagacgtgcctttccacagcagctacgctcacagccagagtctggatcggctgatgaatcctctgatcgaccagtacctgtattatctgaacaagacacaaacaaatagtggaactcttcagcagtctcggctactgtttagccaagctggaccaaccaacatgtctcttcaagctaaaaactggctgcctggaccttgctacagacagcagcgtctgtcaaaacaggcaaacgacaacaacaacagcaactttccctggactgcagctacaaagtatcatctaaatggccgggactcgttggttaatccaggaccagctatggccagtcacaaggatgacgaagaaaagtttttccccatgcatggaaccctgatatttggtaaacaaggaacaaatgccaacgacgcggatttggaaaatgtcatgattacagatgaagaagaaatcagggccaccaatcccgtggctacggagcagtacgggactgtgtcaaataatttgcaaaactcaaacactggtccaactactggaactgtcaatcgccaaggagcgttacctggtatggtgtggcaggatcgagacgtgtacctgcagggacccatttgggccaagattcctcacaccgatggacactttcatccttctccactgatgggaggttttggactcaaacacccgcctcctcagatcatgatcaaaaacactcccgttccagccaatcctcccacaaacttcagttctgccaagtttgcttctttcatcacacagtattccacgggacaggtcagcgtggagatcgagtgggagctgcagaaggagaacagcaaacgctggaatcccgaaattcagtacacttccaactacaacaagtctgttaatgtggactttactgtggacactaatggtgtgtattcagagcctcgccccattggcaccagatacctgactcgtaatctgtaat

SEQ ID NO: 4866 - protein, 735 aa, Adeno-associated virus
MAADGYPPDWLEDTLSEGIRQWWKLKPGPPPPKPAERHKDDSRGLVLPGYKYLGPFNGLDKGEPVNEADAAALEHDKAYDRQLDSGDNPYLKYNHADAEFQERLKEDTSFGGNLGRAVFQAKKRVLEPLGLVEEPVKTAPGKKRPVEHSPVEPDSSSGTGKAGQRPARKRLNFGQTGDADSVPDPQPLGQPPAAPSGLGSTTMATGSGAPMADNNEGADGVGNSSGNWHCDSQWLGDRVITTSTRTWALPTYNNHLYKQISSQSGASNDNHYFGYSTPWGYFDFNRFHCHFSPRDWQRLINNNWGFRPKRLNFKLFNIQVKEVTQNDGTTTIANNLTSTVQVFTDSEYQLPYVLGSAHQGCLPPFPADVFMVPQYGYLTLNNGSQAVGRSSFYCLEYFPSQMLRTGNNFQFSYTFEDVPFHSSYAHSQSLDRLMNPLIDQYLYYLNKTQTNSGTLQQSRLLFSQAGPTNMSLQAKNWLPGPCYRQQRLSKQANDNNNSNFPWTAATKYHLNGRDSLVNPGPAMASHKDDEEKFFPMHGTLIFGKQGTNANDADLENVMITDEEEIRATNPVATEQYGTVSNNLQNSNTGPTTGTVNRQGALPGMVWQDRDVYLQGPIWAKIPHTDGHFHPSPLMGGFGLKHPPPQIMIKNTPVPANPPTNFSSAKFASFITQYSTGQVSVEIEWELQKENSKRWNPEIQYTSNYNKSVNVDFTVDTNGVYSEPRPIGTRYLTRNL

SEQ ID NO: 4867 - DNA, 2208 bp, Adeno-associated virus
  source 1..2208: mol_type = other DNA
atggctgccgatggttatcttccagattggctcgaggacactctctctgaaggaataagacagtggtggaagctcaaacctggcccaccaccaccaaagcccgcagagcggcataaggacgacagcaggggtcttgtgcttcctgggtacaggtacctcggacccttcaacggactcgacaagggagagccggtcaacgaggcagacgccgcggccctcgagcacgacaaggcctacgaccggcagctcgacagcggagacaacccgtacctcaagtacaaccacgtcgacgcggagtttcaggagcgtcttaaagaagatacgtcttttgggggcaacctcggacgagcagtcttccaggccaaaaagaggattcttgaacctctgggcctggttgaggaacctgttaaggcggctccgggagaaaagaggccggtagagcactctcctgcggagccagactcctcctcgggaaccggaaaagcgggccagcagcctgcaagaaagagattgaattttggtcagactggagacgcagactcagtacctgacccccagcctctcggacagccaccagcagccccctctggtctgggaactaatacgatggcttcaggcagtggcgcaccaatggcagacaataacgagggcgccgacggagtgggtaattcctcgggaaattggcattgcgattccacatggatgggcgacagagtcatcaccaccagcacccgcacctgggccctgcccacctacaacaaccatctgtacaagcaaatctccagccagtctggagccagcaacgacaaccactactttggctacagcaccccctgggggcattttgacttcaacagattccactgccacttctccccacgtgactggcaaagactcatcaacaacaactggggattccggcccaagagactcagcttcaagctctttaacattcaagtcaaagaggtcacgcagaatgacggtacgacgacgattgccaataaccttaccagcacggttcaggtgtttactgactcggagtaccagctcccgtacgtcctcggctcggcgcatcaaggatgcctcccgccgttcccagcagacgtcttcatggtgccacagtatggatacctcaccctgaacaacggcagtcaggcggtaggacgctcttccttttactgcctggagtactttccttctcagatgcttcgtaccggaaacaactttaccttcagctacacctttgaagacgttcctttccatagcagctacgctcacagccaaagtctggaccgtctcatgaatcctctcatcgaccagtacctgtattacttgagcagaacaaacactccaagcggaaccaccacgatgtccaggcttcagttttctcaggccggagcaagtgacattcgggaccagtctagaaactggcttcctggaccctgttaccgccagcagcgagtatcaaagacagctgcggacaacaacaacagtgattactcgtggactggagctaccaagtaccacctcaatggaagagactctctggtgaatccgggcccagctatggccagccacaaggacgatgaagaaaaatattttcctcagagcggggttctcatctttggaaaacaagactcgggaaaaactaatgtggacattgaaaaggttatgattacagacgaagaggaaatcaggaccaccaatcccgtggctacggagcagtatggttctgtatctaccaacctccagagcggcaacacacaagcagctacctcagatgtcaacacacaaggcgttcttccaggcatggtctggcaggacagagacgtgtacctgcaggggcccatctgggcaaagattccacacacggacggacattttcacccctctccccccatgggcggattcggacttaaacaccctcctccacaaattctcatcaagaacaccccggtacctgcgaatccttcgaccactttcagtgcggcaaagtttgcttccttcatcacacagtactccacggggcaggtcagcgtggagatcgagtgggagctgcagaaggagaacagcaaacgctggaatcccgaaattcagtacacttccaactacaacaaatctgttaatgtggactttactgtggacactaatggtgtgtattcagagcctcgccccattggcgccagatacctgactcgtaatctgtaa

SEQ ID NO: 4868 - protein, 735 aa, Adeno-associated virus
MAADGYLPDWLEDTLSEGIRQWWKLKPGPPPPKPAERHKDDSRGLVLPGYRYLGPFNGLDKGEPVNEADAAALEHDKAYDRQLDSGDNPYLKYNHVDAEFQERLKEDTSFGGNLGRAVFQAKKRILEPLGLVEEPVKAAPGEKRPVEHSPAEPDSSSGTGKAGQQPARKRLNFGQTGDADSVPDPQPLGQPPAAPSGLGTNTMASGSGAPMADNNEGADGVGNSSGNWHCDSTWMGDRVITTSTRTWALPTYNNHLYKQISSQSGASNDNHYFGYSTPWGHFDFNRFHCHFSPRDWQRLINNNWGFRPKRLSFKLFNIQVKEVTQNDGTTTIANNLTSTVQVFTDSEYQLPYVLGSAHQGCLPPFPADVFMVPQYGYLTLNNGSQAVGRSSFYCLEYFPSQMLRTGNNFTFSYTFEDVPFHSSYAHSQSLDRLMNPLIDQYLYYLSRTNTPSGTTTMSRLQFSQAGASDIRDQSRNWLPGPCYRQQRVSKTAADNNNSDYSWTGATKYHLNGRDSLVNPGPAMASHKDDEEKYFPQSGVLIFGKQDSGKTNVDIEKVMITDEEEIRTTNPVATEQYGSVSTNLQSGNTQAATSDVNTQGVLPGMVWQDRDVYLQGPIWAKIPHTDGHFHPSPPMGGFGLKHPPPQILIKNTPVPANPSTTFSAAKFASFITQYSTGQVSVEIEWELQKENSKRWNPEIQYTSNYNKSVNVDFTVDTNGVYSEPRPIGARYLTRNL

SEQ ID NO: 4869 - DNA, 2208 bp, Adeno-associated virus
  source 1..2208: mol_type = other DNA
atggctgccgatggttatcttccagattggctcgaggacaccctctctgaaggaataagacagtggtggaagctcaaacctggcccaccaccaccaaagcccgcagagcggcataaggacgacagcaggggtcttgtgcttcctgggtacaagtacctcggacccttcaacggactcgacaagggagagccggtcaacgaggcagacgccgcggccctcgagcacgacaaggcctacgaccggcagctcgacagcggagataacccgtacctcaagtacaaccacgccgacgcggagtttcaggagcgccttaaagaggatacgtcttttgggggcaacctcggacgagcagtcttccaggccaaaaagaggattcttgaacctctgggcctggttgaggaacctgttaagacggctccgggaaaaaagaggccggtagagcactctcctgcggagccagactcctcctcgggaaccggaaaagcgggccagcagcctgcaagaaagagattgaattttggtcagactggagacgcagactcagtacctgacccccggcctctcggacagccaccagcagccccctctggtctgggaactaatacgatggcttcaggcagtggcgcaccaatggcagacaataacgagggcgccgacggagtgggtaattcctcgggaaattggcattgcgattccacatggatgggcgacagagtcatcaccaccagcacccgcacctgggccctgcccacctacaacaaccatctgtacaagcaaatctccagccagtctggagccagcaacgacaaccactactttggctacagcaccccctgggggtattttgacttcaacagattccactgccacttctccccacgtgactggcaaagactcatcaacaacaactggggattccggcccaagagactcagcttcaagctctttaacattcaagtcaaagaggtcacgcagaatgacggtacgacgacgattgccaataaccttaccagcacggttcaggtgtttactgactcggagtaccagctcccgtacgtcctcggctcggcgcatcaaggatgcctcccgccgttcccagcagacgtcttcatggtgccacagtatggatacctcaccctgaacaacggcagtcaggcggtaggacgctcttccttttactgcctggagtactttccttctcagatgcttcgtaccggaaacaactttaccttcagctacacctttgaagacgttcctttccatagcagctacgctcacagccaaagtctggaccgtctcatgaatcctctcatcgaccagtacctgtattacttgagcagaacaaacactccaagcggaaccaccacgatgtccaggcttcagttttctcaggccggagcaagtgacattcgggaccagtctagaaactggcttcctggaccctgttaccgccagcagcgagtatcaaagacagctgcggacaacaacaacagtgattactcgtggactggagctaccaagtaccacctcaatggaagagactctctggtgaatccgggcccagctatggccagccacaaggacgatgaagaaaaatattttcctcagagcggggttctcatctttggaaaacaagactcgggaaaaactaatgtggacattgaaaaggttatgattacagacgaagaggaaatcaggaccaccaatcccgtggctacggagcagtatggttctgtatctaccaacctccagagcggcaacacacaagcagctacctcagatgtcaacacacaaggcgttcttccaggcatggtctggcaggacagagacgtgtacctgcaggggcccatctgggcaaagattccacacacggacggacattttcacccctctcccctcatgggcggattcggacttaaacaccctcctccacaaattctcatcaagaacaccccggtacctgcgaatccttcgaccactttcagtgcggcaaagtttgcttccttcatcacacagtactccacggggcaggtcagcgtggagatcgagtgggagctgcagaaggagaacagcaaacgctggaatcccgaaattcagtacacttccaactacaacaaatctgttaatgtggactttactgtggacactaatggtgtgtattcagagcctcgccccattggcaccagatacctgactcgtaatctgtaa

SEQ ID NO: 4870 - protein, 735 aa, Adeno-associated virus
MAADGYLPDWLEDTLSEGIRQWWKLKPGPPPPKPAERHKDDSRGLVLPGYKYLGPFNGLDKGEPVNEADAAALEHDKAYDRQLDSGDNPYLKYNHADAEFQERLKEDTSFGGNLGRAVFQAKKRILEPLGLVEEPVKTAPGKKRPVEHSPAEPDSSSGTGKAGQQPARKRLNFGQTGDADSVPDPRPLGQPPAAPSGLGTNTMASGSGAPMADNNEGADGVGNSSGNWHCDSTWMGDRVITTSTRTWALPTYNNHLYKQISSQSGASNDNHYFGYSTPWGYFDFNRFHCHFSPRDWQRLINNNWGFRPKRLSFKLFNIQVKEVTQNDGTTTIANNLTSTVQVFTDSEYQLPYVLGSAHQGCLPPFPADVFMVPQYGYLTLNNGSQAVGRSSFYCLEYFPSQMLRTGNNFTFSYTFEDVPFHSSYAHSQSLDRLMNPLIDQYLYYLSRTNTPSGTTTMSRLQFSQAGASDIRDQSRNWLPGPCYRQQRVSKTAADNNNSDYSWTGATKYHLNGRDSLVNPGPAMASHKDDEEKYFPQSGVLIFGKQDSGKTNVDIEKVMITDEEEIRTTNPVATEQYGSVSTNLQSGNTQAATSDVNTQGVLPGMVWQDRDVYLQGPIWAKIPHTDGHFHPSPLMGGFGLKHPPPQILIKNTPVPANPSTTFSAAKFASFITQYSTGQVSVEIEWELQKENSKRWNPEIQYTSNYNKSVNVDFTVDTNGVYSEPRPIGTRYLTRNL

SEQ ID NO: 4871 - DNA, 2208 bp, Adeno-associated virus
  source 1..2208: mol_type = other DNA
atggctgccgatggttatcttccagattggctcgaggacactctctctgaaggaataagacagtggtggaagctcaaacctggcccaccaccaccaaagcccgcagagcggcataaggacgacagcaggggtcttgtgcttcctgggtacaagtacctcggacccttcaacggactcgacaagggagagccggtcaacgaggcagacgccgcggccctcgagcacgacaaggcctacgaccggcagctcgacagcggagacaacccgtacctcaagtacaaccacgccgacgcggagtttcaggagcgccttaaaggagatacgtcttttgggggcaacctcggacgagcagtcttccaggccaaaaagaggattcttgaacctctgggcctggttgaggaacctgttaagacggctccgggaaaaaagaggccggtagagcactctcctgcggagccagactcctcctcgggaaccggaaaagcgggccagcagcctgcaagaaagagattgaattttggtcagactggagacgcagactcagtacctgacccccagcctctcggacagccaccagcagccccctctggtctgggaactaatacgatggcttcaggcagtggcgcaccaatggcagacaataacgagggcgccgacggagtgggtaattcctcgggaaattggcattgcgattccacatggatgggcggcagagtcatcaccaccagcacccgcacctgggccctgcccacctacaacaaccatctgtacaagcaaatctccagccagtctggagccagcaacgacaaccactactttggctacagcaccccctgggggtattttgacttcaacagattccactgccacttctccccacgtgactggcaaagactcatcaacaacaactggggattccggcccaagagactcagcttcaagctctttaacattcaagtcaaagaggtcacgcagaatgacggtacgacgacgattgccaataaccttaccagcacggttcaggtgtttactgactcggagtaccagctcccgtacgtcctcggctcggcgcatcaaggatgcctcccgccgttcccagcagacgtcttcatggtgccacagtatggatacctcaccctgaacaacggcagtcaggcggtaggacgctcttccttttactgcctggagtactttccttctcagacgcttcgtaccggaaacaactttaccttcagctacacctttgaagacgttcctttccatagcagctacgctcacagccaaagtctggaccgtctcatgaatcctctcatcgaccagtacctgtattacttgagcagaacaaacactccaagcggaaccaccacgatgtccaggcttcagttttctcaggccggagcaagtgacattcgggaccagtctagaaactggcttcctggaccctgttaccgccagcagcgagtatcaaagacagctgcggacaacaacaacagtgattactcgtggactggagctaccaagtaccacctcaatggaagagactctctggtgaatccgggcccagctatggccagccacaaggacgatgaagaaaaatattttcctcagagcggggttctcatctttggaaaacaagactcgggaaaaactaatgtggacattgaaaaggttatgattacagacgaagaggaaatcaggaccaccaatcccgtggctacggagcagtatggttctgtatctaccaacctccagagcggcaacacacaagcagctacctcagatgtcaacacacaaggcgttcttccaggcatggtctggcaggacagagacgtgtacctgcaggggcccatctgggcaaagattccacacacggacggacattttcacccctctcccctcatgggcggattcggacttaaacaccctcctccacaaattctcatcaagaacaccccggtacctgcgaatccttcgaccactttcagtgcggcaaagtttgcttccttcatcacacagtactccacggggcaggtcagcgtggagatcgagtgggagctgcagaaggagaacagcaaacgctggaatcccgaaattcagtacacttccaactacaacaaatctgttaatgtggactttactgtggacactaatggtgtgtattcagagcctcgccccattggcaccagatacctgactcgtaatctgtaa

SEQ ID NO: 4872 - protein, 735 aa, Adeno-associated virus
MAADGYLPDWLEDTLSEGIRQWWKLKPGPPPPKPAERHKDDSRGLVLPGYKYLGPFNGLDKGEPVNEADAAALEHDKAYDRQLDSGDNPYLKYNHADAEFQERLKGDTSFGGNLGRAVFQAKKRILEPLGLVEEPVKTAPGKKRPVEHSPAEPDSSSGTGKAGQQPARKRLNFGQTGDADSVPDPQPLGQPPAAPSGLGTNTMASGSGAPMADNNEGADGVGNSSGNWHCDSTWMGGRVITTSTRTWALPTYNNHLYKQISSQSGASNDNHYFGYSTPWGYFDFNRFHCHFSPRDWQRLINNNWGFRPKRLSFKLFNIQVKEVTQNDGTTTIANNLTSTVQVFTDSEYQLPYVLGSAHQGCLPPFPADVFMVPQYGYLTLNNGSQAVGRSSFYCLEYFPSQTLRTGNNFTFSYTFEDVPFHSSYAHSQSLDRLMNPLIDQYLYYLSRTNTPSGTTTMSRLQFSQAGASDIRDQSRNWLPGPCYRQQRVSKTAADNNNSDYSWTGATKYHLNGRDSLVNPGPAMASHKDDEEKYFPQSGVLIFGKQDSGKTNVDIEKVMITDEEEIRTTNPVATEQYGSVSTNLQSGNTQAATSDVNTQGVLPGMVWQDRDVYLQGPIWAKIPHTDGHFHPSPLMGGFGLKHPPPQILIKNTPVPANPSTTFSAAKFASFITQYSTGQVSVEIEWELQKENSKRWNPEIQYTSNYNKSVNVDFTVDTNGVYSEPRPIGTRYLTRNL

SEQ ID NO: 4873 - DNA, 2208 bp, Adeno-associated virus
  source 1..2208: mol_type = other DNA
atggctgccgatggttatcttccagattggctcgaggacactctctctgaaggaataagacagtggtggaagctcaaacctggcccaccaccaccaaagcccgcagagcggcataaggacgacagcaggggtcttgtgcttcctgggtacaagtacctcggacccttcaacggactcgacaagggagagccggtcaacgaggcagacgccgcggccctcgagcacgacaaggcctacgaccggcagctcgacagcggagacaacccgtacctcaagtacaaccacgccgacgcggagtttcaggagcgtcttaaagaagatacgtcttttgggggcaacctcggacgagcagtcttccaggccaaaaagaggattcttgaacctctgggcctggttgaggaacctgttaagacggctccgggaaaaaagaggccggtagagcactctcctgcggagccagactcctcctcgggaaccggaaaagcgggccagcagcctgcaagaaagagattgaattttggtcagactggagacgcagactcagtacctgacccccagcctctcggacagccaccagcagccccctctggtctgggaactaatacgatggcttcaggcagtggcgcaccaatggcagacaataacgagggcgccgacggagtgggtaattcctcgggaaattggcattgcgattccacatggatgggcgacagagtcatcaccaccagcacccgcacctgggccctgcccacctgcaacaaccatctgtacaagcaaatctccagccagtctggagccagcaacgacaaccactactttggctacagcaccccctgggggtattttgacttcaacagattccactgccacttctccccacgtgactggcaaagactcatcaacaacaactggggattccggcccaagagactcagcttcaagctctttaacattcaagtcaaagaggtcacgcagaatgacggtacgacgacgattgccaataaccttaccagcacggttcaggtgtttactgactcggagtaccagctcccgtacgtcctcggctcggcgcatcaaggatgcctcccgccgttcccagcagacgtcttcatggtgccacagtatggatacctcaccctgaacaacggcagtcaggcggtaggacgctcttccttttactgcctggagtattttccttctcagatgcttcgtaccggaaacaactttaccttcagctacacctttgaagacgttcctttccatagcagctacgctcacagccaaagtctggaccgtctcatgaatcctctcatcgaccagtacctgtattacttgagcagaacaaacactccaagcggaaccaccacgatgtccaggcttcagttttctcaggccggagcaagtgacattcgggaccagtctagaaactggcttcctggaccctgttaccgccagcagcgagtatcaaagacagctgcggacaacaacaacagtgattactcgtggactggagctaccaagtaccacctcaatggaagagactctctggtgaatccgggcccagctatggccagccacaaggacgatgaagaaaaatattttcctcagagcggggttctcatctttggaaaacaagactcgggaaaaactaatgtggacattgaaaaggttatgattacagacgaagaggaaatcaggaccaccaatcccgtggctacggagcagtatggttctgtatctacctacctccagagcggcaacacacaagcagctacctcagatgtcaacacacaaggcgttcttccaggcatggtctggcaggacagagacgtgtacctgcgggggcccatctgggcaaagattccacacacggacggacattttcacccctctcccctcatgggcggatttggacttaaacaccctcctccacaaattctcatcaagaacaccccggtacctgcgaatccttcgaccactttcagtgcggcaaagtttgcttccttcatcacacagtactccacggggcaggtcagcgtggagatcgagtgggagctgcagaaggagaacagcaaacgctggaatcccgaaattcagtacacttccaactacaacaaatctgttaatgtggactttactgtggacactaatggtgtgtattcagagcctcgccccattggcaccagatacctgactcgtaatctgtaa

SEQ ID NO: 4874 - protein, 735 aa, Adeno-associated virus
MAADGYLPDWLEDTLSEGIRQWWKLKPGPPPPKPAERHKDDSRGLVLPGYKYLGPFNGLDKGEPVNEADAAALEHDKAYDRQLDSGDNPYLKYNHADAEFQERLKEDTSFGGNLGRAVFQAKKRILEPLGLVEEPVKTAPGKKRPVEHSPAEPDSSSGTGKAGQQPARKRLNFGQTGDADSVPDPQPLGQPPAAPSGLGTNTMASGSGAPMADNNEGADGVGNSSGNWHCDSTWMGDRVITTSTRTWALPTCNNHLYKQISSQSGASNDNHYFGYSTPWGYFDFNRFHCHFSPRDWQRLINNNWGFRPKRLSFKLFNIQVKEVTQNDGTTTIANNLTSTVQVFTDSEYQLPYVLGSAHQGCLPPFPADVFMVPQYGYLTLNNGSQAVGRSSFYCLEYFPSQMLRTGNNFTFSYTFEDVPFHSSYAHSQSLDRLMNPLIDQYLYYLSRTNTPSGTTTMSRLQFSQAGASDIRDQSRNWLPGPCYRQQRVSKTAADNNNSDYSWTGATKYHLNGRDSLVNPGPAMASHKDDEEKYFPQSGVLIFGKQDSGKTNVDIEKVMITDEEEIRTTNPVATEQYGSVSTYLQSGNTQAATSDVNTQGVLPGMVWQDRDVYLRGPIWAKIPHTDGHFHPSPLMGGFGLKHPPPQILIKNTPVPANPSTTFSAAKFASFITQYSTGQVSVEIEWELQKENSKRWNPEIQYTSNYNKSVNVDFTVDTNGVYSEPRPIGTRYLTRNL

SEQ ID NO: 4875 - DNA, 2208 bp, Adeno-associated virus; identical to SEQ ID NO: 4869
  source 1..2208: mol_type = other DNA

SEQ ID NO: 4876 - protein, 735 aa, Adeno-associated virus; identical to SEQ ID NO: 4870

SEQ ID NO: 4877 - DNA, 2208 bp, Adeno-associated virus
  source 1..2208: mol_type = other DNA
atggctgccgatggttatcttccagattggctcgaggacactctctctgaaggaataagacagtggtggaagctcaaacctggcccaccaccaccaaagcccgcagagcggcataaggacggcagcaggggtcttgtgcttcctgggtacaagtacctcggacccttcaacggactcgacaagggagagccggtcaacgaggcagacgccgcggccctcgagcacgacaaggcctacgaccggcagctcaacagcggagacaacccgtacctcaagtacaaccacgccgacgcggagtttcaggagcgccttaaagaagatacgtcttttgggggcaacctcggacgagcagtcttccaggcaaaaaagagggttcttgaacctctgggcctggttgaggagcctgttaaaacggctccgggaaaaaagagaccggtagagcactctcctgcggagccagactcctcctcgggaaccggaaaagcgggccagcagcctgcaagaaagagattgaattttggtcagactggagacgcagactccgtacctgacccccagcctctcggacagccaccagcagccccctctggtctgggatctactacaatggctacaggcagtggcgcaccaatggcagacaataacgagggtgccgatggagtgggtaattcctcaggaaattggcattgcgattcccaatggctgggcgacagagtcatcaccacaagcactcgaacctgggccctgcccacctacaacaaccacctctacaagcaaatctccagccaatcaggagcctcaaacgacaaccactattttggctacagcaccccttgggggtattttgacttcaacagattccactgccacttttcaccacgtgactggcaaagactcatcaacaacaactggggattccgacccaagagactcaacttcaagctctttaacattcaagtcaaagaggtcacgcagaatgacggtacgacgacgattgccaataaccttaccagcacggttcaggtgtttactgactcggagtaccagctcccgtacgtcctcggctcggcgcatcaaggatgcctcccgccgttcccagcggacgtcttcatggtcccacagtatggatacctcaccctgaacaacgggagtcaggcggtaggacgctctcccttttactgcctggagtactttccttctcagatgctgcgtactggaaacaactttcagttcagctacacttttgaagacgtgcctttccacagcagctacgctcacagccagagtctggatcggctgatgaatcctctgatcgaccagtacctgtattatctgaacaagacacaaacaaatagtggaactcttcagcagtctcggctactgtttagccaagctggacccaccaacatgtctcttcaagctaaaaactggctgcctggaccttgctacagacagcagcgtctgtcaaagcaggcaaacgacaacaacaacagcaactttccctggactgcagctacaaagtatcatctaaatggccgggactcgttggttaatccaggaccagctatggccagtcacaaggatgacgaagaaaagtttttccccatgcatggaaccctgatatttggtaaacaaggaacaaatgccaacgacgcggatttggaaaatgtcatgattacagatgaagaagaaatcaggaccaccaatcccgtggctacggagcagtacgggactgtgtcaaataatttgcaaaactcaaacactggtccaactactggaactgtcaatcaccaaggagcgttacctggtatggtgtggcaggatcgagatgtgtaccttcagggacccatttgggccaagattcctcacaccgatggacactttcatccttctccactgatgggaggttttggactcaaacacccgcctcctcagattatgatcaaaaacactcccgttccagccaatcctcctacaaacttcagttctgccaagtttgcttctttcatcacacagtattccacggggcaggtcagcgtggagatcgagtgggagctgcagaaggagaacagcaaacgctggaatcccgaaattcagtacacttccaactacaacaaatctgttaatgtggactttactgtggacaataatggcgtgtactcagagcctcgccccattggcaccagatacctgactcgtaatctgtaa

SEQ ID NO: 4878 - protein, 735 aa, Adeno-associated virus
MAADGYLPDWLEDTLSEGIRQWWKLKPGPPPPKPAERHKDGSRGLVLPGYKYLGPFNGLDKGEPVNEADAAALEHDKAYDRQLNSGDNPYLKYNHADAEFQERLKEDTSFGGNLGRAVFQAKKRVLEPLGLVEEPVKTAPGKKRPVEHSPAEPDSSSGTGKAGQQPARKRLNFGQTGDADSVPDPQPLGQPPAAPSGLGSTTMATGSGAPMADNNEGADGVGNSSGNWHCDSQWLGDRVITTSTRTWALPTYNNHLYKQISSQSGASNDNHYFGYSTPWGYFDFNRFHCHFSPRDWQRLINNNWGFRPKRLNFKLFNIQVKEVTQNDGTTTIANNLTSTVQVFTDSEYQLPYVLGSAHQGCLPPFPADVFMVPQYGYLTLNNGSQAVGRSPFYCLEYFPSQMLRTGNNFQFSYTFEDVPFHSSYAHSQSLDRLMNPLIDQYLYYLNKTQTNSGTLQQSRLLFSQAGPTNMSLQAKNWLPGPCYRQQRLSKQANDNNNSNFPWTAATKYHLNGRDSLVNPGPAMASHKDDEEKFFPMHGTLIFGKQGTNANDADLENVMITDEEEIRTTNPVATEQYGTVSNNLQNSNTGPTTGTVNHQGALPGMVWQDRDVYLQGPIWAKIPHTDGHFHPSPLMGGFGLKHPPPQIMIKNTPVPANPPTNFSSAKFASFITQYSTGQVSVEIEWELQKENSKRWNPEIQYTSNYNKSVNVDFTVDNNGVYSEPRPIGTRYLTRNL

SEQ ID NO: 4879 - DNA, 2208 bp, Adeno-associated virus
  source 1..2208: mol_type = other DNA
atggctgccgatggttatcttccagattggctcgaggacactctctctgaaggaataagacagtggtggaagctcaaacctggcccaccaccaccaaagcccgcagagcggcataaggacgacagcaggggtcttgtgcttcctgggtacaagtacctcggacccttcaacggactcgacaagggagagccggtcaacgaggcagacgccgcggccctcgagcacgacaaggcctacgaccggcagctcgacagcggagacaacccgtacctcaagtacaaccacgccgacgcggagtttcaggagcgtcttaaagaagatacgtcttttgggggcaacctcggacgagcagtcttccaggccaaaaagaggattcttgaacctctgggcctggttgaggaacctgttaagacggctccgggaaaaaagaggccggtagagcactctcctgcggagccagactcctcctcgggaaccggaaaagcgggccagcagcctgcaagaaagagattgaattttggtcagactggagacgcagactcagtacctgacccccagcctctcggacagccaccagcagccccctctggtctgggaactaatacgatggcttcaggcagtggcgcaccaatggcagacaataacgagggcgccgacggagtgggtaattcctcgggaaattggcattgcgattccacatggatgggcgacagagtcatcaccaccagcacccgcacctgggccctgcccacctacaacaaccatctgtacaagcaaatctccagccagtctggagccagcaacgacaaccactactttggctacagcaccccctgggggtattttgacttcaacagattccactgccacttctccccacgtgactggcaaagactcatcaacaacaactggggattccggcccaagagactcagcttcaagctctttaacattcaagtcaaagaggtcacgcagaatgacggtacgacgacgattgccaataaccttaccagcacggttcaggtgtttactgactcggagtaccagctcccgtacgtcctcggctcggcgcatcaaggatgcctcccgccgttcccagcagacgtcttcatggtgccacagtatggatacctcaccctgaacaacggcagtcaggcggtaggacgctcttccttttactgcctggagtactttccttctcagatgcttcgtaccggaaacaactttaccttcagctacacctttgaagacgttcctttccatagcagctacgctcacagccaaagtctggaccgtctcatgaatcctctcatcgaccagtacctgtattacttgagcagaacaaacactccaagcggaaccaccacgatgtccaggcttcagttttctcaggccggagcaagtgacattcgggaccagtctagaaactggcttcctggaccctgttaccgccagcagcgagtatcaaagacagctgcggacaacaacaacagtgattactcgtggactggagctaccaagtaccacctcaatggaagagactctctggtgaatccgggcccagctatggccagccacaaggacgatgaagaaaaatattttcctcagagcggggttctcatctttggaaaacaagactcgggaaaaactaatgtggacattgaaaaggttatgattacagacgaagaggaaatcaggaccaccaatcccgtggctacggagcagtatggttctgtatctaccaacctccagagcggcaacacacaagcagctacctcagatgtcaacacacaaggcgttcttccaggcatggtctggcaggacagagacgtgtacctgcaggggcccatctgggcaaagattccacacacggacggacattttcacccctctcccctcatgggcggattcggacttaaacaccctcctccacaaattctcatcaagaacaccccggtacctgcgaatccttcgaccactttcagtgcggcaaagtttgcttccttcatcacacagtactccacggggcaggtcagcgtggagatcgagtgggagctgcagaaggagaacagcaaacgctggaatcccgaaattcagtacacttccaactacaacaaatctgttaatgtggactttactgtggacactaatggtgtgtattcagagcctcgccccattggcaccagatacctgactcgtaatctgtaa

SEQ ID NO: 4880 - protein, 735 aa, Adeno-associated virus
MAADGYLPDWLEDTLSEGIRQWWKLKPGPPPPKPAERHKDDSRGLVLPGYKYLGPFNGLDKGEPVNEADAAALEHDKAYDRQLDSGDNPYLKYNHADAEFQERLKEDTSFGGNLGRAVFQAKKRILEPLGLVEEPVKTAPGKKRPVEHSPAEPDSSSGTGKAGQQPARKRLNFGQTGDADSVPDPQPLGQPPAAPSGLGTNTMASGSGAPMADNNEGADGVGNSSGNWHCDSTWMGDRVITTSTRTWALPTYNNHLYKQISSQSGASNDNHYFGYSTPWGYFDFNRFHCHFSPRDWQRLINNNWGFRPKRLSFKLFNIQVKEVTQNDGTTTIANNLTSTVQVFTDSEYQLPYVLGSAHQGCLPPFPADVFMVPQYGYLTLNNGSQAVGRSSFYCLEYFPSQMLRTGNNFTFSYTFEDVPFHSSYAHSQSLDRLMNPLIDQYLYYLSRTNTPSGTTTMSRLQFSQAGASDIRDQSRNWLPGPCYRQQRVSKTAADNNNSDYSWTGATKYHLNGRDSLVNPGPAMASHKDDEEKYFPQSGVLIFGKQDSGKTNVDIEKVMITDEEEIRTTNPVATEQYGSVSTNLQSGNTQAATSDVNTQGVLPGMVWQDRDVYLQGPIWAKIPHTDGHFHPSPLMGGFGLKHPPPQILIKNTPVPANPSTTFSAAKFASFITQYSTGQVSVEIEWELQKENSKRWNPEIQYTSNYNKSVNVDFTVDTNGVYSEPRPIGTRYLTRNL

SEQ ID NO: 4881 - DNA, 2208 bp, Adeno-associated virus
  source 1..2208: mol_type = other DNA
atggctgccgatggttatcttccagattggctcgaggacactctctctgaaggaataagacagtggtggaagctcaaacctggcccaccaccaccaaagcccgcagagcggcataaggacgacagcaggggtcttgtgcttcctgggtacaagtacctcggacccttcaacggactcgacaagggagagccggtcaacgaggcagacgccgcggccctcgagcacgacaaggcctacgaccggcagctcgacagcggagacaacccgtacctcaagtacaaccacgccgacgcggagtttcaggagcgtcttaaagaagatacgtcttttgggggcaacctcggacgagcagtcttccaggccaaaaagaggattcttgaacctctgggcctggttgaggaacctgttaagacggctccgggaaaaaagaggccggtagagcactctcctgcggagccagactcctcctcgggaaccggaaaagcgggccagcagcctgcaagaaagagattgaattttggtcagactggagacgcagactcagtacctgacccccagcctctcggacagccaccagcagccccctctggtctgggaactaatacgatggcttcaggcagtggcgcaccaatggcagacaataacgagggcgccgacggagtgggtaattcctcgggaaattggcattgcgattccacatggatgggcgacagagtcatcaccaccagcacccgcacctgggccctgcccacctacaacaaccatctgtacaagcaaatctccagccagtctggagccagcaacgacaaccactactttggctacagcaccccctgggggtatttcgacttcaacagattccactgccacttctccccacgtgactggcaaagactcatcaacaacaactggggattccggcccaagagactcagcttcaagctctttaacattcaagtcaaagaggtcacgcagaatgacggtacgacgacgattgccaataaccttaccagcacggttcaggtgtttactgactcggggtaccagctcccgtacgtcctcggctcggcgcatcaaggatgccttccgccgttcccagcagacgtcttcatggtgccacagtatggatacctcaccctgaacaacggcagtcaggcggtaggacgctcttccttttactgcctggagtactttccttctcagatgcttcgtaccggaaacaactttaccttcagctacacctttgaagacgttcctttccatagcagctacgctcacggccaaagtctggaccgtctcatgaatcctctcatcgaccagtacctgtattacttgagcagaacaaacactccaagcggaaccaccacgatgtccaggcttcagttttctcaggccggagcaagtgacgttcgggaccagtctagaaactggcttcctggaccctgttaccgccagcagcgagtatcaaagacagctgcggacaacaacaacagtgattactcgtggactggagctaccaagtaccacctcaatggaagagactctctggtgaatccgggcccagctatggccagccacaaggacgatgaagaaaaatattttcctcagagcggggttctcgtctttggaaaacaagactcgggaaaaactaatgtggacattgaaaaggttatgattacagacgaagaggaaatcaggaccaccaatcccgcggctacggagcagtatggttctgtatctaccaacctccagagcggcaacacacaagcagctacctcagatgtcaacacacaaggcgttcttccaggcatggtctggcaggacagagacgtgtacctgcaggggcccatctgggcaaagattccacacacggacggacattttcacccctctcccctcatgggcggattcggacttaaacaccctcctccacaaattctcatcaagaacaccccggtacctgcgaatccttcgaccactttcagtgcggcaaagtttgtttccttcatcacacagtactccacggggcaggtcagcgtggagatcgagtgggagctgcagaaggagaacagcaaacgctggaatcccgaaattcagtacacttccaactacaacaaatctgttaatgtggactttactgtggacactaatggtgtgtattcagagcctcgccccattggcaccagatacctgactcgtaatctgtaa

SEQ ID NO: 4882 - protein, 735 aa, Adeno-associated virus
MAADGYLPDWLEDTLSEGIRQWWKLKPGPPPPKPAERHKDDSRGLVLPGYKYLGPFNGLDKGEPVNEADAAALEHDKAYDRQLDSGDNPYLKYNHADAEFQERLKEDTSFGGNLGRAVFQAKKRILEPLGLVEEPVKTAPGKKRPVEHSPAEPDSSSGTGKAGQQPARKRLNFGQTGDADSVPDPQPLGQPPAAPSGLGTNTMASGSGAPMADNNEGADGVGNSSGNWHCDSTWMGDRVITTSTRTWALPTYNNHLYKQISSQSGASNDNHYFGYSTPWGYFDFNRFHCHFSPRDWQRLINNNWGFRPKRLSFKLFNIQVKEVTQNDGTTTIANNLTSTVQVFTDSGYQLPYVLGSAHQGCLPPFPADVFMVPQYGYLTLNNGSQAVGRSSFYCLEYFPSQMLRTGNNFTFSYTFEDVPFHSSYAHGQSLDRLMNPLIDQYLYYLSRTNTPSGTTTMSRLQFSQAGASDVRDQSRNWLPGPCYRQQRVSKTAADNNNSDYSWTGATKYHLNGRDSLVNPGPAMASHKDDEEKYFPQSGVLVFGKQDSGKTNVDIEKVMITDEEEIRTTNPAATEQYGSVSTNLQSGNTQAATSDVNTQGVLPGMVWQDRDVYLQGPIWAKIPHTDGHFHPSPLMGGFGLKHPPPQILIKNTPVPANPSTTFSAAKFVSFITQYSTGQVSVEIEWELQKENSKRWNPEIQYTSNYNKSVNVDFTVDTNGVYSEPRPIGTRYLTRNL

SEQ ID NO: 4883 - DNA, 2208 bp, Adeno-associated virus
  source 1..2208: mol_type = other DNA
atggctgccgatggttatcttccagattggctcgaggacactctctctgaaggaataagacagtggtggaaactcaaacctggcccaccaccaccaaagcccgcagagcggcataaggacgacagcaggggtcttgtgcttcctgggtacaagtacctcggacccttcaacggactcgacaagggagagccggtcaacgaggcagacgccgcggccctcgagcacgacaaggcctacgaccggcagctcgacagcggagacaacccgtacctcaagtacaaccacgccgacgcggagtttcaggagcgccttaaagaagatacgtcttttgggggcaacctcggacgagcagtcttccaggcaaaaaagagggttctggaacctctgagcctggttgaggagcctgttaagacggctccgggaaaaaagaggccggtagagcactctcccgcagagccagattcctcctccggaactggaaagtcgggcaaccagcctgcaagaaagagattgaatttcggtcagactggagactcagactccgtacctgacccccagcctctcggacagccaccagcagccccctctggtctgggaactaatacgatggctacaggcagtggcgcaccaatggcagacaataacgagggcgccgacggagtgggtaattcctcgggaaattggcattgcgattccacatggatgggcgacagagtcatcaccaccagcacccgaacctgggccctgcccacctacaacaaccatctgtacaagcaaatatccagccagtctggagccagcaacgacaatcactactttggctacagcaccccctgggggtattttgacttcaacagattccactgccacttttcaccacgtgactggcaaagactcatcaacaacaactggggattccgacccaagagactcaacttcaagctctttaacattcaagtcaaagaggtcacgcagaatgacggtacgacgacgattgccaataaccttaccagcacggttcaggtgtttactgactcggagtaccagctcccgtacgtcctcggctcggcgcatcaaggatgcctcccgccgttcccagcagacgtcttcatggtgccacagtatggatacctcaccctgaacaacgggagtcaggcagtaggacgctcttcattttactgcctagagtactttccttctcagatgctgcgtaccggaaacaactttaccttcagctacacctttgaggacgttcctttccacagcagctacgctcacagccagagtttggaccgtctcatgaatcctctcatcgaccagtacctgtattacttgagcagaacaaacactccaagcggaaccaccacgcagtccaggcttcagttttctcaggccggagcgagtgacattcaggaccagtctaggaactggcttcctggaccctgttaccgtcagcagcgagtatcaaagacatctgcggataacaacaacagtgaatactcgtggactggagctaccaagtaccacctcaatggcagagactctctggtgaatccgggcccggccatggccagccacaaagacgatgaagaaaagttttttcctcagagcggggttcttatctttgggaagcaaggctcagagaaaacaaatgtggatattgaaaaggtcatgattacagacgaagaggaaatcaggaccaccaatcccgtggctacggagcagtatggttctgtatctaccaacctccagagcggcaacacacaagcagctaccgcagatgtcaacacacaaggcgttcttccaggcatggtcgggcaagacagagacgtgtacctgcaggggcctacttgggcaaagattccacacacggacggacattttcacccctctcccctcatgggcggatttggacttaaacaccctcctccacagattctcatcaagaacaccccggtacctgcgaatccttcgaccaccttcagtgcggcaaagtttgcttccttcattacacagtactccacggggcaggtcagcgtggagatcgagtgggagctgcagaaggagaacagcaaacgctggaatcccgagatccagtacacttccaactacaacaagtctgttaatgtggactttactgtggacactaatggcgtgtattcagagcctcgccccattggcaccagatacctgactcgtaatctgtaa

SEQ ID NO: 4884 - protein, 735 aa, Adeno-associated virus
MAADGYLPDWLEDTLSEGIRQWWKLKPGPPPPKPAERHKDDSRGLVLPGYKYLGPFNGLDKGEPVNEADAAALEHDKAYDRQLDSGDNPYLKYNHADAEFQERLKEDTSFGGNLGRAVFQAKKRVLEPLSLVEEPVKTAPGKKRPVEHSPAEPDSSSGTGKSGNQPARKRLNFGQTGDSDSVPDPQPLGQPPAAPSGLGTNTMATGSGAPMADNNEGADGVGNSSGNWHCDSTWMGDRVITTSTRTWALPTYNNHLYKQISSQSGASNDNHYFGYSTPWGYFDFNRFHCHFSPRDWQRLINNNWGFRPKRLNFKLFNIQVKEVTQNDGTTTIANNLTSTVQVFTDSEYQLPYVLGSAHQGCLPPFPADVFMVPQYGYLTLNNGSQAVGRSSFYCLEYFPSQMLRTGNNFTFSYTFEDVPFHSSYAHSQSLDRLMNPLIDQYLYYLSRTNTPSGTTTQSRLQFSQAGASDIQDQSRNWLPGPCYRQQRVSKTSADNNNSEYSWTGATKYHLNGRDSLVNPGPAMASHKDDEEKFFPQSGVLIFGKQGSEKTNVDIEKVMITDEEEIRTTNPVATEQYGSVSTNLQSGNTQAATADVNTQGVLPGMVGQDRDVYLQGPTWAKIPHTDGHFHPSPLMGGFGLKHPPPQILIKNTPVPANPSTTFSAAKFASFITQYSTGQVSVEIEWELQKENSKRWNPEIQYTSNYNKSVNVDFTVDTNGVYSEPRPIGTRYLTRNL

SEQ ID NO: 4885 - DNA, 2208 bp, Adeno-associated virus
  source 1..2208: mol_type = other DNA
atggctgccgatggttatcttccagattggctcgaggacactctctctgaaggaataagacagtggtggaagctcaaacctggcccaccaccaccaaagcccgcagagcggcataaggacgacagcaggggtcttgtgcttcctgggtacaagtacctcggacccttcaacggactcgacaagggagagccggtcaacgaggcagacgccgcggccctcgagcacgacaaggcctacgaccggcagctcgacagcggagacaacccgtacctcaagtacaaccacgccgacgcagagtttcaggagcgccttaaagaagatacgtcttttgggggcaacctcggacgagcagtcttccaggcaaaaaagagggttctggaacctctgggcctggttgaggagcctgttaagacggctccgggaaaaaagaggccggtagagcactctcctgcagagccagattcctcctccggaactggaaagtcgggcaaccagcctgcaagaaagagattgaatttcggtcagactggagactcagactccgtacctgacccccagcctctcggacagccaccagcagccccctctggtctgggaactaatacgatggctacaggcagtggcgcaccaatggcagacaataacgagggcgccgacggagtgggtaattcctcgggaaattggcattgcgattccacatggatgggcgacagagtcatcaccaccagcacccgaacctgggccctgcccacctacaacaaccatctgtacaagcaaatatccagccagtctggagccagcaacgacaatcactactttggctacagcaccccctgggggtattttgacttcaacagattccactgccacttttcaccacgtgactggcaaagactcatcaacaacaactggggattccgacccaagagactcaacttcaagctctttaacattcaagtcaaagaggtcacgcagaatgacggtacgacgacgattgccaataaccttaccagcacggttcaggtgtttactgactcggagtaccagctcccgtacgtcctcggctcggcgcatcaaggatgcctcccgccgttcccagcagacgtcttcatggtgccacagtatggatacctcaccctgaacaacgggagtcaggcagtaggacgctcttcattttactgcctagggtactttccttctcagatgctgcgtaccggaaacaactttaccttcagctacacctttgaggacgttcctttccacagcagctacgctcacagccagagtttggaccgtctcatgaatcctctcatcgaccagtacctgtattacttgagcagaacaaacactccaagcggaaccaccacgcagtccaggcttcagttttctcaggccggagcgagtgacattcgggaccagtctaggaactggcttcctggaccctgttaccgtcagcagcgagtatcaaagacatctgcggataacaacaacagtgaatactcgtggactggagctaccaagtaccacctcaatggcagagactctctggtgaatccgggcccggccatggccagccacaaagacgatgaagaaaagttttttcctcagagcggggttcttatctttgggaagcaaggcccagagaaaacaaatgtggatattgaaaaggtcatgattacagacgaagaggaaatcaggaccaccaatcccgtggctacggagcagtatggttctgtatctaccaacctccagagcggcaacacacaagcagctaccgcagatgtcaacacacaaggcgttcttccaggcatggtctggcaagacagagacgtgtacctgcaggggcctatttgggcaaagattccacacacggacggacattttcacccctctcccctcatgggcggatttggacttaaacaccctcctccacagattctcatcaagaacaccccggtacctgcgaatccttcgaccaccttcagtgcggcaaagtttgcttccttcattacacagtactccacggggcaggtcagcgtggagatcgagtgggagctgcagaaggagaacagcaaacgctggaatcccgagatccagtacacttccaactacaacaagtctgttaatgtggactttactgtggacactaatggcgtgtattcagagcctcgccccattggcaccagatacctgactcgtaatctgtaa

SEQ ID NO: 4886 - protein, 735 aa, Adeno-associated virus
MAADGYLPDWLEDTLSEGIRQWWKLKPGPPPPKPAERHKDDSRGLVLPGYKYLGPFNGLDKGEPVNEADAAALEHDKAYDRQLDSGDNPYLKYNHADAEFQERLKEDTSFGGNLGRAVFQAKKRVLEPLGLVEEPVKTAPGKKRPVEHSPAEPDSSSGTGKSGNQPARKRLNFGQTGDSDSVPDPQPLGQPPAAPSGLGTNTMATGSGAPMADNNEGADGVGNSSGNWHCDSTWMGDRVITTSTRTWALPTYNNHLYKQISSQSGASNDNHYFGYSTPWGYFDFNRFHCHFSPRDWQRLINNNWGFRPKRLNFKLFNIQVKEVTQNDGTTTIANNLTSTVQVFTDSEYQLPYVLGSAHQGCLPPFPADVFMVPQYGYLTLNNGSQAVGRSSFYCLGYFPSQMLRTGNNFTFSYTFEDVPFHSSYAHSQSLDRLMNPLIDQYLYYLSRTNTPSGTTTQSRLQFSQAGASDIRDQSRNWLPGPCYRQQRVSKTSADNNNSEYSWTGATKYHLNGRDSLVNPGPAMASHKDDEEKFFPQSGVLIFGKQGPEKTNVDIEKVMITDEEEIRTTNPVATEQYGSVSTNLQSGNTQAATADVNTQGVLPGMVWQDRDVYLQGPIWAKIPHTDGHFHPSPLMGGFGLKHPPPQILIKNTPVPANPSTTFSAAKFASFITQYSTGQVSVEIEWELQKENSKRWNPEIQYTSNYNKSVNVDFTVDTNGVYSEPRPIGTRYLTRNL

SEQ ID NO: 4887 - protein, 735 aa, Adeno-associated virus
MAADGYLPDWLEDTLSEGIRQWWKLKPGPPPPKPAERHKDDSRGLVLPGYKYLGPFNGLDKGEPVNEADAAALEHDKAYDRQLDSGDNPYLKYNHADAEFQERLKEDTSFGGNLGRAVFQAKKRVLEPLGLVEEPVKTAPGKKRPVEHSPAEPDSSSGTGKSGNQPARKRLNFGQTGDSDSVPDPQPLGQPPAAPSGLGTNTMATGSGAPMADNNEGADGVGNSSGNWHCDSTWMGDRVITTSTRTWALPTYNNHLYKQISSQSGASNDNHYFGYSTPWGYFDFNRFHCHFSPRDWQRLINNNWGFRPKRLNFKLFNIQVKEVTQNDGTTTIANNLTSTVQVFTDSEYQLPYVLGSAHQGCLPPFPADVFMVPQYGYLTLNNGSQAVGRSSFYCLEYFPSQMLRTGNNFTFSYTFEDVPFHSSYAHSQSLDRLMNPLIDQYLYYLSRTNTPSGTTTQSRLQFSQAGASDIRDQSRNWLPGPCYRQQRVSKTSADNNNSEYSWTGATKYHLNGRDSLVNPGPAMASHKDDEEKFFPQSGVLIFGKQGPEKTNVDIEKVMITDEEEIRTTNPVATEQYGSVSTNLQSGNTQAATADVNTQGVLPGMVWQDRDVYLQGPIWAKIPHTDGHFHPSPLMGGFGLKHPPPQILIKNTPVPANPSTTFSAAKFASFITQYSTGQVSVEIEWELQKENSKRWNPEIQYTSNYNKSVNVDFTVDTNGVYSEPRPIGTRYLTRNL

SEQ ID NO: 4888 - protein, 735 aa, Adeno-associated virus; identical to SEQ ID NO: 4887

SEQ ID NO: 4889 - DNA, 2211 bp, Adeno-associated virus
  source 1..2211: mol_type = other DNA
atggctgccgatggttatcttccagattggctcgaggacactctctctgaaggaataagacagtggtggaagctcaaacctggcccaccaccaccaaagcccgcagagcggcataaggacgacagcaggggtcttgtgcttcctgggtacaagtacctcggacccttcaacggactcgacaagggggagccggtcaacgaggcagacgccgcggccctcgagcacgacaaggcctacgaccggcagctcgacagcggagacaacccgtacctcaagtacaaccacgccgacgcagagtttcaggagcgccttaaagaagatacgtcttttgggggcaacctcggacgagcagtcttccaggcgaaaaagagggttcttgaacctctgcggcctggtttgaggaaacctgttaagacggctccgggaaaaaagaggccggtagagcactctcctgtggagccagactcctcctcgggaaccggaaaagcgggccagcagcctgcaagaaaaagattaaattttggtcagactggagacgcagactccgtacctgacccccagcctctcggacagccaccagcagccccctctggtctgggatctactacaatggctacaggcagtggcgcaccaatggcagacaataacgagggtgccgatggagtgggtaattcctcaggaaattggcattgcgattcccaatggctggacgacagagtcatcgccaccagcacccgaacctgggccctgcccacatacaacaaccacctctacaagcaaatctccagccaatcaggagcctgcaacgacaaccactactttggctacagcaccccctgggggtattttgacttcaacagattccactgccacttttcaccacgtgactggcaaagactcatcaacagcaactggggattccggcccaaaagactcaacttcaagctctttaatattcaagtcaaagaggtcacgcagaatgacggtacgacgacgattgccaataaccttaccagcacggttcaggtgtttactgactcggagtaccagctcccgtacgtcccgggctcggcgcatcaaggatgcctcccgccgtttccagcggacgtcttcatggtcccacagtatggatacctcaccctgaacaacgggagtcaggcggtaggacgctcttccttttactgcctggagtactttccttctcagatgctgcgtactggaaacaactttcagttcagctacacttttgaagacgtgcctttccacagcagctacgctcactgccagagtctggatcggctgatgaatcctctgatcgaccagtacctgtattatctgaacaagacacaaacaaatagtggaactcttcagcagtctcggctactgtttagccaagctggaccaaccaacatgtctcttcaagctaaaaactggctgcctggaccttgctacagacagcagcgtctgtcaaaacaggcaaacgacaataacaactgcaactttccctggactgcagctacaaagtatcatctaaatggccgggactcgttggttaatccaggaccagctatggccagtcacaaggatgacgaagaaaagtttttccccatgcatggaaccctgatatttggtaaacaaggaacaaatgccaacgacgcggatttggaaaatgtcatgattacagatgaagaagaaatcaggcccaccaatcccgtggctacggagcagtacgggactgtgtcaaataatttgcaaaactcaaacactggtccaactacaggaactgtcaatcaccaaggagcgttacctggtatggtgtggcaggatcgagacgtgtacctgcagggacccatttgggccaagattcctcacaccgatggacactttcatccttctccactgatgggaggttttggactcaaacacccgcctcctcagatcatgatcaaaagcactcccgttccagccaatcctcccacaaacttcagttctgccaagtttgcttcttccatcacacagtattccacgggacaggtcagcgtggagatcgagtgggagctgcagaaggagaacagcaaacgctggaatcccgaaattcagtacacttccaactacaacaagtctgttaatgtggactttactgtggacactaatggtgtgtattcagagcctcgccccattggcaccagatacctgactcgtaatctgtaa

SEQ ID NO: 4890 - protein, 736 aa, Adeno-associated virus
MAADGYLPDWLEDTLSEGIRQWWKLKPGPPPPKPAERHKDDSRGLVLPGYKYLGPFNGLDKGEPVNEADAAALEHDKAYDRQLDSGDNPYLKYNHADAEFQERLKEDTSFGGNLGRAVFQAKKRVLEPLRPGLRKPVKTAPGKKRPVEHSPVEPDSSSGTGKAGQQPARKRLNFGQTGDADSVPDPQPLGQPPAAPSGLGSTTMATGSGAPMADNNEGADGVGNSSGNWHCDSQWLDDRVIATSTRTWALPTYNNHLYKQISSQSGACNDNHYFGYSTPWGYFDFNRFHCHFSPRDWQRLINSNWGFRPKRLNFKLFNIQVKEVTQNDGTTTIANNLTSTVQVFTDSEYQLPYVPGSAHQGCLPPFPADVFMVPQYGYLTLNNGSQAVGRSSFYCLEYFPSQMLRTGNNFQFSYTFEDVPFHSSYAHCQSLDRLMNPLIDQYLYYLNKTQTNSGTLQQSRLLFSQAGPTNMSLQAKNWLPGPCYRQQRLSKQANDNNNCNFPWTAATKYHLNGRDSLVNPGPAMASHKDDEEKFFPMHGTLIFGKQGTNANDADLENVMITDEEEIRPTNPVATEQYGTVSNNLQNSNTGPTTGTVNHQGALPGMVWQDRDVYLQGPIWAKIPHTDGHFHPSPLMGGFGLKHPPPQIMIKSTPVPANPPTNFSSAKFASSITQYSTGQVSVEIEWELQKENSKRWNPEIQYTSNYNKSVNVDFTVDTNGVYSEPRPIGTRYLTRNL

SEQ ID NO: 4891 - DNA, 2208 bp, Adeno-associated virus
  source 1..2208: mol_type = other DNA
atggctgccgatggttatcttccagattggctcgaggacactctctctgaaggaataagacagtggtggaagctcaaacctggcccaccaccaccaaagcccgcagagcggcataaggacgacagcaggggtcttgtgcttcctgggtacaagtacctcggacccttcaacggactcgacaagggagagccggtcaacgaggcagacgccgcggccctcgagcacgacaaggcctacgaccggcagctcgacagcggagacaacccgtacctcaagtacaaccacgccgacgcggagtttcaggagcgccttaaagaggatacgtcttttgggggcaacctcggacgagcagtcttccaggcaaaaaagagggttctggaacctctgggcctggttgaggagcctgttaagacggctccgggaaaaaagaggccggtagagcactctcctgcagagccagattcctcctccggaactggaaagtcgggcaaccagcctgcaagaaagagattgaatttcggtcagactggagactcagactccgtacctgacccccagcctctcggacagccaccagcagccccctctggtctgggaactaatacgatggctacaggcagtggcgcaccaatggcagacaataacgagggcgccgacggagtgggtaattcctcgggaaattggcattgcgattccacatggatgggcgacagagtcatcaccaccagcacccgaacctgggccctgcccacctacaacaaccatctgtacaagcaaatatccagccagtctggagccagcaacgacaatcactactttggctacagcaccccctgggggtattttgacttcaacagattccactgccacttttcaccacgtgactggcaaagactcatcaacaacaactggggattccgacccaagagactcaacttcaagctctttaacattcaagtcaaagaggtcacgcagaatgacggtacgacgacgattgccaataaccttaccagcacggttcaggtgtttactgactcggagtaccagctcccgtacgtcctcggctcggcgcatcaaggatgcctcccgccgttcccagcagacgtcttcatggtgccacagtatggatacctcaccctgaacaacgggagtcaggcagtaggacgctcttcattttactgcctagagtactttccttctcagatgctgcgtaccggaaacagctttaccttcagctacacctttgaggacgttcctttccacagcagctacgctcacagccagagtttggaccgtctcatgaatcctctcatcgaccagtacctgtattacttgagcagaacaaacactccaagcggaaccaccacgcagtccaggcttcagttttctcaggccggagcgagtgacattcgggaccagtctaggaactggcttcctggaccctgttaccgtcagcagcgagtatcaaagacatctgcggataacaacaacagtgaatactcgtggactggagctaccaagtaccacctcaatggcagagactctctggtgaatccgggcccggccatggccagccacaaagacgatgaagaaaagttctttcctcagagcggggttcttatctttgggaagcaaggctcagagaaaacaaatgtggatattgaaaaggtcatgattacagacgaagaggaaatcaggaccaccaatcccgtggctacggagcagtatggttctgtatctaccaacctccagagcggcaacacacaagcagctaccgcagatgtcaacacacaaggcgttcttccaggcatggtctggcaagacagagacgtgtacctgcaggggcctatttgggcaaagattccacacacggacggacattttcacccctctcccctcatgggcggatttggacttaaacaccctcctccacagattctcatcaagaacaccccggtacctgcgaatccttcgaccaccttcagtgcggcaaagtttgcttccttcattacacagtactccacggggcaggtcagcgtggagatcgagtgggagctgcagaaggagaacagcaaacgctggaatcccgagatccagtacacttccaactacaacaagtctgttaatgtggactttactgtggacactaatggcgtgtattcagagcctcgccccattggcaccagatacctgactcgtaatctgtaa

SEQ ID NO: 4892 - protein, 735 aa, Adeno-associated virus
MAADGYLPDWLEDTLSEGIRQWWKLKPGPPPPKPAERHKDDSRGLVLPGYKYLGPFNGLDKGEPVNEADAAALEHDKAYDRQLDSGDNPYLKYNHADAEFQERLKEDTSFGGNLGRAVFQAKKRVLEPLGLVEEPVKTAPGKKRPVEHSPAEPDSSSGTGKSGNQPARKRLNFGQTGDSDSVPDPQPLGQPPAAPSGLGTNTMATGSGAPMADNNEGADGVGNSSGNWHCDSTWMGDRVITTSTRTWALPTYNNHLYKQISSQSGASNDNHYFGYSTPWGYFDFNRFHCHFSPRDWQRLINNNWGFRPKRLNFKLFNIQVKEVTQNDGTTTIANNLTSTVQVFTDSEYQLPYVLGSAHQGCLPPFPADVFMVPQYGYLTLNNGSQAVGRSSFYCLEYFPSQMLRTGNSFTFSYTFEDVPFHSSYAHSQSLDRLMNPLIDQYLYYLSRTNTPSGTTTQSRLQFSQAGASDIRDQSRNWLPGPCYRQQRVSKTSADNNNSEYSWTGATKYHLNGRDSLVNPGPAMASHKDDEEKFFPQSGVLIFGKQGSEKTNVDIEKVMITDEEEIRTTNPVATEQYGSVSTNLQSGNTQAATADVNTQGVLPGMVWQDRDVYLQGPIWAKIPHTDGHFHPSPLMGGFGLKHPPPQILIKNTPVPANPSTTFSAAKFASFITQYSTGQVSVEIEWELQKENSKRWNPEIQYTSNYNKSVNVDFTVDTNGVYSEPRPIGTRYLTRNL

SEQ ID NO: 4893 - DNA, 2211 bp, Adeno-associated virus; identical to SEQ ID NO: 4804
  source 1..2211: mol_type = other DNA

SEQ ID NO: 4894 - protein, 736 aa, Adeno-associated virus
MAADGYLPDWLEDTLSEGIRQWWKLKPGPPPPKPAERHKDDSRGLVLPGYKYLGPGNGLDKGEPVNAADAAALEHDKAYDQQLKAGDNPYLKYNHADAEFQERLKEDTSFGGNLGRAVFQAKKRLLEPLGLVEEAAKTAPGKKRPVEQSPQEPDSSAGIGKSGSQPAKKKLNFGQTGDTESVPDPQPIGEPPAAPSGVGSLTMASGGGAPVADNNEGADGVGSSSGNWHCDSQWLGDRVITTSTRTWALPTYNNHLYKQISNSTSGGSSNDNAYFGYSTPWGYFDFNRFHCHFSPRDWQRLINNNWGFRPKRLNFKLFNIQVKEVTDNNGVKTIANNLTSTVQVFTDSDYQLPYVLGSAHEGCLPPFPADVFMIPQYGYLTLNDGGQAVGRSSFYCLEYFPSQMLRTGNNFQFSYEFENVPFHSSYAHSQSLDRLMNPLIDQYLYYLSKTINGSGQNQQTLKFSVAGPSNMAVQGRNYIPGPSYRQQRVSTTVTQNNNSEFAWPGASSWALNGRNSLMNPGPAMASHKEGEDRFFPLSGSLIFGKQGTGRDNVDADKVMITNEEEIKTTNPVATESYGQVATNHQSAQAQAQTGWVQNQGILPGMVWQDRDVYLQGPIWAKIPHTDGNFHPSPLMGGFGMKHPPPQILIKNTPVPADPPTAFNKDKLNSFITQYSTGQVSVEIEWELQKENSKRWNPEIQYTSNYYKSNNVEFAVSTEGVYSEPRPIGTRYLTRNL

SEQ ID NO: 4895 - DNA, 2211 bp, Adeno-associated virus
  source 1..2211: mol_type = other DNA
atggctgccgatggttatcttccagattggctcgaggacactctctctgaaggaataagacagtggtggaagctcaaacctggcccaccaccaccaaagcccgcagagcggcataaggacgacagcaggggtcttgtgcttcctgggtacaagtacctcggacccggcaacggactcgacaagggggagccggtcaacgcagcagacgcggcggccctcgagcacgacaaggcctacgaccagcagctcaaggccggagacaacccgtacctcaagtacaaccacgccgacgccgagttccaggagcggctcaaagaagatacgtcttttgggggcaacctcgggcgagcagtcttccaggccaaaaagaggcttcttgaacctcttggtctggttgaggaagcggctaagacggctcctggaaagaagaggcctgtagagcagtctcctcaggaaccggactcctccgcgggtattggcaaatcgggttcacagcccgctaaaaagaaactcaatttcggtcagactggcgacacagagtcagtccccgaccctcaaccaatcggagaacctcccgcagccccctcaggtgtgggatctcttacaatggcttcaggtggtggcgcaccagtggcagacaataacgaaggtgccgatggagtgggtagttcctcgggaaattggcattgcgattcccaatggctgggggacagagtcatcaccaccagcacccgaacctgggccctgcccacctacaacaatcacctctacaagcaaatctccaacagcacatctggaggatcttcaaatgacaacgcctacttcggctacagcaccccctgggggtattttgacttcaacagattccactgccacttctcaccacgtgactggcagcgactcatcaacaacaactggggattccggcctaagcgactcaacttcaagctcttcaacattcaggtcaaagaggttacggacaacaatggagtcaagaccatcgccaataaccttaccagcacggtccaggtcttcacggactcagactatcagctcccgtacgtgctcgggtcggctcacgagggctgcctcccgccgttcccagcggacgttttcatgattcctcagtacgggtatctgacgcttaatgatgggagccaggccgtgggtcgttcgtccttttactgcctggaatatttcccgtcgcaaatgctaagaacgggtaacaacttccagttcagctacgagtttgagaacgtacctttccatagcagctacgctcacagccaaagcctggaccgactaatgaatccactcatcgaccaatacttgtactatctctcaaagactattaacggttctggacagaatcaacaaacgctaaaattcagcgtggccggacccagcaacatggctgtccagggaagaaactacatacctggacccagctaccgacaacaacgtgtctcaaccactgtgactcaaaacaacaacagcgaatttgcttggcctggagcttcttcttgggctctcaatggacgtaatagcttgatgaatcctggacctgctatggccagccacaaagaaggagaggaccgtttctttcctttgtctggatctttaatttttggcaaacaaggaactggaagagacaacgtggatgcggacaaagtcatgataaccaacgaagaagaaattaaaactactaacccggtagcaacggagtcctatggacaagtggccacaaaccaccagagtgcccaagcacaggcgcagaccggctgggttcaaaaccaaggaatacttccgggtatggtttggcaggacagagatgtgtacctgcaaggacccatttgggccaaaattcctcacacggacggcaactttcacccttctccgctaatgggagggtttggaatgaagcacccgcctcctcagatcctcatcaaaaacacacctgtacctgcggatcctccaacggctttcaataaggacaagctgaactctttcatcacccagtattctactggccaagtcagcgtggagattgagtgggagctgcagaaggaaaacagcaagcgctggaacccggagatccagtacacttccaactattacaagtctaataatgttgaatttgctgttaatactgaaggtgtatatagtgaaccccgccccattggcaccagatacctgactcgtaatctgtaa

SEQ ID NO: 4896 - protein, 736 aa, Adeno-associated virus
MAADGYLPDWLEDTLSEGIRQWWKLKPGPPPPKPAERHKDDSRGLVLPGYKYLGPGNGLDKGEPVNAADAAALEHDKAYDQQLKAGDNPYLKYNHADAEFQERLKEDTSFGGNLGRAVFQAKKRLLEPLGLVEEAAKTAPGKKRPVEQSPQEPDSSAGIGKSGSQPAKKKLNFGQTGDTESVPDPQPIGEPPAAPSGVGSLTMASGGGAPVADNNEGADGVGSSSGNWHCDSQWLGDRVITTSTRTWALPTYNNHLYKQISNSTSGGSSNDNAYFGYSTPWGYFDFNRFHCHFSPRDWQRLINNNWGFRPKRLNFKLFNIQVKEVTDNNGVKTIANNLTSTVQVFTDSDYQLPYVLGSAHEGCLPPFPADVFMIPQYGYLTLNDGSQAVGRSSFYCLEYFPSQMLRTGNNFQFSYEFENVPFHSSYAHSQSLDRLMNPLIDQYLYYLSKTINGSGQNQQTLKFSVAGPSNMAVQGRNYIPGPSYRQQRVSTTVTQNNNSEFAWPGASSWALNGRNSLMNPGPAMASHKEGEDRFFPLSGSLIFGKQGTGRDNVDADKVMITNEEEIKTTNPVATESYGQVATNHQSAQAQAQTGWVQNQGILPGMVWQDRDVYLQGPIWAKIPHTDGNFHPSPLMGGFGMKHPPPQILIKNTPVPADPPTAFNKDKLNSFITQYSTGQVSVEIEWELQKENSKRWNPEIQYTSNYYKSNNVEFAVNTEGVYSEPRPIGTRYLTRNL

SEQ ID NO: 4897 - DNA, 2208 bp, Adeno-associated virus
  source 1..2208: mol_type = other DNA
atggctgccgatggttatcttccagattggctcgaggacactctctctgaaggaataagacagcggtggaagctcaaacctggcccaccaccaccagagcccgcagagcggcataaggacgacagcaggggtcttgtgcttcctgggtacaagtacctcggacccttcaacggactcgacaagggagagccggtcaacgaggcagacgccgcggccctcgagcacgacaaagcctacgaccggcagctcgacagcggagacaacccgtacctcaagtacaaccacgccgacgcggagtttcaggagcgccttaaagaagatacgtcttttgggggcaacctcggacgagcagtcttccaggcgaaaaagagggtacttgaacctctgggcctggttgaggaacctgttaagacggctccgggaaaaaagaggccggtagagcactctcctgtggagccagactcctcctcgggaaccggaaaggcgggccagcagcctgcaagaaaaagattgaattttggtcagactggagacgcagactcagtacctgacccccagcctctcggacagccaccagcagccccctctggtctgggaactaatacgatggctacaggcagtggcgcaccaatggcagacaataacgagggcgccgacggagtgggtaattcctcgggaaattggcattgcgattccacatggatgggcgacagagtcatcaccaccagcacccgaacctgggccctgcccacctacaacaaccacctctacaaacaaatttccagccaatcaggagcctcgaacgacaatcactactttggctacagcaccccttgggggtattttgacttcaacagattccactgccacttttcaccacgtgactggcaaagactcatcaacaacaactggggattccgacccaagagactcaacttcaagctctttaacattcaagtcaaagaggtcacgcagaatgacggtacgacgacgattgccaataaccttaccggcacggttcaggtgtttactgactcggagtaccagctcccgtacgtcctcggctcggcgcatcaaggatgcctcccgccgttcccagcagacgtcttcatggtgccacagtatggatacctcaccctgaacaacgggagtcaggcagtaggacgctcttcattttactgcctggagtactttccttctcagatgctgcgtaccggaaacaactttaccttcagctacacttttgaggacgttcctttccacagcagctacgctcacagccagagtctgggccgtctcatgaatcctctcatcgaccagtacctgtattacttgagcagaacaaacactccaagtggaaccaccacgcagtcaaggcttcagttttctcaggccggagcgagtgacattcgggaccagtctaggaactggcttcctggaccctgttaccgccagcagcgagtatcaaagacatctgcggataacaacaacagtgaatactcgtggactggagctaccaagtaccacctcaatggcagagactctctggtgaatccgggcccggccatggcaagccacaaggacgatgaagaaaagttttttcctcagagcggggttctcatctttgggaagcaaggctcagagaaaacaaatgtggacattgaaaaggtcatgattacagacgaagaggaaatcaggacaaccaatcccgtggctacggagcagtatggttctgtatctaccaacctccagagaggcaacagacaagcagctaccgcagatgtcaacacacaaggcgttcttccaggcatggtctggcaggacagagatgtgtaccttcaggggcccatctgggcaaagattccacacacggacggacattttcacccctctcccctcatgggtggattcggacttaaacaccctcctccacagattctcatcaagaacaccccggtacctgcgaatccttcgaccaccttcagtgcggcaaagtttgcttccttcatcacacagtactccacgggacaggtcagcgtggagatcgagtgggagctgcagaaggaaaacagcaaacgctggaatcccgaaattcagtacacttccaactacaacaagtctgttaatgtggactttactgtggacactaatggcgtgtattcagagcctcgccccattggcaccagatacctgactcgtaatctgtaa

SEQ ID NO: 4898 - protein, 735 aa, Adeno-associated virus
MAADGYLPDWLEDTLSEGIRQRWKLKPGPPPPEPAERHKDDSRGLVLPGYKYLGPFNGLDKGEPVNEADAAALEHDKAYDRQLDSGDNPYLKYNHADAEFQERLKEDTSFGGNLGRAVFQAKKRVLEPLGLVEEPVKTAPGKKRPVEHSPVEPDSSSGTGKAGQQPARKRLNFGQTGDADSVPDPQPLGQPPAAPSGLGTNTMATGSGAPMADNNEGADGVGNSSGNWHCDSTWMGDRVITTSTRTWALPTYNNHLYKQISSQSGASNDNHYFGYSTPWGYFDFNRFHCHFSPRDWQRLINNNWGFRPKRLNFKLFNIQVKEVTQNDGTTTIANNLTGTVQVFTDSEYQLPYVLGSAHQGCLPPFPADVFMVPQYGYLTLNNGSQAVGRSSFYCLEYFPSQMLRTGNNFTFSYTFEDVPFHSSYAHSQSLGRLMNPLIDQYLYYLSRTNTPSGTTTQSRLQFSQAGASDIRDQSRNWLPGPCYRQQRVSKTSADNNNSEYSWTGATKYHLNGRDSLVNPGPAMASHKDDEEKFFPQSGVLIFGKQGSEKTNVDIEKVMITDEEEIRTTNPVATEQYGSVSTNLQRGNRQAATADVNTQGVLPGMVWQDRDVYLQGPIWAKIPHTDGHFHPSPLMGGFGLKHPPPQILIKNTPVPANPSTTFSAAKFASFITQYSTGQVSVEIEWELQKENSKRWNPEIQYTSNYNKSVNVDFTVDTNGVYSEPRPIGTRYLTRNL

SEQ ID NO: 4899 - DNA, 2208 bp, Adeno-associated virus
  source 1..2208: mol_type = other DNA
atggctgccgatggttatcttccagattggctcgaggacactctctctgaaggaataagacagcggtggaagctcaaacctggcccaccaccaccagagcccgcagagcggcataaggacgacagcaggggtcttgtgcttcctgggtacaagtacctcggacccttcaacggactcgacaagggagagccggtcaacgaggcagacgccgcggccctcgagcacgacaaagcctacgaccggcagctcgacagcggagacaacccgtacctcaagtacaaccacgccgacgcggagtttcaggagcgccttaaagaagatacgtcctttgggggcaacctcggacgagcagtcttccaggcgaaaaagagggtacttgaacctctgggcctggttgaggaacctgttaagacggctccgggaaaaaagaggccggtagagcactctcctgtggagccagactcctcctcgggaaccggaaaggcgggccagcagcctgcaagaaaaagattgaattttggtcagactggagacgcagactcagtacctgacccccagcctctcggacagccaccagcagccccctctggtctgggaactaatacgatggctacaggcagtggcgcaccaatggcagacaataacgagggcgccgacggagtgggtaattcctcgggaaattggcattgcgattccacatggatgggcgacagagtcatcaccaccagcacccgaacctgggccctgcccacctacaacaaccacctctacaaacaaatttccagccaatcaggagcctcgaacgacaatcactactttggctacagcaccccttgggggtattttgacttcaacagattccactgccacttttcaccacgtgactggcaaagactcatcaacaacaactggggattccgacccaagagactcaacttcaagctctttaacattcaagtcaaagaggtcacgcagaatgacggtacgacgacgattgccaataaccttaccagcacggttcaggtgtttactgactcggagtaccagctcccgtacgtcctcggctcggcgcatcaaggatgcctcccgccgttcccagcagacgtcttcatggtgccacagtatggatacctcaccctgaacaacgagagtcaggcagtaggacgctcttcattttactgcctggagtactttccttctcagatgctgcgtaccggaaacaactttaccttcagctacacttttgaggacgttcctttccacagcagctacgctcacagccagagtctgggccgtctcatgaatcctctcatcgaccagtacctgtattacttgagcagaacaaacactccaagtggaaccaccacgcagtcaaggcttcagttttctcaggccggagcgagtgacattcgggaccagtctaggaactggcttcctggaccctgttaccgccagcagcgagtatcaaagacatctgcggataacaacaacagtgaatactcgtggactggagctaccaagtaccacctcaatggcagagactctctggtgaatccgggcccggccatggcaagccacaaggacgatgaagaaaagttttttcctcagagcggggttctcatctttgggaagcaaggctcagagaaaacaaatgtggacattgaaaaggtcatgattacagacgaagaggaaatcaggacaaccaatcccgtggctacggagcagtatggttctgtatctaccaacctccagagaggcaacagacaagcagctaccgcagatgtcaacacacaaggcgttcttccaggcatggtctggcaggacagagatgtgtaccttcaggggcccatctgggcaaagattccacacacggacggacattttcacccctctcccctcatgggtggattcggacttaaacaccctcctccacagattctcatcaagaacaccccggtacctgcgaatccttcgaccaccttcagtgcggcaaagtttgcttccttcatcacacagtactccacgggacaggtcagcgtggagatcgagtgggagctgcagaaggaaaacagcaaacgctggaatcccgaaattcagtacacttccaactacaacaagtctgttaatgtggactttactgtggacactaatggcgtgtattcagagcctcgccccattggcaccagatacctgactcgtaatctgtaa

SEQ ID NO: 4900 - protein, 735 aa, Adeno-associated virus
MAADGYLPDWLEDTLSEGIRQRWKLKPGPPPPEPAERHKDDSRGLVLPGYKYLGPFNGLDKGEPVNEADAAALEHDKAYDRQLDSGDNPYLKYNHADAEFQERLKEDTSFGGNLGRAVFQAKKRVLEPLGLVEEPVKTAPGKKRPVEHSPVEPDSSSGTGKAGQQPARKRLNFGQTGDADSVPDPQPLGQPPAAPSGLGTNTMATGSGAPMADNNEGADGVGNSSGNWHCDSTWMGDRVITTSTRTWALPTYNNHLYKQISSQSGASNDNHYFGYSTPWGYFDFNRFHCHFSPRDWQRLINNNWGFRPKRLNFKLFNIQVKEVTQNDGTTTIANNLTSTVQVFTDSEYQLPYVLGSAHQGCLPPFPADVFMVPQYGYLTLNNESQAVGRSSFYCLEYFPSQMLRTGNNFTFSYTFEDVPFHSSYAHSQSLGRLMNPLIDQYLYYLSRTNTPSGTTTQSRLQFSQAGASDIRDQSRNWLPGPCYRQQRVSKTSADNNNSEYSWTGATKYHLNGRDSLVNPGPAMASHKDDEEKFFPQSGVLIFGKQGSEKTNVDIEKVMITDEEEIRTTNPVATEQYGSVSTNLQRGNRQAATADVNTQGVLPGMVWQDRDVYLQGPIWAKIPHTDGHFHPSPLMGGFGLKHPPPQILIKNTPVPANPSTTFSAAKFASFITQYSTGQVSVEIEWELQKENSKRWNPEIQYTSNYNKSVNVDFTVDTNGVYSEPRPIGTRYLTRNL

SEQ ID NO: 4901 - DNA, 2208 bp, Adeno-associated virus
  source 1..2208: mol_type = other DNA
atggctgccgatggttatcttccagattggctcgaggacactctctctgaaggaataagacagcggtggaagctcaaacctggcccaccaccaccagagcccgcagagcggcataaggacgacagcaggggtcttgtgcttcctgggtacaagtacctcggacccttcaacggactcgacaagggagagccggtcaacgaggcagacgccgcggccctcgagcacgacaaagcctacgaccggcagctcgacagcggagacaacccgtacctcaagtacaaccacgccgacgcggagtttcaggagcgccttaaagaagatacgtcttttgggggcaacctcggacgagcagtcttccaggcgaaaaagagggtacttgaacctctgggcctggttgaggaacctgttaagacggctccgggaaaaaagaggccggtagagcactctcctgtggagccagactcctcctcgggaaccggaaaggcgggccagcagcctgcaagaaaaagattgaattttggtcagactggagacgcagactcagtacctgacccccagcctctcggacagccaccagcagccccctctggtctgggaactaatacgatggctacaggcagtggcgcaccaatggcagacaataacgagggcgccgacggagtgggtaattcctcgggaaattggcattgcgattccacatggatgggcgacagagtcatcaccaccagcacccgaacctgggccctgcccacctacaacaaccacctctacaaacaaatttccagccaatcaggagcctcgaacgacaatcactactttggctacagcaccccttgggggtattttgacttcaacagattccactgccacttttcaccacgtgactggcaaagactcatcaacaacaactggggattccgacccaagagactcaacttcaagctctttaacattcaagtcaaagaggtcacgcagaatgacggtacgacgacgattgccaataaccttaccagcacggttcaggtgtttactgactcggagtaccagctcccgtacgtcctcggctcggcgcatcaaggatgcctcccgccgttcccagcagacgtcttcatggtaccacagtatggatacctcaccctgaacaacgggagtcaggcagtaggacgctcttcattttactgcctggagtactttccttctcagatgctgcgtaccggaaacaactttaccttcagctacacttttgaggacgttcctttccacagcagctacgctcacagccagagtctgggccgtctcatgaatcctctcatcgaccagtacctgtattacttgagcagaacaaacactccaagtggaaccaccacgcagtcaaggcttcagttttctcaggccggagcgagtgacattcgggaccagtctaggaactggcttcctggaccctgttaccgccagcagcgagtatcaaagacatctgcggataacaacaacagtgaatactcgtggactggagctaccaagtaccacctcaatggcagagactctctggtgaatccgggcccggccatggcaagccacaaggacgatgaagaaaagttttttcctcagagcggggttctcatctttgggaagcaaggctcagagaaaacaaatgtggacattgaaaaggtcatgattacagacgaagaggaaatcaggacaaccaatcccgtggctacggagcagtatggttctgtatctaccaacctccagagaggcaacagacaagcagctaccgcagatgtcaacacacaaggcgttcttccaggcatggtctggcaggacagagatgtgtaccttcaggggcccatctgggcaaagattccacacacggacggacattttcacccctctcccctcatgggtggattcggacttaaacaccctcctccacagattctcatcaagaacaccccggtacctgcgaatccttcgaccaccttcagtgcggcaaagtttgcttccttcatcacacagtactccacgggacaggtcagcgtggagatcgagtgggagctgcagaaggaaaacagcaaacgctggaatcccgaaattcagtacacttccaactacaacaagtctgttaatgtggactttactgtggacactaatggcgtgtattcagagcctcgccccattggcaccagatacctgactcgtaatctgtaa

SEQ ID NO: 4902 - protein, 735 aa, Adeno-associated virus
MAADGYLPDWLEDTLSEGIRQRWKLKPGPPPPEPAERHKDDSRGLVLPGYKYLGPFNGLDKGEPVNEADAAALEHDKAYDRQLDSGDNPYLKYNHADAEFQERLKEDTSFGGNLGRAVFQAKKRVLEPLGLVEEPVKTAPGKKRPVEHSPVEPDSSSGTGKAGQQPARKRLNFGQTGDADSVPDPQPLGQPPAAPSGLGTNTMATGSGAPMADNNEGADGVGNSSGNWHCDSTWMGDRVITTSTRTWALPTYNNHLYKQISSQSGASNDNHYFGYSTPWGYFDFNRFHCHFSPRDWQRLINNNWGFRPKRLNFKLFNIQVKEVTQNDGTTTIANNLTSTVQVFTDSEYQLPYVLGSAHQGCLPPFPADVFMVPQYGYLTLNNGSQAVGRSSFYCLEYFPSQMLRTGNNFTFSYTFEDVPFHSSYAHSQSLGRLMNPLIDQYLYYLSRTNTPSGTTTQSRLQFSQAGASDIRDQSRNWLPGPCYRQQRVSKTSADNNNSEYSWTGATKYHLNGRDSLVNPGPAMASHKDDEEKFFPQSGVLIFGKQGSEKTNVDIEKVMITDEEEIRTTNPVATEQYGSVSTNLQRGNRQAATADVNTQGVLPGMVWQDRDVYLQGPIWAKIPHTDGHFHPSPLMGGFGLKHPPPQILIKNTPVPANPSTTFSAAKFASFITQYSTGQVSVEIEWELQKENSKRWNPEIQYTSNYNKSVNVDFTVDTNGVYSEPRPIGTRYLTRNL

SEQ ID NO: 4903 - DNA, 2208 bp, Adeno-associated virus
  source 1..2208: mol_type = other DNA
atggctgccgatggttatcttccagattggctcgaggacactctctctgaaggaataagacagcggtggaagctcaaacctggcccaccaccaccagagcccgcagagcggcataaggacgacagcaggggtcttgtgcttcctgggtacaagtacctcggacccttcaacggactcgacaagggagagccggtcaacgaggcagacgccgcggccctcgagcacgacaaagcctacgaccggcagctcgacagcggagacaacccgtacctcaagtacaaccacgccgacgcggagtttcaggagcgccttaaagaagatacgtcttttgggggcaacctcggacgagcagtcttccaggcgaaaaagagggtactcgaacctctgggcctggttgaggaacctgttaagacggctccgggaaaaaagaggccggtagagcactctcctgtggagccagactcctcctcgggaaccggaaaggcgggccagcagcctgcaagaaaaagattgaattttggtcagactggagacgcagactcagtacctgacccccagcctctcggacagccaccagcagccccctctggtctgggaactaatacgatggctacaggcagtggcgcaccaatggcagacaataacgagggcgccgacggagtgggtaattcctcgggaaattggcattgcgattccacatggatgggcgacagagtcatcaccaccagcacccgaacctgggccctgcccacctacaacaaccacctctacaaacaaatttccagccaatcaggagcctcgaacgacaatcactactttggctacagcaccccttgggggtattttgacttcaacagattccactgccacttttcaccacgtgactggcaaagactcatcaacaacaactggggattccgacccaagagactcaacttcaagctctttaacattcaagtcaaagaggtcacgcagaatgacggtacgacgacgattgccaataaccttaccagcacggttcaggtgtttactgactcggagtaccagctcccgtacgtcctcggctcggcgcatcaaggatgcctcccgccgttcccagcagacgtcttcatggtgccacagtatggatacctcaccctgaacaacgggagtcaggcagcaggacgctcttcattttactgcctggagtactttccttctcagatgctgcgtaccggaaacaactttaccttcagctacacttttgaggacgttcctttccacagcagctacgctcacagccagagtctgggccgtctcatgaatcctctcatcgaccagtacctgtattacttgagcagaacaaacactccaagtggaaccaccacgcagtcaaggcttcagttttctcaggccggagcgagtgacattcgggaccagtctaggaactggcttcctggaccctgttaccgccagcagcgagtatcaaagacatctgcggataacaacaacagtgaatactcgtggactggagctaccaagtaccacctcaatggcagagactctctggtgaatccgggcccggccatggcaagccacaaggacgatgaagaaaagttttttcctcagagcggggttctcatctttgggaagcaaggctcagagaaaacaaatgtggacattgaaaaggtcatgattacagacgaagaggaaatcaggacaaccaatcccgtggctacggagcagtatggttctgtatctaccaacctccagagaggcaacagacaagcagctaccgcagatgtcaacacacaaggcgttcttccaggcatggtctggcaggacagagatgtgtaccttcaggggcccatctgggcaaagattccacacacggacggacattttcacccctctcccctcatgggtggattcggacttaaacaccctcctccacagattctcatcaagaacaccccggtacctgcgaatccttcgaccaccttcagtgcggcaaagtttgcttccttcatcacacagtactccacgggacaggtcagcgtggagatcgagtgggagctgcagaaggaaaacagcaaacgctggaatcccgaaattcagtacacttccaactacaacaagtccgttaatgtggactttactgtggacactaatggcgtgtattcagagcctcgccccattggcaccagatacctgactcgtaatctgtaa

SEQ ID NO: 4904 - protein, 735 aa, Adeno-associated virus
MAADGYLPDWLEDTLSEGIRQRWKLKPGPPPPEPAERHKDDSRGLVLPGYKYLGPFNGLDKGEPVNEADAAALEHDKAYDRQLDSGDNPYLKYNHADAEFQERLKEDTSFGGNLGRAVFQAKKRVLEPLGLVEEPVKTAPGKKRPVEHSPVEPDSSSGTGKAGQQPARKRLNFGQTGDADSVPDPQPLGQPPAAPSGLGTNTMATGSGAPMADNNEGADGVGNSSGNWHCDSTWMGDRVITTSTRTWALPTYNNHLYKQISSQSGASNDNHYFGYSTPWGYFDFNRFHCHFSPRDWQRLINNNWGFRPKRLNFKLFNIQVKEVTQNDGTTTIANNLTSTVQVFTDSEYQLPYVLGSAHQGCLPPFPADVFMVPQYGYLTLNNGSQAAGRSSFYCLEYFPSQMLRTGNNFTFSYTFEDVPFHSSYAHSQSLGRLMNPLIDQYLYYLSRTNTPSGTTTQSRLQFSQAGASDIRDQSRNWLPGPCYRQQRVSKTSADNNNSEYSWTGATKYHLNGRDSLVNPGPAMASHKDDEEKFFPQSGVLIFGKQGSEKTNVDIEKVMITDEEEIRTTNPVATEQYGSVSTNLQRGNRQAATADVNTQGVLPGMVWQDRDVYLQGPIWAKIPHTDGHFHPSPLMGGFGLKHPPPQILIKNTPVPANPSTTFSAAKFASFITQYSTGQVSVEIEWELQKENSKRWNPEIQYTSNYNKSVNVDFTVDTNGVYSEPRPIGTRYLTRNL

SEQ ID NO: 4905 - protein, 738 aa, Adeno-associated virus; identical to SEQ ID NO: 4797

SEQ ID NO: 4906 - DNA, 2217 bp, Adeno-associated virus
  source 1..2217: mol_type = other DNA
atggctgctgacggttatcttccagattggctcgaggacaacctctctgagggcattcgcgagtggtgggacctgaaacctggagcccccaagcccaaggccaaccagcagaagcaggacgacggccggggtctggtgcttcctggctacaagtacctcggacccttcaacggactcgacaagggggagcccgtcaacgcggcggacgcagcggccctcgagcacgacaaggcctacgaccagcagctcaaagcgggtgacaatccgtacctgcggtataaccacgccgacgccgagtttcaggagcgtctgcaagaagatacgtcttttgggggcaacctcgggcgagcagtcttccaggccaagaagcgggttctcgaacctctcggtctggttgaggaagctgctaagacggctcctggaaagaagagaccggtagaaccgtcacctcagcgttcccccgactcctccacgggcatcggcaagaaaggccagcagcccgctaaaaagagactgaactttggtcagactggcgactcagagtcagtccccgaccctcaaccaatcggagaaccaccagcaggcccctctggtctgggatctggtacaatggctgcaggcggtggcgctccaatggcagacaataacgaaggcgccgacggagtgggtagttcctcaggaaattggcattgcgattccacatggctgggcgacagagtcatcaccaccagcacccgaacctgggccctgcccacctacaacaaccacctctacaagcaaatatccaatgggacatcgggaggaagcaccaacgacaacacctacttcggctacagcaccccctgggggtattttgacttcaacagattccactgccacttctcaccacgtgactggcagcgactcatcaacaacaactggggattccggccaaaaagactcagcttcaagctcttcaacatccaggtcaaggaggtcacgcagaatgaaggcaccaagaccatcgccaataaccttaccagcacgattcaggtatttacggactcggaataccagctgccgtacgtcctcggctccgcgcaccagggctgcctgcctccgttcccggcggacgtcttcatgattccccagtacggctaccttacactgaacaatggaagtcaagccgtaggccgttcctccttctactgcctggaatattttccatctcaaatgctgcgaactggaaacaattttgaattcagctacaccttcgaggacgtgcctttccacagcagctacgcacacagccagagcttggaccgactgatgaatcctctcatcgaccagtacctgtactacttatccagaactcagtccacaggaggaactcaaggtacccagcaattgttattttctcaagctgggcctgcaaacatgtcggctcaggctaagaactggctacctggaccttgctaccggcagcagcgagtctctacgacactgtcgcaaaacaacaacagcaactttgcttggactggtgccaccaaatatcacctgaacggaagagactctttggtaaatcccggtgtcgccatggcaacccacaaggacgacgaggaacgcttcttcccgtcgagtggagtcctgatgttcggaaaacagggtgctggaagagacaatgtggactacagcagcgttatgctaaccagcgaagaagaaattaaaaccactaaccccgtagccacagaacaatacggtgtggtggctgacaacttgcagcaaaccaatacagggcctattgtgggaaatgtcaacagccaaggagccttacctggcatggtctggcagaaccgagacgtgtacctgcagggtcccatctgggccaagattcctcacacggacggcaacttccacccttcaccgctaatgggaggatttggactgaagcacccacctcctcagatcctgatcaagaacacgccggtacctgcggatcctccaacaacgttcagccaggcgaaattggcttccttcattacgcagtacagcaccggacaggtcagcgtggaaatcgagtgggagctgcagaaggagaacagcaaacgctggaacccagagattcagtacacttcaaactactacaaatctacaaatgtggactttgctgtcaatacagagggaacttattctgagcctcgccccattggtactcgttacctcacccgtaatctgtaa

SEQ ID NO: 4907 - protein, 738 aa, Adeno-associated virus
MAADGYLPDWLEDNLSEGIREWWDLKPGAPKPKANQQKQDDGRGLVLPGYKYLGPFNGLDKGEPVNAADAAALEHDKAYDQQLKAGDNPYLRYNHADAEFQERLQEDTSFGGNLGRAVFQAKKRVLEPLGLVEEAAKTAPGKKRPVEPSPQRSPDSSTGIGKKGQQPAKKRLNFGQTGDSESVPDPQPIGEPPAGPSGLGSGTMAAGGGAPMADNNEGADGVGSSSGNWHCDSTWLGDRVITTSTRTWALPTYNNHLYKQISNGTSGGSTNDNTYFGYSTPWGYFDFNRFHCHFSPRDWQRLINNNWGFRPKRLSFKLFNIQVKEVTQNEGTKTIANNLTSTIQVFTDSEYQLPYVLGSAHQGCLPPFPADVFMIPQYGYLTLNNGSQAVGRSSFYCLEYFPSQMLRTGNNFEFSYTFEDVPFHSSYAHSQSLDRLMNPLIDQYLYYLSRTQSTGGTQGTQQLLFSQAGPANMSAQAKNWLPGPCYRQQRVSTTLSQNNNSNFAWTGATKYHLNGRDSLVNPGVAMATHKDDEERFFPSSGVLMFGKQGAGRDNVDYSSVMLTSEEEIKTTNPVATEQYGVVADNLQQTNTGPIVGNVNSQGALPGMVWQNRDVYLQGPIWAKIPHTDGNCHPSPLMGGFGLKHPPPQILIKNTPVPADPPTTFSQAKLASFITQYSTGQVSVEIEWELQKENSKRWNPEIQYTSNYYKSTNVDFAVNTEGTYSEPRPIGTRYLTRNL

SEQ ID NO: 4908 - protein, 738 aa, Adeno-associated virus
MAADGYLPDWLEDNLSEGIREWWDLKPGAPKPKANQQKQDDGRGLVLPGYKYLGPFNGLDKGEPVNAADAAALEHDKAYDQQLKAGDNPYLRYNHADAEFQERLQEDTSFGGNLGRAVFQAKKRVLEPLGLVEEGAKTAPGKKRPVEPSPQRSPDSSTGIGKKGQQPARKRLNFGRTGDSESVPDPQPIGEPPAAPSSVGSGTMAAGGGAPMADNNEGADGVGSSSGNWHCDSTWLGDRVITTSTRTWALPTYNNHLYKQISNGTSGGSTNDNTYFGYSTPWGYLDFNRFHCHFSPRDWQRLINNNWGFRPKRLSFKLFNIQVKEVTQNEGTKTIANNLASTIQVFTDSEYQPPYVLGSAHQGCLPPFPADVFMIPQYGYLTLNNGSQAVGRSSFYCLEYFPSQMLRTGNNFSFSYTFEDVPFHSSYAHSQSLDRLMNPLIDQYLYYLSRTQSTGGTAGTQQLLFSRAGPSNMSAQARNWLPGPCYRQQRVSTTLSQNNNSNFAWTGATKYHLNGRDSLVNPGVAMATNKDDEDRFFPSSGILMFGKQGAGKDNVDYSNVMLTSEEEIKTTNPVATEQYGVVADNLQQQNTAPTVGAVNSQGALPGMVWQNRDVYLQGPIWAKIPHTDGNFHPSPLMGGFGLKHPPPQILIKNTPVPADPPTAFNQAKLNSFIAQYSTGQVSVEIEWELQKENSKRWNPEIQYTSNYYKSTNADFAVNTEGVYSEPRPIGTRYLTRNL

SEQ ID NO: 4909 - DNA, 2217 bp, Adeno-associated virus
  source 1..2217: mol_type = other DNA
atggctgccgatggttatcttccagattggctcgaggacaacctctctgagggcattcgcgagtggtgggacctgaaacctggagccccgaaacccaaagccaaccagcaaaagcaggacgacggccggggtctggtgcttcctggctacaagtacctcggacccttcaacggactcgacaagggggagcccgtcaacgcggcggacgcagcggccctcgagcacgacaaggcctacgaccagcagctcaaagcgggtgacaatccgtacctgcggtataatcacgccgacgccgagtttcaggagcgtctgcaagaagatacgtcttttgggggcaacctcgggcgagcagtcttccaggccaagaagcgggttctcgaacctctcggtctggttgaggaaggcgctaagacggctcctggaaagaagagaccggtagagccgtcaccacagcgttcccccgactcctccacgggcatcggcaagaaaggccagcagcccgccagaaagagactcaatttcggtcggactggcgactcagagtcagtccccgaccctcaacctatcggagaacctccagcagcgccctctagtgtgggatctggtacaatggctgcaggcggtggcgcaccaatggcagacaataacgaaggtgccgacggagtgggtagttcctcgggaaattggcattgcgattccacatggctgggcgacagagttatcaccaccagcacccgaacctgggccctgcccacctacaacaaccacctctacaagcaaatctccaacgggacctcgggaggcagcaccaacgacaacacctactttggctacagcaccccctgggggtatcttgactttaacagattccactgccacttctcaccacgtgactggcagcgactcatcaacaacaactggggattccggcccaagagactcagcttcaagctcttcaacatccaggtcaaagaggtcacgcagaatgaaggcaccaagaccatcgccaataacctcgccagcaccatccaggtgtttacggactcggaataccagccgccgtacgtcctcggctctgcccaccagggctgcctgcctccgttcccggcggacgtcttcatgattcctcagtacggctacctgactctcaacaacggtagtcaggccgtgggacgttcctccttctactgcctggagtacttcccctctcagatgctgagaacgggcaacaacttttccttcagctacactttcgaggacgtgcctttccacagcagctacgcgcacagccagagtttggacaggctgatgaatcctctcatcgaccagtacctgtactacctgtcaagaacccagtctacgggaggcacagcgggaacccagcagttgctgttttctcgggccgggcctagcaacatgtcggctcaggccagaaactggctgcctggaccctgctacagacagcagcgcgtctccacgacactgtcgcaaaacaacaacagcaactttgcctggactggtgccaccaagtatcatctgaacggcagagactctctggtgaatccgggcgtcgccatggcaaccaacaaggacgacgaggaccgcttcttcccatccagcggcatcctcatgtttggcaagcagggagctggaaaagacaacgtggactatagcaacgtgatgctaaccagcgaggaagaaatcaagaccaccaaccccgtggccacagaacagtatggcgtggtggctgataacctacagcagcaaaacaccgctcctactgtgggggccgtcaacagccagggagccttacctggcatggtctggcagaaccgggacgtgtacctgcagggtcctatttgggccaagattcctcacacagatggcaactttcacccgtctcctttaatgggcggctttggacttaaacatccgcctcctcagatcctcatcaaaaacactcctgttcctgcggatcctccaacagcgttcaaccaggccaagctgaattctttcatcgcgcagtacagcaccggacaagtcagcgtggagatcgagtgggagctgcagaaggagaacagcaagcgctggaacccagagattcagtatacttccaactactacaaatctacaaatgcggactttgctgttaatactgagggtgtttactctgagcctcgccccattggcactcgttacctcacccgtaatctgtaa

SEQ ID NO: 4910 - DNA, 2208 bp, Adeno-associated virus
  source 1..2208: mol_type = other DNA
atggctgccgatggttatcttccagattggctcgaggacactctctctgaaggaataagacagtggtggaagctcaaacctggcccaccaccaccaaagcccgcagagcggcataaggacgacagcaggggtcttgtgcttcctgggtacaagtacctcggacccttcaacggactcgacaagggggagccggtcaacgaggcagacgccgcggccctcgagcacgacaaggcctacgaccggcagctcgacagcggagacaacccgtacctcaagtacaaccacgccgacgcagagtttcaggagcgccttaaagaagatacgtcttttgggggcaacctcggacgagcagtcttccaggcgaaaaagagggttcttgaacctctgggcctggttgaggagcctgttaagacggctccgggaaaaaagaggccggtagagcactctcctgtggagccagactcctcctcgggaaccggaaaagcgggccagcagcctgcaagaaaaagattaaattttggtcagactggagacgcagactccgtacctgacccccagcctctcggacagccaccagcagccccctctggtctgggatctactacaatggctacaggcagtggcgcaccaatggcagacaataacgagggtgccgatggagtgggtaattcctcaggaaattggcattgcgattcccaatggctgggcgacagagtcatcaccaccagcacccgaacctgggccctgcccacatacaacaaccacctctacaagcaaatctccagccaatcaggagccagcaacgacaaccactactttggctacagcaccccctgggggtattttgacttcaacagattccactgccacttttcaccacgtgactggcaaagactcgtcaacaacaaccggggattccggcccaaaagactcaacttcaagctctttaatattcaagtcaaagaggtcacgcagaatgacggtacgacgacgattgccaataaccttaccagcacggttcaggtgtttactgactcggagtaccagctcccgtacgtcctgggctcggcgcatcaaggatgcctcccgccgtttccagcggacgtcttcatggtcccacagtatggatacctcaccctgaacaacgggagtcaggcggtaggacgctcttccttttactgcctggagtactttccttctcagatgctgcgtactggaaacaactttcagttcagctacacttttgaagacgtgcctttccacagcagctacgctcacagccagagtctggatcggctgatgaatcctctgatcgaccagtacctgtattatctgaacaagacacaaacaaatagtggaactcttcagcagtctcggctactgtttagccaagctggaccaaccaacatgtctcttcaagctaaaaactggctgcctggaccttgctacagacagcagcgtctgtcaaaacaggcaaacgacaacaacaacagcaactttccctggactgcagctacaaagtatcatctaaatggccgggactcgttggttaatccaggaccagctatggccagtcacaaggatgacgaagaaaagtttttccccatgcatggaaccctgatatttggtaaacaaggaacaaatgccaacgacgcggatttggaaaatgtcatgattacagatgaagaagaaatcagggccaccaatcccgtggctacggagcagtacgggactgtgtcaaataatttgcaaaactcaaacactggtccaactactggaactgtcaatcaccaaggagcgttacctggtatggtgtggcaggatcgagacgtgtacctgcagggacccatttgggccaagattcctcacaccgatggacactttcatccttctccactgatgggaggttttggactcaaacacccgcctcctcagatcatgatcaaaaacactcccgttccagccaatcctcccacaaacttcagttctgccaagtttgcttctttcatcacacagtattccacgggacaggtcagcgtggagatcgagtgggagctgcagaaggagaacagcaaacgctggaatcccgaaattcagtacacttccaactacaacaagtctgttaatgtggactttactgtggacactaatggtgtgtattcagagcctcgccccattggcaccagatacctgactcgtaatctgtaa

SEQ ID NO: 4911 - protein, 735 aa, Adeno-associated virus
MAADGYLPDWLEDTLSEGIRQWWKLKPGPPPPKPAERHKDDSRGLVLPGYKYLGPFNGLDKGEPVNEADAAALEHDKAYDRQLDSGDNPYLKYNHADAEFQERLKEDTSFGGNLGRAVFQAKKRVLEPLGLVEEPVKTAPGKKRPVEHSPVEPDSSSGTGKAGQQPARKRLNFGQTGDADSVPDPQPLGQPPAAPSGLGSTTMATGSGAPMADNNEGADGVGNSSGNWHCDSQWLGDRVITTSTRTWALPTYNNHLYKQISSQSGASNDNHYFGYSTPWGYFDFNRFHCHFSPRDWQRLVNNNRGFRPKRLNFKLFNIQVKEVTQNDGTTTIANNLTSTVQVFTDSEYQLPYVLGSAHQGCLPPFPADVFMVPQYGYLTLNNGSQAVGRSSFYCLEYFPSQMLRTGNNFQFSYTFEDVPFHSSYAHSQSLDRLMNPLIDQYLYYLNKTQTNSGTLQQSRLLFSQAGPTNMSLQAKNWLPGPCYRQQRLSKQANDNNNSNFPWTAATKYHLNGRDSLVNPGPAMASHKDDEEKFFPMHGTLIFGKQGTNANDADLENVMITDEEEIRATNPVATEQYGTVSNNLQNSNTGPTTGTVNHQGALPGMVWQDRDVYLQGPIWAKIPHTDGHFHPSPLMGGFGLKHPPPQIMIKNTPVPANPPTNFSSAKFASFITQYSTGQVSVEIEWELQKENSKRWNPEIQYTSNYNKSVNVDFTVDTNGVYSEPRPIGTRYLTRNL

SEQ ID NO: 4912 - protein, 738 aa, Adeno-associated virus
MAADGYLPDWLEDNLSEGIREWWDLKPGAPKPKANQQKQDDGRGLVLPGYKYLGPFNGLDKGEPVNAADAAALEHDKAYDQQLKAGDNPYLRYNHADAEFQERLQEDTSFGGNLGRAVFQAKKRVLEPLGLVEEAAKTAPGKKRPVEPSPQRSPDSSTGIGKKGQQPAKKRLSFGQTGDSESVPDPQPIGEPPAGPSGLGSGTMAAGGGAPMADNNEGADGVGSSSGNWHCDSTWLGDRVITTSTRTWALPTYNNHLYKQISNGTSGGSTNDNTYFGYSTPWGYFDFNRFHCHFSPRDWQRLINNNWGFRPKRLSFKLFNIQVKEVTQNEGTKTIANNLTSTIQVFTDSEYQLPYVLGSAHQGCLPPFPADVFMIPQYGYLTLNNGSQAVGRSSFYCLEYFPSQMLRTGNNSEFSYTFEDVPFHSSYAHSQSLDRLMNPLIDQYLYYLSRTQSTGGTQGTQQLLFSQAGPANMSAQAKNWLPGPCYRQQRVSTTLSQNNNSNFAWTGATKYHLNGRDSLVNPGVAMATHKDDEERFFPSSGVLMFGKQGAGRDNVDYSSVMLTSEEEIKTTNPVATEQYGVVADNLQQTNTGPIVGNVNSQGALPGMVWQNRDVYLQGPIWAKIPHTDGNFHPSPLMGGFGLKHPPPQILIKNTPVPADPPTTFSQAKLASFITQYSTGQVSVEIEWELQKENSKRWNPEIQYTSNYYKSTNVDFAVNTEGTYSEPRPIGTRYLTRNL

SEQ ID NO: 4913 - DNA, 2217 bp, Adeno-associated virus
  source 1..2217: mol_type = other DNA
atggctgctgacggttatcttccagattggctcgaggacaacctctctgagggcattcgcgagtggtgggacctgaaacctggagcccccaagcccaaggccaaccagcagaagcaggacgacggccggggtctggtgcttcctggctacaagtacctcggacccttcaacggactcgacaagggggagcccgtcaacgcggcggacgcagcggccctcgagcacgacaaggcctacgaccagcagctcaaagcgggtgacaatccgtacctgcggtataaccacgccgacgccgagtttcaggagcgtctgcaagaagatacgtcttttgggggcaacctcgggcgagcagtcttccaggccaagaagcgggttctcgaacctctcggtctggttgaggaagctgctaagacggctcctggaaagaagagaccggtagaaccgtcacctcagcgttcccccgactcctccacgggcatcggcaagaaaggccagcagcccgctaaaaagagactgagctttggtcagactggcgactcagagtcagtccccgaccctcaaccaatcggagaaccaccagcaggcccctctggtctgggatctggtacaatggctgcaggcggtggcgctccaatggcagacaataacgaaggcgccgacggagtgggtagttcctcaggaaattggcattgcgattccacatggctgggcgacagagtcatcaccaccagcacccgaacctgggccctgcccacctacaacaaccacctctacaagcaaatatccaatgggacatcgggaggaagcaccaacgacaacacctacttcggctacagcaccccctgggggtattttgacttcaacagattccactgccacttctcaccacgtgactggcagcgactcatcaacaacaactggggattccggccaaaaagactcagcttcaagctcttcaacatccaggtcaaggaggtcacgcagaatgaaggcaccaagaccatcgccaataaccttaccagcacgattcaggtatttacggactcggaataccagctgccgtacgtcctcggctccgcgcaccagggctgcctgcctccgttcccggcggacgtcttcatgattccccagtacggctaccttacactgaacaatggaagtcaagccgtaggccgttcctccttctactgcctggaatattttccatctcaaatgctgcgaactggaaacaattctgaattcagctacaccttcgaggacgtgcctttccacagcagctacgcacacagccagagcttggaccgactgatgaatcctctcatcgaccagtacctgtactacttatccagaactcagtccacaggaggaactcaaggtacccagcaattgttattttctcaagctgggcctgcaaacatgtcggctcaggctaagaactggctacctggaccttgctaccggcagcagcgagtctctacgacactgtcgcaaaacaacaacagcaactttgcttggactggtgccaccaaatatcacctgaacggaagagactctttggtaaatcccggtgtcgccatggcaacccacaaggacgacgaggaacgcttcttcccgtcgagtggagtcctgatgtttggaaaacagggtgctggaagagacaatgtggactacagcagcgttatgctaaccagcgaagaagaaattaaaaccactaaccctgtagccacagaacaatacggtgtggtggctgacaacttgcagcaaaccaatacagggcctattgtgggaaatgtcaacagccaaggagccttacctggcatggtctggcagaaccgagacgtgtacctgcagggtcccatctgggccaagattcctcacacggacggcaacttccacccttcaccgctaatgggaggatttggactgaagcacccacctcctcagatcctgatcaagaacacgccggtacctgcggatcctccaacaacgttcagccaggcgaaattggcttccttcattacgcagtacagcaccggacaggtcagcgtggaaatcgagtgggagctgcagaaggagaacagcaaacgctggaacccagagattcagtacacttcaaactactacaaatctacaaatgtggactttgctgtcaatacagagggaacttattctgagcctcgccccattggtactcgttacctcacccgtaatctgtaa

SEQ ID NO: 4914 - protein, 738 aa, Adeno-associated virus
MAADGYLPDWLEDNLSEGIREWWDLKPGAPKPKANQQKQDDGRGLVLPGYKYLGPFNGLDKGEPVNAADAAALEHDKAYDQQLKAGDNPYLRYNHADAEFQERLQEDTSFGGNLGRAVFQAKKRVLEPLGPVEEAAKTAPGKKRPVEPPPQRSPDSSTGIGKKGQQPAKKRLNFGQTGDSESVPDPQPIGEPPAGPSGLGSGTMAAGGGAPMADNNEGADGVGSSSGNWHCDSTWLGDRVITTSTRTWALPTYNNHLYKQISNGTSGGSTNDNTYFGYSTPWGYFDFNRFHCHFSPRDWQRLINNNWGFRPKRLSFKLFNIQVKEVTQNEGTKTVANNLTSTIQVFTDSEYQLPYVLGSAHQGCLPPFPADVFMIPQYGYLTLNNGSQAVGRSSFYCLEYFPSQMLRTGNNFEFSYTFEDVPFHSSYAHSQSLDRLMNPLIDQYLYYLSRTQSTGGTQGTQQLLFSQAGPANMSAQAKNWLPGPCYRQQRVSTTLSQNNNSNFAWTGATKYHLNGRDSLVNPGVAMATHKDDEERFFPSSGVLMFGKQGAGRDNVDYSSVMLTSEEEIKTTNPVATEQYGVVADNLQQTNTGPIVGNVNSQGALPGMVWQNRDVYLQGPIWAKIPHTDGNFHPSPLMGGFGLKHPPPQILIKNTPVPADPPTTFSQAKLASFITQYSTGQVSVEIEWELQKENSKRWNPEIQYTSNYYKSTNVDFAVNTEGTYSEPRPIGTRYLTRNL

SEQ ID NO: 4915 - DNA, 2217 bp, Adeno-associated virus
  source 1..2217: mol_type = other DNA
atggctgctgacggttatcttccagattggctcgaggacaacctctctgagggcattcgcgagtggtgggacctgaaacctggagcccccaagcccaaggccaaccagcagaagcaggacgacggccggggtctggtgcttcctggctacaagtacctcggacccttcaacggactcgacaagggggagcccgtcaacgcggcggacgcagcggccctcgagcacgacaaggcctacgaccagcagctcaaagcgggtgacaatccgtacctgcggtataaccacgccgacgccgagtttcaggagcgtctacaagaagatacgtcttttgggggcaacctcgggcgagcagtcttccaggccaagaagcgggttctcgaacctctcggtccggttgaggaagctgctaagacggctcctggaaagaagagaccggtagaaccgccacctcagcgttcccccgactcctccacgggcatcggcaagaaaggccagcagcccgctaaaaagagactgaactttggtcagactggcgactcagagtcagtccccgaccctcaaccaatcggagaaccaccagcaggcccctctggtctgggatctggtacaatggctgcaggcggtggcgctccaatggcagacaataacgaaggcgccgacggagtgggtagttcctcaggaaattggcattgcgattccacatggctgggcgacagagtcatcaccaccagcacccgaacctgggccctgcccacctacaacaaccacctctacaagcaaatatccaatgggacatcgggaggaagcaccaacgacaacacctacttcggctacagcaccccctgggggtattttgacttcaacagattccactgccacttctcaccacgtgactggcagcgactcatcaacaacaactggggattccggccaaaaagactcagcttcaagctcttcaacatccaggtcaaggaggtcacgcagaatgaaggcaccaagaccgtcgccaataaccttaccagcacgattcaggtatttacggactcggaataccagctgccgtacgtcctcggctccgcgcaccagggctgcctgcctccgttcccggcggacgtcttcatgattccccagtacggctaccttacactgaacaatggaagtcaagccgtaggccgttcctccttctactgcctggaatattttccatctcaaatgctgcgaactggaaacaattttgaattcagctacaccttcgaggacgtgcctttccacagcagctacgcacacagccagagcttggaccgactgatgaatcctctcatcgaccagtacctgtactacttatccagaactcagtccacaggaggaactcaaggtacccagcaattgttattttctcaagctgggcctgcaaacatgtcggctcaggctaagaactggctacctggaccttgctaccggcagcagcgagtctctacgacactgtcgcaaaacaacaacagcaactttgcttggactggtgccaccaaatatcacctgaacggaagagactctttggtaaatcccggtgtcgccatggcaacccacaaggacgacgaggaacgcttcttcccgtcgagtggagtcctgatgtttggaaaacagggtgctggaagagacaatgtggactacagcagcgttatgctaaccagcgaagaagaaattaaaaccactaaccctgtagccacagaacaatacggtgtggtggctgacaacttgcagcaaaccaatacagggcctattgtgggaaatgtcaacagccaaggagccttacctggcatggtctggcagaaccgagacgtgtacctgcagggtcccatctgggccaagattcctcacacggacggcaacttccacccttcaccgctaatgggaggatttggactgaagcacccacctcctcagatcctgatcaagaacacgccggtacctgcggatcctccaacaacgttcagccaggcgaaattggcttccttcattacgcagtacagcaccggacaggtcagcgtggaaatcgagtgggagctgcagaaggagaacagcaaacgttggaacccagagattcagtacacttcaaactactacaaatctacaaatgtggactttgctgtcaatacagagggaacttattctgagcctcgccccattggtactcgttacctcacccgtaatctgtaa

SEQ ID NO: 4916 - protein, 738 aa, Adeno-associated virus
MAADGYLPDWLEDNLSEGIREWWDLKPGAPKPKANQQKQDDGRGLVLPGYKYLGPFNGLDKGEPVNAADAAALEHDKAYDQQLKAGDNPYLRYNHADAEFQERLQEDTSFGGNLGRAVFQAKKRVLEPLGLVEEAAKTAPGKKRPVEPSPQRSPDSSTGIGKKGQQPAKKRLNFGQTGDSESVPDPQPIGEPPAGPSGLGSGTMAAGGGAPMADNNEGADGVGSSSGNWHCDSTWLGDRVITTSTRTWALPTYNNHLYKQISNGTSGGSTNDNTYFGYSTPWGYFDFNRFHCHFSPRDWQRLINNNWGFRPKRLSFKLFNIQVKEVTQNEGTKTIANNLTSTIQVFTDSEYQLPYVLGSAHQGCLPPFPADVFMIPQYGYLTLNNGSQAVGRSSFYCLEYFPSQMLRTGNNFEFSYTFEDVPFHSSYAHSQSLDRLMNPLIDQYLYYLSRTQSTGGTQGTQQLLFSQAGPANMSAQAKNWLPGPCYRQQRVSTTLSQSNNSNFAWTGATKYHLNGRDSLVNPGVAMATHKDDEERFFPSSGVLMFGKQGAGRDNVDYSSVMLTSEEEIKTTNPVATEQYGVVADNLQQTNTGPIVGNVNSQGALPGMVWQNRDVYLQGPIWAKIPHTDGNFHPSPLMGGLGLKHPPPQILIKNTPVPADPPTTFSQAKLASFITQYSTGQVSVEIEWELQKENSKRWNPEIQYTSNYYKSTNVDFAVNTEGTYSEPRPIGTRYLTRNL

SEQ ID NO: 4917 - DNA, 2217 bp, Adeno-associated virus
  source 1..2217: mol_type = other DNA
atggctgctgacggttatcttccagattggctcgaggacaacctctctgagggcattcgcgagtggtgggacctgaaacctggagcccccaagcccaaggccaaccagcagaagcaggacgacggccggggtctggtgcttcctggctacaagtacctcggacccttcaacggactcgacaagggggagcccgtcaacgcggcggacgcagcggccctcgagcacgacaaggcctacgaccagcagctcaaagcgggtgacaatccgtacctgcggtataaccacgccgacgccgagtttcaggagcgtctgcaagaagatacgtcttttgggggcaacctcgggcgagcagtcttccaggccaagaagcgggttctcgaacctctcggtctggttgaggaagcggctaagacggctcctggaaagaagagaccggtagaaccgtcacctcagcgttcccccgactcctccacgggcatcggcaagaaaggccagcagcccgctaaaaagagactgaactttggtcagactggcgactcagagtcagtccccgaccctcaaccaatcggagaaccaccagcaggcccctctggtctgggatctggtacaatggctgcaggcggtggcgctccaatggcagacaataacgaaggcgccgacggagtgggtagttcctcaggaaattggcattgcgattccacatggctgggcgacagagtcatcaccaccagcacccgaacctgggccctgcccacctacaacaaccacctctacaagcaaatatccaatgggacatcgggaggaagcaccaacgacaacacctacttcggctacagcaccccctgggggtattttgacttcaacagattccactgccacttctcaccacgtgactggcagcgactcatcaacaacaactggggattccggccaaaaagactcagcttcaagctcttcaacatccaggtcaaggaggtcacgcagaatgaaggcaccaagaccatcgccaataaccttaccagcacgattcaggtatttacggactcggaataccagctgccgtacgtcctcggctccgcgcaccagggctgcctgcctccgttcccggcggacgtcttcatgattccccagtacggctaccttacactgaacaatggaagtcaagccgtaggccgttcctccttctactgcctggaatattttccatctcaaatgctgcgaactggaaacaattttgaattcagctacaccttcgaggacgtgcctttccacagcagctacgcacacagccagagcttggaccgactgatgaatcctctcatcgaccagtacctgtactacttatccagaactcagtccacaggaggaactcaaggtacccagcaattgttattttctcaagctgggcctgcaaacatgtcggctcaggctaagaactggctacctggaccttgctaccggcagcagcgagtctctacgacactgtcgcaaagcaacaacagcaactttgcttggactggtgccaccaaatatcacctgaacggaagagactctttggtaaatcccggtgtcgccatggcaacccacaaggacgacgaggaacgcttcttcccgtcgagtggagtcctgatgtttggaaaacagggtgctggaagagacaatgtggactacagcagcgttatgctaaccagcgaagaagaaattaaaaccactaaccctgtagccacagaacaatacggtgtggtggctgacaacttgcagcaaaccaatacagggcctattgtgggaaatgtcaacagccaaggagccttacctggcatggtctggcagaaccgagacgtgtacctgcagggtcccatctgggccaagattcctcacacggacggcaacttccacccttcaccgctaatgggaggacttggactgaagcacccacctcctcagatcctgatcaagaacacgccggtacctgcggatcctccaacaacgttcagccaggcgaaattggcttccttcattacgcagtacagcaccggacaggtcagcgtggaaatcgagtgggagctgcagaaggagaacagcaaacgctggaacccagagattcagtacacttcaaactactacaaatctacaaatgtggactttgctgtcaatacagagggaacttattctgagcctcgccccattggtactcgttacctcacccgtaatctgtaa

SEQ ID NO: 4918 - protein, 737 aa, Adeno-associated virus
MAADGYLPDWLEDNLSEGIREWWDLKPGAPKPKANQQKQDDGRGLVLPGYKYLGPFNGLDKGEPVNAADAAALEHDKAYDQQLKAGDNPYPRYNHADAEFQERLQEDTPFGGNLGRAVFQAKKRVLEPLGLVEEAAKTAPGKKRPVEPSPQRSPDSSTGIGKKGQQPAKKRLNFGQTGDSESVPDPQPIGEPPAGPSGLGSGTMAAGGGAPMADNNEGADGVGNASGNWHCDSTWLGDRVITTSTRTWALPTYNNHLYKQISSASTGASNDNHYFGYSTPWGYFDFNRFHCHFSPRDWQRLINNNWGFRPKRLNFKLFNIQVKEVTTNDGVTTIANNLTSTVQVFSDSEYQLPYVLGSAHQGCLPPFPADVFMIPQYGYLTLNNGSQAVGRSSFYCLEYFPSQMLRTGNNFTFSYTFEEVPLHSSYAHSQSLDRLMNPLIVQYLYYLNRTQNQSGSAQNKDLLFSRGSPAGMSVQPKNWLPGPCYRQQRVSKTKTDNNNSNFTWTGASKYNLNGRESIINPGTAMASHKDDEDKFFPMSGVMIFGKESAGASNTALDNVMITDEEEIKATNPVATERFGTVAVNFQSSSTDPATGDVHAMGALPGMVWQDRDVYLQGPIWAKIPHTDGHFHPSPLMGGFGLKNPPPQILIKNTPVPANPPAEFSATKFASFITQYSTGQVSVEIEWELQKENSKRWNPEVQYTSNYAKSASVDFTVDNNGLYTEPRPIGTRYLTRPL

SEQ ID NO: 4919 - protein, 737 aa, Adeno-associated virus
MAADGYLPDWLEDNLSEGIREWWDLKPGAPKPKANQQKQDDGRGLVLPGYKYLGPFNGLDKGEPVNAADAAALEHDKAYDQQLKAGDNPYPRYNHADAEFQERLQEDTSFGGNLGRAVFQAKKRVLEPLGLVEEAAKTAPGKKRPVEPSPQRSPDSSTGIGKKGQQPAKKRLNFGQTGDSESVPDPQPIGEPPAGPSGLGSGTMAAGGGAPMADNNEGADGVGNASGNWHCDSTWLGDRVITTSTRTWALPTYNNHLYKQISSASTGASNDNHYFGYSTPWGYFDFNRFHCHFSPRDWQRLINNNWGFRPKRLNFKLFNIQVKEVTTNDGVTTIANNLTSTVQVFSDSEYQLPYVLGSAHQGCLPPFPADVFMIPQYGYLTLNNGSQAVGRSSFYCLEYFPSQMLRTGNNFTFSYTFEEVPLHSSYAHSQSLDRLMNPLIDQYLYYLNRTQNQSGSAQNKDLLFSRGSPAGMSVQPKNWLPGPCYRQQRVSKTKTDNNNSNFTWTGASKYNLNGRESIINPGTAMASHKDDEDKFFPMSGVMIFGKESAGASNTALDNVMITDEEEIKATNPVATERFGTVAVNFQSSSTDPATGDVHAMGALPGMVWQDRDVYLQGPIWAKIPHTDGHFHPSPLMGGFGLKNPPPQILIKNTPVPANPPAEFSATKFASFITQYSTGQVSVEIEWELQKENSKRWNPEVQYTSNYAKSASVDFTVDNNGLYTEPRPIGTRYLTRPL

SEQ ID NO: 4920 - DNA, 2214 bp, Adeno-associated virus
  source 1..2214: mol_type = other DNA
atggctgctgacggttatcttccagattggctcgaggacaacctctctgagggcattcgcgagtggtgggacctgaaacctggagcccccaagcccaaggccaaccagcagaagcaggacgacggccggggtctggtgcttcctggctacaagtacctcggacccttcaacggactcgacaagggggagcccgtcaacgcggcggacgcagcggccctcgagcacgacaaggcctacgaccagcagctcaaagcgggtgacaatccgtacccgcggtataaccacgccgacgccgagtttcaggagcgtctgcaagaagatacgccttttgggggcaacctcgggcgagcagtcttccaggccaagaagcgggttctcgaacctctcggtctggttgaggaagctgctaagacggctcctggaaagaagagaccggtagaaccgtcacctcagcgttcccccgactcctccacgggcatcggcaagaaaggccagcagcccgctaaaaagagactgaactttggtcagactggcgactcagagtcagtccccgaccctcaaccaatcggagaaccaccagcaggcccctctggtctgggatctggtacaatggctgcaggcggtggcgctccaatggcagacaataacgaaggcgccgacggagtgggtaatgcctcaggaaattggcattgcgattccacatggctgggcgacagagtcatcaccaccagcacccgcacctgggccttgcccacctacaataaccacctctacaagcaaatctccagtgcttcaacgggggccagcaacgacaaccactacttcggctacagcaccccctgggggtattttgatttcaacagattccactgccacttttcaccacgtgactggcagcgactcatcaacaacaattggggattccggcccaagagactcaacttcaaactcttcaacatccaagtcaaggaggtcacgacgaatgatggcgtcacaaccatcgctaataaccttaccagcacggttcaagtcttctcggactcggagtaccagcttccgtacgtcctcggctctgcgcaccagggctgcctccctccgttcccggcggacgtgttcatgattccgcaatacggctacctgacgctcaacaatggcagccaagccgtgggacgttcatccttttactgcctggaatatttcccttctcagatgctgagaacgggcaacaactttaccttcagctacacctttgaggaagtgcctctccacagcagctacgcgcacagccagagcctggaccggctgatgaatcctctcatcgtccaatacctgtattacctgaacagaactcaaaatcagtccggaagtgcccaaaacaaggacttgctgttcagccgtgggtctccagctggcatgtctgttcagcccaaaaactggctacctggaccctgttatcggcagcagcgcgtttctaaaacaaaaacagacaacaacaacagcaattttacctggactggtgcttcaaaatataacctcaatgggcgtgaatccatcatcaaccctggcactgctatggcctcacacaaagacgacgaagacaagttctttcccatgagcggtgtcatgatttttggaaaagagagcgccggagcttcaaacactgcattggacaatgtcatgattacagacgaagaggaaattaaagccactaaccctgtggccaccgaaagatttgggaccgtggcagtcaatttccagagcagcagcacagaccctgcgaccggagatgtgcatgctatgggagcattacctggcatggtgtggcaagatagagacgtgtacctgcagggtcccatttgggccaaaattcctcacacagatggacactttcacccgtctcctcttatgggcggctttggactcaagaacccgcctcctcagatcctcatcaaaaacacgcctgttcctgcgaatcctccggcggagttttcagctacaaagtttgcttcattcatcacccaatactccacaggacaagtgagtgtggaaattgaatgggagctgcagaaagaaaacagcaagcgctggaatcccgaagtgcagtacacatccaattatgcaaaatctgccagcgttgattttactgtggacaacaatggactttatactgagcctcgccccattggcacccgttaccttacccgtcccctgtaa

SEQ ID NO: 4921 - protein, 736 aa, Adeno-associated virus
MAADGYLPDWLEDTLSEGIRQWWKLRPGPPPPKPAERHKDDSRGLVLPGYKYLGPFNGLDKGEPVNEADAAALEHDKAYDRQLDSGDNPYLKYNHADAEFQERLKEDTSFGGNLGRAVFQAKKRVLEPLGLVEEGAETAPGKKRPVEQSPQGPDSSSGIGKTGQQPAKKRLNFGQTGDSESVPDPQPLGEPPATPAAVGPTTMASGGGAPMADNNEGADGVGNASGNWHCDSTWLGDRVITTSTRTWALPTYNNHLYKQISSASTGASNDNHYFGYSTPWGYFDFNRFHCHFSPRDWQRLINNNWGFRPKRLNFKLFNIQVKEVTTNDGVTTIANNLTSTVQVFSDSEYQLPYVLGSAHQGCLPPFPADVFMIPQYGYLTLNNGSQAVGRSSFYCLEYFPSQMLRTGNNFTFSYTFEEVPFHSSYAHSQSLDRLMNPLIDQYLYYPNRTQNQSGSAQNKDLLFSRGSPAGMSVQPKNWLPGPCYRQQRVSKTKTDNNNSNFTWTGASKYNLNGRESIINPGTAMASHKDDEDKFFPMSGVMIFGKESAGASNTALDNVMITDEEEIKATNPVATERFGTVAVNFQSSSTDPATGDVHAMGALPGMVWQGRDVYLQGPIWAKIPHTDGHFHPSPLMGGFGLKNPPPQILIKNTPVPANPPAEFSATKFASFITQYSTGQVSVEIEWELQKENSKRWNPEVQYTSNYAKSANVDFTVDNNGLYTEPRPIGTRYLTRPL

SEQ ID NO: 4922 - DNA, 2211 bp, Adeno-associated virus
  source 1..2211: mol_type = other DNA
atggctgccgatggttatcttccagattggctcgaggacactctctctgaaggaataagacagtggtggaagctcagacctggcccaccaccaccaaagcccgcagagcggcataaggacgacagcaggggtcttgtgcttcctgggtacaagtacctcggacccttcaacggactcgacaagggagagccggtcaacgaggcagacgccgcggccctcgagcacgacaaagcctacgaccggcagctcgacagcggagacaacccgtacctcaagtacaaccacgccgacgcggagtttcaggagcgccttaaagaagatacgtcttttgggggcaacctcgggcgagcagtcttccaggccaagaagcgggttctcgaacctctcggtctggttgaggaaggcgctgagacggctcctggaaagaaacgtccggtagagcagtcgccacaagggccagactcctcctcgggcatcggcaagacaggccagcagcccgctaaaaagagactcaattttggtcagactggcgactcagagtcagtccccgatccacaacctctcggagaacctccagcaacccccgctgctgtgggacctactacaatggcttcaggcggtggcgcaccaatggcagacaataacgaaggcgccgacggagtgggtaatgcctcaggaaattggcattgcgattccacatggctgggcgacagagtcatcaccaccagcacccgcacctgggccttgcccacctacaataaccacctctacaagcaaatctccagtgcttcaacgggggccagcaacgacaaccactacttcggctacagcaccccctgggggtattttgatttcaacagattccactgccacttttcaccacgtgactggcagcgactcatcaacaacaattggggattccggcccaagagactcaacttcaaactcttcaacatccaagtcaaggaggtcacgacgaatgatggcgtcacaaccatcgctaataaccttaccagcacggttcaagtcttctcggactcggagtaccagcttccgtacgtcctcggctctgcgcaccagggctgcctccctccgttcccggcggacgtgttcatgattccgcaatacggctacctgacgctcaacaatggcagccaagccgtgggacgttcatccttttactgcctggaatatttcccttctcagatgctgagaacgggcaacaactttaccttcagctacacctttgaggaagtgcctttccacagcagctacgcgcacagccagagcctggaccggctgatgaatcctctcatcgaccaatacctgtattacccgaacagaactcaaaatcagtccggaagtgcccaaaacaaggacttgctgtttagccgtgggtctccagctggcatgtctgttcagcccaaaaactggctacctggaccctgttatcggcagcagcgcgtttctaaaacaaaaacagacaacaacaacagcaattttacctggactggtgcttcaaaatataacctcaatgggcgtgaatccatcatcaaccctggcactgctatggcctcacacaaagacgacgaagacaagttctttcccatgagcggtgtcatgatttttggaaaagagagcgccggagcttcaaacactgcattggacaatgtcatgattacagacgaagaggaaattaaagccactaaccctgtggccaccgaaagatttgggaccgtggcagtcaatttccagagcagcagcacagaccctgcgaccggagatgtgcatgctatgggagcattacctggcatggtgtggcaaggtagagacgtgtacctgcagggtcccatttgggccaaaattcctcacacagatggacactttcacccgtctcctcttatgggcggctttggactcaagaacccgcctcctcagatcctcatcaaaaacacgcctgttcctgcgaatcctccggcggagttttcagctacaaagtttgcttcattcatcacccaatactccacaggacaagtgagtgtggaaattgaatgggagctgcagaaagaaaacagcaagcgctggaatcccgaagtgcagtacacatccaattatgcaaaatctgccaacgttgattttactgtggacaacaatggactttatactgagcctcgccccattggcacccgttaccttacccgtcccctgtaa

SEQ ID NO: 4923 - protein, 736 aa, Adeno-associated virus
MAADGYLPDWLEDTLSEGIRQWWKLRPGPPPPKPAERHKDDSRGLVLPGYKYLGPFNGLDKGEPVNEADAAALEHDKAYDRQLDSGDNPYLKYNHADAEFQERLKEDTSFGGNLGRAVFQAKKRVLEPLGLVEEGAKTAPGKKRPVEQSPQGPDSSSGIGKTGQQPAKKRLNFGQTGDSESVPDPQPLGEPPATPAAVGPTTMASGGGAPMADNNEGADGVGNASGNWHCDSTWLGDRVITTSTRTWALPTYNNHLYKQISSASTGASNDNHYFGYSTPWGYFDFNRFHCHFSPRDWQRLINNNWGFRPKRLNFKLFNIQVKEVTTNDGVTTIANNLTSTVQVFSDSEYQLPYVLGSAHQGCLPPFPADVFMIPQYGYLTLNNGSQAVGRSSFYCLEYFPSQMLRTGNNFTFSYTFEEVPFHSSYAHSQSLDRLMNPLIDQYLYYPNRTQNQSGSAQNKDLLFSRGSPAGMSVQPKNWLPGPCYRQQRVSKTKTDNNNSNFTWTGASKYNLNGRESIINPGTAMASHKDDEDKFFPMSGVMIFGKESAGASNTALDNVMITDEEEIKATNPVATERFGTVAVNFQSSSTDPATGDVHAMGALPGMVWQGRDVYLQGPIWAKIPHTDGHFHPSPLMGGFGLKNPPPQILIKNTPVPANPPAEFSATKFASFITQYSTGQVSVEIEWELQKENSKRWNPEVQYTSNYAKSANVDFTVDNNGLYTEPRPIGTRYLTRPL

SEQ ID NO: 4924 - protein, 736 aa, Adeno-associated virus
MAADGYLPDWLEDTLSEGIRQWWKLRPGPPPPKPAERHKDDSRGLVLPGYKYLGPFNGLDKGEPVNEADAAALEHDKAYDRQLDSGDNPYLKYNHADAEFQERLKEDTSFGGNLGRAVFQAKKRVLEPLGLVEEGAKTAPGKKRPVEQSPQGPDSSSGIGKTGQQPAKKRLNFGQTGDSESVPDPQPLGEPPATPAAVGPTTMASGGGAPMADNNEGADGVGNASGNWHCDSTWLGDRVITTSTRTWALPTYNNHLYKQISSASTGASNDNHYFGYSTPWGYFDFNRFHCHFSPRDWQRLINNNWGFRPKRLNFKLFNIQVKEVTTNDGVTTIANNLTSTVQVFSDSEYQLPYVLGSAHQGCLPPFPADVFMIPQYGYLTLNNGSQAVGRSSFYCLEYFPSQMLRTGNNFTFSYTFEEVPFHSSYAHSQSLDRLMNPLIDQYLYYLNRTQNQSGSAQNKDLLFSRGSPAGMSVQPKNWLPGPCYRQQRVSKTKTDNNNSNFTWTGASKYNLNGRESIINPGTAMASHKDDEDKFFPMSGVMIFGKESAGASNTALDNVMITDEEEIKATNPVATERFGTVAVNFQSSSTDPATGDVHAMGALPGMVWQGRDVYLQGPIWAKIPHTDGHFHPSPLMGGFGLKNPPPQILIKNTPVPANPPAEFSATKFASFITQYSTGQVSVEIEWELQKENSKRWNPEVQYTSNYAKSANVDFTVDNNGLYTEPRPIGTRYLTRPL

SEQ ID NO: 4925 - protein, 736 aa, Adeno-associated virus
MAADGYLPDWLEDTLSEGIRQWWKLRPGPPPPKPAERHKDDSRGLVLPGYKYLGPFNGLDKGEPVNEADAAALEHDKAYDRQLDSGDNPYLKYNHADAEFQERLKEDTSFGGNLGRAVFQAKKRVLEPLGLVEEGAKTAPGKKRPVEQSPQGPDSSSGIGKTGQQPAKKRLNFGQTGDSESVPDPQPLGEPPATPAAVGPTTMASGGGAPMADNNEGADGVGNASGNWHCDSTWLGDRVITTSTRTWALPTYNNHLYKQISSASTGASNDNHYFGYSTPWGYFDFNRFHCHFSPRDWQRLINNNWGFRPKRLNFKLFNIQVKEVTTNDGVTTIANNLTSTVQVFSDSEYQLPYVLGSAHQGCLPPFPADVFMIPQYGYLTLNNGSQAVGRSSFYCLEYFPSQMLRTGNNFTFSYTFEEVPFHSSYAHSQSLDRLMNPLIDQYLYYLNRTQNQSGSAQNKDLLFSRGSPAGMSVQPKNWLPGPCYRQQRVSKTKTDNNNSNFTWTGASKYNLNGRESIINPGTAMASHKDDEDKFFPMSGVMIFGKESAGASNTALDNVMITDEEEIKATNPVATERFGTVAVNFQSSSTDPATGDVHAMGALPGMVWQDRDVYLQGPIWAKIPHTDGHFHPSPLMGGFGLKNPPPQILIKNTPVPANPPAEFSATKFASFITQYSTGQVSVEIEWELQKENSKRWNPEVQYTSNYAKSANVDFTVDNNGLYTEPRPIGTRYLTRPL

SEQ ID NO: 4926 - DNA, 2208 bp, Adeno-associated virus
  source 1..2208: mol_type = other DNA
atggctgccgatggctatcttccagattggctcgaggacactctctctgaaggaataagacagtggtggaagctcaaacctggcccaccaccaccaaagcccgcagagcggcatagggacgacagcaggggtcttgtgcttcctgggtacaagtacctcggacccttcaacggactcgacaagggagagccggtcaacgaggcagacgccgcggccctcgagcacgacaaagcctacgaccggcagctcgacagcggagacaacccgtacctcaagtacaaccacgccgacgcggagtttcaggagcgccttaaagaagatacgtcttttgggggcaacctcggacgagcagtcttccaggcgaaaaagagggttcttgaacctctgggcctggttgaggaacctgttaagacggctccgggaaaaaagaggccggtagagcactctcctgtggagccagactcctcctcgggaaccggaaaggcgggccagcagcctgcaagaaaaagattgaattttggtcagactggagacgcagactcagtacctgacccccagcctctcggacagccaccagcagccccctctggtctgggaactaatacgatggctacaggcagtggcgcaccaatggcagacaataacgagggcgccgacggagtgggtaattcctcgggaaattggcattgcgattccacatggatgggcgacagagtcatcaccaccagcacccgaacctgggccctgcccacctacaacaaccacctctacaaacaaatttccagccaatcaggagcctcgaacgacaatcactactttggctacagcaccccttgggggtattttgacttcaacagattccactgccacttttcaccacgtgactggcaaagactcatcaacaacaactggggattccgacccaagagactcaacttcaagctctttaacattcaagtcaaagaggtcacgcagaatgacggtacgacgacgattgccaataaccttaccagcacggttcaggtgtttactgactcggggtaccagctcccgtacgtcctcggctcggcgcatcaaggatgcctcccgccgttcccagcagacgtcttcatggtgccacagtatggataccccaccctgaacaacgggagtcaggcagtaggacgctcttcattttactgcctggagtactttccttctcagatgctgcgtaccggaaacaactttaccttcagctacacttttgaggacgttcctttccacagcagctacgctcacagccagagtctggaccgtctcatgaatcctctcatcgaccagtacctgtattacttgagcacaacaaacactccaagtggaaccaccacgcagtcaaggcttcagttttctcaggccggagcgagtgacattcgggaccagtctaggaactggcttcctggaccctgttaccgccagcagcgagtatcaaagacatctgcggataacaacaacagtgaatactcgtggactggagctaccaagtaccacctcaatggcagagactctctggtgaatccgggcccggccgtggcaagccacaaggacgatgaagaaaagttttttcctcagagcggggttctcatctttgggaagcaaggctcagagaaaacaaatgtggacattgaaaaggtcatgattacagacgaagaggaaatcaggacaaccaatcccgtggctacggagcagtatggttctgtatctaccaacctccagagaggcaacagacaagcagctaccgcagatgtcaacacacaaggcgttcttccaggcatggtctggcaggacagagatgtgtaccttcaggggcccatctgggcaaagattccacacacggacggacattttcacccctctcccctcatgggtggattcggacttaaacaccctcctccacagattctcatcaagaacaccccggtacctgcgaatccttcgaccaccttcagtgcggcaaagtttgcttccttcatcacacagtactccacgggacaggtcagcgtggagatcgagtgggagctgcagaaggaaaacagcaaacgctggaatcccgaaattcagtacacttccaactacaacaagtctgttaatgtggactttactgtggacactaatggcgtgtattcagagcctcgccccattggcaccagatacctgactcgtaatctgtaa

SEQ ID NO: 4927 - protein, 735 aa, Adeno-associated virus
MAADGYLPDWLEDTLSEGIRQWWKLKPGPPPPKPAERHRDDSRGLVLPGYKYLGPFNGLDKGEPVNEADAAALEHDKAYDRQLDSGDNPYLKYNHADAEFQERLKEDTSFGGNLGRAVFQAKKRVLEPLGLVEEPVKTAPGKKRPVEHSPVEPDSSSGTGKAGQQPARKRLNFGQTGDADSVPDPQPLGQPPAAPSGLGTNTMATGSGAPMADNNEGADGVGNSSGNWHCDSTWMGDRVITTSTRTWALPTYNNHLYKQISSQSGASNDNHYFGYSTPWGYFDFNRFHCHFSPRDWQRLINNNWGFRPKRLNFKLFNIQVKEVTQNDGTTTIANNLTSTVQVFTDSGYQLPYVLGSAHQGCLPPFPADVFMVPQYGYPTLNNGSQAVGRSSFYCLEYFPSQMLRTGNNFTFSYTFEDVPFHSSYAHSQSLDRLMNPLIDQYLYYLSTTNTPSGTTTQSRLQFSQAGASDIRDQSRNWLPGPCYRQQRVSKTSADNNNSEYSWTGATKYHLNGRDSLVNPGPAVASHKDDEEKFFPQSGVLIFGKQGSEKTNVDIEKVMITDEEEIRTTNPVATEQYGSVSTNLQRGNRQAATADVNTQGVLPGMVWQDRDVYLQGPIWAKIPHTDGHFHPSPLMGGFGLKHPPPQILIKNTPVPANPSTTFSAAKFASFITQYSTGQVSVEIEWELQKENSKRWNPEIQYTSNYNKSVNVDFTVDTNGVYSEPRPIGTRYLTRNL

SEQ ID NO: 4928 - DNA, 2211 bp, Adeno-associated virus
  source 1..2211: mol_type = other DNA
atggctgccgacggttatcttccagattggctcgaggacactctctctgaaggaataagacagtggtggaagctcaaacctggcccaccaccaccaaagcccgcagagcggcataaggacgacagcaggggtcttgtgcttcctgggtacaagtacctcggacccttcaacggactcgacaagggagagccggtcaacgaggcagacgccgcggccctcgagcacgacaaagcctacgaccggcagctcgacagcggagacaacccgtacctcaagtacaaccacgccgacgcggagtttcaggagcgccttaaagaagatacgtcttttgggggcaacctcgggcgggcagtcttccaggccaagaagcgggttctcgaacctctcggtctggttgaggaaggcgctaagacggctcctggaaagaaacgtccggtagagcagtcgccacaagagccagactccccctcgggcatcggcaagacaggccagcagcccgctaaaaagagactcaattttggtcagactggcgactcagagtcagtccccgatccacaacctctcggagaacctccagcaacccccgctgctgtgggacctactacaatggcttcaggcggtggcgcaccaatggcagacaataacgaaggcgccgacggagtgggtaatgcctcaggaaattggcactgcgattccacatggctgggcgacagagtcatcaccaccagcacccgcacctgggccttgcccacctacaataaccacctctacaagcaaatctccagtgcttcaacgggggccagcaacgacaaccactacttcggctacagcaccccctgggggtattttgatttcaacagattccactgccacttttcaccacgtgactggcagcgactcatcaacaacaattggggattccggcccaagagactcaacttcaaactcttcaacatccaagtcaaggaggtcacgacgaatgatggcgtcacaaccatcgctaataaccttaccagcacggttcaagtcttctcggactcggagtaccagcttccgtacgtcctcggctctgcgcaccagggccgcctccctccgttcccggcggacgtgttcatgattccgcaatacggctacctgacgctcaacaatggcagccaagccgtgggacgttcatcctcttactgcctggaatatttcccttctcagatgctgagaacgggcaacaactttaccttcagctacacctttgaggaagtgcctctccacagcagctgcgcgcacagccagagcctggaccggctgatgaatcctctcatcgaccaatacctgtattacctgaacagaactcaaaatcagtccggaagtgcccaaaacagggacttgctgttcagccgtgggtctccagctggcatgtctgttcagcccaaaaactggctacctggaccctgttatcggcagcagcgcgtttctaaaacaaaaacagacaacaacaacagcaattttacctggactggtgcttcaaaatataacctcaatgggcgtgaatccatcatcaaccctggcactgctatggcctcacacaaagacgacgaagacaagttctttcccatgagcggtgtcatgatttttggaaaagagagcgccggagcttcaaacactgcattggacaatgtcatgattacagacgaagaggaaattaaagccactaaccctgtggccaccgaaagatttgggaccgtggcagtcaatttccagagcagcagcacagaccctgcgaccggagatgtgcatgctatgggagcattacctggcatggtgtggcaagatagagacgtgtacctgcagggtcccatttgggccaaaattcctcacacagatggacactttcacccgtctcctcttatgggcggctttggactcaagaacccgcctcctcagatcctcatcaaaaacacgcctgttcctgcgaatcctccggcggagttttcagctacaaagtttgcttcattcatcacccaatactccgcaggacaagtgagtgtggaaattgaatgggagctgcagaaagaaaacagcaagcgctggaatcccgaagtgcagtacacatccaattatgcaaaatctgccaacgttgattttactgtggacaacaatggactttatactgagcctcgccccattggcacccgttaccttacccgtcccctgtaa

SEQ ID NO: 4929 - protein, 736 aa, Adeno-associated virus
MAADGYLPDWLEDTLSEGIRQWWKLKPGPPPPKPAERHKDDSRGLVLPGYKYLGPFNGLDKGEPVNEADAAALEHDKAYDRQLDSGDNPYLKYNHADAEFQERLKEDTSFGGNLGRAVFQAKKRVLEPLGLVEEGAKTAPGKKRPVEQSPQEPDSPSGIGKTGQQPAKKRLNFGQTGDSESVPDPQPLGEPPATPAAVGPTTMASGGGAPMADNNEGADGVGNASGNWHCDSTWLGDRVITTSTRTWALPTYNNHLYKQISSASTGASNDNHYFGYSTPWGYFDFNRFHCHFSPRDWQRLINNNWGFRPKRLNFKLFNIQVKEVTTNDGVTTIANNLTSTVQVFSDSEYQLPYVLGSAHQGRLPPFPADVFMIPQYGYLTLNNGSQAVGRSSSYCLEYFPSQMLRTGNNFTFSYTFEEVPLHSSCAHSQSLDRLMNPLIDQYLYYLNRTQNQSGSAQNRDLLFSRGSPAGMSVQPKNWLPGPCYRQQRVSKTKTDNNNSNFTWTGASKYNLNGRESIINPGTAMASHKDDEDKFFPMSGVMIFGKESAGASNTALDNVMITDEEEIKATNPVATERFGTVAVNFQSSSTDPATGDVHAMGALPGMVWQDRDVYLQGPIWAKIPHTDGHFHPSPLMGGFGLKNPPPQILIKNTPVPANPPAEFSATKFASFITQYSAGQVSVEIEWELQKENSKRWNPEVQYTSNYAKSANVDFTVDNNGLYTEPRPIGTRYLTRPL

SEQ ID NO: 4930 - protein, 736 aa, Adeno-associated virus
MAADGYLPDWLEDTLSEGIRQWWKLKPGPPPPKPAERHKDDSRGLVLPGYKYLGPFNGLDKGEPVNEADAAALEHDKAYDRQLDSGDNPYLKYNHADAEFQERLKEDTSFGGNLGRAVFQAKKRVLEPLGLVEEGAKTAPGKKRPVEQSPQEPDSSSGIGKTGQQPAKKRLNFGQTGDSESVPDPQPLGEPPATPAAVGPTTMASGGGAPMADNNEGADGVGNASGNWHCDSTWLGDRVITTSTRTWALPTYNNHLYKQISSASTGASNDNHYFGYSTPWGYFDFNRFHCHFSPRDWQRLINNNWGFRPKRLNFKLFNIQVKEVTTNDGVTTIANNLTSTVQVFSDSEYQLPYVLGSAHQGCLPPFPADVFMIPQYGYLTLNNGSQAVGRSSFYCLEYFPSQMLRTGNNFTFSYTFEEVPLHSSCAHSQSLDRLMNPLIDQYLYYLNRTQNQSGSAQNRDLLFSRGSPAGMSVQPKNWLPGPCYRQQRVSKTKTDNNNSNFTWTGASKYNLNGRESIINPGTAMASHKDDEDKFFPMSGVMIFGKESAGASNTALDNVMITDEEEIKATNPVATERFGTVAVNFQSSSTDPATGDVHAMGALPGMVWQDRDVYLQGPIWAKIPHTDGHFHPSPLMGGFGLKNPPPQILIKNTPVPANPPAEFSATKFASFITQYSTGQVSVEIEWELQKENSKRWNPEVQYTSNYAKSANVDFTVDNNGLYTEPRPIGTRYLTRPL

SEQ ID NO: 4931 - DNA, 2208 bp, Adeno-associated virus
  source 1..2208: mol_type = other DNA
atggctgccgatggctatcttccagattggctcgaggacactctctctgaaggaataagacagtggtggaagctcaaacctggcccaccaccaccaaagcccgcagagcggcatagggacgacagcaggggtcttgtgcttcctgggtacaagtacctcggacccttcaacggactcgacaagggagagccggtcaacgaggcagacgccgcggccctcgagcacgacaaagcctacgaccggcagctcgacagcggagacaacccgtacctcaagtacaaccacgccgacgcggagtttcaggagcgccttaaagaagatacgtcttttgggggcaacctcggacgagcagtcttccaggcgaaaaagagggttcttgaacctctgggcctggttggggaacctgttaagacggctccgggaaaaaagaggccggtagagcactctcctgtggagccagactcctcctcgggaaccggaaaggcgggccagcagcctgcaagaaaaagattgaattttggtcagactggagacgcagactcagtacctgacccccagcctctcggacagccaccagcagccccctctggtctgggaactaatacgatggctacaggcagtggcgcaccaatggcagacaataacgagggcgccgacggagtgggtaattcctcgggaaattggcattgcgattccacatggatgggcgacagagtcatcaccaccagcacccgaacctgggccctgcccacctacaacaaccacctctacaaacaaatttccagccaatcaggagcctcgaacgacagtcactactttggctacagcaccccttgggggtattttgacttcaacagattccactgccacttttcaccacgtgactggcaaagactcatcaacaacaactggggattccgacccaagagactcaacttcaagctctttaacattcaagtcaaagaggtcacgcagaatgacggtacgacgacgattgccaataaccttaccagcacggttcaggtgtttactgactcggagtaccagctcccgtacgtcctcggctcggcgcatcaaggatgcctcccgccgttcccagcagacgtcttcatggtgccacagtatggatacctcaccctgaacaacgggagtcaggcagtaggacgctcttcattttactgcctggagtactttccttctcagatgctgcgtaccggaaacaactttaccttcagctacacttttgaggacgttcctttccacagcagctacgctcacagccagagtctggaccgtctcatgaatcctctcatcgaccagtacctgtattacttgagcacaacaaacactccaagtggaaccaccacgcagtcaaggctccagttttctcaggccggagcgagtgacattcgggaccagtctaggaactggcttcctggaccctgttaccgccagcagcgagtatcaaagacatctgcggataacaacaacagtgaatactcgtggactggagctaccaagtaccacctcaatggcagagactctctggtgaatccgggcccggccatggcaagccacaaggacaatgaagaaaagttttttcctcagagcggggttctcatctttgggaagcaaggctcagagaaaacaaatgtggacattgaaaaggtcatgattacagacgaagaggaaatcaggacaaccaatcccgtggctacggagcagtatggttctgtatctaccaacctccagagaggcaacagacaagcagctaccgcagatgtcaacacacaaggcgttcttccaggcatggtctggcaggacagagatgtgtaccttcaggggcccatctgggcaaagattccacacacggacggacattttcacccctctcccctcatgggtggattcggacttaaacaccctcctccacagattctcatcaagaacaccccggtacctgcgaatccttcgaccaccttcagtgcggcaaagtttgcttccttcatcacacagtactccacgggacaggtcagcgtggagatcgagtgggagctgcagaaggaaaacagcaaacgctggaatcccgaaattcagtacacttccaactacaacaagtctgttaatgtggactttactgtggacactaatggcgtgtattcagagcctcgccccattggcaccagatacctgactcgtaatctgtaa

SEQ ID NO: 4932 - protein, 735 aa, Adeno-associated virus
MAADGYLPDWLEDTLSEGIRQWWKLKPGPPPPKPAERHRDDSRGLVLPGYKYLGPFNGLDKGEPVNEADAAALEHDKAYDRQLDSGDNPYLKYNHADAEFQERLKEDTSFGGNLGRAVFQAKKRVLEPLGLVGEPVKTAPGKKRPVEHSPVEPDSSSGTGKAGQQPARKRLNFGQTGDADSVPDPQPLGQPPAAPSGLGTNTMATGSGAPMADNNEGADGVGNSSGNWHCDSTWMGDRVITTSTRTWALPTYNNHLYKQISSQSGASNDSHYFGYSTPWGYFDFNRFHCHFSPRDWQRLINNNWGFRPKRLNFKLFNIQVKEVTQNDGTTTIANNLTSTVQVFTDSEYQLPYVLGSAHQGCLPPFPADVFMVPQYGYLTLNNGSQAVGRSSFYCLEYFPSQMLRTGNNFTFSYTFEDVPFHSSYAHSQSLDRLMNPLIDQYLYYLSTTNTPSGTTTQSRLQFSQAGASDIRDQSRNWLPGPCYRQQRVSKTSADNNNSEYSWTGATKYHLNGRDSLVNPGPAMASHKDNEEKFFPQSGVLIFGKQGSEKTNVDIEKVMITDEEEIRTTNPVATEQYGSVSTNLQRGNRQAATADVNTQGVLPGMVWQDRDVYLQGPIWAKIPHTDGHFHPSPLMGGFGLKHPPPQILIKNTPVPANPSTTFSAAKFASFITQYSTGQVSVEIEWELQKENSKRWNPEIQYTSNYNKSVNVDFTVDTNGVYSEPRPIGTRYLTRNL

SEQ ID NO: 4933 - protein, 737 aa, Adeno-associated virus
RMAADGYLPDWLEDNLSEGIREWWDLKPGAPKPKANQQKQDDGRGLVLPGYKYLGPFNGLDKGEPVNAADAAALEHDKAYDQQLKAGDNPYLRYNHADAEFQERLQEDTSFGGNLGRAVFQAKKRVLEPLGLVEEGAKTAPGKKRPVEQSPQEPDSSSGIGKTGQQPAKKRLNFGQTGDSESVPDPQPLGEPPATPAAVGPTTMASGGGAPMADNNEGADGVGNASGNWHCDSTWLGDRVITTSTRTWALPTYNNHLYKQISSTSTGASNDNHYFGYGTPWGYFDFNRFHCHFSPRDWQRLINNNWGFRPKRLNFKLFNIQVEEVTTNDGVTTIANNLTSTVQVFSDSEYQLPYVLGSAHQGCLPPFPADVFMIPQYGYLTLNNGSQAVGRSSFYCLEYFPSQMLRTGNNFTFSYTFEEVPFHSSYAHSQSLDRLMNPLIDQYLYYLNRTQNQSGSAQNKDLLFSRGSPAGMSVQPKNWLPGPCYRQQRVSKTKTDNNNSNFTWTGASKYNLNGRESIINPGTAVASHKDDEDKFFPMSGVMIFGKESAGASSTALDNVMITDEEEIKATNPVATERFGTVAVNFQSSSTDPATGDVHAMGALPGMVWQDRDVYLQGPIWAKIPHTDGHFHPSPLMGGFGLKNPPPQILIKNTPVPANPPAEFSATKFASFITQYSTGQVSVEIEWELQKENSKRWNPEVQYTSNYAKSANVDFTVDNNGLYTEPRPIGTRYLTRPL

SEQ ID NO: 4934 - protein, 736 aa, Adeno-associated virus
MAADGYLPDWLEDNLSEGIREWWDLKPGAPKPKANQQKQDDGRGLVLPGYKYLGPFNGLDKGEPVNAADAAALEHDKAYDQQLKAGDNPYLRYNHADAEFQERLQEDTSFGGNLGRAVFQAKKRVLEPLGLVEEGAKTAPGKKRPVEQSPQEPDSSSGIGKTGQQPAKKRLNFGQTGDSESVPDPQPLGEPPATPAAVGPTTMASGGGAPMADNNEGADGVGNASGNWHCDSTWLGDRVITTSTRTWALPTYNNHLYKQISSTSTGASNDNHYFGYGTPWGYFDFNRFHCHFSPRDWQRLINNNWGFRPKRLNFKLFNIQVEEVTTNDGVTTIANNLTSTVQVFSDSEYQLPYVLGSAHQGCLPPFPADVFMIPQYGYLTLNNGSQAVGRSSFYCLEYFPSQMLRTGNNFTFSYTFEEVPFHSSYAHSQSLDRLMNPLIDQYLYYLNRTQNQSGSAQNKDLLFSRGSPAGMSVQPKNWLPGPCYRQQRVSKTKTDNNNSNFTWTGASKYNLNGRESIINPGTAVASHKDDEDKFFPMSGVMIFGKESAGASSTALDNVMITDEEEIKATNPVATERFGTVAVNFQSSSTDPATGDVHAMGALPGMVWQDRDVYLQGPIWAKIPHTDGHFHPSPLMGGFGLKNPPPQILIKNTPVPANPPAEFSATKFASFITQYSTGQVSVEIEWELQKENSKRWNPEVQYTSNYAKSANVDFTVDNNGLYTEPRPIGTRYLTRPL

SEQ ID NO: 4935 - DNA, 2211 bp, Adeno-associated virus
  source 1..2211: mol_type = other DNA
atggctgccgatggttatcttccagattggctcgaggacaacctctctgagggcattcgcgagtggtgggacttgaaacctggagccccgaagcccaaagccaaccagcaaaagcaggacgacggccggggtctggtgcttcctggctacaagtacctcggacccttcaacggactcgacaagggggagcccgtcaacgcggcggacgcagcggccctcgagcacgacaaggcctacgaccagcagctcaaagcgggtgacaatccgtacctgcggtataaccacgccgacgccgagtttcaggagcgtctgcaagaagatacgtcttttgggggcaacctcgggcgagcagtcttccaggccaagaagcgggttctcgaacctctcggtctggttgaggaaggcgctaagacggctcctggaaagaaacgtccggtagagcagtcgccacaagagccagactcctcctcgggcatcggcaagacaggccagcagcccgctaaaaagagactcaattttggccagactggcgactcagagtcagtccccgatccacaacctctcggagaacctccagcaacccccgctgctgtgggacctactacaatggcttcaggcggtggcgcaccaatggcagacaataacgaaggcgccgacggagtgggtaatgcctcaggaaattggcattgcgattccacatggctgggcgacagagtcatcaccaccagcacccgcacctgggccttgcccacctacaataaccacctctacaagcaaatctccagtacttcaacgggggccagcaacgacaaccactacttcggctacggcaccccctgggggtattttgatttcaacagattccactgccacttttcaccacgtgactggcagcgactcatcaacaacaattggggattccggcccaagagactcaacttcaaactcttcaacatccaagtcgaggaggtcacgacgaatgatggcgtcacaaccatcgctaataaccttaccagcacggttcaagtcttctcggactcggagtaccagcttccgtacgtcctcggctctgcgcaccagggctgcctccctccgttcccggcggacgtgttcatgattccgcaatacggctacctgacgctcaacaatggcagccaagccgtgggacgttcatccttttactgcctggaatatttcccttctcagatgctgagaacgggcaacaactttaccttcagctacacctttgaggaagtgcctttccacagcagctacgcgcacagccagagcctggaccggctgatgaatcctctcatcgaccaatacctgtattacctgaacagaacacaaaatcagtccggaagtgcccaaaacaaggacttgctgtttagccgtgggtctccagctggcatgtctgttcagcccaaaaactggctacctggaccctgttatcggcagcagcgcgtttctaaaacaaaaacagacaacaacaacagcaattttacctggactggtgcttcaaaatataacctcaatgggcgtgaatccatcatcaaccctggcaccgctgtggcctcacacaaagacgacgaagacaagttctttcccatgagcggtgtcatgatttttggaaaagagagcgccggagcttcaagcactgcattggacaatgtcatgattacagacgaagaggaaattaaagccactaaccctgtggccaccgaaagatttgggaccgtggcagtcaatttccagagcagcagcacagaccctgcgaccggagatgtgcatgctatgggagcattacctggcatggtgtggcaagatagagacgtgtacctgcagggtcccatttgggccaaaattcctcacacagatggacactttcacccgtctcctcttatgggcggctttggactcaagaacccgcctcctcagatcctcatcaaaaacacgcctgttcctgcgaatcctccggcggagttttcagctacaaagtttgcttcattcatcacccaatactccacaggacaagtgagtgtggaaattgaatgggagctgcagaaagaaaacagcaagcgctggaatcccgaagtgcagtacacatccaattatgcaaaatctgccaacgttgattttactgtggacaacaatggactttatactgagcctcgccccattggcacccgttaccttacccgtcccctgtaa

SEQ ID NO: 4936 - protein, 737 aa, Adeno-associated virus
RMAADGYLPDWLEDNLSEGIREWWDLKPGAPKPKANQQKQDDGRGLVLPGYKYLGPFNGLDKGEPVNAADAAALEHDKAYDQQLKAGDNPYLRYNHADAEFQERLQEDTSFGGNLGRAVFQAKKRVLEPLGLVEEGAKTAPGKKRPVEQSPQEPDSSSGIGKTGQQPAKKRLNFGQTGDSESVPDPQPLGEPPATPAAVGPTTMASGGGAPMADNNEGADGVGNASGNWHCDSTWLGDRVITTSTRTWALPTYNNHLYKQISSTSTGASNDNHYFGYSTPWGYFDFNRFHCHFSPRDWQRLINNNWGFRPKRLNFKLFNIQVEEVTTNDGVTTIANNLTSTVQVFSDSEYQLPYVLGSAHQGCLPPFPADVFMIPQYGYLTLNNGSQAVGRSSFYCLEYFPSQMLRTGNNFTFSYTFEEVPFHSSYAHSQSLDRLMNPLIDQYLYYLNRTQNQSGSAQNKDLLFSRGSPAGMSVQPKNWLPGPCYRQQRVSKTKTDNNNSNFTWTGASKYNLNGRESIINPGTAVASHKDDEDKFFPMSGVMIFGKESAGASSTALDNVMITDEEEIKATNPVATERFGTVAVNFQSSSTDPATGDVHAMGALPGMVWQDRDVYLQGPIWAKIPHTDGHFHPSPLMGGFGLKNPPPQILIKNTPVPANPPAEFSATKFASFITQYSTGQVSVEIEWELQKENSKRWNPEVQYTSNYAKSANVDFTVDNNGLYTEPRPIGTRYLTRPL

SEQ ID NO: 4937 - protein, 737 aa, Adeno-associated virus
RMAADGYLPDWLEDNLSEGIREWWDLKPGAPKPKANQQKQDDGRGLVLPGYKYLGPFNGLDKGEPVNAADAAALEHDKAYDQQLKAGDNPYLRYNHADAEFQERLQEDTSFGGNLGRAVFQAKKRVLEPLGLVEEGAKTAPGKKRPVEQSPQEPDSSSGIGKTGQQPAKKRLNFGQTGDSESVPDPQPLGEPPATPAAVGPTTMASGGGAPMADNNEGADGVGNASGNWHCDSTWLGDRVITTSTRTWALPTYNNHLYKQISSTSTGASNDNHYFGYSTPWGYFDFNRFHCHFSPRDWQRLINNNWGFRPKRLNFKLFNIQVKEVTTNDGVTTIANNLTSTVQVFSDSEYQLPYVLGSAHQGCLPPFPADVFMIPQYGYLTLNNGSQAVGRSSFYCLEYFPSQMLRTGNNFTFSYTFEEVPFHSSYAHSQSLDRLMNPLIDQYLYYLNRTQNQSGSAQNKDLLFSRGSPAGMSVQPKNWLPGPCYRQQRVSKTKTDNNNSNFTWTGASKYNLNGRESIINPGTAVASHKDDEDKFFPMSGVMIFGKESAGASSTALDNVMITDEEEIKATNPVATERFGTVAVNFQSSSTDPATGDVHAMGALPGMVWQDRDVYLQGPIWAKIPHTDGHFHPSPLMGGFGLKNPPPQILIKNTPVPANPPAEFSATKFASFITQYSTGQVSVEIEWELQKENSKRWNPEVQYTSNYAKSANVDFTVDNNGLYTEPRPIGTRYLTRPL

SEQ ID NO: 4938 - protein, 737 aa, Adeno-associated virus
RMAADGYLPDWLEDNLSEGIREWWDLKPGAPKPKANQQKQDDGRGLVLPGYKYLGPFNGLDKGEPVNAADAAALEHDKAYDQQLKAGDNPYLRYNHADAEFQERLQEDTSFGGNLGRAVFQAKKRVLEPLGLVEEGAKTAPGKKRPVEQSPQEPDSSSGIGKTGQQPAKKRLNFGQTGDSESVPDPQPLGEPPATPAAVGPTTMASGGGAPMADNNEGADGVGNASGNWHCDSTWLGDRVITTSTRTWALPTYNNHLYKQISSTSTGASNDNHYFGYSTPWGYFDFNRFHCHFSPRDWQRLINNNWGFRPKRLNFKLFNIQVKEVTTNDGVTTIANNLTSTVQVFSDSEYQLPYVLGSAHQGCLPPFPADVFMIPQYGYLTLNNGSQAVGRSSFYCLEYFPSQMLRTGNNFTFSYTFEEVPFHSSYAHSQSLDRLMNPLIDQYLYYLNRTQNQSGSAQNKDLLFSRGSPAGMSVQPKNWLPGPCYRQQRVSKTKTDNNNSNFTWTGASKYNLNGRESIINPGTAVASHKDDEDKFFPMSGVMIFGKESAGANSTALDNVMITDEEEIKATNPVATERFGTVAVNFQSSSTDPATGDVHAMGALPGMVWQDRDVYLQGPIWAKIPHTDGHFHPSPLMGGFGLKNPPPQILIKNTPVPANPPAEFSATKFASFITQYSTGQVSVEIEWELQKENSKRWNPEVQYTSNYAKSANVDFTVDNNGLYTEPRPIGTRYLTRPL

SEQ ID NO: 4939 - DNA, 2208 bp, Adeno-associated virus
  source 1..2208: mol_type = other DNA
atggctgccgatggttatcttccagattggctcaaggacactctctctgaaggaataagacagtggtggaagctcaaacctggcccaccaccaccaaagcccgcagagcggcataaggacgacagcgggggtcttgtgcttcctgggtacaagtacctcggacccttcaacggactcgacaagggagagccggtcaacgaggcagacgccgcggccctcgagtacgacaaggcctacgaccggcagctcgacagcggagacaacccgtacctcaagtacaaccacgccgacgcggagtttcaggagcgccttaaagaagatacgtcttttgggggcaacctcggacgagcagtcttccaggcgaaaaagagggttcttgaacctctgggcctggttgaggaacctgttaagacggctccgggaaaaaagaggccggtagagcactctcctgtggagccagactcctcctcgggaacaggaaaagcgggccagcagcctgcgagaaagagattgaattttggtcagactggagacgcagactccgtacctgacccccagcctctcggacagccaccagcagccccctctggtctgggaactaatacgatggctacaggcagtggcgcaccaatggcagacaataacgagggcgccgacggagtgggtaattcctcgggaagttggcattgcgattccacatggatgggcgacagagtcatcaccaccagcacccgaacctgggctctgcccacctacaacaaccatctgtacaagcagatctccagccaatcaggagccagcaacgacaaccactactttggctacagcaccccttgggggtattttgacttcaacagattccactgccacttttcaccacgtgactggcaaagactcatcaacaacaactggggattccggcccaagagactcaacttcaagctctttaacattcaagtcaaggaggtcacgcagaatgacggtacgacgacgattgccaataaccttaccagcacggttcaggtgtttactgactcggagtaccagctcccgtacgtccccggctcggcgcatcaaggatgcctcccgccgttcccagcagacgtcttcatggtgccacagtatggatacctcaccctgaacaacgggagtcaggcagtaggacgctcttcattttactgcctggagtactttccttctcagatgcttcgtaccggaaacaactttaccttcagctacacctttgaggatgttcctttccacagcagctacgctcacagccagagtttggaccgtctcatgaatcctctcatcgaccagtacctgtattacttgagcagaacaaacactccaagcggaaccaccacgcagtccaggcttcagttttctcaggccggagcaagtgacattcgggaccagtctaggaactggcttcctggaccctgttaccgccagcagcgagtatcaaagacagctgcggacaacaacaacagtgaatactcgtggactggagctaccaagtaccacctcaatggcagagactctctggtgaatccgggcccggccatggccagccacaaggacgatgaagaaaagttttttcctcaaagcggggttctcatctttgggaagcaaggctcagagaaaacaaatgtggacattgaaaaggtcatgattacagacgaagaggaaatcagaaccaccaatcccgtggccacggagcagtatggttctgtatctaccaacctccagagcggcaacacacaagcagctactgcagatgtcaacacacaaggcgttcttccaggcatggtctggcaggacagagacgtgcacctgcaggggcctatctgggcaaagattccacacacggacggacattttcacccctctcccctcatgggcggatttggacttaaacaccctcctccacagattctcatcaagaacaccccggtacctgcaaatccttcgaccaccttcagtgcggcaaagtttgcttccttcatcacacagtattccacagggcaggtcagcgtggagatcgagtgggagctgcagaaggagaacagcaaacgctggaaccccgagatccagtacacttccaactacaacaaatctgttaatgtggactttactgtggacactaatggtgtgtattcagagcctcgccccattggcaccagatacctgactcgtaatctgtaa

SEQ ID NO: 4940 - protein, 735 aa, Adeno-associated virus
MAADGYLPDWLKDTLSEGIRQWWKLKPGPPPPKPAERHKDDSGGLVLPGYKYLGPFNGLDKGEPVNEADAAALEYDKAYDRQLDSGDNPYLKYNHADAEFQERLKEDTSFGGNLGRAVFQAKKRVLEPLGLVEEPVKTAPGKKRPVEHSPVEPDSSSGTGKAGQQPARKRLNFGQTGDADSVPDPQPLGQPPAAPSGLGTNTMATGSGAPMADNNEGADGVGNSSGSWHCDSTWMGDRVITTSTRTWALPTYNNHLYKQISSQSGASNDNHYFGYSTPWGYFDFNRFHCHFSPRDWQRLINNNWGFRPKRLNFKLFNIQVKEVTQNDGTTTIANNLTSTVQVFTDSEYQLPYVPGSAHQGCLPPFPADVFMVPQYGYLTLNNGSQAVGRSSFYCLEYFPSQMLRTGNNFTFSYTFEDVPFHSSYAHSQSLDRLMNPLIDQYLYYLSRTNTPSGTTTQSRLQFSQAGASDIRDQSRNWLPGPCYRQQRVSKTAADNNNSEYSWTGATKYHLNGRDSLVNPGPAMASHKDDEEKFFPQSGVLIFGKQGSEKTNVDIEKVMITDEEEIRTTNPVATEQYGSVSTNLQSGNTQAATADVNTQGVLPGMVWQDRDVHLQGPIWAKIPHTDGHFHPSPLMGGFGLKHPPPQILIKNTPVPANPSTTFSAAKFASFITQYSTGQVSVEIEWELQKENSKRWNPEIQYTSNYNKSVNVDFTVDTNGVYSEPRPIGTRYLTRNL

SEQ ID NO: 4941 - DNA, 2208 bp, Adeno-associated virus
  source 1..2208: mol_type = other DNA
atggctgccgatggttatcttccagattggctcgaggacactctctctgaaggaataagacagtggtggaagctcaaacctggcccaccaccaccaaagcccgcagagcggcataaggacgacagcaggggtcttgtgcttcctgggtacaagtacctcggacccttcaacggactcgacaagggggagccggtcaacgaggcagacgccgcggccctcgagcacgacaaggcctacgaccggcagctcgacagcggagacaacccgtacctcaagtacaaccacgccgacgcagagtttcaggagcgccttaaagaagatacgtcttttgggggcaacctcggacgagcagtcttccaggcgaaaaagagggttcttgaacctctgggcctggttgaggaacctgttaagacggctccgggaaaaaagaggccggtagagcactctcctgtggagccagactcctcctcgggaaccggaaaagcgggccagcagcctgcaagaaaaagattaaattttggtcagactggagacgcagactccgtacctgacccccagcctctcggacagccaccagcagccccctctggtctgggatctactacaatggctacaggcagtggcgcaccaatggcagacaataacgagggtgccgatggagtgggtaattcctcaggaaattggcattgcgattcccaatggctgggcgacagagtcatcaccaccagcacccgaacctgggccctgcccacatacaacaaccacctctacaagcaaatctccagccaatcaggagccagcaacgacaaccactactttggctacagcaccccctgggggtattttgacttcaacagattccactgccacttttcaccacgtgactggcaaagactcatcaacaacaactggggattccggcccaaaagactcaacttcaagctctttaatattcaagtcaaagaggtcacgcagaatgacggtacgacgacgattgccaataaccttaccagcacggttcaggtgtttactgactcggagtaccagctcccgtacgtcctgggctcggcgcatcaaggatgcctcccgccgtttccagcggacgtcttcatggtcccacagtatggatacctcaccctgaacaacgggagtcaggcggtaggacgctcttccttttactgcctggagtactttccttctcagatgctgcgtactggaaacaactttcagttcagctacacttttgaagacgtgcctttccacagcagctacgctcacagccagagtctggatcggctgatgaatcctctgatcgaccagtacctgtattatctgaacaagacacaaacaaatagtggaactcttcagcagtctcggctactgtttagccaagctggaccaaccaacatgtctcttcaagctaaaaactggctgcctggaccttgctacagacagcagcgtctgtcaaaacaggcaaacgacaacaacaacagcaactttccctggactgcagctacaaagtatcatctaaatggccgggactcgttggttaatccaggaccagctatggccagtcgcaaggatgacgaagaaaagtttttccccatgcatggaaccctgatatttggtaaacaaggaacaaatgccaacgacgcggatttggaaaatgtcatgattacagatgaagaagaaatcagggccaccaatcccgtggctacggagcagtacgggactgtgtcaaataatttgcaaaactcaaacactggtccaactactggaactgtcaatcaccaaggagcgttacctggtatggtgtggcaggatcgagacgtgtacctgcagggacccatttgggccaagattcctcacaccgatggacactttcatccttctccactgatgggaggttttggactcaaacacccgcctcctcagatcatgatcaaaaacactcccgttccagccaatcctcccacaaacttcagttctgccaagtttgcttctttcatcacacagtattccacgggacaggtcagcgtggagatcgagtgggagctgcagaaggagaacagcaaacgctggaatcccgaaattcagtacacttccaactacaacaagtctgttaatgtggactttactgtggacactaatggtgtgtattcagagcctcgccccattggcaccagatacctgactcgtaatctgtaa

SEQ ID NO: 4942 - protein, 735 aa, Adeno-associated virus
MAADGYLPDWLEDTLSEGIRQWWKLKPGPPPPKPAERHKDDSRGLVLPGYKYLGPFNGLDKGEPVNEADAAALEHDKAYDRQLDSGDNPYLKYNHADAEFQERLKEDTSFGGNLGRAVFQAKKRVLEPLGLVEEPVKTAPGKKRPVEHSPVEPDSSSGTGKAGQQPARKRLNFGQTGDADSVPDPQPLGQPPAAPSGLGSTTMATGSGAPMADNNEGADGVGNSSGNWHCDSQWLGDRVITTSTRTWALPTYNNHLYKQISSQSGASNDNHYFGYSTPWGYFDFNRFHCHFSPRDWQRLINNNWGFRPKRLNFKLFNIQVKEVTQNDGTTTIANNLTSTVQVFTDSEYQLPYVLGSAHQGCLPPFPADVFMVPQYGYLTLNNGSQAVGRSSFYCLEYFPSQMLRTGNNFQFSYTFEDVPFHSSYAHSQSLDRLMNPLIDQYLYYLNKTQTNSGTLQQSRLLFSQAGPTNMSLQAKNWLPGPCYRQQRLSKQANDNNNSNFPWTAATKYHLNGRDSLVNPGPAMASRKDDEEKFFPMHGTLIFGKQGTNANDADLENVMITDEEEIRATNPVATEQYGTVSNNLQNSNTGPTTGTVNHQGALPGMVWQDRDVYLQGPIWAKIPHTDGHFHPSPLMGGFGLKHPPPQIMIKNTPVPANPPTNFSSAKFASFITQYSTGQVSVEIEWELQKENSKRWNPEIQYTSNYNKSVNVDFTVDTNGVYSEPRPIGTRYLTRNL

SEQ ID NO: 4943 - DNA, 2208 bp, Adeno-associated virus
  source 1..2208: mol_type = other DNA
atggctgccgatggttatcttccagattggctcgaggacactctctctgaaggaataagacagtggtggaagctcaaacctggcccaccaccaccaaagcccgcagagcggcataaggacgacagcaggggtcttgtgcttcctgggtacaagtacctcggacccttcaacggactcgacaagggagagccggtcaacgaggcagacgccgcggccctcgagcacgacaaagcctacgaccggcagctcgacagcggagacaacccgtacctcaagtacaaccacgccgacgcggagtttcaggagcgccttaaagaagatacgtcttttgggggcaacctcggacgagcagtcttccaggcgaaaaagagggttcttgaacctctgggcctggttggggaacctgtcaagacggctccaggaaaaaagaggccggtagagcactctcctgtggagccagactcctcctcgggaaccggaaaggcgggccagcagcctgcaagaaaaagattgaattttggtcagactggagacgcagactcagtacctgacccccagcctctcggacagccaccagcagccccctctggtctgggaactaatacgatggctacaggcagtggcgcaccaatggcagacaataacgagggcgccgacggagtgggtaattcctcgggaaattggcattgcgattccacatggatgggcgacagagtcatcaccaccagcacccgaacctgggccctgcccacctacaacaaccacctctacaaacaaatttccagccaatcaggagcctcgaacgacaatcactactttggctacagcaccccttgggggtattttgacttcaacagattccactgccacttttcaccacgtgactggcaaagactcatcaacaacaactggggattccgacccaagagactcaacttcaagctctttaacattcaagtcaaagaggtcacgcagaatgacggtacgacgacgattgccaataaccttaccagcacggttcaggtgtttactgactcggagtaccagctcccgtacgtcctcggctcggcgcatcaaggatgcctcccgccgttcccagcagacgtcttcatggtgccacagtatggatacctcaccctgaacaacgggagtcaggcagtaggacgctcttcattttactgcctggagtactttccttctcagatgctgcgtaccggaaacaactttaccttcagctacacttttgaggacgttcctttccacagcggctacgctcacagccagagtctggaccgtctcatgaatcctctcatcgaccagtacctgtattacttgagcacaacaaacactccaagtggaaccaccacgcagtcaaggcttcagttttctcaggccggagcgagtgacattcgggaccagtctaggaactggcttcctggaccctgttaccgccagcagcgagtatcaaagacatctgcggataacaacaacagtgaatactcgtggactggagctaccaagtaccacctcaatggcagagactctctggtgaatccgggcccggccatggcaagccacaaggacaatgaagaaaagttttttcctcagagcggggttctcatctttgggaagcaaggctcagagaaaacaaatgtggacattgaaaaggtcatgattacagacgaagaggaaatcaggacaaccaatcccgtggctacggagcagtacggttctgtatctaccaacctccagagaggcaacagacaagcagctaccgcagatgtcaacacacaaggcgttcttccaggcatggtctggcaggacagagatgtgtaccttcaggggcccatctgggcaaagattccacacacggacggacattttcacccctctcccctcatgggtggattcggacttaaacaccctcctccacagattctcatcaagaacaccccggtacctgcgaatccttcgaccaccttcagtgcggcaaagtttgcttccttcatcacacagtactccacgggacaggtcagcgtggagatcgagtgggagctgcagaaggaaaacagcaaacgctggaatcccgaaattcagtacacttccaactacaacaagtctgttaatgtggactttactgtggacactaatggcgtgtattcagagcctcgccccattggcaccagatacctgactcgtaatctgtaa

SEQ ID NO: 4944 - protein, 735 aa, Adeno-associated virus
MAADGYLPDWLEDTLSEGIRQWWKLKPGPPPPKPAERHKDDSRGLVLPGYKYLGPFNGLDKGEPVNEADAAALEHDKAYDRQLDSGDNPYLKYNHADAEFQERLKEDTSFGGNLGRAVFQAKKRVLEPLGLVGEPVKTAPGKKRPVEHSPVEPDSSSGTGKAGQQPARKRLNFGQTGDADSVPDPQPLGQPPAAPSGLGTNTMATGSGAPMADNNEGADGVGNSSGNWHCDSTWMGDRVITTSTRTWALPTYNNHLYKQISSQSGASNDNHYFGYSTPWGYFDFNRFHCHFSPRDWQRLINNNWGFRPKRLNFKLFNIQVKEVTQNDGTTTIANNLTSTVQVFTDSEYQLPYVLGSAHQGCLPPFPADVFMVPQYGYLTLNNGSQAVGRSSFYCLEYFPSQMLRTGNNFTFSYTFEDVPFHSGYAHSQSLDRLMNPLIDQYLYYLSTTNTPSGTTTQSRLQFSQAGASDIRDQSRNWLPGPCYRQQRVSKTSADNNNSEYSWTGATKYHLNGRDSLVNPGPAMASHKDNEEKFFPQSGVLIFGKQGSEKTNVDIEKVMITDEEEIRTTNPVATEQYGSVSTNLQRGNRQAATADVNTQGVLPGMVWQDRDVYLQGPIWAKIPHTDGHFHPSPLMGGFGLKHPPPQILIKNTPVPANPSTTFSAAKFASFITQYSTGQVSVEIEWELQKENSKRWNPEIQYTSNYNKSVNVDFTVDTNGVYSEPRPIGTRYLTRNL

SEQ ID NO: 4945 - DNA, 2208 bp, Adeno-associated virus
  source 1..2208: mol_type = other DNA
atggctgccgatggttatcttccagattggctcgaggacactctctctgaaggaataagacagtggtggaagctcaaacctggcccaccaccaccaaagcccgcagagcggcataaggacgacagcaggggtcttgtgcttcctgggtacaagtacctcggacccttcaacggactcgacaagggagagccggtcaacgaggcagacgccgcggccctcgagcacgacaaagcctacgaccggcagctcgacagcggagacaacccgtacctcaagtacaaccacgccgacgcggagtttcaggagcgccttaaagaagatacgtcttttgggggcaacctcggacgagcagtcttccaggcgaaaaagagggttcttgaacctctgggcctggttggggaacctgttaagacggctccgggaaaaaagaggccggtagagcactctcctgtggagccagactcctcctcgggaaccggaaaggcgggccagcagcctgcaagaaaaagattgaattttggtcagactggagacgcagactcagtacctgacccccagcctctcggacagccaccagcagccccctctggtctgggaactaatacgatggctacaggcagtggcgcaccaatggcagacaataacgagggcgccgacggagtgggtaattcctcgggaaatcggcattgcgattccacatggatgggcgacagagtcatcaccaccagcacccgaacctgggccctgcccacctacaacaaccacctctacagacaaatttccagccaatcaggagcctcgaacgacaatcactactttggctacagcaccccttgggggtattttgacttcaacagattccactgccacttttcaccacgtgactggcaaagactcatcaacaacaactggggattccgacccaagagactcaacttcaagctctttaacattcaagtcaaagaggtcacgcagaatgacggtacgacgacgattgccaataaccttaccagcacggttcaggtgtttactgactcggagtaccagctcccgtacgtcctcggctcggcgcatcaaggatgcctcccgccgttcccagcagacgtcttcatggtgccacagtatggatacctcaccctgagcaacgggagtcaggcagtaggacgctcttcattttactgcccggagtactttccttctcagatgctgcgtaccggaaacaactttaccttcagctacacttttgaggacgttcctttccacagcagctacgctcacagccagagtctggaccgtctcatgaatcctctcatcgaccagtacctgtattacttgagcacaacaaacactccaagtggaaccaccacgcagtcaaggcttcagttttctcaggccggagcgagtgacattcgggaccagtctaggaactggcttcctggaccctgttaccgccagcagcgagtatcaaagacatctgcggataacaacaacagtgaatactcgtggactggagctaccaagtaccacctcaatggcagagactctctggtgaatccgggcccggccatggcaagccacaaggacaatgaagaaaagttttttcctcagagcggggttctcatctttgggaagcaaggctcagagaaaacaaatgtggacattgaaaaggtcatgattacagacgaagaggaaatcaggacaaccaatcccgtggctacggagcagtatggttctgtatctaccaacctccagagaggcaacagacaagcagctaccgcagatgtcaacacacaaggcgttcttccaggcatggtctggcaggacagagatgtgtaccttcaggggcccatctgggcaaagattccacacacggacggacattttcacccctctcccctcatgggtggattcggacctaaacaccctcctccacagattctcatcaagaacaccccggtacctgcgaatccttcgaccaccttcagtgcggcaaagtttgcttccttcatcacacagtactccacgggacaggtcagcgtggagatcgagtgggagctgcagaaggaaaacagcaaacgctggaatcccgaaattcagtacacttccaactacaacaagtctgttaatgtggactttactgtggacactaatggcgtgtattcagagcctcgccccattggcaccagatacctgactcgtaatttgtaa

SEQ ID NO: 4946 - protein, 735 aa, Adeno-associated virus
MAADGYLPDWLEDTLSEGIRQWWKLKPGPPPPKPAERHKDDSRGLVLPGYKYLGPFNGLDKGEPVNEADAAALEHDKAYDRQLDSGDNPYLKYNHADAEFQERLKEDTSFGGNLGRAVFQAKKRVLEPLGLVGEPVKTAPGKKRPVEHSPVEPDSSSGTGKAGQQPARKRLNFGQTGDADSVPDPQPLGQPPAAPSGLGTNTMATGSGAPMADNNEGADGVGNSSGNRHCDSTWMGDRVITTSTRTWALPTYNNHLYRQISSQSGASNDNHYFGYSTPWGYFDFNRFHCHFSPRDWQRLINNNWGFRPKRLNFKLFNIQVKEVTQNDGTTTIANNLTSTVQVFTDSEYQLPYVLGSAHQGCLPPFPADVFMVPQYGYLTLSNGSQAVGRSSFYCPEYFPSQMLRTGNNFTFSYTFEDVPFHSSYAHSQSLDRLMNPLIDQYLYYLSTTNTPSGTTTQSRLQFSQAGASDIRDQSRNWLPGPCYRQQRVSKTSADNNNSEYSWTGATKYHLNGRDSLVNPGPAMASHKDNEEKFFPQSGVLIFGKQGSEKTNVDIEKVMITDEEEIRTTNPVATEQYGSVSTNLQRGNRQAATADVNTQGVLPGMVWQDRDVYLQGPIWAKIPHTDGHFHPSPLMGGFGPKHPPPQILIKNTPVPANPSTTFSAAKFASFITQYSTGQVSVEIEWELQKENSKRWNPEIQYTSNYNKSVNVDFTVDTNGVYSEPRPIGTRYLTRNL

SEQ ID NO: 4947 - DNA, 2205 bp, Adeno-associated virus
  source 1..2205: mol_type = other DNA
atggctgccgatggttatcttccagattggctcgaggacactctctctgaaggaataagacagtggtggaagctcaaacctggcccaccaccaccaaagcccgcagagcggcataaggacgacagcaggggtcttgtgcttcctgggtacaagtacctcggacccttcaacggactcgacaagggagagccggtcaacgaggcagacgccgcggccctcgagcacgacaaggcctacgaccggcagctcgacagcggagacaacccgtacctcaagtacaaccacgccgacgcggagtttcaggagcgtcttaaagaagatacgtcttttgggggcaacctcggacgagcagtcttccaggcgaaaaagagggttcttgaacctctgggcctggttgaggaacctgttaagacggctccgggaaaaaagaggccggtagagcactctcctgcggagccagactcctcctcgggaaccggaaaagcgggccagcagcctgcaagaaaaagactgaatttcggtcagactggagacgcagactccgtacctgacccccagcctctcagacagccaccagcagcccccacaagtttgggatctactacaatggctacaggcagtggcgcaccaatggcagacaataacgagggtgccgatggagtgggtaattcctcaggaaattggcattgcgattcccaatggctgggcgacagagtcatcaccaccagcacccgaacctgggccctgcccacctacaacaaccacctttacaagcaaatctccagccaatcaggagcctcaaacgacaaccactactttggctacagcaccccctgggggtattttgacttcaacagattccactgccacttttcaccacgtgactggcaaagactcatcaacaacaactggggattccgacccaagagactcaacttcaagctctttaacattcaagtcaaagaggtcacgcagaatgacggtacgacgacgattgccaataaccttaccagcacggttcaggtgtttactgactcggagtaccagctcccgtacgtcctcggctcggcgcatcaaggatgcctcccgccgtttccagcggacgtcttcatggtcccacagtatggatacctcaccctgaacaacgggagtcaggcggtaggacgctcttccttttactgcctggagtactttccttctcagatgctgcgtactggaaacaactttcagttcagctacacttttgaagacgtgcctttccacagcagctacgctcacagccagagtttggatcggctgatgaatcctctgatcgaccagtacctgtattatctaaacagaacacaaacagctagtggaactcagcagtctcggctactgtttagccaagctggacccacaagcatgtctcttcaagctaaaaactggctgcctggaccgtgttatcgccagcagcgtttgtcaaagcaggcaaacgacaacaacaacagcaactttccctggactggagctaccaagtactacctcaatggcagagactctttggtgaacccgggcccggccatggccagccacaaggacgatgaagaaaagtttttccccatgcatggaaccctaatatttggtaaagaaggaacaaatgctaccaacgcggaattggaaaatgtcatgattacagatgaagaggaaatcaggaccaccaatcccgtggctacagagcagtacggatatgtgtcaaataatttgcaaaactcaaatactgctgcaagtactgaaactgtgaatcaccaaggagcattacctggtatggtgtggcaggatcgagacgtgtacctgcagggacccatttgggccaagattcctcacaccgatggacactttcatccttctccactgatgggaggttttggactcaaacacccgcctcctcagattatgatcaaaaacactcccgttccagccaatcctcccacaaacttcagttctgccaagtttgcttccttcatcacacagtattccacgggacaggtcagcgtggagatcgagtgggagctgcagaaggagaacagcaaacgctggaatcccgaaattcagtacacttccaactacaacaaatctgttaatgtggactttactgtggacactaatggtgtgtattcagagcctcgccccattggcaccagatacctgactcgtaatctgtaa

SEQ ID NO: 4948 - protein, 734 aa, Adeno-associated virus
MAADGYLPDWLEDTLSEGIRQWWKLKPGPPPPKPAERHKDDSRGLVLPGYKYLGPFNGLDKGEPVNEADAAALEHDKAYDRQLDSGDNPYLKYNHADAEFQERLKEDTSFGGNLGRAVFQAKKRVLEPLGLVEEPVKTAPGKKRPVEHSPAEPDSSSGTGKAGQQPARKRLNFGQTGDADSVPDPQPLRQPPAAPTSLGSTTMATGSGAPMADNNEGADGVGNSSGNWHCDSQWLGDRVITTSTRTWALPTYNNHLYKQISSQSGASNDNHYFGYSTPWGYFDFNRFHCHFSPRDWQRLINNNWGFRPKRLNFKLFNIQVKEVTQNDGTTTIANNLTSTVQVFTDSEYQLPYVLGSAHQGCLPPFPADVFMVPQYGYLTLNNGSQAVGRSSFYCLEYFPSQMLRTGNNFQFSYTFEDVPFHSSYAHSQSLDRLMNPLIDQYLYYLNRTQTASGTQQSRLLFSQAGPTSMSLQAKNWLPGPCYRQQRLSKQANDNNNSNFPWTGATKYYLNGRDSLVNPGPAMASHKDDEEKFFPMHGTLIFGKEGTNATNAELENVMITDEEEIRTTNPVATEQYGYVSNNLQNSNTAASTETVNHQGALPGMVWQDRDVYLQGPIWAKIPHTDGHFHPSPLMGGFGLKHPPPQIMIKNTPVPANPPTNFSSAKFASFITQYSTGQVSVEIEWELQKENSKRWNPEIQYTSNYNKSVNVDFTVDTNGVYSEPRPIGTRYLTRNL

SEQ ID NO: 4949 - DNA, 3160 bp, Adeno-associated virus
  source 1..3160: mol_type = other DNA
acccttcactaaagggactagtcctgcaggtttaaacgaattcgcccttgctgcgtcaactggaccaatgagaactttcccttcaacgactgtgtcgacaagatggtgatttggtgggaggaggggaagatgaccgccaaggtcgtggagtcggccaaagccattctcggaggaagcaaggtgcgcgtggaccagaaatgcaagtcctcggcccagatagatccgactcccgtgatcgtcacctccaacaccaacatgtgcgccgtgattgacgggaactcaacgaccttcgaacaccagcagccgttgcaagaccggatgttcaaatttgaactcacccgccgtctggatcatgactttgggaaggtcaccaagcgggaagtcaaagactttttccggtgggcaaaggatcacgtggttgaggtggagcatgaattctacgtcaaaaagggtggagccaagaaaagacccgcccctagtgacgcagatataagtgagcccaaacgggtgcgcgagtcagttgcgcagccatcgacgtcagacgcggaagcttcgatcaactacgcggacaggtaccaaaacaaatgttctcgtcacgtgggcatgaatctgatgctgtttccctgcagacaatgcgagagaatgaatcaaaattcaaatatctgcttcactcacggacagaaagactgtttagagtgctttcccgtgtcagaatctcaacctgtttctgtcgtcaaaaaggcgtatcagaaactgtgctacattcatcatatcatgggaaaggtgccagacgcttgcactgcctgcgatctggtcaatgtggatttggatgactgcatctctgaacaataaatgatttaaatcaggtatggctgccgatggttatcttccagattggctcgaggacactctctctgaaggaataagacagtggtggaagctcaaacctggcccaccaccaccaaagcccgcagagcggcataaggacgacagcaggggtcttgtgcttcctgggtacaagtacctcggacccttcaacggactcgacaagggagagccggtcaacgaggcagacgccgcggccctcgagcacgacaaggcctacgaccggcagctcgacagcggagacaacccgtacctcaagtacaaccacgccgacgcggagtttcaggagcgtcttaaagaagatacgtcttttgggggcaacctcggacgagcagtcttccaggcgaaaaagagggttcttgaacctctgggcctggttgaggaacctgttaagacggctccgggaaaaaagaggccggtagagcactctcctgcggagccagactcctcctcgggaaccggaaaagcgggccagcagcctgcaagaaaaagactgaatttcggtcagactggagacgcagactccgtacctgacccccagcctctcagacagccaccagcagcccccacaagtttgggatctactacaatggctacaggcagtggcgcaccaatggcagacaataacgagggtgccgatggagtgggtaattcctcaggaaattggcattgcgattcccaatggctgggcgacagagtcatcaccaccagcacccgaacctgggccctgcccacctacaacaaccacctttacaagcaaatctccagccaatcaggagcctcaaacgacaaccactactttggctacagcaccccctgggggtattttgacttcaacagattccactgccacttttcaccacgtgactggcaaagactcatcaacaacaactggggattccgacccaagagactcaacttcaagctctttaacattcaagtcaaagaggtcacgcagaatgacggtacgacgacgattgccaataaccttaccagcacggttcaggtgtttactgactcggagtaccagctcccgtacgtcctcggctcggcgcatcaaggatgcctcccgccgtttccagcggacgtcttcatggtcccacagtatggatacctcaccctgaacaacgggagtcaggcggtaggacgctcttccttttactgcctggagtactttccttctcagatgctgcgtactggaaacaactttcagttcagctacacttttgaagacgtgcctttccacagcagctacgctcacagccagagtttggatcggctgatgaatcctctgatcgaccagtacctgtattatctaaacagaacacaaacagctagtggaactcagcagtctcggctactgtttagccaagctggacccacaagcatgtctcttcaagctaaaaactggctgcctggaccgtgttatcgccagcagcgtttgtcaaagcaggcaaacgacaacaacaacagcaactttccctggactggagctaccaagtactacctcaatggcagagactctttggtgaacccgggcccggccatggccagccacaaggacgatgaagaaaagtttttccccatgcatggaaccctaatatttggtaaagaaggaacaaatgctaccaacgcggaattggaaaatgtcatgattacagatgaagaggaaatcaggaccaccaatcccgtggctacagagcagtacggatatgtgtcaaataatttgcaaaactcaaatactgctgcaagtactgaaactgtgaatcaccaaggagcattacctggtatggtgtggcaggatcgagacgtgtacctgcagggacccatttgggccaagattcctcacaccgatggacactttcatccttctccactgatgggaggttttggactcaaacacccgcctcctcagattatgatcaaaaacactcccgttccagccaatcctcccacaaacttcagttctgccaagtttgcttccttcatcacacagtattccacgggacaggtcagcgtggagatcgagtgggagctgcagaaggagaacagcaaacgctggaatcccgaaattcagtacacttccaactacaacaaatctgttaatgtggactttactgtggacactaatggtgtgtattcagagcctcgccccattggcaccagatacctgactcgtaatctgtaattgcttgttaatcaataaaccgtttaattcgtttcagttgaactttggtctctgcgaagggcgaattcgcggccgctaaatcaatcg

SEQ ID NO: 4950 - protein, 734 aa, Adeno-associated virus
MAADGYLPDWLEDTLSEGIRQWWKLKPGPPPPKPAERHKDDSRGLVLPGYKYLGPFNGLDKGEPVNEADAAALEHDKAYDRQLDSGDNPYLKYNHADAEFQERLKEDTSFGGNLGRAVFQAKKRVLEPLGLVEEPVKTAPGKKRPVEHSPAEPDSSSGTGKAGQQPARKRLNFGQTGDADSVPDPQPLGQPPAAPTSLGSTTMATGSGAPMADNNEGADGVGNSSGNWHCDSQWLGDRVITTSTRTWALPTYNNHLYKQISSQSGASNDNHYFGYSTPWGYFDFNRFHCRFSPRDWQRLINNNWGFRPKRLNFKLFNIQVKEVTQNDGTTTIANNLTSTVQVFTDSEYQLPYVLGSAHQGCLPPFPADVFMVPQYGYLTLNNGSQAVGRSSFYCLEYFPSQMLRTGNNFQFSYTFEDVPFHSSYAHSQGLDRLMNPLIDQYLYYLNRTQTASGTQQSRLLFSQAGPTSMSLQAKNWLPGPCYRQQRLSKQANDNNNSNFPWTGATKYHLNGGDSLVNPGPAMASHKDDEEKFFPMHGTLIFGKEGTNATNAELENVMITDEEEIRTTNPVATEQYGYVSNNLQNSNTAASTETVNHQGALPGMVWQDRDVYLRGPIWAKIPHADGHFHPSPLMGGFGLKHPPPQIMIKNTPVPANPPTNFSSAKFASFITQYSTGQVSVEIEWELQKENSKRWNPEIQYTSNYNKSVNVDFTVDTNGVYSEPRPIGTRYLTRNL

SEQ ID NO: 4951 - DNA, 3157 bp, Adeno-associated virus
  source 1..3157: mol_type = other DNA
ctcactaagggactagtcctgcaggtttaaacgaattcgcccttgctgcgtcaactggaccaatgagaactttcccttcaacgactgtgtcgacaagatggtgatttggtgggaggaggggaagatgaccgccaaggtcgtggagtcggccaaagccactctcggaggaagcaaggtgcgcgtggaccagaaacgcaagtcctcggcccagatagatccgactcccgtgatcgtcacctccaacaccaacatgtgcgccgtgattgacgggaactcaacgaccttcgaacaccagcagccgttgcaagaccgaatgttcaaatttgaactcacccgccgtctggatcatgacttcgggaaggtcaccaagcaggaagtcaaagactttttccggtgggcaaaggatcacgtggttgaggtggagcatgaattctacgtcaaaaagggtggagccaagaaaagacccgcccctagtgacgcagatataagtgagcccaaacgggtgcgcgagtcagttgcgcagccatcgacgtcagacgcggaagcttcgatcaactacgcggacaggtaccaaaacaaatgttctcgtcacgtgggcatgaatctgatgctgtttccctgcagacaatgcgagagaatgaatcaaaattcaaatatctgcttcactcacggacagaaagactgtttagagtgctttcccgtgtcagaatctcaacctgtttctgtcgtcaaaaaggcgtatcagaaactgtgctacattcatcatatcatgggaaaggtgccagacgcttgcactgcctgcgatctggtcaatgtggatttggatgactgcatctctgaacaataaatgatttaaatcaggtatggctgccgatggttatcttccagattggctcgaggacactctctctgaaggaataagacagtggtggaagctcaaacctggcccaccaccaccaaagcccgcagagcggcataaggacgacagcaggggtcttgtgcttcctgggtacaagtacctcggacccttcaacggactcgacaagggagagccggtcaacgaggcagacgccgcggctctcgagcacgacaaggcctacgaccggcagctcgacagcggagacaacccgtacctcaagtacaaccacgccgacgcggagtttcaggagcgtcttaaagaagatacgtcttttgggggcaacctcggacgagcagtcttccaggcgaaaaagagggttcttgaacctctgggcctggttgaggaacctgttaagacggctccgggaaaaaagaggccggtagagcactctcctgcggagccagactcctcctcgggaaccggaaaagcgggccagcagcctgcaagaaaaagactgaatttcggtcagactggagacgcagactccgtacctgacccccagcctctcggacagccaccagcagcccccacaagtttgggatctactacaatggctacaggcagtggcgcaccaatggcagacaataacgagggtgccgatggagtgggtaattcctcaggaaattggcattgcgattcccaatggctgggcgacagagtcatcaccaccagcacccgaacctgggccctgcccacctacaacaaccacctttacaagcaaatctccagccaatcaggagcctcaaacgacaaccactactttggctacagcaccccctgggggtattttgacttcaacagattccactgccgcttttcaccacgtgactggcaaagactcatcaacaacaactggggattccgacccaagagactcaacttcaagctctttaacattcaagtcaaagaggtcacgcagaatgacggtacgacgacgattgccaataaccttaccagcacggttcaggtgtttactgactcggagtaccagctcccgtacgtcctcggctcggcgcatcaaggatgcctcccgccgtttccagcggacgtcttcatggtcccacagtatggatacctcaccctgaacaacgggagtcaggcggtaggacgctcttccttttactgcctggagtactttccttctcagatgctgcgtactggaaacaactttcagttcagctacacttttgaagacgtgcctttccacagcagctacgctcacagccagggtttggatcggctgatgaatcctctgatcgaccagtacctgtattatctaaacagaacacaaacagctagtggaactcagcagtctcggctactgtttagccaagctggacccacaagcatgtctcttcaagctaaaaactggctgcctggaccgtgttatcgccagcagcgtttgtcaaagcaggcaaacgacaacaacaacagcaactttccctggactggagctaccaagtaccacctcaatggcggagactctttggtgaacccgggcccggccatggccagccacaaggacgatgaagaaaagtttttccccatgcatggaaccctaatatttggtaaagaaggaacaaatgctaccaacgcggaattggaaaatgtcatgattacagatgaagaggaaatcaggaccaccaatcccgtggctacagagcagtacggatatgtgtcaaataatttgcaaaactcaaatactgctgcaagtactgaaactgtgaatcaccaaggagcattacctggtatggtgtggcaggatcgagacgtgtacctgcggggacccatttgggccaagattcctcacgccgatggacactttcatccttctccactgatgggaggttttggactcaaacacccgcctcctcagattatgatcaaaaacactcccgttccagccaatcctcccacaaacttcagttctgccaagtttgcttccttcatcacacagtattccacgggacaggtcagcgtggagatcgagtgggagctgcagaaggagaacagcaaacgctggaatcccgaaattcagtacacttccaactacaacaaatctgttaatgtggactttactgtggacactaatggtgtgtattcagagcctcgccccattggcaccagatacctgactcgtaatctgtaattgcttgttaatcaataaaccgtttaattcgtttcagttgaactttggtctctgcgaagggcgaattcgcggccgctaaattcaattcg

SEQ ID NO: 4952 - protein, 734 aa, Adeno-associated virus
MAADGYLPDWLEDTLSEGIRQWWKLKPGPPPPKPAERHKDDSRGLVLPGYKYLGPFNGLDKGEPVNEADAAALEHDKAYDRQLDSGDNPYLKYNHADAEFQERLKEDTSFGGNLGRAVFQAKKRVLEPLGLVEEPVKTAPGKKRPVEHSPAEPDSSSGTGKAGQQPARKRLNFGQTGDADSVPDPQPLGQPPAAPTSLGSTTMATGSGAPMADNNEGADGVGNSSGNWHCDSQWLGDRVITTSTRTWALPTYNNHLYKQISSQSGASNDNHYFGYSTPWGYFDFNRFHCHFSPRDWQRLINNNWGFRPKRLNFKLFNIQVKEVTQNDGTTTIANNLTSTVQVFTDSEYQLPYVLGSAHQGCLPPFPADVFMVPQYGYLTLNNGSQAVGRSSFYCLECFPSQMLRTGNNFQFSYTFEDVPFHSSYAHSQSLDRLMNPLIDQYLYYLNRTQTASGTQQSRLLFSQAGPTSMSLQAKNWLPGPCYRQQRLSKQANDNNNSNFPWTGATKYHLNGRDSLVNPGPAMASHKDDEEKFFPMHGTLIFGKEGTNATNAELENVMITDEEEIRTTNPVATEQYGYVSNNLQNSNTAASTETVNHQGALPGMVWQDRDVYLQGPIWAKIPHTDGHFHPSPLMGGFGLKHPPPQIMIKNTPVPANPPTNFSSAKFASFITQYSTGQVSVEIEWELQKENSKRWNPEIQYTSNYNKSVNVDFTVDTNGVYSEPRPIGTRYLTRNL

SEQ ID NO: 4953 - DNA, 2208 bp, Adeno-associated virus
  source 1..2208: mol_type = other DNA
atggctgccgatggttatcttccagattggctcgaggacactctctctgaaggaataagacagtggtggaagctcaaacctggcccaccaccaccaaagcccgcagagcggcataaggacgacagcaggggtcttgtgcttcctggatacaagtacctcggacccttcaacggactcgacaagggagagccggtcaacgaggcagacgccgcggccctcgagcacgacaaggcctacgaccggcagctcgacagcggagacaacccgtacctcaagtacaaccacgccgacgcggagtttcaggagcgccttaaagaagatacgtcttttgggggcaacctcggacgagcagtcttccaggcgaaaaagagggttcttgaacctctgggcctggttgaggaacctgttaagacggctccgggaaaaaagaggccggtagagcactctcctgtggagccagactcctcctcgggaaccggaaaagcgggcaaccagcctgcaagaaaaagattgaatttcggtcagactggagacgcagactccgtacctgacccccagcctctcggacagccaccagcatccccctctggtctgggaactaatacgatggctacaggcagtggcgcaccaatggcagacaataacgagggcgccgacggagtgggtaattcctcgggaaattggcattgcgattccacatggatgggcgacagagtcgtcaccaccagcacccgcacctgggccctgcccacctacaacaaccacctctacaagcagatttccagccaatcaggagccagcaacgacaaccactactttggctacagcaccccttgggggtattttgacttcaacagattccactgccacttttcgccacgcgactggcagagactcatcaacaacaactggggattccggcccaaaagactcaacttcaagctgtttaacattcaagtcaaggaggtcacgcagaatgacggtacgacgacgattgccaataaccttaccagcacggttcaggtgtttactgacttggagtaccagctcccgtacgtcctcggctcggcgcatcaaggatgcctcccgccgttcccagcagacgtcttcatggtgccacagtatggatacctcaccctgaacaacgggagtcaggcggtaggacgctcttccttttactgcctggagtactttccttctcagatgcttcgcaccggaaacaactttaccttcagctacacttttgaagacgttcctttccacagcagctacgctcacagtcaaagtctggaccgtctcatgaatcctctcatcgaccagtacctgtattacttgagcagaacaaacactccaagcggaaccactacgcagtccaggcttcagttttctcaggccggagcgagtgacattcgggaccagtctaggaactggcttcctggaccctgttaccgccagcagcgagtatcaaagacagctgcggataacaacaacagtgaatactcgtggactggagctaccaagtaccacctcaatggcagagactctctggtgaatccgggcccggccatggccagccacaaggacgatgaagaaaagttttttcctcaaagcggggttctcatctttgggaagcaaggctcagagaaaacaaatgtggacattgaaaaggtcatgattacagacgaagaggaaatcaggaccaccaatcccgtggctacggagcagtatggttctgtatctaccaacctccagagcggcaacacacaagcagctacctcagatgtcaacacacaaggcgttcttccaggcatggtctggcaggacagagacgtgtacctgcaggggcccatctgggcaaaaattccacacacggacggacattttcacccctctcccctcatgggcggatttggacttaaacaccctcctccacagattctcattaagaataccccggtacctgcgaatccttcgaccaccttcagcgcggcaaagtttgcttccttcatcacacagtattccacggggcaggtcagcgtggagatcgagtgggagctgcagaaggagaacagcaaacgctggaatcccgaaattcagtacacttccaactacaacaaatctgttaatgtggactttactgtggacactaatggggtgtattcagagcctcgccctattggcaccagatacctgactcgtaatctgtaa

SEQ ID NO: 4954 - DNA, 3159 bp, Adeno-associated virus
  source 1..3159: mol_type = other DNA
gattgatttagcggccgcgaattcgcccttgctgcgtcaactggaccaatgagaactttcccttcaacgattgcgtcgacaagatggtgatctggtgggaggagggaaagatgaccgccaaggtcgtggagtcggccaaagccattctcggaggaagcaaggtgcgtgtggaccaaaagtgcaagtcttcggcccagatcgacccgactcccgtgatcgtcacctccaacaccaacatgtgcgccgtgattgatggaaactcaacgaccttcgagcaccagcagccgttgcaagaccggatgttcaaatttgaacttacccgccgtctggatcatgactttggaaaggtcaccaagcaggaagtgaaagactttttccggtgggcaaaggatcacgtggttgaggtggagcatgagttctacgtcaaaaagggtggagccaaaaaaagacccgcccccagtgacgcagatataagtgagcccaaacgggcgcgcgagtcagttgcgcagccatcgacgtcagacgcggaagcttcgatcaactacgcggacaggtaccaaaacaaatgttctcgtcacgtgggcatgaatctgatgctgtttccctgcagacaatgcgagagaatgaatcagaattcaaatatctgcttcactcacggacagaaagactgtccatagtgctttcccgtgtcagaatctcaacccgtttctgtcgtcaaaaaggcgtatcagaaactgtgctacattcatcacatcatgggaaaggtgccagacgcttgcactgcttgcgacctggtcaatgtggatttggatgactgcatctctgaacaataaatgatttaaatcaggtatggctgccgatggttatcttccagattggctcgaggacactctctctgaaggaataagacagtggtggaagctcaaacctggcccaccaccaccaaagcccgcagagcggcataaggacgacagcaggggtcttgtgcttcctggatacaagtacctcggacccttcaacggactcgacaagggagagccggtcaacgaggcagacgccgcggccctcgagcacgacaaggcctacgaccggcagctcgacagcggagacaacccgtacctcaagtacaaccacgccgacgcggagtttcaggagcgccttaaagaagatacgtcttttgggggcaacctcggacgagcagtcttccaggcgaaaaagagggttcttgaacctctgggcctggttgaggaacctgttaagacggctccgggaaaaaagaggccggtagagcactctcctgtggagccagactcctcctcgggaaccggaaaagcgggcaaccagcctgcaagaaaaagattgaatttcggtcagactggagacgcagactccgtacctgacccccagcctctcggacagccaccagcatccccctctggtctgggaactaatacgatggctacaggcagtggcgcaccaatggcagacaataacgagggcgccgacggagtgggtaattcctcgggaaattggcattgcgattccacatggatgggcgacagagtcgtcaccaccagcacccgcacctgggccctgcccacctacaacaaccacctctacaagcagatttccagccaatcaggagccagcaacgacaaccactactttggctacagcaccccttgggggtattttgacttcaacagattccactgccacttttcgccacgcgactggcagagactcatcaacaacaactggggattccggcccaaaagactcaacttcaagctgtttaacattcaagtcaaggaggtcacgcagaatgacggtacgacgacgattgccaataaccttaccagcacggttcaggtgtttactgacttggagtaccagctcccgtacgtcctcggctcggcgcatcaaggatgcctcccgccgttcccagcagacgtcttcatggtgccacagtatggatacctcaccctgaacaacgggagtcaggcggtaggacgctcttccttttactgcctggagtactttccttctcagatgcttcgcaccggaaacaactttaccttcagctacacttttgaagacgttcctttccacagcagctacgctcacagtcaaagtctggaccgtctcatgaatcctctcatcgaccagtacctgtattacttgagcagaacaaacactccaagcggaaccactacgcagtccaggcttcagttttctcaggccggagcgagtgacattcgggaccagtctaggaactggcttcctggaccctgttaccgccagcagcgagtatcaaagacagctgcggataacaacaacagtgaatactcgtggactggagctaccaagtaccacctcaatggcagagactctctggtgaatccgggcccggccatggccagccacaaggacgatgaagaaaagttttttcctcaaagcggggttctcatctttgggaagcaaggctcagagaaaacaaatgtggacattgaaaaggtcatgattacagacgaagaggaaatcaggaccaccaatcccgtggctacggagcagtatggttctgtatctaccaacctccagagcggcaacacacaagcagctacctcagatgtcaacacacaaggcgttcttccaggcatggtctggcaggacagagacgtgtacctgcaggggcccatctgggcaaaaattccacacacggacggacattttcacccctctcccctcatgggcggatttggacttaaacaccctcctccacagattctcattaagaataccccggtacctgcgaatccttcgaccaccttcagcgcggcaaagtttgcttccttcatcacacagtattccacggggcaggtcagcgtggagatcgagtgggagctgcagaaggagaacagcaaacgctggaatcccgaaattcagtacacttccaactacaacaaatctgttaatgtggactttactgtggacactaatggggtgtattcagagcctcgccctattggcaccagatacctgactcgtaatctgtaattgcttgttaatcaataaaccgtttaattcgtttcagttgaactttggtctctgcgaagggcgaattcgtttaaacctgcaggactagtccctttagtgagg

SEQ ID NO: 4955 - protein, 735 aa, Adeno-associated virus
MAADGYLPDWLEDTLSEGIRQWWKLKPGPPPPKPAERHKDDSRGLVLPGYKYLGPFNGLDKGEPVNEADAAALEHDKAYDRQLDSGDNPYLKYNHADAEFQERLKEDTSFGGNLGRAVFQAKKRVLEPLGLVEEPVKTAPGKKRPVEHSPVEPDSSSGTGKAGNQPARKRLNFGQTGDADSVPDPQPLGQPPASPSGLGTNTMATGSGAPMADNNEGADGVGNSSGNWHCDSTWMGDRVVTTSTRTWALPTYNNHLYKQISSQSGASNDNHYFGYSTPWGYFDFNRFHCHFSPRDWQRLINNNWGFRPKRLNFKLFNIQVKEVTQNDGTTTIANNLTSTVQVFTDLEYQLPYVLGSAHQGCLPPFPADVFMVPQYGYLTLNNGSQAVGRSSFYCLEYFPSQMLRTGNNFTFSYTFEDVPFHSSYAHSQSLDRLMNPLIDQYLYYLSRTNTPSGTTTQSRLQFSQAGASDIRDQSRNWLPGPCYRQQRVSKTAADNNNSEYSWTGATKYHLNGRDSLVNPGPAMASHKDDEEKFFPQSGVLIFGKQGSEKTNVDIEKVMITDEEEIRTTNPVATEQYGSVSTNLQSGNTQAATSDVNTQGVLPGMVWQDRDVYLQGPIWAKIPHTDGHFHPSPLMGGFGLKHPPPQILIKNTPVPANPSTTFSAAKFASFITQYSTGQVSVEIEWELQKENSKRWNPEIQYTSNYNKSVNVDFTVDTNGVYSEPRPIGTRYLTRNL

SEQ ID NO: 4956 - DNA, 2205 bp, Adeno-associated virus
  source 1..2205: mol_type = other DNA
atggctgccgatggttatcttccagattggctcgaggacactctctctgaaggaataagacagtggtggaagctcaaacctggcccaccaccaaagcccgcagagcggcataaggacgacagcaggggtcttgtgcttcctggatacaagtacctcggacccttcaacggactcgacaagggagagccggtcaacgaggcagacgccgcggccctcgagcacgacaaggcctacgaccggcagctcgacagcggagacaacccgtacctcaagtacaaccacgccgacgcggagtttcaggagcgccttaaagaagatacgtcttttgggggcaacctcggacgagcagtcttccaggcgaaaaagagggttcttgaacctctgggcctggttgaggaacctgttaagacggctccgggaaaaaagaggcccgtagagcactctcctgtggagccagactcctcctcgggaaccggaaaagcgggcaaccagcctgcaagaaaaagattgaatttcggtcagactggagacgcagactccgtacctgacccccagcctctcggacagccaccagcagccccctctggtctgggaactaatacgatggctacaggcagtggcgcaccaatggcagacaataacgagggcgccgacggagtgggtaattcctcgggagattggcattgcgattccacatggatgggcgacagagtcatcaccaccagcacccgcacctgggccctgcccacctacaacaaccacctctacaagcagatttccagccaatcaggagccagcaatgacaaccactactttggctacagcaccccttgggggtattttgacttcaacagattccactgccacttttcgccacgcgactggcagagactcatcaacaacaactggggattccggcccaaaagactcaacctcaagctgtttaacattcaagtcaaggaggtcacgcagaatgacggtacgacgacgattgccaataaccttaccagcacggttcaggtgtttactgacttggagtaccagctcccgtacgtcctcggctcggcgcatcaaggatgcctcccgccgttcccagcagacgtcttcatggtgccacagtatggatacctcaccctgaacaacgggagtcaggcggtaggacgctcttccttttactgcctggagtactttccttctcagatgcttcgtaccggaaacaactttaccttcagctacacttttgaagacgttcctttccacagcagctacgctcacagtcaaagtctggaccgtctcatgaatcctctcatcgaccagtacctgtattacttgagcagaacaaacactccaagcggaaccactacgcagtccaggcttcagttttctcaggccggagcgagtgacattcgggaccagtctaggaactggcttcctggaccctgttaccgccagcagcgagtatcaaagacagctgcggataacaacaacggtgaatactcgtggactggagctaccaagtaccacctcaatggcagagactctctggtgaatccgggcccggccatggccagccacaaggacgatgaagaaaagttttttcctcaaagcggggttctcatctttgggaagcaaggctcagagaaaacaaatgtggacattgaaaaggtcatgattacagacgaagaggaaatcaggaccaccaatcccgtggctacggagcagtatggttctgtatctaccaacctccagagcggcaacacacgagcagctacctcagatgtcaacacacaaggcgttcttccaggcatggtctggcaggacagagacgtgtacctgcaggggcccatctgggcaaaaattccacacacggacggacattttcacccctctcccctcatgggcggatttggacttaaacaccctcctccacagattctcattaagaataccccggtacctgcgaatccttcgaccaccttcagcgcggcaaagtttgcttccttcatcacacagtattccacggggcaggtcagcgtggagatcgagtgggagctgcagaaggagaacagcaaacgctggaatcccgaaattcagtacacttccaactacaacaaatctgttaatgtggactttactgtggacactaatggggtgtattcagagcctcgccctattggcaccagatacctgactcgtaatctgtaa

SEQ ID NO: 4957 - DNA, 3156 bp, Adeno-associated virus
  source 1..3156: mol_type = other DNA
cgattgaatttagcggccgcgaattcgcccttgctgcgtcaacggaccaatgagaactttcccttcaacgattgcgtcgacaagatggtgatctggtgggaggagggaaagatgaccgccaaggtcgtggagtcggccaaagccattctcggaggaagcaaggtgcgtgtggaccaaaagtgcaagtcttcggcccagatcgacccgactcccgtgatcgtcacctccaacaccaacatgtgcgccgtgattgatggaaactcaacgaccttcgagcaccagcagccgttgcaagaccggatgttcaaatttgaacttacccgccgtctggatcatgactttggaaaggtcaccaagcaggaagtgaaagactttttccggtgggcaaaggatcacgtggttgaggtggagcatgagttctacgtcaaaaagggtggagccaaaaaaagacccgcccccagtgacgcagatataagtgagcccaaacgggcgcgcgagtcagttgcgcagccatcgacgtcagacgcggaagcttcgatcaactacgcggacaggtaccaaaacaaatgttctcgtcacgtgggcatgaatctgatgctgtttccctgcagacaatgcgagcgaatgaatcagaattcaaatatctgcttcactcacggacagaaagactgtttagagtgctttcccgtgtcagaatctcaacccgtttctgtcgtcaaaaaggcgtatcagaaactgtgctacattcatcacatcatgggaaaggtgccagacgcttgcactgcttgcgacctggtcaatgtggatttggatgactgcatctctgaacaataaatgatttaaatcaggtatggctgccgatggttatcttccagattggctcgaggacactctctctgaaggaataagacagtggtggaagctcaaacctggcccaccaccaaagcccgcagagcggcataaggacgacagcaggggtcttgtgcttcctggatacaagtacctcggacccttcaacggactcgacaagggagagccggtcaacgaggcagacgccgcggccctcgagcacgacaaggcctacgaccggcagctcgacagcggagacaacccgtacctcaagtacaaccacgccgacgcggagtttcaggagcgccttaaagaagatacgtcttttgggggcaacctcggacgagcagtcttccaggcgaaaaagagggttcttgaacctctgggcctggttgaggaacctgttaagacggctccgggaaaaaagaggcccgtagagcactctcctgtggagccagactcctcctcgggaaccggaaaagcgggcaaccagcctgcaagaaaaagattgaatttcggtcagactggagacgcagactccgtacctgacccccagcctctcggacagccaccagcagccccctctggtctgggaactaatacgatggctacaggcagtggcgcaccaatggcagacaataacgagggcgccgacggagtgggtaattcctcgggagattggcattgcgattccacatggatgggcgacagagtcatcaccaccagcacccgcacctgggccctgcccacctacaacaaccacctctacaagcagatttccagccaatcaggagccagcaatgacaaccactactttggctacagcaccccttgggggtattttgacttcaacagattccactgccacttttcgccacgcgactggcagagactcatcaacaacaactggggattccggcccaaaagactcaacctcaagctgtttaacattcaagtcaaggaggtcacgcagaatgacggtacgacgacgattgccaataaccttaccagcacggttcaggtgtttactgacttggagtaccagctcccgtacgtcctcggctcggcgcatcaaggatgcctcccgccgttcccagcagacgtcttcatggtgccacagtatggatacctcaccctgaacaacgggagtcaggcggtaggacgctcttccttttactgcctggagtactttccttctcagatgcttcgtaccggaaacaactttaccttcagctacacttttgaagacgttcctttccacagcagctacgctcacagtcaaagtctggaccgtctcatgaatcctctcatcgaccagtacctgtattacttgagcagaacaaacactccaagcggaaccactacgcagtccaggcttcagttttctcaggccggagcgagtgacattcgggaccagtctaggaactggcttcctggaccctgttaccgccagcagcgagtatcaaagacagctgcggataacaacaacggtgaatactcgtggactggagctaccaagtaccacctcaatggcagagactctctggtgaatccgggcccggccatggccagccacaaggacgatgaagaaaagttttttcctcaaagcggggttctcatctttgggaagcaaggctcagagaaaacaaatgtggacattgaaaaggtcatgattacagacgaagaggaaatcaggaccaccaatcccgtggctacggagcagtatggttctgtatctaccaacctccagagcggcaacacacgagcagctacctcagatgtcaacacacaaggcgttcttccaggcatggtctggcaggacagagacgtgtacctgcaggggcccatctgggcaaaaattccacacacggacggacattttcacccctctcccctcatgggcggatttggacttaaacaccctcctccacagattctcattaagaataccccggtacctgcgaatccttcgaccaccttcagcgcggcaaagtttgcttccttcatcacacagtattccacggggcaggtcagcgtggagatcgagtgggagctgcagaaggagaacagcaaacgctggaatcccgaaattcagtacacttccaactacaacaaatctgttaatgtggactttactgtggacactaatggggtgtattcagagcctcgccctattggcaccagatacctgactcgtaatctgtaattgcttgttaatcaataaaccgtttaattcgtttcagttgaactttggtctctgcgaagggcgaattcgtttaaacctgcaggactagtccctttagtgag

SEQ ID NO: 4958 - protein, 734 aa, Adeno-associated virus
MAADGYLPDWLEDTLSEGIRQWWKLKPGPPPKPAERHKDDSRGLVLPGYKYLGPFNGLDKGEPVNEADAAALEHDKAYDRQLDSGDNPYLKYNHADAEFQERLKEDTSFGGNLGRAVFQAKKRVLEPLGLVEEPVKTAPGKKRPVEHSPVEPDSSSGTGKAGNQPARKRLNFGQTGDADSVPDPQPLGQPPAAPSGLGTNTMATGSGAPMADNNEGADGVGNSSGDWHCDSTWMGDRVITTSTRTWALPTYNNHLYKQISSQSGASNDNHYFGYSTPWGYFDFNRFHCHFSPRDWQRLINNNWGFRPKRLNLKLFNIQVKEVTQNDGTTTIANNLTSTVQVFTDLEYQLPYVLGSAHQGCLPPFPADVFMVPQYGYLTLNNGSQAVGRSSFYCLEYFPSQMLRTGNNFTFSYTFEDVPFHSSYAHSQSLDRLMNPLIDQYLYYLSRTNTPSGTTTQSRLQFSQAGASDIRDQSRNWLPGPCYRQQRVSKTAADNNNGEYSWTGATKYHLNGRDSLVNPGPAMASHKDDEEKFFPQSGVLIFGKQGSEKTNVDIEKVMITDEEEIRTTNPVATEQYGSVSTNLQSGNTRAATSDVNTQGVLPGMVWQDRDVYLQGPIWAKIPHTDGHFHPSPLMGGFGLKHPPPQILIKNTPVPANPSTTFSAAKFASFITQYSTGQVSVEIEWELQKENSKRWNPEIQYTSNYNKSVNVDFTVDTNGVYSEPRPIGTRYLTRNL

SEQ ID NO: 4959 - DNA, 2208 bp, Adeno-associated virus
  source 1..2208: mol_type = other DNA
atggctgccgatggttatcttccagattggctcgaggacactctctctgaaggaataagacagtggtggaagctcaaacctggcccaccaccaccaaagcccgcagagcggcataaggacgacagcaggggtcttgtgcttcctgggtacaagtacctcggacccttcaacggactcgacaagggagagccggtcaacgaggcagacgccgcggccctcgagcacgacaaggcctacgaccggcagctcgacagcggagacaacccgtacctcaagtacgaccacgccgacgcggagtttcaggagcgccttaaagaagatacgtcttttgggggcaacctcggacgagcagtcttccaggcaaaaaagagggttcttgaacctctgggcctggttgaggagcctgttaagacggctccgggaaaaaagaggccggtagagcactctcctgtggagccagactcctcctcgggaaccggaaaagcgggcaaccagcctgcaagaaagagattgaatttcggtcagactggagacgcagactccgtacctgacccccagcctctcggacagccaccagcagccccctctggtctgggaactaatacgatggctacaggcagtggcgcaccaatggcagacaataacgatggcgccgacggagtgggtaattcctcgggaaattggcattgcgattccacatggatgggcgacagagtcatcaccaccagcacccgaacctgggctctgcccacctacaacaaccatctgtacaagcagatttccagccaatcaggagccagcaacgacaaccactactttggctacagcaccccttgggggtattttgacttcaacagattccactgccacttttcaccacgtgactggcaaagactcatcaacaacaactggggattccggcccaagagactcaacttcaagctctttaacattcaagtcagagaggtcacgcagaatgatggtacgacgacgattgccaataaccttaccagcacggttcaggtgtttactgactcggagtaccagctcccgtacgtcctcggctcggcgcatcaaggatgcctcccgccgttcccagcagacgtcttcatggtgccacagtatggatacctcaccctgaacaacgggagtcaggcagtaggacgctcttcattttactgcctggagtacttcccttctcagatgctgcgtaccggaaacaactttaccttcagctacacctttgaggatgttcctttccacagcagctacgctcacagccagagtttggaccgtctcatgaatcctctcatcgaccagtacctgtattacttgagcagaacaaacactccaagcggaaccaccacgcagtccaggcttcagttttctcaggccggagcgagtgacattcgggatcagtctaggaactggcttcctggaccctgttaccgccagcagcgagtatcaaagacatctgcggacaacaacaacagtgaatactcgtggattggagctaccaagtaccacctcaatggcagagactctctggtgaatccgggcccggcaatggccagccacaaggacgatgaagaaaagttttttcctcagagcggggttctcatctttggaaaacaaggatcagagaaaacaaatgtggacattgaaaaggtcatgattacagacgaagaggaaatcagaaccaccaatcccgtggccacggagcagtatggttctgtatctaccaacctccagagcggcaacacacaagcatctactgcagatgtcaacacacaaggcgttcttccaggcatggtctggcaggacagagacgtgtacctgcaggggcctatctgggcaaagattccgcacacggacggacattttcacccctctcccctcatgggcggattcggacttaaacaccctcctccacagattctcatcaaaaacaccccggtacctgcgaatccttcgaccaccttcagtgcggcaaagtttgcttccttcatcacacagtattccacggggcgggtcagcgtggagatcgagtgggagctacagaaggagaacagcaaacgctggaatcccgagatccagtacacttccaactacaacaaatctgttaatgtggactttactgtggacactaatggtgtgtattcagagcctcgccccattggcaccagatacctgactcgtaatctgtaa

SEQ ID NO: 4960 - protein, 735 aa, Adeno-associated virus
MAADGYLPDWLEDTLSEGIRQWWKLKPGPPPPKPAERHKDDSRGLVLPGYKYLGPFNGLDKGEPVNEADAAALEHDKAYDRQLDSGDNPYLKYDHADAEFQERLKEDTSFGGNLGRAVFQAKKRVLEPLGLVEEPVKTAPGKKRPVEHSPVEPDSSSGTGKAGNQPARKRLNFGQTGDADSVPDPQPLGQPPAAPSGLGTNTMATGSGAPMADNNDGADGVGNSSGNWHCDSTWMGDRVITTSTRTWALPTYNNHLYKQISSQSGASNDNHYFGYSTPWGYFDFNRFHCHFSPRDWQRLINNNWGFRPKRLNFKLFNIQVREVTQNDGTTTIANNLTSTVQVFTDSEYQLPYVLGSAHQGCLPPFPADVFMVPQYGYLTLNNGSQAVGRSSFYCLEYFPSQMLRTGNNFTFSYTFEDVPFHSSYAHSQSLDRLMNPLIDQYLYYLSRTNTPSGTTTQSRLQFSQAGASDIRDQSRNWLPGPCYRQQRVSKTSADNNNSEYSWIGATKYHLNGRDSLVNPGPAMASHKDDEEKFFPQSGVLIFGKQGSEKTNVDIEKVMITDEEEIRTTNPVATEQYGSVSTNLQSGNTQASTADVNTQGVLPGMVWQDRDVYLQGPIWAKIPHTDGHFHPSPLMGGFGLKHPPPQILIKNTPVPANPSTTFSAAKFASFITQYSTGRVSVEIEWELQKENSKRWNPEIQYTSNYNKSVNVDFTVDTNGVYSEPRPIGTRYLTRNL

SEQ ID NO: 4961 - DNA, 2217 bp, Adeno-associated virus
  source 1..2217: mol_type = other DNA
atggctgccgatggttatcttccagattggctcgaggacaacctctctgagggcattcgcgagtggtgggacttgaaacctggagccccgaaacccaaagccaaccagcaaaagcaggacgacggccggggtctggtgcttcctggctacaagtacctcggacccttcaacggactcgacaagggggagcccgtcaacgcggcggacgcagcggccctcgagcacgacaaggcctacgaccagcagctcaaagcgggtgacaatccgtacctgcggtataaccacgccgacgccgagtttcaggagcgtctgcaagaagatacgtcttttgggggcaacctcgggcgagcagtcttccaggccaagaagcgggttctcgaacctctcggtctggttgaggaaggcgctaagacggctcctggaaagaagagaccggtagagccatcaccccagcgttctccagactcctctacgggcatcggcaagacaggccagcagcccgcgaaaaagagactcaactttgggcagactggcgactcagagtcagtgcccgaccctcaaccaatcggagaaccccccgcaggcccctctggtctgggatctggtacaatggctgcaggcggtggcgctccaatggcagacaataacgaaggcgccgacggagtgggtagttcctcaggaaattggcattgcgattccgcatggctgggcgacagagtcatcaccaccagcacccgaccctgggccctccccacctacaacaaccacctctacaagcaaatctccaacgggacatcgggaggaagcaccaacgacaacacctacttcggctacagcaccccctgggggtattttgactttaacagattccactgccacttctcaccacgtgactggcagcgactcatcaacaacaactggggattccggcccaagagactcaacttcaagctcttcaacatccaggtcaaggaggtcacgcagaatgaaggcaccaagaccatcgccaataaccttaccagcacgattcaggtctttacggactcggaataccagctcccgtacgtcctcggctctgcgcaccagggctgcccgcctccgttcccggcggacgtcttcatgattcctcagtacgggtacctgactctgaacaacggcagtcaggccgtgggccgttcctccttctactgcctggagtactttccttctcaaatgcggagaacgggcaacaactttgagttcagctaccagtttgaggacgtgccttttcacagcagctacgcgcatagccaaagcctggaccggctgatgaaccccctcatcgaccagtacctgtactacctgtctcggactcagtccacgggaggtaccgcaggaactcagcagttgctattttctcaggccgggcctaataacatgtcggctcaggccaaaaactggctacccgggccctgctaccggcagcaacgcgtctccacgacactgtcgcaaaataacaacagcaactttgcttggaccggtgccaccaagtatcatctgaatggcagagactctctggtaaatcccggtgtcgctatggcaacgcacaaggacgacgaagagcgattttttccatccagcggagtcttgatgtttgggaaacagggagctggaaaagacaacgtggactatagcagcgttatgctaaccagtgaggaagaaatcaaaaccaccaacccagtggccacagaacagtacggcgtggtggccgataacctgcaacagcaaaacgccgctcctattgtaggggccgtcaacagtcaaggagccttacctggcatggtctggcagaaccgggacgtgtacctgcagggtcctatctgggccaagattcctcacacggacggcaactttcatccttcgccgctgatgggaggctttggactgaaacacccgcctcctcagatcctgattaagaatacacctgttcccgcggatcctccaactaccttcagtcaagccaagctggcgtcgttcatcacgcagtacagcaccggacaggtcagcgtggaaattgaatgggagctgcagaaagagaacagcaagcgctggaacccagagattcagtatacttccaactactacaaatctacaaatgtggactttgctgtcaatactgagggtacttattcagagcctcgccccattggcacccgttacctcacccgtaacctgtaa

SEQ ID NO: 4962 - protein, 738 aa, Adeno-associated virus
MAADGYLPDWLEDNLSEGIREWWDLKPGAPKPKANQQKQDDGRGLVLPGYKYLGPFNGLDKGEPVNAADAAALEHDKAYDQQLKAGDNPYLRYNHADAEFQERLQEDTSFGGNLGRAVFQAKKRVLEPLGLVEEGAKTAPGKKRPVEPSPQRSPDSSTGIGKTGQQPAKKRLNFGQTGDSESVPDPQPIGEPPAGPSGLGSGTMAAGGGAPMADNNEGADGVGSSSGNWHCDSAWLGDRVITTSTRPWALPTYNNHLYKQISNGTSGGSTNDNTYFGYSTPWGYFDFNRFHCHFSPRDWQRLINNNWGFRPKRLNFKLFNIQVKEVTQNEGTKTIANNLTSTIQVFTDSEYQLPYVLGSAHQGCPPPFPADVFMIPQYGYLTLNNGSQAVGRSSFYCLEYFPSQMRRTGNNFEFSYQFEDVPFHSSYAHSQSLDRLMNPLIDQYLYYLSRTQSTGGTAGTQQLLFSQAGPNNMSAQAKNWLPGPCYRQQRVSTTLSQNNNSNFAWTGATKYHLNGRDSLVNPGVAMATHKDDEERFFPSSGVLMFGKQGAGKDNVDYSSVMLTSEEEIKTTNPVATEQYGVVADNLQQQNAAPIVGAVNSQGALPGMVWQNRDVYLQGPIWAKIPHTDGNFHPSPLMGGFGLKHPPPQILIKNTPVPADPPTTFSQAKLASFITQYSTGQVSVEIEWELQKENSKRWNPEIQYTSNYYKSTNVDFAVNTEGTYSEPRPIGTRYLTRNL

SEQ ID NO: 4963 - protein, 735 aa, Adeno-associated virus
MAADGYLPDWLEDTLSEGIRQWWKLKPGPPPPKPAERHKDDSRGLVLPGYKYLGPFNGLDKGEPVNEADAAALEHDKAYDRQLDSGDNPYLKYNHADAEFQERLKEDTSFGGNLGRAVFQAKKRVLEPLGLVEEPVKTAPGKKRPVEHSPVEPDSSSGTGKAGQQPARKRLNFGQTGDADSVPDPQPLGQPPAAPSGLGSTTMATGSGAPMADNNEGADGVGNSSGNWHCDSQWLGDRVITTSTRTWALPTYNNHLYKQISSQSGASNDNHYFGYSTPWGYFDFNRFHCHFSPRDWQRLINNNWGFRPKRLNFKLFNIQVKEVTQNDGTTTIANNLTSTVQVFTDSEYQLPYVLGSAHQGCLPPFPADVFMVPQYGYLTLNNGSQAVGRSSFYCLEYFPSQMLRTGNNFQFSYTFEDVPFHSSYAHSQSLDRLMNPLVDQYLYYLNKTQTNSGTLQQSRLLFSQAGPTNMSLQAKNWLPGPCYRQQRLSKQANDNNNSNFPWTAATKYHLNGRDSLVNPGPAMASHKDDEEKFFPMHGTLIFGKQGTNANDADLENVMITDEEEIRTTNPVATEQYGTVSNNLQNSNTGPTTGTVNHQGALPGMVWQDRDVYLQGPIWAKIPHTDGHFHPSPLMGGFGLKHPPPQIMIKNTPVPANPPTNFSSAKFASFITQYSTGQVSVEIEWELQKENSKRWNPEIQYTSNYNKSVNVDFTVDTNGVYSEPRPIGTRYLTRNL

SEQ ID NO: 4964 - DNA, 3158 bp, Adeno-associated virus
  source 1..3158: mol_type = other DNA
gattgaatttagcggccgcgaattcgcccttgctgcgtcaactggaccaatgagaactttcctttcaatgattgcgtcgacaagatggtgatctggtgggaggagggaaagatgaccgccaaggtcgtggagtcggccaaagccattctcggaggaagcaaggtgcgcgcggaccagaaatgcaagtcctcggcccagatagacccgactcccgtgattgtcacctccaacaccaacatgtgcgccgtgattgacgggaactcaacgaccttcgaacaccagcagccgttgcaagaccggatgttcaaatttgaactcacccgccgtctggatcatgactttgggaaggtcaccaagcaggaagtcaaagactttttccggtgggcaaaggatcacgtggttgaggtggagcatgaattctacgtcaaaaagggtggagctaagaaaagacccgcccccagtgacgcagatataagtgagcccaaacgggcgcgcgagtcagttgcgcagccatcgacgtcagacgcggaagcttcgatcaactacgcgggcaggtaccaaaacaaatgttctcgtcacgtgggcatgaatctgatgctgtttccctgcagacaatgcgagagaatgaatcagaattcaaatatctgcttcactcacggacagaaagactgtttagagtgctttcccgtgtcagaatctcaacccgtttctgtcgtcaaaaaggcgtatcagaaactttgctacattcatcatatcatgggaaaggtgccagacgcttgcactgcctgcgatctggtcaatgtggatttggatgactgcatctctgaacaataaatgatttaaatcaggtatggctgccgatggttatcttccagattggctcgaggacactctctctgaaggaataagacagtggtggaagctcaaacctggcccaccaccaccaaagcccgcagagcggcataaggacgacagcaggggtcttgtgcttcctgggtacaagtacctcggacccttcaacggactcgacaagggggagccggtcaacgaggcagacgccgcggccctcgagcacgacaaggcctacgaccggcagctcgacagcggagacaacccgtacctcaagtacaaccacgccgacgcggagtttcaggagcgccttaaagaagatacgtcttttgggggcaacctcggacgagcagtcttccaggcaaaaaagagggttcttgaacctctgggcctggttgaggaacctgttaaaacggctccgggaaaaaagaggccggtagagcactctcctgtggagccagactcctcctcgggaaccggaaaagcgggccagcagcctgcaagaaaaagattgaatttcggtcagactggagacgcagactccgtacctgacccccagcctctcggacagccaccagcagccccctctggtctgggatctactacaatggctacaggcagtggcgcaccaatggcagacaataacgagggtgccgatggagtgggtaattcctcgggaaattggcattgcgattcccaatggctgggcgacagagtcatcaccaccagcacccgcacctgggccctgcccacctacaacaaccacctctacaagcaaatctccagccaatcaggagcctcaaacgacaaccactactttggctacagcaccccctgggggtattttgacttcaacagattccactgccacttttcaccacgtgactggcaaagactcatcaacaacaactggggattccgacccaagagactcaacttcaagctctttaacattcaagtcaaagaggtcacgcagaatgacggtacgacgacgattgccaataaccttaccagcacggttcaggtgtttactgactcggagtaccagctcccgtacgtcctcggctcggcgcatcaaggatgcctcccgccgtttccagcggacgtcttcatggtcccacagtatggatacctcaccctgaacaacgggagtcaggcagtaggacgctcttcattttactgcctggagtactttccttctcagatgctgcgtaccggaaacaactttcaattcagctacacttttgaagacgtgcctttccacagcagctacgctcacagccagagtctggatcggctgatgaatcctctggtcgaccagtacctgtattatctgaacaagacacaaacaaatagtggaactcttcagcagtctcggctactgtttagccaagctggacccaccaacatgtctcttcaagctaaaaactggctgcctggaccttgctacagacagcagcgtctgtcaaagcaggcaaacgacaacaacaacagcaactttccctggactgcagctacaaagtatcatctaaatggccgggactcgttggttaatccaggaccagctatggccagtcacaaggatgacgaagaaaagtttttccccatgcatggaacccttatatttggtaaacaaggaacaaatgccaacgacgcggatttggaaaatgtcatgattacagatgaagaagaaatcaggaccaccaatcccgtggctacggagcagtacggaactgtatcaaataatttgcaaaactcaaacactggtccaactactggaactgtcaatcaccaaggagcgttacctggtatggtgtggcaggatcgagacgtgtacctgcagggacccatttgggccaagattcctcacaccgatggacactttcatccttctccactgatgggaggttttggactcaaacacccacctcctcaaatcatgatcaaaaacactcccgttccagccaatcctcccacaaacttcagttctgccaagtttgcttctttcatcacacagtattccacggggcaggtcagcgtggagatcgagtgggagctgcagaaggagaacagcaaacgctggaatcccgaaattcagtacacttccaactacaacaaatctgttaatgtggactttactgtggacactaatggtgtgtattcagagcctcgccccattggcaccagatacctgactcgtaatctgtaattgcttgttaatcaataaaccgtttaattcgtttcagttgaactttggtctctgcgaagggcgaattcgtttaaacctgcaggactagtccctttagtga

SEQ ID NO: 4965 - protein, 735 aa, Adeno-associated virus
MAADGYLPDWLEDTLSEGIRQWWKLKPGPPPPKPAERHKDDSRGLVLPGYKYLGPFNGLDKGEPVNEADAAALEHDKAYDRQLDSGDNPYLKYNHADAEFQERLKEDTSFGGNLGRAVFQAKKRVLEPLGLVEEPVKTAPGKKRPVEHPPVEPDSSSGTGKAGQQPARKRLNFGQTGDADSVPDPQPLGQPPAAPSGLGSTTMATGSGAPMADNNEGADGVGNSSGNWHCDSQWLGDRVITTSTRTWALPTYNNHLYKQISSQSGASNDNHYFGYSTPWGYFDFNRFHCHFSPRDWQRLINNNWGFRPKRLNFKLFNIQVKEVTQNDGTTTIANNLTSTVQVFTDSEYQLPYVLGSAHQGCLPPFPADVFMVPQYGYLTLNNGSQAVGRSSFYCLEYFPSQMLRTGNNFQFSYTFEDVPFHSSYAHSQSLDRLMNPLIDQYLYYLNKTQTNSGTLQQSRLLFSQAGPTNMSLQAKNRLPGPCYRQQRLSKQANDNNNSNFPWTAATKYHLNGRDSLVNPGPAMASHKDDEEKFFPMHGTLIFGKQGTNANDADLENVMITDEEEIRTTNPVATEQYGTVSNNLQNSNTGPTTGTVNHQGALPGMVWQDRDVYLQGPIWAKIPHTDGHFHPSPLVGGFGLKHPPPQIMIKNTPVPANPPTNFSSAKFASFITQYSTGQVSVEIEWELQKENSKRWNPEIQYTSNYNKSVNVDFTVDTNGVYSEPRPIGTRYLTRNL

SEQ ID NO: 4966 - DNA, 3159 bp, Adeno-associated virus
  source 1..3159: mol_type = other DNA
gattgaatttagcggccgcgaattcgcccttgctgcgtcaactggaccaatgagaactttcctttcaatgattgcgtcgacaagatggtgatctggtgggaggagggaaagatgaccgccaaggtcgtggagtcggccaaagccattctcggaggaagcaaggtgcgcgtggaccagaaatgcaagtcctcggcccagatagacccgactcccgtgattgtcacctccaacaccgacatgtgcgccgtgattgacgggaactcaacgaccttcgaacaccagcagccgttgcaagaccggatgttcaaatttgaactcacccgccgtctggatcatgactttgggaaggtcaccaagcaggaagtcaaagactttttccggtgggcaaaggatcacgtggttgaggtggagcatgaattctacgtcaaaaagggtggagctaagaaaagacccgcccccagtgacgcagatataagtgagcccaaacgggcgcgcgagtcagttgcgcagccatcgacgtcagacgcggaagcttcgatcaactacgcggacaggtaccaaaacaaatgttctcgtcacgtgggcatgaatctgatgctgtttccctgcagacaatgcgagagaatgaatcagaattcaaatatctgcttcactcacggacagaaagactgtttagagtgctttcccgtgtcagaatctcaacccgtttctgtcgtcaaaaaggcgtatcagaaactttgctacattcatcatatcatgggaaaggtgccagacgcttgcactgcctgcgatctggtcaatgtggatttggatgactgcatctctgaacaataaatgatttaaatcaggtatggctgccgatggttatcttccagattggctcgaggacactctctctgaaggaataagacagtggtggaagctcaaacctggcccaccaccaccaaagcccgcagagcggcataaggacgacagcaggggtcttgtgcttcctgggtacaagtacctcggacccttcaacggactcgacaagggggagccggtcaacgaggcagacgccgcggccctcgagcacgacaaggcctacgaccggcagctcgacagcggagacaacccgtacctcaagtacaaccacgccgacgcggagtttcaggagcgccttaaagaagatacgtcttttgggggcaacctcggacgagcagtcttccaggcaaaaaagagggttcttgaacctctgggcctggttgaggaacctgttaaaacggctccgggaaaaaagaggccggtagagcaccctcctgtggagccagactcctcctcgggaaccggaaaagcgggccagcagcctgcaagaaaaagattgaatttcggtcagactggagacgcagactccgtacctgacccccagcctctcggacagccaccagcagccccctctggtctgggatctactacaatggctacaggcagtggcgcaccaatggcagacaataacgagggtgccgatggagtgggtaattcctcgggaaattggcattgcgattcccaatggctgggcgacagagtcatcaccaccagcacccgcacctgggccctgcccacctacaacaaccacctctacaagcaaatctccagccaatcaggagcctcaaacgacaaccactactttggctacagcaccccctgggggtattttgacttcaacagattccactgccacttttcaccacgtgactggcaaagactcatcaacaacaactggggattccgacccaagagactcaacttcaagctctttaacattcaagtcaaagaggtcacgcagaatgacggtacgacgacgattgccaataaccttaccagcacggttcaggtgtttactgactcggagtaccagctcccgtacgtcctcggctcggcgcatcaaggatgcctcccgccgtttccagcggacgtcttcatggtcccacagtatggatacctcaccctgaacaacgggagtcaggcagtaggacgctcttcattttactgcctggagtactttccttctcagatgctgcgtaccggaaacaactttcagttcagctacacttttgaagacgtgcctttccacagcagctacgctcacagccagagtctggatcggctgatgaatcctctgatcgaccagtacctgtattatctgaacaagacacaaacaaatagtggaactcttcagcagtctcggctactgtttagccaagctggacccaccaacatgtctcttcaagctaaaaaccggctgcctggaccttgctacagacagcagcgtctgtcaaagcaggcaaacgacaacaacaacagcaactttccctggaccgcagctacaaagtatcatctaaatggccgggactcgttggttaatccaggaccagctatggccagtcacaaggatgacgaagaaaagtttttccccatgcatggaacccttatatttggtaaacaaggaacaaatgccaacgacgcggatttggaaaatgtcatgattacagatgaagaagaaatcaggaccaccaatcccgtggctacggagcagtacggaactgtatcaaataatttgcaaaactcaaacactggtccaactactggaactgtcaatcaccaaggagcgttacctggtatggtgtggcaggatcgagacgtgtacctgcagggacccatttgggccaagattcctcacaccgatggacactttcatccttctccactggtgggaggttttggactcaaacacccacctcctcaaatcatgatcaaaaacactcccgttccagccaatcctcccacaaacttcagttctgccaagtttgcttctttcatcacacagtattccacggggcaggtcagcgtggagatcgagtgggagctgcagaaggagaacagcaaacgctggaatcccgaaattcagtacacttccaactacaacaaatctgttaatgtggactttactgtggacactaatggtgtgtattcagagcctcgccccattggcaccagatacctgactcgtaatctgtaattgcttgttaatcaataaaccgtttaattcgtttcagttgaactttggtctctgcgaagggcgaattcgtttaaacctgcaggactagtccctttagtgag

SEQ ID NO: 4967 - DNA, 2208 bp, Adeno-associated virus
  source 1..2208: mol_type = other DNA
atggctgccgatggttatcttccagattggctcgaggacactctctctgaaggaataagacagtggtggaagctcaaacctggcccaccaccaccaaagcccgcagagcggcataaggacgacagcaggggtcttgtgcttcctgggtacaagtaccttggacccttcaacggactcgacaagggagagccggtcaacgaggcagacgccgcggccctcgagcacgacaaggcctacgaccggcagctcgacagcggagacaacccgtaccccaagtacaaccacgccgacgcggagttccaggagcgtcttaaagaagatacgtcttttgggggcaacctcggacgagcagtcttccaggcgaaaaagagggttcttgaacctctgggcctggttgaggaacctgttaagacggctccgggaaaaaagaggccggtagagcactctcctgcggagccagactcctcctcgggaaccggaaaagcgggccagcagcctgcaagaaagagattgaatttcggtcagactggagacgcagactccgtacctgacccccagcctctcggacagccaccagcagccccctctggtctgggaactaatacgatggctacaggcagtggcgcaccaatggcagacaataacgagggcgccgacggagtgggtaattcctcgggaaattggcattgcgattccacatggatgggcgacagagtcatcaccaccagcacccgcacctgggctctgcccacctacaacaaccacctctacaagcagatttccagccaatcaggagcctcaaacgacaaccactactttggctacagcaccccttgggggtattttgacttcaacagattccactgccacttttcgccacgtgactggcaaagactcatcaacaacaattggggattccggcccaaaagactcaacttcaagctctttaacattcaagtcaaggaggtcacgcagaatgacggtacgacgacgattgccaataaccttaccagcacggttcaggtgtttactgactcggagtaccagctcccgtacgtcctcggctcggcgcatcaaggatgcctcccgccgttcccagcagacgtcttcatggtgccacagtatggatacctcaccctgaacaacgggagtcaggcagtaggacgctcttcattttactgcctggagtactttccttctcagatgctgcgtaccggaaacaactttaccttcagctacacctttgaggacgttcctttccacagcagctacgcccacagccagagtttggaccgtctcatgaatcctctcatcgaccagtacctgtattacttgagcagaacaaacactccaagcggaaccaccacgcagtcaaggcttcagttttctcaggccggagcaagtgacattcgggaccagtctaggaactggcttcctggaccctgttaccgccagcagcgagtatcaaagacatctgcggataacaacaacagtgaatactcgtggactggagctaccaagtaccaccttaatggaagagactctctggtgaatccgggcccggccatggccagccacaaggacgatgaagaaaagttttttcctcagagcggggttctcatctttggaaaacaagactcgggaaaaactaatgtggacattgaaaaggtcatgattacagacgaagaggaaatcaggaccaccaatcccgtggctacggagcagtatggttctgtatctaccaacctccagagcggcaacacacaagcagctacctcagatgtcaacacacaaggcgttcttccaggcatggtgtggcaggacagagacgtgtacctgcaggggcccatctgggcaaagattccacacacggacggacattttcacccctctcccctcatgggcggattcggacttaaacaccctcccccgcagattctcatcaagaacaccccggtacctgcgaatccttcgactaccttcagtgcggcaaagtttgcttccttcattacacagtactccacggggcaggtcagcgtggagatcgagtgggagctgcagaaggagaacagcaaacgctggaatcccgagattcagtacacttccaactacaacaaatctgttaatgtggactttactgtggacactaatggtgtgtattcagagcctcgccccattggcaccaggtacctgactcgtaatctgtaa

SEQ ID NO: 4968 - protein, 735 aa, Adeno-associated virus
MAADGYLPDWLEDTLSEGIRQWWKLKPGPPPPKPAERHKDDSRGLVLPGYKYLGPFNGLDKGEPVNEADAAALEHDKAYDRQLDSGDNPYPKYNHADAEFQERLKEDTSFGGNLGRAVFQAKKRVLEPLGLVEEPVKTAPGKKRPVEHSPAEPDSSSGTGKAGQQPARKRLNFGQTGDADSVPDPQPLGQPPAAPSGLGTNTMATGSGAPMADNNEGADGVGNSSGNWHCDSTWMGDRVITTSTRTWALPTYNNHLYKQISSQSGASNDNHYFGYSTPWGYFDFNRFHCHFSPRDWQRLINNNWGFRPKRLNFKLFNIQVKEVTQNDGTTTIANNLTSTVQVFTDSEYQLPYVLGSAHQGCLPPFPADVFMVPQYGYLTLNNGSQAVGRSSFYCLEYFPSQMLRTGNNFTFSYTFEDVPFHSSYAHSQSLDRLMNPLIDQYLYYLSRTNTPSGTTTQSRLQFSQAGASDIRDQSRNWLPGPCYRQQRVSKTSADNNNSEYSWTGATKYHLNGRDSLVNPGPAMASHKDDEEKFFPQSGVLIFGKQDSGKTNVDIEKVMITDEEEIRTTNPVATEQYGSVSTNLQSGNTQAATSDVNTQGVLPGMVWQDRDVYLQGPIWAKIPHTDGHFHPSPLMGGFGLKHPPPQILIKNTPVPANPSTTFSAAKFASFITQYSTGQVSVEIEWELQKENSKRWNPEIQYTSNYNKSVNVDFTVDTNGVYSEPRPIGTRYLTRNL

SEQ ID NO: 4969 - DNA, 2208 bp, Adeno-associated virus
  source 1..2208: mol_type = other DNA
atggctgccgatggttatcttccagattggctcgaggacactctctctgaaggaataagacagtggtggaagctcaaacctggcccaccaccaccaaagcccgcagagcggcataaggacgacagcaggggtcttgtgcttcctgggtacaagtaccttggacccttcaacggactcgacaagggagagccggtcaacgaggcagacgccgcggccctcgagcacgacaaggcctacgaccggcagctcgacggcggagacaacccgtacctcaagtacaaccacgccgacgcggagttccaggagcgtcttaaagaagatacgtcttttgggggcaacctcggacgagcagtcttccaggcgaaaaagagggttcttgaacctctgggcctggttgaggaacctgttaagacggctccgggaaaaaagaggccggtagagcactctcttgcggagccagactcctcctcgggaaccggaaaagcgggccagcagcctgcaagaaggagattgaatttcggtcagactggagacgcagactccgtacctgacccccagcctctcggacagccaccagcagccccctctggtctgggaactaatacgatggctacaggcagtggcgcaccaatggcagacaataacgagggcgccgacggagtgggtaattcctcgggaaattggcattgcgattccacatggatgggcgacagagtcatcaccaccagcacccgcacctgggctctgcccacctacaacaaccacctctacaggcagatttccagccaatcaggagcctcaaacgacaaccactactttggctacagcaccccttgggggtattttgacttcaacagattccactgccacttttcgccacgtgactggcaaagactcatcaacaacaattggggatcccggcccaaaagactcaacttcaagctctttaacattcaagtcaaggaggtcacgcagaatgacggtacgacgacgattgccaataaccttaccagcacggttcaggtgtttactgactcggagtaccagctcccgtacgtcctcggctcggcgcatcaaggatgcctcccgccgttcccagcagacgtcttcatggtgccacagtatggatacctcaccctgaacaacgggagtcaggcagtaggacgctcttcattttactgcctggagtactttccttctcagatgctgcgtaccggaaacaactttaccttcagctacacctttgaggacgttcctttccacagcagctacgcccacagccagagtttggaccgtctcatgaatcctctcgtcgaccagtacctgtattacttgagcagaacaaacactccaagcggaaccaccacgcagtcaaggcttcagttttctcaggccggagcaagtgacattcgggaccagtctaggaactggcttcctggaccctgttaccgccagcagcgagtatcaaagacatctgcggataacaacaacagtgaatactcgtggactggagctaccaagtaccaccttaatggaagagactctctggtgaatccgggcccggccatggccagccacaaggacgatgaagaaaagttttttcctcagagcggggttctcatctttggaaaacaagactcgggaaaaactaatgtggacattgaaaaggtcatgattacagacgaagaggaaatcaggaccaccaatcccgtggctacggagcagtatggttctgtatctaccaacctccagagcggcaacacacaagcagctacctcagatgtcaacacacaaggcgttcttccaggcatggtgtggcaggacagagacgtgtacctgcaggggcccatctgggcaaagattccacacacggacggacattttcacccctctcccctcatgggcggattcggacttaaacaccctcccccgcagattctcatcaagaacaccccggtacctgcgaatccttcgactaccttcagtgcggcaaagtttgcttccttcattacacagtactccacggggcaggtcagcgtggagatcgagtgggagctgcagaaggagaacagcaaacgctggaatcccgagattcagtacacttccaactacaacaaatctgttaatgtggactttactgtggacactaatggtgtgtattcagagcctcgccccattggcaccagatacctgactcgtaatctgtaa

SEQ ID NO: 4970 - protein, 735 aa, Adeno-associated virus
MAADGYLPDWLEDTLSEGIRQWWKLKPGPPPPKPAERHKDDSRGLVLPGYKYLGPFNGLDKGEPVNEADAAALEHDKAYDRQLDGGDNPYLKYNHADAEFQERLKEDTSFGGNLGRAVFQAKKRVLEPLGLVEEPVKTAPGKKRPVEHSLAEPDSSSGTGKAGQQPARRRLNFGQTGDADSVPDPQPLGQPPAAPSGLGTNTMATGSGAPMADNNEGADGVGNSSGNWHCDSTWMGDRVITTSTRTWALPTYNNHLYRQISSQSGASNDNHYFGYSTPWGYFDFNRFHCHFSPRDWQRLINNNWGSRPKRLNFKLFNIQVKEVTQNDGTTTIANNLTSTVQVFTDSEYQLPYVLGSAHQGCLPPFPADVFMVPQYGYLTLNNGSQAVGRSSFYCLEYFPSQMLRTGNNFTFSYTFEDVPFHSSYAHSQSLDRLMNPLVDQYLYYLSRTNTPSGTTTQSRLQFSQAGASDIRDQSRNWLPGPCYRQQRVSKTSADNNNSEYSWTGATKYHLNGRDSLVNPGPAMASHKDDEEKFFPQSGVLIFGKQDSGKTNVDIEKVMITDEEEIRTTNPVATEQYGSVSTNLQSGNTQAATSDVNTQGVLPGMVWQDRDVYLQGPIWAKIPHTDGHFHPSPLMGGFGLKHPPPQILIKNTPVPANPSTTFSAAKFASFITQYSTGQVSVEIEWELQKENSKRWNPEIQYTSNYNKSVNVDFTVDTNGVYSEPRPIGTRYLTRNL

SEQ ID NO: 4971 - protein, 738 aa, Adeno-associated virus
MAADGYLPDWLEDNLSEGIREWWDLKPGAPKPKANQQKQDDGRGLVLPGYKYLGPFNGLDKGEPVNAADAAALEHDKAYDQQLKAGDNPYLRYNHADAEFQERLQEDTSFGGNLGRAVFQAKKRVLEPLGLVEEAAKTAPGKKRPVEPSPQRSPDSSAGIGKKGQQPAKKRLNFGQTGDSESVPDPQPIGEPPAGPSGLGSGTMAAGGGAPMADNNEGADGVGSSSGNWHCDSTWLGDRVITTSTRTWALPTYNNHLYKQISNGTSGGSTNDNTYFGYSTPWGYFDFNRFHCHFSPRDWQRLINNNWGFRPKRLSFKLFNIQVKEVTQNEGTETIANNLTSTIQVFTDSEYQLPYVLGSAHQGCLPPFPADVFMIPQYGYLTLNNGSQAVGRSSFYCLEYFPSQMLRTGNNFEFSYTFEDVPFHSSCAHSQSSDRLMNPLIDQYLYYLSRTRSTGGTQGTQQLLFSQAGPANMSAQAKNWLPGPCYRQQRVSTTLSQNNNSNFAWTGATKYHLNGRDSLVNPGVAMATHKDDEERFFPSSGVLMFGKQGAGRDNVDYSSVMLTSEEEIKTTNPVATEQYGVVADNLQQTNTGPIVGNVNSQGALPGMVWQNRDVYLQGPIWAKIPHTDGNFHPSPLMGGFGLKHPPPQILIKNTPVPADPPTTFSQAKLASFITQYSTGQVSVEIEWELQKENSKRWNPEIQYTSNYYKSTNVDFAVNTEGTYSEPRPIGTRYLTRNL

SEQ ID NO: 4972 - DNA, 2217 bp, Adeno-associated virus
  source 1..2217: mol_type = other DNA
atggctgctgacggttatcttccagattggctcgaggacaacctctctgagggcattcgcgagtggtgggacctgaaacctggagcccccaagcccaaggccaaccagcagaagcaggacgacggccggggtctggtgcttcttggctacaagtacctcggacccttcaacggactcgacaagggggagcccgtcaatgcggcggacgcagcggccctcgagcacgacaaggcctacgaccagcagctcaaagcgggtgacaatccgtacctgcggtataaccacgccgacgccgagtttcaggagcgtctgcaagaagatacgtcttttgggggcaacctcgggcgagcagtcttccaggccaagaagcgggttctcgaacctctcggtctggttgaggaagctgctaagacggctcctggaaagaagagaccggtagaaccgtcacctcagcgttcccccgactcctccacgggcatcggcaagaaaggccagcagcccgctaaaaagagactgaactttggtcagactggcgactcagagtcagtccccgaccctcaaccaatcggagaaccaccagcaggcccctctggtctgggatctggtacaatggctgcaggcggtggcgctccaatggcagacaataacgaaggcgccgacggagtgggtagttcctcaggaaattggcattgcgattccacatggctgggcgacagagtcatcaccaccagcacccgaacctgggccctgcccacctacaacaaccacctctacaagcaaatatccaatgggacatcgggaggaagcaccaacgacaacacctacttcggctacagcaccccctgggggtattttgacttcaacagattccactgccacttctcaccacgtgactggcagcgactcatcaacaacaactggggattccggccaaaaagactcagcttcaagctcttcaacatccaggtcaaggaggtcacgcagaatgaaggcaccaagaccatcgccaataaccttaccagcacgattcaggtatttacggactcggaataccagctgccgtacgtcctcggctccgcgcaccagggctgcctgcctccgttcccggcggacgtcttcatgattccccagtacggctaccttacactgaacaatggaagtcaagccgtaggccgttcctccttctactgcctggaatattttccatctcaaatgctgcgaactggaaacaattttgaattcagctacaccttcgaggacgtgcctttccacagcggctacgcacacagccagagcttggaccgactgatgaatcctctcatcgaccagtacctgtactacttatccagaactcagtccacaggaggaactcaaggtacccagcaattgttattttctcaagctgggcctgcaaacatgtcggctcaggctaagaactggctacctggaccttgctaccggcagcagcgagtctctacgacactgtcgcaaaacaacaacagcaactttgcttggactggtgccaccaaatatcacctgaacggaagagactctttggtaaatcccggtgtcgccatggcaacccacaaggacgacgaggaacgcttcttcccgtcgagtggagtcctgatgtttggaaaacagggtgctggaagagacaatgtggactacagcagcgttatgctaaccagcgaagaagaaattaaaaccactaaccctgtagccacagaacaatacggtgtggtggctgacaacttgcagcaaaccaatacagggcctattgtgggaaatgtcaacagccaaggagccttacctggcatggtctggcagaaccgagacgtgtacctgcagggtcccatctgggccaagattcctcacacggacggcaacttccacccttcaccgctaatgggaggatttggactgaagcacccacctcctcagatcctgatcaagaacacgccggtacctgcggatcctccaacgacgttcagccaggcgaaattggcttccttcattacgcagtacagcaccggacaggtcagcgtggaaatcgagtgggagctgcagaaggagaacagcaaacgctggaacccagagattcagtacacttcaaactactacaaatctacaaatgtggactttgctgtcaatacagagggaacttattctgagcctcgccccattggtactcgttacctcacccgtaatctgtaa

SEQ ID NO: 4973 - protein, 738 aa, Adeno-associated virus
MAADGYLPDWLEDNLSEGIREWWDLKPGAPKPKANQQKQDDGRGLVLLGYKYLGPFNGLDKGEPVNAADAAALEHDKAYDQQLKAGDNPYLRYNHADAEFQERLQEDTSFGGNLGRAVFQAKKRVLEPLGLVEEAAKTAPGKKRPVEPSPQRSPDSSTGIGKKGQQPAKKRLNFGQTGDSESVPDPQPIGEPPAGPSGLGSGTMAAGGGAPMADNNEGADGVGSSSGNWHCDSTWLGDRVITTSTRTWALPTYNNHLYKQISNGTSGGSTNDNTYFGYSTPWGYFDFNRFHCHFSPRDWQRLINNNWGFRPKRLSFKLFNIQVKEVTQNEGTKTIANNLTSTIQVFTDSEYQLPYVLGSAHQGCLPPFPADVFMIPQYGYLTLNNGSQAVGRSSFYCLEYFPSQMLRTGNNFEFSYTFEDVPFHSGYAHSQSLDRLMNPLIDQYLYYLSRTQSTGGTQGTQQLLFSQAGPANMSAQAKNWLPGPCYRQQRVSTTLSQNNNSNFAWTGATKYHLNGRDSLVNPGVAMATHKDDEERFFPSSGVLMFGKQGAGRDNVDYSSVMLTSEEEIKTTNPVATEQYGVVADNLQQTNTGPIVGNVNSQGALPGMVWQNRDVYLQGPIWAKIPHTDGNFHPSPLMGGFGLKHPPPQILIKNTPVPADPPTTFSQAKLASFITQYSTGQVSVEIEWELQKENSKRWNPEIQYTSNYYKSTNVDFAVNTEGTYSEPRPIGTRYLTRNL

SEQ ID NO: 4974 - protein, 735 aa, Adeno-associated virus
MAADGYLPDWLEDTLSEGIRQWWKLKPGPPPPKPAERHKDDSRGLVLPGYKYLGPFNGLDKGEPVNEADAAALEHDKAYDRQLDSGDNPYLKYNHADAEFQERLKEDTSFGGNLGRAVFQAKKRVLEPLGLVEPPVKTAPGKKRPVEHSPAEPDSSSGTGKAGQQPARKRLNFGQTGDADSVPDPQPLGQPPAAPSGLGSTTMATGSGAPMADNNEGADGVGNSSGNWHCDSQWLGDRVITTSTRTWALPTYNNHLYKQISSQSGASNDNHYFGYSTPWGYFDFNRFHCHFSPRDWQRLINNNWGFRPKRLNFKLFNIQVKEVTQNDGTTTIANNLTSTVQVFTDSEYQLPYVLGSAHQGCLPPFPADVFMVPQYGYLTLNNGSQAVGRSSFYCLEYFPSQMLRTGNNFQFSYTFEDVPFHSSYAHSQSLDRLMNPLIDQYLYYLNKTQSNSGTLQQSRLLFSQAGPTSMSLQAKNWLPGPCYRQQRLSKQANDNNNSNFPWTAATKYHLNGRDSLVNPGPAMASHKDDEEKFFPMHGTLIFGKQGTNANDADLDNVMITDEEEIRTTNPVATEQYGYVSNNLQNSNTGPTTGTVNHQGALPGMVWQDRDVYLQGPIWAKIPHTDGHFHPSPLMGGFGLKHPPPQIMIKNTPVPANPPTNFSSAKFASFITQYSTGQVSVEIEWELQKENSKRWNPEIQYTSNYNKSVNVDFTVDTNGVYSEPRPIGTRYLTRNL

SEQ ID NO: 4975 - protein, 735 aa, Adeno-associated virus
MAADGYLPDWLEDTLSEGIRQWWKLKPGPPPPKPAERHKDDSRGLVLPGYKYLGPFNGLDKGEPVNEADAAALEHDKAYDRQLDSGDNPYLKYNHADAEFQERLKEDTSFGGNLGRAVFQAKKRVLEPLGLVEGPVKTAPGKKRPVEHSPAEPDSSSGTGKAGQQPARKRLNFGQTGDADSVPDPQPLGQPPAAPSGLGSTTMATGSGAPMADNNEGADGVGNSSGNWHCDSQWLGDRVITTSTRTWALPTYNNHLYKQISSQSGASNDNHYFGYSTPWGYFDFNRFHCHFSPRDWQRLINNNWGFRPKRLNFKLFNIQVKEVTQNDGTTTIANNLTSTVQVFTDSEYQLPYVLGSAHQGCLPPFPADVFMVPQYGYLTLNNGSQAVGRSSFYCLEYFPSQMLRTGNNFQFSYTFEDVPFHSSYAHSQSLDRLMNPLIDQYLYYLNKTQSNSGTLQQSRLLFSQAGPTSMSLQAKNWLPGPCYRQQRLSKQANDNNNSNFPWTAATKYHLNGRDSLVNPGPAMASHKDDEEKFFPMHGTLIFGKQGTNANDADLDNVMITDEEEIRTTNPVATEQYGYVSNNLQNSNTGPTTGTVNHQGALPGMVWQDRDVYLQGPIWAKIPHTDGHFHPSPLMGGFGLKHPPPQIMIKNTPVPANPPTNFSSAKFASFITQYSTGQVSVEIEWELQKENSKRWNPEIQYTSNYNKSVNVDFTVDTNGVYSEPRPIGTRYLTRNL

SEQ ID NO: 4976 - DNA, 2208 bp, Adeno-associated virus
  source 1..2208: mol_type = other DNA
atggctgccgatggttatcttccagattggctcgaggacactctctctgaaggaataagacagtggtggaagctcaaacctggcccaccaccaccaaagcccgcagagcggcataaggacgacagcaggggtcttgtgcttcctgggtacaagtacctcggacccttcaacggactcgacaagggggagccggtcaacgaggcagacgccgcggccctcgagcacgacaaggcctacgaccggcagctcgacagcggagacaacccgtacctcaagtacaaccacgccgacgcggagtttcaggagcgtcttaaagaagatacgtcttttgggggcaacctcggacgagcagtcttccaggcgaaaaagagggttcttgaacctctgggcctggttgagggacctgttaagacggctccgggaaaaaagaggccggtagagcactctcctgcggagccagactcctcctcgggaaccggaaaagcgggccagcagcctgcaagaaaaagattgaattttggtcagactggagacgcagactccgtacctgacccccagcctctcggacagccaccagcagccccctctggtttgggatctactacaatggctacaggcagtggcgcaccaatggcagacaataacgagggtgccgatggagtgggtaattcctcaggaaattggcattgcgattcccaatggctgggcgacagagtcatcaccaccagcacccgaacctgggccctgcccacctacaacaaccacctctacaagcaaatctcaagccaatcaggagcctcaaacgacaaccactactttggctacagcaccccttgggggtattttgacttcaacagattccactgccacttttcaccacgtgactggcaaagactcatcaacaacaactggggattccgacccaagagactcaacttcaagctctttaacattcaagtcaaagaggtcacgcagaatgacggtacgacgacgattgccaataaccttaccagcacggttcaggtgtttactgactcggagtaccagctcccgtacgtcctcgggtcggcgcatcaaggatgcctcccgccgtttccagcggacgtcttcatggtcccacagtatggatacctcaccctgaacaacgggagtcaggcggtaggacgctcttccttttactgcctggagtactttccttctcagatgcttcgtactggaaacaactttcagttcagctacacctttgaagacgttcctttccacagcagctacgctcacagccagagtctggatcggctgatgaatcctctgatcgaccagtacctgtattatctgaacaaaacacaatcaaatagtggaactcttcagcagtctcggctactgtttagtcaagctggacccaccagcatgtctcttcaagctaaaaactggctacctggaccttgctacagacagcagcgtctgtcaaagcaggcaaacgacaacaacaacagcaactttccctggactgcggctacaaagtatcacctaaatggccgggactcgttggttaatccaggaccagctatggccagtcacaaagacgatgaagaaaagtttttccccatgcatggaaccctgatatttggtaaacaaggaacaaatgctaacgacgcggatttggacaatgtcatgattacagatgaagaagaaatccgcaccaccaatcccgtggctacggagcagtacggatatgtgtcaaataatttgcaaaactcaaatactggtccaactactggaactgtcaatcaccaaggagcgttacctggcatggtgtggcaggatcgagacgtgtacctgcagggacccatttgggccaagattcctcacaccgatggacactttcatccttctccactgatgggaggttttgggctcaaacacccgcctcctcagatcatgatcaaaaacactcccgttccagccaatcctcccacaaacttcagttctgccaagtttgcttctttcatcacacagtattccacggggcaggtcagcgtggagatcgagtgggagctgcagaaagagaacagcaaacgctggaatcccgaaattcagtacacttccaactacaacaaatctgttaatgtggactttactgtggacactaatggcgtgtattcagagcctcgccccattggcaccagatacctgactcgtaatctgtaa

SEQ ID NO: 4977 - DNA, 2211 bp, Adeno-associated virus
  source 1..2211: mol_type = other DNA
atggctgccgatggttatcttccagattggctcgaggacaacctctctgagggcattcgcgagtggtgggacttgaaacctggagccccgaagcccaaagccaaccagcaaaagcaggacgacggccggggtctggtgcttcctggctacaagtacctcggacccttcaacggactcgacaagggggagcccgtcaacgcggcggacgcagcggccctcgagcacgacaaggcctacgaccagcagctcaaagcgggtgacaatccgtacctgcggtataaccacgccgacgccgagtttcaggagcgtctgcaagaagatacgtcttttgggggcaacctcgggcgagcagtcttccaggccaagaagcgggttctcgaacctctcggtctggttgaggaaggcgctaagacggctcctggaaagaaacgtccggtagagcagtcgccacaagagccagactcctcctcgggcatcggcaagacaggccagcagcccgctaaaaagagactcaattttggtcagactggcgactcagagtcagtccccgatccacaacctctcggagaacctccagcaacccccgctgctgtgggacctactacaatggcttcaggcggtggcgcaccaatggcagacaataacgaaggcgccgacggagtgggtaatgcctcaggaaattggcattgcgattccacatggctgggcgacagagtcatcaccaccagcacccgcacctgggccttgcccacctacaataaccacctctacaagcaaatctccagtgcttcaacgggggccagcaacgacaaccactacttcggctacagcaccccctgggggtattttgatttcaacagattccactgccacttttcaccacgtgactggcagcgactcatcaacaacaattggggattccggcccaagagactcaacttcaaactcttcaacatccaagtcaaggaggtcacgacgaatgatggcgtcacaaccatcgctaataaccttaccagcacggttcaagtcttctcggactcggagtaccagcttccgtacgtcctcggctctgcgcaccagggctgcctccctccgttcccggcggacgtgttcatgattccgcaatacggctacctgacgctcaacaatggcagccaagccgtgggacgttcatccttttactgcctggaatatttcccttctcagatgctgagaacgggcaacaactttaccttcagctacacctttgaggaagtgcctttccacagcagctacgcgcacagccagagcctggaccggctgatgaatcctctcatcgaccaatacctgtattacctgaacagaactcaaaatcagtccggaagtgcccaaaacaaggacttgctgtttagccgtgggtctccagctggcatgtctgttcagcccaaaaactggctacctggaccctgttatcggcagcagcgcgtttctaaaacaaaaacagacaacaacaacagcaattttacctggactggtgcttcaaaatataacctcaatgggcgtgaatccatcatcaaccctggcactgctatggcctcacacaaagacgacgaagacaagttctttcccatgagcggtgtcatgatttttggaaaagagagcgccggagcttcaaacactgcattggacaatgtcatgattacagacgaagaggaaattaaagccactaaccctgtggccaccgaaagatttgggaccgtggcagtcaatttccagagcagcagcacagaccctgcgaccggagatgtgcatgctatgggagcattacctggcatggtgtggcaagatagagacgtgtacctgcagggtcccatttgggccaaaattcctcacacagatggacactttcacccgtctcctcttatgggcggctttggactcaagaacccgcctcctcagatcctcatcaaaaacacgcctgttcctgcgaatcctccggcggagttttcagctacaaagtttgcttcattcatcacccaatactccacaggacaagtgagtgtggaaattgaatgggagctgcagaaagaaaacagcaagcgctggaatcccgaagtgcagtacacatccaattatgcaaaatctgccaacgttgattttactgtggacaacaatggactttatactgagcctcgccccattggcacccgttaccttacccgtcccctgtaa

SEQ ID NO: 4978 - DNA, 2208 bp, Adeno-associated virus
  source 1..2208: mol_type = other DNA
atggctgccgatggttatcttccagattggctcgaggacactctctctgaaggaacaagacagtggtggaagctcaaacctggcccaccaccaccaaagcccgcagagcggcataaggacgacagcaggggtcttgtgcttcctgggtacaagtacctcggacccttcaacggactcgacaagggggagccggtcaacgaggcagacgccgcggccctcgagcacgacaaggcctacgaccggcagctcgacagcggagacaacccgtacctcaagtacaaccacgccgacgcggagtttcaggagcgtcttaaagaagatacgtcttttgggggcaacctcggacgagcagtcttccaggcgaaaaagagggttcttgaacctctgggcctggttgaggaacctgttaagacggctccgggaaaaaagaggccggtagagcactctcctgcggagccagactcctcctcgggaaccggaaaagcgggccagcagcctgcaagaaaaagattgaattttggtcagactggagacgcagactccgtacctgacccccagcctctcggacagccaccagcagccccctctggtttgggatctactacaatggctacaggcagtggcgcaccaatggcagacaataacgagggtgccgatggagtgggtaattcctcaggaaattggcattgcgattcccaatggctgggcgacagagtcatcaccaccagcacccgaacctgggccctgcccacctacaacaaccacctctacaagcaaatctcaagccaatcaggagcctcaaacgacaaccactactttggctacagcaccccttgggggtattttgacttcaacagattccactgccacttttcaccacgtgactggcaaagactcatcaacaacaactggggattccgacccaagagactcaacttcaagctctttaacattcaagtcaaagaggtcacgcagaatgacggtacgacgacgattgccaataaccttaccagcacggttcaggtgtttactgactcggagtaccagctcccgtacgtcctcgggtcggcgcatcaaggatgcctcccgccgtttccagcggacgtcttcatggtcccacagtatggatacctcaccctgaacaacgggagtcaggcggtaggacgctcttccttttactgcctggagtactttccttctcagatgcttcgtactggaaacaactttcagttcagctacacctttgaagacgttcctttccacagcagctacgctcacagccagagtctggatcggctgatgaatcctctgatcgaccagtacctgtattatctgaacaaaacacaatcaaatagtggaactcttcagcagtctcggctactgtttagtcaagctggacccaccagcatgtctcttcaagctaaaaactggctacctggaccttgctacagacagcagcgtctgtcaaagcaggcaaacgacaacaacaacagcaactttccctggactgcggctacaaagtaccacctaaatggccgggactcgttggttaatccaggaccagctatggccagtcacaaagacgatgaagaaaagtttttccccatgcatggaaccctgatatttggtaaacaaggaacaaatgctaacgacgcggatttggacaatgtcatgattacagatgaagaagaaatccgcaccaccaatcccgtggctacggagcagtacggatatgtgtcaaataatttgcaaaactcaaatactggtccaactactggaactgtcaatcaccaaggagcgttacctggcatggtgtggcaggatcgagacgtgtacctgcagggacccatttgggccaagattcctcacaccgatggacactttcatccttctccactgatgggaggttttgggctcaaacacccgcctcctcagatcatgatcaaaaacactcccgttccagccaatcctcccacaaacttcagttctgccaagtttgcttctttcatcacacagtattccacggggcaggtcagcgtggagatcgagtgggagctgcagaaagagaacagcaaacgctggaatcccgaaattcagtacacttccaactacaacaaatctgttaatgtggactttactgtggacactaatggcgtgtattcagagcctcgccccattggcaccagatacctgactcgtaatctgtaa

SEQ ID NO: 4979 - DNA, 2217 bp, Adeno-associated virus
  source 1..2217: mol_type = other DNA
atggctgctgacggttatcttccagattggctcgaggacaacctctctgagggcattcgcgagtggtgggacctgaaacctggagcccccaagcccaaggccaaccagcagaagcaggacgacggccggggtctggtgcttcctggctacaagtacctcggacccttcaacggactcgacaagggggagcccgtcaacgcggcggacgcagcggccctcgagcacgacaaggcctacgaccagcagctcaaagcgggtgacaatccgtacctgcggtataaccacgccgacgccgagtttcaggagcgtctgcaagaagatacgtcttttgggggcaacctcgggcgagcagtcttccaggccaagaagcgggttctcgaacctctcggtctggttgaggaagctgctaagacggctcctggaaagaagagaccggtagaaccgtcacctcagcgttcccccgactcctccacgggcatcggcaagaaaggccagcagcccgctaaaaagagactgaactttggtcagactggcgactcagagtcagtccccgaccctcaaccaatcggagaaccacctgcaggcccctctggtctgggatctggtacaatggctgcaggcggtggcgctccaatggcagacaataacgaaggcgccgacggagtgggtagttcctcaggaaattggcattgcgattccacatggctgggcgacagagtcatcaccaccagcacccgaacctgggccctgcccacctacaacaaccacctctacaagcaaatatccaatgggacatcgggagggagcaccaacgacaacacctacttcggctacagcaccccctgggggtattttgacttcaacagattccactgccacttctcaccacgtgactggcagcgactcatcaacaacaactggggattccggccaaaaagactcagcttcaagctcttcaacatccaggtcaaggaggtcacgcagaatgaaggcaccaagaccatcgccaataaccttaccagcacgattcaggtatttacggactcggaataccagctgccgtacgtcctcggctccgcgcaccagggctgcctgcctccgttcccggcggacgtcttcatgattccccagtacggctaccttacactgaacaatggaagtcaagccgtaggccgttcctccttctactgcctggaatattttccatctcaaatgctgcgaactggaaacaattttgaattcagctacaccttcgaggacgtgcctttccacagcagctacgcacacagccagagcttggaccgactgatgaatcctctcatcgaccagtacctgtactacttatccagaactcagtccacaggaggaactcaaggtacccagcaattgttattttctcaagctgggcctgcaaacatgtcggctcaggctaagaactggctacctggaccttgctaccggcagcagcgagtctctacgacactgtcgcaaaacaacaacagcaactttgcttggactggtgccaccaaatatcacctgaacggaagagactctttggtaaatcccggtgtcgccatggcaacccacaaggacgacgaggaacgcttcttcccgtcgagtggagtcctgatgtttggaaaacagggtgctggaagagacaatgtggactacagcagcgttatgctaaccagcgaagaagaaattaaaaccactaaccctgtagccacagaacaatacggtgtggtggctgacaacttgcagcaaaccaatacagggcctattgtgggaaatgtcaacagccaaggagccttacctggcatggtctggcagaaccgagacgtgtacctgcagggtcccatctgggccaagattcctcacacggacggcaactgccacccttcaccgctaatgggaggatttggactgaagcacccacctcctcagatcctgatcaagaacacgccggtacctgcggatcctccaacaacgttcagccaggcgaaattggcttccttcattacgcagtacagcaccggacaggtcagcgtggaaatcgagtgggagctgcagaaggagaacagcaaacgctggaacccagagattcagtacacttcaaactactacaaatctacaaatgtggactttgctgtcaatacagagggaacttattctgagcctcgccccattggtactcgttacctcacccgtaatctgtaa

SEQ ID NO: 4980 - protein, 735 aa, Adeno-associated virus
MAADGYLPDWLEDTLSEGTRQWWKLKPGPPPPKPAERHKDDSRGLVLPGYKYLGPFNGLDKGEPVNEADAAALEHDKAYDRQLDSGDNPYLKYNHADAEFQERLKEDTSFGGNLGRAVFQAKKRVLEPLGLVEEPVKTAPGKKRPVEHSPAEPDSSSGTGKAGQQPARKRLNFGQTGDADSVPDPQPLGQPPAAPSGLGSTTMATGSGAPMADNNEGADGVGNSSGNWHCDSQWLGDRVITTSTRTWALPTYNNHLYKQISSQSGASNDNHYFGYSTPWGYFDFNRFHCHFSPRDWQRLINNNWGFRPKRLNFKLFNIQVKEVTQNDGTTTIANNLTSTVQVFTDSEYQLPYVLGSAHQGCLPPFPADVFMVPQYGYLTLNNGSQAVGRSSFYCLEYFPSQMLRTGNNFQFSYTFEDVPFHSSYAHSQSLDRLMNPLIDQYLYYLNKTQSNSGTLQQSRLLFSQAGPTSMSLQAKNWLPGPCYRQQRLSKQANDNNNSNFPWTAATKYHLNGRDSLVNPGPAMASHKDDEEKFFPMHGTLIFGKQGTNANDADLDNVMITDEEEIRTTNPVATEQYGYVSNNLQNSNTGPTTGTVNHQGALPGMVWQDRDVYLQGPIWAKIPHTDGHFHPSPLMGGFGLKHPPPQIMIKNTPVPANPPTNFSSAKFASFITQYSTGQVSVEIEWELQKENSKRWNPEIQYTSNYNKSVNVDFTVDTNGVYSEPRPIGTRYLTRNL

SEQ ID NO: 4981 - DNA, 2208 bp, Adeno-associated virus
  source 1..2208: mol_type = other DNA
atggctgccgatggttatcttccagattggctcgaggacactctctctgaaggaataagacagtggtggaagctcaaacctggcccaccaccaccaaagcccgcagagcggcatcaggacaacagcaggggtcttgtgcttcctgggtacaagtacctcggaccctccaacggactcgacaaaggagagccggtcaacgaggcagacgccgcggccctcgagcacgacaaggcctacgaccggcagctcgacagcggagacaacccgtacctcaagtacaaccacgccgacgcggagtttcaggagcgtcttaaagaagatacgtcttttgggggcaacctcggacgagcagtcttccaggcgaaaaagagggttcttgaacctctgggcctggttgaggaacctgttaagacggctccgggaaaaaagaggccggtagagcactctcctgtggagccagactcctcctcgggaaccggaaaagcgggccatcagcctgcgagaaagagattgaattttggtcagactggagacgcagactccgtacctgacccccagcctctcggacagccaccagcagcccccacaagtttgggatctactacaatggctacaggcagtggcgcaccaatggcagacaataacgagggtgccgatggagtgggtaattcctcaggaaattggcattgcgattcccaatggctgggcgacagagtcatcaccaccagcacccgaacctgggccctgcccacctacaacaaccacctctacaagcaaatctccagccaatcaggagcctcgaacgacaaccactactttggctgcagcaccccctgggggtattttgacttcaacagattccactgtcacttctccccacgtgattggcaaagactcatcaacaacaactggggattccgacccaagagactcaacttcaagctctttaacattcaagtcaaagaggtcacgcagaatgacggtacgacgacgattgccaataaccttaccagcacggttcaggtgtttactgactcggagtacccgctcccgtacgtcctcggctcggcgcatcaaggatgcctcccgccgtttccagcggacgtcttcatggtcccacagtatggatacctcaccctgaacaacgggagtcaggcggtaggacgctcttccttttactgcctggagtactttccttctcagatgctgcgtaccggaaacaactttaccttcagctacacctttgaggacgttcctttccacagcagctacgctcacagccagagtttggaccggctgatgaatcctctgatcgaccagtatctatattatctgaacaggacacaatcaaatagtggaactcttcagcagtctaggctactgtttagccaagctggacccaccagcatgtctcttcaagctaaaaactggctgcctggaccttgctacagacagcagcgtctttcaaagcaggcaaacgacaacaacaacagcaactttccctggactgcggctacaaagtatcatctaaatggccgggactcgttggttaatccaggaccagctatggccagccacaaagacgatgaagaaaagtttttccccatgcatggaaccctgatatttggtaaacaaggaacaaatgctaacgacgcggatttggagcatgttatgattacagatgaagaagaaatcaggaccaccaatcctgtggctacagagcagtacggaaacgtgtcaaataatttgcaaaactcaaatactggtccaactacagaaaatgtcaatcaccagggagcgttacctggtatggtgtggcaggatcgagacgtgtacctgcagggacccatttgggccaagattcctcacaccgacggacactttcacccttctccactgatgggaggttttggactcaaacacccgcctcctcaaatcatgatcaaaaacactcccgttccagccaatcctcccacaaacttcagttctgccaagtttgcttctttcatcacacagtattccacgggccaggtcagcgtggagattgagtgggagctgcagaaggagaacagcaaacgctggaaccccgagatccagtatacttccaactacaacaaatctgttaatgtggactttactgtggacactaatggtgtgtattcagagccttgccccattggcaccagatacctgactcgtaatctgtaa

SEQ ID NO: 4982 - protein, 735 aa, Adeno-associated virus
MAADGYLPDWLEDTLSEGIRQWWKLKPGPPPPKPAERHQDNSRGLVLPGYKYLGPSNGLDKGEPVNEADAAALEHDKAYDRQLDSGDNPYLKYNHADAEFQERLKEDTSFGGNLGRAVFQAKKRVLEPLGLVEEPVKTAPGKKRPVEHSPVEPDSSSGTGKAGHQPARKRLNFGQTGDADSVPDPQPLGQPPAAPTSLGSTTMATGSGAPMADNNEGADGVGNSSGNWHCDSQWLGDRVITTSTRTWALPTYNNHLYKQISSQSGASNDNHYFGCSTPWGYFDFNRFHCHFSPRDWQRLINNNWGFRPKRLNFKLFNIQVKEVTQNDGTTTIANNLTSTVQVFTDSEYPLPYVLGSAHQGCLPPFPADVFMVPQYGYLTLNNGSQAVGRSSFYCLEYFPSQMLRTGNNFTFSYTFEDVPFHSSYAHSQSLDRLMNPLIDQYLYYLNRTQSNSGTLQQSRLLFSQAGPTSMSLQAKNWLPGPCYRQQRLSKQANDNNNSNFPWTAATKYHLNGRDSLVNPGPAMASHKDDEEKFFPMHGTLIFGKQGTNANDADLEHVMITDEEEIRTTNPVATEQYGNVSNNLQNSNTGPTTENVNHQGALPGMVWQDRDVYLQGPIWAKIPHTDGHFHPSPLMGGFGLKHPPPQIMIKNTPVPANPPTNFSSAKFASFITQYSTGQVSVEIEWELQKENSKRWNPEIQYTSNYNKSVNVDFTVDTNGVYSEPCPIGTRYLTRNL

SEQ ID NO: 4983 - DNA, 2196 bp, Adeno-associated virus
  source 1..2196: mol_type = other DNA
atggctgctgacggttatcttccagattggctcgaggacaacctctctgagggcattcgcgagtggtgggcgctgaaacctggagccccgcaacccaaagccaaccagcaaaagcaggacgacggccggggtctggtgcttcctggctacaagtacctcggacccttcaacggactcgacaagggggagcccgtcaacgaggcggacgccgcggccctcgagcacgacaaggcctacgaccagcagctcaaagcgggtgacaatccgtacctgcggtataatcacgccgacgccgagtttcaagagcgtctgcaagaagatacgtcctttgggggcaacctcgggcgagcagtcttccaggccaaaaagagggtactcgagcctctgggtctggttgaggaaggcgctaagacggctcctggaaagaagcggccagtagaaccggactccagctcgggcatcggcaagtcaggccagcagcccgcgaaaaagagactgaattttgggcagactggcgactcagagtcagtgcctgacccccaacctctctcagaaccacccgcaggtccctctggtctgggatctggtacaatggctgctggcggtggcgctccaatggcagacaataacgaaggcgccgacggagtgggtaatgtctcaggaaattggcattgcgattccacatggctgggcgaccgagtcatcaccaccagcactcggacctgggccctccccacctacaacaaccacctctacaagcaaatctccaacgggacctcgggaggcagcagcaacgacaacacctactttggctacagcaccccctgggggtattttgactttaacagattccactgccacttttcaccacgtgactggcagcgactcatcaacaacaactgggggttccggcccaagaagctcaacttcaagctcttcaacatccaggtcaaggaggtcacccagaatgaaggcaccaagaccatcgccaataacctcaccagcacggtgcaggtctttacggactcggagtaccagctcccgtacgtgctcggctctgcccaccagggctgcctgcctccgttcccggcggacgtgttcatgattccgcagtacgggtacctgacgctgaacaacgggagccaggccgtggggcgatcctccttctactgcctggagtactttccctcgcagatgctgagaacgggcaacaactttaccttcagctacaccttcgaggacgtgcccttccacagcagctacgcgcacagccagagcctggaccggctgatgaacccgctgattgaccagtacctgtactacctgtctcggactcagaccaacgggaccaatgccacgcagactctgttgtttgctcaggccgggcctcagaacatgtcggctcaggccaagaactggctgcctggtccttgctatcggcagcagcgcgtctctacgacagtgtcgcaaaacaacaacagcaactttacctggaccggggcgaccaagtaccacctgaacggccgagactccctggtgagccccggtgtcgccatggcaacgcacaaggacgacgaggagcgcttcttcccgagcagcggggtcctgatgtttggcaagcagggcgctggaaaggacaatgtcgagtacaccaacgtgatgctcaccagcgaggaggagatcaagaccaccaaccctgtggccacggagcagtacggcgtggtggctgacaatctgcagcagaccaactcagctcccattgtgggggcagtcaacagccagggggccttacccggtatggtctggcagaaccgggacgtgtacctgcagggtcccatctgggccaagatcccgcatacggacggcaactttcacccgtctcctctcatgggcggctttggactgaaacacccgcctccccagatcctgatcaaaaacacgccggtacctgcggatcccccggtgaactttacggacgctaagctggcgagtttcatcacgcagtacagcaccgggcaggtcagcgtggagattgagtgggagctgcagaaggagaacagcaagcgctggaatcccgagattcagtacacttccaattattataaatcagctaatgtggactttgccgtcaatgcagatggtgtatatagtgaaccccgccccattggcactcgttacctcacccgtaatctgtaa

SEQ ID NO: 4984 - protein, 731 aa, Adeno-associated virus
MAADGYLPDWLEDNLSEGIREWWALKPGAPQPKANQQKQDDGRGLVLPGYKYLGPFNGLDKGEPVNEADAAALEHDKAYDQQLKAGDNPYLRYNHADAEFQERLQEDTSFGGNLGRAVFQAKKRVLEPLGLVEEGAKTAPGKKRPVEPDSSSGIGKSGQQPAKKRLNFGQTGDSESVPDPQPLSEPPAGPSGLGSGTMAAGGGAPMADNNEGADGVGNVSGNWHCDSTWLGDRVITTSTRTWALPTYNNHLYKQISNGTSGGSSNDNTYFGYSTPWGYFDFNRFHCHFSPRDWQRLINNNWGFRPKKLNFKLFNIQVKEVTQNEGTKTIANNLTSTVQVFTDSEYQLPYVLGSAHQGCLPPFPADVFMIPQYGYLTLNNGSQAVGRSSFYCLEYFPSQMLRTGNNFTFSYTFEDVPFHSSYAHSQSLDRLMNPLIDQYLYYLSRTQTNGTNATQTLLFAQAGPQNMSAQAKNWLPGPCYRQQRVSTTVSQNNNSNFTWTGATKYHLNGRDSLVSPGVAMATHKDDEERFFPSSGVLMFGKQGAGKDNVEYTNVMLTSEEEIKTTNPVATEQYGVVADNLQQTNSAPIVGAVNSQGALPGMVWQNRDVYLQGPIWAKIPHTDGNFHPSPLMGGFGLKHPPPQILIKNTPVPADPPVNFTDAKLASFITQYSTGQVSVEIEWELQKENSKRWNPEIQYTSNYYKSANVDFAVNADGVYSEPRPIGTRYLTRNL

SEQ ID NO: 4985 - DNA, 2196 bp, Adeno-associated virus
  source 1..2196: mol_type = other DNA
atggctgctgacggttatcttccagattggctcgaggacaacctctctgagggcattcgcgagtggtgggcgctgaaacctggagccccgcaacccaaagccaaccagcaaaagcaggacgacggccggggtctggtgcttcctggctacaagtacctcggacccttcaacggactcgacaagggggagcccgtcaacgaggcggacgccgcggccctcgagcacgacaaggcctacgaccagcagctcaaagcgggtgacaatccgtacctgcggtataatcacgccgacgccgagtttcaagagcgtctgcaagaagatacgtcctttgggggcaacctcgggcgagcagtcttccaggccaaaaagagggtactcgagcctctgggtctggttgaggaaggcgctaagacggctcctggaaagaagcggccagtagaaccggactccagctcgggcatcggcaagtcaggccggcagcccgcgaaaaagagactgaattttgggcagactggcgactcagagtcagtgcctgacccccaacctctctcagaaccacccgcaggtccctctggtctgggatctggtacaatggctgcaggcggtggcgctccaatggcagacaataacgaaggcgccgacggagtgggtaatgcctcaggaaattggcattgcgattccacatggctgggcgaccgagtcatcaccaccagcactcggacctgggccctccccacctacaacaaccacctctacaagcaaatctccaacgggacctcgggaggcagcagcaacgacaacacctactttggctacagcaccccctgggggtattttgactttaacagattccactgccacttttcaccacgtgactggcagcgactcatcaacaacaactggggattccggcccaagaggctcaacttcaagctcttcaacatccaggtcaaggaggtcacccagaatgaaggcaccaagaccatcgccaataacctcaccagcacggtgcaggtctttacggactcgaagtaccagctcccgtacgtgctcggctctgcccaccagggctgcctgcctccgttcccggcggacgtgttcatgattccgcagtacgggtacctgacgctgaacaacgggagccaggccgtggggcgatcctccttctactgcctggagtactttccctcgcagatgctgagaacgggcaacaactttaccttcagctacaccttcgaggacgtgcccttccacagcagctacgcgcacagccagagcctggaccggctgatgaacccgctgattgaccagtacctgtactacctgtctcggactcagaccaacgggaccaatgccacgcagactctgttgtttgctcaggccgggcctcagaacatgtcggctcaggccaagaactggctgcctggtccttgctatcggcagcagcgcgtctctacgacagtgtcgcaaaacaacaacagcaactttacctggaccggggcgaccaagtaccacctgaacggccgagactccctggtgaaccccggtgtcgccatggcaacgcacaaggacgacgaggagcgcttcttcccgagcagcggggtcctgatgtttggcaagcagggcgctggaaaggacaatgtcgagtacaccaacgtgatgctcaccagcgaggaggagatcaagaccaccaaccctgtggccacggagcagtacggtgtggtggctgacaatctgcagcagaccaactcggctcccattgtgggggcagtcaacagccagggggccttacccggtatggtctggcagaaccgggacgtgtacctgcagggtcccatctgggccaagatcccgcatacggacggcaactttcacccgtctcctctcatgggcggctttggactgaaacacccgcctccccagatcctgatcaaaaacacgccggtacctgcggatcccccggtgaactttacggacgctaagctggcgagtttcatcacgcagtacagcaccgggcaggtcagcgtggagattgagtgggagctgcagaaggagaacagcaagcgctggaatcccgagattcagtacacttccaattattataaatcagctaatgtggactttgccgtcaatgcagatggtgtatatagtgaaccccgccccattggcactcgttacctcacccgtaatctgtaa

SEQ ID NO: 4986 - protein, 731 aa, Adeno-associated virus
MAADGYLPDWLEDNLSEGIREWWALKPGAPQPKANQQKQDDGRGLVLPGYKYLGPFNGLDKGEPVNEADAAALEHDKAYDQQLKAGDNPYLRYNHADAEFQERLQEDTSFGGNLGRAVFQAKKRVLEPLGLVEEGAKTAPGKKRPVEPDSSSGIGKSGRQPAKKRLNFGQTGDSESVPDPQPLSEPPAGPSGLGSGTMAAGGGAPMADNNEGADGVGNASGNWHCDSTWLGDRVITTSTRTWALPTYNNHLYKQISNGTSGGSSNDNTYFGYSTPWGYFDFNRFHCHFSPRDWQRLINNNWGFRPKRLNFKLFNIQVKEVTQNEGTKTIANNLTSTVQVFTDSKYQLPYVLGSAHQGCLPPFPADVFMIPQYGYLTLNNGSQAVGRSSFYCLEYFPSQMLRTGNNFTFSYTFEDVPFHSSYAHSQSLDRLMNPLIDQYLYYLSRTQTNGTNATQTLLFAQAGPQNMSAQAKNWLPGPCYRQQRVSTTVSQNNNSNFTWTGATKYHLNGRDSLVNPGVAMATHKDDEERFFPSSGVLMFGKQGAGKDNVEYTNVMLTSEEEIKTTNPVATEQYGVVADNLQQTNSAPIVGAVNSQGALPGMVWQNRDVYLQGPIWAKIPHTDGNFHPSPLMGGFGLKHPPPQILIKNTPVPADPPVNFTDAKLASFITQYSTGQVSVEIEWELQKENSKRWNPEIQYTSNYYKSANVDFAVNADGVYSEPRPIGTRYLTRNL

SEQ ID NO: 4987 - DNA, 2196 bp, Adeno-associated virus
  source 1..2196: mol_type = other DNA
atggctgctgacggttatcttccagattggctcgaggacaacctctctgagggcattcgcgagtggtgggcgctgaaacctggagccccgcaacccaaagccaaccagcaaaagcaggacgacggccggggtctggtgcttcctggctacaagtacctcggacccttcaacggactcgacaagggggagcccgtcaacgaggcggacgccgcggccctcgagcacgacaaggcctacgaccagcagctcaaagcgggtgacaatccgtacctgcggtataatcacgccgacgccgagtttcaagagcgtctgcaagaagatacgtcctttgggggcaacctcgggcgagcagtcttccaggccaaaaagagggtactcgagcctctgggtctggttgaggaaggcgctaagacggctcctggaaagaagcggccagtagaaccggactccagctcgggcatcggcaagtcaggccagcagcccgcgaaaaagagactgaattttgggccgactggcgactcagagtcagtgcctgacccccaacctctctcagaaccacctgcaggtccctctggtctgggatctggtacaatggctgcaggcggtggcgctccaatggcagacaataacgaaggcgccgacggagtgggtaatgtctcaggaaattggcattgcgattccacatggctgggcgaccgagtcatcaccaccagcactcggacctgggccctccccacctacaacaaccacctctacaagcaaatctccaacgggacctcgggaggcagcagcaacgacaacacctactttggctacagcaccccctgggggtattttgactttaacagattccactgccacttttcaccacgcgactggcagcgactcatcaacaacaactggggattccggcccaagaagctcaacttcaagctcttcaacatccaggtcaaggaggtcacccagaatgaaggcaccaagaccaccgccaataacctcaccagcacggtgcaggtctttacggactcggagtaccagctcccgtacgtgctcggctctgcccaccagggctgcctgcctccgttcccggcggacgtgttcatgattccgcagtacgggtacctgacgctgaacaacgggagccaggccgtggggcgatcctccttctactgcctggagtactttccctcgcagatgctgagaacgggcaacaactttaccttcagctacaccttcgaggacgtgcccttccacagcagctacgcgcacagccagagcctggaccggctgatgaacccgctgattgaccagtacctgtactacctgtctcggactcagaccaacgggaccaatgccacgcagactctgttgtttgctcaggccgggcctcagaacatgtcggctcaggccaagaactggctgcctggtccttgctatcggcagcagcgcgtctctacggcagtgtcgcaaaacaacaacagcaactttacctggaccggggcgaccaagtaccacctgaacggccgagactccctggtgaaccccggtgtcgccatggcaacgcacaaggacgacgaggagcgcttcttcccgagcagcggggtcctgatgtttggcaagcagggcgctggaaaggacaatgtcgagtacaccaacgtgatgctcaccagcgaggaggagatcaagaccaccaaccctgtggccacggagcagtacggtgtggtggctgacaatctgcagcagaccaactcggctcccattgtgggggcagtcaacagccagggggccttacccggtatggtctggcagaaccgggacgtgtacctgcagggtcccatctgggccaagatcccgcatacggacggcaactttcacccgtctcctctcatgggcggctttggactgaaacacccgcctccccagatcctgatcaaaaacacgccggtacctgcggatcccccggtgaactttacggacgctaagctggcgagtttcatcacgcagtacagcaccgggcaggtcagcgtggagattgagtgggagctgcagaaggagaacagcaagcgctggaatcccgagattcagtacacttccaattattataaatcagctaatgtggactttgccgtcaatgcagatggtgtatatagcgaaccccgccccattggcactcgttacctcacccgtaatctgtaa

SEQ ID NO: 4988 - protein, 731 aa, Adeno-associated virus
MAADGYLPDWLEDNLSEGIREWWALKPGAPQPKANQQKQDDGRGLVLPGYKYLGPFNGLDKGEPVNEADAAALEHDKAYDQQLKAGDNPYLRYNHADAEFQERLQEDTSFGGNLGRAVFQAKKRVLEPLGLVEEGAKTAPGKKRPVEPDSSSGIGKSGQQPAKKRLNFGPTGDSESVPDPQPLSEPPAGPSGLGSGTMAAGGGAPMADNNEGADGVGNVSGNWHCDSTWLGDRVITTSTRTWALPTYNNHLYKQISNGTSGGSSNDNTYFGYSTPWGYFDFNRFHCHFSPRDWQRLINNNWGFRPKKLNFKLFNIQVKEVTQNEGTKTTANNLTSTVQVFTDSEYQLPYVLGSAHQGCLPPFPADVFMIPQYGYLTLNNGSQAVGRSSFYCLEYFPSQMLRTGNNFTFSYTFEDVPFHSSYAHSQSLDRLMNPLIDQYLYYLSRTQTNGTNATQTLLFAQAGPQNMSAQAKNWLPGPCYRQQRVSTAVSQNNNSNFTWTGATKYHLNGRDSLVNPGVAMATHKDDEERFFPSSGVLMFGKQGAGKDNVEYTNVMLTSEEEIKTTNPVATEQYGVVADNLQQTNSAPIVGAVNSQGALPGMVWQNRDVYLQGPIWAKIPHTDGNFHPSPLMGGFGLKHPPPQILIKNTPVPADPPVNFTDAKLASFITQYSTGQVSVEIEWELQKENSKRWNPEIQYTSNYYKSANVDFAVNADGVYSEPRPIGTRYLTRNL

SEQ ID NO: 4989 - DNA, 4404 bp, Adeno-associated virus
  source 1..4404: mol_type = other DNA
atggctgccgatggttatcttccagattggctcgagggcaacctctctgagggcattcgcgagtggtgggacttgaaacctggagccccgaaacccaaagccaaccagcaaaagcaggacgacggccggggtctggtgcttcctggctacaggtacctcggacccttcaacggactcgacaagggagagccggtcaacgaggcagacgccgcggccctcgagcacgacaaggcctacgacaagcagctcgagcagggggacaacccgtacctcaagtacaaccacgccgacgccgagtttcaggagcgtcttcaagaagatacgtcttttgggggcaacctcgggcgagcagtcttccaggccaagaagcgggttctcgaacctctcggtctggttgaggaaggcgctaagacggctcctggaaagaagagacccatagaatcccccgactcctccacgggcatcggcaagaacggccagccgcccgctaaaaagaagctcaactttgggcagactggcgactcagagtcagtgcccgacccccaacctctcggagaacctcccgccgcgccctcaggtctgggatctggtacaatggctgcaggcggtggcgcaccaatggcagacaataacgaaggcgccgacggagtgggtaatgcctccggaaattggcattgcgattccacatggctgggcgacagagtcatcaccaccagcacccgcacctgggccctgcccacctacaacaaccacctctacaagcagatatcaagtcagagcggggctaccaacgacaaccacttcttcggctacagcaccccctggggctattttgacttcaacagattccactgccacttctcaccacgtgactggcagcgactcatcaacaacaactggggattccggcccagaaagctgcggttcaagttgttcaacatccaggtcaaggaggtcacgacgaacgacggcgttacgaccatcgctaataaccttaccagcacgattcaggtcttctcggactcggagtaccaactgccgtacgtcctcggctctgcgcaccagggctgcctccctccgttccctgcggacgtgttcatgattcctcagtacggatatctgactctaaacaacggcagtcagtctgtgggacgttcctccttctactgcctggagtactttccttctcagatgctgagaacgggcgataactttgaattcagctacacctttgaggaagtgcctttccacagcagctatgcgcacagccagagcctggaccggctgatgaatcccctcatcgaccagtacctgtactacctggcccggacccagagcactacggggtccacaagggagctgcagttccatcaggctgggcccaacaccatggccgagcaatcaaagaactggctgcccggaccctgttatcggcagcagagactgtcaaaaaacatagacagcaacaacaacagtaactttgcctggaccggggccactaaataccatctgaatggtagaaattcattaaccaacccgggcgtagccatggccaccaacaaggacgacgaggaccagttctttcccatcaacggagtgctggtttttggcaaaacgggggctgccaacaagacaacgctggaaaacgtgctaatgaccagcgaggaggagatcaaaaccaccaatcccgtggctacagaagaatacggtgtggtctccagcaacctgcaatcgtctacggccggaccccagacacagactgtcaacagccagggggctctgcccggcatggtctggcagaaccgggacgtgtacctgcagggtcccatctgggccaaaattcctcacacggacggcaactttcacccgtctcccctgatgggcggatttggactcaaacacccgcctcctcaaattctcatcaaaaacaccccggtacctgctaatcctccagaggtgtttactcctgccaagtttgcctcatttatcacgcagtacagcaccggccaggtcagcgtggagatcgagtgggaactgcagaaagaaaacagcaaacgctggaatccagagattcagtacacctcaaattatgccaagtctaataatgtggaatttgctgtcaacaacgaaggggtttatactgagcctcgccccattggcacccgttacctcacccgtaacctgtaaatggctgccgatggttatcttccagattggctcgaggacaacctctctgagggcattcgcgagtggtgggacttgaaacctggagccccgaaacccaaagccaaccagcaaaagcaggacgacggccggggtctggtgcttcctggctacaagtacctcggacccttcaacggactcgacaagggggagcccgtcaacgcggcggacgcagcggccctcgagcacgacaaggcctacgaccagcagctcaaagcgggtgacaatccgtacctgcggtataaccacgccgacgccgagtttcaggagcgtctgcaagaagatacgtcttttgggggcaacctcgggcgagcagtcttccaggccaagaagcgggttctcgaacctctcggtctggttgaggaaggcgctaagacggctcctggaaagaagagaccggtagagccatcaccccagcgttctccagactcctctacgggcatcggcaagaaaggccagcagcccgcgaaaaagagactcaactttgggcagactggcgactcagagtcagtgcccgaccctcaaccaatcggagaaccccccgcaggcccctctggtctgggatctggtacaatggctgcaggcggtggcgctccaatggcagacaataacgaaggcgccgacggagtgggtagttcctcaggaaattggcattgcgattccacatggctgggcgacagagtcatcaccaccagcacccgaacctgggccctccccacctacaacaaccacctctacaagcaaatctccaacgggacttcgggaggaagcaccaacgacaacacctacttcggctacagcaccccctgggggtattttgactttaacagattccactgccacttctcaccacgtgactggcagcgactcatcaacaacaactggggattccggcccaagagactcaacttcaagctcttcaacatccaggtcaaggaggtcacgcagaatgaaggcaccaagaccatcgccaataaccttaccagcacgattcaggtctttacggactcggaataccagctcccgtacgtcctcggctctgcgcaccagggctgcctgcctccgttcccggcggacgtcttcatgattcctcagtacgggtacctgactctgaacaatggcagtcaggccgtgggccgttcctccttctactgcctggagtactttccttctcaaatgctgagaacgggcaacaactttgagttcagctaccagtttgaggacgtgccttttcacagcagctacgcgcacagccaaagcctggaccggctgatgaaccccctcatcgaccagtacctgtactacctgtctcggactcagtccacgggaggtaccgcaggaactcagcagttgctattttctcaggccgggcctaataacatgtcggctcaggccaaaaactggctacccgggccctgctaccggcagcaacgcgtctccacgacactgtcgcaaaataacaacagcaactttgcctggaccggtgccaccaagtatcatctgaatggcagagactctctggtaaatcccggtgtcgctatggcaacccacaaggacgacgaagagcgattttttccgtccagcggagtcttaatgtttgggaaacagggagctggaaaagacaacgtggactatagcagcgttatgctaaccagtgaggaagaaattaaaaccaccaacccagtggccacagaacagtacggcgtggtggccgataacctgcaacagcaaaacgccgctcctattgtaggggccgtcaacagtcaaggagccttacctggcatggtctggcagaaccgggacgtgtacctgcagggtcctatctgggccaagattcctcacacggacggaaactttcatccctcgccgctgatgggaggctttggactgaaacacccgcctcctcagatcctgattaagaatacacctgttcccgcggatcctccaactaccttcagtcaagctaagctggcgtcgttcatcacgcagtacagcaccggacaggtcagcgtggaaattgaatgggagctgcagaaagaaaacagcaaacgctggaacccagagattcaatacacttccaactactacaaatctacaaatgtggactttgctgttaacacagatggcacttattctgagcctcgccccatcggcacccgttacctcacccgtaatctgtaa

SEQ ID NO: 4990 - protein, 738 aa, Adeno-associated virus; identical to SEQ ID NO: 4793

SEQ ID NO: 4991 - protein, 738 aa, Adeno-associated virus; identical to SEQ ID NO: 4793

SEQ ID NO: 4992 - DNA, 2501 bp, Adeno-associated virus
  source 1..2501: mol_type = other DNA
gaattcgcccttggctgcgtcaactggaccaatgagaactttcccttcaacgattgcgtcgacaagatggtgatctggtgggaggagggcaagatgacggccaaggtcgtggagtccgccaaggccattcatcatctgctggggcgggctcccgagattgcttgctcggcctgcgatctggtcaacgtggacctggatgactgtgtttctgagcaataaatgacttaaaccaggtatggctgccgatggttatcttccagattggctcgaggacaacctctctgagggcattcgcgagtggtgggacttgagacctggagccccgaaacccaaagccaaccagcaaaagcaggacgacggccggggtctggtgcttcctggctacaagtacctcggacccttcaacggactcgacaagggagagccggtcaacgaggcagacgccgcggccctcgagcacgacaaggcctacgacaagcagctcgagcagggggacaacccgtacctcaagtacaaccacgccgacgccgagtttcaggagcgtcttcaagaagatacgtcttttgggggcaacctcgggcgagcagtcttccaggccaagaagcgggttctcgaacctctcggtctggttgaggaaggcgctaagacggctcctggaaagaagagacccatagaatcccccgactcctccacgggcatcggcaagaaaggccagcagcccgctaaaaagagactcaactttgggcagactggcgactcagagtcagtgcccgaccctcaaccaatcggagaaccccccgcaggcccctctggtctgggatctggcacaatggctgcaggcggtggcgctccaatggcagacaataacgaaggcgccgacggagtgggtagttcctcaggaaattggcattgcgattccacatggctgggcgacagagtcatcaccaccagcacccgaacctgggccctccccacctacaacaaccacctctacaagcaaatctccaacgggacatcgggaggaagcaccaacgacaacacctacttcggctacagcaccccctgggggtattttgactttaacagattccactgccacttctcaccacgtgactggcagcgactcatcaacaacaactggggattccggcccaagagactcaacttcaagctcttcaacatccaggtcaaggaggtcacgcagaatgaaggcaccaagaccatcgccaataaccttaccagcacgattcaggtctttacggactcggaataccagctcccgtacgtcctcggctctgcgcaccagggctgcctgcctccgttcccggcggacgtcttcatgattcctcagtacgggtacctgactctgaacaacggcagtcaggccgtgggccgttcctccttctactgcctggagtactttccttctcaaatgctgagaacgggcaacaactttgagttcagctaccagtttgaggacgtgccttttcacagcagctatgcgcacagccaaagcctggaccggctgatgaaccccctcatcgaccagtacctgtactacctgtctcggactcagtccacgggaggtaccgcaggaactcagcagttgctattttctcaggccgggcctaataacatgtcggctcaggccaaaaactggctacccgggccctgctaccggcagcaacgcgtctccacgacagtgtcgcaaaataacaacagcaactttgcttggaccggtgccaccaagtatcatctgaatggcagagactctctggtaaatcccggtgtcgctatggcaacgcacaagggcgacgaagagcgattttttccatccagcggagtcttgatgtttgggaaacagggagctggaaaagacaacgtagactatagcagcgttatgctaaccagtgaggaagaaatcaaaaccaccaacccagtggccacagaacagtacggcgtggtggccgataacctgcaacagcaaaacgccgctcctattgtaggggccgtcaacagtcaaggagccttacctggcatggtctggcagaaccgggacgtgtacctgcagggtcctatctgggccaagattcctcacacggacggcaactttcatccttcgccgctgatgggaggctttggactgaaacacccgcctcctcagatcctgattaagaatacacctgttcccgcggatcctccaactaccttcagtcaagccaagctggcgtcgttcatcacgcagtacagcaccggacaggtcagcgtggaaattgaatgggagctgcagaaagagaacagcaagcgctggaacccagagattcagtatacttccaactactacaaatctacaaatgtggactttgctgtcaatactgagggtacttattcagagcctcgccccattggcacccgttacctcacccgtaacctgtaattgcctgttaatcaataaaccggttgattcgtttcagttgaactttggtctcaagggcgaattc

SEQ ID NO: 4993 - DNA, 2187 bp, Adeno-associated virus
  source 1..2187: mol_type = other DNA
atggctgccgatggttatcttccagattggctcgaggacaacctctctgagggcattcgcgagtggtgggacttgaaacctggagccccgaaacccaaagccaaccagcaaaagcaggacgacggccggggtctggtgcttcctggctacaagtacctcggacccttcaacggactcgacaagggagagccggtcaacgaggcagacgccgcggccctcgagcacgacaaggcctacgacaagcagctcgagcagggggacaacccgtacctcaagtacaaccacgccgacgccgagtttcaggagcgtcttcaagaagatacgtcttttgggggcaacctcgggcgagcagtcttccaggccaagaagcgggttctcgaacctctcggtctggttgaggaaggcgctaagacggctcctggaaagaagagacccatagaatcccccgactcctccacgggcatcggcaagaaaggccagcagcccgctaaaaagaagctcaactttgggcagactggcgactcagagtcagtgcccgacccccaacctctcggagaacctcccgccgcgccctcaggtctgggatctggtacaatggctgcaggcggtggcgcaccaatggcagacaataacgaaggcgccgacggagtgggtaatgcctccggaaattggcattgcgattccacatggctgggcgacagagtcatcaccaccagcacccgcacctgggccctgcccacctacaacaaccacctctacaagcagatatcaagtcagagcggggctaccaacgacaaccacttcttcggctacagcaccccctggggctattttgacttcaacagattccactgccacttctcaccacgtgactggcagcgactcatcaacaacaactggggattccggcccagaaagctgcggttcaagttgttcaacatccaggtcaaggaggtcacgacgaacgacggcgttacgaccatcgctaataaccttaccagcacgattcaggtcttctcggactcggagtaccaactgccgtacgtcctcggctctgcgcaccagggctgcctccctccgttccctgcggacgtgttcatgattcctcagtacggatatctgactctaaacaacggcagtcagtctgtgggacgttcctccttctactgcctggagtactttccttctcagatgctgagaacgggcaataactttgaattcagctacacctttgaggaagtgcctttccacagcagctatgcgcacagccagagcctggaccggctgatgaatcccctcatcgaccagtacctgtactacctggcccggacccagagcactacggggtccacaagggagctgcagttccatcaggctgggcccaacaccatggccgagcaatcaaagaactggctgcccggaccctgttatcggcagcagagactgtcaaaaaacatagacagcaacaacaacagtaactttgcctggaccggggccactaaataccatctgaatggtagaaattcattaaccaacccgggcgtagccatggccaccaacaaggacgacgaggaccagttctttcccatcaacggagtgctggtttttggcgaaacgggggctgccaacaagacaacgctggaaaacgtgctaatgaccagcgaggaggagatcaaaaccaccaatcccgtggctacagaagaatacggtgtggtctccagcaacctgcaatcgtctacggccggaccccagacacagactgtcaacagccagggggctctgcccggcatggtctggcagaaccgggacgtgtacctgcagggtcccatctgggccaaaattcctcacacggacggcaactttcacccgtctcccctgatgggcggatttggactcaaacacccgcctcctcaaattctcatcaaaaacaccccggtacctgctaatcctccagaggtgtttactcctgccaagtttgcctcatttatcacgcagtacagcaccggccaggtcagcgtggagatcgagtgggaactgcagaaagaaaacagcaaacgctggaatccagagattcagtacacctcaaattatgccaagtctaataatgtggaatttgctgtcaacaacgaaggggtttatactgagcctcgccccattggcacccgttacctcacccgtaacctgtaa

SEQ ID NO: 4994 - protein, 728 aa, Adeno-associated virus; identical to SEQ ID NO: 4765

SEQ ID NO: 4995 - protein, 728 aa, Adeno-associated virus; identical to SEQ ID NO: 4829

SEQ ID NO: 4996 - protein, 728 aa, Adeno-associated virus; identical to SEQ ID NO: 4829

SEQ ID NO: 4997 - DNA, 3113 bp, Adeno-associated virus
  source 1..3113: mol_type = other DNA
gaattcgccctttctacggctgcgtcaactggaccaatgagaactttcccttcaacgattgcgtcgacaagatggtgatctggtgggaggagggcaagatgacggccaaggtcgtggagtccgccaaggccattctcggcggcagcaaggtgcgcgtggaccaaaagtgcaagtcgtccgcccagatcgatcccacccccgtgatcgtcacttccaacaccaacatgtgcgccgtgattgacgggaacagcaccaccttcgagcaccagcagccgttacaagaccggatgttcaaatttgaactcacccgccgtctggagcatgactttggcaaggtgacaaagcaggaagtcaaagagttcttccgctgggcgcaggatcacgtgaccgaggtggcgcatgagttctacgtcagaaagggtggagccaacaagagacccgcccccgatgacgcggataaaagcgagcccaagcgggcctgcccctcagtcgcggatccatcgacgtcagacgcggaaggagctccggtggactttgccgacaggtaccaaaacaaatgttctcgtcacgcgggcatgcttcagatgctgcttccctgcaagacatgcgagagaatgaatcagaatttcagcatttgcttcacgcacgggaccagagactgttcagaatgtttccccggcgtgtcagaatctcaaccggtcgtcagaaagaggacgtatcggaaactctgtgccattcatcatctgctggggcgggctcccgagattgcttgctcggcctgcgatctggtcaacgtggacctggatgactgtgtttctgagcaataaatgacttaaaccaggtatggctgccgatggtcatcttccagattggctcgaggacaacctctctgagggcattcgcgagtggtgggacttgaaacctggagccccgaaacccaaagccaaccagcaaaagcaggacgacggccggggtctggtgcttcctggctacaagtacctcggacccttcaacggactcgacaagggggagcccgtcaacgcggcggacgcagcggccctcgagcacgacaaggcctacgaccagcagctcaaagcgggtgacaatccgtacctgcggtataaccacgccgacgccgagtttcaggagcgtcttcaagaagatacgtcttttgggggcaacctcgggcgagcagtcttccaggccaagaagcgggttctcgaacctctcggtctggttgaggaaggcgctaagacggctcctggaaagaagagacccatagaatcccccgactcctccacgggcatcggcaagaaaggccagcagcccgctaaaaagaagctcaactttgggcagactggcgactcagagtcagtgcccgaccctcaaccaatcggagaaccccccgcaggcccctctggtctgggatctggtacaatggctgcaggcggtggcgctccaatggcagacaataacgaaggcgccgacggagtgggtagttcctcaggaaattggcattgcgattccacatagctgggcgacagagtcatcaccaccagcacccgaacctgggccctccccacctacaacaaccacctctacaagcaaatctccaacgggacatcgggaggaagcaccaacgacaacacctacttcggctacagcaccccctgggggtattttgactttaacagattccactgccacttctcaccacgtgactggcagcgactcatcaacaacagctggggattccggcccaagagactcaacttcaagctcttcaacatccaggtcaaggaggtcacgcagaatgaaggcaccaagaccatcgccaataaccttaccagcacgattcaggtctttacggactcggaataccagctcccgtacgtcctcggctctgcgcaccagggctgcctgcctccgttcccggcggacgtcttcatgattcctcagtacgggtacctgactctgaacaacggcagtcaggccgtgggccgttcctccttctactgcctggagtactttccttctcaaatgctgagaacgggcaacaactttgagttcagctaccagtttgaggacgtgccttttcacagcagctacgcgcacagccaaagcctggaccggctgatgaaccccctcatcgaccagtacctgtactacctgtctcggactcagtccacgggaggtaccgcaggaactcagcagttgctattttctcaggccgggcctaataacatgtcggctcaggccaaaaactggctacccgggccctgctaccggcagcaacgcgtctccacgacactgtcgcaaaataacaacagcaactttgcttggaccggtgccaccaagtatcatctgaatggcagagactctctggtaaatcccggtgtcgctatggcaacgcacaaggacgacgaagagcgattttttccatccagcggagtcttgatgtttgggaaacagggagctggaaaagacaacgtggactatagcagcgttatgctaaccagtgaggaagaaatcaaaaccaccaacccagtggccacagaacagtacggcgtggtggccgataacctgcaacagcaaaacgccgctcctattgtaggggccgtcaacagtcaaggagccttacctggcatggtctggcagaaccgggacgtgtacctgcagggtcctatctgggccaagattcctcacacggacggcaactttcatccttcgccgctgatgggaggctttggactgaaacacccgcctcctcagatcctgattaagaatacacctgttcccgcggatcctccaactaccttcagtcaagccaagctggcgtcgttcatcacgcagtacagcaccggacaggtcagcgtggaaattgaatgggagctgcagaaagagaacagcaagcgctggaacccagagattcagtatacttccaactactacaaatctacaaatgtggactttgctgtcaatactgagggtacttattcagagcctcgccccattggcacccgttacctcacccgtaacctgtaattgcctgttaatcaataaaccggttaattcgtttcagttgaactttggtctctgcgaagggcgaattc

SEQ ID NO: 4998 - DNA, 3106 bp, Adeno-associated virus
  source 1..3106: mol_type = other DNA
gaattcgcccttctacggctgcgtcaactggaccaatgagaactttcccttcaacgattgcgtcgacaagatggtgatctggtgggaggagggcaagatgacggccaaggtcgtggagtccgccaaggccattctcggcggcagcaaggtgcgcgtggaccaaaagtgcaagtcgtccgcccagatcgaccccacccccgtgatcgtcacctccaacaccaacatgtgcgccgtgattgacgggaacagcaccaccttcgagcaccagcagccgttgcaggaccggatgttcaaatttgaactcacccgccgtctggagcatgactttggcaaggcgacaaagcaggaagtcaaagagttcttccgctgggcgcaggatcacgtgaccgaggtggcgcatgagttctacgtcagaaagggtggagccaacaagagacccgcccccgatgacgcggataaaagcgagcccaagcgggcccgcccctcagtcgcggatccatcgacgtcagacgcggaaggagctccggtggactttgccgacaggtaccaaaacaaatgttctcgtcacgcgggcatgcttcagatgctgtttccctgcaaaacatgcgagagaatgaatcagaatttcaacatttgcttcacgcacgggaccagagactgttcagaatgtttccccggcgtgtcagaatctcaaccggtcgtcagaaagaggacgtatcggaaactctgtgccattcatcatctgctggggcgggctcccgagattgcttgctcggcctgcgatctggtcaacgtggacctggatgactgtgtttctgagcaataaatgacttaaaccaggtatggctgccgatggttatcttccagattggctcgaggacaacctctctgagggcattcgcgagtggtgggacttgaaacctggagccccgaaacccaaagccaaccagcaaaagcaggacgacggccggggtctggtgcttcctggctacaagtacctcggacccttcaacggactcgacaagggagagccggtcaacgaggcagacgccgcggccctcgagcacgacaaggcctacgacaagcagctcgagcagggggacaacccgtacctcaagtacaaccacgccgacgccgagtttcaggagcgtcttcaagaagatacgtcttttgggggcaacctcgggcgagcagtcttccgggccaagaagcgggttctcgaacctctcggtctggttgaggaaggcgctaagacggctcctggaaagaagagacccatagaatcccccgactcctccacgggcatcggcaagaaaggccagcagcccgctaaaaagaagctcaactttgggcagactggcgactcagagtcagtgcccgacccccaacctctcggagaacctcccgccgcgccctcaggtctgggatctggtacaatggctgcaggcggtggcgcaccaatggcagacaataacgaaggcgccgacggagtgggtaatgcctccggaaattggcattgcgattccacatggctgggcgacagagtcatcaccaccagcacccgcacctgggccctgcccacctacaacaaccacctctacaagcagatatcaagtcagagcggggctaccaacgacaaccacttcttcggctacagcaccccctggggctattttgacttcaacagattccactgccacttctcaccacgtgactggcagcgactcatcaacaacaaccggggattccggcccagaaagctgcggttcaagttgttcaacatccaggtcaaggaggtcacgacgaacgacggcgttacgaccatcgctaataaccttaccagcacgattcaggtcttctcggactcggagtaccaactgccgtacgtcctcggctctgcgcaccagggctgcctccctccgttccctgcggacgtgttcatgattcctcagtacggatatctgactctaaacaacggcagtcagtctgtgggacgttcctccttctactgcctggagtactttccttctcagatgctgagaacgggcaataactttgaattcagctaccagtttgaggacgtgccctttcacagcagctacgcgcacagccaaagcctggaccggctgatgaaccccctcatcgaccagtacctgtactacctgtctcggactcagtccacgggaggtaccgcaggaactcagcagttgctattttctcaggccgggcctaataacatgtcggctcaggccaaaaactggctacccgggccctgctaccggcagcaacgcgtctccacgacactgtcgcaaaataacaacagcaactttgcttggaccggtgccaccaagtatcatctgaatggcagagactctctggtaaatcccggtgtcgctatggcaacgcacaaggacgacgaagagcgattttttccatccagcggagtcttgatgtttgggaaacagggagctggaaaagacaacgtggactatagcagcgttatgctaaccagtgaggaagaaatcaaaaccaccaacccagtggccacagaacagtacggcgtggtggccgataacctgcaacagcaaaacgccgctcctattgtaggggccgtcaacagtcaaggagccttacctggcatggcctggcagaaccgggacgtgtacctgcagggtcctatctgggccaagattcctcacacggacggcaactttcatccttcgccgctgatgggaggctttggactgaaacacccgcctcctcagatcctgattaagaatacacctgttcccgcggatcctccaactaccttcagtcaagccaagctggcgtcgttcatcacgcagtacagcaccggacaggtcagcgtggaaattgaatgggagctgcagaaagagaacagcaagcgctggaacccagagattcagtatacttccaactactacaaatctacaaatgtggactttgctgtcaatactgagggtacttattcagagcctcgccccattggcacccgttacctcacccgtaacctgtaattgcctgttaatcaataaaccggttaattcgtttcagttgaactttggtctctgcgaagggcgaattc

SEQ ID NO: 4999 - DNA, 3197 bp, Adeno-associated virus
  source 1..3197: mol_type = other DNA
gaattcgccctttctacggctgcgtcaactggaccaatgagaactttcccttcaacgattgcgtcgacaagatggtgatctggtgggaggagggcaagatgacggccaaggtcgtggagtccgccaaggccattctcggcggcagcaaggtgcgcgtggaccaaaagtgcaagtcgtccgcccagatcgaccccacccccgtgatcgtcacctccaacaccaacatgtgcgccgtgattgacgggaacagcaccaccttcgagcaccagcagccgttacaagaccggatgttcaaatttgaactcacccgccgtctggagcacgactttggcaaggtgacaaagcaggaagtcaaagagttcttccgctgggcgcaggatcacgtgaccgaggtggcgcatgagttctacgtcagaaagggtggagccaacaagagacccgcccccgatgacgcggataaaagcgagcccaagcgggcctgcccctcagtcgcggatccatcgacgtcagacgcggaaggagctccggtggactttgccgacaggtaccaaaacaaatgttctcgtcacgcgggcatgcttcagatgctgtttccctgcaagacatgcgagagaatgaatcagaatttcaacatttgcttcacgcacgggaccagagactgttcagaatgtttccccggcgtgtcagaatctcaaccggtcgtcagaaagaggacgtatcggaaactctgtgccattcatcatctgctggggcgggctcccgagattgcttgctcggcctgcgatctggtcaacgtggacctggatgactgtgtttctgagcaataaatgacttaaaccaggtatggctgccgatggttatcttccagattggctcgaggacaacctctctgagggcattcgcgagtggtgggacttgaaacctggagccccgaaacccaaagccaaccagcaaaagcaggacgacggccggggtctggtgcttcctggctacaagtacctcggacccttcaacggactcgacaagggagagccggtcaacgaggcagacgccgcggccctcgagcacgacaaggcctacgacaagcagctcgagcagggggacaacccgtacctcaagtacaaccacgccgacgccgagtttcaggagcgtcttcaagaagatacgtcttttgggggcaacctcgggcgagcagtcttccaggccaagaagcgggttctcgaacctctcggtctggttgaggaaggcgctaagacggctcctggaaagaagagaccggtagagccatcaccccagcgttctccagactcctctacgggcatcggcaagacaggccagcagcccgcgaaaaagagactcaactttgggcagactggcgactcagagtcagtgcccgaccctcaaccaatcggagaaccccccgcaggcccctctggtctgggatctggtacaatggctgcaggcggtggcgctccaatggcagacaataacgaaggcgccgacggagtgggtagttcctcaggaaattggcattgcgattccacatggctgggcgacagagtcatcaccaccagcacccgaacctgggccctccccacctacaacaaccacctctacaagcaaatctccaacgggacatcgggaggaagcaccaacgacaacacctacttcggctacagcaccccctgggggtattttgactttaacagattccactgccacttctcaccacgtgactggcagcgactcatcaacaacaactggggattccggcccaagagactcaacttcaagctcttcaacatccaggtcaaggaggtcacgcagaatgaaggcaccaagaccatcgccaataaccttaccagcacgattcaggtctttacggactcggaataccagctcccgtacgtcctcggctctgcgcaccagggctgcctgcctccgttcccggcggacgtcttcatgattcctcagtacgggtacctgactctgaacaacggcagtcaggccgtgggccgttcctccttctactgcctggagtactttccttctcaaatgctgagaacgggcaacaactttgagttcagctaccagtttgaggacgtgccttttcacagcagctacgcgcacagccaaagcctggaccggctgatgaaccccctcatcgaccagtacctgtactacctgtctcggactcagtccacgggaggtaccgcaggaactcagcagttgctattttctcaggccgggcctaataacatgtcggctcaggccaaaaactggctacccgggccctgctaccggcagcaacgcgtctccacgacactgtcgcaaaataacaacagcaactttgcttggaccggtgccaccaagtatcatctgaatggcagagactctctggtaaatcccggtgtcgctatggcaacgcacaaggacgacgaagagcgattttttccatccagcggagtcttgatgtttgggaaacagggagctggaaaagacaacgtggactatagcagcgttatgctaaccagtgaggaagaaatcaaaaccaccaacccagtggccacagaacagtacggcgtggtggccgataacctgcaacagcaaaacgccgctcctattgtaggggccgtcaacagtcaaggagccttacctggcatggtctggcagaaccgggacgtgtacctgcagggtcctatctgggccaagattcctcacacggacggcaactttcatccttcgccgctgatgggaggctttggactgaaacacccgcctcctcagatcctgattaagaatacacctgttcccgcggatcctccaactaccttcagtcaagccaagctggcgtcgttcatcacgcagtacagcaccggacaggtcagcgtggaaattgaatgggagctgcagaaagagaacagcaagcgctggaacccagagattcagtatacttccaactactacaaatctacaaatgtggactttgctgtcaatactgagggtacttattcagagcctcgccccattggcacccgttacctcacccgtaacctgtaattgcctgttaatcaataaaccggttaattcgtttcagttgaactttggtctctgcgaagggcgaattcgtttaaacctgcaggactagtccctttagtgagggttaattctgagcttggcgtaatcatgggtcatag

SEQ ID NO: 5000 - DNA, 3276 bp, Adeno-associated virus
  source 1..3276: mol_type = other DNA
gaattcgcccttcgcagagaccaaagttcaactgaaacgaattaaccggtttattgattaacaggcaattacaggttacgggtgaggtaacgggtgccaatggggcgaggctcagtataaaccccttcgttgttgacagcaaattccacattattagacttggcataatttgaggtgtactgaatctctggattccagcgtttgctgttttctttctgcagttcccactcgatctccacgctgacctggccggtgctgtactgcgtgataaatgaggcaaacttggcaggagtaaacacctctggaggattagcaggtaccggggtgtttttgatgagaatttgaggaggcgggtgtttgagtccaaatccgtccatcaggggagacgggtgaaagttgccgtccgtgtgaggaattttggcccagatgggaccctgcaggtacacgtcccggttctgccagaccatgccgggcagagccccctggctgttgacagtctgtgtctggggtccggccgtagacgattgcaggttgctggagaccacaccgtattcttctgtagccacgggattggtggttttgatctcctcctcgctggtcattagcacgttttccagcgttgtcttgttggcagcccccgttttgccaaaaaccagcactccgttgatgggaaagaactggtcctcgtcgtccttgttggtggccatggctacgcccgggttggttaatgaatttctaccattcagatggtatttagtggccccggtccaggcaaagttactgttgttgttgctgtctatgttttttgacagtctctgctgccgataacagggtccgggcagccagttctttgattgctcggccatggtgttgggcccagcctgatggaactgcagctcccttgtggaccccgtagtgctctgggtccgggccaggtagtacaggtactggtcgatgaggggattcatcagccggtccaggctctggctatgcgcatagctgctgtggaaaggcacttcctcaaaggtgtagctgaattcaaagttattgcccgttctcagcatctgagaaggaaagtactccaggcagtagaaggaggaacgtcccacagactgactgccgttgtttagagtcagatatccgtactgaggaatcatgaacacgtccgcagggaacggagggaggcagccctggtgcgcagagccgaggacgtacggcagttggtactccgagtccgagaagacctgaatcgtgctggtaaggttattagcgatggtcgtaacgccgtcgtccgtcgtgacctccttgacctggatgttgaacaacttgaaccgcagctttctgggccggaatccccagttgttgttgatgagtcgctgccagtcacgtggtgagaagtggcagtggaatctgttaaagtcaaaatacccccagggggtgctgtagccgaagtaggtgttgtcgttggtgcttcctcccgatgtcccgttggagatttgcttgtagaggtggttgttgtaggtggggagggcccaggttcgggtgctggtggtgatgactctgtcgcccagccatgtggaatcgcaatgccaatttcctgaggaactacccactccgtcggcgccttcgttattgtctgccattggagcgccaccgcctgcagccattgtaccagatcccagaccagaggggcctgcggggggttctccgattggttgagggtcgggcactgactctgagtcgccagtctgcccaaagttgagtctctttttcgcgggctgctggcctgtcttgccgatgcccgtagaggagtctggagaacgctggggtgatggctctaccggtctcttctttccaggagccgtcttagcgccttcctcaaccagaccgagaggttcgagaacccgcttcttggcctggaagactgctcgcccgaggttgcccccaaaagacgtatcttcttgaagacgctcctgaaactcggcgtcggcgtggttgtacttgaggtacgggttgtccccctgctcgagctgcttgtcgtaggccttgtcgtgctcgagggccgcggcgtctgcctcgttgaccggctctcccttgtcgagtccgttgaagggtccgaggtacttgtagccaggaagcaccagaccccggccgtcgtcctgcttttgctggttggctttgggtttcggggctccaggtttcaagtcccaccactcgcgaatgccctcagagaggttgtcctcgagccaatctggaagataaccatcggcagccatacctggtttaagtcatttattgctcagaaacacagtcatccaggtccacgttgaccagatcgcaggccgagcaagcaatctcgggagcccgccccagcagatgatgaatggcacagagtttccgatacgtcctctttctgacgaccggttgagattctgacacgccggggaaacattctgaacagtctctggtcccgtgcgtgaagcaaatgttgaaattctgattcattctctcgcatgtcttgcagggaaacagcatctgaagcatgcccgcgtgacgagaacacttgttttggtacctgtcggcaaagtccaccggagctccttccgcgtctgacgtcgatggatgcaaaatgtcgcaaaagcactcacgtgacagctaatacaggaccactcccctatgacgtgatttacgtcagcgctatgcccgcgtgacgagaacatttgttttggtacctgtcggcaaagtccaccggagctccttccgcgtctgacgtcgatggatccgcgactgaggggcaggcccgcttgggctcgcttttatccgcgtcatcgggggcgggtctcttgttggctccaccctttctgacgtagaactcatgcgccacctcggtcacgtgatcctgcgcccagcggaagaactctttgacttcctgctttgtcaccttgccaaagtcatgctccagacggcgggtgagttcaaatttgaacatccggtcctgcaacggctgctggtgctcgaaggtggtgctgttcccgtcaatcacggcgcacatgttggtgttggaagtgacgatcacgggggtgggatcgatctgggcggaagacttgcacttttggtccacgcgcaccttgctgccgccgagaatggccttggcggactccacgaccttggccgtcatcttgccctcctcccaccagatcaccatcttgtcgacgcaatcgttgaagggaaagttctcattggtccagttgacgcagccgtagaaagggcgaattc

SEQ ID NO: 5001 - protein, 738 aa, Adeno-associated virus; identical to SEQ ID NO: 4777

SEQ ID NO: 5002 - protein, 738 aa, Adeno-associated virus
MAADGYLPDWLEDNLSEGIREWWDLKPGAPKPKANQQKQDDGRGLVLPGYKYLGPFNGLDKGEPVNAADAAALEHDKAYDQQLKAGDNPYLRYNHADAEFQERLQEDTSFGGNLGRAVFQAKKRVLEPLGLVEEGAKTAPGKKRPVEPSPQRSPDSSTGIGKKGHQPARKRLNFGQTGDSESVPDPQPIGEPPAGPSGLGSGTMAAGGGAPMADNNEGADGVGSSSGNWHCDSTWLGDRVITTSTRTWALPTYNNHLYKQISNGTSGGSTNDNTYFGYSTPWGYFDFNRFHCHFSPRDWQRLINNNWGFRPKRLNFKLFNIQVKEVTQNEGTKTIANNLTSTIQVFTDSEYQLPYVPGSAHQGCLPPFPADVFMIPQYGYLTLNNGSQAVGRSSFYCLEYFPSQMLRTGNNFEFSYTFEDVPFHSSYAHSQSLDRLMNPLIDQYLYYLSRTQSTGGTQGTQQLLFSQAGPANMSAQAKNWLPGPCYRQQRVSTTLSQNNNSNFAWTGATKYHLNGRDSLVNPGVAMATHKDDEERFFPSSGVLMFGKQGAGKDNVDYSSVMLTSEEEIKTTNPVATEQYGVVADNLQQTNGAPIVGTVNSQGALPGMVWQNRDVYLQGPIWAKIPHTDGNFHPSPLMGGFGLKHPPPQILIKNTPVPADPPTTFSQAKLASFITQYSTGQVSVEIEWELQKENSKRWNPEIQYTSNYYKSTNVDFAVNTEGTYSEPRPIGTRYLTRNL

SEQ ID NO: 5003 - protein, 738 aa, Adeno-associated virus; identical to SEQ ID NO: 4775

SEQ ID NO: 5004 - DNA, 2489 bp, Adeno-associated virus
  source 1..2489: mol_type = other DNA
gaattcgccctttctacggctgcgtcaactggaccaatgagaactttcccttcaacgattgcgtcgacaagatggtgatctggtgggaggagggcaagatgacggccaaggtcgtgaagtccgccaaggccattcatcatctgctggggcgggctcccgagattgcttgctcggcctgcgatctggtcaacgtggacctggatgactgtgtttctgagcaataaatgacttaaaccaggtatggctgccgatggttatcttccagattggctcgaggacaacctctctgagggcattcgcgagtggtgggacttgaaacctggagccccgaaacccaaagccaaccagcaaaagcaggacgacggccggggtctggtgcttcctggctacaagtacctcggacccttcaacggactcgacaagggagagccggtcaacgaggcagacgccgcggccctcgagcacgacaaggcctacgacaagcagctcgagcagggggacaacccgtacctcaagtacaaccacgccgacgccgagtttcaggagcgtcttcaagaagatacgtcttttgggggcaacctcgggcgagcagtcttccaggccaagaagcgggttctcgaacctctcggtctggttgaggaaggcgctaagacggctcctggaaagaagagacccatagaatcccccgactcctccacgggcatcggcaggaaaggccagcagcccgctaaaaagaagctcaactttgggcagactggcgactcagagtcagtgcccgaccctcaaccaatcggagaaccccccgcaggcccctctggtctgggatctggtacaatggctgcaggcggtggcgctccaatggcagacaataacgaaggcgccgacggagtgggtaatgcctccggaaattggcattgcgattccacatggctgggcgacagagtcatcaccaccagcacccgcacctgggccctgcccacctacaacaaccacctctacaagcagatatcaagtcagagcggggctaccaacgacaaccacttcttcggctacagcaccccctggggctattttgacttcaacagattccactgccacttctcaccacgtgactggcagcgactcatcaacaacaactggggattccggcccagaaagctgcggttcaagttgttcaacatccaggtcaaggaggtcacgacgaacgacggcgttacgaccatcgccaataaccttaccagcacgattcaggtcttctcggactcggagtaccaactgccgtacgtcctcggctctgcgcaccagggctgcctccctccgttccctgcggacgtgttcatgattcctcagtacggatatctgactctaaacaacggcagtcagtctgtgggacgttcctccttctactgcctggagtactttccttctcagatgctgagaacgggcaataactttgaattcagctacacctttgaggaagtgcctttccacagcagctatgcgcacagccagagcctggaccggctgatgaatcccctcatcgaccagtacctgtactacctggcccggacccagagcactacggggtccacaagggagctgcagttccatcaggctgggcccaacaccatggccgagcaatcaaagaactggctgcccggaccctgttatcggcagcagagactgtcaaaaaacatagacagcaacaacaacagtaactttgcctggaccggggccactaaataccatctgaatggtagaaattcattaaccaacccgggcgtagccatggccaccaacaaggacgacgaggaccagttctttcccatcaacggagtgctggtttttggcaaaacgggggctgccaacaagacaacgctggaaaacgtgctaatgaccagcgaggaggagatcaaaaccaccaatcccgtggctacagaagaatacggtgtggtctccagcaacctgcaatcgtctacggccggaccccagacacagactgtcaacagccagggggctctgcccggcatggtctggcagaaccgggacgtgtacctgcagggtcccatctgggccaaaattcctcacacggacggcaactttcacccgtctcccctgatgggcggatttggactcaaacacccgcctcctcaaattctcatcaaaaacaccccggtacctgctaatcctccagaggtgtttactcctgccaagtttgcctcatttatcacgcagtacagcaccggccaggtcagcgtggagatcgagtgggaactgcagaaagaaaacagcaaacgctggaatccagagattcagtacacctcaaattatgccaagtctaataatgtggaatttgctgtcaacaacgaaggggtttatactgagcctcgccccattggcacccgttacctcacccgtaacctgtaattgcctgttaatcaataaaccggttaattcgtttcagttgaactttggtcaagggcgaattc

SEQ ID NO: 5005 - DNA, 3098 bp, Adeno-associated virus
  source 1..3098: mol_type = other DNA
gaattcgccctttctacggctgcgtcaactggaccaatgagaactttcccttcaacgattgcgtcgacaagatggtgatctggtgggaggagggcaagatgacggccaaggtcgtggagtccgccaaggccattctcggcggcagcaaggtgcgcgtggaccaaaagtgcaagtcttccgcccagatcgatcccacccccgtgatcgtcacttccaacaccaacatgtgcgccgtgattgacgggaacagcaccaccttcgagcaccagcagccgttacaagaccggatgttcaaatttgaactcacccgccgtctggagcacgactttggcaaggtgacaaagcaggaagtcaaagagttcttccgctgggcgcaggatcacgtgaccgaggtggcgcatgagttctacgtcagaaagggtggagccaacaagagacccgcccccgatgacgcggataaaagcgagcccaagcgggcctgcccctcagtcgcggatccatcgacgtcagacgcggaaggagctccggtggactttgccgacaggtaccaaaacaaatgttctcgtcacgcgggcatgcttcagatgctgtttccctgcaagacatgcgagagaatgaatcagaatttcaacatttgcttcacgcacgggaccggagactgttcagaatgtttccccggcgtgtcagaatctcaaccggtcgtcagaaagaggacgtatcggaaactctgtgccattcatcatctgctggggcgggctcccgagattgcttgctcggcctgcgatctggtcaacgtggacctggatgactgtgtttctgagcaataaatgacttaaaccaggtatggctgccgatggttatcttccagattggctcgaggacaacctctctgagggcattcgcgagtggtgggacttgaaacctggagccccgaaacccaaagccaaccagcaaaagcaggacgacggccggggtctggtgcttcctggctacaagtacctcggacccttcaacggactcgacaagggagagccggtcaacgcggcggacgcagcggccctcgagcacgacaaggcctacgaccagcagctcaaagcgggtgacaatccgtacctgcggtataaccacgccgacgccgagtttcaggagcgtcttcaagaagatacgtcttttgggggcaacctcgggcgagcagtcttccaggccaagaagcgggttctcgaacctctcggtctggttgaggaaggcgctaagacggctcctggaaagaagagacccatagaatcccccgactcctccacgggcatcggcaagaaaggccagcagcccgctaaaaagaagctcaactttgggcagactggcgactcagagtcagtgcccgaccctcaaccaatcggagaaccccccgcaggcccctctggtctgggatctggtacaatggctgcaggcggtggcgctccaatggcagacaataacgaaggcgccgacggagtgggtaatgcctccggaaattggcattgcgattccacatggctgggcgacagagtcatcaccaccagcacccgcacctgggccctgcccacctacaacaaccacctctacaagcagatatcaagtcagagcggggctaccaacgacaaccacttcttcggctacagcaccccctggggctattttgacttcaacagattccactgccacttctcaccacgtgactggcagcgactcatcaacaacaactggggattccggcccagaaagctgcggttcaagttgttcaacatccaggtcaaggaggtcacgacgaacgacggcgttacgaccatcgctaataaccttaccagcacgattcaggtcttctcggactcggagtaccaactgccgtacgtcctcggctctgcgcaccagggctgcctccctccgttccctgcggacgtgttcatgattcctcagtacggatatctgactctaaacaacggcagtcagtctgtgggacgttcctccttctactgcctggagtactttccttctcagatgctgagaacgggcaataactttgaattcagctacacctttgaggaagtgcctttccacagcagctatgcgcacagccagagcctggaccggctgatgaatcccctcatcgaccagtacctgtactacctggcccggacccagagcactacggggtccacaagggagctgcagttccatcaggctgggcccaacaccatggccgagcaatcaaagaactggctgcccggaccctgttatcggcggcagagactgtcaaaagacatagacagcaacaacaacagtaactttgcctggaccggggccactaaataccatctgaatggtagaaattcattaaccaacccgggcgtagccatggccaccaacaaggacgacgaggaccagttctttcccatcaacggagtgctggtttttggcaaaacgggggctgccaacaagacaacgctggaaaacgtgctaatgaccagcgaggaggagatcaaaaccaccaatcccgtggctacagaagaatacggtgtggtctccagcaacctgcaatcgtctacggccggaccccagacacagactgtcaacagccagggggctctgcccggcatggtctggcagaaccgggacgtgtacctgcagggtcccatctgggccaaaattcctcacacggacggcaactttcacccgtctcccctgatgggcggatttggactcaaacacccgcctcctcaaattctcatcaaaaacaccccggtacctgctaatcctccagaggtgtttactcctgccaagtttgcctcatttatcacgcagtacagcaccggccaggtcagcgtggagatcgagtgggaactgcagaaagagaacagcaaacgctggaatccagagattcagtacacctcaaattatgccaagtctaataatgtggaatttgctgtcaacaacgaaggggtttatactgagcctcgccccattggcacccgttacctcacccgtaacctgtaattacttgttaatcaataaaccggttgattcgtttcagttgaactttggtctctgcgaagggcgaattc

SEQ ID NO: 5006 - DNA, 2969 bp, Adeno-associated virus
  source 1..2969: mol_type = other DNA
gaattcgccctttctacggctgcgtcaactggaccaatgagaactttcccttcaacgattgcgtcgacaagatggtgatctggtgggaggagggcaagatgacggccaaggtcgtggagtccgccaaggccattctcggcggcagcaaggtgcgcgtggaccaaaagtgcaagtcgtccgcccagatcgaccccacccccgtgatcgtcacctccaacaccaacatgtgcgccgtgattgacgggaacagcaccaccttcgagcaccagcagccgttacaagaccggatgttcaaatttgaactcacccgccgtctggagcacgactttggcaaggtgacaaagcaggaagtcaaagagttcttccgctgggcgcaggatcacgtgaccgaggtggcgcatgagttctacgtcagaaagggtggagccaacaagagacccgcccccgatgacgcggataaaagcgagcccaagcgggcctgcccctcagtcgcggatccatcgacgtcagacgcggaaggagctccggtggactttgccgacaggtaccaaaacaaatgttctcgtcacgcgggcatgcttcagatgctgtttccctgcaagacatgcgagagaatgaatcagaatttcaacatttgcttcacgcacgggaccagagactgttcagaatgtttccccggcgtgtcagaatctcaaccggtcgtcagaaagaggacgtatcggaaactctgtgccattcatcatctgctggggcgggctcccgagattgcttgctcggcctgcgatctggtcaacgtggacctggatgactgtgtttctgagcaataaatgacttaaaccaggtatggctgccgatggttatcttccagattggctcgaggacaacctctctgagggcatccgcgagtggtgggacttgaaacctggagccccgaaacccaaagccaaccagcaaaagcaggacgacggccggggtctggtgcttcctggctacaagtacctcggacccttcaacggactcgacaagggagagccggtcaacgaggcagacgccgcggccctcgagcacgacaaggcctacgacaagcagctcgagcagggggacaacccgtacctcaagtacaaccacgccgacgccgagtttcaggagcgtcttcaagaagatacgtcttttgggggcaacctcgggcgagcagtcttccaggccaagaagcgggttctcgaacctctcggtctggttgaggaaggcgctaagacggctcctggaaagaagagaccggtagagccatcaccccagcgttctccagactcctctacgggcatcggcaagacaggccagcagcccgcgaaaaagagactcaactttgggcagactggcgactcagagtcagtgcccgaccctcaaccaatcggagaaccccccgcaggcccctctggtctgggatctggtacaatggctgcaggcggtggcgctccaatggcagacaataacgaaggcgccgacggagtgggtagttcctcaggaaattggcattgcgattccacatggctgggcgacagagtcatcaccaccagcacccgaacctgggccctccccacctacaacaaccacctctacaagcaaatctccaacgggacatcgggaggaagcaccaacgacaacacctacttcggctacagcaccccctgggggtattttgactttaacagattccactgccacttctcaccacgtgactggcagcgactcatcaacaacaactggggattccggcccaagagactcaacttcaagctcttcaacatccaggtcaaggaggtcacgcagaatgaaggcaccaagaccatcgccaataaccttaccagcacgattcaggtctttacggactcggaataccagctcccgtacgtcctcggctctgcgcaccagggctgcctgcctccgttcccggcggacgtcttcatgattcctcagtacgggtacctgactctgaacaacggcagtcaggccgtgggccgttcctccttctactgcctggagtactttccttctcaaatgctgagaacgggcaacaactttgagttcagctaccagtttgaggacgtgccttttcacagcagctacgcgcacagccaaagcctggaccggctgacgaaccccctcatcgaccagtacctgtactacctggcccggacccagagcactacggggtccacaagggggctgcagttccatcaggctgggcccaacaccatggccgagcaatcaaagaactggctgcccggaccctgttatcggcagcagagactgtcaaaaaacatagacagcaacaacaacagtaactttgcctggaccggggccactaaataccatctgaatggtagaaattcattaaccaacccgggcgtagccatggccaccaacaaggacgacgaggaccagttctttcccatcaacggagtgctggtttttggcaaaacgggggctgccaacaagacaacgctggaaaacgtgctaatgaccagcgaggaggagatcaaaaccaccaatcccgtggctacagaagaatacggtgtggtctccagcaacctgcaatcgtctacggccggaccccagacacagactgtcaacagccagggggctctgcccggcatggtctggcagaaccgggacgtgtacctgcagggtcccatctgggccaaaattcctcacacggacggcaactttcacccgtctcccctgatgggcggatttggactcaaacacccgcctcctcaaattctcatcaagtatacttccaactactacaaatctacaaatgtggactttgctgtcaatactgagggtacttattcagagcctcgccccattggcacccgttacctcacccgtaacctgtaattgcctgttaatcaataaaccggttaattcgtttcagttgaactttggtctctgcgaagggcgaattc

SEQ ID NO: 5007 - DNA, 3113 bp, Adeno-associated virus
  source 1..3113: mol_type = other DNA
gaattcgccctttctacggctgcgtcaactggaccaatgagaactttcccttcaacgattgcgtcgacaagatggtgatctggtgggaggagggcaagatgacggccaaggtcgtggagtccgccaaggccattctcggcggcagcaaggtgcgcgtggaccaaaagtgcaagtcgtccgcccagatcgatcccacccccgtgatcgtcacttccaacaccaacatgtgcgccgtgattgacgggaacagcaccaccttcgagcaccagcagccgttacaagaccggatgttcaaatttgaactcacccgccgtctggagcatgactttggcaaggtgacaaagcaggaagtcaaagagttcttccgctgggcgcaggatcacgtgaccgaggtggcgcatgagttctacgtcagaaagggtggagccaacaagagacccgcccccgatgacgcggataaaagcgagcccaagcgggcctgcccctcagtcgcggatccatcgacgtcagacgcggaaggagctccggtggactttgccgacaggtaccaaaacaaatgttctcgtcacgcgggcatgcttcagatgctgtttccctgcaagacatgcgagagaatgaatcagaatttcaacatttgcttcacgcacgggaccagagactgttcagaatgtttccccggcgtgtcagaatctcaaccggtcgtcagaaagaggacgtatcggaaactctgtgccattcatcatctgctggggcgggctcccgagattgcttgctcggcctgcgatctggtcaacgtggacctggatgactgtgtttctgagcaataaatgacttaaaccaggtatggctgccgatggttatcttccagattggctcgaggacaacctctctgagggcattcgcgagtggtgggacttgaaacctggagccccgaaacccaaagccaaccagcaaaagcaggacgacggccggggtctggtgcttcctggctacaagtacctcggacccttcaacggactcgacaagggggagcccgtcaacgcggcggacgcagcggccctcgagcacgacaaggcctacgaccagcagctcaaagcgggtgacaatccgtacctgcggtataaccacgccgacgccgagtttcaggagcgtcttcaagaagatacgtcttttgggggcaacctcgggcgagcagtcttccaggccaagaagcgggttctcgaacctctcggtctggttgaggaaggcgctaagacggctcctggaaagaagagacccatagaatcccccgactcctccacgggcatcggcaagaaaggccagcagcccgctaaaaagaagctcaactttgggcagactggcgactcagagtcagtgcccgaccctcaaccaatcggagaaccccccgcaggcccctctggtctgggatctggtacaatggctgcaggcggtggcgctccaatggcagacaataacgaaggcgccgacggagtgggtagttcctcaggaaattggcattgcgattccacatggctgggcgacagagtcatcaccaccagcacccgaacctgggccctccccacctacaacaaccacctctacaagcaaatctccaacgggacatcgggaggaagcaccaacgacaacacctacttcggctacagcaccccctgggggtattttgactttaacagattccactgccacttctcaccacgtgactggcagcgactcatcaacaacaactggggattccggcccaagagactcaacttcaagctcttcaacatccaggtcaaggaggtcacgcagaatgaaggcaccaagaccatcgccaataaccttaccagcacgattcaggtctttacggactcggaataccagctcccgtacgtcctcggctctgcgcaccagggctgcctgcctccgttcccggcggacgtcttcatgattcctcagtacgggtacctgactctgaacaacggcagtcaggccgtgggccgttcctccttctactgcctggagtactttccttctcaaatgctgagaacgggcaacaactttgagttcagctaccagtttgaggacgtgccttttcacagcagctatgcgcacagccaaagcctggaccggctgatgaaccccctcatcgaccagtacctgtactacctgtctcggactcagtccacgggaggtaccgcaggaactcagcagttgctattttctcaggccgggcctaataacatgtcggctcaggccaaaaactggctacccgggccctgctaccggcagcaacgcgtctccacgacagtgtcgcaaaataacaacagcaactttgcttggaccggtgccaccaagtatcatctgaatggcagagactctctggtaaatcccggtgtcgctatggcaacgcacaagggcgacgaagagcgattttttccatccagcggagtcttgatgtttgggaaacagggagctggaaaagacaacgtggactatagcagcgttatgctaaccagtgaggaagaaatcaaaaccaccaacccagtggccacagaacagtacggcgtggtggccgataacctgcaacagcaaaacgccgctcctattgtaggggccgtcaacagtcaaggagccttacctggcatggtctggcagaaccgggacgtgtacctgcagggtcctatctgggccaagattcctcacacggacggcaactttcatccttcgccgctgatgggaggctttggactgaaacacccgcctcctcagatcctgattaagaatacacctgttcccgcggatcctccaactaccttcagtcaagccaagctggcgtcgttcatcacgcagtacagcaccggacaggtcagcgtggaaattgaatgggagctgcagaaagagaacagcaagcgctggaacccagagattcagtatacttccaactactacaaatctacaaatgtggactttgctgtcaatactgagggtacttattcagagcctcgccccattggcacccgttacctcacccgtagcctgtaattgcctgttaatcaataaaccggttgattcgtttcagttgaactttggtctctgcgaagggcgaattc

SEQ ID NO: 5008 - DNA, 3128 bp, Adeno-associated virus
  source 1..3128: mol_type = other DNA
gaattcgccctttctacggctgcgtcaactggaccaatgagaactttcccttcaacgattgcgtcgacaagatggtgatctggtgggaggagggcaagatgacggccaaggtcgtggagtccgccaaggccattctcggcggcagcaaggtgcgcgtggaccaaaagtgcaagtcgtccgcccagatcgaccccacccccgtgatcgtcacctccaacaccaacatgtgcgccgtgattgacgggaacagcaccaccttcgagcaccagcagccgttgcaggaccggatgttcaaatttgaactcacccgccgtctggagcatgactttggcaaggtgacaaagcaggaagtcaaagagttcttccgctgggcgcaggatcacgtgaccgaggtggcgcatgagttctacgtcagaaagggtggagccaacaagagacccgcccccgatgacgcggataaaagcgagcccaagcgggcctgcccctcagtcgcggatccatcgacgtcagacgcggaaggagctccggtggactttgccgacaggtaccaaaacaaatgttctcgtcacgcgggcatgcttcagatgctgtttccctgcaagacatgcgagagaatgaatcagaatttcaacatttgcttcacgcgcgggaccagagactgttcagaatgtttcccgggcgtgtcagaatctcaaccggtcgtcagaaagaggacgtatcggaaactctgtgccattcatcatctgctggggcgggctcccgagattgcttgctcggcctgcgatctggtcaacgtggacctggatgactgtgtttctgagcaataaatgacttaaaccaggtatggctgccgatggttatcttccagattggctcgaggacaacctctctgagggcattcgcgagtggtgggacttgaaacctggagccccgaaacccaaagccaaccagcaaaagcaggacgacggccggggtctggtgcttcctggctacaagtacctcggacccttcaacggactcgacaagggggagcccgtcaacgcggcggacgcagcggccctcgagcacgacaaggcctacgaccagcagctcaaagcgggtgacaatccgtacctgcggtataaccacgccgacgccgagtttcaggagcgtctgcaagaagatacgtcttttgggggcaacctcgggcgagcagtcttccaggccaagaagcgggttctcgaacctctcggtctggttgaggaaggcgctaagacggctcctggaaagaagagaccggtagagccatcaccccagcgttctccagactcctctacgggcatcggcaagacaggccagcagcccgcgaaaaagagactcaactttgggcagactggcgactcagagtcagtgcccgaccctcaaccaatcggagaaccccccgcaggcccctctggtctgggatctggtacaatggctgcaggcggtggcgctccaatggcagacaataacgaaggcgccgacggagtgggtagttcctcaggaaattggcattgcgattccacatggctgggcgacagagtcatcaccaccagcacccgaacctgggccctccccacctacaacaaccacctctacaagcaaatctccaacgggacatcgggaggaagcaccaacgacaacacctacttcggctacagcaccccctgggggtattttgactttaacagattccactgccacttctcaccacgtgactggcagcgactcatcaacaacaactggggattccggcccaagagactcaacttcaagctcttcaacatccaggtcaaggaggtcacgcagaatgaaggcaccaagaccatcgccaataaccttaccagcacgattcaggtctttacggactcggaataccagctcccgtacgtcctcggctctgcgcaccagggctgcccgcctccgttcccggcggacgtcttcatgattcctcagtacgggtacctgactctgaacaacggcagtcaggccgtgggccgttcctccttctactgcctggagtactttccttctcaaatgcggagaacgggcaacaactttgagttcagctaccagtttgaggacgtgccttttcacagcagctacgcgcatagccaaagcctggaccggctgatgaaccccctcatcgaccagtacctgtactacctgtctcggactcagtccacgggaggtaccgcaggaactcagcagttgctattttctcaggccgggcctaataacatgtcggctcaggccaaaaactggctacccgggccctgctaccggcagcaacgcgtctccacgacactgtcgcaaaataacaacagcaactttgcttggaccggtgccaccaagtatcatctgaatggcagagactctctggtaaatcccggtgtcgctatggcaacgcacaaggacgacgaagagcgattttttccatccagcggagtcttgatgtttgggaaacagggagctggaaaagacaacgtggactatagcagcgttatgctaaccagtgaggaagaaatcaaaaccaccaacccagtggccacagaacagtacggcgtggtggccgataacctgcaacagcaaaacgccgctcctattgtaggggccgtcaacagtcaaggagccttacctggcatggtctggcagaaccgggacgtgtacctgcagggtcctatctgggccaagattcctcacacggacggcaactttcatccttcgccgctgatgggaggctttggactgaaacacccgcctcctcagatcctgattaagaatacacctgttcccgcggatcctccaactaccttcagtcaagccaagctggcgtcgttcatcacgcagtacagcaccggacaggtcagcgtggaaattgaatgggagctgcagaaagagaacagcaagcgctggaacccagagattcagtatacttccaactactacaaatctacaaatgtggactttgctgtcaatactgagggtacttattcagagcctcgccccattggcacccgttacctcacccgtaacctgtaattgcctgttaatcaataaaccggttaattcgtttcagttgaactttggtctctgcgaagggcgaattc

SEQ ID NO: 5009 - protein, 738 aa, Adeno-associated virus; identical to SEQ ID NO: 5002

SEQ ID NO: 5010 - DNA, 1933 bp, Adeno-associated virus
  variation 1302: note = a, c, t or g
  source 1..1933: mol_type = other DNA
caaggcctacgaccagcagctcaaagcgggtgacaatccgtacctgcggtataaccacgccgacgccgagtttcaggagcgtcttcaagaagatacgtcttttgggggcaacctcgggcgagcagtcttccaggccaaaaagcgggttctcgaacctcttggtctggttgagacgccagctaagacggcacctggaaagaagcgaccggtagactcgccagactccacctcgggcatcggcaagaaaggccagcagcccgcgaaaaagagactcaactttgggcagactggcgactcagagtcagtccccgaccctcaaccaatcggagaaccaccagcaggcccctctggtctgggatctggtacaatggctgcaggcggtggcgcaccaatggctgacaataacgagggcgccgacggagtgggtaatgcctcaggaaattggcattgcgattccacatggctgggcgacagagtcatcaccaccagcacccgaacctgggccctgcccacctacaacaaccacctctacaagcaaatctccagtcagtcagcagggagcaccaacgataacgtctatttcggctacagcaccccctgggggtattttgacttcaacagattccattgccacttctcaccacgtgactggcagcgacttatcaacaacaactggggattccggcccaagaagctcaacttcaagctcttcaacatccaggtcaaggaggtcacgacgaatgacggtgtcacaaccatcgctaataaccttaccagcacggttcaggtcttttcggactcggaatatcaactgccgtacgtcctcggctccgcgcaccagggctgcctgcctccgttcccggcagacgtgttcatgattccgcagtacggatacctgactctgaacaatggcagccaatcggtaggccgttcctccttctactgcctggagtactttccttctcagatgctgagaacgggcaacaacttcacctttagctacaccttcgaggacgtgcctttccacagcagctacgcgcacagccagagtctggaccggctgatgaatcccctcatcgaccagtacctgtactacttggccagaacacagagcaacgcaggaggtactgctggcaatcgggaactgcagttttatcagggcggacctaccaccatggccgaacaagcaaagaactggctgcccggaccttgcttccggcaacagagagtatccaagacgctggatcaaaataacaacagcaactttgcctggactggtgccacaaaataccatttaaatgnaagaaattcattggttaatcccggtgtcgccatggcaacccacaaggacgacgaggaacgcttcttcccttcgagcggagttctaatttttggcaaaactggagcagctaataaaactacattagaaaacgtgctcatgacaaatgaagaagaaattcgtcctaccaacccggtagctaccgaggaatacgggattgtaagcagcaacttgcaggcggctagcaccgcagcccagacacaagttgttaacaaccagggagccttacctggcatggtctggcagaaccgggacgtgtacctgcaaggtcccatttgggccaagattcctcacacggacggcaactttcacccgtctcctctaatgggtggctttggactgaaacacccgcctccccagatcctgatcaaaaacacaccggtacctgctaatcctccagaagtgtttactcctgccaagtttgcttccttcatcacgcagtacagcaccgggcaagtcagcgttgagatcgagtgggagctgcagaaagagaacagcaagcgctggaacccagagattcagtacacctccaactttgacaaacagactggagtggactttgctgttgacagccagggtgtttactctgagcct

SEQ ID NO: 5011 - DNA, 3105 bp, Adeno-associated virus
  source 1..3105: mol_type = other DNA
gaattcgcccttgctgcgtcaactggaccaatgagaactttcccttcaacgattgcgtcgacaagatggtgatctggtgggaggagggcaagatgaccgccaaggtcgtggagtccgccaaggccattctgggcggaagcaaggtgcgcgtggaccaaaagtgcaagtcatcggcccagatcgaccccacgcccgtgatcgtcacctccaacaccaacatgtgcgccgtgatcgacgggaacagcaccaccttcgagcaccagcagccgctgcaggaccgcatgttcaagttcgagctcacccgccgtctggagcacgactttggcaaggtgaccaagcaggaagtcaaagagttcttccgctgggctcaggatcacgtgactgaggtggcgcatgagttctacgtcagaaagggcggagccaccaaaagacccgcccccagtgacgcggatataagcgagcccaagcgggcctgcccctcagttgcggagccatcgacgtcagacgcggaagcaccggtggactttgcggacaggtaccaaaacaaatgttctcgtcacgcgggcatgcttcagatgctgtttccctgcaagacatgcgagagaatgaatcagaatttcaacgtctgcttcacgcacggggtcagagactgctcagagtgcttccccggcgcgtcagaatctcaacccgtcgtcagaaaaaagacgtatcagaaactgtgcgcgattcatcatctgctggggcgggcacccgagattgcgtgttcggcccgcgatctcgtcaacgtggacttggatgactgtgtttctgagcaataaatgacttaaaccaggtatggctgctgacggttatcttccagattggctcgaggacaacctctctgagggcattcgcgagtggtgggacctgaaacctggagcccccaagcccaaggccaaccagcagaagcaggacgacggccggggtctggtgcttcctggctacaagtacctcggacccttcaacggactcgacaagggggagcccgtcaacgcggcggacgcagcggccctcgagcacgacaaggcctacgaccagcagctcaaagcgggtgacaatccgtacctgcggtataaccacgccgacgccgagtttcaggagcgtctgcaagaagatacgtcttttgggggcaacctcgggcgagcagtcttccaggccaagaagagggtactcgaacctctgggcctggttgaagaaggtgctaagacggctcctggaaagaagagaccgttagagtcaccacaagagcccgactcctcctcaggaatcggcaaaaaaggcaaacaaccagccaaaaagagactcaactttgaagaggacactggagccggagacggaccccctgaaggatcagataccagcgccatgtcttcagacattgaaatgcgtgcagcaccgggcggaaatgctgtcgatgcgggacaaggttccgatggagtgggtaatgcctcgggtgattggcattgcgattccacctggtctgagggcaaggtcacaacaacctcgaccagaacctgggtcttgcccacctacaacaaccacttgtacctgcggctcggaacaacatcaaacagcaacacctacaacggattctccaccccctggggatactttgactttaacagattccactgtcacttctcaccacgtgactggcaaagactcatcaacaacaactggggactacgaccaaaagccatgcgcgttaaaatcttcaatatccaagttaaggaggtcacaacgtcgaacggcgagactacggtcgctaataaccttaccagcacggttcagatatttgcggactcgtcgtatgagctcccgtacgtgatggacgctggacaagagggaagtctgtctcctttccccaatgacgtcttcatggtgcctcaatatggctactgtggcattgtgactggcgaaaatcagaaccagacggacagaaatgctttctactgcctggagtattttccttcacaaatgctgagaactggcaataactttgaaatggcttacaactttgggaaggtgccgttccactcaatgtatgcttacagccagagcccggacagactgatgaatcccctcctggaccagtacctgtggcacttacagtcgaccacctctggagagactctgaatcaaggcaatgcagcaaccacatttggaaaaatcaggagtggagactttgccttttacagaaagaactggctgcctgggccttgtgttaaacagcagagactctcaaaaactgccagtcaaaattacaagattcctgccagcgggggcaacgctctgttaaagtatgacacccactataccttaaacaaccgctggagcaacatagcgcctggacctccaatggcaacagctggaccttcagatggggacttcagcaacgcccagctcatcttccctggaccatcagtcaccggaaacacaacaacctcagcaaacaatctgttgtttacatcagaagaagaaattgctgccaccaacccaagagacacggacatgtttggtcagattgctgacaataatcagaatgctacaactgctcccataaccggcaacgtgactgctatgggagtgcttcctggcatggtgtggcaaaacagagacatttactaccaagggccaatttgggccaagatcccacacgcggacggacattttcatccttcaccgctaattggcggttttggactgaaacatccgcctccccagatatttatcaaaaacacccccgtacctgccaatcctgcgacaaccttcactgcagccagagtggactctttcatcacacaatacagcaccggccaggtcgctgttcagattgaatgggaaatcgaaaaggaacgctccaaacgctggaatcctgaagtgcagtttacttcaaactatgggaaccagtcttctatgttgtgggctcccgatacaactgggaagtatacagagccgcgggttattggctctcgttatttgactaatcatttgtaactgcctagttaatcaataaaccgtgtgattcgtttcagttgaactttggtctctgcgaagggcgaattc

SEQ ID NO: 5012 - protein, 733 aa, Adeno-associated virus
MAADGYLPDWLEDNLSEGIREWWDLKPGAPKPKANQQKQDDGRGLVLPGYKYLGPFNGLDKGEPVNAADAAALEHDKAYDQQLKAGDNPYLRYNHADAEFQERLQEDTSFGGNLGRAVFQAKKRVLEPLGLVEEGAKTAPGKKRPLESPQEPDSSSGIGKKGKQPAKKRLNFEEDTGAGDGPPEGSDTSAMSSDIEMRAAPGGNAVDAGQGSDGVGNASGDWHCDSTWSEGKVTTTSTRTWVLPTYNNHLYLRLGTTSNSNTYNGFSTPWGYFDFNRFHCHFSPRDWQRLINNNWGLRPKAMRVKIFNIQVKEVTTSNGETTVANNLTSTVQIFADSSYELPYVMDAGQEGSLPPFPNDVFMVPQYGYCGIVTGENQNQTDRNAFYCLEYFPSQMLRTGNNFEMAYNFEKVPFHSMYAHSQSLDRLMNPLLDQYLWHLQSTTSGETLNQGNAATTFGKIRSGDFAFYRKNWLPGPCVKQQRFSKTASQNYKIPASGGNALLKYDTHYTLNNRWSNIAPGPPMATAGPSDGDFSNAQLIFPGPSVTGNTTTSANNLLFTSEEEIAATNPRDTDMFGQIADNNQNATTAPITGNVTAMGVLPGMVWQNRDIYYQGPIWAKIPHADGHFHPSPLIGGFGLKHPPPQIFIKNTPVPANPATTFTAARVDSFITQYSTGQVAVQIEWEIEKERSKRWNPEVQFTSNYGNQSSMLWAPDTTGKYTEPRVIGSRYLTNHL

SEQ ID NO: 5013 - DNA, 3105 bp, Adeno-associated virus
  source 1..3105: mol_type = other DNA
gaattcgcccttgctgcgtcaactggaccaatgagaactttcccttcaacgattgcgtcgacaagatggtgatctggtgggaggagggcaagatgaccgccaaggtcgtggagtccgccaaggccattctgggcggaagcaaggtgcgcgtggaccaaaagtgcaagtcatcggcccagatcgaccccacgcccgtgatcgtcacctccaacaccaacatgtgcgccgtgatcgacgggaacagcaccaccttcgagcaccagcagccgctgcaggaccgcatgttcaagttcgagctcacccgccgtctggagcacgactttggcaaggtgaccaagcaggaagtcaaagagttcttccgctgggctcaggatcacgtgactgaggtggcgcatgagttctacgtcagaaagggcggagccaccaaaagacccgcccccagtgacgcggatataagcgagcccaagcgggcctgcccctcagttgcggagccatcgacgtcagacgcggaagcaccggtggactttgcggacaggtaccaaaacaaatgttctcgtcacgcgggcatgcttcagatgctgtttccctgcaagacatgcgagagaatgaatcagaatttcaacgtctgcttcacgcacggggtcagagactgctcagagtgcttccccggcgcgtcagaatctcaacccgtcgtcagaaaaaagacgtatcagaaactgtgcgcgattcatcatctgctggggcgggcacccgagattgcgtgttcggcctgcgatctcgtcaacgtggacttggatgactgtgtttctgagcaataaatgacttaaaccaggtatggctgctgacggttatcttccagattggctcgaggacaacctctctgagggcattcgcgagtggtgggacctgaaacctggagcccccaagctcaaggccaaccagcagaagcaggacgacggccggggtctggtgcttcctggctacaagtacctcggacccttccacggactcgacaagggggagcccgtcaacgcggcggacgcagcggccctcgagcacgacaaggcctacgaccagcagctcaaagcgggtgacaatccgtacctgcggtataaccacgccgacgccgagtttcaggagcgtctgcaagaagatacgtcttttgggggcaacctcgggcgagcagtcttccaggccaagaagagggtactcgaaccactgggcctggttgaagaaggtgctaagacggctcctggaaagaagagaccgttagagtcaccacaagagcccgactcctcctcaggaatcggcaaaaaaggcaaacaaccagccaaaaagagactcaactttgaagaggacactggagccggagacggaccccctgaaggatcagataccagcgccatgtcttcagacattgaaatgcgtgcagcaccgggcggaaatgctgtcgatgcgggacaaggttccgatggagtgggtaatgcctcgggtgattggcattgcgattccacctggtctgagggcaaggtcacaacaacctcgaccagaacctgggtcttgcccacctacaacaaccacttgtacctgcggctcggaacaacatcaaacagcaacacctacaacggattctccaccccctggggatactttgactttaacagattccactgtcacttctcaccacgtgactggcaaagactcatcaacaacaactggggactacgaccaaaagccatgcgcgttaaaatcttcaatatccaagttaaggaggtcacaacgtcgaacggcgagactacggtcgctaataaccttaccagcacggttcagatatttgcggactcgtcgtatgagctcccgtacgtgatggacgctggacaagagggaagtctgcctcctttccccaatgacgtcttcatggtgcctcaatatggctactgtggcattgtgactggcgaaaatcagaaccagacggacagaaatgctttctactgcctggagtattttccttcacaaatgctgagaactggcaataactttgaaatggcttacaactttgagaaggtgccgttccactcaatgtatgctcacagccagagcctggacagactgatgaatcccctcctggaccagtacctgtggcacttacagtcgaccacctctggagagactctgaatcaaggcaatgcagcaaccacatttggaaaaatcaggagtggagactttgccttttacagaaagaactggctgcctgggccttgtgttaaacagcagagattctcaaaaactgccagtcaaaattacaagattcctgccagcgggggcaacgctctgttaaagtatgacacccactataccttaaacaaccgctggagcaacatagcgcctggacctccaatggcaacagctggaccttcagatggggacttcagcaacgcccagctcatcttccctggaccatcagtcaccggaaacacaacaacctcagcaaacaatctgttgtttacatcagaaggagaaattgctgccaccaacccaagagacacggacatgtttggtcagattgctgacaataatcagaatgctacaactgctcccataaccggcaacgtgactgctatgggagtgcttcctggcatggtgtggcaaaacagagacatttactaccaagggccaatttgggccaagatcccacacgcggacggacattttcatccttcaccgctaattggcggttttggactgaaacatccgcctccccagatatttatcaaaaacacccccgtacctgccaatcctgcgacaaccttcactgcagccagagtggactctttcatcacacaatacagcaccggccaggtcgctgttcagattgaatgggaaatcgaaaaggaacgctccaaacgccggaatcctgaagtgcagtttacttcaaactatgggaaccagtcttctatgttgtgggctcccgatacaactgggaagtatacagagccgcgggttattggctctcgttatttgactaatcatttgtaactgcctagttaatcaataaaccgtgtgattcgtttcagttgaactttggtctctgcgaagggcgaattc

SEQ ID NO: 5014 - DNA, 3105 bp, Adeno-associated virus
  source 1..3105: mol_type = other DNA
gaattcgcccttcgcagagaccaaagttcaactgaaacgaatcacacggtttattgattaactaggcagttacaaatgattagtcaaataacgagagccaataacccgcggctctgtatacttcccagttgtatcgggagcccacaacatagaagactggttcccacagtttgaagtaaactgcacttcaggattccagcgtttggagcgttccttttcgatttcccattcaatctgaacagcgacctggccggtgctgtattgtgtgatgaaagagtccactctggctgcagtgaaggttgtcgcaggataggcaggtacgggggtgtttttgataaatatctggggaggcggatgtttcagtccaaaaccgccaattagcggtgaaggatgaaaatgtccgtccgcgtgtgggatcttggcccaaattggcccttggtagtaaatgtctctgttttgccacaccatgccaggaagcactcccatagcagtcacgttgccggttatgggagcagttgtagcattctgattattgtcagcaatctgaccaaacatgtccgtgtctcttgggttggtggcagcaatttcttcttctgatgtaaacaacagattgtttgctgaggttgttgtgtttccggtgactgatggtccagggaagatgagctgggcgttgctgaagtccccatctgaaggtccagctgttgccattggaggtccaggcgctatgttgctccagcggttgtttaaggtatagtgggtgtcatactttaacagagcgttgcccccgctggcaggaatcttgtaattttgactggcagtttttgagaatctctgctgtttaacacaaggcccaggcagccagttctttctgtaaaaggcaaagtctccactcctgatttttccaaatgtggttgctgcattgccttgattcagagtctctccagaggtggtcgactgtaagtgccacaggtactggtccaggaggggattcatcagtccgtccaggctctggctgtgagcatacattgagtggaacggcaccttctcaaagttgtaagccgtttcaaagttattgccagttctcagcatttgtgaaggaaaatactccaggcagtagaaagcatttctgtccgtctggttctgattttcgccagtcacaatgccacagtagccatattgaggcaccatgaagacgtcattggggaaaggaggcagacttccctcttgtccagcgtccatcacgtacgggagctcatacgacgagtccgcaaatatctgaaccgtgctggtaaggttattagcgaccgtagtctcgccgttcgacgttgtgacctccttaacttggatattgaagattttaacgcgcatggcttttggtcgtagtccccagttgttgttgatgagtctttgccagtcacgtggtgagaagtgacagtggaatctgttaaagtcaaagtatccccagggggtggagaatccgttgtaggtgttgctgtttgatgttgttccgagccgcaggtacaagtggttgttgtaggtgggcaagacccaggttctggtcgaggttgttgtgaccttgccctcagaccaggtggaatcgcaatgccaatcacccgaggcattacccactccatcggaaccttgtcccgcatcgacagcatttccgcccggtgctgcacgcatttcaatgtctgaagacatggcgctggtatctgatccttcagggggtccgtctccggctccagtgtcctcttcaaagttgagtctctttttggctggttgtttgccttttttgccgattcctgaggaggagtcgggctcttgtggtgactctaacggtctcttctttccaggagccgtcttagcaccttcttcaaccaggcccagaggttcgagtaccctcttcttggcctggaagactgctcgcccgaggttgcccccaaaagacgtatcttcttgcagacgctcctgaaactcggcgtcggcgtggttataccgcaggtacggattgtcacccgctttgagctgctggtcgtaggccttgtcgtgctcgagggccgctgcgtccgccgcgttgacgggctcccccttgtcgagtccgttgaagggtccgaggtactcgtagccaggaagcaccagaccccggccgtcgtcctgcttctgctggttggccttgggcttgggggctccaggtttcaggtcccaccactcgcgaatgccctcagagaggttgtcctcgagccaatctggaagataaccgtcagcagccatacctggtttaagtcatttattgctcagaaacacagtcatccaagtccacgttgacgagatcgcaggccgaacacgcaatctcgggtgcccgccccagcagatgatgaatcgcgcacagtttctgatacgtcttttttctgacgacgggttgagattctgacgcgccggggaagcactctgagcagtctctgaccccgtgcgtgaagcagacgttgaaattctgattcattctctcgcatgtcttgcagggaaacagcatctgaagcatgcccgcgtgacgagaacatttgttttggtacctgtccgcaaggtccaccggtgcttccgcgtctgacgtcgatggctccgcaactgaggggcaggcccgcttgggctcgcttatatccgcgtcactgggggcgggtcttttggtggctccgccctttctgacgtagaactcatgcgccacctcagtcacgtgatcctgagcccagcggaagaactctttgacttcctgcttggtcaccttgccaaagtcgtgctccagacggcgggtgagctcgaacttgaacatgcggtcctgcagcggctgctggtgctcgaaggtggtgctgttcccgtcgatcacggcgcacatgttggtgttggaggtgacgatcacgggcgtggggtcgatctgggccgatgacttgcacttttggtccacgcgcaccttgcttccgcccagaatggccttggcggactccacgaccttggcggtcatcttgccctcctcccaccagatcaccatcttgtcgacgcaatcgttgaagggaaagttctcattggtccagttgacgcagcaagggcgaattc

SEQ ID NO: 5015 - DNA, 3094 bp, Adeno-associated virus
  source 1..3094: mol_type = other DNA
gaattcgcccttgctgcgtcaactggaccaagagaactttcccttcaacgattgcgtcgacaagatggtgatctggtgggaggagggcaagatgacggccaaggtcgtggagtccgccaaagccattctgggcggaagcaaggtgcgcgtcgaccaaaagtgcaagtcctcggcccagatcgatcccacccccgtgatcgtcacctccaacaccaacatgtgcgccgtgatcgacgggaacagcaccaccttcgagcaccagcagccgttgcaggaccggatgttcaaatttgaactcacccgccgtctggaacacgactttggcaaggtgaccaagcaggaagtcaaagagttcttccgctgggctagtgatcacgtgactgaggtgacgcatgagttctacgtcagaaagggcggagccagcaaaagacccgcccccgatgacgcggatataagcgagcccaagcgggcctgtccctcagtcacggacccatcgacgtcagacgcggaaggagctccggtggactttgccgacaggtaccaaaacaaatgttctcgtcacgcgggcatgcttcagatgctgtttccctgcaaaacgtgcgagagaatgaatcagaatttcaacatttgcttcacgcacggggtcagagactgtttagaatgtttccccggcgtgtcagaatctcaaccggtcgtcagaaaaaagacgtatcggaagctgtgtgcgattcatcatctgctggggcgggcacccgagattgcttgctcggcctgcgacctggtcaacgtggacctggacgactgtgtttctgagcaataaatgacttaaaccgggtatggctgccgatggttatcttccagattggctcgaggacaacctctctgagggcattcgcgagtggtgggacctgaaacctggagccccgaaacccaaagccaaccagcaaaagcaggacgacggccggggtctggtgcttcctggctacaagtacctcggacccttcaacggactcgacaagggggagcccgtcaacgcggcggacgcagcggccctcgagcacgacaaggcctacgaccagcagctcaaagcgggtgacaatccgtacctgcggtataaccacgccgacgccgagtttcaggagcgtctgcaagaagatacgtcatttgggggcaacctcgggcgagcagtcttccaggccaagaagcgggttctcgaacctctcggtctggttgaggaaggcgctaagacggctcctggaaagaagagacccatagactctccagactcctccacgggcatcggcaaaaaaggccagcagcccgctaaaaagaagctcaattttggtcagactggcgactcagagtcagtccccgaccctcaacctcttggagaacctccagcagcgccctctagtgtgggatctggtacaatggctgcaggcggtggcgcaccaatggcagacaataacgaaggtgccgacggagtgggtaatgcctcaggaaattggcattgcgattccacatggctgggcgacagagtcatcaccaccagcaccagaacctgggccctccccacctacaacaaccacctctacaagcaaatctccagcagcagctcaggagccaccaatgacaaccactacttcggctacagcaccccctgggggtattttgactttaacagattccactgccacttctcaccacgtgactggcagcgactcatcaacaacaactggggattccggcccaagaagctgcggttcaagctcttcaacatccaggtcaaggaggtcacaacgaatgacggcgtcacgaccatcgctaataaccttaccagcacggttcaggtcttctcggactcggaataccagctgccgtacgtcctcggctctgcgcaccagggctgcctgcctccgttcccggcggacgtcttcatgattcctcagtacggctacctgactctgaacaacggcagccaatcggtgggccgttcctccttctactgcctggaatatttcccctctcaaatgctgagaacgggcaacaactttgagttcagttacagcttcgaggacgtgcctttccacagcagctacgcgcacagccagagcctagaccggctgatgaaccctctcatcgaccagtacctgtactacctggcccggacccagagcaccacgggttccaccagggaactgcaatttcatcaagctgggcccaatactatggccgagcagtcaaagaactggctgcctggaccctgctataggcaacagggactgtcaaagaacttggactttaacaacaacagcaattttgcctggactgctgccactaaatatcatctgaatggcagaaactctttgaccaatcctggcattcccatggcaaccaacaaggatgatgaggaccagttctttcccatcaacggggtactggtttttggcaagacgggagctgccaacaaaactacgctggaaaacgttctgatgaccagcgaggaggagatcaagaccactaaccctgtggctacagaagaatacggtgtggtctccagcaacctgcagccgtctacagccgggcctcaatcacagactatcaacagccagggagcactgcctggcatggtctggcagaaccgggacgtgtatctgcagggtcccatctgggccaaaattcctcacacggatggcaactttcacccgtctcctctgatgggcggttttggactcaaacacccgcctccacagatcctgatcaaaaacacacctgtacctgctaatcctccggaggtgtttactcctgccaagtttgcctccttcatcacgcagtacagcaccggacaagtcagcgtggaaatcgagtgggagctgcagaaagaaaacagcaagcgctggaacccagaaattcagtatacttccaattatgccaagtctaataatgttgaatttgctgtgaaccctgatggtgtttatactgagcctcgccccattggcactcgttacctcccccgtaatctgtaattgcttgttaatcaataaaccggttgattcgtttcagttgaactttggtctctgcgaagggcgaattc

SEQ ID NO: 5016 - DNA, 3095 bp, Adeno-associated virus
  source 1..3095: mol_type = other DNA
gaattcgcccttcgcagagaccaaagttcaactgaaacgaatcaaccggtttattgattaacaagcaattacagattacgggtgaggtaacgagtgccaatggggcgaggctcagtataaacaccatcagggttcacagcaaattcaacattattagacttggcataattggaagtatactgaatttctgggttccagcgcttgctgttttctttctgcagctcccactcgatttccacgctgacttgtccggtgctgtactgcgtgatgaaggaggcaaacttggcaggagtaaacacctccggaggattagcaggtacaggtgtgtttttgatcaggatctgtggaggcgggtgtttgagtccaaaaccgcccatcagaggagacgggtgaaagttgccatccgtgtgaggaattttggcccagatgggaccctgcagatacacgtcccggttctgccagaccatgccaggcagtgctccctggctgttgatagtctgtgattgaggcccggctgtagacgactgcaggttgctggagaccacaccgtattcttctgtagccacagggttagtggtcttgatctcctcctcgctggtcatcagaacgttttccagcgtagttttgttggcagctcccgtcttgccaaaaaccagtaccccgttgatgggaaagaactggtcctcatcatccttgttggttgccatgggaatgccaggattggtcaaagagtttctgccattcagatgatatttagtggcagcagtccaggcaaaattgctgttgttgttaaagtccaagttctttgacagtctctgttgcctatagcagggtccaggcagccagttctttgactgctcggccatagtattgggcccagcttgatgaaattgcagttccctggtggaacccgtggtgctctgggtccgggccaggtagtacaggtactggtcgatgagagggttcatcagccggtctaggctctggctgtgcgcgtagctgctgtggaaaggcacgtcctcgaagctgtaactgaactcaaagttgttgcccgttctcagcatttgagaggggaaatattccaggcagtagaaggaggaacggcccaccgattggctgccgttgtccagagtcaggtagccgtactgaggaatcatgaagacgtccgccgggaacggaggcaggcagccctggtgcgcagagccgaggacgtacggcagctggtattccgagtccgagaagacctgaaccgtgctggtaaggttattagcgatggtcgtgacgccgtcattcgttgtgacctccttgacctggatgttgaggagcttgaaccgcagcttcttgggccggaatccccagttgttgttgatgagtcgctgccagtcacgtggtgagaagtggcagtggaatctgttaaagtcaaaatacccccagggggtgctgtagccgaagtagtggttgtcattggtggctcctgagctgctgctggagatttgcttgtagaggtggttgttgtaggtggggagggcccaggttctggtgctggtggtgatgactctgtcgcccagccatgtggaatcgcaatgccaatttcctgaggcattacccactccgtcggcaccttcgttattgtctgccattggtgcgccaccgcctgcagccattgtaccagatcccacactagagggcgctgctggaggttctccaagaggttgagggtcggggactgactctgagtcgccagtctgaccaaaattgagcttctttttagcgggctgctggccttttttgccgatgcccgtggaggagtctggagagcctatgggtctcttctttccaggagccgtcttagcgccttcctcaaccagaccgagaggttcgagaacccgcttcttggcctggaagactgctcgcccgaggttgcccccaaatgacgtatcttcttgcagacgctcctgaaactcggcgtcggcgtggttataccgcaggtacggattgtcacccgctttgagctgctggtcgtaggccttgtcgtgctcgagggccgctgcgtccgccgcgttgacgggctcccccttgtcgagtccgttgaagggtccgaggtacttgtagccaggaagcaccagaccccggccgtcgtcctgcttttgctggttggctttgggtttcggggctccaggtttcaggtcccaccactcgcgaatgccctcagagaggttgtcctcgagccaatctggaagataaccatcggcagccatacctggtttaagtcatttattgctcagaaacacagtcgtccaggtccacgttgaccaggtcgcaggccgagcaagcaatctcgggtgcccgccccagcagatgatgaatcgcacacagcttccgatacgtcttttttctgacgaccggttgagattctgacacgccggggaaacattctaaacagtctctgaccccgtgcgtgaagcaaatgttgaaattctgattcattctctcgcacgttttgcagggaaacagcacctgaagcatgcccgcgtgacgagaacatttgttttggtacctgtcggcaaagtccaccggagctccttccgcgtctgacgtcgatgggtccgtgactgagggacgggcccgcttgggctcgcttatatccgcgtcatcgggggcgggtcttttgctggctccgccctttctgacgtagaactcatgcgtcacctcagtcacgtgatcactagcccagcggaagaactctttgacttcctgctttgtcaccttgccaaagtcgtgttccagacggcgggtgagttcaaatttgaacatccggtcctgcaacggttgctggtgctcgaaggtggtgctgttcccgtcgatcacggcgcacatgttggtgttggaggtgacgatcacgggggtgggatcgatctgggcggacgacttgcacttttggtccacgcgcaccttgctgccgccgagaatggccttggcggactccacgaccttggccgtcatcttgccctcctcccaccagatcaccatcttgtcgacgcaatcgttgaagggaaagttctcattggtccagttgacgcagcaagggcgaattc

SEQ ID NO: 5017 - DNA, 3095 bp, Adeno-associated virus
  source 1..3095: mol_type = other DNA
gaattcgcccttcgcagagaccaaagttcaactgaaacgaatcaaccggtttattgattaacaagcaattacagattacgggtgaggtaacgagtgccaatggggcgaggctcagtataaacaccatcagggttcacagcaaattcaacattattagacttggcataattggaagtatactgaatttctgggttccagcgcttgctgttttctttctgcagctcccactcgatttccacgctgacttgtccggtgctgtactgcgtgatgaaggaggcaaacttggcaggagtaaacacctccggaggattagcaggtacaggtgtgtttttgatcaggatctgtggaggcgggtgttcgagtccaaaaccgcccatcagaggagacgggtgaaagttgccatccgtgtgaggaattttggcccagatgggaccctgcagatacacgtcccggttctgccagaccatgccaggcagtgctccctggctgttgatagtctgtgattgaggcccggctgtagacgactgcaggttgctggagaccacaccgtattcttctgtagccacagggttagtggtcttgatctcctcctcgctggtcatcagaacgttttccagcgtagttttgttggcagctcccgtcttgccaaaaaccagtaccccgttgatgggaaagaactggtcctcatcatccttgttggttgccatgggaatgccaggattggtcaaagagtttctgccattcagatgatatttagtggcagcagtccaggcaaaattgctgttgttgttaaagtccaagttctttgacagtctctgttgcctatagcagggtccaggcagccagttctttgactgctcggccatagtattgggcccagcttgatgaaattgcagttccctggtggaacccgtggtgctctgggtccgggccaggtagtacaggtactggtcgatgagagggttcatcagccggtctaggctctggctgtgcgcgtagctgctgtggaaaggcacgtcctcgaagctgtaactgaactcaaagttgttgcccgttctcagcatttgagaggggaaatattccaggcagtagaaggaggaacggcccaccgattggctgccgttgttcagagtcaggtagccgtactgaggaatcatgaagacgtccgccgggaacggaggcaggcagccctggtgcgcagagccgaggacgtacggcagctggtattccgagtccgagaagacctgaaccgtgctggtaaggttattagcgatggtcgtgacgccgtcattcgttgtgacctccttgacctggatgttgaagagcttgaaccgcagcttcttgggccggaatccccagttgttgttgatgagtcgctgccagtcacgtggtgagaagtggcagtggaatctgttaaagtcaaaatacccccagggggtgctgtagccgaagtagtggttgtcattggtggctcctgagctgctgctggagatttgcttgtagaggtggttgttgtaggtggggagggcccaggttctggtgctggtggtgatgactctgtcgcccagccatgtggaatcgcaatgccaatttcctgaggcattacccactccgtcggcaccttcgttattgtctgccgttggtgcgccaccgcctgcagccattgtaccagatcccacactagagggcgctgctggaggttctccaagaggttgagggtcggggactgactctgagtcgccagtctgaccaaaattgagcttctttttagcgggctgctggccttttttgccgatgcccgtggaggagtctggagagtctatgggtctcttctttccaggagccgtcttagcgccttcctcaaccagaccgagaggttcgagaacccgcttcttggcctggaagactgctcgcccgaggttgcccccaaatgacgtatcttcttgcaggcgctcctgaaactcggcgtcggcgtggttataccgcaggtacggattgtcacccgctttgagctgctggtcgtaggccttgtcgtgctcgagggccgctgcgtccgccgcgttgacgggctcccccttgtcgagtccgttgaagggtccgaggtacttgtagccaggaagcaccagaccccggccgtcgtcctgcttttgctggttggctttgggtttcggggctccaggtttcaggtcccaccactcgcgaatgccctcagagaggttgtcctcgagccaatctggaagataaccatcggcagccatacctggtttaagccatttattgctcagaaacacagtcgtccaggtccacgttgaccaggtcgcaggccgagcaggcaatctcgggtgcccgccccagcagatgatgaatcgcacacagcttccgatacgtcttttttctgacgaccggttgagattctgacacgccggggaaacattctaaacagtctctgaccccgtgcgtgaagcaaatgttgaaattctgattcattctctcgcacgttttgcagggaaacagcatctgaagcatgcccgcgtggcgagaacatttgttttggtacctgtcggcaaagtccaccggagctccttccgcgtctgacgtcgatgggtccgtgactgagggacaggcccgcttgggctcgcttatatccgcgtcatcgggggcgggtcttttgctggctccgccctttctgacgtagaactcatgcgtcacctcagtcacgtgatcactagcccagcggaagaactctttgacttcctgctttgtcaccttgccaaagtcgtgttccagacggcgggtgagttcaaatttgaacatccggtcctgcaacggctgctggtgctcgaaggtggtgctgttcccgtcgatcacggcgcgcatgttggtgttggaggtgacgatcacgggggtgggatcgatctgggcggacgacttgcacttttggtccacgcgcaccttgctgccgccgagaatggccttggcggactccacgaccttggccgtcatcttgccctcctcccaccagatcaccatcttgtcgacgcaatcgttgaagggaaagttctcattggtccagttgacgcagcaagggcgaattc

SEQ ID NO: 5018 - protein, 729 aa, Adeno-associated virus; identical to SEQ ID NO: 4833

SEQ ID NO: 5019 - protein, 729 aa, Adeno-associated virus
MAADGYLPDWLEDNLSEGIREWWDLKPGAPKPKANQQKQDDGRGLVLPGYKYLGPFNGLDKGEPVNAADAAALEHDKAYDQQLKAGDNPYLRYNHADAEFQERLQEDTSFGGNLGRAVFQAKKRVLEPLGLVEEGAKTAPGKKRPIDSPDSSTGIGKKGQQPAKKKLNFGQTGDSESVPDPQPLGEPPAAPSSVGSGTMAAGGGAPTADNNEGADGVGNASGNWHCDSTWLGDRVITTSTRTWALPTYNNHLYKQISSSSSGATNDNHYFGYSTPWGYFDFNRFHCHFSPRDWQRLINNNWGFRPKKLRFKLFNIQVKEVTTNDGVTTIANNLTSTVQVFSDSEYQLPYVLGSAHQGCLPPFPADVFMIPQYGYLTLNNGSQSVGRSSFYCLEYFPSQMLRTGNNFEFSYSFEDVPFHSSYAHSQSLDRLMNPLIDQYLYYLARTQSTTGSTRELQFHQAGPNTMAEQSKNWLPGPCYRQQRLSKNLDFNNNSNFAWTAATKYHLNGRNSLTNPGIPMATNKDDEDQFFPINGVLVFGKTGAANKTTLENVLMTSEEEIKTTNPVATEEYGVVSSNLQSSTAGPQSQTINSQGALPGMVWQNRDVYLQGPIWAKIPHTDGNFHPSPLMGGFGLKHPPPQILIKNTPVPANPPEVFTPAKFASFITQYSTGQVSVEIEWELQKENSKRWNPEIQYTSNYAKSNNVEFAVNPDGVYTEPRPIGTRYLTRNL

SEQ ID NO: 5020 - protein, 729 aa, Adeno-associated virus
MAADGYLPDWLEDNLSEGIREWWDLKPGAPKPKANQQKQDDGRGLVLPGYKYLGPFNGLDKGEPVNAADAAALEHDKAYDQQLKAGDNPYLRYNHADAEFQERLQEDTSFGGNLGRAVFQAKKRVLEPLGLVEEGAKTAPGKKRPIDSPDSSTGIGKKGQQPAKKKLNFGQTGDSESVPDPQPLGEPPAAPSSVGSGTMAAGGGAPMADNNEGADGVGNASGNWHCDSTWLGDRVITTSTRTWALPTYNNHLYKQISSSSSGATNDNHYFGYSTPWGYFDFNRFHCHFSPRDWQRLINNNWGFRPKKLRFKLFNIQVKEVTTNDGVTTIANNLTSTVQVFSDSEYQLPYVLGSAHQGCLPPFPADVFMIPQYGYLTLNNGSQSVGRSSFYCLEYFPSQMLRTGNNFEFSYSFEDVPFHSSYAHSQSLDRLMNPLIDQYLYYLARTQSTTGSTRELQFHQAGPNTMAEQSKNWLPGPCYRQQRLSKNLDFNNNSNFAWTAATKYHLNGRNSLTNPGIPMATNKDDEDQFFPINGVLVFGKTGAANKTTLENVLMTSEEEIKTTNPVATEEYGVVSSNLQSSTAGPQSQTINSQGALPGMVWQNRDVYLQGPIWAKIPHTDGNFHPSPLMGGFGLKHPPPQILIKNTPVPANPPEVFTPAKFASFITQYSTGQVSVEIEWELQKENSKRWNPEIQYTSNYAKSNNVEFAVNPDGVYTEPRPIGTRYLTRNL

SEQ ID NO: 5021 - DNA, 2217 bp, Adeno-associated virus
  source 1..2217: mol_type = other DNA
atggctgctgacggttatcttccagattggctcgaggacaacctctctgagggcattcgcgagtggtgggacctgaaacctggagcccccaagcccaaggccaaccagcagaagcaggacgacggccggggtctggtgcttcctggctacaagtacctcggacccttcaacggactcgacaagggggagcccgtcaacgcggcggacgcagcggccctcgagcacgacaaggcctacgaccagcagctcaaagcgggtgacaatccgtacctgcggtataaccacgccgacgccgagtttcaggagcgtctacaagaagatacgtcttttgggggcaacctcgggcgagcagtcttccaggccaagaagcgggttctcgaacctctcggtctggttgaggaagctgctaagacggctcctggaaagaagagaccggtagaaccgtcacctcagcgttcccccgactcctccacgggcatcggcaagaaaggccagcggcccgctaaaaagagactgaactttggtcagactggcgactcagagtcagtccccgaccctcaaccaatcggagaaccaccagcaggcccctctggtctgggatctggtacaatggctgcaggcggtggcgctccaatggcagacaataacgaaggcgccgacggagtgggtagttcctcaggaaattggcattgcgattccacatggctgggcgacagagtcatcaccaccagcacccgaacctgggccctgcccacctacaacaaccacctctacaagcaaatatccaatgggacatcgggaggaagcaccaacgacaacacctacttcggctacagcaccccctgggggtattttgacttcaacagattccactgccacttctcaccacgtgactggcagcgactcatcaacaacaactggggattccggccaaaaagactcagcttcaagcccttcaacatccaggtcaaggaggtcacgcagaatgaaggcaccaagaccatcgccaataaccttaccagcacgattcaggtatttacggactcggaataccagctgccgtacgtcctcggctccgcgcaccagggctgcctgcctccgttcccggcggacgtcttcatgattccccagtacggctaccttacactgaacaatggaagtcaagccgtaggccgttcctccttctactgcctggaatattttccatctcaaatgctgcgaactggaaacaattttgaattcagctacaccttcgaggacgtgcctttccacagcagctacgcacacagccagagcttggaccgactgatgaatcctctcatcgaccagtacctgcactacttatccagaactcagtccacaggaggaactcaaggtacccagcaattgttattttctcaagctgggcctgcaaacatgtcggctcaggctaagaactggctacctggaccttgctaccggcagcagcgagtctctacgacactgtcgcaaaacaacaacagcaactttgcttggactggtgccaccaaatatcacctgaacggaagagactctttggtaaatcccggtgtcgccatggcaacccacaaggacgacgaggaacgcttcttcccgtcgagtggagtcctgatgtttggaaaacagggtgctggaagagacaatgtggactacagcagcgttatgctaaccagcgaagaagaaattaaaaccactaaccctgtagccacagaacaatacggtgtggtggctgacaacttgcagcaaaccaatacagggcctattgtgggaaatgtcaacagccaaggagccttacctggcatggtctggcagaaccgagacgtgtacctgcagggtcccatctgggccaagattcctcacacggacggcaacttccacccttcaccgctaatgggaggatttggactgaagcacccacctcctcagatcctgatcaagaacacgccggtacctgcggatcctccaacaacgttcagccaggcgaaattggcttccttcattacgcagtacagcaccggacaggtcagcgtggaaatcgagtgggagctgcagaaggagaacagcaaacgctggaacccagagattcagtacacttcaaactactacaaatctacaaatgtggactttgctgtcaatacagagggaacttattctgagcctcgccccattggtactcgctacctcacccgtaatctgtaa

SEQ ID NO: 5022 - protein, 738 aa, Adeno-associated virus
MAADGYLPDWLEDNLSEGIREWWDLKPGAPKPKANQQKQDDGRGLVLPGYKYLGPFNGLDKGEPVNAADAAALEHDKAYDQQLKAGDNPYLRYNHADAEFQERLQEDTSFGGNLGRAVFQAKKRVLEPLGLVEEAAKTAPGKKRPVEPSPQRSPDSSTGIGKKGQRPAKKRLNFGQTGDSESVPDPQPIGEPPAGPSGLGSGTMAAGGGAPMADNNEGADGVGSSSGNWHCDSTWLGDRVITTSTRTWALPTYNNHLYKQISNGTSGGSTNDNTYFGYSTPWGYFDFNRFHCHFSPRDWQRLINNNWGFRPKRLSFKPFNIQVKEVTQNEGTKTIANNLTSTIQVFTDSEYQLPYVLGSAHQGCLPPFPADVFMIPQYGYLTLNNGSQAVGRSSFYCLEYFPSQMLRTGNNFEFSYTFEDVPFHSSYAHSQSLDRLMNPLIDQYLHYLSRTQSTGGTQGTQQLLFSQAGPANMSAQAKNWLPGPCYRQQRVSTTLSQNNNSNFAWTGATKYHLNGRDSLVNPGVAMATHKDDEERFFPSSGVLMFGKQGAGRDNVDYSSVMLTSEEEIKTTNPVATEQYGVVADNLQQTNTGPIVGNVNSQGALPGMVWQNRDVYLQGPIWAKIPHTDGNFHPSPLMGGFGLKHPPPQILIKNTPVPADPPTTFSQAKLASFITQYSTGQVSVEIEWELQKENSKRWNPEIQYTSNYYKSTNVDFAVNTEGTYSEPRPIGTRYLTRNL

SEQ ID NO: 5023 - DNA, 2217 bp, Adeno-associated virus
  source 1..2217: mol_type = other DNA
atggctgctgacggttatcttccagattggctcgaggacaacctctctgagggcattcgcgagtggtgggacctgaaacctggagcccccaagcccaaggccaaccagcagaagcaggacgacggccggggtctggtgcttcctggctacaagtacctcggacccttcaacggactcgacaagggggagcccgtcaacgcggcggacgcagcggccctcgagcacgacaaggcctacgaccagcagctcaaagcgggtgacaatccgtacctgcggtataaccacgccgacgccgagtttcaggagcgtctgcaagaagatacgtcttttgggggcaacctcgggcgagcagtcttccaggccaagaagcgggttctcgaacctctcggtctggttgaggaagctgctaagacggctcctggaaagaagagaccggtagaaccgtcacctcagcgttcccccgactcctccacgggcatcggcaagaaaggccagcagcccgctaaaaagagactgaactttggtcagactggcgactcagagtcagtccccgaccctcaaccaatcggagaaccaccagcaggcccctctggtctgggatctggtacaatggctgcaggcggtggcgctccaatggcagacaataacgaaggcgccgacggagtgggtagttcctcaggaaattggcattgcgattccacatggctgggcgacagagtcatcaccaccagcacccgaacctgggccctgcccacctacaacaaccacctctacaagcaaatatccaatgggacatcgggaggaagcaccaacgacaacacctacttcggctacagcaccccctgggggtattttgacttcaacagattccactgccacttctcaccacgtgactggcagcgactcatcaacaacaactggggattccggccaaaaagactcagcttcaagctcttcaacatccaggtcaaggaggtcacgcagaatgaaggcaccaagaccatcgccaataaccttaccagcacgattcaggtatttacggactcggaataccagctgccgtacgtcctcggctccgcgcaccagggctgcctgcctccgttcccggcggacgtcttcatgattccccagtacggctaccttacactgaacaatggaagtcaagccgtaggccgttcctccttctactgcctggaatattttccatctcaaatgctgcgaactggaaacaattttgaattcagctacaccttcgaggacgtgcctttccacagcagctacgcacacagccagagcttggaccgactgatgaatcctctcatcgaccagtacctgtactacttatccagaactcagtccacaggaggaactcaaggtacccagcaattgttattttctcaagctgggcctgcaaacatgtcggctcaggctaagaactggctacctggaccttgctaccggcagcagcgagtctctacgacactgtcgcaaaacaacaacagcaactttgcttggactggtgccaccaaatatcacctgaacggaagagactctttggtaaatcccggtgtcgccatggcaacccacaaggacgacgaggaacgcttcttcccgtcgagtggagtcctgatgtttggaaaacagggtgctggaagagacaatgtggactacagcagcgttatgctaaccagcgaagaagaaattaaaaccactaaccctgtagccacagaacaatacggtgtggtggctgataacttgcagcaaaccaatacggggcctattgtgggaaatgtcaacagccaaggagccttacctggcatggtctggcagaaccgagacgtgtacctgcagggtcccatctgggccaagattcctcacacggacggcaacttccacccttcaccgctaatgggaggatttggactgaagcacccacctcctcagatcctgatcaagaacacgccggtacctgcggatcctccaacaacgttcagccaggcgaaattggcttccttcattacgcagtacagcaccggacaggtcagcgtggaaatcgagtgggagctgcagaaggagaacagcaaacgctggaacccagagattcagtacacttcaaactactacaaatctacaaatgtggactttgctgtcaatacagagggaacttattctgagcctcgccccattggtactcgttacctcacccgtaatctgtaa

SEQ ID NO: 5024 - protein, 738 aa, Adeno-associated virus; identical to SEQ ID NO: 4797

SEQ ID NO: 5025 - protein, 738 aa, Adeno-associated virus
MAADGYLPDWLEDNLSEGIREWWDLKPGAPKPKANQQKQDDGRGLVLPGYKYLGPFNGLDKGEPVNAADAAALEHDKAYDQQLKAGDNPYLRYNHADAEFQERLQEDTSFGGNLGRAVFQAKKRVLEPLGLVEEAAKTAPGKKRPVEPSPQRSPDSSTGIGKKGQQPAKKRLNFGQTGDSESVPDPQPIGEPPAGPSGLGSGTMAAGGGAPMADNNEGADGVGSSSGNWHCDSTWLGDRVITTSTRTWALPTYNNHLYKQISNGTSGGSTNDNTYFGYSTPWGYFDFNRFHCHFSPRDWQRLINNNWGFRPKRLSFKLFNIQVKEVTQDEGTKTIANNLTSTIQVFTDSEYQLPYVLGSAHQGCLPPFPADVFMIPQYGYLTLNNGSQAVGRSSFYCLEYFPSQMLRTGNNFEFSYTFEDVPFHSSYAHSQSLDRLMNPLIDQYLYYLSRTQSTGGTQGTQQLLFSQAGPANMSARAKNWLPGPCYRQQRVSTTLSQNNNSNFAWTGATKYHLNGRDSLVNPGVAMATHKDDEERFFPSSGVLMFGKQGAGRDNVDYSSVMLTSEEEIKTTNPVATEQYGVVADNLQQANTGPIVGNVNSQGALPGMVWQNRDVYLQGPIWAKIPHTDGNFHPSPLMGGFGLKHPPPQILIKNTPVPADPPTTFSQAKLASFITQYSTGQVSVEIEWELQKENSKRWNPEIQYTSNYYKSTNVDFAVNSEGTYSEPRPIGTRYLTRNL

SEQ ID NO: 5026 - DNA, 2217 bp, Adeno-associated virus
  source 1..2217: mol_type = other DNA
atggctgctgacggttatcttccagattggctcgaggacaacctctctgagggcattcgcgagtggtgggacctgaaacctggagcccccaagcccaaggccaaccagcagaagcaggacgacggccggggtctggtgcttcctggctacaagtacctcggacccttcaacggactcgacaagggggagcccgtcaacgcggcggacgcagcggccctcgagcacgacaaggcctacgaccagcagctcaaagcgggtgacaatccgtacctgcggtataaccacgccgacgccgagtttcaggagcgtctgcaagaagatacgtcttttgggggcaacctcgggcgagcagtcttccaggccaagaagcgggttctcgaacctctcggtctggttgaggaagctgctaagacggctcctggaaagaagagaccggtagaaccgtcacctcagcgttcccccgactcctccacgggcatcggcaagaaaggccagcagcccgctaaaaagagactgaactttggtcagactggcgactcagagtcagtccccgaccctcaaccaatcggagaaccaccagcaggcccctctggtctgggatctggtacaatggctgcaggcggtggcgctccaatggcagacaataacgaaggcgccgacggagtgggtagttcctcaggaaattggcattgcgattccacatggctgggcgacagagtcatcaccaccagcacccgaacctgggccctgcccacctacaacaaccacctctacaagcaaatatccaatgggacatcgggaggaagcaccaacgacaacacctacttcggctacagcaccccctgggggtattttgacttcaacagattccactgccacttctcaccacgtgactggcagcgactcatcaacaacaactggggattccggccaaaaagactcagcttcaagctcttcaacatccaggtcaaggaggtcacgcaggatgaaggcaccaagaccatcgccaataaccttaccagcacgattcaggtatttacggactcggaataccagctgccgtacgtcctcggctccgcgcaccagggctgcctgcctccgttcccggcggacgtcttcatgattccccagtacggctaccttacactgaacaatggaagtcaagccgtaggccgttcctccttctactgcctggaatattttccatctcaaatgctgcgaactggaaacaattttgaattcagctacaccttcgaggacgtgcctttccacagcagctacgcacacagccagagcttggaccgactgatgaatcctctcatcgaccagtacctgtactacttatccagaactcagtccacaggaggaactcaaggtacccagcaattgttattttctcaagctgggcctgcaaacatgtcggctcgggctaagaactggctacctggaccttgctaccggcagcagcgagtctctacgacactgtcgcaaaacaacaacagcaactttgcttggactggtgccaccaaatatcacctgaacggaagagactctttggtaaatcccggtgttgctatggcaacgcataaggacgacgaggaacgtttctttccatcgagcggagtcctgatgtttggaaaacagggtgctggaagagacaatgtggactatagcagcgttatgctaaccagcgaggaagaaattaaaaccactaaccctgtagccacagaacaatacggtgtggtggctgacaacttgcagcaagccaatacagggcctattgtgggaaatgtcaacagccaaggagccttacctggcatggtctggcagaaccgagacgtgtacctgcagggtcccatctgggccaaaattcctcacacggacggcaattttcacccgtctcctctgatgggcggctttggactgaagcacccacctccccagatcctgatcaagaatacgccggtacctgcggatcctccaacgacgttcagccaggcaaaattggcttccttcatcacgcagtacagcaccggccaggtcagcgtggagatcgagtgggagctgcagaaggagaacagcaagcgatggaacccagaaattcagtacacttccaactactacaaatctacaaatgtggactttgctgtcaattctgagggtacatattcagagcctcgccccattggtactcgttatctgacacgtaatctgtaa

SEQ ID NO: 5027 - DNA, 2211 bp, Adeno-associated virus
  source 1..2211: mol_type = other DNA
atggctgccgatggttatcttccagattggctcgaggacaacctctctgagggcattcgcgagtggtgggacttgaaacctggagccccgaaacccaaagccaaccagcaaaagcaggacgacggccggggcctggtgcttcctggctacaagtacctcggacccttcaacggactcgacaagggggagcccgtcaacgcggcggacgcagcggccctcgagcacgacaaggcctacgaccagcagctcgaagcgggtgacaatccgtacctgcggtataaccacgccgacgccgagtttcaggagcgtctgcaagaagatacgtcttttgggggcaacctcgggcgagcagtcttccaggccaagaagcgggttctcgaacctctcggtctggttgaggaaggcgctaagacggctcctggaaagaagagaccagtagagcagtcaccccaagaaccagactcctcctcgggcatcggcaagaaaggccaacagcccgccagaaaaagactcaattttggccagactggcgactcagagtcagttccagaccctcaacctctcggagaacctccagcagcgccctctggtgtgggacctaatacaatggctgcaggcggtggcgcaccaatggcagacaataacgaaggcgccgacggagtgggtagttcctcgggaaattggcattgcgattccacatggctgggcgacagagtcatcaccaccagcacccgaacctgggccctgcccacctacaacaaccacctctacaagcaaatctccaacgggacatcgggaggagccaccaacgacaacacctacttcggctacagcaccccctgggggtattttgactttaacagattccactgccacttttcaccacgtgactggcagcgactcatcaacaacaactggggattccggcccaagagactcagcttcaagctcttcaacatccaggtcaaggaggtcacgcagaatgaaggcaccaagaccatcgccaataacctcaccagcaccatccaggtgtttacggactcggagtaccagctgccgtacgttctcggctctgcccaccagggctgcctgcctccgttcccggcggacgtgttcatgattccccagtacggctacctaacactcaacaacggtagtcaggccgtgggacgctcctccttctactgcctggaatactttccttcgcagatgctgagaaccggcaacaacttccagtttacttacaccttcgaggacgtgcctttccacagcagctacgcccacagccagagcttggaccggctgatgaatcctctgattgaccagtacctgtactacttgtctcggactcaaacaacaggaggcacggcaaatacgcagactctgggcttcagccaaggtgggcctaatacaatggccaatcaggcaaagaactggctgccaggaccctgttaccgccaacaacgcgtctcaacgacaaccgggcaaaacaacaatagcaactttgcctggactgctgggaccaaataccatctgaatggaagaaattcattggctaatcctggcatcgctatggcaacacacaaagacgacgaggagcgttttttcccagtaacgggatcctgtttttggcaacaaaatgctgccagagacaatgcggattacagcgatgtcatgctcaccagcgaggaagaaatcaaaaccactaaccctgtggctacagaggaatacggtatcgtggcagataacttgcagcagcaaaacacggctcctcaaattggaactgtcaacagccagggggccttacccggtatggtctggcagaaccgggacgtgtacctgcagggtcccatctgggccaagattcctcacacggacggcaacttccacccgtctccgctgatgggcggctttggcctgaaacatcctccgcctcagatcctgatcaagaacacgcctgtacctgcggatcctccgaccaccttcaaccagtcaaagctgaactctttcatcacgcaatacagcaccggacaggtcagcgtggaaattgaatgggagctacagaaggaaaacagcaagcgctggaaccccgagatccagtacacctccaactactacaaatctacaagtgtggactttgctgttaatacagaaggcgtgtactctgaaccccgccccattggcacccgttacctcacccgtaatctgtaa

SEQ ID NO: 5028 - protein, 736 aa, Adeno-associated virus
MAADGYLPDWLEDNLSEGIREWWDLKPGAPKPKANQQKQDDGRGLVLPGYKYLGPFNGLDKGEPVNAADAAALEHDKAYDQQLEAGDNPYLRYNHADAEFQERLQEDTSFGGNLGRAVFQAKKRVLEPLGLVEEGAKTAPGKKRPVEQSPQEPDSSSGIGKKGQQPARKRLNFGQTGDSESVPDPQPLGEPPAAPSGVGPNTMAAGGGAPMADNNEGADGVGSSSGNWHCDSTWLGDRVITTSTRTWALPTYNNHLYKQISNGTSGGATNDNTYFGYSTPWGYFDFNRFHCHFSPRDWQRLINNNWGFRPKRLSFKLFNIQVKEVTQNEGTKTIANNLTSTIQVFTDSEYQLPYVLGSAHQGCLPPFPADVFMIPQYGYLTLNNGSQAVGRSSFYCLEYFPSQMLRTGNNFQFTYTFEDVPFHSSYAHSQSLDRLMNPLIDQYLYYLSRTQTTGGTANTQTLGFSQGGPNTMANQAKNWLPGPCYRQQRVSTTTGQNNNSNFAWTAGTKYHLNGRNSLANPGIAMATHKDDEERFFPVTGSCFWQQNAARDNADYSDVMLTSEEEIKTTNPVATEEYGIVADNLQQQNTAPQIGTVNSQGALPGMVWQNRDVYLQGPIWAKIPHTDGNFHPSPLMGGFGLKHPPPQILIKNTPVPADPPTTFNQSKLNSFITQYSTGQVSVEIEWELQKENSKRWNPEIQYTSNYYKSTSVDFAVNTEGVYSEPRPIGTRYLTRNL

SEQ ID NO: 5029 - DNA, 2214 bp, Adeno-associated virus
  source 1..2214: mol_type = other DNA
atggctgctgacggttatcttccagattggctcgaggacaacctctctgagggcattcgcgagtggtgggacctgaaacctggagcccccaagcccaaggccaaccagcagaagcaggacgacggccggggtctggtgcttcctggctacaagtacctcggacccttcaacggactcgacaagggggagcccgtcagcgcggcggacgcagcggccctcgagcacgacaaggcctgcgaccagcggctcaaagcgggtgacaatccgtacctgcggtataaccacgccgacgccgagtttcaggagcgtctgcaagaagatacgtcttttgggggcaacctcgggcgagcagtcttccaggccaagaagcgggttctcgaacctctcggtctggttgaggaagctgctaagacggctcctggaaagaagggaccggtagaaccgtcacctcagcgttcccccgactcctccacgggcatcggcaagaaaggccagcagcccgctagaaagagactgaactttgggcagactggcgactcagagtcagtccccgaccctcaaccaatcggagaaccaccagcaggcccctctggtctgggatctggtacaatggctgcaggcggtggcgcaccaatggctgacaataacgagggcgccgacggagtgggtaatgcctcaggaaattggcattgcgattccacatggctgggcgacagagtcatcaccaccagcacccgaacctgggctttgcccacctacaacaatcacctctacaagcaaatctccagtcagtcagcaggtagcaccaacgacaacgtctacttcggctacagcaccccctgggggtattttgacttcaacagattccactgtcacttctcaccacgtgactggcagcggctcatcaacaacaactggggattccggcccaagaagctcaacttcaagctgttcaacatccaggtcaaggaggtcacaacgaatgacggcgtcacgaccatcgccaataaccttaccagcacggttcaggtcttttcggactcggaataccagctgccctacgtcctcggctccgcacaccagggctgcctgcctccgttcccggcggacgtcttcatgattccccagtacggctacctgactctgaacaatggcagccaatcggtgggtcgttcctctttctactgcctggaatatttcccttctcaaatgctgagaacgggcaacaacttcaccttcagctacaccttcgaggacgttcccttccacagcagctacgcacacagccagagcctggaccggctgatgaatcctcttatcgaccagtacctgtattacctggccagaacacagagcaacgcaggaggcacagctggcaatcgggaactgcagttttatcagggcgggcctaccaccatggccgaacaagccaaaaactggctgcctggaccttgcttccggcaacaaagagtctccaagacgctggatcaaaacaacaacagcaactttgcttggactggtgccaccaaataccatctaaatggaagaaattcattggttaatcccggtgtcgccatggcaacccacaaggacgacgaggaacgcttcttcccttcgagcggagtcctgatttttggaaaaactggagcagctaataagactacactggaaaatgtgttaatgacaaatgaagaggaaattcgtcctaccaacccggtagccaccgaggaatacgggactgttagcagcaacctgcaggcggctaacactgcagcccagacacaagttgtcaacaaccagggagccttacctggtatggtctggcagaaccgggacgtgtacctgcagggtcccatctgggccaagattcctcacacggacggcaactttcacccgtctccgctgatgggcggctttggactgaagcatccgcctcctcagatcctgatcaaaaacactcctgttcctgctaatcccccggaggtgtttacgcctgccaagtttgcttctttcatcacacagtacagcaccggccaggtcagcgtggagatcgagtgggagctgcagaaggagaacagcaagcgctggaacccagagattcagtatacctccaattttgacgaacagactggtgtggactttgccgttgacagccagggtgtttattctgagcctcgccccattggtactcgttacctcacccgtaatctgtaa

SEQ ID NO: 5030 - protein, 737 aa, Adeno-associated virus
MAADGYLPDWLEDNLSEGIREWWDLKPGAPKPKANQQKQDDGRGLVLPGYKYLGPFNGLDKGEPVSAADAAALEHDKACDQRLKAGDNPYLRYNHADAEFQERLQEDTSFGGNLGRAVFQAKKRVLEPLGLVEEAAKTAPGKKGPVEPSPQRSPDSSTGIGKKGQQPARKRLNFGQTGDSESVPDPQPIGEPPAGPSGLGSGTMAAGGGAPMADNNEGADGVGNASGNWHCDSTWLGDRVITTSTRTWALPTYNNHLYKQISSQSAGSTNDNVYFGYSTPWGYFDFNRFHCHFSPRDWQRLINNNWGFRPKKLNFKLFNIQVKEVTTNDGVTTIANNLTSTVQVFSDSEYQLPYVLGSAHQGCLPPFPADVFMIPQYGYLTLNNGSQSVGRSSFYCLEYFPSQMLRTGNNFTFSYTFEDVPFHSSYAHSQSLDRLMNPLIDQYLYYLARTQSNAGGTAGNRELQFYQGGPTTMAEQAKNWLPGPCFRQQRVSKTLDQNNNSNFAWTGATKYHLNGRNSLVNPGVAMATHKDDEERFFPSSGVLIFGKTGAANKTTLENVLMTNEEEIRPTNPVATEEYGTVSSNLQAANTAAQTQVVNNQGALPGMVWQNRDVYLQGPIWAKIPHTDGNFHPSPLMGGFGLKHPPPQILIKNTPVPANPPEVFTPAKFASFITQYSTGQVSVEIEWELQKENSKRWNPEIQYTSNFDEQTGVDFAVDSQGVYSEPRPIGTRYLTRNL

SEQ ID NO: 5031 - DNA, 2214 bp, Adeno-associated virus
  source 1..2214: mol_type = other DNA
atggctgccgatggttatcttccagattggctcgaggacaacctctctgagggcattcgcgagtggtgggacctgaaacctggagccccgaaacccaaagccaaccagcaaaagcaggacgacggccggggtctggtgcttcctggctacaagtacctcggacccttcaacggactcgacaagggggagcccgtcaacgcggcggacgcagcggccctcgagcacgacaaggcctacgaccagcagctcaaagcgggtgacaatccgtacctgcggtataaccacgccgacgccgagtttcaggagcgtctgcaagaagatacgtcttttgggggcaacctcgggcgagcagtcttccaggccaagaagcgggttctcgaacctctcggtctggttgaggaagctgctaagacggctcctggaaagaagagaccggtagaaccgtcacctcagcgttcccccgactcctccacgggcatcggcaagaaaggccagcagcccgctagaaagagactgaactttgggcagactggcgactcagagtcagtccccgaccctcaaccaatcggagaaccaccagcaggcccctctggtctgggatctggtacaatggctgcaggcggtggcgctccaatggcagacaataacgaaggcgccgacggagtgggtaatgcctcaggaaattggcattgcgattccacatggctgggcgacagagtcatcaccaccagcacccgaacctgggctttgcccacctacaacaaccacctctacaagcaaatctccagtcagtcagcaggtagcaccaacgacaacgtctacttcggctacagcaccccctgggggtattttgacttcaacagattccactgtcacttctcaccacgtgactggcagcggctcatcaacaacaactggggattccggcccaagaagctcaacttcaagctgttcaacatccaggtcaaggaggtcacaacgaatgacggcgtcacgaccatcgccaataaccttaccagcacggttcaggtcttttcggactcggaataccagctgccctacgtcctcggctccgcacaccagggctgcctgcctccgttcccggcggacgtcttcatgattcctcagtacggctacctgactctcaacaacggtagtcaggccgtgggacgttcctccttctactgcctggagtacttcccctctcagatgctgagaacgggcaacaacttttccttcagctacactttcgaggacgtgcctttccacagcagctacgcgcacagccagagtttggacaggctgatgaatcctctcatcgaccagtacctgtactacctgtcaagaacccagtctacgggaggcacagcgggaacccagcagttgctgttttctcaggccgggcctagcaacatgtcgactcaggccagaaactggctgcctggaccctgctacagacagcagcgcgtctccacgacactgtcgcaaaacaacaacagcaactttgcctggactggtgccaccaagtatcatctgaacggcagagactctctggtgaatccgggcgtcgccatggcaaccaacaaggacgacgaggaccgcttcttcccatccagcggcatcctcatgtttggcaagcagggagctggaaaagacaacgtggactatagcaacgtgatgctaaccagcgaggaagaaatcaagaccaccaaccccgtggccacagaacagtatggcgtggtggctgataacctacagcagcaaaacaccgctcctattgtgggggccgtcaacagccagggagccttacctggcatggtctggcagaaccgggacgtgtacctgcagggtcctatttgggccaagattcctcacacagatggcaactttcacccgtctcctttaatgggcggctttggacttaaacatccgcctcctcagatccttatcaaaaacactcctgttcctgcggatcctccaacagcgttcaaccaggccaagctgaattctttcatcacgcagtacagcaccggacaagtcagcgtggagatcgagtgggagctgcagaaggagaacagcaagcgctggaacccagagattcagtatacttccaactactacaaatctacaaatgtggactttgctgttaatactgagggtgcttactctgagcctcgccccattggcactcgttacctcacccgtaatctgtaa

SEQ ID NO: 5032 - protein, 737 aa, Adeno-associated virus
MAADGYLPDWLEDNLSEGIREWWDLKPGAPKPKANQQKQDDGRGLVLPGYKYLGPFNGLDKGEPVNAADAAALEHDKAYDQQLKAGDNPYLRYNHADAEFQERLQEDTSFGGNLGRAVFQAKKRVLEPLGLVEEAAKTAPGKKRPVEPSPQRSPDSSTGIGKKGQQPARKRLNFGQTGDSESVPDPQPIGEPPAGPSGLGSGTMAAGGGAPMADNNEGADGVGNASGNWHCDSTWLGDRVITTSTRTWALPTYNNHLYKQISSQSAGSTNDNVYFGYSTPWGYFDFNRFHCHFSPRDWQRLINNNWGFRPKKLNFKLFNIQVKEVTTNDGVTTIANNLTSTVQVFSDSEYQLPYVLGSAHQGCLPPFPADVFMIPQYGYLTLNNGSQAVGRSSFYCLEYFPSQMLRTGNNFSFSYTFEDVPFHSSYAHSQSLDRLMNPLIDQYLYYLSRTQSTGGTAGTQQLLFSQAGPSNMSTQARNWLPGPCYRQQRVSTTLSQNNNSNFAWTGATKYHLNGRDSLVNPGVAMATNKDDEDRFFPSSGILMFGKQGAGKDNVDYSNVMLTSEEEIKTTNPVATEQYGVVADNLQQQNTAPIVGAVNSQGALPGMVWQNRDVYLQGPIWAKIPHTDGNFHPSPLMGGFGLKHPPPQILIKNTPVPADPPTAFNQAKLNSFITQYSTGQVSVEIEWELQKENSKRWNPEIQYTSNYYKSTNVDFAVNTEGAYSEPRPIGTRYLTRNL

SEQ ID NO: 5033 - DNA, 2217 bp, Adeno-associated virus
  source 1..2217: mol_type = other DNA
atggctgccgatggttatcttccagattggctcgaggacaacctctctgagggcattcgcgagtggtgggacctgaaacctggagccccgaaacccaaagccaaccagcaaaagcaggacgacggccggggtctggtgcttcctggctacaagtacctcggacccttcaacggactcgacaagggggagcccgtcaacgcggcggacgcagcggccctcgagcacgacaaggcctacgaccagcagctcaaagcgggtgacaatccgtacctgcggtataatcacgccgacgccgagtttcaggagcgtctgcaagaagatacgtcttttgggggcaacctcgggcgagcagtcttccaggccaagaagcgggttctcgaacctctcggtctggttgaggaaggcgctaagacggctcctggaaagaagagaccggtagagccgtcaccacagcgttcccccgactcctccacgggcatcggcaagaaaggccagcagcccgccagaaagagactcaatttcggtcagactggcgactcagagtcagtccccgaccctcaacctatcggagaacctccagcagcgccctctagtgtgggatctggtacaatggctgcaggcggtggcgcaccaatggcagacaataacgaaggtgccgacggagtgggtagttcctcgggaaattggcattgcgattccacatggctgggcgacagagtcatcaccaccagcacccgaacctgggccctgcccacctacaacaaccacctctacaagcaaatctccaacgggacctcgggaggcagcaccaacgacaacacctactttggctacagcaccccctgggggtattttgactttaacagattccactgccacttctcaccacgtgactggcagcgactcatcaacaacaactggggattccggcccaagagactcagcttcaagctcttcaacatccaggtcaaagaggtcacgcagaatgaaggcaccaagaccatcgccaataacctcaccagcaccatccaggtgtttacggactcggaataccagctgccgtacgtcctcggctctgcccaccagggctgcctgcctccgttcccggcggacgtcttcatgattcctcagtacggctacctgactctcaacaacggtagtcaggccgtgggacgttcctccttctactgcctggagtacttcccctctcagatgctgagaacgggcaacaacttttccttcagctacactttcgaggacgtgcctttccacagcagctacgcgcacagccagagtttggacaggctgatgaatcctctcatcgaccagtacctgtactacctgtcaagaacccagtctacgggaggcacagcgggaacccagcagttgctgttttctcaggccgggcctagcaacatgtcggctcaggccagaaactggctgcctggaccctgctacagacagcagcgcgtctccacgacactgtcgcaaaacaacaacagcaactttgcctggactggtgccaccaagtatcatctgaacggcagagactctctggtgaatccgggcgtcgccatggcaaccaacaaggacgacgaggaccgcttcttcccatccagcggcatcctcatgtttggcaagcagggagctggaaaagacaacgtggactatagcaacgtgatgctaaccagcgaggaagaaatcaaggccaccaaccccgtggccacagaacagtatggcgtggtggctgataacctacagcagcaaaacaccgctcctattgtgggggccgtcaacagccagggagccttacctggcatggtctggcagaaccgggacgtgtacctgcagggtcctatttgggccaagattcctcacacagatggcaactttcacccgtctcctttaatgggcggctttggacttaaacatccgcctcctcagatcctcatcaaaaacactcctgttcctgcggatcctccaacagcgttcaaccaggccaagctgaattctttcatcacgcagtacagcaccggacaagtcagcgtggagatcgagtgggagctgcagaaggagaacagcaagcgctggaacccagagattcagtatacttccaactactacaaatctacaaatgtggactttgctgttaatactgagggtgtttactctgagcctcgccccattggcactcgttacctcacccgtaatctgtaa

SEQ ID NO: 5034 - protein, 738 aa, Adeno-associated virus
MAADGYLPDWLEDNLSEGIREWWDLKPGAPKPKANQQKQDDGRGLVLPGYKYLGPFNGLDKGEPVNAADAAALEHDKAYDQQLKAGDNPYLRYNHADAEFQERLQEDTSFGGNLGRAVFQAKKRVLEPLGLVEEGAKTAPGKKRPVEPSPQRSPDSSTGIGKKGQQPARKRLNFGQTGDSESVPDPQPIGEPPAAPSSVGSGTMAAGGGAPMADNNEGADGVGSSSGNWHCDSTWLGDRVITTSTRTWALPTYNNHLYKQISNGTSGGSTNDNTYFGYSTPWGYFDFNRFHCHFSPRDWQRLINNNWGFRPKRLSFKLFNIQVKEVTQNEGTKTIANNLTSTIQVFTDSEYQLPYVLGSAHQGCLPPFPADVFMIPQYGYLTLNNGSQAVGRSSFYCLEYFPSQMLRTGNNFSFSYTFEDVPFHSSYAHSQSLDRLMNPLIDQYLYYLSRTQSTGGTAGTQQLLFSQAGPSNMSAQARNWLPGPCYRQQRVSTTLSQNNNSNFAWTGATKYHLNGRDSLVNPGVAMATNKDDEDRFFPSSGILMFGKQGAGKDNVDYSNVMLTSEEEIKATNPVATEQYGVVADNLQQQNTAPIVGAVNSQGALPGMVWQNRDVYLQGPIWAKIPHTDGNFHPSPLMGGFGLKHPPPQILIKNTPVPADPPTAFNQAKLNSFITQYSTGQVSVEIEWELQKENSKRWNPEIQYTSNYYKSTNVDFAVNTEGVYSEPRPIGTRYLTRNL

SEQ ID NO: 5035 - DNA, 2217 bp, Adeno-associated virus
  source 1..2217: mol_type = other DNA
atggctgccgatggttatcttccagattggctcgaggacaacctctctgagggcattcgcgagtggtgggacctgaaacctggagccccgaaacccaaagccaaccagcaaaagcaggacgacggccggggtctggtgcttcctggctacaagcacctcggacccttcaacggactcgacaagggggagcccgtcaacgcggcggacgcagcggccctcgagcacgacaaggcctacgaccagcagctcaaagcgggtgacaatccgtacctgcggtataatcacgctgacgccgagtttcaggagcgtctgcaagaagatacgtcttttgggggcaacctcgggcgagcagtcttccaggccaagaagcgggttctcgaacctctcggtctggttgaggaaggcgctaagacggctcctggaaagaagagaccggtagagccgtcaccacagcgttcccccgactcctccacgggcatcggcaagaaaggccagcagcccgccagaaagagactcaatttcggtcagactggcgactcagagtcagtccccgaccctcaacctatcggagaacctccagcagcgccctctagtgtgggatctggtacaatggctgcaggcggtggcgcaccaatggcagacaataacgaaggtgccgacggagtgggtagttcctcgggaaattggcattgcgattccacatggctgggcgacagagtcatcaccaccagcacccgaacctgggccctgcccacctacaacaaccacctctacaagcaaatctccaacgggacctcgggaggcagcaccaacgacaacacctactttggctacagcaccccctgggggtattttgactttaacagattccactgccacttctcaccacgtgactggcagcgactcatcaacaacaactggggattccggcccaagagactcagcttcaagctcttcaacatccaggtcaaagaggtcacgcagaatgaaggcaccaagaccatcgccaataaccttaccagcacggttcaggtcttttcggactcggaataccagctgccctacgtcctcggctccgcacaccagggctgcctgcctccgttcccggcggacgtcttcatgattccccagtacggctacctgactctgaacaatggcagccaatcggtgggtcgttcctctttctactgcctggaatatttcccttctcaaatgctgagaacgggcaacaacttcaccttcagctacaccttcgaggacgttcccttccacagcagctacgcacacagccagagcctggaccggctgatgaatcctcttatcgaccagtacctgtattacctggccagaacacagagcaacgcaggaggcacagctggcaatcgggaactgcagttttatcagggcgggcctaccaccatggccgaacaagccaaaaactggctgcctggaccttgcttccggcaacaaagagtctccaagacgctggatcaaaacaacaacagcaactttgcttggactggtgccaccaaataccatctaaatggaagaaattcattggttaatcccggtgtcgccatggcaacccacaaggacgacgaggaacgcttcttcccttcgagcggagtcctgatttttggaaaaactggagcagctaataagactacactggaaaatgtgttaatgacaaatgaagaggaaattcgtcctaccaacccggtagccaccgaggaatacgggactgttagcagcaacctgcaggcggctaacactgcagcccagacacaagttgtcaacaaccagggagccttacctggtatggtctggcagaaccgggacgtgtacctgcagggtcccatctgggccaagattcctcacacggacggcaactttcacccgtctccgctgatgggcggctttggactgaagcatccgcctcctcagatcctgatcaaaaacactcctgttcctgctaatcccccggaggtgtttacgcctgccaagtttgcttctttcatcacacagtacagcaccggccaggtcagcgtggagatcgagtgggagctgcagaaggagaacagcaagcgctggaacccagagattcagtatacctccaattttgacaaacagactggtgtggactttgccgttgacagccagggtgtttattctgagcctcgccccattggtactcgttacctcacccgtaatctgtaa

SEQ ID NO: 5036 - protein, 738 aa, Adeno-associated virus
MAADGYLPDWLEDNLSEGIREWWDLKPGAPKPKANQQKQDDGRGLVLPGYKHLGPFNGLDKGEPVNAADAAALEHDKAYDQQLKAGDNPYLRYNHADAEFQERLQEDTSFGGNLGRAVFQAKKRVLEPLGLVEEGAKTAPGKKRPVEPSPQRSPDSSTGIGKKGQQPARKRLNFGQTGDSESVPDPQPIGEPPAAPSSVGSGTMAAGGGAPMADNNEGADGVGSSSGNWHCDSTWLGDRVITTSTRTWALPTYNNHLYKQISNGTSGGSTNDNTYFGYSTPWGYFDFNRFHCHFSPRDWQRLINNNWGFRPKRLSFKLFNIQVKEVTQNEGTKTIANNLTSTVQVFSDSEYQLPYVLGSAHQGCLPPFPADVFMIPQYGYLTLNNGSQSVGRSSFYCLEYFPSQMLRTGNNFTFSYTFEDVPFHSSYAHSQSLDRLMNPLIDQYLYYLARTQSNAGGTAGNRELQFYQGGPTTMAEQAKNWLPGPCFRQQRVSKTLDQNNNSNFAWTGATKYHLNGRNSLVNPGVAMATHKDDEERFFPSSGVLIFGKTGAANKTTLENVLMTNEEEIRPTNPVATEEYGTVSSNLQAANTAAQTQVVNNQGALPGMVWQNRDVYLQGPIWAKIPHTDGNFHPSPLMGGFGLKHPPPQILIKNTPVPANPPEVFTPAKFASFITQYSTGQVSVEIEWELQKENSKRWNPEIQYTSNFDKQTGVDFAVDSQGVYSEPRPIGTRYLTRNL

SEQ ID NO: 5037 - protein, 737 aa, Adeno-associated virus
MAADGYLPDWLEDNLSEGIREWWDLKPGAPKPKANQQKQDDGRGLVLPGYKYLGPFNGLDKGEPVNAADAAALEHDKAYDQQLKAGDNPYLRYNHADAEFQERLQEDTSFGGNLGRAVFQAKKRVLEPLGLVEEAAKTAPGKKRPVEPSPQRSPDSSTGIGKKGQQPARKRLNFGQTGDSESVPDPQPIGEPPAGPSGLGSGTMAAGGGAPMADNNKGADGVGNASGNWHCDSTWLGDRVITTSTRTWALPTYNNHLYKQISSQSAGSTNDNVYFGYSTPWGYFDFNRFHCHFSPRDWQRLINSNWGFRPKKLNFKLFNIQVKEVTTNDGVTTIANNLTSTVQVFSDSEYQLPYVLGSAHQGCLPPFPADVFMIPQYGYLTLNNGSQSVGRSSFYCLEYFPSQMLRTGNNFTFSYTFEDVPFHSSYAHSQSLDRLMNPLIDQYLYYLARTQSNAGGTAGNRELQFYQGGPTTMAEQAKNWLPGPCFRQQRVSKTLDQNNNSNFAWTGATKYHLNGRNSLVNPGVAMATHKDDEERFFPSSGVLIFGKTGAANKTTLENVLMTNEEEIRPTNPVATEEYGTVSSNLQAANTAAQTQVVNNQGALPGMVWQNRDVYLQGPIWAKIPHTDGNFHPSPLMGGFGLKHPPPQILIKNTPVPANPPEVFTPAKFASFITQYSTGQVSVEIEWELQKENSKRWNPEIQYTSNFDKQTGVDFAVDSQGVYSEPRPIGTRYLTRNL

SEQ ID NO: 5038 - DNA, 2214 bp, Adeno-associated virus
  source 1..2214: mol_type = other DNA
atggctgctgacggttatcttccagattggctcgaggacaacctctctgagggcattcgcgagtggtgggacctgaaacctggagcccccaagcccaaggccaaccagcagaagcaggacgacggccggggtctggtgcttcctggctacaagtacctcggacccttcaacggactcgacaagggggagcccgtcaacgcggcggacgcagcggccctcgagcacgacaaggcctacgaccagcagctcaaagcgggtgacaatccgtacctgcggtataaccacgccgacgccgagtttcaggagcgtctgcaagaagatacgtcttttgggggcaacctcgggcgagcagtcttccaggccaagaagcgggttctcgaacctctcggtctggttgaggaagctgctaagacggctcctggaaagaagagaccggtagaaccgtcacctcagcgttcccccgactcctccacgggcatcggcaagaaaggccagcagcccgctagaaagagactgaactttgggcagactggcgactcagagtcagtccccgaccctcaaccaatcggagaaccaccagcaggcccctctggtctgggatctggtacaatggctgcaggcggtggcgcaccaatggctgacaataacaagggcgccgacggagtgggtaatgcctcaggaaattggcattgcgattccacatggctgggcgacagagtcatcaccaccagcacccgaacctgggctttgcccacctacaacaaccacctctacaagcaaatctccagtcagtcagcaggtagcaccaacgacaacgtctacttcggctacagcaccccctgggggtattttgacttcaacagattccactgtcacttctcaccacgtgactggcagcggctcatcaacagcaactggggattccggcccaagaagctcaacttcaagctgttcaacatccaggtcaaggaggtcacaacgaatgacggcgtcacgaccatcgccaataaccttaccagcacggttcaggtcttttcggactcggaataccagctgccctacgtcctcggctccgcacaccagggctgcctgcctccgttcccggcggacgtcttcatgattccccagtacggctacctgactctgaacaatggcagccaatcggtgggtcgttcctctttctactgcctggaatatttcccttctcaaatgctgagaacgggcaacaacttcaccttcagctacaccttcgaggacgttcccttccacagcagctacgcacacagccagagcctggaccggctgatgaatcctcttatcgaccagtacctgtattacctggccagaacacagagcaacgcaggaggcacagctggcaatcgggaactgcagttttatcagggcgggcctaccaccatggccgaacaagccaaaaactggctgcctggaccttgcttccggcaacaaagagtctccaagacgctggatcaaaacaacaacagcaactttgcttggactggtgccaccaaataccatctaaatggaagaaattcattggttaatcccggtgtcgccatggcaacccacaaggacgacgaggaacgcttcttcccttcgagcggagtcctgatttttggaaaaactggagcagctaataagactacactggaaaatgtgttaatgacaaatgaagaggaaattcgtcctaccaacccggtagccaccgaggaatacgggactgttagcagcaacctgcaggcggctaacactgcagcccagacacaagttgtcaacaaccagggagccttacctggtatggtctggcagaaccgggacgtgtacctgcagggtcccatctgggccaagattcctcacacggacggcaactttcacccgtctccgctgatgggcggctttggactgaagcatccgcctcctcagatcctgatcaaaaacactcctgttcctgctaatcccccggaggtgtttacgcctgccaagtttgcttctttcatcacacagtacagcaccggccaggtcagcgtggagatcgagtgggagctgcagaaggagaacagcaagcgctggaacccagagattcagtatacctccaattttgacaaacagactggtgtggactttgccgttgacagccagggtgtttattctgagcctcgccccattggtactcgttacctcacccgtaatctgtaa

SEQ ID NO: 5039 - protein, 737 aa, Adeno-associated virus
MAADGYLPDWLEDNLSEGIREWWDLKPGAPKPKANQQKQDDGRGLVLPGYKYLGPFNGLDKGEPVNAADAAALEHDKAYDQQLKAGDNPYLRYNHADAEFQERLQEDTSFGGNLGRAVFQAKKRVLEPLGLVEEAAKTAPGKKRPVEPSPQRSPDSSTGIGKKGQQPARKRLNFGQTGDSESVPDPQPIGEPPAGPSGLGSGTMAAGGGAPMADNNEGADGVGNASGNWHCDSTWLGDRVITTSTRTWALPTYNNHLYKQISSQSAGSTNDNVYFGYSTPWGYFDFNRFHCHFSPRDWQRLINSNWGFRPKKLNFKLFNIQVKEVTTNDGVTTIANNLTSTVQVFSDSEYQLPYVLGSAHQGCLPPFPADVFMIPQYGYLTLNNGSQSVGRSSFYCLEYFPSQMLRTGNNFTFSYTFEDVPFHSSYAHSQSLDRLMNPLIDQYLYYLARTQSNAGGTAGNRELQFYQGGPTTMAEQAKNWLPGPCFRQQRVSKTLDQNNNSNFAWTGATKYHLNGRNSLVNPGVAMATHKDDEERFFPSSGVLIFGKTGAANKTTLENVLMTNEEEIRPTNPVATEEYGTVSSNLQAANTAAQTQVVNNQGALPGMVWQNRDVYLQGPIWAKIPHTDGNFHPSPLMGGFGLKHPPPQILIKNTPVPANPPEVFTPAKFASFITQYSTGQVSVEIEWELQKENSKRWNPEIQYTSNFDKQTGVDFAVDSQGVYSEPRPIGTRYLTRNL

SEQ ID NO: 5040 - protein, 737 aa, Adeno-associated virus
MAADGYLPDWLEDNLSEGIREWWDLKPGAPKPKANQQKQDDGRGLVLPGYKYLGPFNGLDKGEPVNAADAAALEHDKAYDQQLKAGDNPYLRYNHADAEFQERLQEDTSFGGNLGRAVFQAKKRVLEPLGLVEEAAKTAPGKKRPVEPSPQRSPDSSTGIGKKGQQPARKRLNFGQTGDSESVPDPQPIGEPPAGPSGLGSGTMAAGGGAPMADNNEGADGVGNASGNWHCDSTWLGDRVITTSTRTWALPTYNNHLYKQISSQSAGSTNDNVYFGYSTPWGYFDFNRFHCHFSPRDWQRLINNNWGFRPKKLNFKLFNIQVKEVTTNDGVTTIANNLTSTVQVFSDSEYQLPYVLGSAHQGCLPPFPADVFMIPQYGYLTLNNGSQSVGRSSFYCLEYFPSQMLRTGNNFTFSYTFEDVPFHSSYAHSQSLDRLMNPLIDQYLYYLARTQSNAGGTAGNRELQFYQGGPTTMAEQAKNWLPGPCFRQQRVSKTLDQNNNSNFAWTGATKYHLNGRNSLVNPGVAMATHKDDEERFFPSSGVLIFGKTGAANKTTLENVLMTNEEEIRPTNPVATEEYGTVSSNLQAANTAAQTQVVNNQGALPGMVWQNRDVYLQGPIWAKIPHTDGNFHPSPLMGGFGLKHPPPQILIKNTPVPANPPEVFTPAKFASFITQYSTGQVSVEIEWELQKENSKRWNPEIQYTSNFDKQTGVDFAVDSQGVYSEPRPIGTRYLTRNL

SEQ ID NO: 5041 - protein, 737 aa, Adeno-associated virus
MAADGYLPDWLEDNLSEGIREWWDLKPGAPKPKANQQKQDDGRGLVLPGYKYLGPFNGLDKGEPVNAADAAALEHDKAYDQQLKAGDNPYLRYNHADAEFQERLQEDTSFGGNLGRAVFQAKKRVLEPLGLVEEAAKTAPGKKRPVEPSPQRSPDSSTGIGKKGQQPARKRLNFGQTGDSESVPDPQPIGEPPAGPSGLGSGTMAAGGGAPMADNNKGADGVGNASGNWHCDSTWLGDRVITTSTRTWALPTYNNHLYKQISSQSAGSTNDNVYFGYSTPWGYFDFNRFHCHFSPRDWQRLINNNWGFRPKKLNFKLFNIQVKEVTTNDGVTTIANNLTSTVQVFSDSEYQLPYVLGSAHQGCLPPFPADVFMIPQYGYLTLNNGSQSVGRSSFYCLEYFPSQMLRTGNNFTFSYTFEDVPFHSSYAHSQSLDRLMNPLIDQYLYYLARTQSNAGGTAGNRELQFYQGGPTTMAEQAKNWLPGPCFRQQRVSKTLDQNNNSNFAWTGATKYHLNGRNSLVNPGVAMATHKDDEERFFPSSGVLIFGKTGAANKTTLENVLMTNEEEIRPTNPVATEEYGTVSSNLQAANTAAQTQVVNNQGALPGMVWQNRDVYLQGPIWAKIPHTDGNFHPSPLMGGFGLKHPPPQILIKNTPVPANPPEVFTPAKFASFITQYSTGQVSVEIEWELQKENSKRWNPEIQYTSNFDKQTGVDFAVDSQGVYSEPRPIGTRYLTRNL

SEQ ID NO: 5042 - DNA, 2217 bp, Adeno-associated virus
  source 1..2217: mol_type = other DNA
atggctgccgatggttatcttccagattggctcgaggacaacctctctgagggcattcgcgagtggtgggacctgaaacctggagccccgaaacccaaagccaaccagcaaaagcaggacgacggccggggtctggtgcttcctggctacaagtacctcggacccttcaacggactcgacaagggggagcccgtcaacgcggcggacgcagcggccctcgagcacgacaaggcctacgaccagcagctcaaagcgggtgacaatccgcacctgcggtataatcacgccgacgccgagtttcaggagcgtctgcaagaagatacgtcttttgggggcaacctcgggcgagcagtcttccaggccaagaagcgggttctcgaacctctcggtctggttgaggaaggcgctaagacggctcctggaaagaagagaccggtagagccgtcaccacagcgttcccccgactcctccacgggcatcggcaagaaaggccagcagcccgccagaaagagactcaatttcggtcagactggcgactcagagtcagtccccgaccctcaacttatcggagaacctccagcagcgccctctagtgtgggatctggtacaatggctgcaggcggtggcgcaccaatggcagacaataacgaaggtgccgacggagtgggtagttcctcgggaaattggcattgcgattccacatggctgggcgacagagtcatcaccaccagcacccgaacctgggccctgcccacctacaacaaccacctctacaagcaaatctccaacgggacctcgggaggcagcaccaacgacaacacctactttggctacagcaccccctgggggtattttgactttaacagattccactgccacttctcaccacgtgactggcagcgactcatcaacaacaactggggattccggcccaagagactcagcttcaagctcttcaacatccaggtcaaagaggtcacgcagaatgaaggcaccaagaccatcgccaataacctcaccagcaccatccaggtgtttacggactcggagtaccagctgccgtacgtcctcggctctgcccaccagggctgcctgcctccgttcccggcggacgtcttcatgattcctcagtacggcaacctgactctcaacaacggtagtcaggccgtgggacgttcctccttctactgcctggagtacttcccctctcagatgctgagaacgggcaacaacttttccttcagctacactttcgaggacgtgcctttccacagcagctacgcgcacagccagagtttggacaggctgatgaatcctctcatcgaccagtacctgtactacctgtcaagaacccagtctacgggaggcacagcgggaacccagcagttgctgttttctcaggccgggcctagcaacatgtcggctcaggccagaaactggctgcctggaccctgctacagacagcagcgcgtctccacgacactgtcgcaaaacaacaacagcaactttgcctggactggtgccaccaagtatcatctgaacggcagagactctctggtgaatccgggcgtcgccatggcaaccaacaaggacgacgaggaccgcttcttcccatccagcggcatcctcatgtttggcaagcagggagctggaaaagacaacatgggctatagcaacgtgatgctaaccagcgaggaagaaatcaagaccaccaaccccgtggccacagaacagtatggcgtggtggctgataacctacagcagcaaaacaccgctcctattgtgggggccgtcaacagccagggagccttacctggcatggtctggcagaaccgggacgtgtacctgcagggtcctatttgggccaagattcctcacacagatggcaactttcacccgtctcctttaatgggcggctttggacttaaacatccgcctcctcagatcctcatcaaaaacactcctgttcctgcggatcctccaacagcgttcaaccaggccaagctgaattctttcatcacgcagtacggcaccggacaagtcagcgtggagatcgagtgggagctgcagaaggagaacagcaagcgctggaacccagagattcagtatacttccaactactacaaatctacaaatgtggactttgctgttaatactgagggtgtttactctgagcctcgccccattggcactcgttacctcacccgtaatctgtaa

SEQ ID NO: 5043 - protein, 738 aa, Adeno-associated virus
MAADGYLPDWLEDNLSEGIREWWDLKPGAPKPKANQQKQDDGRGLVLPGYKYLGPFNGLDKGEPVNAADAAALEHDKAYDQQLKAGDNPHLRYNHADAEFQERLQEDTSFGGNLGRAVFQAKKRVLEPLGLVEEGAKTAPGKKRPVEPSPQRSPDSSTGIGKKGQQPARKRLNFGQTGDSESVPDPQLIGEPPAAPSSVGSGTMAAGGGAPMADNNEGADGVGSSSGNWHCDSTWLGDRVITTSTRTWALPTYNNHLYKQISNGTSGGSTNDNTYFGYSTPWGYFDFNRFHCHFSPRDWQRLINNNWGFRPKRLSFKLFNIQVKEVTQNEGTKTIANNLTSTIQVFTDSEYQLPYVLGSAHQGCLPPFPADVFMIPQYGNLTLNNGSQAVGRSSFYCLEYFPSQMLRTGNNFSFSYTFEDVPFHSSYAHSQSLDRLMNPLIDQYLYYLSRTQSTGGTAGTQQLLFSQAGPSNMSAQARNWLPGPCYRQQRVSTTLSQNNNSNFAWTGATKYHLNGRDSLVNPGVAMATNKDDEDRFFPSSGILMFGKQGAGKDNMGYSNVMLTSEEEIKTTNPVATEQYGVVADNLQQQNTAPIVGAVNSQGALPGMVWQNRDVYLQGPIWAKIPHTDGNFHPSPLMGGFGLKHPPPQILIKNTPVPADPPTAFNQAKLNSFITQYGTGQVSVEIEWELQKENSKRWNPEIQYTSNYYKSTNVDFAVNTEGVYSEPRPIGTRYLTRNL

SEQ ID NO: 5044 - DNA, 2217 bp, Adeno-associated virus
  source 1..2217: mol_type = other DNA
atggctgccgatggttatcttccagattggctcgaggacaacctctctgagggcattcgcgagtggtgggacctgaaacctggagccccgaaacccaaagccaaccagcaaaagcaggacgacggccggggtctggtgcttcctggctacaagtacctcggacccttcaacggactcgacaagggggagcccgtcaacgcggcggacgcagcggccctcgagcacgacaaggcctacgaccagcagctcaaagcgggtgacaatccgtacctgcggtataatcacgccgacgccgagtttcaggagcgtctgcaagaagatacgtcttttgggggcaacctcgggcgagcagtcttccaggccaagaagcgggttctcgaacctctcggtctggttgaggaaggcgctaagacggctcctggaaagaagagaccggtagagccgtcaccacagcgttcccccgactcctccacgggcatcggcaagaaaggccagcagcccgccggaaagagactcaatttcggtcagactggcgactcagagtcagtccccgaccctcaacctatcggagaacctccagcagcgccctctagtgtgggatctggtacaatggctgcaggcggtggcgcaccaatggcagacaataacgaaggtgccgacggagtgggtagttcctcgggaaattggcattgcgattccacatggctgggcgacagagtcatcaccaccagcacccgaacctgggccctgcccacctacaacaaccacctctacaagcaaatctccaacgggacctcgggaggcagcaccaacgacaacacctactttggctacagcaccccctgggggtattttgactttaacagattccactgccacttctcaccacgtgactggcagcgactcatcaacaacaactggggattccggcccaagagactcagcttcaagctcttcaacatccaggtcaaagaggtcacgcagaatgaaggcaccaagaccatcgccaataacctcaccagcaccatccaggtgtttacggactcggaataccagctgccgtacgtcctcggctctgcccaccagggctgcctgcctccgttcccggcggacgtcttcatgattcctcagtacggctacctgactctcaacaacggtagtcaggccgtgggacgttcctccttctactgcctggagtacttcccctctcagatgctgagaacgggcaacaacttttccttcagctacactttcgaggacgtgcctttccacagcagctacgcgcacagccagagtttggacaggctgatgaatcctctcgtcgaccagtacctgtactacctgtcaagaacccagtctacgggaggcacagcgggaacccagcagttgctgttttctcaggccgggcctagcaacatgtcggctcaggccagaaactggctgcctggaccctgctacagacagcagcgcgtctccacgacactgtcgcaaaacaacaacagcaactttgcctggactggtgccaccaagtatcatctgaacggcagagactctctggtgaatccgggcgtcgccatggcaaccaacaaggacgacgaggaccgcttcttcccatccagcggcatcctcatgtttggcaagcagggagctggaaaagacaacgtggactatagcaacgtgatgctaaccagcgaggaagaaatcaagaccaccaaccccgtggccacagaacagtatggcgtggtggctgataacctacagcagcaaaacaccgctcctattgtgggggccgtcaacagccagggagccttacctggcatggtctggcagaaccgggacgtgtacctgcagggtcctatttgggccaagattcctcacacagatggcaactttcacccgtctcctttaatgggcggctttggacttaaacatccgcctcctcagatcctcatcaaaaacactcctgttcctgcggatcctccaacagcgttcaaccaggccaagctgaattctttcatcacgcagtacagcaccggacaagtcagcgtggagatcgagtgggagctgcagaaggagaacagcaagcgctggagcccagagattcagtatacttccaactactacaaatctacaaatgtggactttgctgttaatactgagggtgtttactctgagcctcgccccattggcactcgttacctcacccgtaatctgtaa

SEQ ID NO: 5045 - protein, 738 aa, Adeno-associated virus
MAADGYLPDWLEDNLSEGIREWWDLKPGAPKPKANQQKQDDGRGLVLPGYKYLGPFNGLDKGEPVNAADAAALEHDKAYDQQLKAGDNPYLRYNHADAEFQERLQEDTSFGGNLGRAVFQAKKRVLEPLGLVEEGAKTAPGKKRPVEPSPQRSPDSSTGIGKKGQQPAGKRLNFGQTGDSESVPDPQPIGEPPAAPSSVGSGTMAAGGGAPMADNNEGADGVGSSSGNWHCDSTWLGDRVITTSTRTWALPTYNNHLYKQISNGTSGGSTNDNTYFGYSTPWGYFDFNRFHCHFSPRDWQRLINNNWGFRPKRLSFKLFNIQVKEVTQNEGTKTIANNLTSTIQVFTDSEYQLPYVLGSAHQGCLPPFPADVFMIPQYGYLTLNNGSQAVGRSSFYCLEYFPSQMLRTGNNFSFSYTFEDVPFHSSYAHSQSLDRLMNPLVDQYLYYLSRTQSTGGTAGTQQLLFSQAGPSNMSAQARNWLPGPCYRQQRVSTTLSQNNNSNFAWTGATKYHLNGRDSLVNPGVAMATNKDDEDRFFPSSGILMFGKQGAGKDNVDYSNVMLTSEEEIKTTNPVATEQYGVVADNLQQQNTAPIVGAVNSQGALPGMVWQNRDVYLQGPIWAKIPHTDGNFHPSPLMGGFGLKHPPPQILIKNTPVPADPPTAFNQAKLNSFITQYSTGQVSVEIEWELQKENSKRWSPEIQYTSNYYKSTNVDFAVNTEGVYSEPRPIGTRYLTRNL

SEQ ID NO: 5046 - DNA, 2217 bp, Adeno-associated virus
  source 1..2217: mol_type = other DNA
atggttgccgatggttatcttccagattggctcgaggacaacctctctgagggcattcgcgagtggtgggacctgaaacctggagccccgaaacccaaagccaaccagcaaaagcagggcgacggccggggtctggtgcttcctggctacaagtacctcggacccttcaacggactcgacaagggggagcccgtcaacgcggcggacgcagcggccctcgagcacgacaaggcctacgaccagcagcttaaagcgggtgacaatccgtacctgcggtataatcacgccgacgccgagcttcaggagcgtctgcaagaagatacgtcttttgggggcaacctcgggcgagcagtcttccaggccaagaagcgggttctcgaacctctcggtctggttgaggaaggcgctaagacggctcctggaaagaagagaccggtagagccgtcaccacagcgttcccccgactcctccacgggcatcggcaagaaaggccagcagcccgccagaaagagactcaatttcggtcagactggcgactcagagtcagtccccgaccctcaacctatcggagaacctccagcagcgccctctagtgtgggatctggtacaatggctgcaggcggtggcgcgccaatggcagacaataacgaaggtgccgacggagtgggtagttcctcgggaaattggcattgcgattccacatggctgggcgacagagtcatcaccaccagcacccgaacctgggccctgcccacctacaacaaccacctctacaagcaaatctccaacgggacctcgggaggcagcaccaacgacaacacctactttggctacagcaccccctgggggtattttgactttaacagattccactgccacttctcaccacgtgactggcagcgactcatcaacaacaactggggattccggcccaagagactcagcttcaagctcttcaacatccaggtcaaagaggtcacgcagaatgaaggcaccaagaccatcgccaataacctcaccagcaccatccaggtgtttacggactcggaataccagctgccgtacgtcctcggctctgcccaccagggctgccagcctccgttcccggcggacgtcttcatgattcctcagtacggctacctgactctcaacaacggtagtcaggccgtgggacgttcctccttctactgcctggagtacttcccctctcagatgctgagaacgggcaacaacttttccttcagctacactttcgaggacgtgcctttccacagcagctacgcgcacagccagagtttggacaggctgatgaatcctctcatcgaccagtacctgtactacctgtcaagaacccagtctacgggaggcacagcgggaacccagcagttgctgttttctcaggccgggcctagcaacatgtcggctcaggccagaaactggctgcctggaccctgctacagacagcagcgcgtctccacgacactgtcgcaaaacaacaacagcaactttgcctggactggtgccaccaagtatcatctgaacggcagagactctctggtgaatccgggcgtcgccatggcaaccaacaaggacgacgaggaccgcttcttcccatccagcggcatcctcatgtttggcaagcagggagctggaaaagacaacgtggactatagcaacgtgatgctaaccagcgaggaagaaatcaagaccaccaaccccgtggccacagaacagtatggcgtggtggctgataacctacagcagcaaaacaccgctcctattgtgggggccgtcaacagccagggagccttacctggcatggtctggcagaaccgggacgtgtacctgcagggtcctatttgggccaagattcctcacacagatggcaactttcacccgtctcctttaatgggcggctttggacttaaacatccgcctcctcagatcctcatcaaaaacactcctgttcctgcggatcctccaacagcgttcaaccaggccaagctgaattctttcatcacgcagtacagcaccggacaagtcagcgtggagatcgagtgggagccgcagaaggagaacagcaagcgctggaacccagagattcagtatacttccaactactacaaatctacaaatgtggactttgctgttaatactgagggtgtttactctgagcctcgccccattggcactcgttacctcacccgtaatctgtaa

SEQ ID NO: 5047 - protein, 738 aa, Adeno-associated virus
MVADGYLPDWLEDNLSEGIREWWDLKPGAPKPKANQQKQGDGRGLVLPGYKYLGPFNGLDKGEPVNAADAAALEHDKAYDQQLKAGDNPYLRYNHADAELQERLQEDTSFGGNLGRAVFQAKKRVLEPLGLVEEGAKTAPGKKRPVEPSPQRSPDSSTGIGKKGQQPARKRLNFGQTGDSESVPDPQPIGEPPAAPSSVGSGTMAAGGGAPMADNNEGADGVGSSSGNWHCDSTWLGDRVITTSTRTWALPTYNNHLYKQISNGTSGGSTNDNTYFGYSTPWGYFDFNRFHCHFSPRDWQRLINNNWGFRPKRLSFKLFNIQVKEVTQNEGTKTIANNLTSTIQVFTDSEYQLPYVLGSAHQGCQPPFPADVFMIPQYGYLTLNNGSQAVGRSSFYCLEYFPSQMLRTGNNFSFSYTFEDVPFHSSYAHSQSLDRLMNPLIDQYLYYLSRTQSTGGTAGTQQLLFSQAGPSNMSAQARNWLPGPCYRQQRVSTTLSQNNNSNFAWTGATKYHLNGRDSLVNPGVAMATNKDDEDRFFPSSGILMFGKQGAGKDNVDYSNVMLTSEEEIKTTNPVATEQYGVVADNLQQQNTAPIVGAVNSQGALPGMVWQNRDVYLQGPIWAKIPHTDGNFHPSPLMGGFGLKHPPPQILIKNTPVPADPPTAFNQAKLNSFITQYSTGQVSVEIEWEPQKENSKRWNPEIQYTSNYYKSTNVDFAVNTEGVYSEPRPIGTRYLTRNL

SEQ ID NO: 5048 - DNA, 2217 bp, Adeno-associated virus
  source 1..2217: mol_type = other DNA
atggctgccgatggttatcttccagattggctcgaggacaacctctctgagggcattcgcgagtggtgggacctgaaacctggagccccgaaacccaaagccaaccagcaaaagcaggacgacggccggggtctggtgcttcctggctacaagtacctcggacccttcaacggactcgacaagggggagcccgtcaacgcggcggacgcagcggccctcgagcacgacaaggcctacgaccagcagctcaaagcgggtgacaatccgtacctgcggtataatcacgccgacgccgagtttcaggagcgtctgcaagaagatacgtcttttgggggcaacctcgggcgagcagtcttccaggccaagaagcgggttctcgaacctctcggtctggttgaggaaggcgctaagacggctcctggaaagaagagaccggtagagccgtcaccacagcgttcccccgactcctccacgggcatcggcaagaaaggccagcagcccgccagaaagagactcaatttcggtcagactggcgactcagagtcagtccccgaccctcaacctatcggagaacctccagcagcgccctctagtgtgggatctggtacaatggctgcaggcggtggcgcaccaatggcagacaataacgaaggtgccgacggagtgggtagttcctcgggaaattggcattgcgattccacatggctgggcgacagagtcatcaccaccagcacccgaacctgggccctgcccacctacaacaaccacctctacaagcaaatctccaacgggacctcgggaggcagcaccaacgacaacacctactttggctacagcaccccctgggggtattttgactttaacagattccactgccacttctcaccacgtgactggcagcgactcatcaacaacaactggggattccggcccaagagactcagcttcaagctcttcaacatccaggtcaaagaggtcacgcagaatgaaggcaccaagaccatcgccaatagcctcaccagcaccatccaggtgtttacggactcggaataccagctgccgtacgtcctcggctctgcccaccagggctgcctgcctccgttcccggcggacgtcttcatgattcctcagtacggctacctgactcccaacaacggtagtcaggccgtgggacgttcctccttctactgcctggagtacttcccctctcagatgctgagaacgggcaacaacttttccttcagctacactttcgaggacgtgcctttccacagcagctacgcgcacagccagagtttggacaggctgatgaatcctctcatcgaccagtacctgtactacctgtcaagaacccagtctacgggaggcacagcgggaacccagcagttgctgtcttctcaggccgggcctagcaacatgtcggctcaggccagaaactggctgcctggaccctgctacagacagcagcgcgtctccacgacactgtcgcaaaacaacaacagcaactttgcctggactggtgccaccaagtatcatctgaacggcagagactctctggtgaatccgggcgtcgccatggcaaccaacaaggacgacgaggaccgcttcttcccatccagcggcatcctcatgtttggcaagcagggagctggaaaagacaacgtggactatagcaacgtgatgctaaccagcgaggaagaaatcaagaccaccaaccccgtggccacagaacagtatggcgtggtggctgataacctacagcagcaaaacaccgctcctattgtgggggccgtcaacagccagggagccttacctggcatggtctggcagaaccgggacgtgtacttgcagggtcctatttgggccaagattcctcacacagatggcaactttcacccgtctcctttaatgggcggctttggacttaaacatccgcctcctcagatcctcatcaaaaacactcctgttcctgcggatcctccaacagcgttcaaccaggccaagctgaattctttcatcacgcagtacagcaccggacaagtcagcgtggagatcgagtgggagctgcagaaggagaacagcaagcgctggaacccagagattcagtatacttccaactactacaaatctacaaatgtggactttgctgttaatactgagggtgtttactctgagcctcgccccattggcactcgttacctcacccgtaatctgtaa

SEQ ID NO: 5049 - protein, 738 aa, Adeno-associated virus
MAADGYLPDWLEDNLSEGIREWWDLKPGAPKPKANQQKQDDGRGLVLPGYKYLGPFNGLDKGEPVNAADAAALEHDKAYDQQLKAGDNPYLRYNHADAEFQERLQEDTSFGGNLGRAVFQAKKRVLEPLGLVEEGAKTAPGKKRPVEPSPQRSPDSSTGIGKKGQQPARKRLNFGQTGDSESVPDPQPIGEPPAAPSSVGSGTMAAGGGAPMADNNEGADGVGSSSGNWHCDSTWLGDRVITTSTRTWALPTYNNHLYKQISNGTSGGSTNDNTYFGYSTPWGYFDFNRFHCHFSPRDWQRLINNNWGFRPKRLSFKLFNIQVKEVTQNEGTKTIANSLTSTIQVFTDSEYQLPYVLGSAHQGCLPPFPADVFMIPQYGYLTPNNGSQAVGRSSFYCLEYFPSQMLRTGNNFSFSYTFEDVPFHSSYAHSQSLDRLMNPLIDQYLYYLSRTQSTGGTAGTQQLLSSQAGPSNMSAQARNWLPGPCYRQQRVSTTLSQNNNSNFAWTGATKYHLNGRDSLVNPGVAMATNKDDEDRFFPSSGILMFGKQGAGKDNVDYSNVMLTSEEEIKTTNPVATEQYGVVADNLQQQNTAPIVGAVNSQGALPGMVWQNRDVYLQGPIWAKIPHTDGNFHPSPLMGGFGLKHPPPQILIKNTPVPADPPTAFNQAKLNSFITQYSTGQVSVEIEWELQKENSKRWNPEIQYTSNYYKSTNVDFAVNTEGVYSEPRPIGTRYLTRNL

SEQ ID NO: 5050 - protein, 738 aa, Adeno-associated virus
MAADGYLPDWLEDNLSEGIREWWDLKPGAPKPKANQQKQDDGRGLVLPGYKYLGPFNGLDKGEPVNAADAAALEHDKAYDQQLKAGDNPYLRYNHADAEFQERLQEDTSFGGNLGRAVFQAKKRVLEPLGLVEEGAKTAPGKKRPVEPSPQRSPDSSTGIGKKGQQPARKRLNFGQTGDSESVPDPQPIGEPPAAPSSVGSGTMAAGGGAPMADNNEGADGVGSSSGNWHCDSTWLGDRVITTSTRTWALPTYNNHLYKQISNGTSGGSTNDNTYFGYSTPWGYFDFNRFHCHFSPRDWQRLINNNWGFRPKRLSFKLFNIQVKEVTQNEGTKTIANNLTSTIQVFTDSEYQLPYVLGSAHQGCLPPFPADVFMIPQYGYLTLNNGSQAVGRSSFYCLEYFPSQMLRTGNNFSFSYTFEDVPFHSSYVHSQSLDRLMNPLIDQYLYYLSRTQSTGGTAGTQQLLFSQAGPSNMSAQARNWLPGPCYRQQRVSTTLSQNNNSNFAWTGATKYHLNGRDSLVNSGVAMATNKDDEDRFFPSSGILMFGKQGAGKDNVDYSNVMLTSEEEIKTTNPVATEQYGVVADNLQQQNTAPIVGAVNSQGALPGMVWQNRDVYLQGPIWAKIPHTDGNFHPSPLMGGFGLKHPPPQILIKNTPVPADPPTAFNQAKLNSFITQYSTGQVSVEIEWELQKENSKRWNPEIQYTSNYYKSTNVDFAVNTEGVYSEPRPIGTRYPTRNL

SEQ ID NO: 5051 - DNA, 2217 bp, Adeno-associated virus
  source 1..2217: mol_type = other DNA
atggctgccgatggttatcttccagattggctcgaggacaacctctctgagggcattcgcgagtggtgggacctgaaacctggagccccgaaacccaaagccaaccagcaaaagcaggacgacggccggggtctggtgcttcctggctacaagtacctcggacccttcaacggactcgacaagggggagcccgtcaacgcggcggacgcagcggccctcgagcacgacaaggcctacgaccagcagctcaaagcgggtgacaatccgtacctgcggtataatcacgccgacgccgagtttcaggagcgtctgcaagaagatacgtcttttgggggcaacctcgggcgagcagtcttccaggccaagaagcgggttctcgaacctctcggtctggttgaggaaggcgctaagacggctcctggaaagaagagaccggtagagccgtcaccacagcgttcccccgactcctccacgggcatcggcaagaaaggccagcagcccgccagaaagagactcaatttcggtcagactggcgactcagagtcagtccccgaccctcaacctatcggagaacctccagcagcgccctctagtgtgggatctggtacaatggctgcaggcggtggcgcaccaatggcagacaataacgaaggtgccgacggagtgggtagttcctcgggaaattggcattgcgattccacatggctgggcgacagagtcatcaccaccagcacccgaacctgggccctgcccacctacaacaaccacctctacaagcaaatctccaacgggacctcgggaggcagcaccaacgacaacacctactttggctacagcaccccctgggggtattttgactttaacagattccactgccacttctcaccacgtgactggcagcgactcatcaacaacaactggggattccggcccaagagactcagcttcaagctcttcaacatccaggtcaaagaggtcacgcagaatgaaggcaccaagaccatcgccaataacctcaccagcaccatccaggtgtttacggactcggaataccagctgccgtacgtcctcggctctgcccaccagggctgcctgcctccgttcccggcggacgtcttcatgattcctcagtacggctacctgactctcaacaacggtagtcaggccgtgggacgttcctccttctactgcctggagtacttcccctctcagatgctgagaacgggcaacaacttttccttcagctacactttcgaggacgtgcctttccacagcagctacgtgcacagccagagtttggacaggctgatgaatcctctcatcgaccagtacctgtactacctgtcaagaacccagtctacgggaggcacagcgggaacccagcagttgctgttttctcaggccgggcctagcaacatgtcggctcaggccagaaactggctgcctggaccctgctacagacagcagcgcgtctccacgacactgtcgcaaaacaacaacagcaactttgcctggactggtgccaccaagtatcatctgaacggcagagactctctggtgaattcgggcgtcgccatggcaaccaacaaggacgacgaggaccgcttcttcccatccagcggcatcctcatgtttggcaagcagggagctggaaaagacaacgtggactatagcaacgtgatgctaaccagcgaggaagaaatcaagaccaccaaccccgtggccacagaacagtatggcgtggtggctgataacctacagcagcaaaacaccgctcctattgtgggggccgtcaacagccagggagccttacctggcatggtctggcagaaccgggacgtgtacctgcagggtcctatttgggccaagattcctcacacagatggcaactttcacccgtctcctttaatgggcggctttggacttaaacatccgcctcctcagatcctcatcaaaaacactcctgttcctgcggatcctccaacagcgttcaaccaggccaagctgaattctttcatcacgcagtacagcaccggacaagtcagcgtggagatcgagtgggagctgcagaaggagaacagcaagcgctggaacccagagattcagtatacttccaactactacaaatctacaaatgtggactttgctgttaatactgagggtgtttactctgagcctcgccccattggcactcgttaccccacccgtaatctgtaa

SEQ ID NO: 5052 - protein, 734 aa, Adeno-associated virus; identical to SEQ ID NO: 4948

SEQ ID NO: 5053 - DNA, 2214 bp, Adeno-associated virus
  source 1..2214: mol_type = other DNA
atggctgctgacggttatcttccagattggctcgaggacaacctctctgagggcattcgcgagtggtgggacctgaaacctggagccccgaaacccaaagccaaccagcagaagcaggacgacggccggggtctggtgcttcctggctacaagtacctcggacccttcaacggactcgacaagggggagcccgtcaacgcggcggacgcagcggccctcgagcacgacaaggcctacgaccagcagctcaaagcgggtgacaatccgtacctgcggtataaccacgccgacgccgagtttcaggagcgtctgcaagaagatacgtcttttgggggcaacctcgggcgagcagtcttccaggccaagaagcgggttctcgaacctctcggtctggttgaggaagctgctaagacggctcctggaaagaagagaccggtagaaccgtcacctcagcgttcccccgactcctccacgggcatcggcaagaaaggccagcagcccgctagaaagagactgaactttgggcagactggcgactcagagtcagtccccgaccctcaacctctcggagaaccaccagcaggcccctctggtctgggatctggtacaatggctgcaggcggtggcgctccaatggcagacaataacgaaggcgccgacggagtgggtaatgcctcaggaaattggcattgcgattccacatggctgggcgacagagtcatcaccaccagcacccgaacctgggctttgcccacctacaacaaccacctctacaagcaaatctccagtcagtcagcaggtagcaccaacgacaacgtctacttcggctacagcaccccctgggggtattttgacttcaacagattccactgtcacttctcaccacgtgactggcagcgactcatcaacaacaactggggattccggcccaagaagctcaacttcaagctcttcaacatccaagtcaaggaggtcacgacgaatgacggcgtcacgaccatcgctaataaccttaccagcacggttcaggtcttttcggactcggagtaccagctgccgtacgtcctcggctctgcccaccagggctgcctgcctccgttcccggcggacgtcttcatgattcctcagtacggctacctgactctgaacaatggcagccaatcggtgggacgttcatccttctactgcctggaatacttcccttctcaggtgctgagaacgggtaacaacttcaccttcagttacaccttcgaggacgtgcctttccacagcagctacgcgcacagccagagcctagaccggctgatgaatcccctcatcgaccagtacctgtattacctggctagaacacagagtaacccaggaggcacatctggcaatcgggaactgcagttttaccagggcgggccttccaccatggccgaacaagccaagaactggttacctggaccttgcttccggcaacaaagagtttccaaaacactggatcaaaacaacaacagcaactttgcttggactggtgccaccaaatatcacctgaacggcagaaactcattggtgaatcctggtgtcgccatggcaactcacaaggacgacgaggaccgctttttcccatccagcggagtcctgatttttggaaaaactggagcaaccaacaagactacattggaaaacgtgttaatgacaaatgaagaagaaattcgtcctactaatcctgtggccacagaagaatacgggatagtcagcagcaatttacaagcggccaatactgcagcccagacacaagttgtcaacaaccagggagccttacctggcatggtctggcagaaccgggacgtgtacctgcagggtcccatctgggccaaaattcctcacacagacggcaactttcacccgtctccgctgatgggcggctttggactgaagcatccgcctcctcagatcctgatcaaaaacactcctgttcctgctaatcccccggaggtgtttacgcctgccaagtttgcttctttcatcacacagtacagcaccggccaggtcagcgtggagatcgagtgggagctgcagaaggagaacagcaagcgctggaacccagagattcagtatacctccaattttgacaaacagactggtgtggactttgccgttgacagccagggtgtttattctgagcctcgccccattggtactcgttacctcacccgtaatctgtaa

SEQ ID NO: 5054 - protein, 737 aa, Adeno-associated virus
MAADGYLPDWLEDNLSEGIREWWDLKPGAPKPKANQQKQDDGRGLVLPGYKYLGPFNGLDKGEPVNAADAAALEHDKAYDQQLKAGDNPYLRYNHADAEFQERLQEDTSFGGNLGRAVFQAKKRVLEPLGLVEEAAKTAPGKKRPVEPSPQRSPDSSTGIGKKGQQPARKRLNFGQTGDSESVPDPQPLGEPPAGPSGLGSGTMAAGGGAPMADNNEGADGVGNASGNWHCDSTWLGDRVITTSTRTWALPTYNNHLYKQISSQSAGSTNDNVYFGYSTPWGYFDFNRFHCHFSPRDWQRLINNNWGFRPKKLNFKLFNIQVKEVTTNDGVTTIANNLTSTVQVFSDSEYQLPYVLGSAHQGCLPPFPADVFMIPQYGYLTLNNGSQSVGRSSFYCLEYFPSQVLRTGNNFTFSYTFEDVPFHSSYAHSQSLDRLMNPLIDQYLYYLARTQSNPGGTSGNRELQFYQGGPSTMAEQAKNWLPGPCFRQQRVSKTLDQNNNSNFAWTGATKYHLNGRNSLVNPGVAMATHKDDEDRFFPSSGVLIFGKTGATNKTTLENVLMTNEEEIRPTNPVATEEYGIVSSNLQAANTAAQTQVVNNQGALPGMVWQNRDVYLQGPIWAKIPHTDGNFHPSPLMGGFGLKHPPPQILIKNTPVPANPPEVFTPAKFASFITQYSTGQVSVEIEWELQKENSKRWNPEIQYTSNFDKQTGVDFAVDSQGVYSEPRPIGTRYLTRNL

SEQ ID NO: 5055 - DNA, 2214 bp, Adeno-associated virus
  source 1..2214: mol_type = other DNA
atggctgccgatggttatcttccagattggctcgaggacaacctctctgagggcattcgcgagtggtgggacctgaaacctggagccccgaaacccaaagccaaccagcaaaagcaggacgacggccggggtctggtgcttcctggctacaagtacctcggacccttcaacggactcgacaagggggagcccgtcaacgcggcggacgcagcggccctcgagcacgacaaggcctacgaccagcagctcaaagcgggtgacaatccgtacctgcggtataatcacgccgacgccgagtttcaggagcgtctgcaagaagatacgtcttttgggggcaacctcgggcgagcagtcttccaggccaagaagcgggttctcgaacctctcggtctggttgaggaaggcgctaagacggctcctggaaagaagagaccggtagagccgtcaccacagcgttcccccgactcctccacgggcatcggcaagaaaggccagcagcccgccagaaagagactcaatttcggtcagactggcgactcagagtcagtccccgaccctcaacctatcggagaacctccagcagcgccctctagtgtgggatctggtacaatggctgcaggcggtggcgcaccaatggcagacaataacgaaggtgccgacggagtgggtagttcctcgggaaattggcattgcgattccacacggctgggcgacagagtcatcaccaccagcacccggacctgggctttgcccacctacaacaaccacctctacaagcaaatctccagtcagtcagcaggtagcaccaacgacaacgtctacttcggctacagcaccccctgggggtattttgacttcaacagattccactgtcacttctcaccacgtgactggcagcggctcatcaacaacaactggggattccggcccaagaagctcaacttcaagctgttcaacatccaggtcaaggaggtcacaacgaatgacggcgtcacgaccatcgccaataaccttaccagcacggttcaggtcttttcggactcggaataccagctgccctacgtcctcggctccgcacaccagggctgcctgcctccgttcccggcggacgtcttcatgattccccagtacggctacctgactctgaacaatggcagccaatcggtgggtcgttcctctttctactgcctggaatatttcccttctcaaatgctgagaacgggcaacaacttcaccttcagctacaccttcgaggacgttcccttccacagcagctacgcacacagccagagcctggaccggctgatgaatcctcttatcgaccagtacctgtattacctggccagaacacagagcaacgcaggaggcacagctggcaatcgggaactgcagttttatcagggcgggcctaccaccatggccgaacaagccaaaaactggctgcctggaccttgcttccggcaacgaagagtctccaagacgctggatcaaaacaacaacagcaactttgcttggactggtgccaccaaataccatctaaatggaagaaattcattggttaatcccggtgtcgccatggcaacccacaaggacgacgaggaacgcttcttcccttcgagcggagtcctgatttttggaaaaactggagcagctaataagactacactggaaaatgtgttaatgacaaatgaagaggaaattcgtcctaccaacccggtagccaccgaggaatacgggactgttagcagcaacctgcaggcggctaacactgcagcccagacacaagttgtcaacaaccagggagccttacctggtatggtctggcagaaccgggacgtgtacctgcagggtcccatctgggccaagattcctcacacggacggcaactttcacccgtctccgctgatgggcggctttggactgaagcatccgcctcctcagatcctgatcaaaaacactcctgttcctgctaatcccccggaggtgtttacgcctgccaagtttgcttctttcatcacacagtacagcaccggccaggtcagcgtggagatcgagtgggagctgcagaaggagaacagcaagcgctggaacccagagattcagtatacctccaattttgacaaacagactggtgtggactttgccgttgacagccagggtgtttattctgagcctcgccccattggtactcgttacctcacccgtaatctgtaa

SEQ ID NO: 5056 - protein, 737 aa, Adeno-associated virus
MAADGYLPDWLEDNLSEGIREWWDLKPGAPKPKANQQKQDDGRGLVLPGYKYLGPFNGLDKGEPVNAADAAALEHDKAYDQQLKAGDNPYLRYNHADAEFQERLQEDTSFGGNLGRAVFQAKKRVLEPLGLVEEGAKTAPGKKRPVEPSPQRSPDSSTGIGKKGQQPARKRLNFGQTGDSESVPDPQPIGEPPAAPSSVGSGTMAAGGGAPMADNNEGADGVGSSSGNWHCDSTRLGDRVITTSTRTWALPTYNNHLYKQISSQSAGSTNDNVYFGYSTPWGYFDFNRFHCHFSPRDWQRLINNNWGFRPKKLNFKLFNIQVKEVTTNDGVTTIANNLTSTVQVFSDSEYQLPYVLGSAHQGCLPPFPADVFMIPQYGYLTLNNGSQSVGRSSFYCLEYFPSQMLRTGNNFTFSYTFEDVPFHSSYAHSQSLDRLMNPLIDQYLYYLARTQSNAGGTAGNRELQFYQGGPTTMAEQAKNWLPGPCFRQRRVSKTLDQNNNSNFAWTGATKYHLNGRNSLVNPGVAMATHKDDEERFFPSSGVLIFGKTGAANKTTLENVLMTNEEEIRPTNPVATEEYGTVSSNLQAANTAAQTQVVNNQGALPGMVWQNRDVYLQGPIWAKIPHTDGNFHPSPLMGGFGLKHPPPQILIKNTPVPANPPEVFTPAKFASFITQYSTGQVSVEIEWELQKENSKRWNPEIQYTSNFDKQTGVDFAVDSQGVYSEPRPIGTRYLTRNL

SEQ ID NO: 5057 - DNA, 2208 bp, Adeno-associated virus
  source 1..2208: mol_type = other DNA
atggctgccgatggttatcttccagattggctcgaggacactctctctgaaggaataagacagtggtggaagctcaaacctggcccaccaccaccaaagcccgcagagcggcataaggacgacagcaggggtcttgtgcttcctgggtacaagtacctcggacccttcaacggactcgacaagggggagccggtcaacgaggcagacgccgcggccctcgagcacgacaaggcctacgaccggcagctcgacagcggagacaacccgtacctcaagtacaaccacgccgacgcggagtttcaggagcgtcttaaagaagatacgtcttttgggggcaacctcggacgagcagtcttccaggcgaaaaagagggttcttgaacctctgggcctggttgaggaacctgttaagacggctccgggaaaaaagaggccggtagagcactctcctgcggagccagactcctcctcgggaaccggaaaagcgggccagcagcctgcaagaaaaagattgaattttggtcagactggagacgcagactccgtacctgacccccagcctctcggacagccaccagcagccccctctggtttgggatctactacaatggctacaggcagtggcgcaccaatggcagacaataacgagggtgccgatggagtgggtaattcttcaggaaattggcattgcgattcccaatggctgggcgacagagtcatcaccaccagcacccgaacctgggcccagcccacctacaacaaccacctctacaagcaaatctcaagccaatcaggagcctcaaacgacaaccactactttggctacagcaccccttgggggtattttgacttcaacagattccactgccacttttcaccacgtgactggcaaagactcatcaacaacaactggggattccgacccaagagactcaacttcaagctctttaacattcaagtcaaagaggtcacgcagaatgacggtacgacgacgattgccaataaccttaccagcacggttcaggtgtttactgactcggagtaccagctcccgtacgtcctcgggtcggcgcatcaaggatgcctcccgccgtttccagcggacgtcttcatggtcccacagtatggatacctcaccctgaacaacgggagtcaggcggtaggacgctcttccttttactgcctggagtactttccttctcagatgcttcgtactggaaacaactttcagttcagctacacctttgaagacgttcctttccacagcagctacgctcacagccagagtctggatcggctgatgaatcctctgatcgaccagtacctgtattatctgaacaaaacacaatcaaatagtggagctcttcagcagtctcggctactgtttagtcaagctggacccaccagcatgtctcttcaagctaaaaactggctacctggaccttgctacagacagcagcgtctgtcaaagcaggcaaacgacaacaacaacagcaactttccctggactgcggctacaaagtaccacctaaatggccgggactcgttggttaatccaggaccagctatggccagtcacaaagacgatgaagaaaagtttttccccatgcatggaaccctgatatttggtaaacaaggaacaaatgctaacgacgcggatttggacaatgtcatgattacagatgaagaagaaatccgcaccaccaatcccgtggctacggagcagtacggatatgtgtcaaataatttgcaaaactcaaatactggtccaactactggaactgtcaatcaccgaggagcgttacctggcatggtgtggcaggatcgagacgtgtacctgcagggacccatttgggccaagattcctcacaccgatggacactttcatccttctccactgatgggaggttttgggctcaaacacccgcctcctcagatcatgatcaaaaacactcccgttccagccaatcctcccacaaacttcagttctgccaagtttgcttctttcatcacacagtattccacggggcaggtcagcgtggagatcgagtgggagctgcagaaagagaacagcaaacgctggaatcccgaaattcagtacacttccaactacaacaaatctgttaatgtggactttactgtggacactaatggcgtgtattcagagcctcgccccattggcaccagatacctgactcgtaatctgtaa

SEQ ID NO: 5058 - protein, 735 aa, Adeno-associated virus
MAADGYLPDWLEDTLSEGIRQWWKLKPGPPPPKPAERHKDDSRGLVLPGYKYLGPFNGLDKGEPVNEADAAALEHDKAYDRQLDSGDNPYLKYNHADAEFQERLKEDTSFGGNLGRAVFQAKKRVLEPLGLVEEPVKTAPGKKRPVEHSPAEPDSSSGTGKAGQQPARKRLNFGQTGDADSVPDPQPLGQPPAAPSGLGSTTMATGSGAPMADNNEGADGVGNSSGNWHCDSQWLGDRVITTSTRTWAQPTYNNHLYKQISSQSGASNDNHYFGYSTPWGYFDFNRFHCHFSPRDWQRLINNNWGFRPKRLNFKLFNIQVKEVTQNDGTTTIANNLTSTVQVFTDSEYQLPYVLGSAHQGCLPPFPADVFMVPQYGYLTLNNGSQAVGRSSFYCLEYFPSQMLRTGNNFQFSYTFEDVPFHSSYAHSQSLDRLMNPLIDQYLYYLNKTQSNSGALQQSRLLFSQAGPTSMSLQAKNWLPGPCYRQQRLSKQANDNNNSNFPWTAATKYHLNGRDSLVNPGPAMASHKDDEEKFFPMHGTLIFGKQGTNANDADLDNVMITDEEEIRTTNPVATEQYGYVSNNLQNSNTGPTTGTVNHRGALPGMVWQDRDVYLQGPIWAKIPHTDGHFHPSPLMGGFGLKHPPPQIMIKNTPVPANPPTNFSSAKFASFITQYSTGQVSVEIEWELQKENSKRWNPEIQYTSNYNKSVNVDFTVDTNGVYSEPRPIGTRYLTRNL

SEQ ID NO: 5059 - DNA, 2217 bp, Adeno-associated virus
  source 1..2217: mol_type = other DNA
atggctgccgatggttatcttccagattggctcgaggacaacctctctgagggcattcgcgagtggtgggcgctgaaacctggagccccgaagcccaaagccaaccagcaaaagcaggacgacggccggggtctggtgcttcctggctacaagtacctcggacccttcaacggactcgacaagggggagcccgtcaacgcggcggacgcagcggccctcgagcacgacaaggcctacgaccagcagctgcaggcgggtgacaatccgtacctgcggtataatcacgccgacgccgagtttcaggagcgtctgcaagaagatacgtcttttgggggcaacctcgggcgagcagtcttccaggccaagaagcgggttctcgaacctctcggtctggttgaggaaggcgctaagacggctcctggaaagaagagaccggtagagccgtcaccacagcgttcccccgactcctccacgggcatcggcaagaaaggccagcagcccgccagaaagagactcaatttcggtcagactggcgactcagagtcagtccccgaccctcaacctatcggagaacctccagcagcgccctctagtgtgggatctggtacaatggctgcaggcggtggcgcgccaatggcagacaataacgaaggtgccgacggagtgggtagttcctcgggaaattggcattgcgattccacatggctgggcgacagagtcatcaccaccagcacccgaacctgggccctgcccacctacaacaaccacctctacaagcaaacctccaacgggacctcgggaggcagcaccaacgacaacacctactttggctacagcaccccctgggggtattttgactttaacagattccactgccacttctcaccacgtgactggcagcgactcatcaacaacaactggggattccggcccaagagactcagcttcaagctcttcaacatccaggtcaaagaggtcacgcagaatgaaggcaccaagaccatcgccaataacctcaccagcaccatccaggtgtttacggactcggaataccagctgccgtacgtcctcggctctgcccaccagggctgcctgcctccgttcccggcggacgtcttcatgattcctcagtacggctacctgactctcaacaacggtagtcaggccgtgggacgttcctccttctactgcctggagtacttcccctctcagatgctgagaacgggcaacaacttttccttcagctacactttcgaggacgtgcctttccacagcagctacgcgcacagccagagtttggacaggctgatgaatcctctcatcgaccagtacctgtactacctgtcaagaacccagtctacgggaggcacagcgggaacccagcagttgctgttttctcaggccgggcctagcaacatgtcggctcaggccagaaactggctgcctggaccctgctacagacagcagcgcgtctccacgacactgtcgcaaaacaacaacagcaactttgcctggactggtgccaccaagtatcatctgaacggcagagactctctggtgaatccgggcgtcgccatggcaaccaacaaggacgacgaggaccgcttcttcccatccagcggcatcctcatgtttggcaagcagggagctggaaaagacaacgtggactatagcaacgtgatgctaaccagcgaggaagaaatcaagaccaccaaccccgtggccacagaacagtatggcgtggtggctgataacctacagcagcaaaacaccgctcctattgtgggggccgtcaacagccagggagccttacctggcatggtctggcagaaccgggacgtgtacctgcagggtcctatttgggccaagattcctcacacagatggcaactttcacccgtctcctttaatgggcggctttggacttaaacatccgcctcctcagatcctcatcaaaaacactcctgttcctgcggatcctccaacagcgttcaaccaggccaagctgaattctttcatcacgcagtacagcaccggacaagtcagcgcggagatcgagtgggagctgcagaaggagaacagcaagcgctggaacccagagattcagtatacttccaactactacaaatctacaaatgtggactttgctgttaatactgagggtgtttactctgagcctcgccccattggcactcgttacctcacccgtaatctgtaa

SEQ ID NO: 5060 - protein, 738 aa, Adeno-associated virus
MAADGYLPDWLEDNLSEGIREWWALKPGAPKPKANQQKQDDGRGLVLPGYKYLGPFNGLDKGEPVNAADAAALEHDKAYDQQLQAGDNPYLRYNHADAEFQERLQEDTSFGGNLGRAVFQAKKRVLEPLGLVEEGAKTAPGKKRPVEPSPQRSPDSSTGIGKKGQQPARKRLNFGQTGDSESVPDPQPIGEPPAAPSSVGSGTMAAGGGAPMADNNEGADGVGSSSGNWHCDSTWLGDRVITTSTRTWALPTYNNHLYKQTSNGTSGGSTNDNTYFGYSTPWGYFDFNRFHCHFSPRDWQRLINNNWGFRPKRLSFKLFNIQVKEVTQNEGTKTIANNLTSTIQVFTDSEYQLPYVLGSAHQGCLPPFPADVFMIPQYGYLTLNNGSQAVGRSSFYCLEYFPSQMLRTGNNFSFSYTFEDVPFHSSYAHSQSLDRLMNPLIDQYLYYLSRTQSTGGTAGTQQLLFSQAGPSNMSAQARNWLPGPCYRQQRVSTTLSQNNNSNFAWTGATKYHLNGRDSLVNPGVAMATNKDDEDRFFPSSGILMFGKQGAGKDNVDYSNVMLTSEEEIKTTNPVATEQYGVVADNLQQQNTAPIVGAVNSQGALPGMVWQNRDVYLQGPIWAKIPHTDGNFHPSPLMGGFGLKHPPPQILIKNTPVPADPPTAFNQAKLNSFITQYSTGQVSAEIEWELQKENSKRWNPEIQYTSNYYKSTNVDFAVNTEGVYSEPRPIGTRYLTRNL

SEQ ID NO: 5061 - DNA, 2217 bp, Adeno-associated virus
  source 1..2217: mol_type = other DNA
atggctgctgacggttatcttccagattggctcgaggacaacctctctgagggcattcgcgagtggtgggacctgaaacctggagcccccaagcccaaggccaaccagcagaagcaggacgacggccggggtctggtgcttcctggctacaagtacctcggacccttcaacggactcgacaagggggagcccgtcaacgcggcggacgcagcggccctcgagcacgacaaggcctacgaccagcagctcaaagcgggtgacaatccgtacctgcggtataatcacgccgacgccgagtttcaggagcgtctgcaagaagatacgtcttttgggggcaacctcgggcgagcagtcttccaggccaagaagcgggttctcgaacctctcggtctggttgaggaagctgctaagacggctcctggaaagaagagaccggtagaaccgtcacctcagcgttcccccgactcctccacgggcatcggcaagaaaggccagcagcccgctagaaagagactgaactttgggcagactggcgactcagagtcagtccccgaccctcaaccaatcggagaacctccagcagcgccctctagtgtgggatctggtacaatggccgcaggcggtggcgcaccaatggcagacaataacgaaggtgccgacggagtgggtagttcctcgggaaattggcattgcgattccacatggctgggcgacagagtcatcaccaccagcacccgaacctgggccctgcccacctacaacaaccacctctacaagcaaatctccaacgggacctcgggaggcagcaccaacgacaacacctactttggctacagcaccccctgggggtattttgactttaacagattccactgccacttctcaccacgtgactggcagcgactcatcaacaacaactggggattccggcccaagagactcagcttcaagctcttcaacatccaggtcaaagaggtcacgcagaatgaaggcaccaagaccatcgccaataacctcaccagcaccatccaggtgtttacggactcggaataccagctgccgtacgtcctcggctctgcccaccagggctgcctgcctccgttcccggcggacgtcttcatgattcctcagtacggctacctgactctcaacaacggtagtcaggccgtgggacgttcctccttctactgcctggagtacttcccctctcagatgctgagaacgggcaacaacttttccttcagctacactttcgaggacgtgcctttccacagcagctacgcgcacagccagagtttggacaggctgatgaatcctctcatcgaccagtacctgtactacctgtcaagaacccagtctacgggaggcacagcgggaacccagcagctgctgttttctcaggccgggcctagcaacatgtcggctcaggccagaaactggctgcctggaccctgctacagacagcagcgcgtctccacgacactgtcgcaaaacaacaacagcaactttgcctggactggtgccaccaagtatcatctgaacggcagagactctctggtgaatccgggcgtcgccatggcaaccaacaaggacgacgaggaccgcttcttcccatccagcggcatcctcatgtttggcaagcagggagctggaaaagacaacgtggactatagcaacgtgatgctaaccagcgaggaagaaatcaagaccaccaaccccgtggccacagaacagtatggcgtggtggctgataacctacagcagcaaaacaccgctcctattgtgggggccgtcaacagccagggagccttacctggcatggtctggcagaaccgggacgtgtacctgcagggtcctatttgggccaagattcctcacacagatggcaactttcacccgtctcctttaatgggcggctttggacttaaacatccgcctcctcagatcctcatcaaaagcactcctgttcctgcggatcctccaacagcgttcaaccaggccaagctgaattctttcatcacgcagtacagcaccggacaagtcagcgtggagatcgagtgggagctgcagaaggagaacagcaagtgctggaacccagagattcagtatacttccaactactacaaatctacaaatgtggactttgctgttaatactgagggtgtttactctgagcctcgccccattggcactcgttacctcacccgtaatctgtaa

SEQ ID NO: 5062 - protein, 738 aa, Adeno-associated virus
MAADGYLPDWLEDNLSEGIREWWDLKPGAPKPKANQQKQDDGRGLVLPGYKYLGPFNGLDKGEPVNAADAAALEHDKAYDQQLKAGDNPYLRYNHADAEFQERLQEDTSFGGNLGRAVFQAKKRVLEPLGLVEEAAKTAPGKKRPVEPSPQRSPDSSTGIGKKGQQPARKRLNFGQTGDSESVPDPQPIGEPPAAPSSVGSGTMAAGGGAPMADNNEGADGVGSSSGNWHCDSTWLGDRVITTSTRTWALPTYNNHLYKQISNGTSGGSTNDNTYFGYSTPWGYFDFNRFHCHFSPRDWQRLINNNWGFRPKRLSFKLFNIQVKEVTQNEGTKTIANNLTSTIQVFTDSEYQLPYVLGSAHQGCLPPFPADVFMIPQYGYLTLNNGSQAVGRSSFYCLEYFPSQMLRTGNNFSFSYTFEDVPFHSSYAHSQSLDRLMNPLIDQYLYYLSRTQSTGGTAGTQQLLFSQAGPSNMSAQARNWLPGPCYRQQRVSTTLSQNNNSNFAWTGATKYHLNGRDSLVNPGVAMATNKDDEDRFFPSSGILMFGKQGAGKDNVDYSNVMLTSEEEIKTTNPVATEQYGVVADNLQQQNTAPIVGAVNSQGALPGMVWQNRDVYLQGPIWAKIPHTDGNFHPSPLMGGFGLKHPPPQILIKSTPVPADPPTAFNQAKLNSFITQYSTGQVSVEIEWELQKENSKCWNPEIQYTSNYYKSTNVDFAVNTEGVYSEPRPIGTRYLTRNL

SEQ ID NO: 5063 - protein, 738 aa, Adeno-associated virus
MAADGYLPDWLEDNLSEGIREWWDLKPGAPKPKANQQKQDDGRGLVLPGYKYLGPFNGLDKGEPVNAADAAALEHDKAYDQQLKAGDNPYLRYNHADAEFQERLQEDTSFGGNLGRAVFQAKKRVLEPLGLVEEAAKTAPGKKRPVEPSPQRSPDSSTGIGKKGQQPARKRLNFGQTGDSESVPDPQPIGEPPAAPSSVGSGTMAAGGGAPMADNNEGADGVGSSSGNWHCDSTWLGDRVITTSTRTWALPTYNNHLYKQISNGTSGGSTNDNTYFGYSTPWGYFDFNRFHCHFSPRDWQRLINNNWGFRPKRLSFKLFNIQVKEVTQNEGTKTIANNLTSTIQVFTDSEYQLPYVLGSAHQGCLPPFPADVFMIPQYGYLTLNNGSQAVGRSSFYCLEYFPSQMLRTGNNFSFSYTFEDVPFHSSYAHSQSLDRLMNPLIDQYLYYLSRTQSTGGTAGTQQLLFSQAGPSNMSAQARNWLPGPCYRQQRVSTTLSQNNNSNFAWTGATKYHLNGRDSLVNPGVAMATNKDDEDRFFPSSGILMFGKQGAGKDNVDYSNVMLTSEEEIKTTNPVATEQYGVVADNLQQQNTAPIVGAVNSQGALPGMVWQNRDVYLQGPIWAKIPHTDGNFHPSPLMGGFGLKHPPPQILIKSTPVPADPPTAFNQAKLNSFITQYSTGQVSVEIEWELQKENSKRWNPEIQYTSNYYKSTNVDFAVNTEGVYSEPRPIGTRYLTRNL

SEQ ID NO: 5064 - DNA, 2217 bp, Adeno-associated virus
  source 1..2217: mol_type = other DNA
atggctgctgacggttatcttccagattggctcgaggacaacctctctgagggcattcgcgagtggtgggacctgaaacctggagcccccaagcccaaggccaaccagcagaagcaggacgacggccggggtctggtgcttcctggctacaagtacctcggacccttcaacggactcgacaagggggagcccgtcaacgcggcggacgcagcggccctcgagcacgacaaggcctacgaccagcagctcaaagcgggtgacaatccgtacctgcggtataaccacgccgacgccgagtttcaggagcgtctgcaagaagatacgtcttttgggggcaacctcgggcgagcagtcttccaggccaagaagcgggttctcgaacctctcggtctggttgaggaagctgctaagacggctcctggaaagaagagaccggtagaaccgtcacctcagcgttcccccgactcctccacgggcatcggcaagaaaggccagcagcccgctagaaagagactgaactttgggcagactggcgactcagagtcagtccccgaccctcaaccaatcggagaaccaccagcaggcccctctggtctgggatctggtacaatggctgcaggcggtggcgcaccaatggctgacaataacgagggcgccgacggagtgggtaatgcctcaggaaattggcattgcgattccacatggctgggcgacagagtcatcaccaccagcacccgaacctgggctttgcccacctacaacaaccacctctacaagcaaatctccagtcagtcagcaggtagcaccaacgacaacgtctacttcggctacagcaccccctgggggtattttgacttcaacagattccactgtcacttctcaccacgtgactggcagcggctcatcaacaacaactggggattccggcccaagaagctcaacttcaagctgttcaacatccaggtcaaggaggtcacaacgaatgacggcgtcacgaccatcgccaataaccctaccagcacggttcaggtcttttcggactcggaataccagctgccctacgtcctcggctccgcacaccagggctgcctgcctccgttcccggcggacgtcttcatgattccccagtacggctacctgactctgaacaatggcagccaatcggtgggtcgttcctctttctactgcctggaatatttcccttctcaaatgctgagaacgggcaacaacttcaccttcagctacaccttcgaggacgttcccttccacagcagctacgcacacagccagagcctggaccggctgatgaatcctcttatcgaccagtacctgtattacctggccagaacacagagcaacgcaggaggcacagctggcaatcgggaactgcagttttatcagggcgggcctaccaccatggccgaacaagccaaaaactggctgcctggaccctgctacagacagcagcgcgtctccacgacactgtcgcaaaacaacaacagcaactttgcctggactggtgccaccaagtatcatctgaacggcagagactctctggtgaatccgggcgtcgccatggcaaccaacaaggacgacgaggaccgcttcttcccatccagcggcatcctcatgtttggcaagcagggagctggaaaagacaacgtggactatagcaacgtgatgctaaccagcgaggaagaaatcaagaccaccaaccccgtggccacagaacagtatggcgtggtggctgataacctacagcagcaaaacaccgctcctattgtgggggccgtcaacagccagggagccttacctggcatggtctggcagaaccgggacgtgtacctgcagggtcctatttgggccaagattcctcacacagatggcaactttcacccgtctcctttaatgggcggctttggacttaaacatccgcctcctcagatcctcatcaaaaacactcctgttcctgcggatcctccaacagcgttcaaccaggccaagctgaattctttcatcacgcagtacagcaccggacaagtcagcgtggagatcgagtgggagctgcagaaggagaacagcaagcgctggaacccagagattcagtatacttccaactactacaaatctacaaatgtggactttgctgttaatactgagggtgtttactctgagcctcgccccattggcactcgttacctcacccgtaatctgtaa

SEQ ID NO: 5065 - protein, 738 aa, Adeno-associated virus
MAADGYLPDWLEDNLSEGIREWWDLKPGAPKPKANQQKQDDGRGLVLPGYKYLGPFNGLDKGEPVNAADAAALEHDKAYDQQLKAGDNPYLRYNHADAEFQERLQEDTSFGGNLGRAVFQAKKRVLEPLGLVEEAAKTAPGKKRPVEPSPQRSPDSSTGIGKKGQQPARKRLNFGQTGDSESVPDPQPIGEPPAGPSGLGSGTMAAGGGAPMADNNEGADGVGNASGNWHCDSTWLGDRVITTSTRTWALPTYNNHLYKQISSQSAGSTNDNVYFGYSTPWGYFDFNRFHCHFSPRDWQRLINNNWGFRPKKLNFKLFNIQVKEVTTNDGVTTIANNPTSTVQVFSDSEYQLPYVLGSAHQGCLPPFPADVFMIPQYGYLTLNNGSQSVGRSSFYCLEYFPSQMLRTGNNFTFSYTFEDVPFHSSYAHSQSLDRLMNPLIDQYLYYLARTQSNAGGTAGNRELQFYQGGPTTMAEQAKNWLPGPCYRQQRVSTTLSQNNNSNFAWTGATKYHLNGRDSLVNPGVAMATNKDDEDRFFPSSGILMFGKQGAGKDNVDYSNVMLTSEEEIKTTNPVATEQYGVVADNLQQQNTAPIVGAVNSQGALPGMVWQNRDVYLQGPIWAKIPHTDGNFHPSPLMGGFGLKHPPPQILIKNTPVPADPPTAFNQAKLNSFITQYSTGQVSVEIEWELQKENSKRWNPEIQYTSNYYKSTNVDFAVNTEGVYSEPRPIGTRYLTRNL

SEQ ID NO: 5066 - DNA, 2208 bp, Adeno-associated virus
  source 1..2208: mol_type = other DNA
atggctgccgatggttatcttccagattggctcgaggacaacctctctgagggcattcacgagtggtgggacccgaaacctggagccccgaaacccaaagccaaccagcaaaagcaggacgacggccggggtctggtgcttcctggctacaagtacctcggacccttcaacggactcgacaagggggagcccgtcaacgcggcggacgcagcggccctcgagcacgacaaggcctacgaccagcagctcaaagcgggtgacaatccgtacctgcggtataatcacgccgacgccgagtttcaggagcgtctgcaagaagatacgtcttttgggggcaacctcgggcgagcagtcttccaggccaagaagcgggttctcgaacctctcggtctggttgaggaaggcgctaagacggctcctggaaagaagagaccggtagagccgtcaccacagcgttcccccgactcctccacgggcatcggcaagaaaggccagcagcccgccagaaagagactcaatttcggtcagactggcgactcagagtcagtccccgaccctcaacctatcggagaacctccagcagcgccctctagtgtgggatctggtacaatggctgcaggcggtggcgcaccaatggcagacaataacgaaggtgccgacggagtgggtagttcctcgggaaattggcattgcgattccacatggctgggcgacagagtcatcaccaccagcacccgaacctgggccctgcccacccacaacaaccacctctacaagcaaatctccaacgggacctcgggaggcagcaccaacgacaacgtctacttcggctacagcaccccctgggggtattttgacttcaacagattccactgtcacttctcaccacgtgaccggcagcgactcatcaacaacaactggggattccggcccaagagactcagcttcaagctcttcaacatccaggtcaaagaggtcacgcagaatgaaggcaccaagaccatcgccaataacctcaccagcaccatccaggtgtttacggactcggaataccagctgccgtacgtcctcggctctgcccaccagggctgcctgcctccgttcccggcggacgtcttcatgattcctcagtacggctacctgactctcaacaacggtagtcaggccgtgggacgttcctccttctactgcctggagtacttcccctctcagatgctgagaacgggcaacaacttttccttcagctacactttcgaggacgtgcctttccacagcagctacgcgcacagccagagtttggacaggctgatgaatcctctcatcgaccagtacctgtactacctgtcaagaacccagtctacggaaggcacagcgggaacccagcagttgctgttttctcaggccgggcctagcaacatgtcggctcaggccagaaactggctgcctggaccctgctacagacagcagcgcgtctccacgacactgtcgcaaaacaacaacagcaactttgcctggactggtgccaccaagtatcatctgaacggcagagactctctggtgaatccgggcgtcgccatggcaacccacaaggacgacgaggaacgcttcttcccttcgagcggagtcctgatttttggaaaaactggagcagctaataagactacactggaaaatgtgttaatgacaaatgaagaggaaattcgtcctaccaacccggtagccaccgaggaatacgggactgttagcagcaacctgcaggcggctaacactgcagcccagacacaagttgtcaacaaccagggagccttacctggtatggtctggcagaaccgggacgtgtacctgcagggtcccatctgggccaagattcctcacacggacggcaactttcacccgtctccgctgatgggcggctttggactgaagcatcctcagatcctgatcaaaaacactcctgttcctgctaatcccccggaggtgtttacgcctgccaagtttgcttctttcatcacacagtacagcaccggccaggtcagcgtggagatcgagtgggagctgcagaaggagaacagcaagcgctggaacccagagattcagtatacctccaattttgacaaacagactggtgtggactttgccgttgacagccagggtgtttattctgagcctcgccccattggtactcgttacctcacccgtaatctgtaa

SEQ ID NO: 5067 - protein, 735 aa, Adeno-associated virus
MAADGYLPDWLEDNLSEGIHEWWDPKPGAPKPKANQQKQDDGRGLVLPGYKYLGPFNGLDKGEPVNAADAAALEHDKAYDQQLKAGDNPYLRYNHADAEFQERLQEDTSFGGNLGRAVFQAKKRVLEPLGLVEEGAKTAPGKKRPVEPSPQRSPDSSTGIGKKGQQPARKRLNFGQTGDSESVPDPQPIGEPPAAPSSVGSGTMAAGGGAPMADNNEGADGVGSSSGNWHCDSTWLGDRVITTSTRTWALPTHNNHLYKQISNGTSGGSTNDNVYFGYSTPWGYFDFNRFHCHFSPRDRQRLINNNWGFRPKRLSFKLFNIQVKEVTQNEGTKTIANNLTSTIQVFTDSEYQLPYVLGSAHQGCLPPFPADVFMIPQYGYLTLNNGSQAVGRSSFYCLEYFPSQMLRTGNNFSFSYTFEDVPFHSSYAHSQSLDRLMNPLIDQYLYYLSRTQSTEGTAGTQQLLFSQAGPSNMSAQARNWLPGPCYRQQRVSTTLSQNNNSNFAWTGATKYHLNGRDSLVNPGVAMATHKDDEERFFPSSGVLIFGKTGAANKTTLENVLMTNEEEIRPTNPVATEEYGTVSSNLQAANTAAQTQVVNNQGALPGMVWQNRDVYLQGPIWAKIPHTDGNFHPSPLMGGFGLKHPQILIKNTPVPANPPEVFTPAKFASFITQYSTGQVSVEIEWELQKENSKRWNPEIQYTSNFDKQTGVDFAVDSQGVYSEPRPIGTRYLTRNL

SEQ ID NO: 5068 - protein, 738 aa, Adeno-associated virus
MAADGYLPDWLEDNLSEGIREWWDLKPGAPKPKANQQKQDDGRGLVLPGYKYLGPFNGLDKGEPVNAADAAALEHDKAYDQQLKAGDNPYLRYNHADAEFQERLQEDTSFGGNLGRAVFQAKKRVLEPLGLVEEGAKTAPGKKRPVEPSPQRSPDSSTGIGKKGQQPARKRLNFGQTGDSESVPDPQPIGEPPAAPSSVGSGTMAAGGGAPMADNNEGADGVGSSSGNWHCDSTWLGDRVITTSTRTWALPTYNNHLYKQISNGTSGGSTNDNTYFGYSTPWGYFDFNRFHCHFSPRDWQRPINNNWGFRPKRLSFKLFNIQVKEVTQNEGTKTIANNLTSTIQVFTDSEYQLPYVLGSAHQGCLPPFPADVFMIPQYGYLTLNNGSQAVGRSSFYCLEYFPSQMLRTGNNFSFSYPFEDVPFHSSYAHSQSLDRLMNPLIDQYLYYLSRTQSTGGTAGTQQLLFSQAGPSNMSAQARNWLPGPCYRQQRVSTTLSQNNNSNFAWTGATKYHLNGRDSLVNPGVAMATNKDDEDRFFPSSGILMFGKQGAGKDNVDYSNVMLTSEEEIKTTNPVATEQYGVVADNLQQQDTAPIVGAVNSQGALPGMVWQNRDVYLQGPIWAKIPHTDGNFHPSPLMGGFGLKHPPPQVLIKNTPVPADPPTAFNQAKLNSFITQYSTGQVSVEIEWELQKENSKRWNPEIQYTSNYYKSTNVDFAVNTEGVYSEPRPIGTRYLTRNL

SEQ ID NO: 5069 - DNA, 2217 bp, Adeno-associated virus
  source 1..2217: mol_type = other DNA
atggctgccgatggttatcttccagattggctcgaggacaacctctctgagggcattcgcgagtggtgggacctgaaacctggagccccgaaacccaaggccaaccagcaaaagcaggacgacggccggggtctggtgcttcctggctacaagtacctcggacccttcaacggactcgacaagggggagcccgtcaacgcggcggacgcagcggccctcgagcacgacaaggcctacgaccagcagctcaaagcgggtgacaatccgtacctgcggtataatcacgccgacgccgagtttcaggagcgtctgcaagaagatacgtcttttgggggcaacctcgggcgagcagtcttccaggccaagaagcgggttctcgaacctctcggtctggttgaggaaggcgctaagacggctcctggaaagaagagaccggtagagccgtcaccacagcgttcccccgactcctccacgggcatcggcaagaaaggccagcagcccgccagaaagagactcaatttcggtcagactggcgactcagagtcagtccccgaccctcaacctatcggagaacctccagcagcgccctctagtgtgggatctggtacaatggctgcaggcggtggcgcaccaatggcagacaataacgaaggtgccgacggagtgggtagttcctcgggaaattggcattgcgattccacatggctgggcgacagagtcatcaccaccagcacccgaacctgggccctgcccacctacaacaaccacctctacaagcaaatctccaacgggacctcgggaggcagcaccaacgacaacacctactttggctacagcaccccctgggggtattttgactttaacagattccactgccacttctcaccacgtgactggcagcgacccatcaacaacaactggggattccggcccaagagactcagcttcaagctcttcaacatccaggtcaaagaggtcacgcagaatgaaggcaccaagaccatcgccaataacctcaccagcaccatccaggtgtttacggactcggaataccagctgccgtacgtcctcggctctgcccaccagggctgcctgcctccgttcccggcggacgtcttcatgattcctcagtacggctacctgactctcaacaacggtagtcaggccgtgggacgttcctccttctactgcctggagtacttcccctctcagatgctgagaacgggcaacaacttttccttcagctaccctttcgaggacgtgcctttccacagcagctacgcgcacagccagagtttggacaggctgatgaatcctctcatcgaccagtacctgtactacctgtcaagaacccagtctacgggaggcacagcgggaacccagcagttgctgttttctcaggccgggcctagcaacatgtcggctcaggccagaaactggctgcctggaccctgctacagacagcagcgcgtctccacgacactgtcgcaaaacaacaacagcaactttgcctggactggtgccaccaagtatcatctgaacggcagagactctctggtgaatccgggcgtcgccatggcaaccaacaaggacgacgaggaccgcttcttcccatccagcggcatcctcatgtttggcaagcagggagctggaaaagacaacgtggactatagcaacgtgatgctaaccagcgaggaagaaatcaagaccaccaaccccgtggccacagaacagtatggcgtggtggctgataacctacagcagcaagacaccgctcctattgtgggggccgtcaacagccagggagccttacctggcatggtctggcagaaccgggacgtgtacctgcagggtcctatttgggccaagattcctcacacagatggcaactttcacccgtctcctttaatgggcggctttggacttaaacatccgcctcctcaggtcctcatcaaaaacactcctgttcctgcggatcctccaacagcgttcaaccaggccaagctgaattctttcatcacgcagtacagcaccggacaagtcagcgtggagatcgagtgggagctgcagaaggagaacagcaagcgctggaacccagagattcagtatacttccaactactacaaatctacaaatgtggactttgctgttaatactgagggtgtttactctgagcctcgccccattggcactcgttacctcacccgtaatctgtaa

SEQ ID NO: 5070 - DNA, 2214 bp, Adeno-associated virus
  source 1..2214: mol_type = other DNA
atggctgctgacggttatcttccagattggctcgaggacaacctctctgagggcattcgcgagtggtgggacctgaaacctggagcccccaagcccaaggccaaccagcagaagcaggacgacggccggggtctggtgcttcctggctacaagtacctcggacccttcaacggactcgacaagggggagcccgtcaacgcggcggacgcagcggccctcgagcacgacaaggcctacgaccagcagctcaaagcgggtgacaatccgtacctgcggtataaccacgccgacgccgagttccaggagcgtctgcaagaagatacgtcttttgggggcaacctcgggcgagcagtcttccaggccaagaagcgggttctcgaacctctcggtctggctgaggaagctgctaagacggctcctggaaagaagagaccggtagaaccgtcacctcagcgttcccccgactcctccacgggcatcggcaagaaaggccagcagcccgctagaaagagactgaactttgggcagactggcgactcagagtcagtccccgaccctcaaccaatcggagagccaccagcaggcccctctggtctgggatctggtacaatggctgcaggcggtggcgcaccaatggctgacaataacaagggcgccgacggagtgggtaatgcctcaggaaattggcattgcgattccacatggctgggcgacagagtcatcaccaccagcacccgaacctgggctttgcccacctacaacaaccacctctacaagcaaatctccagtcagtcagcaggtagcaccaacgacaacgtctacttcggctacagcaccccctgggggtattttgacttcaacagattccactgtcacttctcaccacgtgactggcagcggctcatcaacaacaactggggattccggcccaagaagctcaacttcaagctgttcaacatccaggtcaaggaggtcacaacgggtgacggcgtcacgaccatcgccaataaccttaccagcacggttcaggtcttttcggactcggaataccagctgccctacgtcctcggctccgcacaccagggctgcctgcctccgttcccggcggacgtcttcatgattccccagtacggctacctgactctgaacaatgacagccaatcggtgggtcgttcctctttctactgcctggaatatttcccttctcaaatgctgagaacgggcaacaacttcaccttcagctacaccttcgaggacgttcccttccacagcagctacgcacacagccagagcctggaccggctgatgaatcctcttatcgaccagtacctgtattacctggccagaacacagagcaacgcaggaggcacagctggcaatcgggaactgcagttttatcagggcgggcctaccaccatggccgaacaagccaaaaactggctgcctggaccttgcttccggcaacaaagagtctccaagacgctggatcaaaacaacaacagcaactttgcttggactggtgccaccaaataccatctaaatggaagaaattcattggttaatcccggtgtcgccatggcaacccacaaggacgacgaggaacgcttcttcccttcgagcggagtcctgatttttggaaaaactggagcagctaataagactacactggaaaatgtgttaatgacaaatgaagaggaaattcgtcctaccaacccggtagccaccgaggaatacgggactgttagcagcaacctgcaggcggctaacactgcagcccagacacaagttgtcaacaaccagggagccttacctggtatggtctggcagaaccgggacgtgtacctgcagggtcccatctgggccaagattcctcacacggacggcaactttcacccgtctccgctgatgggcggctttggactgaagcatccgcctcctcagatcctgatcaaaaacactcctgttcctgctaatcccccggaggtgtttacgcctgccaagtttgcttctttcatcacacagtacagcaccggccaggtcagcgtggagatcgagtgggagctgcagaaggagaacagcaagcgctggaacccagagattcagtatacctccaattttgacaaacagactggtgtggactttgccgttgacagccagggtgtttattctgagcctcgccccattggtactcgttacctcacccgtaatctgtaa

SEQ ID NO: 5071 - protein, 737 aa, Adeno-associated virus
MAADGYLPDWLEDNLSEGIREWWDLKPGAPKPKANQQKQDDGRGLVLPGYKYLGPFNGLDKGEPVNAADAAALEHDKAYDQQLKAGDNPYLRYNHADAEFQERLQEDTSFGGNLGRAVFQAKKRVLEPLGLAEEAAKTAPGKKRPVEPSPQRSPDSSTGIGKKGQQPARKRLNFGQTGDSESVPDPQPIGEPPAGPSGLGSGTMAAGGGAPMADNNKGADGVGNASGNWHCDSTWLGDRVITTSTRTWALPTYNNHLYKQISSQSAGSTNDNVYFGYSTPWGYFDFNRFHCHFSPRDWQRLINNNWGFRPKKLNFKLFNIQVKEVTTGDGVTTIANNLTSTVQVFSDSEYQLPYVLGSAHQGCLPPFPADVFMIPQYGYLTLNNDSQSVGRSSFYCLEYFPSQMLRTGNNFTFSYTFEDVPFHSSYAHSQSLDRLMNPLIDQYLYYLARTQSNAGGTAGNRELQFYQGGPTTMAEQAKNWLPGPCFRQQRVSKTLDQNNNSNFAWTGATKYHLNGRNSLVNPGVAMATHKDDEERFFPSSGVLIFGKTGAANKTTLENVLMTNEEEIRPTNPVATEEYGTVSSNLQAANTAAQTQVVNNQGALPGMVWQNRDVYLQGPIWAKIPHTDGNFHPSPLMGGFGLKHPPPQILIKNTPVPANPPEVFTPAKFASFITQYSTGQVSVEIEWELQKENSKRWNPEIQYTSNFDKQTGVDFAVDSQGVYSEPRPIGTRYLTRNL

SEQ ID NO: 5072 - DNA, 2217 bp, Adeno-associated virus
  source 1..2217: mol_type = other DNA
atggctgccgatggttatcttccagattggctcgaggacaacctctctgagggcattcgcgagtggtgggacctgaaacctggagccccgaaacccaaagccaaccagcaaaagcaggacgacggccggggtctggtgcttcctggctacaagtacctcggacccttcaacggactcgacaagggggagcccgtcaacgcggcggacgcagcggccctcgagcacgacaaggcctacgaccagcagctcaaagcgggtgacaatccgtacctgcggtataatcacgccgacgccgagtttcaggagcgtctgcaagaagatacgtcttttgggggcaacctcgggcgagcagtcttccaggccaagaagcgggttctcgaacctctcggtctggttgaggaaggcgctaagacggctcctggaaagaagagaccggtagagccgtcaccacagcgttcccccgactcctccacgggcatcggcaagaaaggccagcagcccgccagaaagagactcaatttcggtcagactggcgactcagagtcagtccccgaccctcaacctatcggagaacctccagcagcgccctctagtgtgggatctggtacaatggctgcaggcggtggcgcaccaatggcagacaataacgaaggtgccgacggagtgggtagttcctcgggaaattggcattgcgattccacatggctgggcgacagagtcatcaccaccagcacccgaacctgggccctgcccacctacaacaaccacctctacaagcaaatctccaacgggacctcgggaggcagcaccaacgacaacacctactttggctacagcaccccctgggggtattttgactttaacagattccactgccacttctcaccacgtgactggcagcgactcatcaacaacaactggggattccggcccaagagactcagcttcaagctcttcaacatccaggtcaaagaggtcacgcagaatgaaggcaccaagaccatcgccaataacctcaccagcaccatccaggtgtttacggactcggaataccagctgccgtacgtcctcggctctgcccaccagggctgcctgcctccgttcccggcggacgtcttcatgattcctcagtacggctacctgactctcaacaacggtagtcaggccgtgggacgttcctccttctactgcctggagtacttcccctctcagatgctgagaacgggcaacaacttttccttcagctacactttcgaggacgtgcctttccacagcagctacgcgcacagccagagtttggacaggctgatgaatcctctcatcgaccagtacctgtactacctgtcaagaacccagtctacgggaggcacagcgggaacccagcagttgctgttttctcaggccgggcctagcaacatgtcggctcaggccagaaactggctgcctggaccctgctacagacagcagcgcgtctccacgacactgtcgcaaaacaacaacagcaactttgcctggactggtgccaccaagtatcatctgaacggcagagactctctggtgaatccgggcgtcgccatggcaaccaacaaggacgacgaggaccgcttcttcccatccagcggcatcctcatgtttggcaagcagggagctggaaaagacaacgtggactatagcaacgtgatgctaaccagcgaggaagaaatcaagaccaccaaccccgtggccacagaacagtatggcgtggtggctgataacctacagcagcaaaacaccgctcctattgtgggggccgtcaacagccagggagccttacctggcatggtctggcagaaccgggacgtgtacctgcagggtcctatttgggccaagattcctcacacagatggcaactttcacccgtctcctttaatgggcggctttggacttaaacatccgcctcctcagatcctcatcaaaaacactcctgttcctgcggatcctccaacagcgttcaaccaggccaagctgaattctttcatcacgcagtacagcaccggacaagtcagcgtggagatcgtgtgggagctgcagaaggagaacagcaagcgcaggaacccagagattcagtatacttccaactactacaaatctacaaatgtggactttgctgttaatactgagggtgtttactctgagcctcgccccattggcactcgttacctcacccgtaatctgtaa

SEQ ID NO: 5073 - protein, 738 aa, Adeno-associated virus
MAADGYLPDWLEDNLSEGIREWWDLKPGAPKPKANQQKQDDGRGLVLPGYKYLGPFNGLDKGEPVNAADAAALEHDKAYDQQLKAGDNPYLRYNHADAEFQERLQEDTSFGGNLGRAVFQAKKRVLEPLGLVEEGAKTAPGKKRPVEPSPQRSPDSSTGIGKKGQQPARKRLNFGQTGDSESVPDPQPIGEPPAAPSSVGSGTMAAGGGAPMADNNEGADGVGSSSGNWHCDSTWLGDRVITTSTRTWALPTYNNHLYKQISNGTSGGSTNDNTYFGYSTPWGYFDFNRFHCHFSPRDWQRLINNNWGFRPKRLSFKLFNIQVKEVTQNEGTKTIANNLTSTIQVFTDSEYQLPYVLGSAHQGCLPPFPADVFMIPQYGYLTLNNGSQAVGRSSFYCLEYFPSQMLRTGNNFSFSYTFEDVPFHSSYAHSQSLDRLMNPLIDQYLYYLSRTQSTGGTAGTQQLLFSQAGPSNMSAQARNWLPGPCYRQQRVSTTLSQNNNSNFAWTGATKYHLNGRDSLVNPGVAMATNKDDEDRFFPSSGILMFGKQGAGKDNVDYSNVMLTSEEEIKTTNPVATEQYGVVADNLQQQNTAPIVGAVNSQGALPGMVWQNRDVYLQGPIWAKIPHTDGNFHPSPLMGGFGLKHPPPQILIKNTPVPADPPTAFNQAKLNSFITQYSTGQVSVEIVWELQKENSKRRNPEIQYTSNYYKSTNVDFAVNTEGVYSEPRPIGTRYLTRNL

SEQ ID NO: 5074 - protein, 738 aa, Adeno-associated virus
MAADGYLPDWLEDNLSEGIREWWDLKPGAPKPKANQQKQDDGRGLVLPGYKYLGPFNGLDKGEPVNAADAAALEHDKAYDQQLKAGDNPYLRYNHADAEFQERLQEDTSFGGNLGRAVFQAKKRVLEPLGLVEEGAKTAPGKKRPVEPSPQRSPDSSTGIGKKGQQPARKRLNFGQTGDSESVPDPQPIGEPPAAPSSVGSGTMAAGGGAPMADNNEGADGVGSSSGNWHCDSTWLGDRVITTSTRTWALPTYNNHLYKQISNGTSGGSTNDNTYFGYSTPWGYFDFNRFHCHFSPRDWQRLINNNWGFRPKRLSFKLFNIQVKEVTQNEGTKTIANNLTSTIQVFTDSEYQLPYVLGSAHQGCLPPFPADVFMIPQYGYLTLNNGSQAVGRSSFYCLEYFPSQMLRTGNNFSFSYTFEDVPFHSSYAHSQSLDRLMNPLIDQYLYYLSRTQSTGGTAGTQQLLFSQAGPSNMSAQARNWLPGPCYRQQRVSTTLSQNNNSNFAWTGATKYHLNGRDSLVNPGVAMATNKDDEDRFFPSSGILMFGKQGAGKDNVDYSNVMLTSEEEIKTTNPVATEQYGVVADNLQQQNTAPIVGAVNSQGALPGMVWQNRDVYLQGPIWAKIPHTDGNFHPSPLMGGFGLKHPPPQILIKNTPVPADPPTAFNQAKLNSFITQYSTGQVSVEIEWELQKENSKRWNPEIQYTSNYYKSTNVDFAVNTEGVYSEPRPIGTRYLTRNL

SEQ ID NO: 5075 - protein, 738 aa, Adeno-associated virus
MAADGYLPDWLEDNLSEGIREWWDLKPGAPKPKANQQKQDDGRGLVLPGYKYLGPFNGLDKGEPVNAADAAALEHDKAYDQQLKAGDNPYLRYNHADAEFQERLQEDTSFGGNLGRAVFQAKKRVLEPLGLVEEGAKTAPGKKRPVEPSPQRSPDSSTGIGKKGQQPARKRLNFGQTGDSESVPDPQPIGEPPAAPSSVGSGTMAAGGGAPMADNNEGADGVGSSSGNWHCDSTWLGDRVITTSTRTWALPTYNNHLYKQISNGTSGGSTNDNTYFGYSTPWGYFDFNRFHCHFSPRDWQRLINNNWGFRPKRLSFKLFNIQVKEVTQNEGTKTIANNLTSTIQVFTDSEYQLPYVLGSAHQGCLPPFPADVFMIPQYGYLTLNNGSQAVGRSSFYCLEYFPSQMLRTGNNFSFSYTFEDVPFHSSYAHSQSLDRLMNPLIDQYLYYLSRTQSTGGTAGTQQLLFSQAGPSNMSAQARNWLPGPCYRQQRVSTTLSQNNNSNFAWTGATKYHLNGRDSLVNPGVAMATNKDDEDRFFPSSGILMFGKQGAGKDNVDYSNVMLTSEEEIKTTNPVATEQYGVVADNLQQQNTAPIVGAVNSQGALPGMVWQNRDVYLQGPIWAKIPHTDGNFHPSPLMGGFGLKHPPPQILIKNTPVPADPPTAFNQAKLNSFITQYSTGQVSVEIVWELQKENSKRWNPEIQYTSNYYKSTNVDFAVNTEGVYSEPRPIGTRYLTRNL

SEQ ID NO: 5076 - protein, 738 aa, Adeno-associated virus; identical to SEQ ID NO: 5074

SEQ ID NO: 5077 - DNA, 2214 bp, Adeno-associated virus
  source 1..2214: mol_type = other DNA
atggctgctgacggttatcttccagattggctcgaggacaacctctctgagggcattcgcgagtggtgggacctgaaacctggagcccccaagcccaaggccaaccagcagaagcaggacgacggccggggtctggtgcttcctggctacaagtacctcggacccttcaacggactcgacaagggggagcccgtcaacgcggcggacgcagcggccctcgagcacgacaaggcctacgaccagcagctcaaagcgggtgacaatccgtacctgcggtataaccacgccgacgccgagtttcaggagcgtctgcaagaagatacgtcttttgggggcaacctcgggcgagcagtcttccaggccaagaagcgggttctcgaacctctcggtctggttgaggaagctgctaagacggctcctggaaagaagagaccggtagaaccgtcacctcagcgttcccccgactcctccacgggcatcggcaagaaaggccagcagcccgctagaaagagactgaactttgggcagactggcgactcagagtcagtccccgaccctcaaccaatcggagaaccaccagcaggcccctctggtctgggatctggtacaatggctgcaggcggtggcgctccaatggcagacaataacgaaggcgccgacggagtgggtaatgcctcaggaaattggcattgcgattccacatggctgggcgacagagtcatcaccaccagcacccgaacctgggctttgcccacctacaacaaccacctctacaagcaaatctccagtcagtcagcaggtagcaccaacgacaacgtctacttcggctacagcaccccctgggggtattttgacttcaacagattccactgtcacttctcaccacgtgactggcagcggctcatcaacaacaactggggattccggcccaagaagctcaacttcaagctgttcaacatccaggtcaaggaggtcacaacgaatgacggcgtcacgaccatcgccaataaccttaccagcacggttcaggtcttttcggactcggaataccagctgccctacgtcctcggctccgcacaccagggctgcctgcctccgttcccggcggacgtcttcatgattccccagtacggctacctgactctgaacaatggcagccaatcggtgggtcgttcctctttctactgcctggaatatttcccttctcaaatgctgagaacgggcaacaacttcaccttcagctacaccttcgaggacgttcccttccacagcagctacgcacacagccagagcctggaccggctgatgaatcctcttatcgaccagtacctgtattacctggccagaacacagagcaacgcaggaggcacagctggcaatcgggaactgcagttttatcagggcgggcctaccaccatggccgaacaagccaaaaactggctgcctagaccttgcttccggcaacaaagagtctccaagacgctggatcaaaacaacaacagcaactttgcttggactggtgccaccaaataccatctaaatggaagaaattcattggttaatcccggtgtcgccatggcaacccacaaggacgacgaggaacgcttcttcccttcgagcggagtcctgatttttggaaaaactggagcagctaataagactacactggaaaatgtgttaatgacaaatgaagaggaaattcgtcctaccaacccggtagccaccgaggaatacgggactgttagcagcaacctgcaggcggctaacactgcagcccagacacaagttgtcaacaaccagggagccttacctggtatggtctggcagaaccgggacgtgtacctgcagggtcccatctgggccaagattcctcacacggacggcaactttcacccgtctccgctgatgggcggctttggactgaagcatccgcctcctcagatcctgatcaaaaacactcctgttcctgctaatcccccggaggtgtttacgcctgccaagtttgcttctttcatcacacagtacagcaccggccaggtcagcgtggagatcgagtgggagctgcagaaggagaacagcaagcgctggaacccagagattcagtatacctccaattttgacaaacagactggtgtggactttgccgttgacagccagggtgtttattctgagcctcgccccattggtactcgttacctcacccgtaatctgtaa

SEQ ID NO: 5078 - protein, 737 aa, Adeno-associated virus
MAADGYLPDWLEDNLSEGIREWWDLKPGAPKPKANQQKQDDGRGLVLPGYKYLGPFNGLDKGEPVNAADAAALEHDKAYDQQLKAGDNPYLRYNHADAEFQERLQEDTSFGGNLGRAVFQAKKRVLEPLGLVEEAAKTAPGKKRPVEPSPQRSPDSSTGIGKKGQQPARKRLNFGQTGDSESVPDPQPIGEPPAGPSGLGSGTMAAGGGAPMADNNEGADGVGNASGNWHCDSTWLGDRVITTSTRTWALPTYNNHLYKQISSQSAGSTNDNVYFGYSTPWGYFDFNRFHCHFSPRDWQRLINNNWGFRPKKLNFKLFNIQVKEVTTNDGVTTIANNLTSTVQVFSDSEYQLPYVLGSAHQGCLPPFPADVFMIPQYGYLTLNNGSQSVGRSSFYCLEYFPSQMLRTGNNFTFSYTFEDVPFHSSYAHSQSLDRLMNPLIDQYLYYLARTQSNAGGTAGNRELQFYQGGPTTMAEQAKNWLPRPCFRQQRVSKTLDQNNNSNFAWTGATKYHLNGRNSLVNPGVAMATHKDDEERFFPSSGVLIFGKTGAANKTTLENVLMTNEEEIRPTNPVATEEYGTVSSNLQAANTAAQTQVVNNQGALPGMVWQNRDVYLQGPIWAKIPHTDGNFHPSPLMGGFGLKHPPPQILIKNTPVPANPPEVFTPAKFASFITQYSTGQVSVEIEWELQKENSKRWNPEIQYTSNFDKQTGVDFAVDSQGVYSEPRPIGTRYLTRNL

SEQ ID NO: 5079 - DNA, 2214 bp, Adeno-associated virus
  source 1..2214: mol_type = other DNA
atggctgctgacggttatcttccagattggctcgaggacaacctctctgagggcattcgcgagtggtgggacctgaaacctggagcccccaagcccaaggccaaccagcagaagcaggacgacggccggggtctggtgcttcctggctacaagtacctcggacccttcaacggactcgacaagggggagcccgtcaacgcggcggacgcagcggccctcgagcacgacaaggcctacgaccagcagctcaaagcgggtgacaatccgtacctgcggtataaccatgccgacgccgagtttcaggagcgtctgcaagaagatacgtcttttgggggcaacctcgggcgagcagtcctccaggccaagaagcgggttctcgaacctctcggtctggttgaggaagctgctaagacggctcctggaaagaagagaccggtagaaccgtcacctcagcgttcccccgactcctccacgggcatcggcaagaaaggccagcagcccgctagaaagagactgaactttgggcagactggcgactcagagtcagtccccgaccctcaaccaatcggagaaccaccagcaggcccctctggtctgggatctggtacaatggctgcaggcggtggcgctccaatggcagacaataacgaaggcgccgacggagtgggtaatgcctcaggaaattggcattgcgattccacatggctgggcgacagagtcatcaccaccagcacccgaacctgggctttgcccacctacaacaaccacctctacaagcaaatctccagtcagtcagcaggtagcaccaacgacaacgtctacttcggctacagcaccccctgggggtattttgacttcaacagattccactgtcacttctcaccacgtgactggcagcggctcatcaacaacaactggggattccggcccaagaagctcaacttcaagctgttcaacatccaggtcaaggaggtcacaacgaatgacggcgtcacgaccatcgccaataaccttaccagcacggttcaggtcttttcggactcggaataccagctgccctacgtcctcggctccgcacaccagggctgcctgcctccgttcccggcggacgtcttcatgattccccagtacggctacctgactctgaacaatggcagccaatcggtgggtcgttcctctttctactgcctggaatatttcccttctcaaatgctgagaacgggcaacaacttcaccttcagctacaccttcgaggacgttcccttccacagcagctacgcacacagccagagcctggaccggctgatgaatcctcttatcgaccagtacctgtattacctggccagaacacagagcaacgcaggaggcacagctggcaatcgggaactgcagttttatcagggcgggcctaccaccatggccgaacaagccaaaaactggctgcctggaccttgcttccggcaacaaagagtctccaagacgctggatcaaaacaacaacagcaactttgcttggactggtgccaccaaataccatctaaatggaagaaattcattggttaatcccggtgtcgccatggcaacccacaaggacgacgaggaacgcttcttcccttcgagcggagtcctgatttttggaaaaactggagcagctaataagactacactggaaaatgtgttaatgacaaatgaagaggaaattcgtcctaccaacccggtagccaccgaggaatacgggactgttagcagcaacctgcaggcggctaacactgcagcccagacacaagttgtcaacaaccagggagccttacctggtatggtctggcagaaccgggacgtgtacctgcagggtcccatctgggccaagattcctcacacggacggcaactttcacccgtctccgctgatgggcggctttggactgaagcatccgcctcctcagatcctgatcaaaaacactcctgttcctgctaatcccccggaggtgtttacgcctgccaagtttgcttctttcatcacacagtacagcaccggccaggtcagcgtggagatcgagtgggagctgcagaaggagaacagcaagcgctggaacccagagattcagtatacctccaattttgacaaacagactggtgtggactttgccgttgacagccagggtgtttattctgagcctcgccccattggtactcgttacctcacccgtaatctgtaa

SEQ ID NO: 5080 - protein, 737 aa, Adeno-associated virus; identical to SEQ ID NO: 5040

SEQ ID NO: 5081 - protein, 737 aa, Adeno-associated virus
MAADGYLPDWLEDNLSEGIREWWDLKPGAPKPKANQQKQDDGRGLVLPGYKYLGPFNGLDKGEPVNAADAAALEHDKAYDQQLKAGDNPYLRYNHADAEFQERLQEDTSFGGNLGRAVLQAKKRVLEPLGLVEEAAKTAPGKKRPVEPSPQRSPDSSTGIGKKGQQPARKRLNFGQTGDSESVPDPQPIGEPPAGPSGLGSGTMAAGGGAPMADNNEGADGVGNASGNWHCDSTWLGDRVITTSTRTWALPTYNNHLYKQISSQSAGSTNDNVYFGYSTPWGYFDFNRFHCHFSPRDWQRLINNNWGFRPKKLNFKLFNIQVKEVTTNDGVTTIANNLTSTVQVFSDSEYQLPYVLGSAHQGCLPPFPADVFMIPQYGYLTLNNGSQSVGRSSFYCLEYFPSQMLRTGNNFTFSYTFEDVPFHSSYAHSQSLDRLMNPLIDQYLYYLARTQSNAGGTAGNRELQFYQGGPTTMAEQAKNWLPGPCFRQQRVSKTLDQNNNSNFAWTGATKYHLNGRNSLVNPGVAMATHKDDEERFFPSSGVLIFGKTGAANKTTLENVLMTNEEEIRPTNPVATEEYGTVSSNLQAANTAAQTQVVNNQGALPGMVWQNRDVYLQGPIWAKIPHTDGNFHPSPLMGGFGLKHPPPQILIKNTPVPANPPEVFTPAKFASFITQYSTGQVSVEIEWELQKENSKRWNPEIQYTSNFDKQTGVDFAVDSQGVYSEPRPIGTRYLTRNL

SEQ ID NO: 5082 - DNA, 2217 bp, Adeno-associated virus
  source 1..2217: mol_type = other DNA
atggctgccgatggttatcttccagattggctcgaggacaacctctctgagggcattcgcgagtggtgggacctgaaacctggagccccgaaacccaaagccaaccagcaaaagcaggacgacggccggggtctggtgcttcctggctacaagtacctcggacccttcaacggactcgacaagggggagcccgtcaacgcggcggacgcagcggccctcgagcacgacaaggcctacgaccagcagctcaaagcgggtgacaatccgtacctgcggtataatcacgccgacgccgagtttcaggagcgtctgcaagaagatacgtcttttgggggcaacctcgggcgagcagtcttccaggccaagaagcgggttctcgaacctctcggtctggttgaggaaggcgctaagacggctcctggaaagaagagaccggtagagccgtcaccacagcgttcccccgactcctccacgggcatcggcaagaaaggccagcagcccgccagaaagagactcaatttcggtcagactggcgactcagagtcagtccccgaccctcaacctatcggagaacctccagcagcgccctctagtgtgggatctggtacaatggctgcaggcggtggcgcaccaatggcagacaataacgaaggtgccgacggagtgggtagttcctcgggaaattggcattgcgattccacatggctgggcgacagagtcatcaccaccagcacccgaacctgggccctgcccacctacaacaaccacctctacaagcaaatctccaacgggacctcgggaggcagcaccaacgacaacacctactttggctacagcaccccctgggggtattttgactttaacagattccactgccacttctcaccacgtgactggcagcgactcatcaacaacaactggggattccggcccaagagactcagcttcaagctcttcaacatccaggtcaaagaggtcacgcagaatgaaggcaccaagaccatcgccaataacctcaccagcaccatccaggtgtttacggactcggaataccagctgccgtacgtcctcggctctgcccaccagggctgcctgcctccgttcccggcggacgtcttcatgattcctcagtacggctacctgactctcaacaacggtagtcaggccgtgggacgttcctccttctactgcctggagtacttcccctctcagatgctgagaacgggcaacaacttttccttcagctacactttcgaggacgtgcctttccacagcagctacgcgcacagccagagtttggacaggctgatgaatcctctcatcgaccagtacctgtactacctgtcaagaacccagtctacgggaggcacagcgggaacccagcagttgctgttttctcaggccgggcctagcaacatgtcggctcaggccagaaactggctgcctggaccctgctacagacagcagcgcgtctccacgacactgtcgcaaaacaacaacagcaactttgcctggactggtgccaccaagtatcatctgaacggcagagactctctggtgaatccgggcgtcgccatggcaaccaacaaggacgacgaggaccgcttcttcccacccagcggcatcctcatgtttggcaagcagggagctggaaaagacaacgtggactatagcaacgtgatgctaaccagcgaggaagaaatcaagaccaccaaccccgtggccacagaacagtatggcgtggtggctgataacctacagcagcaaaacaccgctcctattgtgggggccgtcaacagccagggagccttacctggcatggtctggcagaaccgggacgtgtacctgcagggtcctatttgggccaagattcctcacacagatggcaactttcacccgtctcctttaatgggcggctttggacttaaacatccgcctcctcagatcctcatcaaaaacactcctgttcctgcggatcctccaacagcgttcaaccaggccaagctgaattctttcatcacgcagtacagcaccggacaagtcagcgtggtgatcgagtgggagctgcagaaggagaacagcaagcgctggaacccagagattcagtatacttccaactactacaaatctacaaatgtggactttgctgttaatactgagggtgtttactctgagcttcgccccattggcactcgttacctcacccgtaatctgtaa

SEQ ID NO: 5083 - protein, 738 aa, Adeno-associated virus
MAADGYLPDWLEDNLSEGIREWWDLKPGAPKPKANQQKQDDGRGLVLPGYKYLGPFNGLDKGEPVNAADAAALEHDKAYDQQLKAGDNPYLRYNHADAEFQERLQEDTSFGGNLGRAVFQAKKRVLEPLGLVEEGAKTAPGKKRPVEPSPQRSPDSSTGIGKKGQQPARKRLNFGQTGDSESVPDPQPIGEPPAAPSSVGSGTMAAGGGAPMADNNEGADGVGSSSGNWHCDSTWLGDRVITTSTRTWALPTYNNHLYKQISNGTSGGSTNDNTYFGYSTPWGYFDFNRFHCHFSPRDWQRLINNNWGFRPKRLSFKLFNIQVKEVTQNEGTKTIANNLTSTIQVFTDSEYQLPYVLGSAHQGCLPPFPADVFMIPQYGYLTLNNGSQAVGRSSFYCLEYFPSQMLRTGNNFSFSYTFEDVPFHSSYAHSQSLDRLMNPLIDQYLYYLSRTQSTGGTAGTQQLLFSQAGPSNMSAQARNWLPGPCYRQQRVSTTLSQNNNSNFAWTGATKYHLNGRDSLVNPGVAMATNKDDEDRFFPPSGILMFGKQGAGKDNVDYSNVMLTSEEEIKTTNPVATEQYGVVADNLQQQNTAPIVGAVNSQGALPGMVWQNRDVYLQGPIWAKIPHTDGNFHPSPLMGGFGLKHPPPQILIKNTPVPADPPTAFNQAKLNSFITQYSTGQVSVVIEWELQKENSKRWNPEIQYTSNYYKSTNVDFAVNTEGVYSELRPIGTRYLTRNL

SEQ ID NO: 5084 - DNA, 2214 bp, Adeno-associated virus
  source 1..2214: mol_type = other DNA
atggctgctgacggttatcttccagattggctcgaggacaacctctctgagggcattcgcgagtggtgggacctgaaacctggagcccccaagcccaaggccaaccagcagaagcaggacgacggccggggtctggtgcttcctggctacaagtacctcggacccttcaacggactcgacaagggggagcccgtcaacgcggcggacgcagcggccctcgagcacgacaaggcctacgaccagcagctcaaagcgggtgacaatccgtacctgcggtataaccacgccgacgccgagtttcaggagcgtctgcaagaagatacgtcttttgggggcaacctcgggcgagcagtcttccaggccaagaagcgggttctcgaacctctcggtctggttgaggaagctgctaagacggctcctggaaagaagagaccggtagaaccgtcacctcagcgttcccccgactcctccacgggcatcggcaagaaaggccagcagcccgctagaaagagactgaactttgggcagactggcgactcagagtcagtccccgaccctcaaccaatcggagaaccaccagcaggcccctctggtctgggatctggtacaatggctgcaggcggtggcgccccaatggcagacaataacgaaggcgccgacggagtgggtaatgcctcaggaaattggcattgcgattccacatggctgggcgacagagtcatcaccaccagcacccgaacctgggctttgcccacctacaacaaccacctctacaagcaaatctccagtcagtcagcaggtagcaccaacgacaacgtctacttcggctacagcaccccctgggggtattttgacttcaacagattccactgtcacttctcaccacgtgactggcagcggctcatcaacaacaactggggattccggcccaagaagctcaacttcaagctgttcaacatccaggtcaaggaggtcacaacgaatgacggcgtcacgaccatcgccaataaccttaccagcacggttcaggtcttttcggactcggaataccagctgccctacgtcctcggctccgcacaccagggctgcctgcctccgttcccggcggacgtcttcatgattccccagtacggctacctgactctgaacaatggcagccaatcggtgggtcgttcctctttctactgcctggaatatttcccttctcaaatgctgagaacgggcaacaacttcaccatcagctacaccttcgaggacgttcccttccacagcagctacgcacacagccagagcctggaccggctgatgaatcctcttatcgaccagtacctgtattacctggccagaacacagagcaacgcaggaggcacagctggcaatcaggaactgcagttttatcagggcgggcctaccaccatggccgaacaagccaaaaactggctgcctggaccttgcttccggcaacaaagagtctccaagacgctggatcaaaacaacaacagcaactttgcttggactggtgccaccaaataccatctaaatggaagaaattcattggttaatcccggtgtcgccatggcaacccacaaggacgacgaggaacgcttcttcccttcgagcggagtcctgatttttggaaaaactggagcagctaataagactacactggaaaatgtgttaatgacaaatgaagaggaaattcgtcctaccaacccggtagccaccgaggaatacgggactgttagcagcaacctgcaggcggctaacactgcagcccagacacaagttgtcaacaaccagggagccttacctggtatggtctggcagaaccgggacgtgtacctgcagggtcccatctgggccaagattcctcacacagatggcaactttcacccgtctcctttaatgggcggctttggacttaaacatccgcctcctcagatcctcatcaaaaacactcctgttcctgcggatcctccaacagcgttcaaccaggccaagctgaattctttcatcacgcagtacagcaccggacaagtcagcgtggagatcgagtgggagctgcagaaggagaacagcaagcgctggaacccagagattcagtatacttccaactactacaaatctacaaatgtggactttgctgttaatactgagggtgtttactctgagcctcgccccattggcactcgttacctcacccgtaatctgtaa

SEQ ID NO: 5085 - protein, 737 aa, Adeno-associated virus
MAADGYLPDWLEDNLSEGIREWWDLKPGAPKPKANQQKQDDGRGLVLPGYKYLGPFNGLDKGEPVNAADAAALEHDKAYDQQLKAGDNPYLRYNHADAEFQERLQEDTSFGGNLGRAVFQAKKRVLEPLGLVEEAAKTAPGKKRPVEPSPQRSPDSSTGIGKKGQQPARKRLNFGQTGDSESVPDPQPIGEPPAGPSGLGSGTMAAGGGAPMADNNEGADGVGNASGNWHCDSTWLGDRVITTSTRTWALPTYNNHLYKQISSQSAGSTNDNVYFGYSTPWGYFDFNRFHCHFSPRDWQRLINNNWGFRPKKLNFKLFNIQVKEVTTNDGVTTIANNLTSTVQVFSDSEYQLPYVLGSAHQGCLPPFPADVFMIPQYGYLTLNNGSQSVGRSSFYCLEYFPSQMLRTGNNFTISYTFEDVPFHSSYAHSQSLDRLMNPLIDQYLYYLARTQSNAGGTAGNQELQFYQGGPTTMAEQAKNWLPGPCFRQQRVSKTLDQNNNSNFAWTGATKYHLNGRNSLVNPGVAMATHKDDEERFFPSSGVLIFGKTGAANKTTLENVLMTNEEEIRPTNPVATEEYGTVSSNLQAANTAAQTQVVNNQGALPGMVWQNRDVYLQGPIWAKIPHTDGNFHPSPLMGGFGLKHPPPQILIKNTPVPADPPTAFNQAKLNSFITQYSTGQVSVEIEWELQKENSKRWNPEIQYTSNYYKSTNVDFAVNTEGVYSEPRPIGTRYLTRNL

SEQ ID NO: 5086 - DNA, 2217 bp, Adeno-associated virus
  source 1..2217: mol_type = other DNA
atggctgccgatggttatcttccagattggctcgaggacaacctctctgagggcattcgcgagtggtgggacctgaaacctggagccccgaaacccaaagccaaccagcaaaagcaggacgacggccggggtctggtgcttcctggctacaagtacctcggacccttcaacggactcgacaagggggagcccgtcaacgcggcggacgcagcggccctcgagcacgacaaggcctacgaccagcagctcaaagcgggtgacaatccgtacctgcggtataatcacgccgacgccgagtttcaggagcgtctgcaagaagatacgtcttttgggggcaacctcgggcgagcagtcttccaggccaagaagcgggttctcgaacctctcggtctggttgaggaaggcgctaagacggctcctggaaagaagagaccggtagagccgtcaccacagcgttcccccgactcctccacgggcatcggcaagaaaggccagcagcccgccagaaagagactcaatttcggtcagactggcgactcagagtcagtccccgaccctcaacctatcggagaacctccagcagcgccctctagtgtgggatctggtacaatggctgcaggcggtggcgcaccaatggcagacaataacgaaggtgccgacggagtgggtagttcctcgggaaattggcattgcgattccacatggctgggcgacagagtcatcaccaccagcacccgaacctgggccctgcccgcctacaacaaccacctctacaagcaaatctccaacgggacctcgggaggcagcaccaacgacaacacctactttggctacagcaccccctgggggtattttgactttaacagattccactgccacttctcaccacgtgactggcagcgactcatcaacaacaactggggattccggcccaagagactcagcttcaagctcttcaacatccaggtcaaagaggtcacgcagaatgaaggcaccaagaccatcgccaataacctcaccagcaccatccaggtgtttacggactcggaataccagctgccgtacgtcctcggctctgcccaccagggctgcctgcctccgttcccggcggatgtcttcatgattcctcagtacggctacctgactctcaacaacggtagtcaggccgtgggacgttcctccttctactgcctggagtacttcccctctcagatgctgagaacgggcaacaacttttccttcagctacactttcgaggacgtgcctttccacagcagctacgcgcacagccagagtttggacaggctgatgaatcctctcatcgaccagtacctgtactacctgtcaagaacccagtctacgggaggcacagcgggaacccagcagttgctgttttctcaggccgggcctagcaacatgtcggctcaggccagaaactggctgcctggaccctgctacagacagcagcgcgtctccacgacactgtcgcaaaacaacaacagcaactttgcctggactggtgccaccaagtatcatctgagcggcagagactctctggtgaatccgggcgtcgccatggcaaccaacaaggacgacgaggaccgcttcttcccatccagcggcatcctcatgtttggcaagcagggagctggaaaagacaacgtggactatagcaacgtgatgctaaccagcgaggaagaaatcaagaccaccaaccccgtggccacagaacagtatggcgtggtggctgataacctacagcagcaaaacaccgctcctattgtgggggccgtcaacagccagggagccttacctggcatggtctggcagaaccgggacgtgtacctgcagggtcctatttgggccaagattcctcacacagatggcaactttcacccgtctcctttaatgggcggctttggacttaaacatccgcctcctcagatcctcatcaaaaacactcctgttcctgcggatcctccaacagcgttcaaccaggccaagctgaattcttccatcacgcagtacagcaccggacaagtcagcgtggagatcgagtgggagctgcagaaggagaacagcaagcgctggaacccagagattcagtatacttccaactactacaaatctacaaatgtggactttgctgttaatactgagggtgtttactctgagcctcgccccattggcactcgttacctcacccgtaatttgtaa

SEQ ID NO: 5087 - protein, 738 aa, Adeno-associated virus
MAADGYLPDWLEDNLSEGIREWWDLKPGAPKPKANQQKQDDGRGLVLPGYKYLGPFNGLDKGEPVNAADAAALEHDKAYDQQLKAGDNPYLRYNHADAEFQERLQEDTSFGGNLGRAVFQAKKRVLEPLGLVEEGAKTAPGKKRPVEPSPQRSPDSSTGIGKKGQQPARKRLNFGQTGDSESVPDPQPIGEPPAAPSSVGSGTMAAGGGAPMADNNEGADGVGSSSGNWHCDSTWLGDRVITTSTRTWALPAYNNHLYKQISNGTSGGSTNDNTYFGYSTPWGYFDFNRFHCHFSPRDWQRLINNNWGFRPKRLSFKLFNIQVKEVTQNEGTKTIANNLTSTIQVFTDSEYQLPYVLGSAHQGCLPPFPADVFMIPQYGYLTLNNGSQAVGRSSFYCLEYFPSQMLRTGNNFSFSYTFEDVPFHSSYAHSQSLDRLMNPLIDQYLYYLSRTQSTGGTAGTQQLLFSQAGPSNMSAQARNWLPGPCYRQQRVSTTLSQNNNSNFAWTGATKYHLSGRDSLVNPGVAMATNKDDEDRFFPSSGILMFGKQGAGKDNVDYSNVMLTSEEEIKTTNPVATEQYGVVADNLQQQNTAPIVGAVNSQGALPGMVWQNRDVYLQGPIWAKIPHTDGNFHPSPLMGGFGLKHPPPQILIKNTPVPADPPTAFNQAKLNSSITQYSTGQVSVEIEWELQKENSKRWNPEIQYTSNYYKSTNVDFAVNTEGVYSEPRPIGTRYLTRNL

SEQ ID NO: 5088 - protein, 736 aa, Adeno-associated virus
MAADGYLPDWLEDNLSEGIREWWDLKPGAPKPKANQQKQDDGRGLVLPGYKYLGPFNGLDKGEPVNAADAAALEHDKAYDQQLKAGDNPYLRYNHADAEFQERLQEDTSFGGNLGRAVFQAKKRVLEPLGLVEEGAKTAPGKKRPVEQSPQEPDSSSGIGKTGQQPAKKRLNFGQTGDSESVPDPQPLGEPPATPAAVGPTTMASGGGAPMADNNEGADGVGNASGNWHCDSTWLGDRVITTSTRTWALPTYNNHLYKQISSASTGASNDNHYFGYSTPWGYFDFNRFHCHFSPRDWQRLINNNWGFRPKRLNFKLFNIQVKEVTTNDGVTTIANNLTSTVQVFSDSEYQLPYVLGSAHQGCLPPFPADVFMIPQYGYLTLNNGSQAVGRSSFYCLEYFPSQMLRTGNNFTFSYTFEEVPFHSSYAHSQSLDRLMNPLIDQYLYYLNRTQNQSGSAQNKDLLFSRGSPAGMSVQPKNWLPGPCYRQQRVSKTKTDNNNSNFTWTGASKYNLNGRESIINPGTAMASHKDDEDKFFPMSGVMIFGKESAGASNTALDNVMITDEEEIKATNPVATERFGTVAVNFQSSSTDPATGDVHAMGALPGMVWQDRDVYLQGPIWAKIPHTDGHFHPSPLMGGFGLKNPPPQILIKNTPVPANPPAEFSATKFASFITQYSTGQVSVEIEWELQKENSKRWNPEVQYTSNYAKSANVDFTVDNNGLYTEPRPIGTRYLTRPL

SEQ ID NO: 5089 - DNA, 2217 bp, Adeno-associated virus
  source 1..2217: mol_type = other DNA
atggctgctgacggttatcttccagattggctcgaggacaacctctctgagggcattcgcgagtggtgggacctgaaacctggagcccccaagcccaaggccaaccagcagaagcaggacgacggccggggtctggtgcttcctggctacaagtacctcggacccttcaacggactcgacaagggggagcccgtcaacgcggcggacgcagcggccctcgagcacgacaaggcctacgaccagcagctcaaagcgggtgacaatccgtacctgcggtataaccacgccgacgccgagtttcaggagcgtctgcaagaagatacgtcttttgggggcaacctcgggcgagcagtcttccaggccaagaagcgggttctcgaacctctcggtctggttgaggaagctgctaagacggctcctggaaagaagagaccggtagaaccgtcacctcagcgttcccccgactcctccacgggcatcggcaagaaaggccagcagcccgctaaaaagagactgaactttggtcagactggcgactcagagtcagtccccgaccctcaaccaatcggagaaccaccagcaggcccctctggtctgggatctggtacaatggctgcaggcggtggcgctccaatggcagacaataacgaaggcgccgacggagtgggtagttcctcaggaaattggcattgcgattccacatggctgggcgacagagtcatcaccaccagcacccgaacctgggccctgcccacctacaacaaccacctctacaagcaaatatccaatgggacatcgggaggaagcaccaacgacaacacctacttcggctacagcaccccctgggggtattttgacttcaacagattccactgccacttctcaccacgtgactggcagcgactcatcaacaacaactggggattccggccaaaaagactcagcttcaagctcttcaacatccaggtcaaggaggtcacgcagaatgaaggcaccaagaccatcgccaataaccttaccagcacgattcaggtatttacggactcggaataccagctgccgtacgtcctcggctccgcgcaccagggctgcctgcctccgttcccggcggacgtcttcatgattccccagtacggctaccttacactgaacaatggaagtcaagccgtaggccgttcctccttctactgcctggaatattttccatctcaaatgctgcgaactggaaacaattttgaattcagctacaccttcgaggacgtgcctttccacagcagctacgcacacagccagagcttggaccgactgatgaatcctctcatcgaccagtacctgtactacttatccagaactcagtccacaggaggaactcaaggtacccagcaattgttattttctcaagctgggcctgcaaacatgtcggctcaggctaagaactggctacctggaccttgctaccggcagcagcgagtctctacgacactgtcgcaaaacaacaacagcaactttgcttggactggtgccaccaaatatcacctgaacggaagagactctttggtaaatcccggtgtcgccatggcaacccacaaggacgacgaggaacgcttcttcccgtcgagtggagtcctgatgtttggaaaacagggtgctggaagagacaatgtggactacagcagcgttatgctaaccagcgaagaagaaattaaaaccactaaccctgtagccacagaacaatacggtgtggtggctgacaacttgcagcaaaccaatacagggcctattgtgggaaatgtcaacagccaaggagccttacctggcatggtctggcagaaccgagacgtgtacctgcagggtcccatctgggccaagattcctcacacggacggcaacttccacccttcaccgctaatgggaggatttggactgaagcacccacctcctcagatcctgatcaagaacacgccggtacctgcggatcctccaacaacgttcagccaggcgaaattggcttccttcattacgcagtacagcaccggacaggtcagcgtggaaatcgagtgggagctgcagaaggagaacagcaaacgctggaacccagagattcagtacacttcaaactactacaaatctacaaatgtggactttgctgtcaatacagagggaacttattctgagcctcgccccattggtactcgttacctcacccgtaatctgtaa

SEQ ID NO: 5090 - protein, 738 aa, Adeno-associated virus
MAADGYLPDWLEDNLSEGIREWWDLKPGAPKPKANQQKQDDGRGLVLPGYKYLGPFNGLDKGEPVNAADAAALEHDKAYDQQLKAGDNPYLRYNHADAEFQERLQEDTSFGGNLGRAVFQAKKRVLEPLGLVEEGAKTAPGKKRPVEPSPQRSPDSSTGIGKKGQQPARKRLNFGQTGDSESVPDPQPLGEPPAAPSSVGSGTMAAGGGAPMADNNEGADGVGSSSGNWHCDSTWLGDRVITTSTRTWALPTYNNHLYKQISNGTSGGSTNDNTYFGYSTPWGYFDFNRFHCHFSPRDWQRLINNNWGFRPKRLSFKLFNIQVKEVTQNEGTKTIANNLTSTIQVFTDSEYQLPYVLGSAHQGCLPPFPADVFMIPQYGYLTLNNGSQAVGRSSFYCLEYFPSQMLRTGNNFSFSYTFEDVPFHSSYAHSQSLDRLMNPLIDQYLYYLSRTQSTGGTAGTQQLLFSQAGPSNMSAQARNWLPGPCYRQQRVSTTLSQNNNSNFAWTGATKYHLNGRDSLVNPGVAMATNKDDEDRFFPSSGILMFGKQGAGKDNVDYSNVMLTSEEEIKTTNPVATEQYGVVADNLQRQNTAPIVGAVNSQGALPGMVWQNRDVYLQGPIWAKIPHTDGNFHPSPLMGGFGLKHPPPQILIKNTPVPADPPTAFNQAKLNSFITQYSTGQVSVEIEWELQKENSKRWNPEIQYTSNYYKSTNVDFAVNTEGVYSEPRPIGTRYLTRNL

SEQ ID NO: 5091 - protein, 736 aa, Adeno-associated virus
MAADGYLPDWLEDNLSEGIREWLNLKPGAPQPKANQQKQDNARGLVLPGYKYLGPFNGLDKGDPVNEADAAALEHDKAYGQQLKAGDNPYLKYNHADAEFQERLQKDTSFGGNLGKAVFQAKKRILEPLGLVETPAKTAPGKKRPVDPSPQRSPDSSSGIGKKSPHPARKRLNFGQTGEAESVPDPQPIGEPPSDPSSVGSGTMAAGGGAPMADNNEGADGVGNSSGNWHCDSTWLGDRVITTSTRTWALPTYNNHLYKQISSQSGATNDNHYFGYSTPWGYFDFNRFHCHFSPRDWQRLINNNWGFRPKRLSFKLFNIQVKEVTQNDGTTTIANNLTSTVQVFTDSEYQLPYVLGSAHQGCLPPFPADVFMIPQYGYLTLNNGSQAVGRSSFYCLEYFPSQMLRTGNNFQFSYTFEDVPFHSSYAHSQSLDRLMNPLIDQYLYYLSKTQGTNATVQGAKLQFSQAGPSNMRDQARNWLPGPCYRQQRVSKTANDNNNSEYAWTGATKYHLNGRDSLVNPGPAMASHKDDEEKFFPMNGTLVFGKNGAGNSNVDIENVMITDEEEIRTTNPVATEQYGVVSDNLQSSNTRPITGDVDSQGVLPGMVWQDRDVYLQGPIWAKIPHTDGHFHPSPLMGGFGLKHPPPQILIKNTPVPANPATTFTPGKFASFITQYSTGQVSVQIEWELQKENSKRWNPEIQYTSNYNKSVNVDFTVDTNGVYSEPRPIGTRYLTRNL

SEQ ID NO: 5092 - protein, 736 aa, Adeno-associated virus; identical to SEQ ID NO: 4787

SEQ ID NO: 5093 - protein, 736 aa, Adeno-associated virus
MAADGYLPDWLEDNLSEGIREWWDLKPGAPKPKANQQKQDDGRGLVLPGYKYLGPFNGLDKGEPVNAADAAALEHDKAYDQQLKAGDNPYLRYNHADAEFQERLQEDTSFGGNLGRAVFQAKKRVLEPLGLVEEGAKTAPGKKRPVEQSPQEPDSSSGIGKTGQQPAKKRLNFGQTGDSESVPDPQPLGEPPAAPSGLGPNTMASGGGAPMADNNEGADGVGNSSGNWHCDSTWLGDRVITTSTRTWALPTYNNHLYKQISNGTSGGSTNDNTYFGYSTPWGYFDFNRFHCHFSPRDWQRLINNNWGFRPKRLNFKLFNIQVKEVTTNEGTKTIANNLTSTVQVFTDSEYQLPYVLGSAHQGCLPPFPADVFMVPQYGYLTLNNGSQALGRSSFYCLEYFPSQMLRTGNNFQFSYTFEDVPFHSSYAHSQSLDRLMNPLIDQYLYYLVRTQTTGTGGTQTLAFSQAGPSSMANQARNWVPGPCYRQQRVSTTTNQNNNSNFAWTGAAKFKLNGRDSLMNPGVAMASHKDDEDRFFPSSGVLIFGKQGAGNDGVDYSQVLITDEEEIKATNPVATEEYGAVAINNQAANTQAQTGLVHNQGVIPGMVWQNRDVYLQGPIWAKIPHTDGNFHPSPLMGGFGLKHPPPQILIKNTPVPADPPLTFNQAKLNSFITQYSTGQVSVEIEWELQKENSKRWNPEIQYTSNYYKSTNVDFAVNTEGVYSEPRPIGTRYLTRNL

SEQ ID NO: 5094 - DNA, 2211 bp, Adeno-associated virus 1; identical to SEQ ID NO: 4977
  source 1..2211: mol_type = other DNA

SEQ ID NO: 5095 - protein, 736 aa, Adeno-associated virus 1; identical to SEQ ID NO: 5088

SEQ ID NO: 5096 - DNA, 4718 bp, Adeno-associated virus 1
  source 1..4718: mol_type = other DNA
ttgcccactccctctctgcgcgctcgctcgctcggtggggcctgcggaccaaaggtccgcagacggcagagctctgctctgccggccccaccgagcgagcgagcgcgcagagagggagtgggcaactccatcactaggggtaatcgcgaagcgcctcccacgctgccgcgtcagcgctgacgtaaattacgtcataggggagtggtcctgtattagctgtcacgtgagtgcttttgcgacattttgcgacaccacgtggccatttagggtatatatggccgagtgagcgagcaggatctccattttgaccgcgaaatttgaacgagcagcagccatgccgggcttctacgagatcgtgatcaaggtgccgagcgacctggacgagcacctgccgggcatttctgactcgtttgtgagctgggtggccgagaaggaatgggagctgcccccggattctgacatggatctgaatctgattgagcaggcacccctgaccgtggccgagaagctgcagcgcgacttcctggtccaatggcgccgcgtgagtaaggccccggaggccctcttctttgttcagttcgagaagggcgagtcctacttccacctccatattctggtggagaccacgggggtcaaatccatggtgctgggccgcttcctgagtcagattagggacaagctggtgcagaccatctaccgcgggatcgagccgaccctgcccaactggttcgcggtgaccaagacgcgtaatggcgccggaggggggaacaaggtggtggacgagtgctacatccccaactacctcctgcccaagactcagcccgagctgcagtgggcgtggactaacatggaggagtatataagcgcctgtttgaacctggccgagcgcaaacggctcgtggcgcagcacctgacccacgtcagccagacccaggagcagaacaaggagaatctgaaccccaattctgacgcgcctgtcatccggtcaaaaacctccgcgcgctacatggagctggtcgggtggctggtggaccggggcatcacctccgagaagcagtggatccaggaggaccaggcctcgtacatctccttcaacgccgcttccaactcgcggtcccagatcaaggccgctctggacaatgccggcaagatcatggcgctgaccaaatccgcgcccgactacctggtaggccccgctccgcccgcggacattaaaaccaaccgcatctaccgcatcctggagctgaacggctacgaacctgcctacgccggctccgtctttctcggctgggcccagaaaaggttcgggaagcgcaacaccatctggctgtttgggccggccaccacgggcaagaccaacatcgcggaagccatcgcccacgccgtgcccttctacggctgcgtcaactggaccaatgagaactttcccttcaatgattgcgtcgacaagatggtgatctggtgggaggagggcaagatgacggccaaggtcgtggagtccgccaaggccattctcggcggcagcaaggtgcgcgtggaccaaaagtgcaagtcgtccgcccagatcgaccccacccccgtgatcgtcacctccaacaccaacatgtgcgccgtgattgacgggaacagcaccaccttcgagcaccagcagccgttgcaggaccggatgttcaaatttgaactcacccgccgtctggagcatgactttggcaaggtgacaaagcaggaagtcaaagagttcttccgctgggcgcaggatcacgtgaccgaggtggcgcatgagttctacgtcagaaagggtggagccaacaaaagacccgcccccgatgacgcggataaaagcgagcccaagcgggcctgcccctcagtcgcggatccatcgacgtcagacgcggaaggagctccggtggactttgccgacaggtaccaaaacaaatgttctcgtcacgcgggcatgcttcagatgctgtttccctgcaagacatgcgagagaatgaatcagaatttcaacatttgcttcacgcacgggacgagagactgttcagagtgcttccccggcgtgtcagaatctcaaccggtcgtcagaaagaggacgtatcggaaactctgtgccattcatcatctgctggggcgggctcccgagattgcttgctcggcctgcgatctggtcaacgtggacctggatgactgtgtttctgagcaataaatgacttaaaccaggtatggctgccgatggttatcttccagattggctcgaggacaacctctctgagggcattcgcgagtggtgggacttgaaacctggagccccgaagcccaaagccaaccagcaaaagcaggacgacggccggggtctggtgcttcctggctacaagtacctcggacccttcaacggactcgacaagggggagcccgtcaacgcggcggacgcagcggccctcgagcacgacaaggcctacgaccagcagctcaaagcgggtgacaatccgtacctgcggtataaccacgccgacgccgagtttcaggagcgtctgcaagaagatacgtcttttgggggcaacctcgggcgagcagtcttccaggccaagaagcgggttctcgaacctctcggtctggttgaggaaggcgctaagacggctcctggaaagaaacgtccggtagagcagtcgccacaagagccagactcctcctcgggcatcggcaagacaggccagcagcccgctaaaaagagactcaattttggtcagactggcgactcagagtcagtccccgatccacaacctctcggagaacctccagcaacccccgctgctgtgggacctactacaatggcttcaggcggtggcgcaccaatggcagacaataacgaaggcgccgacggagtgggtaatgcctcaggaaattggcattgcgattccacatggctgggcgacagagtcatcaccaccagcacccgcacctgggccttgcccacctacaataaccacctctacaagcaaatctccagtgcttcaacgggggccagcaacgacaaccactacttcggctacagcaccccctgggggtattttgatttcaacagattccactgccacttttcaccacgtgactggcagcgactcatcaacaacaattggggattccggcccaagagactcaacttcaaactcttcaacatccaagtcaaggaggtcacgacgaatgatggcgtcacaaccatcgctaataaccttaccagcacggttcaagtcttctcggactcggagtaccagcttccgtacgtcctcggctctgcgcaccagggctgcctccctccgttcccggcggacgtgttcatgattccgcaatacggctacctgacgctcaacaatggcagccaagccgtgggacgttcatccttttactgcctggaatatttcccttctcagatgctgagaacgggcaacaactttaccttcagctacacctttgaggaagtgcctttccacagcagctacgcgcacagccagagcctggaccggctgatgaatcctctcatcgaccaatacctgtattacctgaacagaactcaaaatcagtccggaagtgcccaaaacaaggacttgctgtttagccgtgggtctccagctggcatgtctgttcagcccaaaaactggctacctggaccctgttatcggcagcagcgcgtttctaaaacaaaaacagacaacaacaacagcaattttacctggactggtgcttcaaaatataacctcaatgggcgtgaatccatcatcaaccctggcactgctatggcctcacacaaagacgacgaagacaagttctttcccatgagcggtgtcatgatttttggaaaagagagcgccggagcttcaaacactgcattggacaatgtcatgattacagacgaagaggaaattaaagccactaaccctgtggccaccgaaagatttgggaccgtggcagtcaatttccagagcagcagcacagaccctgcgaccggagatgtgcatgctatgggagcattacctggcatggtgtggcaagatagagacgtgtacctgcagggtcccatttgggccaaaattcctcacacagatggacactttcacccgtctcctcttatgggcggctttggactcaagaacccgcctcctcagatcctcatcaaaaacacgcctgttcctgcgaatcctccggcggagttttcagctacaaagtttgcttcattcatcacccaatactccacaggacaagtgagtgtggaaattgaatgggagctgcagaaagaaaacagcaagcgctggaatcccgaagtgcagtacacatccaattatgcaaaatctgccaacgttgattttactgtggacaacaatggactttatactgagcctcgccccattggcacccgttaccttacccgtcccctgtaattacgtgttaatcaataaaccggttgattcgtttcagttgaactttggtctcctgtccttcttatcttatcggttaccatggttatagcttacacattaactgcttggttgcgcttcgcgataaaagacttacgtcatcgggttacccctagtgatggagttgcccactccctctctgcgcgctcgctcgctcggtggggcctgcggaccaaaggtccgcagacggcagagctctgctctgccggccccaccgagcgagcgagcgcgcagagagggagtgggcaa

SEQ ID NO: 5097 - DNA, 255 bp, Adeno-associated virus 10
  source 1..255: mol_type = other DNA
ggtaattcctccggaaattggcattgcgattccacatggctgggcgacagagtcatcaccaccagcacccgaacctgggtcctgcccacctacaacaaccacatctacaagcaaatctccagcgagacaggagccaccaacgacaaccactacttcggctacagcaccccctgggggtattttgactttaacagattccactgccacttttcaccacgtgactggcagcgactcatcaacaacaactggggattc

SEQ ID NO: 5098 - protein, 738 aa, Adeno-associated virus 10
MAADGYLPDWLEDNLSEGIREWWDLKPGAPKPKANQQKQDDGRGLVLPGYKYLGPFNGLDKGEPVNAADAAALEHDKAYDQQLKAGDNPYLRYNHADAEFQERLQEDTSFGGNLGRAVFQAKKRVLEPLGLVEEAAKTAPGKKRPVEPSPQRSPDSSTGIGKKGQQPAKKRLNFGQTGESESVPDPQPIGEPPAGPSGLGSGTMAAGGGAPMADNNEGADGVGSSSGNWHCDSTWLGDRVITTSTRTWALPTYNNHLYKQISNGTSGGSTNDNTYFGYSTPWGYFDFNRFHCHFSPRDWQRLINNNWGFRPKRLSFKLFNIQVKEVTQNEGTKTIANNLTSTIQVFTDSEYQLPYVLGSAHQGCLPPFPADVFMIPQYGYLTLNNGSQAVGRSSFYCLEYFPSQMLRTGNNFEFSYTFEDVPFHSSYAHSQSLDRLMNPLIDQYLYYLSRTQSTGGTQGTQQLLFSQAGPANMSAQAKNWLPGPCYRQQRVSTTLSQNNNSNFAWTGATKYHLNGRDSLVNPGVAMATHKDDEERFFPSSGVLMFGKQGAGRDNVDYSSVMLTSEEEIKTTNPVATEQYGVVADNLQQANTGPIVGNVNSQGALPGMVWQNRDVYLQGPIWAKIPHTDGNFHPSPLMGGFGLKHPPPQILIKNTPVPADPPTTFSQAKLASFITQYSTGQVSVEIEWELQKENSKRWNPEIQYTSNYYKSTNVDFAVNTEGTYSEPRPIGTRYLTRNL

SEQ ID NO: 5099 - protein, 738 aa, Adeno-associated virus 10; identical to SEQ ID NO: 4793

SEQ ID NO: 5100 - DNA, 258 bp, Adeno-associated virus 11
  source 1..258: mol_type = other DNA
ggtaattcctccggaaattggcattgcgattccacatggctgggcgacagagtcatcaccaccagcacccgaacctgggccctgccaacctacaacaaccacctctacaaacaaatctccagcgcttcaacgggggccagcaacgacaaccactactttggctacagcaccccctgggggtattttgactttaacagattccactgccacttctcaccacgtgactggcagcgactcatcaacaacaactggggattc

SEQ ID NO: 5101 - DNA, 255 bp, Adeno-associated virus 12
  source 1..255: mol_type = other DNA
ggtaattcctccggaaattggcattgcgattccacatggctgggcgaccgagtcattaccaccagcacccggacttgggccctgcccacctacaacaaccacctctacaagcaaatctccagccaatcgggtgccaccaacgacaaccactacttcggctacagcaccccttgggggtattttgatttcaacagattccactgccatttctcaccacgtgactggcagcgactcatcaacaacaactggggattc

SEQ ID NO: 5102 - DNA, 2208 bp, Adeno-associated virus 2
  source 1..2208: mol_type = other DNA
atggctgccgatggttatcttccagattggctcgaggacactctctctgaaggaataagacagtggtggaagctcaaacctggcccaccaccaccaaagcccgcagagcggcataaggacgacagcaggggtcttgtgcttcctgggtacaagtacctcggacccttcaacggactcgacaagggagagccggtcaacgaggcagacgccgcggccctcgagcacgacaaagcctacgaccggcagctcgacagcggagacaacccgtacctcaagtacaaccacgccgacgcggagtttcaggagcgccttaaagaagatacgtcttttgggggcaacctcggacgagcagtcttccaggcgaaaaagagggttcttgaacctctgggcctggttgaggaacctgttaagacggctccgggaaaaaagaggccggtagagcactctcctgtggagccagactcctcctcgggaaccggaaaggcgggccagcagcctgcaagaaaaagattgaattttggtcagactggagacgcagactcagtacctgacccccagcctctcggacagccaccagcagccccctctggtctgggaactaatacgatggctacaggcagtggcgcaccaatggcagacaataacgagggcgccgacggagtgggtaattcctcgggaaattggcattgcgattccacatggatgggcgacagagtcatcaccaccagcacccgaacctgggccctgcccacctacaacaaccacctctacaaacaaatttccagccaatcaggagcctcgaacgacaatcactactttggctacagcaccccttgggggtattttgacttcaacagattccactgccacttttcaccacgtgactggcaaagactcatcaacaacaactggggattccgacccaagagactcaacttcaagctctttaacattcaagtcaaagaggtcacgcagaatgacggtacgacgacgattgccaataaccttaccagcacggttcaggtgtttactgactcggagtaccagctcccgtacgtcctcggctcggcgcatcaaggatgcctcccgccgttcccagcagacgtcttcatggtgccacagtatggatacctcaccctgaacaacgggagtcaggcagtaggacgctcttcattttactgcctggagtactttccttctcagatgctgcgtaccggaaacaactttaccttcagctacacttttgaggacgttcctttccacagcagctacgctcacagccagagtctggaccgtctcatgaatcctctcatcgaccagtacctgtattacttgagcagaacaaacactccaagtggaaccaccacgcagtcaaggcttcagttttctcaggccggagcgagtgacattcgggaccagtctaggaactggcttcctggaccctgttaccgccagcagcgagtatcaaagacatctgcggataacaacaacagtgaatactcgtggactggagctaccaagtaccacctcaatggcagagactctctggtgaatccgggcccggccatggcaagccacaaggacgatgaagaaaagttttttcctcagagcggggttctcatctttgggaagcaaggctcagagaaaacaaatgtggacattgaaaaggtcatgattacagacgaagaggaaatcaggacaaccaatcccgtggctacggagcagtatggttctgtatctaccaacctccagagaggcaacagacaagcagctaccgcagatgtcaacacacaaggcgttcttccaggcatggtctggcaggacagagatgtgtaccttcaggggcccatctgggcaaagattccacacacggacggacattttcacccctctcccctcatgggtggattcggacttaaacaccctcctccacagattctcatcaagaacaccccggtacctgcgaatccttcgaccaccttcagtgcggcaaagtttgcttccttcatcacacagtactccacgggacaggtcagcgtggagatcgagtgggagctgcagaaggaaaacagcaaacgctggaatcccgaaattcagtacacttccaactacaacaagtctgttaatgtggactttactgtggacactaatggcgtgtattcagagcctcgccccattggcaccagatacctgactcgtaatctgtaa

SEQ ID NO: 5103 - protein, 735 aa, Adeno-associated virus 2 [sequence omitted]

SEQ ID NO: 5104 - protein, 621 aa, Adeno-associated virus 2
MPGFYEIVIKVPSDLDGHLPGISDSFVNWVAEKEWELPPDSDMDLNLIEQAPLTVAEKLQRDFLTEWRRVSKAPEALFFVQFEKGESYFHMHVLVETTGVKSMVLGRFLSQIREKLIQRIYRGIEPTLPNWFAVTKTRNGAGGGNKVVDECYIPNYLLPKTQPELQWAWTNMEQYLSACLNLTERKRLVAQHLTHVSQTQEQNKENQNPNSDAPVIRSKTSARYMELVGWLVDKGITSEKQWIQEDQASYISFNAASNSRSQIKAALDNAGKIMSLTKTAPDYLVGQQPVEDISSNRIYKILELNGYDPQYAASVFLGWATKKFGKRNTIWLFGPATTGKTNIAEAIAHTVPFYGCVNWTNENFPFNDCVDKMVIWWEEGKMTAKVVESAKAILGGSKVRVDQKCKSSAQIDPTPVIVTSNTNMCAVIDGNSTTFEHQQPLQDRMFKFELTRRLDHDFGKVTKQEVKDFFRWAKDHVVEVEHEFYVKKGGAKKRPAPSDADISEPKRVRESVAQPSTSDAEASINYADRYQNKCSRHVGMNLMLFPCRQCERMNQNSNICFTHGQKDCLECFPVSESQPVSVVKKAYQKLCYIHHIMGKVPDACTACDLVNVDLDDCIFEQ

SEQ ID NO: 5105 - DNA, 4675 bp, Adeno-associated virus 2
  source 1..4675: mol_type = other DNA
ttggccactccctctctgcgcgctcgctcgctcactgaggccgggcgaccaaaggtcgcccgacgcccgggctttgcccgggcggcctcagtgagcgagcgagcgcgcagagagggagtggccaactccatcactaggggttcctggaggggtggagtcgtgacgtgaattacgtcatagggttagggaggtcctgtattagaggtcacgtgagtgttttgcgacattttgcgacaccatgtggtcacgctgggtatttaagcccgagtgagcacgcagggtctccattttgaagcgggaggtttgaacgcgcagccgccatgccggggttttacgagattgtgattaaggtccccagcgaccttgacgggcatctgcccggcatttctgacagctttgtgaactgggtggccgagaaggaatgggagttgccgccagattctgacatggatctgaatctgattgagcaggcacccctgaccgtggccgagaagctgcagcgcgactttctgacggaatggcgccgtgtgagtaaggccccggaggcccttttctttgtgcaatttgagaagggagagagctacttccacatgcacgtgctcgtggaaaccaccggggtgaaatccatggttttgggacgtttcctgagtcagattcgcgaaaaactgattcagagaatttaccgcgggatcgagccgactttgccaaactggttcgcggtcacaaagaccagaaatggcgccggaggcgggaacaaggtggtggatgagtgctacatccccaattacttgctccccaaaacccagcctgagctccagtgggcgtggactaatatggaacagtatttaagcgcctgtttgaatctcacggagcgtaaacggttggtggcgcagcatctgacgcacgtgtcgcagacgcaggagcagaacaaagagaatcagaatcccaattctgatgcgccggtgatcagatcaaaaacttcagccaggtacatggagctggtcgggtggctcgtggacaaggggattacctcggagaagcagtggatccaggaggaccaggcctcatacatctccttcaatgcggcctccaactcgcggtcccaaatcaaggctgccttggacaatgcgggaaagattatgagcctgactaaaaccgcccccgactacctggtgggccagcagcccgtggaggacatttccagcaatcggatttataaaattttggaactaaacgggtacgatccccaatatgcggcttccgtctttctgggatgggccacgaaaaagttcggcaagaggaacaccatctggctgtttgggcctgcaactaccgggaagaccaacatcgcggaggccatagcccacactgtgcccttctacgggtgcgtaaactggaccaatgagaactttcccttcaacgactgtgtcgacaagatggtgatctggtgggaggaggggaagatgaccgccaaggtcgtggagtcggccaaagccattctcggaggaagcaaggtgcgcgtggaccagaaatgcaagtcctcggcccagatagacccgactcccgtgatcgtcacctccaacaccaacatgtgcgccgtgattgacgggaactcaacgaccttcgaacaccagcagccgttgcaagaccggatgttcaaatttgaactcacccgccgtctggatcatgactttgggaaggtcaccaagcaggaagtcaaagactttttccggtgggcaaaggatcacgtggttgaggtggagcatgaattctacgtcaaaaagggtggagccaagaaaagacccgcccccagtgacgcagatataagtgagcccaaacgggtgcgcgagtcagttgcgcagccatcgacgtcagacgcggaagcttcgatcaactacgcagacaggtaccaaaacaaatgttctcgtcacgtgggcatgaatctgatgctgtttccctgcagacaatgcgagagaatgaatcagaattcaaatatctgcttcactcacggacagaaagactgtttagagtgctttcccgtgtcagaatctcaacccgtttctgtcgtcaaaaaggcgtatcagaaactgtgctacattcatcatatcatgggaaaggtgccagacgcttgcactgcctgcgatctggtcaatgtggatttggatgactgcatctttgaacaataaatgatttaaatcaggtatggctgccgatggttatcttccagattggctcgaggacactctctctgaaggaataagacagtggtggaagctcaaacctggcccaccaccaccaaagcccgcagagcggcataaggacgacagcaggggtcttgtgcttcctgggtacaagtacctcggacccttcaacggactcgacaagggagagccggtcaacgaggcagacgccgcggccctcgagcacgtacaaagcctacgaccggcagctcgacagcggagacaacccgtacctcaagtacaaccacgccgacgcggagtttcaggagcgccttaaagaagatacgtcttttgggggcaacctcggacgagcagtcttccaggcgaaaaagagggttcttgaacctctgggcctggttgaggaacctgttaagacggctccgggaaaaaagaggccggtagagcactctcctgtggagccagactcctcctcgggaaccggaaaggcgggccagcagcctgcaagaaaaagattgaattttggtcagactggagacgcagactcagtacctgacccccagcctctcggacagccaccagcagccccctctggtctgggaactaatacgatggctacaggcagtggcgcaccaatggcagacaataacgagggcgccgacggagtgggtaattcctccggaaattggcattgcgattccacatggatgggcgacagagtcatcaccaccagcacccgaacctgggccctgcccacctacaacaaccacctctacaaacaaatttccagccaatcaggagcctcgaacgacaatcactactttggctacagcaccccttgggggtattttgacttcaacagattccactgccacttttcaccacgtgactggcaaagactcatcaacaacaactggggattccgacccaagagactcaacttcaagctctttaacattcaagtcaaagaggtcacgcagaatgacggtacgacgacgattgccaataaccttaccagcacggttcaggtgtttactgactcggagtaccagctcccgtacgtcctcggctcggcgcatcaaggatgcctcccgccgttcccagcagacgtcttcatggtgccacagtatggatacctcaccctgaacaacgggagtcaggcagtaggacgctcttcattttactgcctggagtactttccttctcagatgctgcgtaccggaaacaactttaccttcagctacacttttgaggacgttcctttccacagcagctacgctcacagccagagtctggaccgtctcatgaatcctctcatcgaccagtacctgtattacttgagcagaacaaacactccaagtggaaccaccacgcagtcaaggcttcagttttctcaggccggagcgagtgacattcgggaccagtctaggaactggcttcctggaccctgttaccgccagcagcgagtatcaaagacatctgcggataacaacaacagtgaatactcgtggactggagctaccaagtaccacctcaatggcagagactctctggtgaatccggccatggcaagccacaaggacgatgaagaaaagttttttcctcagagcggggttctcatctttgggaagcaaggctcagagaaaacaaatgtgaacattgaaaaggtcatgattacagacgaagaggaaatcggaacaaccaatcccgtggctacggagcagtatggttctgtatctaccaacctccagagaggcaacagacaagcagctaccgcagatgtcaacacacaaggcgttcttccaggcatggtctggcaggacagagatgtgtaccttcaggggcccatctgggcaaagattccacacacggacggacattttcacccctctcccctcatgggtggattcggacttaaacaccctcctccacagattctcatcaagaacaccccggtacctgcgaatccttcgaccaccttcagtgcggcaaagtttgcttccttcatcacacagtactccacgggacacggtcagcgtggagatcgagtgggagctgcagaaggaaaacagcaaacgctggaatcccgaaattcagtacacttccaactacaacaagtctgttaatcgtggacttaccgtggatactaatggcgtgtattcagagcctcgccccattggcaccagatacctgactcgtaatctgtaattgcttgttaatcaataaaccgtttaattcgtttcagttgaactttggtctctgcgtatttctttcttatctagtttccatggctacgtagataagtagcatggcgggttaatcattaactacaaggaacccctagtgatggagttggccactccctctctgcgcgctcgctcgctcactgaggccgggcgaccaaaggtcgcccgacgcccgggctttgcccgggcggcctcagtgagcgagcgagcgcgcagagagggagtggccaa

SEQ ID NO: 5106 - DNA, 4679 bp, Adeno-associated virus 2
  source 1..4679: mol_type = other DNA
ttggccactccctctctgcgcgctcgctcgctcactgaggccgggcgaccaaaggtcgcccgacgcccgggctttgcccgggcggcctcagtgagcgagcgagcgcgcagagagggagtggccaactccatcactaggggttcctggaggggtggagtcgtgacgtgaattacgtcatagggttagggaggtcctgtattagaggtcacgtgagtgttttgcgacattttgcgacaccatgtggtcacgctgggtatttaagcccgagtgagcacgcagggtctccattttgaagcgggaggtttgaacgcgcagccgccatgccggggttttacgagattgtgattaaggtccccagcgaccttgacgggcatctgcccggcatttctgacagctttgtgaactgggtggccgagaaggaatgggagttgccgccagattctgacatggatctgaatctgattgagcaggcacccctgaccgtggccgagaagctgcagcgcgactttctgacggaatggcgccgtgtgagtaaggccccggaggcccttttctttgtgcaatttgagaagggagagagctacttccacatgcacgtgctcgtggaaaccaccggggtgaaatccatggttttgggacgtttcctgagtcagattcgcgaaaaactgattcagagaatttaccgcgggatcgagccgactttgccaaactggttcgcggtcacaaagaccagaaatggcgccggaggcgggaacaaggtggtggatgagtgctacatccccaattacttgctccccaaaacccagcctgagctccagtgggcgtggactaatatggaacagtatttaagcgcctgtttgaatctcacggagcgtaaacggttggtggcgcagcatctgacgcacgtgtcgcagacgcaggagcagaacaaagagaatcagaatcccaattctgatgcgccggtgatcagatcaaaaacttcagccaggtacatggagctggtcgggtggctcgtggacaaggggattacctcggagaagcagtggatccaggaggaccaggcctcatacatctccttcaatgcggcctccaactcgcggtcccaaatcaaggctgccttggacaatgcgggaaagattatgagcctgactaaaaccgcccccgactacctggtgggccagcagcccgtggaggacatttccagcaatcggatttataaaattttggaactaaacgggtacgatccccaatatgcggcttccgtctttctgggatgggccacgaaaaagttcggcaagaggaacaccatctggctgtttgggcctgcaactaccgggaagaccaacatcgcggaggccatagcccacactgtgcccttctacgggtgcgtaaactggaccaatgagaactttcccttcaacgactgtgtcgacaagatggtgatctggtgggaggaggggaagatgaccgccaaggtcgtggagtcggccaaagccattctcggaggaagcaaggtgcgcgtggaccagaaatgcaagtcctcggcccagatagacccgactcccgtgatcgtcacctccaacaccaacatgtgcgccgtgattgacgggaactcaacgaccttcgaacaccagcagccgttgcaagaccggatgttcaaatttgaactcacccgccgtctggatcatgactttgggaaggtcaccaagcaggaagtcaaagactttttccggtgggcaaaggatcacgtggttgaggtggagcatgaattctacgtcaaaaagggtggagccaagaaaagacccgcccccagtgacgcagatataagtgagcccaaacgggtgcgcgagtcagttgcgcagccatcgacgtcagacgcggaagcttcgatcaactacgcagacaggtaccaaaacaaatgttctcgtcacgtgggcatgaatctgatgctgtttccctgcagacaatgcgagagaatgaatcagaattcaaatatctgcttcactcacggacagaaagactgtttagagtgctttcccgtgtcagaatctcaacccgtttctgtcgtcaaaaaggcgtatcagaaactgtgctacattcatcatatcatgggaaaggtgccagacgcttgcactgcctgcgatctggtcaatgtggatttggatgactgcatctttgaacaataaatgatttaaatcaggtatggctgccgatggttatcttccagattggctcgaggacactctctctgaaggaataagacagtggtggaagctcaaacctggcccaccaccaccaaagcccgcagagcggcataaggacgacagcaggggtcttgtgcttcctgggtacaagtacctcggacccttcaacggactcgacaagggagagccggtcaacgaggcagacgccgcggccctcgagcacgacaaagcctacgaccggcagctcgacagcggagacaacccgtacctcaagtacaaccacgccgacgcggagtttcaggagcgccttaaagaagatacgtcttttgggggcaacctcggacgagcagtcttccaggcgaaaaagagggttcttgaacctctgggcctggttgaggaacctgttaagacggctccgggaaaaaagaggccggtagagcactctcctgtggagccagactcctcctcgggaaccggaaaggcgggccagcagcctgcaagaaaaagattgaattttggtcagactggagacgcagactcagtacctgacccccagcctctcggacagccaccagcagccccctctggtctgggaactaatacgatggctacaggcagtggcgcaccaatggcagacaataacgagggcgccgacggagtgggtaattcctccggaaattggcattgcgattccacatggatgggcgacagagtcatcaccaccagcacccgaacctgggccctgcccacctacaacaaccacctctacaaacaaatttccagccaatcaggagcctcgaacgacaatcactactttggctacagcaccccttgggggtattttgacttcaacagattccactgccacttttcaccacgtgactggcaaagactcatcaacaacaactggggattccgacccaagagactcaacttcaagctctttaacattcaagtcaaagaggtcacgcagaatgacggtacgacgacgattgccaataaccttaccagcacggttcaggtgtttactgactcggagtaccagctcccgtacgtcctcggctcggcgcatcaaggatgcctcccgccgttcccagcagacgtcttcatggtgccacagtatggatacctcaccctgaacaacgggagtcaggcagtaggacgctcttcattttactgcctggagtactttccttctcagatgctgcgtaccggaaacaactttaccttcagctacacttttgaggacgttcctttccacagcagctacgctcacagccagagtctggaccgtctcatgaatcctctcatcgaccagtacctgtattacttgagcagaacaaacactccaagtggaaccaccacgcagtcaaggcttcagttttctcaggccggagcgagtgacattcgggaccagtctaggaactggcttcctggaccctgttaccgccagcagcgagtatcaaagacatctgcggataacaacaacagtgaatactcgtggactggagctaccaagtaccacctcaatggcagagactctctggtgaatccgggcccggccatggcaagccacaaggacgatgaagaaaagttttttcctcagagcggggttctcatctttgggaagcaaggctcagagaaaacaaatgtggacattgaaaaggtcatgattacagacgaagaggaaatcaggacaaccaatcccgtggctacggagcagtatggttctgtatctaccaacctccagagaggcaacagacaagcagctaccgcagatgtcaacacacaaggcgttcttccaggcatggtctggcaggacagagatgtgtaccttcaggggcccatctgggcaaagattccacacacggacggacattttcacccctctcccctcatgggtggattcggacttaaacaccctcctccacagattctcatcaagaacaccccggtacctgcgaatccttcgaccaccttcagtgcggcaaagtttgcttccttcatcacacagtactccacgggacaggtcagcgtggagatcgagtgggagctgcagaaggaaaacagcaaacgctggaatcccgaaattcagtacacttccaactacaacaagtctgttaatgtggactttactgtggacactaatggcgtgtattcagagcctcgccccattggcaccagatacctgactcgtaatctgtaattgcttgttaatcaataaaccgtttaattcgtttcagttgaactttggtctctgcgtatttctttcttatctagtttccatggctacgtagataagtagcatggcgggttaatcattaactacaaggaacccctagtgatggagttggccactccctctctgcgcgctcgctcgctcactgaggccgggcgaccaaaggtcgcccgacgcccgggctttgcccgggcggcctcagtgagcgagcgagcgcgcagagagggagtggccaa

SEQ ID NO: 5107 - protein, 735 aa, Adeno-associated virus 2
MAADGYLPDWLEDTLSEGIRQWWKLKPGPPPPKPAERHKDDSRGLVLPGYKYLGPFNGLDKGEPVNEADAAALEHDKAYDRQLDSGDNPYLKYNHADAEFQERLKEDTSFGGNLGRAVFQAKKRVLEPLGLVEEPVKTAPGKKRPVEHSPVEPDSSSGTGKAGQQPARKRLNFGQTGDADSVPDPQPLGEPPATPAAVGPTTMASGGGAPMADNNEGADGVGNASGNWHCDSTWLGDRVITTSTRTWALPTYNNHLYKQISSASTGASNDNHYFGYSTPWGYFDFNRFHCHFSPRDWQRLINNNWGFRPKRLNFKLFNIQVKEVTQNDGTTTIANNLTSTVQVFTDSEYQLPYVLGSAHQGCLPPFPADVFMIPQYGYLTLNNGSQAVGRSSFYCLEYFPSQMLRTGNNFTFSYTFEDVPFHSSYAHSQSLDRLMNPLIDQYLYYLNRTQNQSGSAQDKALLFSRGSPAGMSVQPKNWLPGPCYRQQRVSKTKTDNNNSNFTWTGASKYNLNGRESIINPGTAMASHKDDKDKFFPMSGVMIFGKESAGASNTALDNVMITDEEEIKATNPVATERFGTVAVNFQSSSTDPATGDVHVMGALPGMVWQDRDVYLQGPIWAKIPHTDGHFHPSPLMGGFGLKHPPPQILIKNTPVPANPPAEFSATKFASFITQYSTGQVSVEIEWELQKENSKRWNPEVQYTSNYAKSANVDFTVDNNGLYTEPRPIGTRYLTRP

SEQ ID NO: 5108 - protein, 740 aa, Adeno-associated virus 2
MAADGYLPDWLEDTLSEGIRQWWKLKPGPPPPKPAERHKDDSRGLVLPGYKYLGPFNGLDKGEPVNAADAAALEHDKAYDRQLDSGDNPYLKYNHADAEFQERLKEDTSFGGNLGRAVFQAKKRVLEPLGLVEEPVKTAPGKKRPVEHSPVEPDSSSGTGKAGQQPARKRLNFGQTGDADSVPDPQPLGQPPAAPSGLGTNTMATGSGAPMADNNEGADGVGNSSGNWHCDSTWMGDRVITTSTRTWALPTYNNHLYKQISSQSGASNDNHYFGYSTPWGYFDFNRFHCHFSPRDWQRLINNNWGFRPKRLNFKLFNIQVKEVTQNDGTTTIANNLTSTVQVFTDSEYQLPYVLGSAHQGCLPPFPADVFMVPQYGYLTLNNGSQAVGRSSFYCLEYFPSQMLRTGNNFTFSYTFEDVPFHSSYAHSQSLDRLMNPLIDQYLYYLSRTNTPSGTTTQSGLQFSQAGASDIRDQSRNWLPGPCYRQQRVSKTSADNNNSEYSWTGATKYHLNGRDSLVNPGPAMASHKDDEEKFFPQSGVLIFGKQGSEKTNVDIEKVMITDEEEIRTTNPVATEQYGSVSTNLQRGNRQAATADVNTQGVLPGMVWQDRDVYLQGPIWAKIPHTDGHFHPSPLMGGFGLKHPPPQILIKNTPVPANPSTTFSAAKFASFITQYSTGQVSVEIEWELQKENSKRWNPEIQYTSNYNKSVNVDFTVDTNGVYSEPRPIGTRYLTRNLLLAAA

SEQ ID NO: 5109 - protein, 734 aa, Adeno-associated virus 2
MAADGYLPDWLEDTLSEGIRQWWKLKPGPPPPKPAERHKDDSRGLVLPGYKYLGPFNGLDKGEPVNEADAAALEHDKAYDRQLDSGDNPYLKYNHADAEFQERLKEDTSFGGNLGRAVFQAKKRVLEPLGLVEEPVKTAPGKKRPVEHSPVEPDSSSGTGKAGQQPARKRLNFGQTGDADSVPDPQPLGQPPAAPSGLGTNTMATGSGAPMADNNEGADGVGNSSGNWHCDSTWMGDRVITTSTRTWALPTYNNHLYKQISSQSGASNDNHYFGYSTPWGYFDFNRFHCHFSPRDWQRLINNNWGFRPKRLNFKLFNIQVKEVTQNDGTTTIANNLTSTVQVFTDSEYQLPYVLGSAHQGCLPPFPADVFMVPQYGYLTLNNGSQAVGRSSFYCLEYFPSQMLRTGNNFTFSYTFEDVPFHSSYAHSQSLDRLMNPLIDQYLYYLSRTNTPSGTTTQSGLQFSQAGASDIRDQSRNWLPGPCYRQQRVSKTSADNNNSEYSWTGATMYHLNGRDSLVNPGPAMASHKDDEEKFFPQSGVLIFGKQGSEKTNVDIEKVMITDEEEIRTTNPVATEQYGSVSTNLQRGNRQAATADVNTQGVLPGMVWQDRDVYLQGPIWAKIPHTDGHFHPSPLMGGFGLKHPPPQILIKNTPVPANPSTTFSAAKFASFITQYSTGQVSVEIEWELQKENSKRWNPEIQYTSNYNKSINVDFTVDTNGVYSEPRPIGTRYLTRN

SEQ ID NO: 5110 - protein, 734 aa, Adeno-associated virus 2
MAADGYLPDWLEDTLSEGIRQWWKLKPGPPPPKPAERHKDDSRGLVLPGYKYLGPFNGLDKGEPVNEADAAALEHDKAYDRQLDSGDNPYLKYNHADAEFQERLKEDTSFGGNLGRAVFQAKKRVLEPLGLVEEPVKTAPGKKRPVEHSPVEPDSSSGTGKAGQQPARKRLNFGQTGDADSVPDPQPLGQPPAAPSGLGTNTMATGSGAPMADNNEGADGVGNSSGNWHCDSTWMGDRVITTSTRTWALPTYNNHLYKQISSQSGASNDNHYFGYSTPWGYFDFNRFHCHFSPRDWQRLINNNWGFRPKRLNFKLFNIQVKEVTQNDGTTTIANNLTSTVQVFTDSEYQLPYVLGSAHQGCLPPFPADVFMVPQYGYLTLNNGSQAVGRSSFYCLEYFPSQMLRTGNNFTFSYTFEDVPFHSSYAHSQSLDRLMNPLIDQYLYYLSRTNTPSGTTTQSGLQFSQAGASDIRDQSRNWLPGPCYRQQRVSKTSADNNNSEYSWTGATKYHLNGRDSLVNPGPAMASHKDDEEKFFPQSGVLIFGKQGSEKTNVDIEKVMITDEEEIRTTNPVATEQYGSVSTNLQRGNRQAATADVNTQGVLPGMVWQDRDVYLQGPIWAKIPHTDGHFHPSPLMGGFGLKHPPPQILIKNTPVPANPSTTFSEAKFASFITQYSTGQVSVEIEWELQKENSKRWNPEIQYTSNYNKSVNVDFTVDTNGVYSEPRPIGTRYLTRN

SEQ ID NO: 5111 - protein, 739 aa, Adeno-associated virus 2
MAADGYLPDWLEDTLSEGIRQWWKLKPGPPPPKPAERHKDDSRGLVLPGYKYLGPFNGLDKGEPVNEADAAALEHDKAYDRQLDSGDNPYLKYNHADAEFQERLKEDTSFGGNLGRAVFQAKKRVLEPLGLVEEPVKTAPGKKRPVEHSPVEPDSSSGTGKAGQQPARKRLNFGQTGDADSVPDPQPLGQPPAAPSGLGTNTMATGSGAPMADNNEGADGVGNSSGNWHCDSTWMGDRVITTSTRTWALPTYNNHLYKQISSQSGASNDNHYFGYSTPWGYFDFNRFHCHFSPRDWQRLINNNWGFRPKRLNFKLFNIQVKEVTQNDGTTTIANNLTSTVQVFTDSEYQLPYVLGSAHQGCLPPFPADVFMVPQYGYLTLNNGSQAVGRSSFYCLEYFPSQMLRTGNNFTFSYTFEDVPFHSSYAHSQSLDRLMNPLIDQYLYYLSRTNTPSGTTTQSGLQFSQAGASDIRDQSRNWLPGPCYRQQRVSKTSADNNNSEYSWTGATKYHLNGRDSLVNPGPAMASHKDDEEKFFPQSGVLIFGKQGSEKTNVDIEKVMITDEEEIRTTNPVATEQYGSVSTNLQRGNRQAATADVNTQGVLPGMVWQDRDVYLQGPIWAKIPHTDGHFHPSPLMGGFGLKHPPPQILIKNTPVPANPSTTFSAAKFASFITQYSTGQVSVEIEWELQKENSKRWNPEIQYTSNYNKSVNVDFTVDTNGVYSEPRPIGTRYLTRNLLLAA

SEQ ID NO: 5112 - protein, 725 aa, Adeno-associated virus 2
MAADGYLPDWLEDTLSEGIRQWWKLKPGPPPPKPAERHKDDSRGLVLPGYKYLGPFNGLDKGEPVNEADAAALEHDKAYDRQLDSGDNPYLKYNHADAEFQERLKEDTSFGGNLGRAVFQAKKRVLEPLGLVEEPVKTAPGKKRPVEHSPVEPDSSSGTGKAGQQPARKRLNFGQTGDADSVPDPQPLGQPPAAPSGLGTNTMATGSGAPMADNNEGADGVGNSSGNWHCDSTWMGDRVITTSTRTWALPTYNNHLYKQISSQSGASNDNHYFGYSTPWGYFDFNRFHCHFSPRDWQRLINNNWGFRPKRLNFKLFNIQVKEVTQNDGTTTIANNLTSTVQVFTDSEYQLPYVLGSAHQGCLPPFPADVFMVPQYGYLTLNNGSQAVGRSSFYCLEYFPSQMLRTGNNFTFSYTFEDVPFHSSYAHSQSLDRLMNPLIDQYLYYLSRTNTPSGTTTQSGLQFSQAGASDIRDQSRNWLPGPCYRQQRVSKTSADNNNSEYSWTGATKYHLNGRDSLVNPGPAMASHKDDEEKFFPQSGVLIFGKQGSEKTNVDIEKVMITDEEEIRTTNPVATEQYGSVSTNLQRGNRQAATADVNTQGVLPGMVWQDRDVYLQGPIWAKIPHTDGHFHPSPLMGGFGLKHPPPQILIKNTPVPANPSTTFSAAKFASFITQYSTGQVSVEIEWELQKENSKRWNPEIQYTSNYNKSVNVDFTVDTNGVYSEPRP

SEQ ID NO: 5113 - protein, 707 aa, Adeno-associated virus 2
MAADGYLPDWLEDTLSEGIRQWWKLKPGPPPPKPAERHKDDSRGLVLPGYKYLGPFNGLDKGEPVNEADAAALEHDKAYDRQLDSGDNPYLKYNHADAEFQERLKEDTSFGGNLGRAVFQAKKRVLEPLGLVEEPVKTAPGKKRPVEHSPVEPDSSSGTGKAGQQPARKRLNFGQTGDADSVPDPQPLGQPPAAPSGLGTNTMATGSGAPMADNNEGADGVGNSSGNWHCDSTWMGDRVITTSTRTWALPTYNNHLYKQISSQSGASNDNHYFGYSTPWGYFDFNRFHCHFSPRDWQRLINNNWGFRPKRLNFKLFNIQVKEVTQNDGTTTIANNLTSTVQVFTDSEYQLPYVLGSAHQGCLPPFPADVFMVPQYGYLTLNNGSQAVGRSSFYCLEYFPSQMLRTGNNFTFSYTFEDVPFHSSYAHSQSLDRLMNPLIDQYLYYLSRTNTPSGTTTQSGLQFSQAGASDIRDQSRNWLPGPCYRQQRVSKTSADNNNSEYSWTGATKYHLNGRDSLVNPGPAMASHKDDEEKFFPQSGVLIFGKQGSEKTNVDIEKVMITDEEEIRTTNPVATEQYGSCIYQPPERQQTSSYRRCQHTRRSSRHGLAGQRCVPSGAHLGKDSTHGRTFSPLSPHGWIRTTPSSTDSHQEHPGTCESFDHLQCGKVCFLHHTVLHGTGQRGDRVRAAEGKQQTLESRNSVHFQLQQVC

SEQ ID NO: 5114 - protein, 739 aa, Adeno-associated virus 2; identical to SEQ ID NO: 5111

SEQ ID NO: 5115 - protein, 737 aa, Adeno-associated virus 2
MASDGYLPDWLEDNLSEGIREWWDLKPGAPKPKANQQKQDDGRGLVLPGYKYLGPFNGLDKGEPVNAADAAALEHDKAYDQQLKAGDNPYLRYNHADAEFQERLQEDTSFGGNLGRAVFQAKKRVLEPFGLVEEGAKTAPGKKRPVEQSPQEPDSSSGIGKTGQQPAKKRLNFGQTGDSESVPDPQPLGEPPATPAAVGPTTMASGGGAPMADNNEGADGVGNASGNWHCDSTWLGDRVITTSTRTWALPTYNNHLYKQISSASTGASNDNHYFGYSTPWGYFDFNRFHCHFSPRDWQRLINNNWGFRPKRLNFKLFNIQVKEVTTNDGTTTIANNLTSTVQVFTDSEYQLPYVLGSAHQGCLPPFPADVFMVPQYGYLTLNNGSQAVGRSSFYCLEYFPSQMLRTGNNFTFSYTFEDVPFHSSYAHSQSLDRLMNPLIDQYLYYLSRTNTPSGTTTQSGLQFSQAGASDIRDQSRNWLPGPCYRQQRVSKTSADNNNSEYSWTGATKYHLNGRDSLVNPGPAMASHKDDEEKFFPQSGVLIFGKQGSEKTNVDIEKVMITDEEEIRTTNPVATEQYGSVSTNLQRGNRQAATADVNTQGVLPGMVWQDRDVYLQGPIWAKIPHTDGHFHPSPLMGGFGLKHHPPQILIKNTPVPANPSTTFSAAKFASFITQYSTGQVSVEIEWELQKENSKRWNPEIQYTSNYNKSVNVDFTVDTNGVYSEPRPIGTRYLTRNLL

SEQ ID NO: 5116 - protein, 741 aa, Adeno-associated virus 2
MAADGYLPDWLEDTLSEGIREWWALKPGAPKPKANQQKQDDGRGLVLPGYKYLGPFNGLDKGEPVNEADAAALEHDKAYDQQLQAGDNPYLRYNHADAEFQERLQEDTSFGGNLGRAVFQAKKRVLEPLGLVEEPVKTAPGKKRPVEHSPVEPDSSSGTGKSGQQPARKRLNFGQTGDADSVPDPQPLGQPPAAPSGLGTNTMATGSGAPMADNNEGADGVGNSSGNWHCDSTWMGDRVITTSTRTWALPTYNNHLYKQISSQSGASNDNHYFGYSTPWGYFDFNRFHCHFSPRDWQRLINNNWGFRPKRLNFKLFNIQVKEVTQNDGTTTIANNLTSTVQVFTDSEYQLPYVLGSAHQGCLPPFPADVFMVPQYGYLTLNNGSQAVGRSSFYCLEYFPSQMLRTGNNFTFSYTFEDVPFHSSYAHSQSLDRLMNPLIDQYLYYLSRTNTPSGTTTQSGLQFSQAGASDIRDQSRNWLPGPCYRQQRVSKTSADNNNSEYSWTGATKYHLNGRDSLVNPGPAMASHKDDEEKFFPQSGVLIFGKQGSEKTNVDIEKVMITDEEEIRTTNPVATEQYGSVSTNLQRGNLANHNNTTNARQAATADVNTQGVLPGMVWQDRDVYLQGPIWAKIPHTDGHFHPSPLMGGFGLKHPPPQILIKNTPVPANPSTTFSAAKFASFITQYSTGQVSVEIEWELQKENSKRWNPEIQYTSNYNKSINVDFTVDTNGVYSEPRPIGTRYL

SEQ ID NO: 5117 - protein, 730 aa, Adeno-associated virus 2
MASDGYLPDWLEDNLSEGIREWWDLKPGAPKPKANQQKQDDGRGLVLPGYKYLGPFNGLDKGEPVNAADAAALEHDKAYDQQLKAGDNPYLRYNHADAEFQERLQEDTSFGGNLGRAVFQAKKRVLEPFGLVEEGAKTAPGKKRPVEQSPQEPDSSSGIGKTGQQPAKKRLNFGQTGDSESVPDPQPLGEPPATPAAVGPTTMASGGGAPMADNNEGADGVGNASGNWHCDSTWLGDRVITTSTRTWALPTYNNHLYKQISSASTGASNDNHYFGYSTPWGYFDFNRFHCHFSPRDWQRLINNNWGFRPKRLNFKLFNIQVKEVTTNDGVTTIANNLTSTVQVFSDSEYQLPYVLGSAHQGCLPPFPADVFMIPQYGYLTLNNGSQAVGRSSFYCLEYFPSQMLRTGNNFTFSYTFEDVPFHSSYAHSQSLDRLMNPLIDQYLYYLNRTQNQSGSAQNNDLLFSRGSPAGMSVQPKNWLPGPCYRQQRVSKTKTDNNNSNFTWTGASKYNLNGRESIINPGTAMASHKDDKDKFFPMSGVMIFGKESAGASNTALDNVMITDEEEIKATNPVATERFGTVAVNLQSSSTDPATGDVHVMGALPGMVWQDRDVYLQGPIWAKIPHTDGHFHPSPLMGGFGLKNPPPQILIKNTPVPANPPAEFSATKFASFITQYSTGQVSVEIEWELQKENSKRWNPEVQYTSNYAKSANVDFTVDNNGLYTEPRPIGTR

SEQ ID NO: 5118 - protein, 735 aa, Adeno-associated virus 2
  MOD_RES 239: note = Any amino acid
MASDGYLPDWLEDNLSEGIREWWDLKPGAPKPKANQQKQDDGRGLVLPGYKYLGPFNGLDKGEPVNAADAAALEHDKAYDQQLKAGDNPYLRYNHADAEFQERLQEDTSFGGNLGRAVFQAKKRVLEPFGLVEEGAKTAPGKKRPVEQSPQEPDSSSGIGKTGQQPAKKRLNFGQTGDSESVPDPQPLGEPPATPAAVGPTTMASGGGAPMADNNEGADGVGNASGNWHCDSTWLGDRXITTSTRTWALPTYNNHLYKQISSASTGASNDNHYFGYSTPWGYFDFNRFHCHFSPRDWQRLINNNWGFRPKRLNFKLFNIQVKEVTTNDGVTTIANNLTSTVQVFSDSEYQLPYVLGSAHQGCLPPFPADVFMIPQYGYLTLNNGSQAVGRSSFYCLEYFPSQMLRTGNNFTFSYTFEDVPFHSSYAHSQSLDRLMNPLIDQYLYYLNRTQNQSGSAQNNDLLFSRGSPAGMSVQPKNWLPGPCYRQQRVSKTKTDNNNSNFTWTGASKYNLNGRESIINPGTAMASHKDDKDKFFPMSGVMIFGKESAGASNTALDNVMITDEEEIKATNPVATERFGTVAVNLQSSSTDPATGDVHVMGALPGMVWQDRDVYLQGPIWAKIPHTDGHFHPSPLMGGFGLKNPPPQILIKNTPVPANPPAEFSATKFASFITQYSTGQVSVEIEWELQKENSKRWNPEVQYTSNYAKSANVDFTVDNNGLYTEPRPIGTRYLTRP

SEQ ID NO: 5119 - protein, 733 aa, Adeno-associated virus 2
MASDGYLPDWLEDNLSEGIREWWDLKPGAPKPKANQQKQDDGRGLVLPGYKYLGPFNGLDKGEPVNAADAAALEHDKAYDQQLKAGDNPYLRYNHADAEFQERLQEDTSFGGNLGRAVFLAKKRVLEPFGLVEEGAKTAPGKKRPVEQSPQEPDSSSGIGKTGQQPAKKRLNFGQTGDSESVPDPQPLGEPPATPAAVGPTTMASGGGAPMADNNEGADGVGNASGNWHCDSTWLGDRVITTSTRTWALPTYNNHLYKQISSASTGASNDNHYFGYSTPWGYFDFNRFHCHFSPRDWQRLINNNWGFRPKRLNFKLFNIQVKEVTTNDGVTTIANNLTSTVQVFSDSEYQLPYVLGSAHQGCLPPFPADVFMIPQYGYLTLNNGSQAVGRSSFYCLEYFPSQMLRTGNNFTFSYTFEDVPFHSSYAHSQSLDRLMNPLIDQYLYYLNRTQNQSGSAQNNDLLFSRGSPAGMSVQPKNWLPGPCYRQQRVSKTKTDNNNSNFTWTGASKYNLNGRESIINPGTAMASHKDDKDKFFPMSGVMIFGKESAGASNTALDNVMITDEEEIKATNPVATERFGTVAVNLQSSSTDPATGDVHVMGALPGMVWQDRDVYLQGPIWAKIPHTDGHFHPSPLMGGFGLKNPPPQILIKNTPVPANPPAEFSATKFASFITQYSTGQVSVEIEWELQKENSKRWNPEVQYTSNYAKSANVDFTVDNNGLYTEPRPIGTRYLT

SEQ ID NO: 5120 - protein, 734 aa, Adeno-associated virus 2
MAADGYLPDWLEDTLSEGIRQWWKLKPGPPPPKPAERHKDDSRGLVLPGCKYLGPFNGLDKGEPVNEADAAALEHDKAYDRQLDSGDNPYLKYNHADAEFQERLKEDTSFGGNLGRAVFQAKKRVLEPLGLVEEPVKTAPGKKRPVEHSPVEPDSSSGTGKAGQQPARKRLNFGQTGDADSVPDPQPLGQPPAAPSGLGTNTMATGSGAPMADNNEGADGVGNSSGNWHCDSTWMGDRVITTSTRTWALPTYNNHLYKQISSQSGASNDNHYFGYSTPWGYFDFNRFHCHFSPRDWQRLINNNWGFRPKRLNFKLFNIQVKEVTQNDGTTTIANNLTSTVQVFSDSEYQLPYVLGSAHQGCLPPFPADVFMIPQYGYLTLNNGSQAVGRSSFYCLEYFPSQMLRTGNNFTFNYTFEDVPFHSSYAHSQSLDRLMNPLIDQYLYYLNRTQNQSGSAQNNDLLFSRGSPAGMSVQPKNWLPGPCYRQQRVSKTKTDNNNSNFTWTGASKYNLNGRESIINPGTAMASHKDDKDKFFPMSGVMIFGKESAGASNTALDNVMITDEEEIKATNPVATERFGTVAVNLQSSSTDPATGDVHVMGALPGMVWQDRDVYLQGPIWAKIPHTDGHFHPSPLMGGFGLKNPPPQILIKNTPVPANPPAEFSATKFASFITQYSTGQVSVEIEWELQKENSKRWNPEVQYTSNYAKSANVDFTVDNNGLYTEPRPIGTRYLTRP

SEQ ID NO: 5121 - protein, 734 aa, Adeno-associated virus 2
MAADGYLPDWLEDTLSEGIRQWWKLKPGPPPPKPAERHKDDSRGLVLPGYKYLGPFNGLDKGEPVNEADAAALEHDKAYDRQLDSGDNPYLKYNHADAEFQERLKEDTSFGGNLGRAVFQAKKRVLEPLGLVEEPVKTAPGKKRPVEHSPVEPDSSSGTGKAGQQPARKRLNFGQTGDADSVPDPQPLGQPPAAPSGLGTNTMATGSGAPMADNNEGADGVGNSSGNWHCDSTWMGDRVITTSTRTWALSTYNNHLYKQISSQSGASNDNHYFGYSTPWGYFDFNRFHCHFSPRDWQRLINNNWGFRPKRLNFKLFNIQVKEVTQNDGTTTIANNLTSTVQVFTDSEYQLPYVLGSAHQGCLPPFPADVFMVPQYGYLTLNNGSQAVGRSSFYCLEYFPSQMLRTGNNFTFSYTFEDVPFHSSYAHSQSLDRLMNPLIDQYLYYLSRTNTPSGTTTQSRLQFSQAGASDIRDQSRNWLPGPCYRQQRVSKTSADNNNSEYSWTGATKYHLNGRDSLVNPGPAMASHKDDEEKFFPQSGVLIFGKQGSEKTNVDIEKVMITDEEEIRTTNPVATEQYGSVSTNLQRGNRQAATADVNTQGVLPGMVWQDRDVYLQGPIWAKIPHTDGHFHPSPLMGGFGLKHPPPQILIKNTPVPANPSTTFSAAKFASFITQYSTGQVSVEIEWELQKENSKRWNPEIQYTSNYNKSINVDFTVDTNGVYSEPRPIGTRYLTRN

SEQ ID NO: 5122 - protein, 738 aa, Adeno-associated virus 2
MAADGYLPDWLEDTLSEGIRQWWKLKPGPPPPKPAERHKDDSRGLVLPGYKYLGPFNGLDKGEPVNEADAAALEHDKAYDRQLDGGDNPYLKYNHADAEFQERLKEDTSFGGNLGRAVFQAKKRVLEPLGLVEEPVKTAPGKKRPVEHSPVEPDSSSGTGKAGQQPARKRLNFGQTGDADSVPDPQPLGQPPAAPSGLGTNTMATGSGAPMADNNEGADGVGNSSGNWHCDSTWMGDRVITTSTRTWALPTYNNHLYKQISSQSGASNDNHYFGYSTPWGYFDFNRFHCHFSPRDWQRLINNNWGFRPKRLNFKLFNIQVKEVTQNDGTTTIANNLTSTVQVFTDSEYQLPYVLGSAHQGCLPPFPADVFMVPQYGYLTLNNGSQAVGRSSFYCLEYFPSQMLRTGNNFTFSYTFEDVPFHSSYAHSQSLDRLMNPLIDQYLYYLSRTNTPSGTTTQSGLQFSQAGASDIRDQSRNWLPGPCYRQQRVSKTSADNNNSEYSWTGATKYHLNGRDSLVNPGPAMASHKDDEEKFFPQSGVLIFGKQGSEKTNVDIEKVMITDEEEIRTTNPVATEQYGSVSTNLQRGNRQAATADVNTQGVLPGMVWQDRDVYLQGPIWAKIPHTDGHFHPSPLMGGFGLKHPPPQILIKNTPVPANPSTTFSAAKFASFITQYSTGQVSVEIEWELQKENSKRWNPEIQYTSNYNKSVNVDFTVDTNGVYSEPRPIGTRYLTRNLLRP

SEQ ID NO: 5123 - protein, 736 aa, Adeno-associated virus 3; identical to SEQ ID NO: 4757

SEQ ID NO: 5124 - DNA, 4726 bp, Adeno-associated virus 3
  source 1..4726: mol_type = other DNA
ttggccactccctctatgcgcactcgctcgctcggtggggcctggcgaccaaaggtcgccagacggacgtgctttgcacgtccggccccaccgagcgagcgagtgcgcatagagggagtggccaactccatcactagaggtatggcagtgacgtaacgcgaagcgcgcgaagcgagaccacgcctaccagctgcgtcagcagtcaggtgacccttttgcgacagtttgcgacaccacgtggccgctgagggtatatattctcgagtgagcgaaccaggagctccattttgaccgcgaaatttgaacgagcagcagccatgccggggttctacgagattgtcctgaaggtcccgagtgacctggacgagcgcctgccgggcatttctaactcgtttgttaactgggtggccgagaaggaatgggacgtgccgccggattctgacatggatccgaatctgattgagcaggcacccctgaccgtggccgaaaagcttcagcgcgagttcctggtggagtggcgccgcgtgagtaaggccccggaggccctcttttttgtccagttcgaaaagggggagacctacttccacctgcacgtgctgattgagaccatcggggtcaaatccatggtggtcggccgctacgtgagccagattaaagagaagctggtgacccgcatctaccgcggggtcgagccgcagcttccgaactggttcgcggtgaccaaaacgcgaaatggcgccgggggcgggaacaaggtggtggacgactgctacatccccaactacctgctccccaagacccagcccgagctccagtgggcgtggactaacatggaccagtatttaagcgcctgtttgaatctcgcggagcgtaaacggctggtggcgcagcatctgacgcacgtgtcgcagacgcaggagcagaacaaagagaatcagaaccccaattctgacgcgccggtcatcaggtcaaaaacctcagccaggtacatggagctggtcgggtggctggtggaccgcgggatcacgtcagaaaagcaatggattcaggaggaccaggcctcgtacatctccttcaacgccgcctccaactcgcggtcccagatcaaggccgcgctggacaatgcctccaagatcatgagcctgacaaagacggctccggactacctggtgggcagcaacccgccggaggacattaccaaaaatcggatctaccaaatcctggagctgaacgggtacgatccgcagtacgcggcctccgtcttcctgggctgggcgcaaaagaagttcgggaagaggaacaccatctggctctttgggccggccacgacgggtaaaaccaacatcgcggaagccatcgcccacgccgtgcccttctacggctgcgtaaactggaccaatgagaactttcccttcaacgattgcgtcgacaagatggtgatctggtgggaggagggcaagatgacggccaaggtcgtggagagcgccaaggccattctgggcggaagcaaggtgcgcgtggaccaaaagtgcaagtcatcggcccagatcgaacccactcccgtgatcgtcacctccaacaccaacatgtgcgccgtgattgacgggaacagcaccaccttcgagcatcagcagccgctgcaggaccggatgtttgaatttgaacttacccgccgtttggaccatgactttgggaaggtcaccaaacaggaagtaaaggactttttccggtgggcttccgatcacgtgactgacgtggctcatgagttctacgtcagaaagggtggagctaagaaacgccccgcctccaatgacgcggatgtaagcgagccaaaacgggagtgcacgtcacttgcgcagccgacaacgtcagacgcggaagcaccggcggactacgcggacaggtaccaaaacaaatgttctcgtcacgtgggcatgaatctgatgctttttccctgtaaaacatgcgagagaatgaatcaaatttccaatgtctgttttacgcatggtcaaagagactgtggggaatgcttccctggaatgtcagaatctcaacccgtttctgtcgtcaaaaagaagacttatcagaaactgtgtccaattcatcatatcctgggaagggcacccgagattgcctgttcggcctgcgatttggccaatgtggacttggatgactgtgtttctgagcaataaatgacttaaaccaggtatggctgctgacggttatcttccagattggctcgaggacaacctttctgaaggcattcgtgagtggtgggctctgaaacctggagtccctcaacccaaagcgaaccaacaacaccaggacaaccgtcggggtcttgtgcttccgggttacaaatacctcggacccggtaacggactcgacaaaggagagccggtcaacgaggcggacgcggcagccctcgaacacgacaaagcttacgaccagcagctcaaggccggtgacaacccgtacctcaagtacaaccacgccgacgccgagtttcaggagcgtcttcaagaagatacgtcttttgggggcaaccttggcagagcagtcttccaggccaaaaagaggatccttgagcctcttggtctggttgaggaagcagctaaaacggctcctggaaagaagggggctgtagatcagtctcctcaggaaccggactcatcatctggtgttggcaaatcgggcaaacagcctgccagaaaaagactaaatttcggtcagactggagactcagagtcagtcccagaccctcaacctctcggagaaccaccagcagcccccacaagtttgggatctaatacaatggcttcaggcggtggcgcaccaatggcagacaataacgagggtgccgatggagtgggtaattcctcaggaaattggcattgcgattcccaatggctgggcgacagagtcatcaccaccagcaccagaacctgggccctgcccacttacaacaaccatctctacaagcaaatctccagccaatcaggagcttcaaacgacaaccactactttggctacagcaccccttgggggtattttgactttaacagattccactgccacttctcaccacgtgactggcagcgactcattaacaacaactggggattccggcccaagaaactcagcttcaagctcttcaacatccaagttagaggggtcacgcagaacgatggcacgacgactattgccaataaccttaccagcacggttcaagtgtttacggactcggagtatcagctcccgtacgtgctcgggtcggcgcaccaaggctgtctcccgccgtttccagcggacgtcttcatggtccctcagtatggatacctcaccctgaacaacggaagtcaagcggtgggacgctcatccttttactgcctggagtacttcccttcgcagatgctaaggactggaaataacttccaattcagctataccttcgaggatgtaccttttcacagcagctacgctcacagccagagtttggatcgcttgatgaatcctcttattgatcagtatctgtactacctgaacagaacgcaaggaacaacctctggaacaaccaaccaatcacggctgctttttagccaggctgggcctcagtctatgtctttgcaggccagaaattggctacctgggccctgctaccggcaacagagactttcaaagactgctaacgacaacaacaacagtaactttccttggacagcggccagcaaatatcatctcaatggccgcgactcgctggtgaatccaggaccagctatggccagtcacaaggacgatgaagaaaaatttttccctatgcacggcaatctaatatttggcaaagaagggacaacggcaagtaacgcagaattagataatgtaatgattacggatgaagaagagattcgtaccaccaatcctgtggcaacagagcagtatggaactgtggcaaataacttgcagagctcaaatacagctcccacgactggaactgtcaatcatcagggggccttacctggcatggtgtggcaagatcgtgacgtgtaccttcaaggacctatctgggcaaagattcctcacacggatggacactttcatccttctcctctgatgggaggctttggactgaaacatccgcctcctcaaatcatgatcaaaaatactccggtaccggcaaatcctccgacgactttcagcccggccaagtttgcttcatttatcactcagtactccactggacaggtcagcgtggaaattgagtgggagctacagaaagaaaacagcaaacgttggaatccagagattcagtacacttccaactacaacaagtctgttaatgtggactttactgtagacactaatggtgtttatagtgaacctcgccctattggaacccggtatctcacacgaaacttgtgaatcctggttaatcaataaaccgtttaattcgtttcagttgaactttggctcttgtgcacttctttatctttatcttgtttccatggctactgcgtagataagcagcggcctgcggcgcttgcgcttcgcggtttacaactgctggttaatatttaactctcgccatacctctagtgatggagttggccactccctctatgcgcactcgctcgctcggtggggcctggcgaccaaaggtcgccagacggacgtgctttgcacgtccggccccaccgagcgagcgagtgcgcatagagggagtggccaa

SEQ ID NO: 5125 - protein, 736 aa, Adeno-associated virus 3A; identical to SEQ ID NO: 4757

SEQ ID NO: 5126 - protein, 624 aa, Adeno-associated virus 3A
MPGFYEIVLKVPSDLDERLPGISNSFVNWVAEKEWDVPPDSDMDPNLIEQAPLTVAEKLQREFLVEWRRVSKAPEALFFVQFEKGETYFHLHVLIETIGVKSMVVGRYVSQIKEKLVTRIYRGVEPQLPNWFAVTKTRNGAGGGNKVVDDCYIPNYLLPKTQPELQWAWTNMDQYLSACLNLAERKRLVAQHLTHVSQTQEQNKENQNPNSDAPVIRSKTSARYMELVGWLVDRGITSEKQWIQEDQASYISFNAASNSRSQIKAALDNASKIMSLTKTAPDYLVGSNPPEDITKNRIYQILELNGYDPQYAASVFLGWAQKKFGKRNTIWLFGPATTGKTNIAEAIAHAVPFYGCVNWTNENFPFNDCVDKMVIWWEEGKMTAKVVESAKAILGGSKVRVDQKCKSSAQIEPTPVIVTSNTNMCAVIDGNSTTFEHQQPLQDRMFEFELTRRLDHDFGKVTKQEVKDFFRWASDHVTDVAHEFYVRKGGAKKRPASNDADVSEPKRECTSLAQPTTSDAEAPADYADRYQNKCSRHVGMNLMLFPCKTCERMNQISNVCFTHGQRDCGECFPGMSESQPVSVVKKKTYQKLCPIHHILGRAPEIACSACDLANVDLDDCVSEQ

SEQ ID NO: 5127 - protein, 736 aa, Adeno-associated virus 3B
MAADGYLPDWLEDNLSEGIREWWALKPGVPQPKANQQHQDNRRGLVLPGYKYLGPGNGLDKGEPVNEADAAALEHDKAYDQQLKAGDNPYLKYNHADAEFQERLQEDTSFGGNLGRAVFQAKKRILEPLGLVEEAAKTAPGKKRPVDQSPQEPDSSSGVGKSGKQPARKRLNFGQTGDSESVPDPQPLGEPPAAPTSLGSNTMASGGGAPMADNNEGADGVGNSSGNWHCDSQWLGDRVITTSTRTWALPTYNNHLYKQISSQSGASNDNHYFGYSTPWGYFDFNRFHCHFSPRDWQRLINNNWGFRPKKLSFKLFNIQVKEVTQNDGTTTIANNLTSTVQVFTDSEYQLPYVLGSAHQGCLPPFPADVFMVPQYGYLTLNNGSQAVGRSSFYCLEYFPSQMLRTGNNFQFSYTFEDVPFHSSYAHSQSLDRLMNPLIDQYLYYLNRTQGTTSGTTNQSRLLFSQAGPQSMSLQARNWLPGPCYRQQRLSKTANDNNNSNFPWTAASKYHLNGRDSLVNPGPAMASHKDDEEKFFPMHGNLIFGKEGTTASNAELDNVMITDEEEIRTTNPVATEQYGTVANNLQSSNTAPTTRTVNDQGALPGMVWQDRDVYLQGPIWAKIPHTDGHFHPSPLMGGFGLKHPPPQIMIKNTPVPANPPTTFSPAKFASFITQYSTGQVSVEIEWELQKENSKRWNPEIQYTSNYNKSVNVDFTVDTNGVYSEPRPIGTRYLTRNL

SEQ ID NO: 5128 - protein, 624 aa, Adeno-associated virus 3B
MPGFYEIVLKVPSDLDEHLPGISNSFVNWVAEKEWELPPDSDMDPNLIEQAPLTVAEKLQREFLVEWRRVSKAPEALFFVQFEKGETYFHLHVLIETIGVKSMVVGRYVSQIKEKLVTRIYRGVEPQLPNWFAVTKTRNGAGGGNKVVDDCYIPNYLLPKTQPELQWAWTNMDQYLSACLNLAERKRLVAQHLTHVSQTQEQNKENQNPNSDAPVIRSKTSARYMELVGWLVDRGITSEKQWIQEDQASYISFNAASNSRSQIKAALDNASKIMSLTKTAPDYLVGSNPPEDITKNRIYQILELNGYDPQYAASVFLGWAQKKFGKRNTIWLFGPATTGKTNIAEAIAHAVPFYGCVNWTNENFPFNDCVDKMVIWWEEGKMTAKVVESAKAILGGSKVRVDQKCKSSAQIEPTPVIVTSNTNMCAVIDGNSTTFEHQQPLQDRMFKFELTRRLDHDFGKVTKQEVKDFFRWASDHVTDVAHEFYVRKGGAKKRPASNDADVSEPKRQCTSLAQPTTSDAEAPADYADRYQNKCSRHVGMNLMLFPCKTCERMNQISNVCFTHGQRDCGECFPGMSESQPVSVVKKKTYQKLCPIHHILGRAPEIACSACDLANVDLDDCVSEQ

SEQ ID NO: 5129 - DNA, 4722 bp, Adeno-associated virus 3B
  source 1..4722: mol_type = other DNA
tggccactccctctatgcgcactcgctcgctcggtggggcctggcgaccaaaggtcgccagacggacgtgctttgcacgtccggccccaccgagcgagcgagtgcgcatagagggagtggccaactccatcactagaggtatggcagtgacgtaacgcgaagcgcgcgaagcgagaccacgcctaccagctgcgtcagcagtcaggtgacccttttgcgacagtttgcgacaccacgtggccgctgagggtatatattctcgagtgagcgaaccaggagctccattttgaccgcgaaatttgaacgagcagcagccatgccggggttctacgagattgtcctgaaggtcccgagtgacctggacgagcacctgccgggcatttctaactcgtttgttaactgggtggccgagaaggaatgggagctgccgccggattctgacatggatccgaatctgattgagcaggcacccctgaccgtggccgaaaagcttcagcgcgagttcctggtggagtggcgccgcgtgagtaaggccccggaggccctcttttttgtccagttcgaaaagggggagacctacttccacctgcacgtgctgattgagaccatcggggtcaaatccatggtggtcggccgctacgtgagccagattaaagagaagctggtgacccgcatctaccgcggggtcgagccgcagcttccgaactggttcgcggtgaccaaaacgcgaaatggcgccgggggcgggaacaaggtggtggacgactgctacatccccaactacctgctccccaagacccagcccgagctccagtgggcgtggactaacatggaccagtatttaagcgcctgtttgaatctcgcggagcgtaaacggctggtggcgcagcatctgacgcacgtgtcgcagacgcaggagcagaacaaagagaatcagaaccccaattctgacgcgccggtcatcaggtcaaaaacctcagccaggtacatggagctggtcgggtggctggtggaccgcgggatcacgtcagaaaagcaatggattcaggaggaccaggcctcgtacatctccttcaacgccgcctccaactcgcggtcccagatcaaggccgcgctggacaatgcctccaagatcatgagcctgacaaagacggctccggactacctggtgggcagcaacccgccggaggacattaccaaaaatcggatctaccaaatcctggagctgaacgggtacgatccgcagtacgcggcctccgtcttcctgggctgggcgcaaaagaagttcgggaagaggaacaccatctggctctttgggccggccacgacgggtaaaaccaacatcgcggaagccatcgcccacgccgtgcccttctacggctgcgtaaactggaccaatgagaactttcccttcaacgattgcgtcgacaagatggtgatctggtgggaggagggcaagatgacggccaaggtcgtggagagcgccaaggccattctgggcggaagcaaggtgcgcgtggaccaaaagtgcaagtcatcggcccagatcgaacccactcccgtgatcgtcacctccaacaccaacatgtgcgccgtgattgacgggaacagcaccaccttcgagcatcagcagccgctgcaggaccggatgtttaaatttgaacttacccgccgtttggaccatgactttgggaaggtcaccaaacaggaagtaaaggactttttccggtgggcttccgatcacgtgactgacgtggctcatgagttctacgtcagaaagggtggagctaagaaacgccccgcctccaatgacgcggatgtaagcgagccaaaacggcagtgcacgtcacttgcgcagccgacaacgtcagacgcggaagcaccggcggactacgcggacaggtaccaaaacaaatgttctcgtcacgtgggcatgaatctgatgctttttccctgtaaaacatgcgagagaatgaatcaaatttccaatgtctgttttacgcatggtcaaagagactgtggggaatgcttccctggaatgtcagaatctcaacccgtttctgtcgtcaaaaagaagacttatcagaaactgtgtccaattcatcatatcctgggaagggcacccgagattgcctgttcggcctgcgatttggccaatgtggacttggatgactgtgtttctgagcaataaatgacttaaaccaggtatggctgctgacggttatcttccagattggctcgaggacaacctttctgaaggcattcgtgagtggtgggctctgaaacctggagtccctcaacccaaagcgaaccaacaacaccaggacaaccgtcggggtcttgtgcttccgggttacaaatacctcggacccggtaacggactcgacaaaggagagccggtcaacgaggcggacgcggcagccctcgaacacgacaaagcttacgaccagcagctcaaggccggtgacaacccgtacctcaagtacaaccacgccgacgccgagtttcaggagcgtcttcaagaagatacgtcttttgggggcaaccttggcagagcagtcttccaggccaaaaagaggatccttgagcctcttggtctggttgaggaagcagctaaaacggctcctggaaagaagaggcctgtagatcagtctcctcaggaaccggactcatcatctggtgttggcaaatcgggcaaacagcctgccagaaaaagactaaatttcggtcagactggcgactcagagtcagtcccagaccctcaacctctcggagaaccaccagcagcccccacaagtttgggatctaatacaatggcttcaggcggtggcgcaccaatggcagacaataacgagggtgccgatggagtgggtaattcctcaggaaattggcattgcgattcccaatggctgggcgacagagtcatcaccaccagcaccagaacctgggccctgcccacttacaacaaccatctctacaagcaaatctccagccaatcaggagcttcaaacgacaaccactactttggctacagcaccccttgggggtattttgactttaacagattccactgccacttctcaccacgtgactggcagcgactcattaacaacaactggggattccggcccaagaaactcagcttcaagctcttcaacatccaagttaaagaggtcacgcagaacgatggcacgacgactattgccaataaccttaccagcacggttcaagtgtttacggactcggagtatcagctcccgtacgtgctcgggtcggcgcaccaaggctgtctcccgccgtttccagcggacgtcttcatggtccctcagtatggatacctcaccctgaacaacggaagtcaagcggtgggacgctcatccttttactgcctggagtacttcccttcgcagatgctaaggactggaaataacttccaattcagctataccttcgaggatgtaccttttcacagcagctacgctcacagccagagtttggatcgcttgatgaatcctcttattgatcagtatctgtactacctgaacagaacgcaaggaacaacctctggaacaaccaaccaatcacggctgctttttagccaggctgggcctcagtctatgtctttgcaggccagaaattggctacctgggccctgctaccggcaacagagactttcaaagactgctaacgacaacaacaacagtaactttccttggacagcggccagcaaatatcatctcaatggccgcgactcgctggtgaatccaggaccagctatggccagtcacaaggacgatgaagaaaaatttttccctatgcacggcaatctaatatttggcaaagaagggacaacggcaagtaacgcagaattagataatgtaatgattacggatgaagaagagattcgtaccaccaatcctgtggcaacagagcagtatggaactgtggcaaataacttgcagagctcaaatacagctcccacgactagaactgtcaatgatcagggggccttacctggcatggtgtggcaagatcgtgacgtgtaccttcaaggacctatctgggcaaagattcctcacacggatggacactttcatccttctcctctgatgggaggctttggactgaaacatccgcctcctcaaatcatgatcaaaaatactccggtaccggcaaatcctccgacgactttcagcccggccaagtttgcttcatttatcactcagtactccactggacaggtcagcgtggaaattgagtgggagctacagaaagaaaacagcaaacgttggaatccagagattcagtacacttccaactacaacaagtctgttaatgtggactttactgtagacactaatggtgtttatagtgaacctcgccctattggaacccggtatctcacacgaaacttgtaatcctggttaatcaataaaccgtttaattcgtttcagttgaactttggctcttgtgcacttcttatcttatcttgtttccatggctactgcgtagataagcagcggcctgcggcgcttgcgcttcgcggtttacaactgctggttaatatttaactctcgccatacctctagtgatggagttggccactccctctatgcgcactcgctcgctcggtggggccggacgtgcaaagcacgtccgtctggcgacctttggtcgccaggccccaccgagcgagcgagtgcgcatagagggagtggccaa

SEQ ID NO: 5130 - DNA, 1800 bp, Adeno-associated virus 4
  variation 342: note = a, c, t or g
  source 1..1800: mol_type = other DNA
acggctcctggaaagaagagaccgttgattgaatccccccagcagcccgactcctccacgggtatcggcaaaaaaggcaagcagccggctaaaaagaagctcgttttcgaagacgaaactggagcaggcgacggaccccctgagggatcaacttccggagccatgtctgatgacagtgagatgcgtgcagcagctggcggagctgcagtcgagggsggacaaggtgccgatggagtgggtaatgcctcgggtgattggcattgcgattccacctggtctgagggccacgtcacgaccaccagcaccagaacctgggtcttgcccacctacaacaaccacctntacaagcgactcggagagagcctgcagtccaacacctacaacggattctccaccccctggggatactttgacttcaaccgcttccactgccacttctcaccacgtgactggcagcgactcatcaacaacaactggggcatgcgacccaaagccatgcgggtcaaaatcttcaacatccaggtcaaggaggtcacgacgtcgaacggcgagacaacggtggctaataaccttaccagcacggttcagatctttgcggactcgtcgtacgaactgccgtacgtgatggatgcgggtcaagagggcagcctgcctccttttcccaacgacgtctttatggtgccccagtacggctactgtggactggtgaccggcaacacttcgcagcaacagactgacagaaatgccttctactgcctggagtactttccttcgcagatgctgcggactggcaacaactttgaaattacgtacagttttgagaaggtgcctttccactcgatgtacgcgcacagccagagcctggaccggctgatgaaccctctcatcgaccagtacctgtggggactgcaatcgaccaccaccggaaccaccctgaatgccgggactgccaccaccaactttaccaagctgcggcctaccaacttttccaactttaaaaagaactggctgcccgggccttcaatcaagcagcagggcttctcaaagactgccaatcaaaactacaagatccctgccaccgggtcagacagtctcatcaaatacgagacgcacagcactctggacggaagatggagtgccctgacccccggacctccaatggccacggctggacctgcggacagcaagttcagcaacagccagctcatctttgcggggcctaaacagaacggcaacacggccaccgtacccgggactctgatcttcacctctgaggaggagctggcagccaccaacgccaccgatacggacatgtggggcaacctacctggcggtgaccagagcaacagcaacctgccgaccgtggacagactgacagccttgggagccgtgcctggaatggtctggcaaaacagagacatttactaccagggtcccatttgggccaagattcctcataccgatggacactttcacccctcaccgctgattggtgggtttgggctgaaacacccgcctcctcaaatttttatcaagaacaccccggtacctgcgaatcctgcaacgaccttcagctctactccggtaaactccttcattactcagtacagcactggccaggtgtcggtgcagattgactgggagatccagaaggagcggtccaaacgctggaaccccgaggtccagtttacctccaactacggacagcaaaactctctgttgtgggctcccgatgcggctgggaaatacactgagcctagggctatcggtacccgctacctcacccaccacctgtaataa

SEQ ID NO: 5131 - DNA, 2208 bp, Adeno-associated virus 4
  variation 750: note = a, c, t or g
  source 1..2208: mol_type = other DNA
atgactgacggttaccttccagattggctagaggacaacctctctgaaggcgttcgagagtggtgggcgctgcaacctggagcccctaaacccaaggcaaatcaacaacatcaggacaacgctcggggtcttgtgcttccgggttacaaatacctcggacccggcaacggactcgacaagggggaacccgtcaacgcagcggacgcggcagccctcgagcacgacaaggcctacgaccagcagctcaaggccggtgacaacccctacctcaagtacaaccacgccgacgcggagttccagcagcggcttcagggcgacacatcgtttgggggcaacctcggcagagcagtcttccaggccaaaaagagggttcttgaacctcttggtctggttgagcaagcgggtgagacggctcctggaaagaagagaccgttgattgaatccccccagcagcccgactcctccacgggtatcggcaaaaaaggcaagcagccggctaaaaagaagctcgttttcgaagacgaaactggagcaggcgacggaccccctgagggatcaacttccggagccatgtctgatgacagtgagatgcgtgcagcagctggcggagctgcagtcgagggsggacaaggtgccgatggagtgggtaatgcctcgggtgattggcattgcgattccacctggtctgagggccacgtcacgaccaccagcaccagaacctgggtcttgcccacctacaacaaccacctntacaagcgactcggagagagcctgcagtccaacacctacaacggattctccaccccctggggatactttgacttcaaccgcttccactgccacttctcaccacgtgactggcagcgactcatcaacaacaactggggcatgcgacccaaagccatgcgggtcaaaatcttcaacatccaggtcaaggaggtcacgacgtcgaacggcgagacaacggtggctaataaccttaccagcacggttcagatctttgcggactcgtcgtacgaactgccgtacgtgatggatgcgggtcaagagggcagcctgcctccttttcccaacgacgtctttatggtgccccagtacggctactgtggactggtgaccggcaacacttcgcagcaacagactgacagaaatgccttctactgcctggagtactttccttcgcagatgctgcggactggcaacaactttgaaattacgtacagttttgagaaggtgcctttccactcgatgtacgcgcacagccagagcctggaccggctgatgaaccctctcatcgaccagtacctgtggggactgcaatcgaccaccaccggaaccaccctgaatgccgggactgccaccaccaactttaccaagctgcggcctaccaacttttccaactttaaaaagaactggctgcccgggccttcaatcaagcagcagggcttctcaaagactgccaatcaaaactacaagatccctgccaccgggtcagacagtctcatcaaatacgagacgcacagcactctggacggaagatggagtgccctgacccccggacctccaatggccacggctggacctgcggacagcaagttcagcaacagccagctcatctttgcggggcctaaacagaacggcaacacggccaccgtacccgggactctgatcttcacctctgaggaggagctggcagccaccaacgccaccgatacggacatgtggggcaacctacctggcggtgaccagagcaacagcaacctgccgaccgtggacagactgacagccttgggagccgtgcctggaatggtctggcaaaacagagacatttactaccagggtcccatttgggccaagattcctcataccgatggacactttcacccctcaccgctgattggtgggtttgggctgaaacacccgcctcctcaaatttttatcaagaacaccccggtacctgcgaatcctgcaacgaccttcagctctactccggtaaactccttcattactcagtacagcactggccaggtgtcggtgcagattgactgggagatccagaaggagcggtccaaacgctggaaccccgaggtccagtttacctccaactacggacagcaaaactctctgttgtgggctcccgatgcggctgggaaatacactgagcctagggctatcggtacccgctacctcacccaccacctgtaataa

SEQ ID NO: 5132 - DNA, 1872 bp, Adeno-associated virus 4
  source 1..1872: mol_type = other DNA
atgccggggttctacgagatcgtgctgaaggtgcccagcgacctggacgagcacctgcccggcatttctgactcttttgtgagctgggtggccgagaaggaatgggagctgccgccggattctgacatggacttgaatctgattgagcaggcacccctgaccgtggccgaaaagctgcaacgcgagttcctggtcgagtggcgccgcgtgagtaaggccccggaggccctcttctttgtccagttcgagaagggggacagctacttccacctgcacatcctggtggagaccgtgggcgtcaaatccatggtggtgggccgctacgtgagccagattaaagagaagctggtgacccgcatctaccgcggggtcgagccgcagcttccgaactggttcgcggtgaccaagacgcgtaatggcgccggaggcgggaacaaggtggtggacgactgctacatccccaactacctgctccccaagacccagcccgagctccagtgggcgtggactaacatggaccagtatataagcgcctgtttgaatctcgcggagcgtaaacggctggtggcgcagcatctgacgcacgtgtcgcagacgcaggagcagaacaaggaaaaccagaaccccaattctgacgcgccggtcatcaggtcaaaaacctccgccaggtacatggagctggtcgggtggctggtggaccgcgggatcacgtcagaaaagcaatggatccaggaggaccaggcgtcctacatctccttcaacgccgcctccaactcgcggtcacaaatcaaggccgcgctggacaatgcctccaaaatcatgagcctgacaaagacggctccggactacctggtgggccagaacccgccggaggacatttccagcaaccgcatctaccgaatcctcgagatgaacgggtacgatccgcagtacgcggcctccgtcttcctgggctgggcgcaaaagaagttcgggaagaggaacaccatctggctctttgggccggccacgacgggtaaaaccaacatcgcggaagccatcgcccacgccgtgcccttctacggctgcgtgaactggaccaatgagaactttccgttcaacgattgcgtcgacaagatggtgatctggtgggaggagggcaagatgacggccaaggtcgtagagagcgccaaggccatcctgggcggaagcaaggtgcgcgtggaccaaaagtgcaagtcatcggcccagatcgacccaactcccgtgatcgtcacctccaacaccaacatgtgcgcggtcatcgacggaaactcgaccaccttcgagcaccaacaaccactccaggaccggatgttcaagttcgagctcaccaagcgcctggagcacgactttggcaaggtcaccaagcaggaagtcaaagactttttccggtgggcgtcagatcacgtgaccgaggtgactcacgagttttacgtcagaaagggtggagctagaaagaggcccgcccccaatgacgcagatataagtgagcccaagcgggcctgtccgtcagttgcgcagccatcgacgtcagacgcggaagctccggtggactacgcggacaggtaccaaaacaaatgttctcgtcacgtgggtatgaatctgatgctttttccctgccggcaatgcgagagaatgaatcagaatgtggacatttgcttcacgcacggggtcatggactgtgccgagtgcttccccgtgtcagaatctcaacccgtgtctgtcgtcagaaagcggacgtatcagaaactgtgtccgattcatcacatcatggggagggcgcccgaggtggcctgctcggcctgcgaactggccaatgtggacttggatgactgtgacatggaacaataa

SEQ ID NO: 5133 - DNA, 1611 bp, Adeno-associated virus 4
  source 1..1611: mol_type = other DNA
atgccggggttctacgagatcgtgctgaaggtgcccagcgacctggacgagcacctgcccggcatttctgactcttttgtgagctgggtggccgagaaggaatgggagctgccgccggattctgacatggacttgaatctgattgagcaggcacccctgaccgtggccgaaaagctgcaacgcgagttcctggtcgagtggcgccgcgtgagtaaggccccggaggccctcttctttgtccagttcgagaagggggacagctacttccacctgcacatcctggtggagaccgtgggcgtcaaatccatggtggtgggccgctacgtgagccagattaaagagaagctggtgacccgcatctaccgcggggtcgagccgcagcttccgaactggttcgcggtgaccaagacgcgtaatggcgccggaggcgggaacaaggtggtggacgactgctacatccccaactacctgctccccaagacccagcccgagctccagtgggcgtggactaacatggaccagtatataagcgcctgtttgaatctcgcggagcgtaaacggctggtggcgcagcatctgacgcacgtgtcgcagacgcaggagcagaacaaggaaaaccagaaccccaattctgacgcgccggtcatcaggtcaaaaacctccgccaggtacatggagctggtcgggtggctggtggaccgcgggatcacgtcagaaaagcaatggatccaggaggaccaggcgtcctacatctccttcaacgccgcctccaactcgcggtcacaaatcaaggccgcgctggacaatgcctccaaaatcatgagcctgacaaagacggctccggactacctggtgggccagaacccgccggaggacatttccagcaaccgcatctaccgaatcctcgagatgaacgggtacgatccgcagtacgcggcctccgtcttcctgggctgggcgcaaaagaagttcgggaagaggaacaccatctggctctttgggccggccacgacgggtaaaaccaacatcgcggaagccatcgcccacgccgtgcccttctacggctgcgtgaactggaccaatgagaactttccgttcaacgattgcgtcgacaagatggtgatctggtgggaggagggcaagatgacggccaaggtcgtagagagcgccaaggccatcctgggcggaagcaaggtgcgcgtggaccaaaagtgcaagtcatcggcccagatcgacccaactcccgtgatcgtcacctccaacaccaacatgtgcgcggtcatcgacggaaactcgaccaccttcgagcaccaacaaccactccaggaccggatgttcaagttcgagctcaccaagcgcctggagcacgactttggcaaggtcaccaagcaggaagtcaaagactttttccggtgggcgtcagatcacgtgaccgaggtgactcacgagttttacgtcagaaagggtggagctagaaagaggcccgcccccaatgacgcagatataagtgagcccaagcgggcctgtccgtcagttgcgcagccatcgacgtcagacgcggaagctccggtggactacgcggacagattggctagaggacaacctctctga

SEQ ID NO: 5134 - DNA, 1872 bp, Adeno-associated virus 4; identical to SEQ ID NO: 5132
  source 1..1872: mol_type = other DNA

SEQ ID NO: 5135 - DNA, 1617 bp, Adeno-associated virus 4
  variation 162: note = a, c, t or g
  source 1..1617: mol_type = other DNA
atgcgtgcagcagctggcggagctgcagtcgagggsggacaaggtgccgatggagtgggtaatgcctcgggtgattggcattgcgattccacctggtctgagggccacgtcacgaccaccagcaccagaacctgggtcttgcccacctacaacaaccacctntacaagcgactcggagagagcctgcagtccaacacctacaacggattctccaccccctggggatactttgacttcaaccgcttccactgccacttctcaccacgtgactggcagcgactcatcaacaacaactggggcatgcgacccaaagccatgcgggtcaaaatcttcaacatccaggtcaaggaggtcacgacgtcgaacggcgagacaacggtggctaataaccttaccagcacggttcagatctttgcggactcgtcgtacgaactgccgtacgtgatggatgcgggtcaagagggcagcctgcctccttttcccaacgacgtctttatggtgccccagtacggctactgtggactggtgaccggcaacacttcgcagcaacagactgacagaaatgccttctactgcctggagtactttccttcgcagatgctgcggactggcaacaactttgaaattacgtacagttttgagaaggtgcctttccactcgatgtacgcgcacagccagagcctggaccggctgatgaaccctctcatcgaccagtacctgtggggactgcaatcgaccaccaccggaaccaccctgaatgccgggactgccaccaccaactttaccaagctgcggcctaccaacttttccaactttaaaaagaactggctgcccgggccttcaatcaagcagcagggcttctcaaagactgccaatcaaaactacaagatccctgccaccgggtcagacagtctcatcaaatacgagacgcacagcactctggacggaagatggagtgccctgacccccggacctccaatggccacggctggacctgcggacagcaagttcagcaacagccagctcatctttgcggggcctaaacagaacggcaacacggccaccgtacccgggactctgatcttcacctctgaggaggagctggcagccaccaacgccaccgatacggacatgtggggcaacctacctggcggtgaccagagcaacagcaacctgccgaccgtggacagactgacagccttgggagccgtgcctggaatggtctggcaaaacagagacatttactaccagggtcccatttgggccaagattcctcataccgatggacactttcacccctcaccgctgattggtgggtttgggctgaaacacccgcctcctcaaatttttatcaagaacaccccggtacctgcgaatcctgcaacgaccttcagctctactccggtaaactccttcattactcagtacagcactggccaggtgtcggtgcagattgactgggagatccagaaggagcggtccaaacgctggaaccccgaggtccagtttacctccaactacggacagcaaaactctctgttgtgggctcccgatgcggctgggaaatacactgagcctagggctatcggtacccgctacctcacccaccacctgtaa

SEQ ID NO: 5136 - DNA, 939 bp, Adeno-associated virus 4
  source 1..939: mol_type = other DNA
atggagctggtcgggtggctggtggaccgcgggatcacgtcagaaaagcaatggatccaggaggaccaggcgtcctacatctccttcaacgccgcctccaactcgcggtcacaaatcaaggccgcgctggacaatgcctccaaaatcatgagcctgacaaagacggctccggactacctggtgggccagaacccgccggaggacatttccagcaaccgcatctaccgaatcctcgagatgaacgggtacgatccgcagtacgcggcctccgtcttcctgggctgggcgcaaaagaagttcgggaagaggaacaccatctggctctttgggccggccacgacgggtaaaaccaacatcgcggaagccatcgcccacgccgtgcccttctacggctgcgtgaactggaccaatgagaactttccgttcaacgattgcgtcgacaagatggtgatctggtgggaggagggcaagatgacggccaaggtcgtagagagcgccaaggccatcctgggcggaagcaaggtgcgcgtggaccaaaagtgcaagtcatcggcccagatcgacccaactcccgtgatcgtcacctccaacaccaacatgtgcgcggtcatcgacggaaactcgaccaccttcgagcaccaacaaccactccaggaccggatgttcaagttcgagctcaccaagcgcctggagcacgactttggcaaggtcaccaagcaggaagtcaaagactttttccggtgggcgtcagatcacgtgaccgaggtgactcacgagttttacgtcagaaagggtggagctagaaagaggcccgcccccaatgacgcagatataagtgagcccaagcgggcctgtccgtcagttgcgcagccatcgacgtcagacgcggaagctccggtggactacgcggacagattggctagaggacaacctctctga

SEQ ID NO: 5137 - DNA, 1197 bp, Adeno-associated virus 4
  source 1..1197: mol_type = other DNA
atggagctggtcgggtggctggtggaccgcgggatcacgtcagaaaagcaatggatccaggaggaccaggcgtcctacatctccttcaacgccgcctccaactcgcggtcacaaatcaaggccgcgctggacaatgcctccaaaatcatgagcctgacaaagacggctccggactacctggtgggccagaacccgccggaggacatttccagcaaccgcatctaccgaatcctcgagatgaacgggtacgatccgcagtacgcggcctccgtcttcctgggctgggcgcaaaagaagttcgggaagaggaacaccatctggctctttgggccggccacgacgggtaaaaccaacatcgcggaagccatcgcccacgccgtgcccttctacggctgcgtgaactggaccaatgagaactttccgttcaacgattgcgtcgacaagatggtgatctggtgggaggagggcaagatgacggccaaggtcgtagagagcgccaaggccatcctgggcggaagcaaggtgcgcgtggaccaaaagtgcaagtcatcggcccagatcgacccaactcccgtgatcgtcacctccaacaccaacatgtgcgcggtcatcgacggaaactcgaccaccttcgagcaccaacaaccactccaggaccggatgttcaagttcgagctcaccaagcgcctggagcacgactttggcaaggtcaccaagcaggaagtcaaagactttttccggtgggcgtcagatcacgtgaccgaggtgactcacgagttttacgtcagaaagggtggagctagaaagaggcccgcccccaatgacgcagatataagtgagcccaagcgggcctgtccgtcagttgcgcagccatcgacgtcagacgcggaagctccggtggactacgcggacaggtaccaaaacaaatgttctcgtcacgtgggtatgaatctgatgctttttccctgccggcaatgcgagagaatgaatcagaatgtggacatttgcttcacgcacggggtcatggactgtgccgagtgcttccccgtgtcagaatctcaacccgtgtctgtcgtcagaaagcggacgtatcagaaactgtgtccgattcatcacatcatggggagggcgcccgaggtggcctgctcggcctgcgaactggccaatgtggacttggatgactgtgacatggaacaa

SEQ ID NO: 5138 - DNA, 245 bp, Adeno-associated virus 4
  source 1..245: mol_type = other DNA
ctccatcatctaggtttgcccactgacgtcaatgtgacgtcctagggttagggaggtccctgtattagcagtcacgtgagtgtcgtatttcgcggagcgtagcggagcgcataccaagctgccacgtcacagccacgtggtccgtttgcgacagtttgcgacaccatgtggtcaggagggtatataaccgcgagtgagccagcgaggagctccattttgcccgcgaattttgaacgagcagcagc

SEQ ID NO: 5139 - protein, 313 aa, Adeno-associated virus 4
  MOD_RES 313: note = Any amino acid
MELVGWLVDRGITSEKQWIQEDQASYISFNAASNSRSQIKAALDNASKIMSLTKTAPDYLVGQNPPEDISSNRIYRILEMNGYDPQYAASVFLGWAQKKFGKRNTIWLFGPATTGKTNIAEAIAHAVPFYGCVNWTNENFPFNDCVDKMVIWWEEGKMTAKVVESAKAILGGSKVRVDQKCKSSAQIDPTPVIVTSNTNMCAVIDGNSTTFEHQQPLQDRMFKFELTKRLEHDFGKVTKQEVKDFFRWASDHVTEVTHEFYVRKGGARKRPAPNDADISEPKRACPSVAQPSTSDAEAPVDYADRLARGQPLX

SEQ ID NO: 5140 - protein, 399 aa, Adeno-associated virus 4
MELVGWLVDRGITSEKQWIQEDQASYISFNAASNSRSQIKAALDNASKIMSLTKTAPDYLVGQNPPEDISSNRIYRILEMNGYDPQYAASVFLGWAQKKFGKRNTIWLFGPATTGKTNIAEAIAHAVPFYGCVNWTNENFPFNDCVDKMVIWWEEGKMTAKVVESAKAILGGSKVRVDQKCKSSAQIDPTPVIVTSNTNMCAVIDGNSTTFEHQQPLQDRMFKFELTKRLEHDFGKVTKQEVKDFFRWASDHVTEVTHEFYVRKGGARKRPAPNDADISEPKRACPSVAQPSTSDAEAPVDYADRYQNKCSRHVGMNLMLFPCRQCERMNQNVDICFTHGVMDCAECFPVSESQPVSVVRKRTYQKLCPIHHIMGRAPEVACSACELANVDLDDCDMEQ

SEQ ID NO: 5141 - protein, 623 aa, Adeno-associated virus 4
MPGFYEIVLKVPSDLDEHLPGISDSFVSWVAEKEWELPPDSDMDLNLIEQAPLTVAEKLQREFLVEWRRVSKAPEALFFVQFEKGDSYFHLHILVETVGVKSMVVGRYVSQIKEKLVTRIYRGVEPQLPNWFAVTKTRNGAGGGNKVVDDCYIPNYLLPKTQPELQWAWTNMDQYISACLNLAERKRLVAQHLTHVSQTQEQNKENQNPNSDAPVIRSKTSARYMELVGWLVDRGITSEKQWIQEDQASYISFNAASNSRSQIKAALDNASKIMSLTKTAPDYLVGQNPPEDISSNRIYRILEMNGYDPQYAASVFLGWAQKKFGKRNTIWLFGPATTGKTNIAEAIAHAVPFYGCVNWTNENFPFNDCVDKMVIWWEEGKMTAKVVESAKAILGGSKVRVDQKCKSSAQIDPTPVIVTSNTNMCAVIDGNSTTFEHQQPLQDRMFKFELTKRLEHDFGKVTKQEVKDFFRWASDHVTEVTHEFYVRKGGARKRPAPNDADISEPKRACPSVAQPSTSDAEAPVDYADRYQNKCSRHVGMNLMLFPCRQCERMNQNVDICFTHGVMDCAECFPVSESQPVSVVRKRTYQKLCPIHHIMGRAPEVACSACELANVDLDDCDMEQ

SEQ ID NO: 5142 - protein, 537 aa, Adeno-associated virus 4
  MOD_RES 537: note = Any amino acid
MPGFYEIVLKVPSDLDEHLPGISDSFVSWVAEKEWELPPDSDMDLNLIEQAPLTVAEKLQREFLVEWRRVSKAPEALFFVQFEKGDSYFHLHILVETVGVKSMVVGRYVSQIKEKLVTRIYRGVEPQLPNWFAVTKTRNGAGGGNKVVDDCYIPNYLLPKTQPELQWAWTNMDQYISACLNLAERKRLVAQHLTHVSQTQEQNKENQNPNSDAPVIRSKTSARYMELVGWLVDRGITSEKQWIQEDQASYISFNAASNSRSQIKAALDNASKIMSLTKTAPDYLVGQNPPEDISSNRIYRILEMNGYDPQYAASVFLGWAQKKFGKRNTIWLFGPATTGKTNIAEAIAHAVPFYGCVNWTNENFPFNDCVDKMVIWWEEGKMTAKVVESAKAILGGSKVRVDQKCKSSAQIDPTPVIVTSNTNMCAVIDGNSTTFEHQQPLQDRMFKFELTKRLEHDFGKVTKQEVKDFFRWASDHVTEVTHEFYVRKGGARKRPAPNDADISEPKRACPSVAQPSTSDAEAPVDYADRLARGQPLX

SEQ ID NO: 5143 - protein, 623 aa, Adeno-associated virus 4; identical to SEQ ID NO: 5141

SEQ ID NO: 5144 - protein, 544 aa, Adeno-associated virus 4
MSDDSEMRAAAGGAAVEGGQGADGVGNASGDWHCDSTWSEGHVTTTSTRTWVLPTYNNHLYKRLGESLQSNTYNGFSTPWGYFDFNRFHCHFSPRDWQRLINNNWGMRPKAMRVKIFNIQVKEVTTSNGETTVANNLTSTVQIFADSSYELPYVMDAGQEGSLPPFPNDVFMVPQYGYCGLVTGNTSQQQTDRNAFYCLEYFPSQMLRTGNNFEITYSFEKVPFHSMYAHSQSLDRLMNPLIDQYLWGLQSTTTGTTLNAGTATTNFTKLRPTNFSNFKKNWLPGPSIKQQGFSKTANQNYKIPATGSDSLIKYETHSTLDGRWSALTPGPPMATAGPADSKFSNSQLIFAGPKQNGNTATVPGTLIFTSEEELAATNATDTDMWGNLPGGDQSNSNLPTVDRLTALGAVPGMVWQNRDIYYQGPIWAKIPHTDGHFHPSPLIGGFGLKHPPPQIFIKNTPVPANPATTFSSTPVNSFITQYSTGQVSVQIDWEIQKERSKRWNPEVQFTSNYGQQNSLLWAPDAAGKYTEPRAIGTRYLTHHL

SEQ ID NO: 5145 - protein, 734 aa, Adeno-associated virus 4; identical to SEQ ID NO: 4791

SEQ ID NO: 5146 - protein, 598 aa, Adeno-associated virus 4
TAPGKKRPLIESPQQPDSSTGIGKKGKQPAKKKLVFEDETGAGDGPPEGSTSGAMSDDSEMRAAAGGAAVEGGQGADGVGNASGDWHCDSTWSEGHVTTTSTRTWVLPTYNNHLYKRLGESLQSNTYNGFSTPWGYFDFNRFHCHFSPRDWQRLINNNWGMRPKAMRVKIFNIQVKEVTTSNGETTVANNLTSTVQIFADSSYELPYVMDAGQEGSLPPFPNDVFMVPQYGYCGLVTGNTSQQQTDRNAFYCLEYFPSQMLRTGNNFEITYSFEKVPFHSMYAHSQSLDRLMNPLIDQYLWGLQSTTTGTTLNAGTATTNFTKLRPTNFSNFKKNWLPGPSIKQQGFSKTANQNYKIPATGSDSLIKYETHSTLDGRWSALTPGPPMATAGPADSKFSNSQLIFAGPKQNGNTATVPGTLIFTSEEELAATNATDTDMWGNLPGGDQSNSNLPTVDRLTALGAVPGMVWQNRDIYYQGPIWAKIPHTDGHFHPSPLIGGFGLKHPPPQIFIKNTPVPANPATTFSSTPVNSFITQYSTGQVSVQIDWEIQKERSKRWNPEVQFTSNYGQQNSLLWAPDAAGKYTEPRAIGTRYLTHHL

SEQ ID NO: 5147 - DNA, 129 bp, Adeno-associated virus 4
  source 1..129: mol_type = other DNA
ttggccactccctctatgcgcgctcgctcactcactcggccctgcggccagaggccggcagtctggagacctttggtgtccagggcagggccgagtgagtgagcgagcgcgcatagagggagtggccaa

SEQ ID NO: 5148 - DNA, 125 bp, Adeno-associated virus 4
  source 1..125: mol_type = other DNA
ttggccactccctctatgcgcgctcgctcactcactcggccctggagaccaaaggtctccagactgccggcctctggccggcagggccgagtgagtgagcgagcgcgcatagagggagtggccaa

SEQ ID NO: 5149 - DNA, 4768 bp, Adeno-associated virus 4
  variation 3009: note = a, c, t or g
  source 1..4768: mol_type = other DNA
ttggccactccctctatgcgcgctcgctcactcactcggccctggagaccaaaggtctccagactgccggcctctggccggcagggccgagtgagtgagcgagcgcgcatagagggagtggccaactccatcatctaggtttgcccactgacgtcaatgtgacgtcctagggttagggaggtccctgtattagcagtcacgtgagtgtcgtatttcgcggagcgtagcggagcgcataccaagctgccacgtcacagccacgtggtccgtttgcgacagtttgcgacaccatgtggtcaggagggtatataaccgcgagtgagccagcgaggagctccattttgcccgcgaattttgaacgagcagcagccatgccggggttctacgagatcgtgctgaaggtgcccagcgacctggacgagcacctgcccggcatttctgactcttttgtgagctgggtggccgagaaggaatgggagctgccgccggattctgacatggacttgaatctgattgagcaggcacccctgaccgtggccgaaaagctgcaacgcgagttcctggtcgagtggcgccgcgtgagtaaggccccggaggccctcttctttgtccagttcgagaagggggacagctacttccacctgcacatcctggtggagaccgtgggcgtcaaatccatggtggtgggccgctacgtgagccagattaaagagaagctggtgacccgcatctaccgcggggtcgagccgcagcttccgaactggttcgcggtgaccaagacgcgtaatggcgccggaggcgggaacaaggtggtggacgactgctacatccccaactacctgctccccaagacccagcccgagctccagtgggcgtggactaacatggaccagtatataagcgcctgtttgaatctcgcggagcgtaaacggctggtggcgcagcatctgacgcacgtgtcgcagacgcaggagcagaacaaggaaaaccagaaccccaattctgacgcgccggtcatcaggtcaaaaacctccgccaggtacatggagctggtcgggtggctggtggaccgcgggatcacgtcagaaaagcaatggatccaggaggaccaggcgtcctacatctccttcaacgccgcctccaactcgcggtcacaaatcaaggccgcgctggacaatgcctccaaaatcatgagcctgacaaagacggctccggactacctggtgggccagaacccgccggaggacatttccagcaaccgcatctaccgaatcctcgagatgaacgggtacgatccgcagtacgcggcctccgtcttcctgggctgggcgcaaaagaagttcgggaagaggaacaccatctggctctttgggccggccacgacgggtaaaaccaacatcgcggaagccatcgcccacgccgtgcccttctacggctgcgtgaactggaccaatgagaactttccgttcaacgattgcgtcgacaagatggtgatctggtgggaggagggcaagatgacggccaaggtcgtagagagcgccaaggccatcctgggcggaagcaaggtgcgcgtggaccaaaagtgcaagtcatcggcccagatcgacccaactcccgtgatcgtcacctccaacaccaacatgtgcgcggtcatcgacggaaactcgaccaccttcgagcaccaacaaccactccaggaccggatgttcaagttcgagctcaccaagcgcctggagcacgactttggcaaggtcaccaagcaggaagtcaaagactttttccggtgggcgtcagatcacgtgaccgaggtgactcacgagttttacgtcagaaagggtggagctagaaagaggcccgcccccaatgacgcagatataagtgagcccaagcgggcctgtccgtcagttgcgcagccatcgacgtcagacgcggaagctccggtggactacgcggacaggtaccaaaacaaatgttctcgtcacgtgggtatgaatctgatgctttttccctgccggcaatgcgagagaatgaatcagaatgtggacatttgcttcacgcacggggtcatggactgtgccgagtgcttccccgtgtcagaatctcaacccgtgtctgtcgtcagaaagcggacgtatcagaaactgtgtccgattcatcacatcatggggagggcgcccgaggtggcctgctcggcctgcgaactggccaatgtggacttggatgactgtgacatggaacaataaatgactcaaaccagatatgactgacggttaccttccagattggctagaggacaacctctctgaaggcgttcgagagtggtgggcgctgcaacctggagcccctaaacccaaggcaaatcaacaacatcaggacaacgctcggggtcttgtgcttccgggttacaaatacctcggacccggcaacggactcgacaagggggaacccgtcaacgcagcggacgcggcagccctcgagcacgacaaggcctacgaccagcagctcaaggccggtgacaacccctacctcaagtacaaccacgccgacgcggagttccagcagcggcttcagggcgacacaccgtttgggggcaacctcggcagagcagtcttccaggccaaaaagagggttcttgaacctcttggtctggttgagcaagcgggtgagacggctcctggaaagaagagaccgttgattgaatccccccagcagcccgactcctccacgggtatcggcaaaaaaggcaagcagccggctaaaaagaagctcgttttcgaagacgaaactggagcaggcgacggaccccctgagggatcaacttccggagccatgtctgatgacagtgagatgcgtgcagcagctggcggagctgcagtcgagggsggacaaggtgccgatggagtgggtaatgcctcgggtgattggcattgcgattccacctggtctgagggccacgtcacgaccaccagcaccagaacctgggtcttgcccacctacaacaaccacctntacaagcgactcggagagagcctgcagtccaacacctacaacggattctccaccccctggggatactttgacttcaaccgcttccactgccacttctcaccacgtgactggcagcgactcatcaacaacaactggggcatgcgacccaaagccatgcgggtcaaaatcttcaacatccaggtcaaggaggtcacgacgtcgaacggcgagacaacggtggctaataaccttaccagcacggttcagatctttgcggactcgtcgtacgaactgccgtacgtgatggatgcgggtcaagagggcagcctgcctccttttcccaacgacgtctttatggtgccccagtacggctactgtggactggtgaccggcaacacttcgcagcaacagactgacagaaatgccttctactgcctggagtactttccttcgcagatgctgcggactggcaacaactttgaaattacgtacagttttgagaaggtgcctttccactcgatgtacgcgcacagccagagcctggaccggctgatgaaccctctcatcgaccagtacctgtggggactgcaatcgaccaccaccggaaccaccctgaatgccgggactgccaccaccaactttaccaagctgcggcctaccaacttttccaactttaaaaagaactggctgcccgggccttcaatcaagcagcagggcttctcaaagactgccaatcaaaactacaagatccctgccaccgggtcagacagtctcatcaaatacgagacgcacagcactctggacggaagatggagtgccctgacccccggacctccaatggccacggctggacctgcggacagcaagttcagcaacagccagctcatctttgcggggcctaaacagaacggcaacacggccaccgtacccgggactctgatcttcacctctgaggaggagctggcagccaccaacgccaccgatacggacatgtggggcaacctacctggcggtgaccagagcaacagcaacctgccgaccgtggacagactgacagccttgggagccgtgcctggaatggtctggcaaaacagagacatttactaccagggtcccatttgggccaagattcctcataccgatggacactttcacccctcaccgctgattggtgggtttgggctgaaacacccgcctcctcaaatttttatcaagaacaccccggtacctgcgaatcctgcaacgaccttcagctctactccggtaaactccttcattactcagtacagcactggccaggtgtcggtgcagattgactgggagatccagaaggagcggtccaaacgctggaaccccgaggtccagtttacctccaactacggacagcaaaactctctgttgtgggctcccgatgcggctgggaaatacactgagcctagggctatcggtacccgctacctcacccaccacctgtaataacctgttaatcaataaaccggtttattcgtttcagttgaactttggtctccgtgtccttcttatcttatctcgtttccatggctactgcgtacataagcagcggcctgcggcgcttgcgcttcgcggtttacaactgccggttaatcagtaacttctggcaaaccatgatgatggagttggccactccctctatgcgcgctcgctcactcactcggccctggagaccaaaggtctccagactgccggcctctggccggcagggccgagtgagtgagcgagcgcgcatagagggagtggccaa

SEQ ID NO: 5150 - protein, 725 aa, Adeno-associated virus 5
MAADGYLPDWLEDTLSEGIRQWWKLKPGPPPPKPAERHKDDSRGLVLPGYKYLGPFNGLDKGEPVNEADAAALEHDKAYDRQLDSGDNPYLKYNHADAEFQERLKEDTSFGGNLGRAVFQAKKRVLEPFGLVEEGAKTAPTGKRIDDHFPKRKKARTEEDSKPSTSSDAEAGPSGSQQLQIPAQPASSLGADTMSAGGGGPLGDNNQGADGVGNASGDWHCDSTWMGDRVVTKSTRTWVLPSYNNHQYREIKSGSVDGSNANAYFGYSTPWGYFDFNRFHSHWSPRDWQRLINNYWGFRPRSLRVKIFNIQVKEVTVQDSTTTIANNLTSTVQVFTDDDYQLPYVVGNGTEGCLPAFPPQVFTLPQYGYATLNRDNTENPTERSSFFCLEYFPSKMLRTGNNFEFTYNFEEVPFHSSFAPSQNLFKLANPLVDQYLYRFVSTNNTGGVQFNKNLAGRYANTYKNWFPGPMGRTQGWNLGSGVNRASVSAFATTNRMELEGASYQVPPQPNGMTNNLQGSNTYALENTMIFNSQPANPGTTATYLEGNMLITSESETQPVNRVAYNVGGQMATNNQSSTTAPTTGTYNLQEIVPGSVWMERDVYLQGPIWAKIPETGAHFHPSPAMGGFGLKHPPPMMLIKNTPVPGNITSFSDVPVSSFITQYSTGQVTVEMEWELKKENSKRWNPEIQYTNNYNDPQFVDFAPDSTGEYRTTRPIGTRYLTRPL

SEQ ID NO: 5151 - protein, 724 aa, Adeno-associated virus 5
MSFVDHPPDWLEEVGEGLREFLGLEAGPPKPKPNQQHQDQARGLVLPGYNYLGPGNGLDRGEPVNRADEVAREHDISYNEQLEAGDNPYLKYNHADAEFQEKLADDTSFGGNLGKAVFQAKKRVLEPFGLVEEGAKTAPTGKRIDDHFPKRKKARTEEDSKPSTSSDAEAGPSGSQQLQIPAQPASSLGADTMSAGGGGPLGDNNQGADGVGNASGDWHCDSTWMGDRVVTKSTRTWVLPSYNNHQYREIKSGSVDGSNANAYFGYSTPWGYFDFNRFHSHWSPRDWQRLINNYWGFRPRSLRVKIFNIQVKEVTVQDSTTTIANNLTSTVQVFTDDDYQLPYVVGNGTEGCLPAFPPQVFTLPQYGYATLNRDNTENPTERSSFFCLEYFPSKMLRTGNNFEFTYNFEEVPFHSSFAPSQNLFKLANPLVDQYLYRFVSTNNTGGVQFNKNLAGRYANTYKNWFPGPMGRTQGWNLGSGVNRASVSAFATTNRMELEGASYQVPPQPNGMTNNLQGSNTYALENTMIFNSQPANPGTTATYLEGNMLITSESETQPVNRVAYNVGGQMATNNQSSTTAPATGTYNLQEIVPGSVWMERDVYLQGPIWAKIPETGAHFHPSPAMGGFGLKHPPPMMLIKNTPVPGNITSFSDVPVSSFITQYSTGQVTVEMEWELKKENSKRWNPEIQYTNNYNDPQFVDFAPDSTGEYRTTRPIGTRYLTRPL

SEQ ID NO: 5152 - DNA, 2175 bp, Adeno-associated virus 5
  source 1..2175: mol_type = other DNA
atgtcttttgttgatcaccctccagattggttggaagaagttggtgaaggtcttcgcgagtttttgggccttgaagcgggcccaccgaaaccaaaacccaatcagcagcatcaagatcaagcccgtggtcttgtgctgcctggttataactatctcggacccggaaacggtctcgatcgaggagagcctgtcaacagggcagacgaggtcgcgcgagagcacgacatctcgtacaacgagcagcttgaggcgggagacaacccctacctcaagtacaaccacgcggacgccgagtttcaggagaagctcgccgacgacacatccttcgggggaaacctcggaaaggcagtctttcaggccaagaaaagggttctcgaaccttttggcctggttgaagagggtgctaagacggcccctaccggaaagcggatagacgaccactttccaaaaagaaagaaggctcggaccgaagaggactccaagccttccacctcgtcagacgccgaagctggacccagcggatcccagcagctgcaaatcccagcccaaccagcctcaagtttgggagctgatacaatgtctgcgggaggtggcggcccattgggcgacaataaccaaggtgccgatggagtgggcaatgcctcgggagattggcattgcgattccacgtggatgggggacagagtcgtcaccaagtccacccgaacctgggtgctgcccagctacaacaaccaccagtaccgagagatcaaaagcggctccgtcgacggaagcaacgccaacgcctactttggatacagcaccccctgggggtactttgactttaaccgcttccacagccactggagcccccgagactggcaaagactcatcaacaactactggggcttcagaccccggtccctcagagtcaaaatcttcaacattcaagtcaaagaggtcacggtgcaggactccaccaccaccatcgccaacaacctcacctccaccgtccaagtgtttacggacgacgactaccagctgccctacgtcgtcggcaacgggaccgagggatgcctgccggccttccctccgcaggtctttacgctgccgcagtacggttacgcgacgctgaaccgcgacaacacagaaaatcccaccgagaggagcagcttcttctgcctagagtactttcccagcaagatgctgagaacgggcaacaactttgagtttacctacaactttgaggaggtgcccttccactccagcttcgctcccagtcagaacctgttcaagctggccaacccgctggtggaccagtacttgtaccgcttcgtgagcacaaataacactggcggagtccagttcaacaagaacctggccgggagatacgccaacacctacaaaaactggttcccggggcccatgggccgaacccagggctggaacctgggctccggggtcaaccgcgccagtgtcagcgccttcgccacgaccaataggatggagctcgagggcgcgagttaccaggtgcccccgcagccgaacggcatgaccaacaacctccagggcagcaacacctatgccctggagaacactatgatcttcaacagccagccggcgaacccgggcaccaccgccacgtacctcgagggcaacatgctcatcaccagcgagagcgagacgcagccggtgaaccgcgtggcgtacaacgtcggcgggcagatggccaccaacaaccagagctccaccactgcccccgcgaccggcacgtacaacctccaggaaatcgtgcccggcagcgtgtggatggagagggacgtgtacctccaaggacccatctgggccaagatcccagagacgggggcgcactttcacccctctccggccatgggcggattcggactcaaacacccaccgcccatgatgctcatcaagaacacgcctgtgcccggaaatatcaccagcttctcggacgtgcccgtcagcagcttcatcacccagtacagcaccgggcaggtcaccgtggagatggagtgggagctcaagaaggaaaactccaagaggtggaacccagagatccagtacacaaacaactacaacgacccccagtttgtggactttgccccggacagcaccggggaatacagaaccaccagacctatcggaacccgataccttacccgacccctttaa

SEQ ID NO: 5153 - DNA, 2208 bp, Adeno-associated virus 6
  source 1..2208: mol_type = other DNA
atggctgccgatggttatcttccagattggctcgaggacaacctctctgagggcattcgcgagtggtgggacttgaaacctggagccccgaaacccaaagccaaccagcaaaagcaggacgacggccggggtctggtgcttcctggctacaagtacctcggacccttcaacggactcgacaagggggagcccgtcaacgcggcggatgcagcggccctcgagcacgacaaggcctacgaccagcagctcaaagcgggtgacaatccgtacctgcggtataaccacgccgacgccgagtttcaggagcgtctgcaagaagatacgtcttttgggggcaacctcgggcgagcagtcttccaggccaagaagagggttctcgaaccttttggtctggttgaggaaggtgctaagacggctcctggaaagaaacgtccggtagagcagtcgccacaagagccagactcctcctcgggcattggcaagacaggccagcagcccgctaaaaagagactcaattttggtcagactggcgactcagagtcagtccccgacccacaacctctcggagaacctccagcaacccccgctgctgtgggacctactacaatggcttcaggcggtggcgcaccaatggcagacaataacgaaggcgccgacggagtgggtaatgcctcaggaaattggcattgcgattccacatggctgggcgacagagtcatcaccaccagcacccgaacatgggccttgcccacctataacaaccacctctacaagcaaatctccagtgcttcaacgggggccagcaacgacaaccactacttcggctacagcaccccctgggggtattttgatttcaacagattccactgccatttctcaccacgtgactggcagcgactcatcaacaacaattggggattccggcccaagagactcaacttcaagctcttcaacatccaagtcaaggaggtcacgacgaatgatggcgtcacgaccatcgctaataaccttaccagcacggttcaagtcttctcggactcggagtaccagttgccgtacgtcctcggctctgcgcaccagggctgcctccctccgttcccggcggacgtgttcatgattccgcagtacggctacctaacgctcaacaatggcagccaggcagtgggacggtcatccttttactgcctggaatatttcccatcgcagatgctgagaacgggcaataactttaccttcagctacaccttcgaggacgtgcctttccacagcagctacgcgcacagccagagcctggaccggctgatgaatcctctcatcgaccagtacctgtattacctgaacagaactcagaatcagtccggaagtgcccaaaacaaggacttgctgtttagccgggggtctccagctggcatgtctgttcagcccaaaaactggctacctggaccctgttaccggcagcagcgcgtttctaaaacaaaaacagacaacaacaacagcaactttacctggactggtgcttcaaaatataaccttaatgggcgtgaatctataatcaaccctggcactgctatggcctcacacaaagacgacaaagacaagttctttcccatgagcggtgtcatgatttttggaaaggagagcgccggagcttcaaacactgcattggacaatgtcatgatcacagacgaagaggaaatcaaagccactaaccccgtggccaccgaaagatttgggactgtggcagtcaatctccagagcagcagcacagaccctgcgaccggagatgtgcatgttatgggagccttacctggaatggtgtggcaagacagagacgtatacctgcagggtcctatttgggccaaaattcctcacacggatggacactttcacccgtctcctctcatgggcggctttggacttaagcacccgcctcctcagatcctcatcaaaaacacgcctgttcctgcgaatcctccggcagagttttcggctacaaagtttgcttcattcatcacccagtattccacaggacaagtgagcgtggagattgaatgggagctgcagaaagaaaacagcaaacgctggaatcccgaagtgcagtatacatctaactatgcaaaatctgccaacgttgatttcactgtggacaacaatggactttatactgagcctcgccccattggcacccgttacctcacccgtcccctg

SEQ ID NO: 5154 - protein, 736 aa, Adeno-associated virus 6; identical to SEQ ID NO: 4799

SEQ ID NO: 5155 - protein, 623 aa, Adeno-associated virus 6
MPGFYEIVIKVPSDLDEHLPGISDSFVNWVAEKEWELPPDSDMDLNLIEQAPLTVAEKLQRDFLVQWRRVSKAPEALFFVQFEKGESYFHLHILVETTGVKSMVLGRFLSQIRDKLVQTIYRGIEPTLPNWFAVTKTRNGAGGGNKVVDECYIPNYLLPKTQPELQWAWTNMEEYISACLNLAERKRLVAHDLTHVSQTQEQNKENLNPNSDAPVIRSKTSARYMELVGWLVDRGITSEKQWIQEDQASYISFNAASNSRSQIKAALDNAGKIMALTKSAPDYLVGPAPPADIKTNRIYRILELNGYDPAYAGSVFLGWAQKRFGKRNTIWLFGPATTGKTNIAEAIAHAVPFYGCVNWTNENFPFNDCVDKMVIWWEEGKMTAKVVESAKAILGGSKVRVDQKCKSSAQIDPTPVIVTSNTNMCAVIDGNSTTFEHQQPLQDRMFKFELTRRLEHDFGKVTKQEVKEFFRWAQDHVTEVAHEFYVRKGGANKRPAPDDADKSEPKRACPSVADPSTSDAEGAPVDFADRYQNKCSRHAGMLQMLFPCKTCERMNQNFNICFTHGTRDCSECFPGVSESQPVVRKRTYRKLCAIHHLLGRAPEIACSACDLVNVDLDDCVSEQ

SEQ ID NO: 5156 - DNA, 4683 bp, Adeno-associated virus 6
  source 1..4683: mol_type = other DNA
ttggccactccctctctgcgcgctcgctcgctcactgaggccgggcgaccaaaggtcgcccgacgcccgggctttgcccgggcggcctcagtgagcgagcgagcgcgcagagagggagtggccaactccatcactaggggttcctggaggggtggagtcgtgacgtgaattacgtcatagggttagggaggtcctgtattagaggtcacgtgagtgttttgcgacattttgcgacaccatgtggtcacgctgggtatttaagcccgagtgagcacgcagggtctccattttgaagcgggaggtttgaacgcgcagcgccatgccggggttttacgagattgtgattaaggtccccagcgaccttgacgagcatctgcccggcatttctgacagctttgtgaactgggtggccgagaaggaatgggagttgccgccagattctgacatggatctgaatctgattgagcaggcacccctgaccgtggccgagaagctgcagcgcgacttcctggtccagtggcgccgcgtgagtaaggccccggaggccctcttctttgttcagttcgagaagggcgagtcctacttccacctccatattctggtggagaccacgggggtcaaatccatggtgctgggccgcttcctgagtcagattagggacaagctggtgcagaccatctaccgcgggatcgagccgaccctgcccaactggttcgcggtgaccaagacgcgtaatggcgccggaggggggaacaaggtggtggacgagtgctacatccccaactacctcctgcccaagactcagcccgagctgcagtgggcgtggactaacatggaggagtatataagcgcgtgtttaaacctggccgagcgcaaacggctcgtggcgcacgacctgacccacgtcagccagacccaggagcagaacaaggagaatctgaaccccaattctgacgcgcctgtcatccggtcaaaaacctccgcacgctacatggagctggtcgggtggctggtggaccggggcatcacctccgagaagcagtggatccaggaggaccaggcctcgtacatctccttcaacgccgcctccaactcgcggtcccagatcaaggccgctctggacaatgccggcaagatcatggcgctgaccaaatccgcgcccgactacctggtaggccccgctccgcccgccgacattaaaaccaaccgcatttaccgcatcctggagctgaacggctacgaccctgcctacgccggctccgtctttctcggctgggcccagaaaaggttcggaaaacgcaacaccatctggctgtttgggccggccaccacgggcaagaccaacatcgcggaagccatcgcccacgccgtgcccttctacggctgcgtcaactggaccaatgagaactttcccttcaacgattgcgtcgacaagatggtgatctggtgggaggagggcaagatgacggccaaggtcgtggagtccgccaaggccattctcggcggcagcaaggtgcgcgtggaccaaaagtgcaagtcgtccgcccagatcgatcccacccccgtgatcgtcacctccaacaccaacatgtgcgccgtgattgacgggaacagcaccaccttcgagcaccagcagccgttgcaggaccggatgttcaaatttgaactcacccgccgtctggagcatgactttggcaaggtgacaaagcaggaagtcaaagagttcttccgctgggcgcaggatcacgtgaccgaggtggcgcatgagttctacgtcagaaagggtggagccaacaagagacccgcccccgatgacgcggataaaagcgagcccaagcgggcctgcccctcagtcgcggatccatcgacgtcagacgcggaaggagctccggtggactttgccgacaggtaccaaaacaaatgttctcgtcacgcgggcatgcttcagatgctgtttccctgcaaaacatgcgagagaatgaatcagaatttcaacatttgcttcacgcacgggaccagagactgttcagaatgtttccccggcgtgtcagaatctcaaccggtcgtcagaaagaggacgtatcggaaactctgtgccattcatcatctgctggggcgggctcccgagattgcttgctcggcctgcgatctggtcaacgtggatctggatgactgtgtttctgagcaataaatgacttaaaccaggtatggctgccgatggttatcttccagattggctcgaggacaacctctctgagggcattcgcgagtggtgggacttgaaacctggagccccgaaacccaaagccaaccagcaaaagcaggacgacggccggggtctggtgcttcctggctacaagtacctcggacccttcaacggactcgacaagggggagcccgtcaacgcggcggatgcagcggccctcgagcacgacaaggcctacgaccagcagctcaaagcgggtgacaatccgtacctgcggtataaccacgccgacgccgagtttcaggagcgtctgcaagaagatacgtcttttgggggcaacctcgggcgagcagtcttccaggccaagaagagggttctcgaaccttttggtctggttgaggaaggtgctaagacggctcctggaaagaaacgtccggtagagcagtcgccacaagagccagactcctcctcgggcattggcaagacaggccagcagcccgctaaaaagagactcaattttggtcagactggcgactcagagtcagtccccgacccacaacctctcggagaacctccagcaacccccgctgctgtgggacctactacaatggcttcaggcggtggcgcaccaatggcagacaataacgaaggcgccgacggagtgggtaatgcctcaggaaattggcattgcgattccacatggctgggcgacagagtcatcaccaccagcacccgaacatgggccttgcccacctataacaaccacctctacaagcaaatctccagtgcttcaacgggggccagcaacgacaaccactacttcggctacagcaccccctgggggtattttgatttcaacagattccactgccatttctcaccacgtgactggcagcgactcatcaacaacaattggggattccggcccaagagactcaacttcaagctcttcaacatccaagtcaaggaggtcacgacgaatgatggcgtcacgaccatcgctaataaccttaccagcacggttcaagtcttctcggactcggagtaccagttgccgtacgtcctcggctctgcgcaccagggctgcctccctccgttcccggcggacgtgttcatgattccgcagtacggctacctaacgctcaacaatggcagccaggcagtgggacggtcatccttttactgcctggaatatttcccatcgcagatgctgagaacgggcaataactttaccttcagctacaccttcgaggacgtgcctttccacagcagctacgcgcacagccagagcctggaccggctgatgaatcctctcatcgaccagtacctgtattacctgaacagaactcagaatcagtccggaagtgcccaaaacaaggacttgctgtttagccgggggtctccagctggcatgtctgttcagcccaaaaactggctacctggaccctgttaccggcagcagcgcgtttctaaaacaaaaacagacaacaacaacagcaactttacctggactggtgcttcaaaatataaccttaatgggcgtgaatctataatcaaccctggcactgctatggcctcacacaaagacgacaaagacaagttctttcccatgagcggtgtcatgatttttggaaaggagagcgccggagcttcaaacactgcattggacaatgtcatgatcacagacgaagaggaaatcaaagccactaaccccgtggccaccgaaagatttgggactgtggcagtcaatctccagagcagcagcacagaccctgcgaccggagatgtgcatgttatgggagccttacctggaatggtgtggcaagacagagacgtatacctgcagggtcctatttgggccaaaattcctcacacggatggacactttcacccgtctcctctcatgggcggctttggacttaagcacccgcctcctcagatcctcatcaaaaacacgcctgttcctgcgaatcctccggcagagttttcggctacaaagtttgcttcattcatcacccagtattccacaggacaagtgagcgtggagattgaatgggagctgcagaaagaaaacagcaaacgctggaatcccgaagtgcagtatacatctaactatgcaaaatctgccaacgttgatttcactgtggacaacaatggactttatactgagcctcgccccattggcacccgttacctcacccgtcccctgtaattgtgtgttaatcaataaaccggttaattcgtgtcagttgaactttggtctcatgtcgttattatcttatctggtcaccatagcaaccggttacacattaactgcttagttgcgcttcgcgaatacccctagtgatggagttgcccactccctctatgcgcgctcgctcgctcggtggggccggcagagcagagctctgccgtctgcggacctttggtccgcaggccccaccgagcgagcgagcgcgcatagagggagtgggcaa

SEQ ID NO: 5157 - DNA, 2211 bp, Adeno-associated virus 6
  source 1..2211: mol_type = other DNA
atggctgccgatggttatcttccagattggctcgaggacaacctctctgagggcattcgcgagtggtgggacttgaaacctggagccccgaaacccaaagccaaccagcaaaagcaggacgacggccggggtctggtgcttcctggctacaagtacctcggacccttcaacggactcgacaagggggagcccgtcaacgcggcggatgcagcggccctcgagcacgacaaggcctacgaccagcagctcaaagcgggtgacaatccgtacctgcggtataaccacgccgacgccgagtttcaggagcgtctgcaagaagatacgtcttttgggggcaacctcgggcgagcagtcttccaggccaagaagagggttctcgaaccttttggtctggttgaggaaggtgctaagacggctcctggaaagaaacgtccggtagagcagtcgccacaagagccagactcctcctcgggcattggcaagacaggccagcagcccgctaaaaagagactcaattttggtcagactggcgactcagagtcagtccccgacccacaacctctcggagaacctccagcaacccccgctgctgtgggacctactacaatggcttcaggcggtggcgcaccaatggcagacaataacgaaggcgccgacggagtgggtaatgcctcaggaaattggcattgcgattccacatggctgggcgacagagtcatcaccaccagcacccgaacatgggccttgcccacctataacaaccacctctacaagcaaatctccagtgcttcaacgggggccagcaacgacaaccactacttcggctacagcaccccctgggggtattttgatttcaacagattccactgccatttctcaccacgtgactggcagcgactcatcaacaacaattggggattccggcccaagagactcaacttcaagctcttcaacatccaagtcaaggaggtcacgacgaatgatggcgtcacgaccatcgctaataaccttaccagcacggttcaagtcttctcggactcggagtaccagttgccgtacgtcctcggctctgcgcaccagggctgcctccctccgttcccggcggacgtgttcatgattccgcagtacggctacctaacgctcaacaatggcagccaggcagtgggacggtcatccttttactgcctggaatatttcccatcgcagatgctgagaacgggcaataactttaccttcagctacaccttcgaggacgtgcctttccacagcagctacgcgcacagccagagcctggaccggctgatgaatcctctcatcgaccagtacctgtattacctgaacagaactcagaatcagtccggaagtgcccaaaacaaggacttgctgtttagccgggggtctccagctggcatgtctgttcagcccaaaaactggctacctggaccctgttaccggcagcagcgcgtttctaaaacaaaaacagacaacaacaacagcaactttacctggactggtgcttcaaaatataaccttaatgggcgtgaatctataatcaaccctggcactgctatggcctcacacaaagacgacaaagacaagttctttcccatgagcggtgtcatgatttttggaaaggagagcgccggagcttcaaacactgcattggacaatgtcatgatcacagacgaagaggaaatcaaagccactaaccccgtggccaccgaaagatttgggactgtggcagtcaatctccagagcagcagcacagaccctgcgaccggagatgtgcatgttatgggagccttacctggaatggtgtggcaagacagagacgtatacctgcagggtcctatttgggccaaaattcctcacacggatggacactttcacccgtctcctctcatgggcggctttggacttaagcacccgcctcctcagatcctcatcaaaaacacgcctgttcctgcgaatcctccggcagagttttcggctacaaagtttgcttcattcatcacccagtattccacaggacaagtgagcgtggagattgaatgggagctgcagaaagaaaacagcaaacgctggaatcccgaagtgcagtatacatctaactatgcaaaatctgccaacgttgatttcactgtggacaacaatggactttatactgagcctcgccccattggcacccgttacctcacccgtcccctgtaa

SEQ ID NO: 5158 - DNA, 2214 bp, Adeno-associated virus 7
  source 1..2214: mol_type = other DNA
atggctgccgatggttatcttccagattggctcgaggacaacctctctgagggcattcgcgagtggtgggacctgaaacctggagccccgaaacccaaagccaaccagcaaaagcaggacaacggccggggtctggtgcttcctggctacaagtacctcggacccttcaacggactcgacaagggggagcccgtcaacgcggcggacgcagcggccctcgagcacgacaaggcctacgaccagcagctcaaagcgggtgacaatccgtacctgcggtataaccacgccgacgccgagtttcaggagcgtctgcaagaagatacgtcatttgggggcaacctcgggcgagcagtcttccaggccaagaagcgggttctcgaacctctcggtctggttgaggaaggcgctaagacggctcctgcaaagaagagaccggtagagccgtcacctcagcgttcccccgactcctccacgggcatcggcaagaaaggccagcagcccgccagaaagagactcaatttcggtcagactggcgactcagagtcagtccccgaccctcaacctctcggagaacctccagcagcgccctctagtgtgggatctggtacagtggctgcaggcggtggcgcaccaatggcagacaataacgaaggtgccgacggagtgggtaatgcctcaggaaattggcattgcgattccacatggctgggcgacagagtcattaccaccagcacccgaacctgggccctgcccacctacaacaaccacctctacaagcaaatctccagtgaaactgcaggtagtaccaacgacaacacctacttcggctacagcaccccctgggggtattttgactttaacagattccactgccacttctcaccacgtgactggcagcgactcatcaacaacaactggggattccggcccaagaagctgcggttcaagctcttcaacatccaggtcaaggaggtcacgacgaatgacggcgttacgaccatcgctaataaccttaccagcacgattcaggtattctcggactcggaataccagctgccgtacgtcctcggctctgcgcaccagggctgcctgcctccgttcccggcggacgtcttcatgattcctcagtacggctacctgactctcaacaatggcagtcagtctgtgggacgttcctccttctactgcctggagtacttcccctctcagatgctgagaacgggcaacaactttgagttcagctacagcttcgaggacgtgcctttccacagcagctacgcacacagccagagcctggaccggctgatgaatcccctcatcgaccagtacttgtactacctggccagaacacagagtaacccaggaggcacagctggcaatcgggaactgcagttttaccagggcgggccttcaactatggccgaacaagccaagaattggttacctggaccttgcttccggcaacaaagagtctccaaaacgctggatcaaaacaacaacagcaactttgcttggactggtgccaccaaatatcacctgaacggcagaaactcgttggttaatcccggcgtcgccatggcaactcacaaggacgacgaggaccgctttttcccatccagcggagtcctgatttttggaaaaactggagcaactaacaaaactacattggaaaatgtgttaatgacaaatgaagaagaaattcgtcctactaatcctgtagccacggaagaatacgggatagtcagcagcaacttacaagcggctaatactgcagcccagacacaagttgtcaacaaccagggagccttacctggcatggtctggcagaaccgggacgtgtacctgcagggtcccatctgggccaagattcctcacacggatggcaactttcacccgtctcctttgatgggcggctttggacttaaacatccgcctcctcagatcctgatcaagaacactcccgttcccgctaatcctccggaggtgtttactcctgccaagtttgcttcgttcatcacacagtacagcaccggacaagtcagcgtggaaatcgagtgggagctgcagaaggaaaacagcaagcgctggaacccggagattcagtacacctccaactttgaaaagcagactggtgtggactttgccgttgacagccagggtgtttactctgagcctcgccctattggcactcgttacctcacccgtaatctgtaa

SEQ ID NO: 5159 - protein, 738 aa, Adeno-associated virus 7
MAADGYLPDWLEDNLSEGIREWWALKPGAPKPKANQQKQDDGRGLVLPGYKYLGPFNGLDKGEPVNAADAAALEHDKAYDQQLQAGDNPYLRYNHADAEFQERLQEDTSFGGNLGRAVFQAKKRVLEPLGLVEEGAKTAPGKKRPVEPSPQRSPDSSTGIGKKGQQPARKRLNFGQTGDSESVPDPQPLGEPPAAPSGVGPNTMAAGGGAPMADNNEGADGVGSSSGNWHCDSTWLGDRVITTSTRTWALPTYNNHLYKQISNGTSGGATNDNTYFGYSTPWGYFDFNRFHCHFSPRDWQRLINNNWGFRPKRLSFKLFNIQVKEVTQNEGTKTIANNLTSTIQVFTDSEYQLPYVLGSAHQGCLPPFPADVFMIPQYGYLTLNNGSQAVGRSSFYCLEYFPSQMLRTGNNFQFTYTFEDVPFHSSYAHSQSLDRLMNPLIDQYLYYLSRTQTTGGTANTQTLGFSQGGPNTMANQAKNWLPGPCYRQQRVSTTTGQNNNSNFAWTAGTKYHLNGRNSLANPGIAMATHKDDEERFFPSNGILIFGKQNAARDNADYSDVMLTSEEEIKTTNPVATEEYGIVADNLQQQNTAPQIGTVNSQGALPGMVWQNRDVYLQGPIWAKIPHTDGNFHPSPLMGGFGLKHPPPQILIKNTPVPADPPTTFNQSKLNSFITQYSTGQVSVEIEWELQKENSKRWNPEIQYTSNYYKSTSVDFAVNTEGVYSEPRPIGTRYLTRNL

SEQ ID NO: 5160 - protein, 737 aa, Adeno-associated virus 7
MAADGYLPDWLEDNLSEGIREWWDLKPGAPKPKANQQKQDNGRGLVLPGYKYLGPFNGLDKGEPVNAADAAALEHDKAYDQQLKAGDNPYLRYNHADAEFQERLQEDTSFGGNLGRAVFQAKKRVLEPLGLVEEGAKTAPAKKRPVEPSPQRSPDSSTGIGKKGQQPARKRLNFGQTGDSESVPDPQPLGEPPAAPSSVGSGTVAAGGGAPMADNNEGADGVGNASGNWHCDSTWLGDRVITTSTRTWALPTYNNHLYKQISSETAGSTNDNTYFGYSTPWGYFDFNRFHCHFSPRDWQRLINNNWGFRPKKLRFKLFNIQVKEVTTNDGVTTIANNLTSTIQVFSDSEYQLPYVLGSAHQGCLPPFPADVFMIPQYGYLTLNNGSQSVGRSSFYCLEYFPSQMLRTGNNFEFSYSFEDVPFHSSYAHSQSLDRLMNPLIDQYLYYLARTQSNPGGTAGNRELQFYQGGPSTMAEQAKNWLPGPCFRQQRVSKTLDQNNNSNFAWTGATKYHLNGRNSLVNPGVAMATHKDDEDRFFPSSGVLIFGKTGATNKTTLENVLMTNEEEIRPTNPVATEEYGIVSSNLQAANTAAQTQVVNNQGALPGMVWQNRDVYLQGPIWAKIPHTDGNFHPSPLMGGFGLKHPPPQILIKNTPVPANPPEVFTPAKFASFITQYSTGQVSVEIEWELQKENSKRWNPEIQYTSNFEKQTGVDFAVDSQGVYSEPRPIGTRYLTRNL

SEQ ID NO: 5161 - protein, 623 aa, Adeno-associated virus 7
MPGFYEIVIKVPSDLDEHLPGISDSFVNWVAEKEWELPPDSDMDLNLIEQAPLTVAEKLQRDFLVQWRRVSKAPEALFFVQFEKGESYFHLHVLVETTGVKSMVLGRFLSQIREKLVQTIYRGVEPTLPNWFAVTKTRNGAGGGNKVVDECYIPNYLLPKTQPELQWAWTNMEEYISACLNLAERKRLVAQHLTHVSQTQEQNKENLNPNSDAPVIRSKTSARYMELVGWLVDRGITSEKQWIQEDQASYISFNAASNSRSQIKAALDNAGKIMALTKSAPDYLVGPSLPADIKTNRIYRILELNGYDPAYAGSVFLGWAQKKFGKRNTIWLFGPATTGKTNIAEAIAHAVPFYGCVNWTNENFPFNDCVDKMVIWWEEGKMTAKVVESAKAILGGSKVRVDQKCKSSAQIDPTPVIVTSNTNMCAVIDGNSTTFEHQQPLQDRMFKFELTRRLEHDFGKVTKQEVKEFFRWASDHVTEVAHEFYVRKGGASKRPAPDDADISEPKRACPSVADPSTSDAEGAPVDFADRYQNKCSRHAGMIQMLFPCKTCERMNQNFNICFTHGVRDCLECFPGVSESQPVVRKKTYRKLCAIHHLLGRAPEIACSACDLVNVDLDDCVSEQ

SEQ ID NO: 5162 - DNA, 4721 bp, Adeno-associated virus 7
  source 1..4721: mol_type = other DNA
ttggccactccctctatgcgcgctcgctcgctcggtggggcctgcggaccaaaggtccgcagacggcagagctctgctctgccggccccaccgagcgagcgagcgcgcatagagggagtggccaactccatcactaggggtaccgcgaagcgcctcccacgctgccgcgtcagcgctgacgtaaatcacgtcataggggagtggtcctgtattagctgtcacgtgagtgcttttgcgacattttgcgacaccacgtggccatttgaggtatatatggccgagtgagcgagcaggatctccattttgaccgcgaaatttgaacgagcagcagccatgccgggtttctacgagatcgtgatcaaggtgccgagcgacctggacgagcacctgccgggcatttctgactcgtttgtgaactgggtggccgagaaggaatgggagctgcccccggattctgacatggatctgaatctgatcgagcaggcacccctgaccgtggccgagaagctgcagcgcgacttcctggtccaatggcgccgcgtgagtaaggccccggaggccctgttctttgttcagttcgagaagggcgagagctacttccaccttcacgttctggtggagaccacgggggtcaagtccatggtgctaggccgcttcctgagtcagattcgggagaagctggtccagaccatctaccgcggggtcgagcccacgctgcccaactggttcgcggtgaccaagacgcgtaatggcgccggcggggggaacaaggtggtggacgagtgctacatccccaactacctcctgcccaagacccagcccgagctgcagtgggcgtggactaacatggaggagtatataagcgcgtgtttgaacctggccgaacgcaaacggctcgtggcgcagcacctgacccacgtcagccagacgcaggagcagaacaaggagaatctgaaccccaattctgacgcgcccgtgatcaggtcaaaaacctccgcgcgctacatggagctggtcgggtggctggtggaccggggcatcacctccgagaagcagtggatccaggaggaccaggcctcgtacatctccttcaacgccgcctccaactcgcggtcccagatcaaggccgcgctggacaatgccggcaagatcatggcgctgaccaaatccgcgcccgactacctggtggggccctcgctgcccgcggacattaaaaccaaccgcatctaccgcatcctggagctgaacgggtacgatcctgcctacgccggctccgtctttctcggctgggcccagaaaaagttcgggaagcgcaacaccatctggctgtttgggcccgccaccaccggcaagaccaacattgcggaagccatcgcccacgccgtgcccttctacggctgcgtcaactggaccaatgagaactttcccttcaacgattgcgtcgacaagatggtgatctggtgggaggagggcaagatgacggccaaggtcgtggagtccgccaaggccattctcggcggcagcaaggtgcgcgtggaccaaaagtgcaagtcgtccgcccagatcgaccccacccccgtgatcgtcacctccaacaccaacatgtgcgccgtgattgacgggaacagcaccaccttcgagcaccagcagccgttgcaggaccggatgttcaaatttgaactcacccgccgtctggagcacgactttggcaaggtgacgaagcaggaagtcaaagagttcttccgctgggccagtgatcacgtgaccgaggtggcgcatgagttctacgtcagaaagggcggagccagcaaaagacccgcccccgatgacgcggatataagcgagcccaagcgggcctgcccctcagtcgcggatccatcgacgtcagacgcggaaggagctccggtggactttgccgacaggtaccaaaacaaatgttctcgtcacgcgggcatgattcagatgctgtttccctgcaaaacgtgcgagagaatgaatcagaatttcaacatttgcttcacacacggggtcagagactgtttagagtgtttccccggcgtgtcagaatctcaaccggtcgtcagaaaaaagacgtatcggaaactctgcgcgattcatcatctgctggggcgggcgcccgagattgcttgctcggcctgcgacctggtcaacgtggacctggacgactgcgtttctgagcaataaatgacttaaaccaggtatggctgccgatggttatcttccagattggctcgaggacaacctctctgagggcattcgcgagtggtgggacctgaaacctggagccccgaaacccaaagccaaccagcaaaagcaggacaacggccggggtctggtgcttcctggctacaagtacctcggacccttcaacggactcgacaagggggagcccgtcaacgcggcggacgcagcggccctcgagcacgacaaggcctacgaccagcagctcaaagcgggtgacaatccgtacctgcggtataaccacgccgacgccgagtttcaggagcgtctgcaagaagatacgtcatttgggggcaacctcgggcgagcagtcttccaggccaagaagcgggttctcgaacctctcggtctggttgaggaaggcgctaagacggctcctgcaaagaagagaccggtagagccgtcacctcagcgttcccccgactcctccacgggcatcggcaagaaaggccagcagcccgccagaaagagactcaatttcggtcagactggcgactcagagtcagtccccgaccctcaacctctcggagaacctccagcagcgccctctagtgtgggatctggtacagtggctgcaggcggtggcgcaccaatggcagacaataacgaaggtgccgacggagtgggtaatgcctcaggaaattggcattgcgattccacatggctgggcgacagagtcattaccaccagcacccgaacctgggccctgcccacctacaacaaccacctctacaagcaaatctccagtgaaactgcaggtagtaccaacgacaacacctacttcggctacagcaccccctgggggtattttgactttaacagattccactgccacttctcaccacgtgactggcagcgactcatcaacaacaactggggattccggcccaagaagctgcggttcaagctcttcaacatccaggtcaaggaggtcacgacgaatgacggcgttacgaccatcgctaataaccttaccagcacgattcaggtattctcggactcggaataccagctgccgtacgtcctcggctctgcgcaccagggctgcctgcctccgttcccggcggacgtcttcatgattcctcagtacggctacctgactctcaacaatggcagtcagtctgtgggacgttcctccttctactgcctggagtacttcccctctcagatgctgagaacgggcaacaactttgagttcagctacagcttcgaggacgtgcctttccacagcagctacgcacacagccagagcctggaccggctgatgaatcccctcatcgaccagtacttgtactacctggccagaacacagagtaacccaggaggcacagctggcaatcgggaactgcagttttaccagggcgggccttcaactatggccgaacaagccaagaattggttacctggaccttgcttccggcaacaaagagtctccaaaacgctggatcaaaacaacaacagcaactttgcttggactggtgccaccaaatatcacctgaacggcagaaactcgttggttaatcccggcgtcgccatggcaactcacaaggacgacgaggaccgctttttcccatccagcggagtcctgatttttggaaaaactggagcaactaacaaaactacattggaaaatgtgttaatgacaaatgaagaagaaattcgtcctactaatcctgtagccacggaagaatacgggatagtcagcagcaacttacaagcggctaatactgcagcccagacacaagttgtcaacaaccagggagccttacctggcatggtctggcagaaccgggacgtgtacctgcagggtcccatctgggccaagattcctcacacggatggcaactttcacccgtctcctttgatgggcggctttggacttaaacatccgcctcctcagatcctgatcaagaacactcccgttcccgctaatcctccggaggtgtttactcctgccaagtttgcttcgttcatcacacagtacagcaccggacaagtcagcgtggaaatcgagtgggagctgcagaaggaaaacagcaagcgctggaacccggagattcagtacacctccaactttgaaaagcagactggtgtggactttgccgttgacagccagggtgtttactctgagcctcgccctattggcactcgttacctcacccgtaatctgtaattgcatgttaatcaataaaccggttgattcgtttcagttgaactttggtctcctgtgcttcttatcttatcggtttccatagcaactggttacacattaactgcttgggtgcgcttcacgataagaacactgacgtcaccgcggtacccctagtgatggagttggccactccctctatgcgcgctcgctcgctcggtggggcctgcggaccaaaggtccgcagacggcagagctctgctctgccggccccaccgagcgagcgagcgcgcatagagggagtggccaa

SEQ ID NO: 5163 - DNA, 2214 bp, Adeno-associated virus 7; identical to SEQ ID NO: 5158
  source 1..2214: mol_type = other DNA

SEQ ID NO: 5164 - protein, 737 aa, Adeno-associated virus 7; identical to SEQ ID NO: 5160

SEQ ID NO: 5165 - DNA, 2217 bp, Adeno-associated virus 8
  source 1..2217: mol_type = other DNA
atggctgccgatggttatcttccagattggctcgaggacaacctctctgagggcattcgcgagtggtgggcgctgaaacctggagccccgaagcccaaagccaaccagcaaaagcaggacgacggccggggtctggtgcttcctggctacaagtacctcggacccttcaacggactcgacaagggggagcccgtcaacgcggcggacgcagcggccctcgagcacgacaaggcctacgaccagcagctgcaggcgggtgacaatccgtacctgcggtataaccacgccgacgccgagtttcaggagcgtctgcaagaagatacgtcttttgggggcaacctcgggcgagcagtcttccaggccaagaagcgggttctcgaacctctcggtctggttgaggaaggcgctaagacggctcctggaaagaagagaccggtagagccatcaccccagcgttctccagactcctctacgggcatcggcaagaaaggccaacagcccgccagaaaaagactcaattttggtcagactggcgactcagagtcagttccagaccctcaacctctcggagaacctccagcagcgccctctggtgtgggacctaatacaatggctgcaggcggtggcgcaccaatggcagacaataacgaaggcgccgacggagtgggtagttcctcgggaaattggcattgcgattccacatggctgggcgacagagtcatcaccaccagcacccgaacctgggccctgcccacctacaacaaccacctctacaagcaaatctccaacgggacatcgggaggagccaccaacgacaacacctacttcggctacagcaccccctgggggtattttgactttaacagattccactgccacttttcaccacgtgactggcagcgactcatcaacaacaactggggattccggcccaagagactcagcttcaagctcttcaacatccaggtcaaggaggtcacgcagaatgaaggcaccaagaccatcgccaataacctcaccagcaccatccaggtgtttacggactcggagtaccagctgccgtacgttctcggctctgcccaccagggctgcctgcctccgttcccggcggacgtgttcatgattccccagtacggctacctaacactcaacaacggtagtcaggccgtgggacgctcctccttctactgcctggaatactttccttcgcagatgctgagaaccggcaacaacttccagtttacttacaccttcgaggacgtgcctttccacagcagctacgcccacagccagagcttggaccggctgatgaatcctctgattgaccagtacctgtactacttgtctcggactcaaacaacaggaggcacggcaaatacgcagactctgggcttcagccaaggtgggcctaatacaatggccaatcaggcaaagaactggctgccaggaccctgttaccgccaacaacgcgtctcaacgacaaccgggcaaaacaacaatagcaactttgcctggactgctgggaccaaataccatctgaatggaagaaattcattggctaatcctggcatcgctatggcaacacacaaagacgacgaggagcgtttttttcccagtaacgggatcctgatttttggcaaacaaaatgctgccagagacaatgcggattacagcgatgtcatgctcaccagcgaggaagaaatcaaaaccactaaccctgtggctacagaggaatacggtatcgtggcagataacttgcagcagcaaaacacggctcctcaaattggaactgtcaacagccagggggccttacccggtatggtctggcagaaccgggacgtgtacctgcagggtcccatctgggccaagattcctcacacggacggcaacttccacccgtctccgctgatgggcggctttggcctgaaacatcctccgcctcagatcctgatcaagaacacgcctgtacctgcggatcctccgaccaccttcaaccagtcaaagctgaactctttcatcacgcaatacagcaccggacaggtcagcgtggaaattgaatgggagctgcagaaggaaaacagcaagcgctggaaccccgagatccagtacacctccaactactacaaatctacaagtgtggactttgctgttaatacagaaggcgtgtactctgaaccccgccccattggcacccgttacctcacccgtaatctgtaa

SEQ ID NO: 5166 - DNA, 2213 bp, Adeno-associated virus 8
  source 1..2213: mol_type = other DNA
atggctgccgatggttatcttccagattggctcgaggacaacctctctgagggcattcgcgagtggtgggcgctgaaacctggagccccgaagcccaaagccaaccagcaaaagcaggacgacggccggggtctggtgcttcctggctacaagtacctcggacccttcaacggactcgacaagggggagcccgtcaacgcggcggacgcagcggccctcgagcacgacaaggcctacgaccagcagctgcaggcgggtgacaatccgtacctgcggtataaccacgccgacgccgagtttcaggagcgtctgcaagaagatacgtcttttgggggcaacctcgggcgagcagtcttccaggccaagaagcgggttctcgaacctctcggtctggttgaggaaggcgctaagacggctcctggaaagaagagaccggtagagccatcaccccagcgttctccagactcctctacgggcatcggcaagaaaggccaacagcccgccagaaaaagactcaattttggtcagactggcgactcagagtcagttccagaccctcaacctctcggagaacctccagcagcgccctctggtgtgggacctaatacaatggctgcaggcggtggcgcaccaatggcagacaataacgaaggcgccgacggagtgggtagttcctcgggaaattggcattgcgattccacatggctgggcgacagagtcatcaccaccagcacccgaacctgggccctgcccacctacaacaaccacctctacaagcaaatctccaacgggacatcgggaggagccaccaacgacaacacctacttcggctacagcaccccctgggggtattttgactttaacagattccactgccacttttcaccacgtgactggcagcgactcatcaacaacaactggggattccggcccaagagactcagcttcaagctcttcaacatccaggtcaaggaggtcacgcagaatgaaggcaccaagaccatcgccaataacctcaccagcaccatccaggtgtttacggactcggagtaccagctgccgtacgttctcggctctgcccaccagggctgcctgcctccgttcccggcggacgtgttcatgattccccagtacggctacctaacactcaacaacggtagtcaggccgtgggacgctcctccttctactgcctggaatactttccttcgcagatgctgagaaccggcaacaacttccagtttacttacaccttcgaggacgtgcctttccacagcagctacgcccacagccagagcttggaccggctgatgaatcctctgattgaccagtacctgtactacttgtctcggactcaaacaacaggaggcacggcaaatacgcagactctgggcttcagccaaggtgggcctaatacaatggccaatcaggcaaagaactggctgccaggaccctgttaccgccaacaacgcgtctcaacgacaaccgggcaaaacaacaatagcaactttgcctggactgctgggaccaaataccatctgaatggaagaaattcattggctaatcctggcatcgctatggcaacacacaaagacgacgaggagcgtttttttcccagtaacgggatcctgatttttggcaaacaaaatgctgccagagacaatgcggattacagcgatgtcatgctcaccagcgaggaagaaatcaaaaccactaaccctgtggctacagaggaatacggtatcgtggcagataacttgcagcagcaaaacacggctcctcaaattggaactgtcaacagccagggggccttacccggtatggtctggcagaaccgggacgtgtacctgcagggtcccatctgggccaagattcctcacacggacggcaacttccacccgtctccgctgatgggcggctttggcctgaaacatcctccgcctcagatcctgatcaagaacacgcctgtacctgcggatcctccgaccaccttcaaccagtcaaagctgaactctttcatcacgcaatacagcaccggacaggtcagcgtggaaattgaatgggagctgcagaaggaaaacagcaagcgctggaaccccgagatccagtacacctccaactactacaaatctacaagtgtggactttgctgtaatacagaaggcgtgtactctgaaccccgccccattggcacccgttacctcacccgtaatctg

SEQ ID NO: 5167 - DNA, 4393 bp, Adeno-associated virus 8
  source 1..4393: mol_type = other DNA
cagagagggagtggccaactccatcactaggggtagcgcgaagcgcctcccacgctgccgcgtcagcgctgacgtaaattacgtcataggggagtggtcctgtattagctgtcacgtgagtgcttttgcggcattttgcgacaccacgtggccatttgaggtatatatggccgagtgagcgagcaggatctccattttgaccgcgaaatttgaacgagcagcagccatgccgggcttctacgagatcgtgatcaaggtgccgagcgacctggacgagcacctgccgggcatttctgactcgtttgtgaactgggtggccgagaaggaatgggagctgcccccggattctgacatggatcggaatctgatcgagcaggcacccctgaccgtggccgagaagctgcagcgcgacttcctggtccaatggcgccgcgtgagtaaggccccggaggccctcttctttgttcagttcgagaagggcgagagctactttcacctgcacgttctggtcgagaccacgggggtcaagtccatggtgctaggccgcttcctgagtcagattcgggaaaagcttggtccagaccatctacccgcggggtcgagccccaccttgcccaactggttcgcggtgaccaaagacgcggtaatggcgccggcgggggggaacaaggtggtggacgagtgctacatccccaactacctcctgcccaagactcagcccgagctgcagtgggcgtggactaacatggaggagtatataagcgcgtgcttgaacctggccgagcgcaaacggctcgtggcgcagcacctgacccacgtcagccagacgcaggagcagaacaaggagaatctgaaccccaattctgacgcgcccgtgatcaggtcaaaaacctccgcgcgctatatggagctggtcgggtggctggtggaccggggcatcacctccgagaagcagtggatccaggaggaccaggcctcgtacatctccttcaacgccgcctccaactcgcggtcccagatcaaggccgcgctggacaatgccggcaagatcatggcgctgaccaaatccgcgcccgactacctggtggggccctcgctgcccgcggacattacccagaaccgcatctaccgcatcctcgctctcaacggctacgaccctgcctacgccggctccgtctttctcggctgggctcagaaaaagttcgggaaacgcaacaccatctggctgtttggacccgccaccaccggcaagaccaacattgcggaagccatcgcccacgccgtgcccttctacggctgcgtcaactggaccaatgagaactttcccttcaatgattgcgtcgacaagatggtgatctggtgggaggagggcaagatgacggccaaggtcgtggagtccgccaaggccattctcggcggcagcaaggtgcgcgtggaccaaaagtgcaagtcgtccgcccagatcgaccccacccccgtgatcgtcacctccaacaccaacatgtgcgccgtgattgacgggaacagcaccaccttcgagcaccagcagcctctccaggaccggatgtttaagttcgaactcacccgccgtctggagcacgactttggcaaggtgacaaagcaggaagtcaaagagttcttccgctgggccagtgatcacgtgaccgaggtggcgcatgagttttacgtcagaaagggcggagccagcaaaagacccgcccccgatgacgcggataaaagcgagcccaagcgggcctgcccctcagtcgcggatccatcgacgtcagacgcggaaggagctccggtggactttgccgacaggtaccaaaacaaatgttctcgtcacgcgggcatgcttcagatgctgtttccctgcaaaacgtgcgagagaatgaatcagaatttcaacatttgcttcacacacggggtcagagactgctcagagtgtttccccggcgtgtcagaatctcaaccggtcgtcagaaagaggacgtatcggaaactctgtgcgattcatcatctgctggggcgggctcccgagattgcttgctcggcctgcgatctggtcaacgtggacctggatgactgtgtttctgagcaataaatgacttaaaccaggtatggctgccgatggttatcttccagattggctcgaggacaacctctctgagggcattcgcgagtggtgggcgctgaaacctggagccccgaagcccaaagccaaccagcaaaagcaggacgacggccggggtctggtgcttcctggctacaagtacctcggacccttcaacggactcgacaagggggagcccgtcaacgcggcggacgcagcggccctcgagcacgacaaggcctacgaccagcagctgcaggcgggtgacaatccgtacctgcggtataaccacgccgacgccgagtttcaggagcgtctgcaagaagatacgtcttttgggggcaacctcgggcgagcagtcttccaggccaagaagcgggttctcgaacctctcggtctggttgaggaaggcgctaagacggctcctggaaagaagagaccggtagagccatcaccccagcgttctccagactcctctacgggcatcggcaagaaaggccaacagcccgccagaaaaagactcaattttggtcagactggcgactcagagtcagttccagaccctcaacctctcggagaacctccagcagcgccctctggtgtgggacctaatacaatggctgcaggcggtggcgcaccaatggcagacaataacgaaggcgccgacggagtgggtagttcctcgggaaattggcattgcgattccacatggctgggcgacagagtcatcaccaccagcacccgaacctgggccctgcccacctacaacaaccacctctacaagcaaatctccaacgggacatcgggaggagccaccaacgacaacacctacttcggctacagcaccccctgggggtattttgactttaacagattccactgccacttttcaccacgtgactggcagcgactcatcaacaacaactggggattccggcccaagagactcagcttcaagctcttcaacatccaggtcaaggaggtcacgcagaatgaaggcaccaagaccatcgccaataacctcaccagcaccatccaggtgtttacggactcggagtaccagctgccgtacgttctcggctctgcccaccagggctgcctgcctccgttcccggcggacgtgttcatgattccccagtacggctacctaacactcaacaacggtagtcaggccgtgggacgctcctccttctactgcctggaatactttccttcgcagatgctgagaaccggcaacaacttccagtttacttacaccttcgaggacgtgcctttccacagcagctacgcccacagccagagcttggaccggctgatgaatcctctgattgaccagtacctgtactacttgtctcggactcaaacaacaggaggcacggcaaatacgcagactctgggcttcagccaaggtgggcctaatacaatggccaatcaggcaaagaactggctgccaggaccctgttaccgccaacaacgcgtctcaacgacaaccgggcaaaacaacaatagcaactttgcctggactgctgggaccaaataccatctgaatggaagaaattcattggctaatcctggcatcgctatggcaacacacaaagacgacgaggagcgtttttttcccagtaacgggatcctgatttttggcaaacaaaatgctgccagagacaatgcggattacagcgatgtcatgctcaccagcgaggaagaaatcaaaaccactaaccctgtggctacagaggaatacggtatcgtggcagataacttgcagcagcaaaacacggctcctcaaattggaactgtcaacagccagggggccttacccggtatggtctggcagaaccgggacgtgtacctgcagggtcccatctgggccaagattcctcacacggacggcaacttccacccgtctccgctgatgggcggctttggcctgaaacatcctccgcctcagatcctgatcaagaacacgcctgtacctgcggatcctccgaccaccttcaaccagtcaaagctgaactctttcatcacgcaatacagcaccggacaggtcagcgtggaaattgaatgggagctgcagaaggaaaacagcaagcgctggaaccccgagatccagtacacctccaactactacaaatctacaagtgtggactttgctgttaatacagaaggcgtgtactctgaaccccgccccattggcacccgttacctcacccgtaatctgtaattgcctgttaatcaataaaccggttgattcgtttcagttgaactttggtctctgcg

SEQ ID NO: 5168 - protein, 738 aa, Adeno-associated virus 8; identical to SEQ ID NO: 5159

SEQ ID NO: 5169 - protein, 737 aa, Adeno-associated virus 8
MAADGYLPDWLEDNLSEGIREWWALKPGAPKPKANQQKQDDGRGLVLPGYKYLGPFNGLDKGEPVNAADAAALEHDKAYDQQLQAGDNPYLRYNHADAEFQERLQEDTSFGGNLGRAVFQAKKRVLEPLGLVEEGAKTAPGKKRPVEPSPQRSPDSSTGIGKKGQQPARKRLNFGQTGDSESVPDPQPLGEPPAAPSGVGPNTMAAGGGAPMADNNEGADGVGSSSGNWHCDSTWLGDRVITTSTRTWALPTYNNHLYKQISNGTSGGATNDNTYFGYSTPWGYFDFNRFHCHFSPRDWQRLINNNWGFRPKRLSFKLFNIQVKEVTQNEGTKTIANNLTSTIQVFTDSEYQLPYVLGSAHQGCLPPFPADVFMIPQYGYLTLNNGSQAVGRSSFYCLEYFPSQMLRTGNNFQFTYTFEDVPFHSSYAHSQSLDRLMNPLIDQYLYYLSRTQTTGGTANTQTLGFSQGGPNTMANQAKNWLPGPCYRQQRVSTTTGQNNNSNFAWTAGTKYHLNGRNSLANPGIAMATHKDDEERFFPSNGILIFGKQNAARDNADYSDVMLTSEEEIKTTNPVATEEYGIVADNLQQQNTAPQIGTVNSQGALPGMVWQNRDVYLQGPIWAKIPHTDGNFHPSPLMGGFGLKHPPPQILIKNTPVPADPPTTFNQSKLNSFITQYSTGQVSVEIEWELQKENSKRWNPEIQYTSNYYKSTSVDFAVIQKACTLNPAPLAPVTSPVI

SEQ ID NO: 5170 - DNA, 2217 bp, Adeno-associated virus 8; identical to SEQ ID NO: 5165
  source 1..2217: mol_type = other DNA

SEQ ID NO: 5171 - DNA, 4385 bp, Adeno-associated virus 9
  source 1..4385: mol_type = other DNA
cagagagggagtggccaactccatcactaggggtaatcgcgaagcgcctcccacgctgccgcgtcagcgctgacgtagattacgtcataggggagtggtcctgtattagctgtcacgtgagtgcttttgcgacattttgcgacaccacatggccatttgaggtatatatggccgagtgagcgagcaggatctccattttgaccgcgaaatttgaacgagcagcagccatgccgggcttctacgagattgtgatcaaggtgccgagcgacctggacgagcacctgccgggcatttctgactcttttgtgaactgggtggccgagaaggaatgggagctgcccccggattctgacatggatcggaatctgatcgagcaggcacccctgaccgtggccgagaagctgcagcgcgacttcctggtccaatggcgccgcgtgagtaaggccccggaggccctcttctttgttcagttcgagaagggcgagagctactttcacctgcacgttctggtcgagaccacgggggtcaagtccatggtgctaggccgcttcctgagtcagattcgggagaagctggtccagaccatctaccgcgggatcgagccgaccctgcccaactggttcgcggtgaccaagacgcgtaatggcgccggcggggggaacaaggtggtggacgagtgctacatccccaactacctcctgcccaagactcagcccgagctgcagtgggcgtggactaacatggaggagtatataagcgcgtgcttgaacctggccgagcgcaaacggctcgtggcgcagcacctgacccacgtcagccagacgcaggagcagaacaaggagaatctgaaccccaattctgacgcgcccgtgatcaggtcaaaaacctccgcgcgctacatggagctggtcgggtggctggtggaccggggcatcacctccgagaagcagtggatccaggaggaccaggcctcgtacatctccttcaacgccgcctccaactcgcggtcccagatcaaggccgcgctggacaatgccggcaagatcatggcgctgaccaaatccgcgcccgactacctggtaggcccttcacttccggtggacattacgcagaaccgcatctaccgcatcctgcagctcaacggctacgaccctgcctacgccggctccgtctttctcggctgggcacaaaagaagttcgggaaacgcaacaccatctggctgtttgggccggccaccacgggaaagaccaacatcgcagaagccattgcccacgccgtgcccttctacggctgcgtcaactggaccaatgagaactttcccttcaacgattgcgtcgacaagatggtgatctggtgggaggagggcaagatgacggccaaggtcgtggagtccgccaaggccattctcggcggcagcaaggtgcgcgtggaccaaaagtgcaagtcgtccgcccagatcgaccccactcccgtgatcgtcacctccaacaccaacatgtgcgccgtgattgacgggaacagcaccaccttcgagcaccagcagcctctccaggaccggatgtttaagttcgaactcacccgccgtctggagcacgactttggcaaggtgacaaagcaggaagtcaaagagttcttccgctgggccagtgatcacgtgaccgaggtggcgcatgagttttacgtcagaaagggcggagccagcaaaagacccgcccccgatgacgcggataaaagcgagcccaagcgggcctgcccctcagtcgcggatccatcgacgtcagacgcggaaggagctccggtggactttgccgacaggtaccaaaacaaatgttctcgtcacgcgggcatgcttcagatgctgcttccctgcaaaacgtgcgagagaatgaatcagaatttcaacatttgcttcacacacggggtcagagactgctcagagtgtttccccggcgtgtcagaatctcaaccggtcgtcagaaagaggacgtatcggaaactctgtgcgattcatcatctgctggggcgggctcccgagattgcttgctcggcctgcgatctggtcaacgtggacctggatgactgtgtttctgagcaataaatgacttaaaccaggtatggctgccgatggttatcttccagattggctcgaggacaacctctctgagggcattcgcgagtggtgggcgctgaaacctggagccccgaagcccaaagccaaccagcaaaagcaggacgacggccggggtctggtgcttcctggctacaagtacctcggacccttcaacggactcgacaagggggagcccgtcaacgcggcggacgcagcggccctcgagcacggcaaggcctacgaccagcagctgcaggcgggtgacaatccgtacctgcggtataaccacgccgacgccgagtttcaggagcgtctgcaagaagatacgtcttttgggggcaacctcgggcgagcagtcttccaggccaagaagcgggttctcgaacctctcggtctggttgaggaaggcgctaagacggctcctggaaagaagagaccggtagagccatcaccccagcgttctccagactcctctacgggcatcggcaagaaaggccaacagcccgccagaaaaagactcaattttggtcagactggcgactcagagtcagttccagaccctcaacctctcggagaacctccagcagcgccctctggtgtgggacctaatacaatggctgcaggcggtggcgcaccaatggcagacaataacgaaggcgccgacggagtgggtaattcctcgggaaattggcattgcgattccacatggctgggggacagagtcatcaccaccagcacccgaacctgggcattgcccacctacaacaaccacctctacaagcaaatctccaatggaacatcgggaggaagcaccaacgacaacacctactttggctacagcaccccctgggggtattttgacttcaacagattccactgccacttctcaccacgtgactggcagcgactcatcaacaacaactggggattccggccaaagagactcaacttcaagctgttcaacatccaggtcaaggaggttacgacgaacgaaggcaccaagaccatcgccaataaccttaccagcaccgtccaggtctttacggactcggagtaccagctaccgtacgtcctaggctctgcccaccaaggatgcctgccaccgtttcctgcagacgtcttcatggttcctcagtacggctacctgacgctcaacaatggaagtcaagcgttaggacgttcttctttctactgtctggaatacttcccttctcagatgctgagaaccggcaacaactttcagttcagctacactttcgaggacgtgcctttccacagcagctacgcacacagccagagtctagatcgactgatgaaccccctcatcgaccagtacctatactacctggtcagaacacagacaactggaactgggggaactcaaactttggcattcagccaagcaggccctagctcaatggccaatcaggctagaaactgggtacccgggccttgctaccgtcagcagcgcgtctccacaaccaccaaccaaaataacaacagcaactttgcgtggacgggagctgctaaattcaagctgaacgggagagactcgctaatgaatcctggcgtggctatggcatcgcacaaagacgacgaggaccgcttctttccatcaagtggcgttctcatatttggcaagcaaggagccgggaacgatggagtcgactacagccaggtgctgattacagatgaggaagaaattaaagccaccaaccctgtagccacagaggaatacggagcagtggccatcaacaaccaggccgctaacacgcaggcgcaaactggacttgtgcataaccagggagttattcctggtatggtctggcagaaccgggacgtgtacctgcagggccctatttgggctaaaatacctcacacagatggcaactttcacccgtctcctctgatgggtggatttggactgaaacacccacctccacagattctaattaaaaatacaccagtgccggcagatcctcctcttaccttcaatcaagccaagctgaactctttcatcacgcagtacagcacgggacaagtcagcgtggaaatcgagtgggagctgcagaaagaaaacagcaagcgctggaatccagagatccagtatacttcaaactactacaaatctacaaatgtggactttgctgtcaataccaaaggtgtttactctgagcctcgccccattggtactcgttacctcacccgtaatttgtaattgcctgttaatcaataaaccggttaattcgtttcagttgaactttggtctctgcg

SEQ ID NO: 5172 - DNA, 4382 bp, Adeno-associated virus 9
  source 1..4382: mol_type = other DNA
cagagagggagtggccaactccatcactaggggtaatcgcgaagcgcctcccacgctgccgcgtcagcgctgacgtagattacgtcataggggagtggtcctgtattagctgtcacgtgagtgcttttgcgacattttgcgacaccacatggccatttgaggtatatatggccgagtgagcgagcaggatctccattttgaccgcgaaatttgaacgagcagcagccatgccgggcttctacgagattgtgatcaaggtgccgagcgacctggacgagcacctgccgggcatttctgactcttttgtgaactgggtggccgagaaggaatgggagctgcccccggattctgacatggatcggaatctgatcgagcaggcacccctgaccgtggccgagaagctgtagcgcgacttcctggtccaatggcgccgcgtgagtaaggccccggaggccctcttctttgttcagttcgagaagggcgagagctactttcacctgcacgttctggtcgagaccacgggggtcaagtccatggtgctaggccgcttcctgagtcagattcgggagaagctggtccagaccatctaccgcgggatcgagccgaccctgcccaactggttcgcggtgaccaagacgcgtaatggcgccggcggggggaacaaggtggtggacgagtgctacatccccaactacctcctgcccaagactcagcccgagctgcagtgggcgtggactaacatggaggagtatataagcgcgtgcttgaacctggccgagcgcaaacggctcgtggcgcagcacctgacccacgtcagccagacgcaggagcagaacaaggagaatctgaaccccaattctgacgcgcccgtgatcaggtcaaaaacctccgcgcgctacatggagctggtcgggtggctggtggaccggggcatcacctccgagaagcagtggatccaggaggaccaggcctcgtacatctccttcaacgccgcctccaactcgcggtcccagatcaaggccgcgctggacaatgccggcaagatcatggcgctgaccaaatccgcgcccgactacctggtaggcccttcacttccggtggacattacgcagaaccgcatctaccgcatcctgcagctcaacggctacgaccctgcctacgccggctccgtctttctcggctgggcacaaaagaagttcgggaaacgcaacaccatctggctgtttgggccggccaccacgggaaagaccaacatcgcagaagccattgcccacgccgtgcccttctacggctgcgtcaactggaccaatgagaactttcccttcaacgattgcgtcgacaagatggtgatctggtgggaggagggcaagatgacggccaaggtcgtggagtccgccaaggccattctcggcggcagcaaggtgcgcgtggaccaaaagtgcaagtcgtccgcccagatcgaccccactcccgtgatcgtcacctccaacaccaacatgtgcgccgtgattgacgggaacagcaccaccttcgagcaccagcagcctctccaggaccggatgtttaagttcgaactcacccgccgtctggagcacgactttggcaaggtgacaaagcaggaagtcaaagagttcttccgctgggccagtgatcacgtgaccgaggtggcgcatgagttttacgtcagaaagggcggagccagcaaaagacccgcccccgatgacgcggataaaagcgagcccaagcgggcctgcccctcagtcgcggatccatcgacgtcagacgcggaaggagctccggtggactttgccgacaggtaccaaaacaaatgttctcgtcacgcgggcatgcttcagatgctgcttccctgcaaaacgtgcgagagaatgaatcagaatttcaacatttgcttcacacacggggtcagagactgctcagagtgtttccccggcgtgtcagaatctcaaccggtcgtcagaaagaggacgtatcggaaactctgtgcgattcatcatctgctggggcgggctcccgagattgcttgctcggcctgcgatctggtcaacgtggacctggatgactgtgtttctgagcaataaatgacttaaaccaggtatggctgccgatggttatcttccagattggctcgaggacaacctctctgagggcattcgcgagtggtgggacctgaaacctggagccccgaaacccaaagccaaccagcaaaagcaggacgacggccggggtctggtgcttcctggctacaagtacctcggacccttcaacggactcgacaagggggagcccgtcaacgcggcggacgcagcggccctcgagcacgacaaggcctacgaccagcagctcaaagcgggtgacaatccgtacctgcggtataaccacgccgacgccgagtttcaggagcgtctgcaagaagatacgtcttttgggggcaacctcgggcgagcagtcttccaggccaagaagcgggttctcgaacctctcggtctggttgaggaaggcgctaagacggctcctggaaagaagagaccggtagagcagtcaccccaagaaccagactcatcctcgggcatcggcaaatcaggccagcagcccgctaaaaagagactcaattttggtcagactggcgactcagagtcagtccccgacccacaacctctcggagaacctccagaagccccctcaggtctgggacctaatacaatggcttcaggcggtggcgctccaatggcagacaataacgaaggcgccgacggagtgggtaattcctcgggaaattggcattgcgattccacatggctgggggacagagtcatcaccaccagcacccgaacctgggcattgcccacctacaacaaccacctctacaagcaaatctccaatggaacatcgggaggaagcaccaacgacaacacctactttggctacagcaccccctgggggtattttgacttcaacagattccactgccacttctcaccacgtgactggcagcgactcatcaacaacaactggggattccggccaaagagactcaacttcaagctgttcaacatccaggtcaaggaggttacgacgaacgaaggcaccaagaccatcgccaataaccttaccagcaccgtccaggtctttacggactcggagtaccagctaccgtacgtcctaggctctgcccaccaaggatgcctgccaccgtttcctgcagacgtcttcatggttcctcagtacggctacctgacgctcaacaatggaagtcaagcgttaggacgttcttctttctactgtctggaatacttcccttctcagatgctgagaaccggcaacaactttcagttcagctacactttcgaggacgtgcctttccacagcagctacgcacacagccagagtctagatcgactgatgaaccccctcatcgaccagtacctatactacctggtcagaacacagacaactggaactgggggaactcaaactttggcattcagccaagcaggccctagctcaatggccaatcaggctagaaactgggtacccgggccttgctaccgtcagcagcgcgtctccacaaccaccaaccaaaataacaacagcaactttgcgtggacgggagctgctaaattcaagctgaacgggagagactcgctaatgaatcctggcgtggctatggcatcgcacaaagacgacgaggaccgcttctttccatcaagtggcgttctcatatttggcaagcaaggagccgggaacgatggagtcgactacagccaggtgctgattacagatgaggaagaaattaaagccaccaaccctgtagccacagaggaatacggagcagtggccatcaacaaccaggccgctaacacgcaggcgcaaactggacttgtgcataaccagggagttattcctggtatggtctggcagaaccgggacgtgtacctgcagggccctatttgggctaaaatacctcacacagatggcaactttcacccgtctcctctgatgggtggatttggactgaaacacccacctccacagattctaattaaaaatacaccagtgccggcagatcctcctcttaccttcaatcaagccaagctgaactctttcatcacgcagtacagcacgggacaagtcagcgtggaaatcgagtgggagctgcagaaagaaaacagcaagcgctggaatccagagatccagtatacttcaaactactacaaatctacaaatgtggactttgctgtcaataccgaaggtgtttactctgagcctcgccccattggtactcgttacctcacccgtaatttgtaattgcctgttaatcaataaaccggttaattcgtttcagttgaactttggtctctgcg

SEQ ID NO: 5173 - protein, 736 aa, Adeno-associated virus 9; identical to SEQ ID NO: 4805

SEQ ID NO: 5174 - protein, 736 aa, Adeno-associated virus 9
MAADGYLPDWLEDNLSEGIREWWDLKPGAPKPKANQQKQDDGRGLVLPGYKYLGPFNGLDKGEPVNAADAAALEHDKAYDQQLKAGDNPYLRYNHADAEFQERLQEDTSFGGNLGRAVFQAKKRVLEPLGLVEEGAKTAPGKKRPVEQSPQEPDSSSGIGKSGQQPAKKRLNFGQTGDSESVPDPQPLGEPPEAPSGLGPNTMASGGGAPMADNNEGADGVGNSSGNWHCDSTWLGDRVITTSTRTWALPTYNNHLYKQISNGTSGGSTNDNTYFGYSTPWGYFDFNRFHCHFSPRDWQRLINNNWGFRPKRLNFKLFNIQVKEVTTNEGTKTIANNLTSTVQVFTDSEYQLPYVLGSAHQGCLPPFPADVFMVPQYGYLTLNNGSQALGRSSFYCLEYFPSQMLRTGNNFQFSYTFEDVPFHSSYAHSQSLDRLMNPLIDQYLYYLVRTQTTGTGGTQTLAFSQAGPSSMANQARNWVPGPCYRQQRVSTTTNQNNNSNFAWTGAAKFKLNGRDSLMNPGVAMASHKDDEDRFFPSSGVLIFGKQGAGNDGVDYSQVLITDEEEIKATNPVATEEYGAVAINNQAANTQAQTGLVHNQGVIPGMVWQNRDVYLQGPIWAKIPHTDGNFHPSPLMGGFGLKHPPPQILIKNTPVPADPPLTFNQAKLNSFITQYSTGQVSVEIEWELQKENSKRWNPEIQYTSNYYKSTNVDFAVNTEGVYSEPRPIGTRYLTRNL

SEQ ID NO: 5175 - protein, 623 aa, Adeno-associated virus 9
MPGFYEIVIKVPSDLDEHLPGISDSFVNWVAEKEWELPPDSDMDRNLIEQAPLTVAEKLQRDFLVQWRRVSKAPEALFFVQFEKGESYFHLHVLVETTGVKSMVLGRFLSQIREKLVQTIYRGIEPTLPNWFAVTKTRNGAGGGNKVVDECYIPNYLLPKTQPELQWAWTNMEEYISACLNLAERKRLVAQHLTHVSQTQEQNKENLNPNSDAPVIRSKTSARYMELVGWLVDRGITSEKQWIQEDQASYISFNAASNSRSQIKAALDNAGKIMALTKSAPDYLVGPSLPVDITQNRIYRILQLNGYDPAYAGSVFLGWAQKKFGKRNTIWLFGPATTGKTNIAEAIAHAVPFYGCVNWTNENFPFNDCVDKMVIWWEEGKMTAKVVESAKAILGGSKVRVDQKCKSSAQIDPTPVIVTSNTNMCAVIDGNSTTFEHQQPLQDRMFKFELTRRLEHDFGKVTKQEVKEFFRWASDHVTEVAHEFYVRKGGASKRPAPDDADKSEPKRACPSVADPSTSDAEGAPVDFADRYQNKCSRHAGMLQMLLPCKTCERMNQNFNICFTHGVRDCSECFPGVSESQPVVRKRTYRKLCAIHHLLGRAPEIACSACDLVNVDLDDCVSEQ

SEQ ID NO: 5176 - DNA, 1797 bp, synthetic construct
  misc_feature 1..1797: note = Description of Artificial Sequence: Synthetic polynucleotide
  source 1..1797: mol_type = other DNA
acggctccgaccggagacaagcggaaaggcgaagacgaacctcgtttgcccgacacttcttcacagactcccaagaaaaacaagaagcctcgcaaggaaagaccttccggcggggcagaagatccgggcgaaggcacctcttccaacgctggagcagcagcacccgcctctagtgtgggatcatctatcatggctgaaggaggtggcggcccagtgggcgatgcaggccagggtgccgatggagtgggcaattcctccggaaattggcattgcgattcccaatggctggaaaacggagtcgtcactcgaaccacccgaacctgggtcttgcccagctacaacaaccacctgtacaaacgaatccaaggacccagcggaggcgacaacaacaacaaattctttggattcagcaccccctggggatactttgactacaatcgattccactgccacttttccccgcgagactggcaacgactcatcaacaacaactggggcatccgtcccaaagcgatgcgctttagactctttaacatccaggttaaagaggtcacggtccaagacttcaacaccaccatcggcaacaacctcaccagtacggtccaggtctttgcggacaaggactaccaactgccgtacgtcctcggatcggctaccgaaggcaccttcccgccgttcccagcggatatctacacgatcccgcagtacgggtactgcacgctaaactacaacaacgaggcggtggatcgttcggccttctactgtctggactactttccctcagacatgctgcggacaggaaataactttgagtttacttacaccttcgaggacgttcctttccatagcatgtttgcccacaaccagacgctagaccggctgatgaatcccctcgtggatcagtacctctgggctttcagctccgtcagccaagcaggctcatctggacgagctcttcattactcgcgggcgactaaaaccaacatggcggctcaatataggaactggttacctgggcctttcttccgtgatcagcaaatctttacgggcgctagcaacatcactaaaaataacgtctttagcgtttgggaaaaaggcaagcaatgggaactcgacaatcggaccaacctaatgcagcccggtcctgcggcagcgaccacctttagcggagaacctgaccgtcaagccatgcaaaacacgctggcttttagcaggaccgtctacgatcaaacgaccgccacgaccgatcgtaaccagatactcatcaccaacgaagacgaaatcagacccaccaactcggtcggtatcgacgcgtggggagcagttcccaccaacaaccagtcgatcgtgacccccggcactcgcgcggccgtcaacaatcaaggggcgcttcccgggatggtgtggcaaaacagagacatttaccctacagggacccatttggccaaaattcccgacactgacaatcacttccatccgtccccgcttattgggcggtttggctgcaagcatccccctccccagattttcattaaaaacacacccgtccctgccaacccttcggaaacgttccagacggccaaagtggcctccttcatcaaccagtactcgaccggacagtgcaccgtcgaaatcttttgggaactcaagaaggaaacctccaagcgctggaaccccgaaatccagttcacctccaactttggcaacgcggccgacatccagtttgccgtctccgacacgggatcctattccgaacctcgtcccatcggtacccgttaccttaccaaacctctgtaa

SEQ ID NO: 5177 - DNA, 1989 bp, synthetic construct
  misc_feature 1..1989: note = Description of Artificial Sequence: Synthetic polynucleotide
  source 1..1989: mol_type = other DNA
atgaggtcgtactacgaggtcatcgttcagctgcccaacgacgtcgagagtcaggtacctggaatctccgattcgttcgtcaactggattacgtcgcgagaatggacgttgcctgaggacgccgattgggatttggaccaggtcgatcaagttcaactgacgctcggcgacaaaatccaacgggagattcgaactcattgggggacgatggccaaagaaccggactttcactattttatccaactggaacaaggtgaggtgttctttcatttacacgtcctgctggaaacgtgttccgtaaagccgatggtactcggaagatatatccgacatattcaacaaaaaattgtgagtaaagtctactgcgccacgagcctacgatggaaggatggatgcgtggtgaccaagaccaaaaatttcgggggcgcgaacaaggtccgggccgagtcgtatattcccgcctacctgatcccgaaacagcaaccggaagtgcagtgggcgtggactaacgtgcccgagtatataaaagcgtgcttgcaccgagaactgcgtgccagtctcgcgcgacttcacttcgaggaggcgggcgtctcgcaatccaaggaaaatctcgcgagaactgcagacggcgctcccgtgatgccgacccgcgtcagcaaacgctacatggagctcgtggattggctcgtggagaaggggatcaccaccgagaaggaatggctgctggaaaacagagaaagctttcggagctttcaggcctcgagcaactcggcgcgtcagatcaagacggccctgcaaggcgccattcaggagatgcttctgaccaagacggcggaggactacctcgtcggaaaggatcccgtctcggacgacgacatccgtcagaaccgcatctacaagattctggaactgaaccactacgacccagcgtacgtggggagtattttggtcgggtggtgccagaagaaatggggcaagcgaaacacgctgtggctgttcggacatgcgaccaccggcaagaccaacatcgcggaggctattgcccatgctgtgccgttctatggatgcgttaactggaccaacgagaactttccgttcaacgactgcgtcgaaaaaatgattatctggtgggaggagggcaaaatgaccgccaaagtggtggaaacagccaaggcgattctgggaggatctcgggtgagagtggaccaaaaatgcaaagcttcggttccgatcgaaccgacgccggtcattattaccagtaacaccaacatgtgttatgtcatcgacgggaacacgaccacgttcgagcataagcagccgttggaggacaggatgtttaagctcgaattgctgactcggttgcctgatgactttggtaaggtgaccaaacaggaggtgcgtcaattcttcaggtggtctcaggatcacctgacccctgtgatcccagaattcctagtgcggaaggcggagtctcgcaaaagacccgccccttccggggaaggctatataagcccgacaaagcggcccgcgctcgcagagcagcagcaggcgtcggagagcgcggacccggttcccaccaggtatcgtatcaaatgctcgaaacattgcggtatggataaaatgttgtttccttgccaaatttgtgaatcgatgaacagagatattaatatttgtgctattcataaaacgaccgactgtaaagagtgtttccccgactacggggataaagatgatgtagaactacccccctgtacagaacacaacgtgtctcgttgttatcaatgtcattcgggcgaattgtatcgcgtgacttcggactctgacgagaaacctgcccccgagagtgatgaaggcaccgagccatcctatgctccctgcacgattcaccacctgatgggcaagagtcacgggttagtcacttgcgcggcgtgtcggttgaaaaatagtacgttgcatgatgacttggatgacggtgatctcgaacaataa

SEQ ID NO: 5178 - DNA, 1626 bp, synthetic construct
  misc_feature 1..1626: note = Description of Artificial Sequence: Synthetic polynucleotide
  source 1..1626: mol_type = other DNA
atgaggtcgtactacgaggtcatcgttcagctgcccaacgacgtcgagagtcaggtacctggaatctccgattcgttcgtcaactggattacgtcgcgagaatggacgttgcctgaggacgccgattgggatttggaccaggtcgatcaagttcaactgacgctcggcgacaaaatccaacgggagattcgaactcattgggggacgatggccaaagaaccggactttcactattttatccaactggaacaaggtgaggtgttctttcatttacacgtcctgctggaaacgtgttccgtaaagccgatggtactcggaagatatatccgacatattcaacaaaaaattgtgagtaaagtctactgcgccacgagcctacgatggaaggatggatgcgtggtgaccaagaccaaaaatttcgggggcgcgaacaaggtccgggccgagtcgtatattcccgcctacctgatcccgaaacagcaaccggaagtgcagtgggcgtggactaacgtgcccgagtatataaaagcgtgcttgcaccgagaactgcgtgccagtctcgcgcgacttcacttcgaggaggcgggcgtctcgcaatccaaggaaaatctcgcgagaactgcagacggcgctcccgtgatgccgacccgcgtcagcaaacgctacatggagctcgtggattggctcgtggagaaggggatcaccaccgagaaggaatggctgctggaaaacagagaaagctttcggagctttcaggcctcgagcaactcggcgcgtcagatcaagacggccctgcaaggcgccattcaggagatgcttctgaccaagacggcggaggactacctcgtcggaaaggatcccgtctcggacgacgacatccgtcagaaccgcatctacaagattctggaactgaaccactacgacccagcgtacgtggggagtattttggtcgggtggtgccagaagaaatggggcaagcgaaacacgctgtggctgttcggacatgcgaccaccggcaagaccaacatcgcggaggctattgcccatgctgtgccgttctatggatgcgttaactggaccaacgagaactttccgttcaacgactgcgtcgaaaaaatgattatctggtgggaggagggcaaaatgaccgccaaagtggtggaaacagccaaggcgattctgggaggatctcgggtgagagtggaccaaaaatgcaaagcttcggttccgatcgaaccgacgccggtcattattaccagtaacaccaacatgtgttatgtcatcgacgggaacacgaccacgttcgagcataagcagccgttggaggacaggatgtttaagctcgaattgctgactcggttgcctgatgactttggtaaggtgaccaaacaggaggtgcgtcaattcttcaggtggtctcaggatcacctgacccctgtgatcccagaattcctagtgcggaaggcggagtctcgcaaaagacccgccccttccggggaaggctatataagcccgacaaagcggcccgcgctcgcagagcagcagcaggcgtcggagagcgcggacccggttcccaccagattggttggagcggttggtcaaaaagggagtgaatgctgcagctga

SEQ ID NO: 5179 - DNA, 1323 bp, synthetic construct
  misc_feature 1..1323: note = Description of Artificial Sequence: Synthetic polynucleotide
  source 1..1323: mol_type = other DNA
atggagctcgtggattggctcgtggagaaggggatcaccaccgagaaggaatggctgctggaaaacagagaaagctttcggagctttcaggcctcgagcaactcggcgcgtcagatcaagacggccctgcaaggcgccattcaggagatgcttctgaccaagacggcggaggactacctcgtcggaaaggatcccgtctcggacgacgacatccgtcagaaccgcatctacaagattctggaactgaaccactacgacccagcgtacgtggggagtattttggtcgggtggtgccagaagaaatggggcaagcgaaacacgctgtggctgttcggacatgcgaccaccggcaagaccaacatcgcggaggctattgcccatgctgtgccgttctatggatgcgttaactggaccaacgagaactttccgttcaacgactgcgtcgaaaaaatgattatctggtgggaggagggcaaaatgaccgccaaagtggtggaaacagccaaggcgattctgggaggatctcgggtgagagtggaccaaaaatgcaaagcttcggttccgatcgaaccgacgccggtcattattaccagtaacaccaacatgtgttatgtcatcgacgggaacacgaccacgttcgagcataagcagccgttggaggacaggatgtttaagctcgaattgctgactcggttgcctgatgactttggtaaggtgaccaaacaggaggtgcgtcaattcttcaggtggtctcaggatcacctgacccctgtgatcccagaattcctagtgcggaaggcggagtctcgcaaaagacccgccccttccggggaaggctatataagcccgacaaagcggcccgcgctcgcagagcagcagcaggcgtcggagagcgcggacccggttcccaccaggtatcgtatcaaatgctcgaaacattgcggtatggataaaatgttgtttccttgccaaatttgtgaatcgatgaacagagatattaatatttgtgctattcataaaacgaccgactgtaaagagtgtttccccgactacggggataaagatgatgtagaactacccccctgtacagaacacaacgtgtctcgttgttatcaatgtcattcgggcgaattgtatcgcgtgacttcggactctgacgagaaacctgcccccgagagtgatgaaggcaccgagccatcctatgctccctgcacgattcaccacctgatgggcaagagtcacgggttagtcacttgcgcggcgtgtcggttgaaaaatagtacgttgcatgatgacttggatgacggtgatctcgaacaataa

SEQ ID NO: 5180 - DNA, 960 bp, synthetic construct
  misc_feature 1..960: note = Description of Artificial Sequence: Synthetic polynucleotide
  source 1..960: mol_type = other DNA
atggagctcgtggattggctcgtggagaaggggatcaccaccgagaaggaatggctgctggaaaacagagaaagctttcggagctttcaggcctcgagcaactcggcgcgtcagatcaagacggccctgcaaggcgccattcaggagatgcttctgaccaagacggcggaggactacctcgtcggaaaggatcccgtctcggacgacgacatccgtcagaaccgcatctacaagattctggaactgaaccactacgacccagcgtacgtggggagtattttggtcgggtggtgccagaagaaatggggcaagcgaaacacgctgtggctgttcggacatgcgaccaccggcaagaccaacatcgcggaggctattgcccatgctgtgccgttctatggatgcgttaactggaccaacgagaactttccgttcaacgactgcgtcgaaaaaatgattatctggtgggaggagggcaaaatgaccgccaaagtggtggaaacagccaaggcgattctgggaggatctcgggtgagagtggaccaaaaatgcaaagcttcggttccgatcgaaccgacgccggtcattattaccagtaacaccaacatgtgttatgtcatcgacgggaacacgaccacgttcgagcataagcagccgttggaggacaggatgtttaagctcgaattgctgactcggttgcctgatgactttggtaaggtgaccaaacaggaggtgcgtcaattcttcaggtggtctcaggatcacctgacccctgtgatcccagaattcctagtgcggaaggcggagtctcgcaaaagacccgccccttccggggaaggctatataagcccgacaaagcggcccgcgctcgcagagcagcagcaggcgtcggagagcgcggacccggttcccaccagattggttggagcggttggtcaaaaagggagtgaatgctgcagctga

SEQ ID NO: 5181 - DNA, 1608 bp, synthetic construct
  misc_feature 1..1608: note = Description of Artificial Sequence: Synthetic polynucleotide
  source 1..1608: mol_type = other DNA
atggctgaaggaggtggcggcccagtgggcgatgcaggccagggtgccgatggagtgggcaattcctccggaaattggcattgcgattcccaatggctggaaaacggagtcgtcactcgaaccacccgaacctgggtcttgcccagctacaacaaccacctgtacaaacgaatccaaggacccagcggaggcgacaacaacaacaaattctttggattcagcaccccctggggatactttgactacaatcgattccactgccacttttccccgcgagactggcaacgactcatcaacaacaactggggcatccgtcccaaagcgatgcgctttagactctttaacatccaggttaaagaggtcacggtccaagacttcaacaccaccatcggcaacaacctcaccagtacggtccaggtctttgcggacaaggactaccaactgccgtacgtcctcggatcggctaccgaaggcaccttcccgccgttcccagcggatatctacacgatcccgcagtacgggtactgcacgctaaactacaacaacgaggcggtggatcgttcggccttctactgtctggactactttccctcagacatgctgcggacaggaaataactttgagtttacttacaccttcgaggacgttcctttccatagcatgtttgcccacaaccagacgctagaccggctgatgaatcccctcgtggatcagtacctctgggctttcagctccgtcagccaagcaggctcatctggacgagctcttcattactcgcgggcgactaaaaccaacatggcggctcaatataggaactggttacctgggcctttcttccgtgatcagcaaatctttacgggcgctagcaacatcactaaaaataacgtctttagcgtttgggaaaaaggcaagcaatgggaactcgacaatcggaccaacctaatgcagcccggtcctgcggcagcgaccacctttagcggagaacctgaccgtcaagccatgcaaaacacgctggcttttagcaggaccgtctacgatcaaacgaccgccacgaccgatcgtaaccagatactcatcaccaacgaagacgaaatcagacccaccaactcggtcggtatcgacgcgtggggagcagttcccaccaacaaccagtcgatcgtgacccccggcactcgcgcggccgtcaacaatcaaggggcgcttcccgggatggtgtggcaaaacagagacatttaccctacagggacccatttggccaaaattcccgacactgacaatcacttccatccgtccccgcttattgggcggtttggctgcaagcatccccctccccagattttcattaaaaacacacccgtccctgccaacccttcggaaacgttccagacggccaaagtggcctccttcatcaaccagtactcgaccggacagtgcaccgtcgaaatcttttgggaactcaagaaggaaacctccaagcgctggaaccccgaaatccagttcacctccaactttggcaacgcggccgacatccagtttgccgtctccgacacgggatcctattccgaacctcgtcccatcggtacccgttaccttaccaaacctctgtaa

SEQ ID NO: 5182 - DNA, 2232 bp, synthetic construct
  misc_feature 1..2232: note = Description of Artificial Sequence: Synthetic polynucleotide
  source 1..2232: mol_type = other DNA
atgtctctcatttctgatgcgattccagattggttggagcggttggtcaaaaagggagtgaatgctgcagctgatttctaccatttggaaagcggtcctcctcgtcctaaggcaaatcagcaaactcaagaatctcttgaaaaggacgattcgagaggtctcgtgttcccaggctacaattatctaggccctttcaacggtctagataaaggagaacccgtcaacgaggcagacgctgccgccttagaacacgacaaggcttacgacctcgaaatcaaggacgggcacaacccgtactttgagtacaacgaggccgacagacgtttccaggaacgtctcaaagacgatacctcctttggaggcaatttaggtaaagccatcttccaggccaaaaagagggttctcgaaccctttggtctggtggaagactcaaagacggctccgaccggagacaagcggaaaggcgaagacgaacctcgtttgcccgacacttcttcacagactcccaagaaaaacaagaagcctcgcaaggaaagaccttccggcggggcagaagatccgggcgaaggcacctcttccaacgctggagcagcagcacccgcctctagtgtgggatcatctatcatggctgaaggaggtggcggcccagtgggcgatgcaggccagggtgccgatggagtgggcaattcctccggaaattggcattgcgattcccaatggctggaaaacggagtcgtcactcgaaccacccgaacctgggtcttgcccagctacaacaaccacctgtacaaacgaatccaaggacccagcggaggcgacaacaacaacaaattctttggattcagcaccccctggggatactttgactacaatcgattccactgccacttttccccgcgagactggcaacgactcatcaacaacaactggggcatccgtcccaaagcgatgcgctttagactctttaacatccaggttaaagaggtcacggtccaagacttcaacaccaccatcggcaacaacctcaccagtacggtccaggtctttgcggacaaggactaccaactgccgtacgtcctcggatcggctaccgaaggcaccttcccgccgttcccagcggatatctacacgatcccgcagtacgggtactgcacgctaaactacaacaacgaggcggtggatcgttcggccttctactgtctggactactttccctcagacatgctgcggacaggaaataactttgagtttacttacaccttcgaggacgttcctttccatagcatgtttgcccacaaccagacgctagaccggctgatgaatcccctcgtggatcagtacctctgggctttcagctccgtcagccaagcaggctcatctggacgagctcttcattactcgcgggcgactaaaaccaacatggcggctcaatataggaactggttacctgggcctttcttccgtgatcagcaaatctttacgggcgctagcaacatcactaaaaataacgtctttagcgtttgggaaaaaggcaagcaatgggaactcgacaatcggaccaacctaatgcagcccggtcctgcggcagcgaccacctttagcggagaacctgaccgtcaagccatgcaaaacacgctggcttttagcaggaccgtctacgatcaaacgaccgccacgaccgatcgtaaccagatactcatcaccaacgaagacgaaatcagacccaccaactcggtcggtatcgacgcgtggggagcagttcccaccaacaaccagtcgatcgtgacccccggcactcgcgcggccgtcaacaatcaaggggcgcttcccgggatggtgtggcaaaacagagacatttaccctacagggacccatttggccaaaattcccgacactgacaatcacttccatccgtccccgcttattgggcggtttggctgcaagcatccccctccccagattttcattaaaaacacacccgtccctgccaacccttcggaaacgttccagacggccaaagtggcctccttcatcaaccagtactcgaccggacagtgcaccgtcgaaatcttttgggaactcaagaaggaaacctccaagcgctggaaccccgaaatccagttcacctccaactttggcaacgcggccgacatccagtttgccgtctccgacacgggatcctattccgaacctcgtcccatcggtacccgttaccttaccaaacctctgtaa

SEQ ID NO: 5183 - protein, 535 aa, synthetic construct
  REGION 1..535: note = Description of Artificial Sequence: Synthetic polypeptide
MAEGGGGPVGDAGQGADGVGNSSGNWHCDSQWLENGVVTRTTRTWVLPSYNNHLYKRIQGPSGGDNNNKFFGFSTPWGYFDYNRFHCHFSPRDWQRLINNNWGIRPKAMRFRLFNIQVKEVTVQDFNTTIGNNLTSTVQVFADKDYQLPYVLGSATEGTFPPFPADIYTIPQYGYCTLNYNNEAVDRSAFYCLDYFPSDMLRTGNNFEFTYTFEDVPFHSMFAHNQTLDRLMNPLVDQYLWAFSSVSQAGSSGRALHYSRATKTNMAAQYRNWLPGPFFRDQQIFTGASNITKNNVFSVWEKGKQWELDNRTNLMQPGPAAATTFSGEPDRQAMQNTLAFSRTVYDQTTATTDRNQILITNEDEIRPTNSVGIDAWGAVPTNNQSIVTPGTRAAVNNQGALPGMVWQNRDIYPTGTHLAKIPDTDNHFHPSPLIGRFGCKHPPPQIFIKNTPVPANPSETFQTAKVASFINQYSTGQCTVEIFWELKKETSKRWNPEIQFTSNFGNAADIQFAVSDTGSYSEPRPIGTRYLTKPL

SEQ ID NO: 5184 - protein, 440 aa, synthetic construct
  REGION 1..440: note = Description of Artificial Sequence: Synthetic polypeptide
MELVDWLVEKGITTEKEWLLENRESFRSFQASSNSARQIKTALQGAIQEMLLTKTAEDYLVGKDPVSDDDIRQNRIYKILELNHYDPAYVGSILVGWCQKKWGKRNTLWLFGHATTGKTNIAEAIAHAVPFYGCVNWTNENFPFNDCVEKMIIWWEEGKMTAKVVETAKAILGGSRVRVDQKCKASVPIEPTPVIITSNTNMCYVIDGNTTTFEHKQPLEDRMFKLELLTRLPDDFGKVTKQEVRQFFRWSQDHLTPVIPEFLVRKAESRKRPAPSGEGYISPTKRPALAEQQQASESADPVPTRYRIKCSKHCGMDKMLFPCQICESMNRDINICAIHKTTDCKECFPDYGDKDDVELPPCTEHNVSRCYQCHSGELYRVTSDSDEKPAPESDEGTEPSYAPCTIHHLMGKSHGLVTCAACRLKNSTLHDDLDDGDLEQ

SEQ ID NO: 5185 - protein, 319 aa, synthetic construct
  REGION 1..319: note = Description of Artificial Sequence: Synthetic polypeptide
MELVDWLVEKGITTEKEWLLENRESFRSFQASSNSARQIKTALQGAIQEMLLTKTAEDYLVGKDPVSDDDIRQNRIYKILELNHYDPAYVGSILVGWCQKKWGKRNTLWLFGHATTGKTNIAEAIAHAVPFYGCVNWTNENFPFNDCVEKMIIWWEEGKMTAKVVETAKAILGGSRVRVDQKCKASVPIEPTPVIITSNTNMCYVIDGNTTTFEHKQPLEDRMFKLELLTRLPDDFGKVTKQEVRQFFRWSQDHLTPVIPEFLVRKAESRKRPAPSGEGYISPTKRPALAEQQQASESADPVPTRLVGAVGQKGSECCS

SEQ ID NO: 5186 - protein, 662 aa, synthetic construct
  REGION 1..662: note = Description of Artificial Sequence: Synthetic polypeptide
MRSYYEVIVQLPNDVESQVPGISDSFVNWITSREWTLPEDADWDLDQVDQVQLTLGDKIQREIRTHWGTMAKEPDFHYFIQLEQGEVFFHLHVLLETCSVKPMVLGRYIRHIQQKIVSKVYCATSLRWKDGCVVTKTKNFGGANKVRAESYIPAYLIPKQQPEVQWAWTNVPEYIKACLHRELRASLARLHFEEAGVSQSKENLARTADGAPVMPTRVSKRYMELVDWLVEKGITTEKEWLLENRESFRSFQASSNSARQIKTALQGAIQEMLLTKTAEDYLVGKDPVSDDDIRQNRIYKILELNHYDPAYVGSILVGWCQKKWGKRNTLWLFGHATTGKTNIAEAIAHAVPFYGCVNWTNENFPFNDCVEKMIIWWEEGKMTAKVVETAKAILGGSRVRVDQKCKASVPIEPTPVIITSNTNMCYVIDGNTTTFEHKQPLEDRMFKLELLTRLPDDFGKVTKQEVRQFFRWSQDHLTPVIPEFLVRKAESRKRPAPSGEGYISPTKRPALAEQQQASESADPVPTRYRIKCSKHCGMDKMLFPCQICESMNRDINICAIHKTTDCKECFPDYGDKDDVELPPCTEHNVSRCYQCHSGELYRVTSDSDEKPAPESDEGTEPSYAPCTIHHLMGKSHGLVTCAACRLKNSTLHDDLDDGDLEQ

SEQ ID NO: 5187 - protein, 541 aa, synthetic construct
  REGION 1..541: note = Description of Artificial Sequence: Synthetic polypeptide
MRSYYEVIVQLPNDVESQVPGISDSFVNWITSREWTLPEDADWDLDQVDQVQLTLGDKIQREIRTHWGTMAKEPDFHYFIQLEQGEVFFHLHVLLETCSVKPMVLGRYIRHIQQKIVSKVYCATSLRWKDGCVVTKTKNFGGANKVRAESYIPAYLIPKQQPEVQWAWTNVPEYIKACLHRELRASLARLHFEEAGVSQSKENLARTADGAPVMPTRVSKRYMELVDWLVEKGITTEKEWLLENRESFRSFQASSNSARQIKTALQGAIQEMLLTKTAEDYLVGKDPVSDDDIRQNRIYKILELNHYDPAYVGSILVGWCQKKWGKRNTLWLFGHATTGKTNIAEAIAHAVPFYGCVNWTNENFPFNDCVEKMIIWWEEGKMTAKVVETAKAILGGSRVRVDQKCKASVPIEPTPVIITSNTNMCYVIDGNTTTFEHKQPLEDRMFKLELLTRLPDDFGKVTKQEVRQFFRWSQDHLTPVIPEFLVRKAESRKRPAPSGEGYISPTKRPALAEQQQASESADPVPTRLVGAVGQKGSECCS

SEQ ID NO: 5188 - protein, 743 aa, synthetic construct
  REGION 1..743: note = Description of Artificial Sequence: Synthetic polypeptide
MSLISDAIPDWLERLVKKGVNAAADFYHLESGPPRPKANQQTQESLEKDDSRGLVFPGYNYLGPFNGLDKGEPVNEADAAALEHDKAYDLEIKDGHNPYFEYNEADRRFQERLKDDTSFGGNLGKAIFQAKKRVLEPFGLVEDSKTAPTGDKRKGEDEPRLPDTSSQTPKKNKKPRKERPSGGAEDPGEGTSSNAGAAAPASSVGSSIMAEGGGGPVGDAGQGADGVGNSSGNWHCDSQWLENGVVTRTTRTWVLPSYNNHLYKRIQGPSGGDNNNKFFGFSTPWGYFDYNRFHCHFSPRDWQRLINNNWGIRPKAMRFRLFNIQVKEVTVQDFNTTIGNNLTSTVQVFADKDYQLPYVLGSATEGTFPPFPADIYTIPQYGYCTLNYNNEAVDRSAFYCLDYFPSDMLRTGNNFEFTYTFEDVPFHSMFAHNQTLDRLMNPLVDQYLWAFSSVSQAGSSGRALHYSRATKTNMAAQYRNWLPGPFFRDQQIFTGASNITKNNVFSVWEKGKQWELDNRTNLMQPGPAAATTFSGEPDRQAMQNTLAFSRTVYDQTTATTDRNQILITNEDEIRPTNSVGIDAWGAVPTNNQSIVTPGTRAAVNNQGALPGMVWQNRDIYPTGTHLAKIPDTDNHFHPSPLIGRFGCKHPPPQIFIKNTPVPANPSETFQTAKVASFINQYSTGQCTVEIFWELKKETSKRWNPEIQFTSNFGNAADIQFAVSDTGSYSEPRPIGTRYLTKPL

SEQ ID NO: 5189 - protein, 598 aa, synthetic construct
  REGION 1..598: note = Description of Artificial Sequence: Synthetic polypeptide
TAPTGDKRKGEDEPRLPDTSSQTPKKNKKPRKERPSGGAEDPGEGTSSNAGAAAPASSVGSSIMAEGGGGPVGDAGQGADGVGNSSGNWHCDSQWLENGVVTRTTRTWVLPSYNNHLYKRIQGPSGGDNNNKFFGFSTPWGYFDYNRFHCHFSPRDWQRLINNNWGIRPKAMRFRLFNIQVKEVTVQDFNTTIGNNLTSTVQVFADKDYQLPYVLGSATEGTFPPFPADIYTIPQYGYCTLNYNNEAVDRSAFYCLDYFPSDMLRTGNNFEFTYTFEDVPFHSMFAHNQTLDRLMNPLVDQYLWAFSSVSQAGSSGRALHYSRATKTNMAAQYRNWLPGPFFRDQQIFTGASNITKNNVFSVWEKGKQWELDNRTNLMQPGPAAATTFSGEPDRQAMQNTLAFSRTVYDQTTATTDRNQILITNEDEIRPTNSVGIDAWGAVPTNNQSIVTPGTRAAVNNQGALPGMVWQNRDIYPTGTHLAKIPDTDNHFHPSPLIGRFGCKHPPPQIFIKNTPVPANPSETFQTAKVASFINQYSTGQCTVEIFWELKKETSKRWNPEIQFTSNFGNAADIQFAVSDTGSYSEPRPIGTRYLTKPL

SEQ ID NO: 5190 - DNA, 4694 bp, synthetic construct
  misc_feature 1..4694: note = Description of Artificial Sequence: Synthetic polynucleotide
  source 1..4694: mol_type = other DNA
tggccagtttccaagacaggctcgctcgctcactcgggccggggccccaaaggggcccctagcgaccgcttcgcggtcgcggcccgagtgagcgagcgagcctgtcttggaaactggccagcactccggtgaggtaatgccgtcacgtggtcgggaatgggaacgggaaatctcgcgagaacgtaaacaaatataagacggcgccacacggcgctgcgtcatacgcgcgcgcgcaccggcgagatgaggtcgtactacgaggtcatcgttcagctgcccaacgacgtcgagagtcaggtacctggaatctccgattcgttcgtcaactggattacgtcgcgagaatggacgttgcctgaggacgccgattgggatttggaccaggtcgatcaagttcaactgacgctcggcgacaaaatccaacgggagattcgaactcattgggggacgatggccaaagaaccggactttcactattttatccaactggaacaaggtgaggtgttctttcatttacacgtcctgctggaaacgtgttccgtaaagccgatggtactcggaagatatatccgacatattcaacaaaaaattgtgagtaaagtctactgcgccacgagcctacgatggaaggatggatgcgtggtgaccaagaccaaaaatttcgggggcgcgaacaaggtccgggccgagtcgtatattcccgcctacctgatcccgaaacagcaaccggaagtgcagtgggcgtggactaacgtgcccgagtatataaaagcgtgcttgcaccgagaactgcgtgccagtctcgcgcgacttcacttcgaggaggcgggcgtctcgcaatccaaggaaaatctcgcgagaactgcagacggcgctcccgtgatgccgacccgcgtcagcaaacgctacatggagctcgtggattggctcgtggagaaggggatcaccaccgagaaggaatggctgctggaaaacagagaaagctttcggagctttcaggcctcgagcaactcggcgcgtcagatcaagacggccctgcaaggcgccattcaggagatgcttctgaccaagacggcggaggactacctcgtcggaaaggatcccgtctcggacgacgacatccgtcagaaccgcatctacaagattctggaactgaaccactacgacccagcgtacgtggggagtattttggtcgggtggtgccagaagaaatggggcaagcgaaacacgctgtggctgttcggacatgcgaccaccggcaagaccaacatcgcggaggctattgcccatgctgtgccgttctatggatgcgttaactggaccaacgagaactttccgttcaacgactgcgtcgaaaaaatgattatctggtgggaggagggcaaaatgaccgccaaagtggtggaaacagccaaggcgattctgggaggatctcgggtgagagtggaccaaaaatgcaaagcttcggttccgatcgaaccgacgccggtcattattaccagtaacaccaacatgtgttatgtcatcgacgggaacacgaccacgttcgagcataagcagccgttggaggacaggatgtttaagctcgaattgctgactcggttgcctgatgactttggtaaggtgaccaaacaggaggtgcgtcaattcttcaggtggtctcaggatcacctgacccctgtgatcccagaattcctagtgcggaaggcggagtctcgcaaaagacccgccccttccggggaaggctatataagcccgacaaagcggcccgcgctcgcagagcagcagcaggcgtcggagagcgcggacccggttcccaccaggtatcgtatcaaatgctcgaaacattgcggtatggataaaatgttgtttccttgccaaatttgtgaatcgatgaacagagatattaatatttgtgctattcataaaacgaccgactgtaaagagtgtttccccgactacggggataaagatgatgtagaactacccccctgtacagaacacaacgtgtctcgttgttatcaatgtcattcgggcgaattgtatcgcgtgacttcggactctgacgagaaacctgcccccgagagtgatgaaggcaccgagccatcctatgctccctgcacgattcaccacctgatgggcaagagtcacgggttagtcacttgcgcggcgtgtcggttgaaaaatagtacgttgcatgatgacttggatgacggtgatctcgaacaataaatgattgaaatgtagccatgtctctcatttctgatgcgattccagattggttggagcggttggtcaaaaagggagtgaatgctgcagctgatttctaccatttggaaagcggtcctcctcgtcctaaggcaaatcagcaaactcaagaatctcttgaaaaggacgattcgagaggtctcgtgttcccaggctacaattatctaggccctttcaacggtctagataaaggagaacccgtcaacgaggcagacgctgccgccttagaacacgacaaggcttacgacctcgaaatcaaggacgggcacaacccgtactttgagtacaacgaggccgacagacgtttccaggaacgtctcaaagacgatacctcctttggaggcaatttaggtaaagccatcttccaggccaaaaagagggttctcgaaccctttggtctggtggaagactcaaagacggctccgaccggagacaagcggaaaggcgaagacgaacctcgtttgcccgacacttcttcacagactcccaagaaaaacaagaagcctcgcaaggaaagaccttccggcggggcagaagatccgggcgaaggcacctcttccaacgctggagcagcagcacccgcctctagtgtgggatcatctatcatggctgaaggaggtggcggcccagtgggcgatgcaggccagggtgccgatggagtgggcaattcctccggaaattggcattgcgattcccaatggctggaaaacggagtcgtcactcgaaccacccgaacctgggtcttgcccagctacaacaaccacctgtacaaacgaatccaaggacccagcggaggcgacaacaacaacaaattctttggattcagcaccccctggggatactttgactacaatcgattccactgccacttttccccgcgagactggcaacgactcatcaacaacaactggggcatccgtcccaaagcgatgcgctttagactctttaacatccaggttaaagaggtcacggtccaagacttcaacaccaccatcggcaacaacctcaccagtacggtccaggtctttgcggacaaggactaccaactgccgtacgtcctcggatcggctaccgaaggcaccttcccgccgttcccagcggatatctacacgatcccgcagtacgggtactgcacgctaaactacaacaacgaggcggtggatcgttcggccttctactgtctggactactttccctcagacatgctgcggacaggaaataactttgagtttacttacaccttcgaggacgttcctttccatagcatgtttgcccacaaccagacgctagaccggctgatgaatcccctcgtggatcagtacctctgggctttcagctccgtcagccaagcaggctcatctggacgagctcttcattactcgcgggcgactaaaaccaacatggcggctcaatataggaactggttacctgggcctttcttccgtgatcagcaaatctttacgggcgctagcaacatcactaaaaataacgtctttagcgtttgggaaaaaggcaagcaatgggaactcgacaatcggaccaacctaatgcagcccggtcctgcggcagcgaccacctttagcggagaacctgaccgtcaagccatgcaaaacacgctggcttttagcaggaccgtctacgatcaaacgaccgccacgaccgatcgtaaccagatactcatcaccaacgaagacgaaatcagacccaccaactcggtcggtatcgacgcgtggggagcagttcccaccaacaaccagtcgatcgtgacccccggcactcgcgcggccgtcaacaatcaaggggcgcttcccgggatggtgtggcaaaacagagacatttaccctacagggacccatttggccaaaattcccgacactgacaatcacttccatccgtccccgcttattgggcggtttggctgcaagcatccccctccccagattttcattaaaaacacacccgtccctgccaacccttcggaaacgttccagacggccaaagtggcctccttcatcaaccagtactcgaccggacagtgcaccgtcgaaatcttttgggaactcaagaaggaaacctccaagcgctggaaccccgaaatccagttcacctccaactttggcaacgcggccgacatccagtttgccgtctccgacacgggatcctattccgaacctcgtcccatcggtacccgttaccttaccaaacctctgtaaattaaacccttcaataaaccgtttatgcgtaactgtatttccgtctcctgtcgttattcagtcacatgatgcggcattacctcaccggagtgctggccagtttccaagacaggctcgctcgctcactcgggccggggccccaaaggggcccctagcgaccgcttcgcggtcgcggcccgagtgagcgagcgagcctgtcttggaaactggcca

SEQ ID NO: 5191 - DNA, 2211 bp, synthetic construct
  misc_feature 1..2211: note = Description of Artificial Sequence: Synthetic polynucleotide
  source 1..2211: mol_type = other DNA
atggctgctgatggttatcttccagattggctcgaggacactctctctgaaggaataagacagtggtggaagctcaaacctggcccaccaccaccaaagcccgcagagcggcataaggacgacagcaggggtcttgtgcttcctgggtacaagtacctcggacccttcaacggactcgacaagggagagccggtcaacgaggcagacgcagcggccctcgagcacgacaaggcctacgaccagcagctcaaggccggtgacaacccctacctcaagtacaaccacgccgacgcggagttccagcagcggcttcagggcgacacatcgtttgggggcaacctcggcagagcagtcttccaggccaaaaagagggttcttgaacctcttggtctggttgagcaagcgggtgagacggctcctggaaagaagagaccgttgattgaatccccccagcagcccgactcctccacgggtatcggcaaaaaaggcaagcagccggctaaaaagagactcaattttggtcagactggcgactcagagtcagtccccgacccacaacctctcggagaacctccagcaacccccgctgctgtgggacctactacaatggcttcaggtggtggcgcaccaatggcagacaataacgaaggcgccgacggagtgggtaatgcctcaggaaattggcattgcgattccacatggctgggcgacagagtcatcaccaccagcacccgcacctgggccttgcccacctacaataaccacctctacaagcaaatctccagtgcttcaacgggggccagcaacgacaaccactacttcggctacagcaccccctgggggtattttgacttcaacagattccactgccacttttcaccacgtgactggcagcgactcatcaacaacaattggggattccggcccaagagactcaacttcaaactcttcaacatccaagtcaaggaggtcacgacgaatgatggcgtcacaaccatcgctaataaccttaccagcacggttcaagtcttctcggactcagactatcagctcccgtacgtgctcgggtcggctcacgagggctgcctcccgccgttcccagcagacgtcttcatggtgccacagtatggatacctcaccctgaacaacgggagtcaggcagtaggacgctcttcattttactgcctggagtactttccttctcagatgctgcgtaccggaaacaactttaccttcagctacacttttgaggacgttcctttccacagcagctacgctcacagccagagtctggaccgtctcatgaatcctctcatcgaccagtacctgtattacctgaacagaactcagaatcagtccggaagtgcccaaaacaaggacttgctgtttagccgggggtctccagctggcatgtctgttcagcccaaaaactggctacctggaccctgttatcggcagcagcgcgtttctaaaacaaaaacagacaacaacaacagcaactttacctggactggtgcttcaaaatataaccttaatgggcgtgaatctataatcaaccctggcactgctatggcctcacacaaagacgacaaagacaagttctttcccatgagcggtgtcatgatttttggaaaggagagcgccggagcttcaaacactgcattggacaatgtcatgatcacagacgaagaggaaatcaaagccactaaccccgtggccaccgaaagatttgggactgtggcagtcaatctccagagcagcagcacagaccctgcgaccggagatgtgcatgttatgggagccttacctggaatggtgtggcaagacagagacgtatacctgcagggtcccatttgggccaaaattcctcacacagatggacactttcacccgtctcctcttatgggcggctttggactcaagaacccgcctcctcagatcctcatcaaaaacacgcctgttcctgcgaatcctccggcggagttttcagctacaaagtttgcttcattcatcacccaatactccacaggacaagtgagtgtggaaattgaatgggagctgcagaaagaaaacagcaagcgctggaatcccgaagtgcagtacacatccaattatgcaaaatctgccaacgttgattttactgtggacaacaatggactttatactgagcctcgccccattggcacccgttacctcacccgtcccctgtaa

SEQ ID NO: 5192 - protein, 736 aa, synthetic construct
  REGION 1..736: note = Description of Artificial Sequence: Synthetic polypeptide
MAADGYLPDWLEDTLSEGIRQWWKLKPGPPPPKPAERHKDDSRGLVLPGYKYLGPFNGLDKGEPVNEADAAALEHDKAYDQQLKAGDNPYLKYNHADAEFQQRLQGDTSFGGNLGRAVFQAKKRVLEPLGLVEQAGETAPGKKRPLIESPQQPDSSTGIGKKGKQPAKKRLNFGQTGDSESVPDPQPLGEPPATPAAVGPTTMASGGGAPMADNNEGADGVGNASGNWHCDSTWLGDRVITTSTRTWALPTYNNHLYKQISSASTGASNDNHYFGYSTPWGYFDFNRFHCHFSPRDWQRLINNNWGFRPKRLNFKLFNIQVKEVTTNDGVTTIANNLTSTVQVFSDSDYQLPYVLGSAHEGCLPPFPADVFMVPQYGYLTLNNGSQAVGRSSFYCLEYFPSQMLRTGNNFTFSYTFEDVPFHSSYAHSQSLDRLMNPLIDQYLYYLNRTQNQSGSAQNKDLLFSRGSPAGMSVQPKNWLPGPCYRQQRVSKTKTDNNNSNFTWTGASKYNLNGRESIINPGTAMASHKDDKDKFFPMSGVMIFGKESAGASNTALDNVMITDEEEIKATNPVATERFGTVAVNLQSSSTDPATGDVHVMGALPGMVWQDRDVYLQGPIWAKIPHTDGHFHPSPLMGGFGLKNPPPQILIKNTPVPANPPAEFSATKFASFITQYSTGQVSVEIEWELQKENSKRWNPEVQYTSNYAKSANVDFTVDNNGLYTEPRPIGTRYLTRPL

SEQ ID NO: 5193 - DNA, 2211 bp, synthetic construct
  misc_feature 1..2211: note = Description of Artificial Sequence: Synthetic polynucleotide
  source 1..2211: mol_type = other DNA
atggcttccgatggttatcttccagattggctcgaggacaacctctctgagggcatccgcgagtggtgggacttgaaacctggagccccgaaacccaaagccaaccagcaaaagcaggacgacggccggggtctggtgcttcctggctacaagtacctcggacccttcaacggactcgacaagggggagcccgtcaacgcggcggatgcagcggccctcgagcacgacaaggcctacgaccagcagctcagagcgggtgacaatccgtacctgcggtataaccacgccgacgccgagtttcaggagcgtctgcaagaagatacgtcttttgggggcaacctcgggcgagcagtcttccaggccaagaagagggttctcgaaccttttggtctggttgaggaaggtgctaagacggctcctggaaagaaacgtccggtagagcagtcgccacaagagccagactcctcctcgggcattggcaagacaggccagcagcccgctaaaaagagactcaattttggtcagactggcgactcagagtcagtccccgacccacaacctctcggagaacctccagcaacccccgctgctgtgggacctactacaatggcttcaggcggtggcgcaccaatggcagacaataacgaaggcgccgacggagtgggtaatgcctcaggaaattggcattgcgattccacatggctgggcgacagagtcatcaccaccagcacccgaacatgggccttgcccacctataacaaccacctctacaagcaaatctccagtgcttcaacgggggccagcaacgacaaccactacttcggctacagcaccccctgggggtattttgatttcaacagattccactgccatttctcaccacgtgactggcagcgactcatcaacaacaattggggattccggcccaagagactcaacttcaaactcttcaacatccaagtcaaggaggtcacgacgaatgatggcgtcacaaccatcgctaataaccttaccagcacggttcaagtcttctcggactcggagtaccagcttccgtacgtcctcggctctgcgcaccagggctgcctccctccgttcccggcggacgtgttcatgattccgcagtacggctacctaacgctcaacaatggcagccaggcagtgggacggtcatccttttactgcctggaatatttcccatcgcagatgctgagaacgggcaataactttaccttcagctacaccttcgaggacgtgcctttccacagcagctacgcgcacagccagagcctggaccggctgatgaatcctctcatcgaccagtacctgtattacctgaacagaactcagaatcagtccggaagtgcccaaaacaaggacttgctgtttagccgggggtctccagctggcatgtctgttcagcccaaaaactggctacctggaccctgttaccggcagcagcgcgtttctaaaacaaaaacagacaacaacaacagcaactttacctggactggtgcttcaaaatataaccttaatgggcgtgaatctataatcaaccctggcactgctatggcctcacacaaagacgacaaagacaagttctttcccatgagcggtgtcatgatttttggaaaggagagcgccggagcttcaaacactgcattggacaatgtcatgatcacagacgaagaggaaatcaaagccactaaccccgtggccaccgaaagatttgggactgtggcagtcaatctccagagcagcagcacagaccctgcgaccggagatgtgcatgttatgggagccttacctggaatggtgtggcaagacagagacgtatacctgcagggtcccatttgggccaaaattcctcacacagatggacactttcacccgtctcctcttatgggcggctttggacttaagcacccgcctcctcagatcctcatcaaaaacacgcctgttcctgcgaatcctccggcagagttttcggctacaaagtttgcttcattcatcacccagtattctactggccaagtcagcgtggagattgaatgggagctgcagaaagaaaacagcaaacgctggaatcccgaagtgcagtatacatctaactatgcaaaatctgccaacgttgatttcactgtggacaacaatggactttatactgagcctcgtcccattggcacccgttacctcacccgtcccctgtaa

SEQ ID NO: 5194 - protein, 736 aa, synthetic construct
  REGION 1..736: note = Description of Artificial Sequence: Synthetic polypeptide
MASDGYLPDWLEDNLSEGIREWWDLKPGAPKPKANQQKQDDGRGLVLPGYKYLGPFNGLDKGEPVNAADAAALEHDKAYDQQLRAGDNPYLRYNHADAEFQERLQEDTSFGGNLGRAVFQAKKRVLEPFGLVEEGAKTAPGKKRPVEQSPQEPDSSSGIGKTGQQPAKKRLNFGQTGDSESVPDPQPLGEPPATPAAVGPTTMASGGGAPMADNNEGADGVGNASGNWHCDSTWLGDRVITTSTRTWALPTYNNHLYKQISSASTGASNDNHYFGYSTPWGYFDFNRFHCHFSPRDWQRLINNNWGFRPKRLNFKLFNIQVKEVTTNDGVTTIANNLTSTVQVFSDSEYQLPYVLGSAHQGCLPPFPADVFMIPQYGYLTLNNGSQAVGRSSFYCLEYFPSQMLRTGNNFTFSYTFEDVPFHSSYAHSQSLDRLMNPLIDQYLYYLNRTQNQSGSAQNKDLLFSRGSPAGMSVQPKNWLPGPCYRQQRVSKTKTDNNNSNFTWTGASKYNLNGRESIINPGTAMASHKDDKDKFFPMSGVMIFGKESAGASNTALDNVMITDEEEIKATNPVATERFGTVAVNLQSSSTDPATGDVHVMGALPGMVWQDRDVYLQGPIWAKIPHTDGHFHPSPLMGGFGLKHPPPQILIKNTPVPANPPAEFSATKFASFITQYSTGQVSVEIEWELQKENSKRWNPEVQYTSNYAKSANVDFTVDNNGLYTEPRPIGTRYLTRPL

SEQ ID NO: 5195 - DNA, 2211 bp, synthetic construct
  misc_feature 1..2211: note = Description of Artificial Sequence: Synthetic polynucleotide
  source 1..2211: mol_type = other DNA
atggctgctgatggttatcttccagattggctcgaggacactctctctgaaggaataagacagtggtggaagctcaaacctggcccaccaccaccaaagcccgcagagcggcataaggacgacagcaggggtcttgtgcttcctgggtacaagtacctcggacccttcaacggactcgacaagggagagccggtcaacgaggcagacgcagcggccctcgagcacgacaaggcctacgaccagcagctcaaggccggtgacaacccctacctcaagtacaaccacgccgacgcggagttccagcagcggcttcagggcgacacatcgtttgggggcaacctcggcagagcagtcttccaggccaaaaagagggttcttgaacctcttggtctggttgagcaagcgggtgagacggctcctggaaagaagagaccgttgattgaatccccccagcagcccgactcctccacgggtatcggcaaaaaaggcaagcagccggctaaaaagagactcaattttggtcagactggcgactcagagtcagtccccgacccacaacctctcggagaacctccagcaacccccgctgctgtgggacctactacaatggcttcaggtggtggcgcaccaatggcagacaataacgaaggcgccgacggagtgggtaatgcctcaggaaattggcattgcgattccacatggctgggcgacagagtcatcaccaccagcacccgcacctgggccttgcccacctacaataaccacctctacaagcaaatctccagtgcttcaacgggggccagcaacgacaaccactacttcggctacagcaccccctgggggtattttgacttcaacagattccactgccacttttcaccacgtgactggcagcgactcatcaacaacaattggggattccggcccaagagactcaacttcaaactcttcaacatccaagtcaaggaggtcacgacgaatgatggcgtcacaaccatcgctaataaccttaccagcacggttcaagtcttctcggactcagactatcagctcccgtacgtgctcgggtcggctcacgagggctgcctcccgccgttcccagcagacgtcttcatggtgccacagtatggatacctcaccctgaacaacgggagtcaggcagtaggacgctcttcattttactgcctggagtactttccttctcagatgctgcgtaccggaaacaactttaccttcagctacacttttgaggacgttcctttccacagcagctacgctcacagccagagtctggaccgtctcatgaatcctctcatcgaccagtacctgtattacctgaacagaactcagaatcagtccggaagtgcccaaaacaaggacttgctgtttagccgggggtctccaactggcatgtctgttcagcccaaaaactggctacctggaccctgttatcggcagcagcgcgtttctaaaacaaaaacagacaacaacaacagcaactttacctggactggtgcttcaaaatataaccttaatgggcgtgaatctataatcaaccctggcactgctatggcctcacacaaagacgacaaagacaagttctttcccatgagcggtgtcatgatttttggaaaggagagcgccggagcttcaaacactgcattggacaatgtcatgatcacagacgaagaggaaatcaaagccactaaccccgtggccactgaaagatttgggactgtggcagtcaatctccagagcagcagcacagaccctgcgaccggagatgtgcatgccatgggagccttacctggaatggtgtggcaagacagagacgtatacctgcagggtcctatttgggccaaaattcctcacacggatggacactttcacccgtctcctctcatgggcggctttggactcaagaacccgcctcctcagatcctcatcaaaaacacgcctgttcctgcgaatcctccggcggagttttcagctacaaagtttgcttcattcatcacccagtattccacaggacaagtgagcgtggagattgaatgggagctgcagaaagaaaacagcaaacgctggaatcccgaagtgcagtatacatctaactatgcaaaatctgccaacgttgatttcactgtggacaacaatggactttatactgagcctcgccccattggcacccgttacctcacccgtcccctgtaa

SEQ ID NO: 5196 - protein, 736 aa, synthetic construct
  REGION 1..736: note = Description of Artificial Sequence: Synthetic polypeptide
MAADGYLPDWLEDTLSEGIRQWWKLKPGPPPPKPAERHKDDSRGLVLPGYKYLGPFNGLDKGEPVNEADAAALEHDKAYDQQLKAGDNPYLKYNHADAEFQQRLQGDTSFGGNLGRAVFQAKKRVLEPLGLVEQAGETAPGKKRPLIESPQQPDSSTGIGKKGKQPAKKRLNFGQTGDSESVPDPQPLGEPPATPAAVGPTTMASGGGAPMADNNEGADGVGNASGNWHCDSTWLGDRVITTSTRTWALPTYNNHLYKQISSASTGASNDNHYFGYSTPWGYFDFNRFHCHFSPRDWQRLINNNWGFRPKRLNFKLFNIQVKEVTTNDGVTTIANNLTSTVQVFSDSDYQLPYVLGSAHEGCLPPFPADVFMVPQYGYLTLNNGSQAVGRSSFYCLEYFPSQMLRTGNNFTFSYTFEDVPFHSSYAHSQSLDRLMNPLIDQYLYYLNRTQNQSGSAQNKDLLFSRGSPTGMSVQPKNWLPGPCYRQQRVSKTKTDNNNSNFTWTGASKYNLNGRESIINPGTAMASHKDDKDKFFPMSGVMIFGKESAGASNTALDNVMITDEEEIKATNPVATERFGTVAVNLQSSSTDPATGDVHAMGALPGMVWQDRDVYLQGPIWAKIPHTDGHFHPSPLMGGFGLKNPPPQILIKNTPVPANPPAEFSATKFASFITQYSTGQVSVEIEWELQKENSKRWNPEVQYTSNYAKSANVDFTVDNNGLYTEPRPIGTRYLTRPL

SEQ ID NO: 5197 - DNA, 2211 bp, synthetic construct
  misc_feature 1..2211: note = Description of Artificial Sequence: Synthetic polynucleotide
  source 1..2211: mol_type = other DNA
atggctgccgatggttatcttccagattggctcgaggacaacctctctgagggcattcgcgagtggtgggcgctgaaacctggagccccgaagcccaaagccaaccagcaaaagcaggacgacggccggggtctggtgcttcctggctacaagtacctcggacccttcaacggactcgacaagggggagcccgtcaacgcggcggatgcagcggccctcgagcacgacaaggcctacgaccagcagctcaaagcgggtgacaatccgtacctgcggtataaccacgccgacgccgagtttcaggagcgtctgcaagaagatacgtcttttgggggcaacctcgggcgagcagtcttccaggccaagaagcgggttctcgaacctctcggtctggttgaggaaggcgctaagacggctcctggaaagaaacgtccggtagagcaatcgccacaagagccagactcctcctcgggcatcggcaagacaggccagcagcccgctaaaaagagactcaattttggtcagactggcgactcagagtcagtccccgacccacaacctctcggagaacctccagcaacccccgctgctgtgggacctactacaatggcttcaggcggtggcgcaccaatggcagacaataacgaaggcgccgacggagtgggtaatgcctcaggaaattggcattgcgattccacatggctgggcgacagagtcatcaccaccagcacccgaacatgggccttgcccacctataacaaccacctctacaagcaaatctccagtgcttcgacgggggccagcaacgacaaccactacttcggctacagcaccccctgggggtattttgactttaacagattccactgccacttttcaccacgtgactggcagcgactcatcaacaacaactggggattccggcccaagagactcagcttcaagctcttcaacatccaggtcaaggaggtcacgacgaatgatggcgtcacaaccatcgctaataaccttaccagcacggttcaagtcttctcggactcggagtaccagcttccgtacgtcctcggctctgcgcaccagggctgcctccctccgttcccggcggacgtgttcatgattccgcaatacggctacctgacgctcaacaatggcagccaagccgtgggacgttcatccttttactgcctggaatatttcccttctcagatgctgagaacgggcaacaactttaccttcagctacacctttgaggaagtgcctttccacagcagctacgcgcacagccagagcctggaccggctgatgaatcctctcatcgatcaatacctgtattacctgaacagaactcaaaatcagtccggaagtgcccaaaacaaggacttgctgtttagccgtgggtctccagctggcatgtctgttcagcccaaaaactggctacctggaccctgttatcggcagcagcgcgtttctaaaacaaaaacagacaacaacaacagcaattttacctggactggtgcttcaaaatataacctcaatgggcgtgaatccatcatcaaccctggcactgctatggcctcacataaagacgacgaagacaagttctttcccatgagcggtgtcatgatttttggaaaagagagcgccggagcttcaaacactgcattggacaatgtcatgattacagacgaagaggaaattaaagccactaaccctgtggccaccgaaagatttgggaccgtggcagtcaatttccagagcagcagcacagaccctgcgaccggagatgtgcatgctatgggagcattacctggcatggtgtggcaagatagagacgtgtacctgcagggtcccatttgggccaaaattcctcacacagatggacactttcacccgtctcctcttatgggcggctttggactcaagaacccgcctcctcagatcctcatcaaaaacacgcctgttcctgcgaatcctccggcggagttttcagctacaaagtttgcttcattcatcacccaatactccacaggacaagtgagcgtggagattgaatgggagctgcagaaagaaaacagcaaacgctggaatcccgaagtgcagtatacatctaactatgcaaaatctgccaacattgatttcactgtggacaacaatggactttatactgagcctcgccccattggcacccgttacctcacccgtccccagtaa

SEQ ID NO: 5198 - protein, 736 aa, synthetic construct
  REGION 1..736: note = Description of Artificial Sequence: Synthetic polypeptide
MAADGYLPDWLEDNLSEGIREWWALKPGAPKPKANQQKQDDGRGLVLPGYKYLGPFNGLDKGEPVNAADAAALEHDKAYDQQLKAGDNPYLRYNHADAEFQERLQEDTSFGGNLGRAVFQAKKRVLEPLGLVEEGAKTAPGKKRPVEQSPQEPDSSSGIGKTGQQPAKKRLNFGQTGDSESVPDPQPLGEPPATPAAVGPTTMASGGGAPMADNNEGADGVGNASGNWHCDSTWLGDRVITTSTRTWALPTYNNHLYKQISSASTGASNDNHYFGYSTPWGYFDFNRFHCHFSPRDWQRLINNNWGFRPKRLSFKLFNIQVKEVTTNDGVTTIANNLTSTVQVFSDSEYQLPYVLGSAHQGCLPPFPADVFMIPQYGYLTLNNGSQAVGRSSFYCLEYFPSQMLRTGNNFTFSYTFEEVPFHSSYAHSQSLDRLMNPLIDQYLYYLNRTQNQSGSAQNKDLLFSRGSPAGMSVQPKNWLPGPCYRQQRVSKTKTDNNNSNFTWTGASKYNLNGRESIINPGTAMASHKDDEDKFFPMSGVMIFGKESAGASNTALDNVMITDEEEIKATNPVATERFGTVAVNFQSSSTDPATGDVHAMGALPGMVWQDRDVYLQGPIWAKIPHTDGHFHPSPLMGGFGLKNPPPQILIKNTPVPANPPAEFSATKFASFITQYSTGQVSVEIEWELQKENSKRWNPEVQYTSNYAKSANIDFTVDNNGLYTEPRPIGTRYLTRPQ

SEQ ID NO: 5199 - DNA, 2211 bp, synthetic construct
  misc_feature 1..2211: note = Description of Artificial Sequence: Synthetic polynucleotide
  source 1..2211: mol_type = other DNA
atggctgccgatggttatcttccagattggctcgaggacaacctctctgagggcattcgcgagtggtgggacttgaaacctggagccccgaaacccaaagccaaccagcaaaagcaggacgacggccggggtctggtgcttcctggctacaagtacctcggacccttcaacggactcgacaagggggagcccgtcaacgcggcggatgcagcggccctcgagcacgacaaggcctacgaccagcagctcaaagcgggtgacaatccgtaccttcggtataaccacgccgacgccgagtttcaggagcgtctgcaagaagatacgtcttttgggggcaacctcgggcgagcagtcttccaggccaaaaagagggttctcgaacctctcggtctggttgaggaagcggctaagacggctcctggaaagaaacgtccggtagagcagtcgccacaagagccagactcctcctcgggcattggcaagacaggccagcagcccgctaaaaagagactcaattttggtcagactggcgactcagagtcagtccccgacccacaacctctcggagaacctcccgcagccccctcaggtgtgggatctcttacaatggcttcaggtggtggcgcaccaatggcagacaataacgaaggcgccgacggagtgggtaatgcctcaggaaattggcattgcgattccacatggctgggcgacagagtcatcaccaccagcacccgcacctgggccttgcccacctacaataaccacctctacaagcaaatctccagtgcttcaacgggggccagcaacgacaaccactacttcggctacagcaccccctgggggtattttgacttcaacagattccactgccacttttcaccacgtgactggcaaagactcatcaacaacaattggggattccggcccaagagactcaacttcaagctcttcaacatccaagtcaaggaggtcacgacgaatgatggcgtcacgaccatcgctaataaccttaccagcacggttcaagtcttctcggactcggagtaccagttgccgtacgtcctcggctctgcgcaccagggctgcctccctccgttcccggcggacgtgttcatgattccgcagtacggctacctaacgctcaacaatggcagccaggcagtgggacggtcatccttttactgcctggaatatttcccatcgcagatgctgagaacgggcaacaactttaccttcagctacacctttgaggaagtgcctttccacagcagctacgcgcacagccagagcctggaccggctgatgaatcctctcatcgaccagtacctgtattacctgaacagaactcaaaatcagtccggaagtgcccaaaacaaggacttgctgtttagccgtgggtctccagctggcatgtctgttcagcccaaaaactggctacctggaccctgttaccggcagcagtgcgtttctaaaacaaaaacagacaacaacaacagcaactttacctggactggtgcttcaaaatataaccttaatgggcgtgaatctataatcaaccctggcactgctatggcctcacacaaagacgacaaagacaagttctttcccatgagcggtgtcatgatttttggaaaggagagcgccggagcttcaaacactgcattggacaatgtcatgatcacagacgaagaggaaatcaaagccactaaccccgtggccaccgaaagatttgggactgtggcagtcaatctccagagcagcagcacagaccctgcgaccggagatgtgcatgttatgggagccttacctggaatggtgtggcaagacagagacgtatacctgcagggtcctatttgggccaaaattcctcacacagatggacactttcacccgtctcctcttatgggcggctttggactcaagaacccgcctcctcagatcctcatcaaaaacacgcctgttcctgcgaatcctccggcggagttttcagctacaaagtttgcttcattcatcacccaatactccacaggacaagtgagcgtggagattgaatgggagctgcagaaagaaaacagcaagcgctggaatcccgaagtgcagtacacatccaattatgcaaaatctgccaacgttgatttcactgtggacaacaatggactttatactgagcctcgccccattggcacccgttacctcacccgtcccctgtaa

SEQ ID NO: 5200 - protein, 736 aa, synthetic construct
  REGION 1..736: note = Description of Artificial Sequence: Synthetic polypeptide
MAADGYLPDWLEDNLSEGIREWWDLKPGAPKPKANQQKQDDGRGLVLPGYKYLGPFNGLDKGEPVNAADAAALEHDKAYDQQLKAGDNPYLRYNHADAEFQERLQEDTSFGGNLGRAVFQAKKRVLEPLGLVEEAAKTAPGKKRPVEQSPQEPDSSSGIGKTGQQPAKKRLNFGQTGDSESVPDPQPLGEPPAAPSGVGSLTMASGGGAPMADNNEGADGVGNASGNWHCDSTWLGDRVITTSTRTWALPTYNNHLYKQISSASTGASNDNHYFGYSTPWGYFDFNRFHCHFSPRDWQRLINNNWGFRPKRLNFKLFNIQVKEVTTNDGVTTIANNLTSTVQVFSDSEYQLPYVLGSAHQGCLPPFPADVFMIPQYGYLTLNNGSQAVGRSSFYCLEYFPSQMLRTGNNFTFSYTFEEVPFHSSYAHSQSLDRLMNPLIDQYLYYLNRTQNQSGSAQNKDLLFSRGSPAGMSVQPKNWLPGPCYRQQCVSKTKTDNNNSNFTWTGASKYNLNGRESIINPGTAMASHKDDKDKFFPMSGVMIFGKESAGASNTALDNVMITDEEEIKATNPVATERFGTVAVNLQSSSTDPATGDVHVMGALPGMVWQDRDVYLQGPIWAKIPHTDGHFHPSPLMGGFGLKNPPPQILIKNTPVPANPPAEFSATKFASFITQYSTGQVSVEIEWELQKENSKRWNPEVQYTSNYAKSANVDFTVDNNGLYTEPRPIGTRYLTRPL

SEQ ID NO: 5201 - DNA, 2211 bp, synthetic construct
  misc_feature 1..2211: note = Description of Artificial Sequence: Synthetic polynucleotide
  source 1..2211: mol_type = other DNA
atggctgccgatggttatcttccagattggctcgaggacaacctctctgagggcattcgcgaatggtgggacttgaaacctggagccccgaaacccaaagtcaaccagcaaaagcaggacaacgctcggggtcttgtgcttccgggttacaaatacctcggacccttcaacggactcgacaagggggagcccgtcaacgcggcggacgcagcggccctcgagcacgacaaggcctacgaccagcagctcaaagcgggtgacaatccgtaccttcggtataaccacgccgacgccgagtttcaggagcgtctgcaagaagatacgtcttttgggggcaaccttggacgagcagtcttccaggccaagaagagggttctcgaaccttttggtctggttgaggaaggtgctaagacggctcctggaaagaaacgtccggtagagcagtcgccacaagagccagactcctcctcgggcattggcaagacaggccagcagcccgctaaaaagagactcaattttggtcagactggcgactcagagtcagtccccgacccacaacctctcggagaacctccagcaacccccgctgctgtgggacctactacaatggcttcaggcggtggcgcaccaatggcagacaataacgaaggcgccgacggagtgggtaatgcctcaggaaattggcattgcgattccacatggctgggcgacagagtcatcaccaccagcacccgcacctgggccttgcccacctacaataaccacctctacaagcaaatctccagtgcttcaacgggggccagcaacgacaaccactacttcggctacagcaccccctgggggtattttgacttcaacagattccactgccacttttcaccacgtgactggcaaagactcatcaacaacaattggggattccggcccaagagactcaacttcaagctcttcaacatccaagtcaaggaggtcacgacgaatgatggcgtcacgaccatcgctaataaccttaccagcacggttcaagtcttctcggactcggagtaccagttgccgtacgtcctcggctctgcgcaccagggctgcctccctccgttcccggcggacgtgttcatgattccgcaatacggctacctgacgctcaacaatggcagccaggcagtgggacggtcatccttttactgcctggaatatttcccatcgcagatgctgagaacgggcaataactttaccttcagctacacttttgaggacgttcctttccacagcagctacgctcacagccagagcctggaccggctgatgaatcctctcatcgaccagtacctgtattacctgaacagaactcagaatcagtccggaagtgcccaaaacaaggacttgctgtttagccgtgggtctccaactggcatgtctgttcagcccaaaaactggctacctggaccctgttatcggcagcagcgcgtttctaaaacaaaaacagacaacaacaacagcaactttacctggactggtgcttcaaaatataaccttaatgggcgtgaatctataatcaaccctggcactgctatggcctcacacaaagacgacgaagacaagttctttcccatgagcggtgtcatgatttttggaaaggagagcgccggagcttcaaacactgcattggacaatgtcatgatcacagacgaagaggaaatcaaagccactaaccccgtggccactgaaagatttgggactgtggcagtcaatctccagagcagcagcacagaccctgcgaccggagatgtgcatgccatgggagccttacctggaatggtgtggcaagacagagacgtatacctgcagggtcctatttgggccaaaattcctcacacggatggacactttcacccgtctcctctcatgggcggctttggacttaagcacccgcctcctcagatcctcatcaaaaacacgcctgttcctgcgaatcctccggcagagttttcggctacaaagtttgcttcattcatcacccagtattccacaggacaagtgagcgtggagattgaatgggagctgcagaaagaaaacagcaaacgctggaatcccgaagtgcagtatacatctaactatgcaaaatctgccaacgttgatttcactgtggacaacaatggactttatactgagcctcgccccattggcacccgttacctcacccgtcccctgtaa

SEQ ID NO: 5202 - protein, 736 aa, synthetic construct
  REGION 1..736: note = Description of Artificial Sequence: Synthetic polypeptide
MAADGYLPDWLEDNLSEGIREWWDLKPGAPKPKVNQQKQDNARGLVLPGYKYLGPFNGLDKGEPVNAADAAALEHDKAYDQQLKAGDNPYLRYNHADAEFQERLQEDTSFGGNLGRAVFQAKKRVLEPFGLVEEGAKTAPGKKRPVEQSPQEPDSSSGIGKTGQQPAKKRLNFGQTGDSESVPDPQPLGEPPATPAAVGPTTMASGGGAPMADNNEGADGVGNASGNWHCDSTWLGDRVITTSTRTWALPTYNNHLYKQISSASTGASNDNHYFGYSTPWGYFDFNRFHCHFSPRDWQRLINNNWGFRPKRLNFKLFNIQVKEVTTNDGVTTIANNLTSTVQVFSDSEYQLPYVLGSAHQGCLPPFPADVFMIPQYGYLTLNNGSQAVGRSSFYCLEYFPSQMLRTGNNFTFSYTFEDVPFHSSYAHSQSLDRLMNPLIDQYLYYLNRTQNQSGSAQNKDLLFSRGSPTGMSVQPKNWLPGPCYRQQRVSKTKTDNNNSNFTWTGASKYNLNGRESIINPGTAMASHKDDEDKFFPMSGVMIFGKESAGASNTALDNVMITDEEEIKATNPVATERFGTVAVNLQSSSTDPATGDVHAMGALPGMVWQDRDVYLQGPIWAKIPHTDGHFHPSPLMGGFGLKHPPPQILIKNTPVPANPPAEFSATKFASFITQYSTGQVSVEIEWELQKENSKRWNPEVQYTSNYAKSANVDFTVDNNGLYTEPRPIGTRYLTRPL

SEQ ID NO: 5203 - DNA, 2208 bp, synthetic construct
  misc_feature 1..2208: note = Description of Artificial Sequence: Synthetic polynucleotide
  variation 955: note = a, c, t or g
  variation 971..972: note = a, c, t or g
  variation 981: note = a, c, t or g
  variation 986: note = a, c, t or g
  variation 1235: note = a, c, t or g
  variation 1694..1696: note = a, c, t or g
  variation 1698: note = a, c, t or g
  variation 1763..1765: note = a, c, t or g
  variation 1778: note = a, c, t or g
  variation 2204: note = a, c, t or g
  source 1..2208: mol_type = other DNA
atggctgccgatggttatcttccagattggctcgaggacaacctctctgagggcattcgcgaatggtgggacttgaaacctggagccccgaaacccaaagtcaaccagcaaaagcaggacaacgctcggggtcttgtgcttccgggttacaaatacctcggacccttcaacggactcgacaagggggagcccgtcaacgcggcggacgcagcggccctcgagcacgacaaggcctacgaccagcagctcaaagcgggtgacaatccgtaccttcggtataaccacgccgacgccgagtttcaggagcgtctgcaagaagatacgtcttttgggggcaaccttggacgagcagtcttccaggccaagaagagggttctcgaaccttttggtctggttgaggaaggtgctaagacggctcctggaaagaaacgtccggtagagcagtcgccacaagagccagactcctcctcgggcattggcaagacaggccagcagcccgctaaaaagagactcaattttggtcagactggcgactcagagtcagtccccgacccacaacctctcggagaacctccagcaacccccgctgctgtgggacctactacaatggcttcaggcggtggcgcaccaatggcagacaataacgaaggcgccgacggagtgggtaatgcctcaggaaattggcattgcgattccacatggctgggcgacagagtcatcaccaccagcacccgaacatgggccttgcccacctataacaaccacctctacaagcaaatctccagtgcttcaacgggggccagcaacgacaaccactacttcggctacagcaccccctgggggtattttgatttcaacagattccactgccacttttcaccacgtgactggcagcgactcatcaataacaattggggattccggcccaagagactcaacttcaaactcttcaacntccaagtcaaggaggnnacgacgaangatgncgtcacaaccatcgctaataaccttaccagcacggttcaagtcttctcggactcggagtaccagcttccgtacgtcctcggctctgcgcaccagggctgcctccctccgttcccggcggacgtgttcatgattccgcaatacggctacctgacgctcaacaatggcagccaggcagtgggacggtcatccttttactgcctggaatatttcccatcgcagatgctgagaacgggcaataactttacctncagctacacttttgaggacgttcctttccacagcagctacgctcacagccagagcctggaccggctgatgaatcctctcatcgaccagtacctgtattacctgaacagaactcagaatcagtccggaagtgcccaaaacaaggacttgctgtttagccgtgggtctccaactggcatgtctgttcagcccaaaaactggctacctggaccctgttatcggcagcagcgcgtttctaaaacaaaaacagacaacaacaacagcaactttacctggactggtgcttcaaaatataaccttaatgggcgtgaatctataatcaaccctggcactgctatggcctcacacaaagacgacgaagacaagttctttcccatgagcggtgtcatgatttttggaaaggagagcgccggagcttcaaacactgcattggacaatgtcatgatcacagacgaagagannncnaagccactaaccccgtggccactgaaagatttgggactgtggcagtcaatctccaagcagcacannnaccctgcgaccgnagatgtgcatgccatgggagccttacctggaatggtgtggcaagacagagacgtatacctgcagggtcctatttgggccaaaattcctcacacggatggacactttcacccgtctcctctcatgggcggctttggacttaagcacccgcctcctcagatcctcatcaaaaacacgcctgttcctgcgaatcctccggcagagttttcggctacaaagtttgcttcattcatcacccagtattccacaggacaagtgagcgtggagattgaatgggagctgcagaaagaaaacagcaaacgctggaatcccgaagtgcagtatacatctaactatgcaaaatctgccaacgttgatttcactgtggacaacaatggactttatactgagcctcgccccattggcacccgttacctcacccgtccccngtaa

SEQ ID NO: 5204 - protein, 723 aa, synthetic construct
  REGION 1..723: note = Description of Artificial Sequence: Synthetic polypeptide
MAADGYLPDWLEDNLSEGIREWWDLKPGAPKPKVNQQKQDNARGLVLPGYKYLGPFNGLDKGEPVNAADAAALEHDKAYDQQLKAGDNPYLRYNHADAEFQERLQEDTSFGGNLGRAVFQAKKRVLEPFGLVEEGAKTAPGKKRPVEQSPQEPDSSSGIGKTGQQPAKKRLNFGQTGDSESVPDPQPLGEPPATPAAVGPTTMASGGGAPMADNNEGADGVGNASGNWHCDSTWLGDRVITTSTRTWALPTYNNHLYKQISSASTGASNDNHYFGYSTPWGYFDFNRFHCHFSPRDWQRLINNNWGFRPKRLNFKLFNQVKETTDVTTIANNLTSTVQVFSDSEYQLPYVLGSAHQGCLPPFPADVFMIPQYGYLTLNNGSQAVGRSSFYCLEYFPSQMLRTGNNFTSYTFEDVPFHSSYAHSQSLDRLMNPLIDQYLYYLNRTQNQSGSAQNKDLLFSRGSPTGMSVQPKNWLPGPCYRQQRVSKTKTDNNNSNFTWTGASKYNLNGRESIINPGTAMASHKDDEDKFFPMSGVMIFGKESAGASNTALDNVMITDEEATNPVATERFGTVAVNLQSSPATDVHAMGALPGMVWQDRDVYLQGPIWAKIPHTDGHFHPSPLMGGFGLKHPPPQILIKNTPVPANPPAEFSATKFASFITQYSTGQVSVEIEWELQKENSKRWNPEVQYTSNYAKSANVDFTVDNNGLYTEPRPIGTRYLTRP

SEQ ID NO: 5205 - DNA, 2208 bp, synthetic construct
  misc_feature 1..2208: note = Description of Artificial Sequence: Synthetic polynucleotide
  source 1..2208: mol_type = other DNA
atggctgccgatggttatcttccagattggctcgaggacactctctctgaaggaataagacagtggtggaagctcaaacctggcccaccaccaccaaagcccgcagagcggcataaggacgacagcaggggtcttgtgcttcctgggtacaagtacctcggacccttcaacggactcgacaagggagagccggtcaacgaggcagacgccgcggccctcgagcacgacaaagcctatgaccggcagctcgacagcggagacaacccgtacctcaagtacaaccacgccgacgcggagtttcaggagcgccttaaagaagatacgtcttttgggggcaacctcggacgagcagtcttccaggcgaaaaagagggttcttgaacctctgggcctggttgaggaacctgttaagacggctccgggaaaaaagaggccggtagagcactctcctgtggagccagactcctcctcgggaaccggaaaggcgggtcagcagcctgcaagaaaaagattgaattttggtcagactggagacgcagactcagtacctgacccccagcctctcggacagccaccagcagccccctctggtctgggaactaatacgatggctacaggcagtggcgcaccaatggcagacaataacgagggcgccgacggagtgggtaattcctcgggaaattggcattgcgattccacatggatgggcgacagagtcatcaccaccagcacccgaacctgggccctgcccacctacaacaaccacctctacaaacaaatttccagccaatcaggagcctcgaacgacaatcactactttggctacagcaccccttgggggtattttgacttcaacagattccactgccacttttcaccacgtgactggcaaagactcatcaacaacaactggggattccgacccaagagactcaagttcaagctctttaacattcaagtcaaagaggtcacgcagaatgacggtacgacgacgattgccaataaccttaccagcacggttcaggtgtttactgactcggagtaccagctcccgtacgtcctcggctcggcgcatcaaggatgcctcccgccgttcccagcagacgtcttcatggtgccacagtatggatacctcaccctgaacaacgggagtcaggcagtaggacgctcttcattttactgcctggagtactttccttctcagatgctgcgtaccggtaacaactttaccttcagctacacttttgaggacgttcctttccacagcagctacgctcacagccagagtctggaccgtctcatgaatcctctcatcgaccagtacctgtattacttgagcagaacagacgctccaagtggaaccaccacgcagtcaaggcttcagttttctcaggccggagcgagtgacattcgggaccagtctaggaactggcttcctggaccctgttaccgccagcagcgagtatcaaagacatctgcggataacaacaacagtgaatactcgtggactggagctaccaagtaccacctcaatggcagagactctctggtgaatccgggcccggccatggcaagccacaaggacgatgaagaaaagttttttcctcagagcggggttctcatctttgggaagcaaggctcagagaaaacaagtgtggacattgaaaaggtcatgattacagacgaagaggaaatcaggacaaccaatcccgtggctacggagcagtatggttctgtatctaccaacctccagagaggcaacagacaagcagctaccgcagatgtcaacacacaaggcgttcttccaggcatggtctggcaggacagagatgtgtaccttcaggggcccatctgggcaaagattccacacacggacggacattttcacccctctcccctcatgggtggattcggacttaaacaccctcctccacagattctcatcaagaacaccccggtacctgcgaatccttcgaccaccttcagtgcggcaaagtttgcttccttcatcacacagtactccacgggacaggtcagcgtggagatcgagtgggagctgcagaaggaaaacagcaaacgctggaatcccgaagttcagtacacttccaactacaacaagtctgttaatgtggactttactgtggacactaatggcgtgtattcagagcctcgccccattggcaccagatacctgactcgtaatctgtaa

SEQ ID NO: 5206 - protein, 735 aa, synthetic construct
  REGION 1..735: note = Description of Artificial Sequence: Synthetic polypeptide
MAADGYLPDWLEDTLSEGIRQWWKLKPGPPPPKPAERHKDDSRGLVLPGYKYLGPFNGLDKGEPVNEADAAALEHDKAYDRQLDSGDNPYLKYNHADAEFQERLKEDTSFGGNLGRAVFQAKKRVLEPLGLVEEPVKTAPGKKRPVEHSPVEPDSSSGTGKAGQQPARKRLNFGQTGDADSVPDPQPLGQPPAAPSGLGTNTMATGSGAPMADNNEGADGVGNSSGNWHCDSTWMGDRVITTSTRTWALPTYNNHLYKQISSQSGASNDNHYFGYSTPWGYFDFNRFHCHFSPRDWQRLINNNWGFRPKRLKFKLFNIQVKEVTQNDGTTTIANNLTSTVQVFTDSEYQLPYVLGSAHQGCLPPFPADVFMVPQYGYLTLNNGSQAVGRSSFYCLEYFPSQMLRTGNNFTFSYTFEDVPFHSSYAHSQSLDRLMNPLIDQYLYYLSRTDAPSGTTTQSRLQFSQAGASDIRDQSRNWLPGPCYRQQRVSKTSADNNNSEYSWTGATKYHLNGRDSLVNPGPAMASHKDDEEKFFPQSGVLIFGKQGSEKTSVDIEKVMITDEEEIRTTNPVATEQYGSVSTNLQRGNRQAATADVNTQGVLPGMVWQDRDVYLQGPIWAKIPHTDGHFHPSPLMGGFGLKHPPPQILIKNTPVPANPSTTFSAAKFASFITQYSTGQVSVEIEWELQKENSKRWNPEVQYTSNYNKSVNVDFTVDTNGVYSEPRPIGTRYLTRNL

SEQ ID NO: 5207 - DNA, 2208 bp, synthetic construct
  misc_feature 1..2208: note = Description of Artificial Sequence: Synthetic polynucleotide
  source 1..2208: mol_type = other DNA
atggctgccgatggttatcttccagattggctcgaggacactctctctgaaggaataagacagtggtggaagctcaaacctggcccaccaccaccaaagcccgcagagcggcataaggacgacagcaggggtcttgtgcttcctgggtacaagtacctcggacccttcaacggactcgacaagggagagccggtcaacgaggcagacgccgcggccctcgagcacgacaaagcctatgaccggcagctcgacagcggagacaacccgtacctcaagtacaaccacgccgacgcggagtttcaggagcgccttaaagaagatacgtcttttgggggcaacctcggacgagcagtcttccaggcgaaaaagagggttcttgaacctctgggcctggttgaggaacctgttaagacggctccgggaaaaaagaggccggtagagcactctcctgtggagccagactcctcctcgggaaccggaaaggcgggccagcagcctgcaagaaaaagattgaattttggtcagactggagacgcaaactcagtacctgacccccagcctctcggacagccaccagcagccccctctggtctgggaactaatacgatggctacaggcagtggcgcaccaatggcagacaataacgagggcgccgacggagtgggtaattcctcgggaaattggcattgcgattccacatggatgggcgacagagtcatcaccaccagcacccgaacctgggccctgcccacctacaacaaccacctctacaaacaaatttccagccaatcaggagcctcgaacgacaatcactactttggctacagcaccccttgggggtattttgacttcaacagattccactgccacttttcaccacgtgactggcaaagactcatcaacaacaactggggattccgacccaagagactcaagttcaagctctttaacattcaagtcaaagaggtcacgcagaatgacggtacgacgacgattgccaataaccttaccagcacggttcaggtgtttactgactcggagtaccagctcccgtacgtcctcggctcggcgcatcaaggatgcctcccgccgttcccagcagacgtcttcatggtgccacagtatggatacctcaccctgaacaacgggagtcgggcagtaggacgctcttcattttactgcctggagtactttccttctcagatgctgcgtaccggtaacaactttaccttcagctacacttttgaggacgttcctttccacagcagctacgctcacagccagagtctggaccgtctcatgaatcctctcatcgaccagtacctgtattacttgagcagaacagacactccaagtggaaccaccacgcagtcaaggcttcagttttctcaggccggagcgagtgacattcgggaccagtctaggaactggcttcctggaccctgttaccgccagcagcgagtatcaaagacatctgcggataacaacaacagtgaatactcgtggactggagctaccaagtaccacctcaatggcagagactctctggtgaatccgggcccggccatggcaagccacaaggacgatgaagaaaagttttttcctcagagcggggttctcatctttgggaagcaaggctcagagaaaacaagtgtggacattgaaaaggtcatgattacagacgaagaggaaatcaggacgaccaatcccgtggctacggagcagtatggttctgtatctaccaacctccagagaggcaacagacaagcagctaccgcagatgtcaacacacaaggcgttcttccaggcatggtctggcaggacagagatgtgtaccttcaggggcccatctgggcaaagattccacacacggacggacattttcacccctctcccctcatgggtggattcggacttaaacaccctcctccacagattctcatcaagaacaccccggtacctgcgaatccttcgaccaccttcagtgcggcaaagtttgcttccttcatcacacagtactccacgggacaggtcagcgtggagatcgagtgggagctgcagaaggaaaacagcaaacgctggaatcccgaagttcagtacacttccaactacaacaagtctgttaatgtggactttactgtggacactaatggcgtgtatacagagcctcgccccattggcaccagatacctgactcgtaatctgtaa

SEQ ID NO: 5208 - protein, 735 aa, synthetic construct
  REGION 1..735: note = Description of Artificial Sequence: Synthetic polypeptide
MAADGYLPDWLEDTLSEGIRQWWKLKPGPPPPKPAERHKDDSRGLVLPGYKYLGPFNGLDKGEPVNEADAAALEHDKAYDRQLDSGDNPYLKYNHADAEFQERLKEDTSFGGNLGRAVFQAKKRVLEPLGLVEEPVKTAPGKKRPVEHSPVEPDSSSGTGKAGQQPARKRLNFGQTGDANSVPDPQPLGQPPAAPSGLGTNTMATGSGAPMADNNEGADGVGNSSGNWHCDSTWMGDRVITTSTRTWALPTYNNHLYKQISSQSGASNDNHYFGYSTPWGYFDFNRFHCHFSPRDWQRLINNNWGFRPKRLKFKLFNIQVKEVTQNDGTTTIANNLTSTVQVFTDSEYQLPYVLGSAHQGCLPPFPADVFMVPQYGYLTLNNGSRAVGRSSFYCLEYFPSQMLRTGNNFTFSYTFEDVPFHSSYAHSQSLDRLMNPLIDQYLYYLSRTDTPSGTTTQSRLQFSQAGASDIRDQSRNWLPGPCYRQQRVSKTSADNNNSEYSWTGATKYHLNGRDSLVNPGPAMASHKDDEEKFFPQSGVLIFGKQGSEKTSVDIEKVMITDEEEIRTTNPVATEQYGSVSTNLQRGNRQAATADVNTQGVLPGMVWQDRDVYLQGPIWAKIPHTDGHFHPSPLMGGFGLKHPPPQILIKNTPVPANPSTTFSAAKFASFITQYSTGQVSVEIEWELQKENSKRWNPEVQYTSNYNKSVNVDFTVDTNGVYTEPRPIGTRYLTRNL

SEQ ID NO: 5209 - DNA, 2211 bp, synthetic construct
  misc_feature 1..2211: note = Description of Artificial Sequence: Synthetic polynucleotide
  source 1..2211: mol_type = other DNA
atggctgccgatggttatcttccagattggctcgaggacactctctctgaaggaataagacagtggtggaagctcaaacctggcccaccaccaccaaagcccgcagagcggcataaggacgacagcaggggtcttgtgcttcctgggtacaagtacctcggacccttcaacggactcgacaagggagagccggtcaacgaggcagacgccgcggccctcgagcacgacaaggcctacgaccagcagctcaaagcgggtgacaatccgtacctgcggtataaccacgccgacgccgagtttcaggagcgtctgcaagaagatacgtcttttgggggcaacctcgggcgagcagtcttccaggccaagaagcgggttctcgaacctctcggtctggttgaggaaggcgctaagacggctcctggaaagaaacgtccggtagagcagtcgccacaagagccagactcctcctcgggcatcggcaagacaggccagcagcccgctaaaaagagactcaattttggtcagactggcgactcagagtcagtccccgacccacaacctctcggagaacctccagcaacccccgctgctgtgggacctactacaatggcttcaggcggtggcgcaccaatggcagacaataacgaaggcgccgacggagtgggtaatgcctcaggaaattggcattgcgattccacatggctgggcgacagagtcatcaccaccagcacccgaacatgggccttgcccacctataacaaccacctctacaagcaaatctccagtgcttcgacgggggccagcaacgacaaccactacttcggctacagcaccccctgggggtattttgactttaacagattccactgccacttttcaccacgtgactggcagcgactcatcaacaataactggggattccggcccaagagactcagcttcaagctcttcaacatccaggtcaaggaggtcacgacgaatgatggcgtcacaaccatcgctaataaccttaccagcacggttcaagtcttctcggactcggagtaccagcttccgtacgtcctcggctctgcgcaccagggctgcctccctccgttcccggcggacgtgttcatgattccgcaatacggctacctgacgctcaacaatggcagccaagccgtgggacgttcatccttttactgcctggaatatttcccttctcagatgctgagaacgggcaacaactttaccttcagctacacctttgaggaagtgcctttccacagcagctacgcgcacagccagagcctggaccggctgatgaatcctctcatcgatcaatacctgtattacctgaacagaactcaaaatcagtccggaagtgcccaaaacaaggacttgctgtttagccgtgggtctccagctggcatgtctgttcagcccaaaaactggctacctggaccctgttatcggcagcagcgcgtttctaaaacaaaaacagacaacaacaacagcaattttacctggactggtgcttcaaaatataacctcaatgggcgtgaatccatcatcaaccctggcactgctatggcctcacacaaagacgacgaagacaagttctttcccatgagcggtgtcatgatttttggaaaagagagcgccggagcttcaaacactgcattggacaatgtcatgattacggacgaagaggaaattaaagccactaaccctgtggccaccgaaagatttgggaccgtggcagtcaatttccagagcagcagcacagaccctgcgaccggagatgtgcatgctatgggagcattacctggcatggtgtggcaagatagagacgtgtacctgcagggtcccatttgggccaaaattcctcacacagatggacactttcacccgtctcctcttatgggcggctttggactcaagaacccgcctcctcagatcctcatcaaaaacacgcctgttcctgcgaatcctccggcggagttttcagctacaaagtttgcttcattcatcactcaatactccacaggacaagtgagcgtggaaattgaatgggagctgcagaaagaaaacagcaaacgctggaatcccgaagtgcagtatacatctaactatgcaaaatctgccaacgttgatttcactgtggacaacaatggactttatactgagcctcgccccattggcacccgttacctcacccgtcccctgtaa

SEQ ID NO: 5210 - protein, 736 aa, synthetic construct
  REGION 1..736: note = Description of Artificial Sequence: Synthetic polypeptide
MAADGYLPDWLEDTLSEGIRQWWKLKPGPPPPKPAERHKDDSRGLVLPGYKYLGPFNGLDKGEPVNEADAAALEHDKAYDQQLKAGDNPYLRYNHADAEFQERLQEDTSFGGNLGRAVFQAKKRVLEPLGLVEEGAKTAPGKKRPVEQSPQEPDSSSGIGKTGQQPAKKRLNFGQTGDSESVPDPQPLGEPPATPAAVGPTTMASGGGAPMADNNEGADGVGNASGNWHCDSTWLGDRVITTSTRTWALPTYNNHLYKQISSASTGASNDNHYFGYSTPWGYFDFNRFHCHFSPRDWQRLINNNWGFRPKRLSFKLFNIQVKEVTTNDGVTTIANNLTSTVQVFSDSEYQLPYVLGSAHQGCLPPFPADVFMIPQYGYLTLNNGSQAVGRSSFYCLEYFPSQMLRTGNNFTFSYTFEEVPFHSSYAHSQSLDRLMNPLIDQYLYYLNRTQNQSGSAQNKDLLFSRGSPAGMSVQPKNWLPGPCYRQQRVSKTKTDNNNSNFTWTGASKYNLNGRESIINPGTAMASHKDDEDKFFPMSGVMIFGKESAGASNTALDNVMITDEEEIKATNPVATERFGTVAVNFQSSSTDPATGDVHAMGALPGMVWQDRDVYLQGPIWAKIPHTDGHFHPSPLMGGFGLKNPPPQILIKNTPVPANPPAEFSATKFASFITQYSTGQVSVEIEWELQKENSKRWNPEVQYTSNYAKSANVDFTVDNNGLYTEPRPIGTRYLTRPL

SEQ ID NO: 5211 - protein, 735 aa, synthetic construct
  REGION 1..735: note = Description of Artificial Sequence: Synthetic polypeptide
MAADGYLPDWLEDTLSEGIRQWWKLKPGPPPPKPAERHKDDSRGLVLPGYKYLGPFNGLDKGEPVNEADAAALEHDKAYDRQLDSGDNPYLKYNHADAEFQERLKEDTSFGGNLGRAVFQAKKRVLEPLGLVEEPVKTAPGKKRPVEHSPVEPDSSSGTGKAGQQPARKRLNFGQTGDADSVPDPQPLGQPPAAPSGLGTNTMATGSGAPMADNNEGADGVGNSSGNWHCDSTWMGDRVITTSTRTWALPTYNNHLYKQISSQSGASNDNHYFGYSTPWGYFDFNRFHCHFSPRDWQRLINNNWGFRPKRLKFKLFNIQVKEVTQNDGTTTIANNLTSTVQVFTDSEYQLPYVLGSAHQGCLPPFPADVFMVPQYGYLTLNNGSQAVGRSSFYCLEYFPSQMLRTGNNFTFSYTFEDVPFHSSYAHSQSLDRLMNPLIDQYLYYLSRTDTPSGTTTQSRLQFSQAGASDIRNQSRNWLPGPCYRQQRVSKTSADNNNSEYSWTGATKYHLNGRDSLVNPGPAMASHKDDEEKFFPQSGVLIFGKQGSEKTSVDIEKVMITDEEEIRTTNPVATEQYGSVSTNLQRGNRQAATADVNTQGVLPGMVWQDRDVYLQGPIWAKIPHTDGHFHPSPLMGGFGLKHPPPQILIKNTPVPANPSTTFSAAKFASFITQYSTGQVSVEIEWELQKENSKRWNPEVQYTSNYNKSVNVDFTVDTNGVYSEPRPIGTRYLTRNQ

SEQ ID NO: 5212 - DNA, 2208 bp, synthetic construct
  misc_feature 1..2208: note = Description of Artificial Sequence: Synthetic polynucleotide
  source 1..2208: mol_type = other DNA
atggctgccgatggttatcttccagattggctcgaggacactctctctgaaggaataagacagtggtggaagctcaaacctggcccaccaccaccaaagcccgcagagcggcataaggacgacagcaggggtcttgtgcttcctgggtacaagtacctcggacccttcaacggactcgacaagggagagccggtcaacgaggcagacgccgcggccctcgagcacgacaaagcctatgaccggcagctcgacagcggagacaacccgtacctcaagtacaaccacgccgacgcggagtttcaggaacgccttaaagaagatacgtcttttgggggcaacctcggacgagcagtcttccaggcgaaaaagagggttcttgaacctctgggcctggttgaggaacctgttaagacggctccgggaaaaaagaggccggtagagcactctcctgtggagccagactcctcctcgggaaccggaaaggcgggccagcagcctgcaagaaaaagattgaattttggtcagactggagacgcagactcagtacctgacccccagcctctcggacagccaccagcagccccctctggtctgggaactaatacgatggctacaggcagtggcgcaccaatggcagacaataacgagggcgccgacggagtgggtaattcctcgggaaattggcattgcgattccacatggatgggcgacagagtcatcaccaccagcacccgaacctgggccctgcccacctacaacaaccacctctacaaacaaatttccagccaatcaggagcctcgaacgacaatcactactttggctacagcaccccttgggggtattttgacttcaacagattccactgccacttttcaccacgtgactggcaaagactcatcaacaacaactggggattccgacccaagagactcaagttcaagctctttaacattcaagtcaaagaggtcacgcagaatgacggtacgacgacgattgccaataaccttaccagcacggttcaggtgtttactgactcggagtaccagctcccgtacgtcctcggctcggcgcatcaaggatgcctcccgccgttcccagcagacgtcttcatggtgccacagtatggatacctcaccctgaacaacgggagtcaggcagtaggacgctcttcattttactgcctggagtactttccttctcagatgctgcgtaccggtaacaactttaccttcagctacacttttgaggacgttcctttccacagcagctacgctcacagccagagtctggaccgtctcatgaatcctctcatcgaccagtacctgtattacttgagcagaacagacactccaagtggaaccaccacgcagtcaaggcttcagttttctcaggccggagcgagtgacattcggaaccagtctaggaactggcttcctggaccctgttaccgccagcagcgagtatcaaagacatctgcggataacaacaacagtgaatactcgtggactggagctaccaagtaccacctcaatggcagagactctctggtgaatccgggcccggccatggcaagccacaaggacgatgaagaaaagttttttcctcagagcggggttctcatctttgggaagcaaggctcagagaaaacaagtgtggacattgaaaaggtcatgattacagacgaagaggaaatcaggacaaccaatcccgtggctacggagcagtatggttctgtatctaccaacctccagagaggcaacagacaagcagctaccgcagatgtcaacacacaaggcgttcttccaggcatggtctggcaggacagagatgtgtaccttcaggggcccatctgggcaaagattccacacacggacggacattttcacccctctcccctcatgggtggattcggacttaaacaccctcctccacagattctcatcaagaacaccccggtacctgcgaatccttcgaccaccttcagtgcggcaaagtttgcttccttcatcacacagtactccacgggacaggtcagcgtggagatcgagtgggagctgcagaaggaaaacagcaaacgctggaatcccgaagttcagtacacttccaactacaacaagtctgttaatgtggactttactgtggacactaatggcgtgtattcagagcctcgccccattggcaccagatacctgactcgtaatcagtaa

SEQ ID NO: 5213 - DNA, 2208 bp, synthetic construct
  misc_feature 1..2208: note = Description of Artificial Sequence: Synthetic polynucleotide
  source 1..2208: mol_type = other DNA
atggctgccgatggttatcttccagattggctcgaggacactctctctgaaggaataagacagtggtggaagctcaaacctggcccaccaccaccaaagcccgcagagcggcataaggacgacagcaggggtcttgtgcttcctgggtacaagtacctcggacccttcaacggactcgacaagggagagccggtcaacgaggcagacgccgcggccctcgagcacgacaaagcctatgaccggcagctcgacagcggagacaacccgtacctcaagtacaaccacgccgacgcggagtttcaggagcgccttaaagaagatacgtcttttgggggcaacctcggacgagcagtcttccaggcgaaaaagagggttcttgaacctctgggcctggttgaggaacctgttaagacggctccgggaaaaaagaggccggtagagcactctcctgtggagccagactcctcctcgggaaccggaaaggcgggccagcagcctgcaagaaaaagattgaattttggtcagactggagacgcagactcagtacctgatccccagcctctcggacagccaccagcagccccctctggtctgggaactaatacgatggctacaggcagtggcgcaccaatggcagacaataacgagggcgccgacggagtgggtaattcctcgggaaattggcattgcgattccacatggatgggcgacagagtcatcaccaccagcacccgaacctgggccctgcccacctacaacaaccacctctacaaacaaatttccagccaatcaggagcctcgaacgacaatcactactttggctacagcaccccttgggggtattttgacttcaacagattccactgccacttttcaccacgtgactggcaaagactcatcaacaacaactggggattccgacccaagagactcaagttcaagctctttaacattcaagtcaaagaggtcacgcagaatgacggtacgacgacgattgccaataaccttaccagcacggttcaggtgtttactgactcggagtaccagctcccgtatgtcctcggctcggcgcatcaaggatgcctcccgccgttcccagcagacgtcttcatggtgccacagtatggatacctcaccctgaacaacgggagtcaggcagtaggacgctcttcattttactgcctggagtactttccttctcagatgctgcgtaccggtaacaactttaccttcagctacacttttgaggacgttcctttccacagcagctacgctcacagccagagtctggaccgtctcatgaatcctctcatcgaccagtacctgtattacttgagcagaacagacactccaagtggaaccaccacgcagtcaaggcttcagttttctcaggccggagcgagtgacattcgggaccagtctaggaactggcttcctggaccctgttaccgccagcagcgagtatcaaagacatctgcggataacaacaacagtgaatactcgtggactggagctaccaagtaccacctcaatggcagagactctctggtgaatccgggcccggccatggcaagccacaaggacgatgaagaaaagttttttcctcagagcggggttctcatctttgggaagcaaggctcagagaaaacaagtgtggacattgaaaaggtcatgattacagacgaagaggaaatcaggacaaccaatcccgtggctacggagcagtatggttctgtatctaccaacctccagagaggcaacagacaagcagctaccgcagatgtcaacacacaaggcgttcttccaggcatggtctggcaggacagagatgtgtaccttcaggggcccatctgggcaaagattccacacacggacggacattttcacccctctcccctcatgggtggattcggacttaaacaccctcctccacagattctcatcaagaacaccccggtacctgcgaatccttcgaccaccttcagtgcggcaaagtttgcttccttcatcacacagtactccacgggacaggtcagcgtggagatcgagtgggagctgcagaaggaaaacagcaaacgctggaatcccgaagttcagtacacttccaactacaacaagtctgttaatgtggactttactgtggacactaatggcgtgtattcagagcctcgccccattggcaccagatacctgactcgtaatctgtaa

SEQ ID NO: 5214 - protein, 735 aa, synthetic construct
  REGION 1..735: note = Description of Artificial Sequence: Synthetic polypeptide
MAADGYLPDWLEDTLSEGIRQWWKLKPGPPPPKPAERHKDDSRGLVLPGYKYLGPFNGLDKGEPVNEADAAALEHDKAYDRQLDSGDNPYLKYNHADAEFQERLKEDTSFGGNLGRAVFQAKKRVLEPLGLVEEPVKTAPGKKRPVEHSPVEPDSSSGTGKAGQQPARKRLNFGQTGDADSVPDPQPLGQPPAAPSGLGTNTMATGSGAPMADNNEGADGVGNSSGNWHCDSTWMGDRVITTSTRTWALPTYNNHLYKQISSQSGASNDNHYFGYSTPWGYFDFNRFHCHFSPRDWQRLINNNWGFRPKRLKFKLFNIQVKEVTQNDGTTTIANNLTSTVQVFTDSEYQLPYVLGSAHQGCLPPFPADVFMVPQYGYLTLNNGSQAVGRSSFYCLEYFPSQMLRTGNNFTFSYTFEDVPFHSSYAHSQSLDRLMNPLIDQYLYYLSRTDTPSGTTTQSRLQFSQAGASDIRDQSRNWLPGPCYRQQRVSKTSADNNNSEYSWTGATKYHLNGRDSLVNPGPAMASHKDDEEKFFPQSGVLIFGKQGSEKTSVDIEKVMITDEEEIRTTNPVATEQYGSVSTNLQRGNRQAATADVNTQGVLPGMVWQDRDVYLQGPIWAKIPHTDGHFHPSPLMGGFGLKHPPPQILIKNTPVPANPSTTFSAAKFASFITQYSTGQVSVEIEWELQKENSKRWNPEVQYTSNYNKSVNVDFTVDTNGVYSEPRPIGTRYLTRNL

SEQ ID NO: 5215 - DNA, 2172 bp, synthetic construct
  misc_feature 1..2172: note = Description of Artificial Sequence: Synthetic polynucleotide
  source 1..2172: mol_type = other DNA
atgtcttttgttgatcaccctccagattggttggaagaagttggtgaaggtcttcgcgagtttttgggccttgaagcgggcccaccgaaaccaaaacccaatcagcagcatcaagatcaagcccgtggtcttgtgctgcctggttataactatctcggacccggaaacggtctcgatcgaggagagcctgtcaacagggcagacgaggtcgcgcgagagcacgacatctcgtacaacgagcagcttgaggcgggagacaacccctacctcaagtacaaccacgcggacgccgagtttcaggagaagctcgccgacgacacatccttcgggggaaacctcggaaaggcagtctttcaggccaagaaaagggttctcgaaccttttggcctggttgaagagggtgctaagacggcccctaccggaaagcggatagacgaccactttccaaaaagaaagaaggctcggaccgaagaggactccaagccttccacctcgtcagacgccgaagctggacccagcggatcccagcagctgcaaatcccagcccaaccagcctcaagtttgggagctgatacaatgtctgcgggaggtggcggcccattgggcgacaataaccaaggtgccgatggagtgggcaatgcctcgggagattggcattgcgattccacgtggatgggggacagagtcgtcaccaagtccacccgaacctgggtgctgcccagctacaacaaccaccagtaccgagagatcaaaagcggctccgtcgacggaagcaacgccaacgcctactttggatacagcaccccctgggggtactttgactttaaccgcttccacagccactggagcccccgagactggcaaagactcatcaacaactactggggcttcagaccccggtccctcagagtcaaaatcttcaacattcaagtcaaagaggtcacggtgcaggactccaccaccaccatcgccaacaacctcacctccaccgtccaagtgtttacggacgacgactaccagctgccctacgtcgtcggcaacgggaccgagggatgcctgccggccttccctccgcaggtctttacgctgccgcagtacggttacgcgacgctgaaccgcgacaacacagaaaatcccaccgagaggagcagcttcttctgcctagagtactttcccagcaagatgctgagaacgggcaacaactttgagtttacctacaactttgaggaggtgcccttccactccagcttcgctcccagtcagaacctgttcaagctggccaacccgctggtggaccagtacttgtaccgcttcgtgagcacaaataacactggcggagtccagttcaacaagaacctggccgggagatacgccaacacctacaaaaactggttcccggggcccatgggccgaacccagggctggaacctgggctccggggtcaaccgcgccagtgtcagcgccttcgccacgaccaataggatggagctcgagggcgcgagttaccaggtgcccccgcagccgaacggcatgaccaacaacctccagggcagcaacacctatgccctggagaacactatgatcttcaacagccagccggcgaacccgggcaccaccgccacgtacctcgagggcaacatgctcatcaccagcgagagcgagacgcagccggtgaaccgcgtggcgtacaacgtcggcgggcagatggccaccaacaaccagagctccaccactgcccccgcgaccggcacgtacaacctccaggaaatcgtgcccggcagcgtgtggatggagagggacgtgtacctccaaggacccatctgggccaagatcccagagacgggggcgcactttcacccctctccggccatgggcggattcggactcaaacacccaccgcccatgatgctcatcaagaacacgcctgtgcccggaaatatcaccagcttctcggacgtgcccgtcagcagcttcatcacccagtacagcaccgggcaggtcaccgtggagatggagtgggagctcaagaaggaaaactccaagaggtggaacccagagatccagtacacaaacaactacaacgacccccagtttgtggactttgccccggacagcaccggggaatacagaaccaccagacctatcggaacccgataccttacccgacccctt

SEQ ID NO: 5216 - DNA, 2214 bp, synthetic construct
  misc_feature 1..2214: note = Description of Artificial Sequence: Synthetic polynucleotide
  source 1..2214: mol_type = other DNA
atggctgccgatggttatcttccagattggctcgaggacaacctctctgagggcattcgcgagtggtgggcgctgaaacctggagccccgaagcccaaagccaaccagcaaaagcaggacgacggccggggtctggtgcttcctggctacaagtacctcggacccttcaacggactcgacaagggggagcccgtcaacgcggcggacgcagcggccctcgagcacgacaaggcctacgaccagcagctgcaggcgggtgacaatccgtacctgcggtataaccacgccgacgccgagtttcaggagcgtctgcaagaagatacgtcttttgggggcaacctcgggcgagcagtcttccaggccaagaagcgggttctcgaacctctcggtctggttgaggaaggcgctaagacggctcctggaaagaagagaccggtagagccatcaccccagcgttctccagactcctctacgggcatcggcaagaaaggccaacagcccgccagaaaaagactcaattttggtcagactggcgactcagagtcagttccagaccctcaacctctcggagaacctccagcagcgccctctggtgtgggacctaatacaatggctgcaggcggtggcgcaccaatggcagacaataacgaaggcgccgacggagtgggtagttcctcgggaaattggcattgcgattccacatggctgggcgacagagtcatcaccaccagcacccgaacctgggccctgcccacctacaacaaccacctctacaagcaaatctccaacgggacatcgggaggagccaccaacgacaacacctacttcggctacagcaccccctgggggtattttgactttaacagattccactgccacttttcaccacgtgactggcagcgactcatcaacaacaactggggattccggcccaagagactcagcttcaagctcttcaacatccaggtcaaggaggtcacgcagaatgaaggcaccaagaccatcgccaataacctcaccagcaccatccaggtgtttacggactcggagtaccagctgccgtacgttctcggctctgcccaccagggctgcctgcctccgttcccggcggacgtgttcatgattccccagtacggctacctaacactcaacaacggtagtcaggccgtgggacgctcctccttctactgcctggaatactttccttcgcagatgctgagaaccggcaacaacttccagtttacttacaccttcgaggacgtgcctttccacagcagctacgcccacagccagagcttggaccggctgatgaatcctctgattgaccagtacctgtactacttgtctcggactcaaacaacaggaggcacggcaaatacgcagactctgggcttcagccaaggtgggcctaatacaatggccaatcaggcaaagaactggctgccaggaccctgttaccgccaacaacgcgtctcaacgacaaccgggcaaaacaacaatagcaactttgcctggactgctgggaccaaataccatctgaatggaagaaattcattggctaatcctggcatcgctatggcaacacacaaagacgacgaggagcgtttttttcccagtaacgggatcctgatttttggcaaacaaaatgctgccagagacaatgcggattacagcgatgtcatgctcaccagcgaggaagaaatcaaaaccactaaccctgtggctacagaggaatacggtatcgtggcagataacttgcctgagcggacggcgatgagtcttccgggaactgtcaacagccagggggccttacccggtatggtctggcagaaccgggacgtgtacctgcagggtcccatctgggccaagattcctcacacggacggcaacttccacccgtctccgctgatgggcggctttggcctgaaacatcctccgcctcagatcctgatcaagaacacgcctgtacctgcggatcctccgaccaccttcaaccagtcaaagctgaactctttcatcacgcaatacagcaccggacaggtcagcgtggaaattgaatgggagctgcagaaggaaaacagcaagcgctggaaccccgagatccagtacacctccaactactacaaatctacaagtgtggactttgctgttaatacagaaggcgtgtactctgaaccccgccccattggcacccgttacctcacccgtaatctg

SEQ ID NO: 5217 - protein, 738 aa, synthetic construct
  REGION 1..738: note = Description of Artificial Sequence: Synthetic polypeptide
MAADGYLPDWLEDNLSEGIREWWALKPGAPKPKANQQKQDDGRGLVLPGYKYLGPFNGLDKGEPVNAADAAALEHDKAYDQQLQAGDNPYLRYNHADAEFQERLQEDTSFGGNLGRAVFQAKKRVLEPLGLVEEGAKTAPGKKRPVEPSPQRSPDSSTGIGKKGQQPARKRLNFGQTGDSESVPDPQPLGEPPAAPSGVGPNTMAAGGGAPMADNNEGADGVGSSSGNWHCDSTWLGDRVITTSTRTWALPTYNNHLYKQISNGTSGGATNDNTYFGYSTPWGYFDFNRFHCHFSPRDWQRLINNNWGFRPKRLSFKLFNIQVKEVTQNEGTKTIANNLTSTIQVFTDSEYQLPYVLGSAHQGCLPPFPADVFMIPQYGYLTLNNGSQAVGRSSFYCLEYFPSQMLRTGNNFQFTYTFEDVPFHSSYAHSQSLDRLMNPLIDQYLYYLSRTQTTGGTANTQTLGFSQGGPNTMANQAKNWLPGPCYRQQRVSTTTGQNNNSNFAWTAGTKYHLNGRNSLANPGIAMATHKDDEERFFPSNGILIFGKQNAARDNADYSDVMLTSEEEIKTTNPVATEEYGIVADNLPERTAMSLPGTVNSQGALPGMVWQNRDVYLQGPIWAKIPHTDGNFHPSPLMGGFGLKHPPPQILIKNTPVPADPPTTFNQSKLNSFITQYSTGQVSVEIEWELQKENSKRWNPEIQYTSNYYKSTSVDFAVNTEGVYSEPRPIGTRYLTRNL

SEQ ID NO: 5218 - DNA, 2214 bp, synthetic construct
  misc_feature 1..2214: note = Description of Artificial Sequence: Synthetic polynucleotide
  source 1..2214: mol_type = other DNA
atggctgccgatggttatcttccagattggctcgaggacaacctctctgagggcattcgcgagtggtgggcgctgaaacctggagccccgaagcccaaagccaaccagcaaaagcaggacgacggccggggtctggtgcttcctggctacaagtacctcggacccttcaacggactcgacaagggggagcccgtcaacgcggcggacgcagcggccctcgagcacgacaaggcctacgaccagcagctgcaggcgggtgacaatccgtacctgcggtataaccacgccgacgccgagtttcaggagcgtctgcaagaagatacgtcttttgggggcaacctcgggcgagcagtcttccaggccaagaagcgggttctcgaacctctcggtctggttgaggaaggcgctaagacggctcctggaaagaagagaccggtagagccatcaccccagcgttctccagactcctctacgggcatcggcaagaaaggccaacagcccgccagaaaaagactcaattttggtcagactggcgactcagagtcagttccagaccctcaacctctcggagaacctccagcagcgccctctggtgtgggacctaatacaatggctgcaggcggtggcgcaccaatggcagacaataacgaaggcgccgacggagtgggtagttcctcgggaaattggcattgcgattccacatggctgggcgacagagtcatcaccaccagcacccgaacctgggccctgcccacctacaacaaccacctctacaagcaaatctccaacgggacatcgggaggagccaccaacgacaacacctacttcggctacagcaccccctgggggtattttgactttaacagattccactgccacttttcaccacgtgactggcagcgactcatcaacaacaactggggattccggcccaagagactcagcttcaagctcttcaacatccaggtcaaggaggtcacgcagaatgaaggcaccaagaccatcgccaataacctcaccagcaccatccaggtgtttacggactcggagtaccagctgccgtacgttctcggctctgcccaccagggctgcctgcctccgttcccggcggacgtgttcatgattccccagtacggctacctaacactcaacaacggtagtcaggccgtgggacgctcctccttctactgcctggaatactttccttcgcagatgctgagaaccggcaacaacttccagtttacttacaccttcgaggacgtgcctttccacagcagctacgcccacagccagagcttggaccggctgatgaatcctctgattgaccagtacctgtactacttgtctcggactcaaacaacaggaggcacggcaaatacgcagactctgggcttcagccaaggtgggcctaatacaatggccaatcaggcaaagaactggctgccaggaccctgttaccgccaacaacgcgtctcaacgacaaccgggcaaaacaacaatagcaactttgcctggactgctgggaccaaataccatctgaatggaagaaattcattggctaatcctggcatcgctatggcaacacacaaagacgacgaggagcgtttttttcccagtaacgggatcctgatttttggcaaacaaaatgctgccagagacaatgcggattacagcgatgtcatgctcaccagcgaggaagaaatcaaaaccactaaccctgtggctacagaggaatacggtatcgtggcagataacttgagttttagtcgtgcggttctttgtgatggaactgtcaacagccagggggccttacccggtatggtctggcagaaccgggacgtgtacctgcagggtcccatctgggccaagattcctcacacggacggcaacttccacccgtctccgctgatgggcggctttggcctgaaacatcctccgcctcagatcctgatcaagaacacgcctgtacctgcggatcctccgaccaccttcaaccagtcaaagctgaactctttcatcacgcaatacagcaccggacaggtcagcgtggaaattgaatgggagctgcagaaggaaaacagcaagcgctggaaccccgagatccagtacacctccaactactacaaatctacaagtgtggactttgctgttaatacagaaggcgtgtactctgaaccccgccccattggcacccgttacctcacccgtaatctg

SEQ ID NO: 5219 - protein, 738 aa, synthetic construct
  REGION 1..738: note = Description of Artificial Sequence: Synthetic polypeptide
MAADGYLPDWLEDNLSEGIREWWALKPGAPKPKANQQKQDDGRGLVLPGYKYLGPFNGLDKGEPVNAADAAALEHDKAYDQQLQAGDNPYLRYNHADAEFQERLQEDTSFGGNLGRAVFQAKKRVLEPLGLVEEGAKTAPGKKRPVEPSPQRSPDSSTGIGKKGQQPARKRLNFGQTGDSESVPDPQPLGEPPAAPSGVGPNTMAAGGGAPMADNNEGADGVGSSSGNWHCDSTWLGDRVITTSTRTWALPTYNNHLYKQISNGTSGGATNDNTYFGYSTPWGYFDFNRFHCHFSPRDWQRLINNNWGFRPKRLSFKLFNIQVKEVTQNEGTKTIANNLTSTIQVFTDSEYQLPYVLGSAHQGCLPPFPADVFMIPQYGYLTLNNGSQAVGRSSFYCLEYFPSQMLRTGNNFQFTYTFEDVPFHSSYAHSQSLDRLMNPLIDQYLYYLSRTQTTGGTANTQTLGFSQGGPNTMANQAKNWLPGPCYRQQRVSTTTGQNNNSNFAWTAGTKYHLNGRNSLANPGIAMATHKDDEERFFPSNGILIFGKQNAARDNADYSDVMLTSEEEIKTTNPVATEEYGIVADNLSFSRAVLCDGTVNSQGALPGMVWQNRDVYLQGPIWAKIPHTDGNFHPSPLMGGFGLKHPPPQILIKNTPVPADPPTTFNQSKLNSFITQYSTGQVSVEIEWELQKENSKRWNPEIQYTSNYYKSTSVDFAVNTEGVYSEPRPIGTRYLTRNL

SEQ ID NO: 5220 - DNA, 2215 bp, synthetic construct
  misc_feature 1..2215: note = Description of Artificial Sequence: Synthetic polynucleotide
  source 1..2215: mol_type = other DNA
atggctgccgatggttatcttccagattggctcgaggacactctctctgaaggaataagacagtggtggaagctcaaacctggcccaccaccaccaaagcccgcagagcggcataaggacgacagcaggggtcttgtgcttcctgggtacaagtacctcggacccttcaacggactcgacaagggagagccggtcaacgaggcagacgccgcggccctcgagcacgacaaagcctacgaccggcagctcgacagcggagacaacccgtacctcaagtacaaccacgccgacgccgagttccaggagcggctcaaagaagatacgtcttttgggggcaacctcgggcgagcagtcttccaggccaaaaagaggcttcttgaacctcttggtctggttgaggaagcggctaagacggctcctggaaagaagaggcctgtagagcactctcctgtggagccagactcctcctcgggaaccggaaaggcgggccagcagcctgcaagaaaaagattgaattttggtcagactggagacgcagactcagtcccagaccctcaaccaatcggagaacctcccgcagccccctcaggtgtgggatctcttacaatggctgcaggcggtggcgcaccaatggcagacaataacgagggcgccgacggagtgggtaattcctcgggaaattggcattgcgattccacatggatgggcgacagagtcatcaccaccagcacccgaacctgggccctgcccacctacaacaaccacctctacaagcaaatctccaacagcacatctggaggatcttcaaatgacaacgcctacttcggctacagcaccccctgggggtattttgactttaacagattccactgccacttttcaccacgtgactggcagcgactcatcaacaacaactggggattccggcccaagagactcagcttcaagctcttcaacatccaggtcaaggaggtcacgcagaatgaaggcaccaagaccatcgccaataacctcaccagcaccatccaggtgtttacggactcggagtaccagctgccgtacgttctcggctctgcccaccagggctgcctgcctccgttcccggcggacgtgttcatgattccccagtacggctacctaacactcaacaacggtagtcaggccgtgggacgctcctccttctactgcctggaatactttccttcgcagatgctgagaaccggcaacaacttccagtttacttacaccttcgaggacgtgcctttccacagcagctacgcccacagccagagcttggaccggctgatgaatcctctgattgaccagtacctgtactacttgtctcggactcaaacaacaggaggcacgacaaatacgcagactctgggcttcagccaaggtgggcctaatacaatggccaatcaggcaaagaactggctgccaggaccctgttaccgccagcagcgagtatcaaagacatctgcggataacaacaacagtgaatactcgtggactggagctaccaagtaccacctcaatggcagagactctctggtgaatccgggcccggccatggcaagccacaaggacgatgaagaaaagtttttttcctcagagcggggttctcatctttgggaagcaaggctcagagaaaacaaatgtggacattgaaaaggtcatgattacagacgaagaggaaatcaggacaaccaatcccgtggctacggagcagtatggttctgtatctaccaacctccagagaggcaacagacaagcagctaccgcagatgtcaacacacaaggcgttcttccaggcatggtctggcaggacagagatgtgtaccttcaggggcccatctgggcaaagattccacacacggacggacattttcacccctctcccctcatgggtggattcggacttaaacaccctccgcctcagatcctgatcaagaacacgcctgtacctgcggatcctccgaccaccttcaaccagtcaaagctgaactctttcatcacccagtattctactggccaagtcagcgtggagatcgagtgggagctgcagaaggaaaacagcaagcgctggaaccccgagatccagtacacctccaactactacaaatctacaagtgtggactttgctgttaatacagaaggcgtgtactctgaaccccgccccattggcacccgttacctcacccgtaatctgtaa

SEQ ID NO: 5221 - protein, 737 aa, synthetic construct
  REGION 1..737: note = Description of Artificial Sequence: Synthetic polypeptide
MAADGYLPDWLEDTLSEGIRQWWKLKPGPPPPKPAERHKDDSRGLVLPGYKYLGPFNGLDKGEPVNEADAAALEHDKAYDRQLDSGDNPYLKYNHADAEFQERLKEDTSFGGNLGRAVFQAKKRLLEPLGLVEEAAKTAPGKKRPVEHSPVEPDSSSGTGKAGQQPARKRLNFGQTGDADSVPDPQPIGEPPAAPSGVGSLTMAAGGGAPMADNNEGADGVGNSSGNWHCDSTWMGDRVITTSTRTWALPTYNNHLYKQISNSTSGGSSNDNAYFGYSTPWGYFDFNRFHCHFSPRDWQRLINNNWGFRPKRLSFKLFNIQVKEVTQNEGTKTIANNLTSTIQVFTDSEYQLPYVLGSAHQGCLPPFPADVFMIPQYGYLTLNNGSQAVGRSSFYCLEYFPSQMLKTGNNFQFTYTFEDVPFHSSYAHSQSLDRLMNPLIDQYLYYLSRTQTTGGTTNTQTLGFSQGGPNTMANQAKNWLPGPCYRQQRVSKTSADNNNSEYSWTGATKYHLNGRDSLVNPGPAMASHKDDEEKFFPQSGVLIFGKQGSEKTNVDIEKVMITDEEEIRTTNPVATEQYGSVSTNLQRGNRQAATADVNTQGVLPGMVWQDRDVYLQGPIWAKIPHTDGHFHPSPLMGGFGLKHPPPQILIKNTPVPADPPTTFNQSKLNSFITQYSTGQVSVEIEWELQKENSKRWNPEIQYTSNYYKSTSVDFAVNTEGVYSEPRPIGTRYLTRNL

SEQ ID NO: 5222 - protein, 737 aa, synthetic construct
  REGION 1..737: note = Description of Artificial Sequence: Synthetic polypeptide
MAADGYLPDWLEDTLSEGIRQWWKLKPGPPPPKPAERHKDDSRGLVLPGYKYLGPFNGLDKGEPVNEADAAALEHDKAYDRQLDSGDNPYLKYNHADAEFQERLKEDTSFGGNLGRAVFQAKKRLLEPLGLVEEAAKTAPGKKRPVEHSPVEPDSSSGTGKAGQQPARKRLNFGQTGDADSVPDPQPIGEPPAAPSGVGSLTMAAGGGAPMADNNEGADGVGNSSGNWHCDSTWMGDRVITTSTRTWALPTYNNHLYKQISNSTSGGSSNDNAYFGYSTPWGYFDFNRFHCHFSPRDWQRLINNNWGFRPKRLSFKLFNIQVKEVTQNEGTKTIANNLTSTIQVFTDSEYQLPYVLGSAHQGCLPPFPADVFMIPQYGYLTLNNGSQAVGRSSFYCLEYFPSQMLKTGNNFQFTYTFEDVPFHSSYAHSQSLDRLMNPLIDQYLYYLSRTQTTGGTTNTQTLGFSQGGPNTMANQAKNWLPGPCYRQQRVSKTSADNNNSEYSWTGATKYHLNGRDSLVNPGPAMASHKDDEEKFFPQSGVLIFGKQGSEKTNVDIEKVMITDEEEIRTTNPVATEQYGSVSTNLQQGNTQAATADVNTQGVLPGMVWQDRDVYLQGPIWAKIPHTDGHFHPSPLMGGFGLKHPPPQILIKNTPVPADPPTTFNQSKLNSFITQYSTGQVSVEIEWELQKENSKRWNPEIQYTSNYYKSTSVDFAVNTEGVYSEPRPIGTRYLTRNL

SEQ ID NO: 5223 - protein, 737 aa, synthetic construct
  REGION 1..737: note = Description of Artificial Sequence: Synthetic polypeptide
MAADGYLPDWLEDTLSEGIRQWWKLKPGPPPPKPAERHKDDSRGLVLPGYKYLGPFNGLDKGEPVNEADAAALEHDKAYDRQLDSGDNPYLKYNHADAEFQERLKEDTSFGGNLGRAVFQAKKRLLEPLGLVEEAAKTAPGKKRPVEHSPVEPDSSSGTGKAGQQPARKRLNFGQTGDADSVPDPQPIGEPPAAPSGVGSLTMAAGGGAPMADNNEGADGVGNSSGNWHCDSTWMGDRVITTSTRTWALPTYNNHLYKQISNSTSGGSSNDNAYFGYSTPWGYFDFNRFHCHFSPRDWQRLINNNWGFRPKRLSFKLFNIQVKEVTQNEGTKTIANNLTSTIQVFTDSEYQLPYVLGSAHQGCLPPFPADVFMIPQYGYLTLNNGSQAVGRSSFYCLEYFPSQMLRTGNNFQFTYTFEDVPFHSSYAHSQSLDRLMNPLIDQYLYYLSRTQTTGGTTNTQTLGFSQGGPNTMANQAKNWLPGPCYRQQRVSKTSADNNNSEYSWTGATKYHLNGRDSLVNPGPAMASHKDDEEKFFPQSGVLIFGKQGSEKTNVDIEKVMITDEEEIRTTNPVATEQYGSVSTNLQQGNTQAATADVNTQGVLPGMVWQDRDVYLQGPIWAKIPHTDGHFHPSPLMGGFGLKHPPPQILIKNTPVPADPPTTFNQSKLNSFITQYSTGQVSVEIEWELQKENSKRWNPEIQYTSNYYKSTSVDFAVNTEGVYSEPRPIGTRYLTRNL

SEQ ID NO: 5224 - DNA, 2214 bp, synthetic construct
  misc_feature 1..2214: note = Description of Artificial Sequence: Synthetic polynucleotide
  source 1..2214: mol_type = other DNA
atggctgccgatggttatcttccagattggctcgaggacaaccttagtgaaggaattcgcgagtggtgggctttgaaacctggagcccctcaacccaaggcaaatcaacaacatcaagacaacgctcgaggtcttgtgcttccgggttacaaataccttggacccggcaacggactcgacaagggggagccggtcaacgcagcagacgcggcggccctcgagcacgacaaggcctacgaccagcagctgcaggcgggtgacaatccgtacctgcggtataaccacgccgacgccgagtttcaggagcgtctgcaagaagatacgtcttttgggggcaaccttggcagagcagtcttccaggccaaaaagaggatccttgagcctcttggtctggttgaggaagcagctaaaacggctcctggaaagaagaggcctgtagatcagtctcctcaggaaccggactcatcatctggtgttggcaaatcgggcaaacagcctgccagaaaaagactaaatttcggtcagactggcgactcagagtcagtcccagaccctcaacctctcggagaaccaccagcagcccccacaagtttgggatctaatacaatggcttcaggcggtggcgcaccaatggcagacaataacgagggtgccgatggggtgggtagttcctcgggaaattggcattgcgattcccaatggctgggggacagagtcatcaccaccagcacccgaacctgggccctgcccacctacaacaatcacctctacaagcaaatctccaacgggacatcgggaggagccaccaacgacaacacctacttcggctacagcaccccctgggggtattttgactttaacagattccactgccacttttcaccacgtgactggcagcgactcatcaacaacaactggggattccggcccaagagactcagcttcaagctcttcaacatccaggtcaaggaggtcacgcagaatgaaggcaccaagaccatcgccaataacctcaccagcaccatccaggtgtttacggactcggagtaccagctgccgtacgttctcggctctgcgcaccagggctgcctccctccgttcccggcggacgtgttcatgattccgcaatacggctacctgacgctcaacaatggcagccaagccgtgggacgttcatccttttactgcctggaatatttcccttctcagatgctgagaacgggcaacaactttaccttcagctacacctttgaggaagtgcctttccacagcagctacgcgcacagccagagcttggaccggctgatgaatcctctgattgaccagtacctgtactacttgtctcggactcaaacaacaggaggcacggcaaatacgcagactctgggcttcagccaaggtgggcctaatacaatggccaatcaggcaaagaactggctgccaggaccctgttaccgccaacaacgcgtctcaacgacaaccgggcaaaacaacaatagcaactttgcctggactgctgggaccaaataccatctgaatggaagaaattcattggctaatcctggcatcgctatggcaacacacaaagacgacgaggagcgtttttttcccagtaacgggatcctgatttttggcaaacaaaatgctgccagagacaatgcggattacagcgatgtcatgctcaccagcgaggaagaaatcaaaaccactaaccctgtggctacagaggaatacggtatcgtggcagataacttgcagcagcaaaacacggctcctcaaattggaactgtcaacagccagggggccttacccggtatggtctggcagaaccgggacgtgtacctgcagggtcccatctgggccaagattcctcacacggacggcaacttccacccgtctccgctgatgggcggctttggcctgaaacatcctccgcctcagatcctgatcaagaacacgcctgtacctgcggatcctccgaccaccttcaaccagtcaaagctgaactctttcatcacgcaatacagcaccggacaggtcagcgtggagatcgagtgggagctgcagaaggaaaacagcaagcgctggaacccggagatccagtacacttccaactattacaagtctaataatgttgaatttgctgttaatactgaaggtgtatatagtgaaccccgccccattggcaccagatacctgactcgtaatctgtaa

SEQ ID NO: 5225 - protein, 737 aa, synthetic construct
  REGION 1..737: note = Description of Artificial Sequence: Synthetic polypeptide
MAADGYLPDWLEDNLSEGIREWWALKPGAPQPKANQQHQDNARGLVLPGYKYLGPGNGLDKGEPVNAADAAALEHDKAYDQQLQAGDNPYLRYNHADAEFQERLQEDTSFGGNLGRAVFQAKKRILEPLGLVEEAAKTAPGKKRPVDQSPQEPDSSSGVGKSGKQPARKRLNFGQTGDSESVPDPQPLGEPPAAPTSLGSNTMASGGGAPMADNNEGADGVGSSSGNWHCDSQWLGDRVITTSTRTWALPTYNNHLYKQISNGTSGGATNDNTYFGYSTPWGYFDFNRFHCHFSPRDWQRLINNNWGFRPKRLSFKLFNIQVKEVTQNEGTKTIANNLTSTIQVFTDSEYQLPYVLGSAHQGCLPPFPADVFMIPQYGYLTLNNGSQAVGRSSFYCLEYFPSQMLRTGNNFTFSYTFEEVPFHSSYAHSQSLDRLMNPLIDQYLYYLSRTQTTGGTANTQTLGFSQGGPNTMANQAKNWLPGPCYRQQRVSTTTGQNNNSNFAWTAGTKYHLNGRNSLANPGIAMATHKDDEERFFPSNGILIFGKQNAARDNADYSDVMLTSEEEIKTTNPVATEEYGIVADNLQQQNTAPQIGTVNSQGALPGMVWQNRDVYLQGPIWAKIPHTDGNFHPSPLMGGFGLKHPPPQILIKNTPVPADPPTTFNQSKLNSFITQYSTGQVSVEIEWELQKENSKRWNPEIQYTSNYYKSNNVEFAVNTEGVYSEPRPIGTRYLTRNL

SEQ ID NO: 5226 - DNA, 2211 bp, synthetic construct
  misc_feature 1..2211: note = Description of Artificial Sequence: Synthetic polynucleotide
  source 1..2211: mol_type = other DNA
atggctgccgatggttatcttccagattggctcgaggacaacctctctgagggcattcgcgagtggtgggacttgaaacctggagccccgaagcccaaagccaaccagcaaaagcaggacgacggccggggtctggtgcttcctggctacaagtacctcggacccttcaacggactcgacaagggggagcccgtcaacgcggcggacgcagcggccctcgagcacgacaaggcctacgaccagcagctcaaagcgggtgacaatccgtacctgcggtataaccacgccgacgccgagtttcaggagcgtctgcaagaagatacgtcttttgggggcaacctcgggcgagcagtcttccaggccaagaagcgggttctcgaacctctcggtctggttgaggaaggcgctaagacggctcctggaaagaaacgtccggtagagcagtcgccacaagagccagactcctcctcgggcatcggcaagacaggccagcagcccgctaaaaagagactcaattttggtcagactggcgactcagagtcagtccccgacccacaacctctcggagaacctccagcaacccccgctgctgtgggacctactacaatggcttcaggcggtggcgcaccaatggcagacaataacgaaggcgccgacggagtgggtaatgcctcaggaaattggcattgcgattccacatggctgggcgacagagtcatcaccaccagcacccgaacatgggccttgcccacctataacaaccacctctacaagcaaatctccagtgcttcaacgggggccagcaacgacaaccactacttcggctacagcaccccctgggggtattttgatttcaacagattccactgccatttctcaccacgtgactggcagcgactcatcaacaacaattggggattccggcccaagagactcaacttcaagctcttcaacatccaagtcaaggaggtcacgacgaatgatggcgtcacgaccatcgctaataaccttaccagcacggttcaagtcttctcggactcggagtaccagctgccgtacgttctcggctctgcccaccagggctgcctgcctccgttcccggcggacgtgttcatgattccccagtacggctacctaacactcaacaacggtagtcaggccgtgggacgctcctccttctactgcctggaatactttccttcgcagatgctgagaaccggcaacaacttccagtttacttacaccttcgaggacgtgcctttccacagcagctacgcccacagccagagcttggaccggctgatgaatcctctgattgaccagtacctgtactacttgtctcggactcaaacaacaggaggcacggcaaatacgcagactctgggcttcagccaaggtgggcctaatacaatggccaatcaggcaaagaactggctgccaggaccctgttaccgccaacaacgcgtctcaacgacaaccgggcaaaacaacaatagcaattttacctggactggtgcttcaaaatataacctcaatgggcgtgaatccatcatcaaccctggcactgctatggcctcacacaaagacgacgaagacaagttctttcccatgagcggtgtcatgatttttggaaaagagagcgccggagcttcaaacactgcattggacaatgtcatgattacagacgaagaggaaattaaagccactaaccctgtggccaccgaaagatttgggaccgtggcagtcaatttccagagcagcagcacagaccctgcgaccggagatgtgcatgctatgggagcattacctggcatggtgtggcaagatagagacgtgtacctgcagggtcccatttgggccaaaattcctcacacagatggacactttcacccgtctcctcttatgggcggctttggactcaagaacccgcctcctcagatcctcatcaaaaacacgcctgttcctgcgaatcctccggcggagttttcagctacaaagtttgcttcattcatcacccaatactccacaggacaagtgagtgtggaaattgaatgggagctgcagaaagaaaacagcaagcgctggaatcccgaagtgcagtacacatccaattatgcaaaatctgccaacgttgattttactgtggacaacaatggactttatactgagcctcgccccattggcacccgttacctcacccgtcccctgtaa

SEQ ID NO: 5227 - protein, 736 aa, synthetic construct
  REGION 1..736: note = Description of Artificial Sequence: Synthetic polypeptide
MAADGYLPDWLEDNLSEGIREWWDLKPGAPKPKANQQKQDDGRGLVLPGYKYLGPFNGLDKGEPVNAADAAALEHDKAYDQQLKAGDNPYLRYNHADAEFQERLQEDTSFGGNLGRAVFQAKKRVLEPLGLVEEGAKTAPGKKRPVEQSPQEPDSSSGIGKTGQQPAKKRLNFGQTGDSESVPDPQPLGEPPATPAAVGPTTMASGGGAPMADNNEGADGVGNASGNWHCDSTWLGDRVITTSTRTWALPTYNNHLYKQISSASTGASNDNHYFGYSTPWGYFDFNRFHCHFSPRDWQRLINNNWGFRPKRLNFKLFNIQVKEVTTNDGVTTIANNLTSTVQVFSDSEYQLPYVLGSAHQGCLPPFPADVFMIPQYGYLTLNNGSQAVGRSSFYCLEYFPSQMLRTGNNFQFTYTFEDVPFHSSYAHSQSLDRLMNPLIDQYLYYLSRTQTTGGTANTQTLGFSQGGPNTMANQAKNWLPGPCYRQQRVSTTTGQNNNSNFTWTGASKYNLNGRESIINPGTAMASHKDDEDKFFPMSGVMIFGKESAGASNTALDNVMITDEEEIKATNPVATERFGTVAVNFQSSSTDPATGDVHAMGALPGMVWQDRDVYLQGPIWAKIPHTDGHFHPSPLMGGFGLKNPPPQILIKNTPVPANPPAEFSATKFASFITQYSTGQVSVEIEWELQKENSKRWNPEVQYTSNYAKSANVDFTVDNNGLYTEPRPIGTRYLTRPL

SEQ ID NO: 5228 - DNA, 2211 bp, synthetic construct
  misc_feature 1..2211: note = Description of Artificial Sequence: Synthetic polynucleotide
  source 1..2211: mol_type = other DNA
atggctgctgacggttatcttccagattggctcgaggacaacctttctgaaggcattcgagagtggtgggcgctgcaacctggagcccctaaacccaaggcaaatcaacaacatcaggacaacgctcggggtcttgtgcttccgggttacaaatacctcggacccggcaacggactcgacaagggggaacccgtcaacgcagcggacgcggcagccctcgagcacgacaaggcctacgaccagcagctcaaggccggtgacaacccctacctcaagtacaaccacgccgacgccgagttccaggagcggctcaaagaagatacgtcttttgggggcaacctcgggcgagcagtcttccaggccaaaaagaggcttcttgaacctcttggtctggttgaggaagcggctaagacggctcctggaaagaagaggcctgtagatcagtctcctcaggaaccggactcatcatctggtgttggcaaatcgggcaaacagcctgccagaaaaagactaaatttcggtcagactggcgactcagagtcagtcccagaccctcaacctctcggagaaccaccagcagcccccacaagtttgggatctaatacaatggcttcaggcggtggcgcaccaatggcagacaataacgagggtgccgatggagtgggtaattcctcaggaaattggcattgcgattcccaatggctgggcgacagagtcatcaccaccagcaccagaacctgggccctgcccacttacaacaaccatctctacaagcaaatctccagccaatcaggagcttcaaacgacaaccactactttggctacagcaccccttgggggtattttgactttaacagattccactgccacttctcaccacgtgactggcagcgactcattaacaacaactggggattccggcccaagaaactcagcttcaagctcttcaacatccaagttaaagaggtcacgcagaacgatggcacgacgactattgccaataaccttaccagcacggttcaagtgtttacggactcggagtatcagctcccgtacgtgctcgggtcggcgcaccaaggctgtctcccgccgtttccagcggacgtcttcatggtccctcagtatggatacctcaccctgaacaacggaagtcaagcggtgggacgctcatccttttactgcctggagtacttcccttcgcagatgctaaggactggaaataacttccaattcagctataccttcgaggatgtaccttttcacagcagctacgctcacagccagagtttggatcgcttgatgaatcctcttattgatcagtatctgtactacctgaacagaacgcaaggaacaacctctggaacaaccaaccaatcacggctgctttttagccaggctgggcctcagtctatgtctttgcaggccagaaattggctacctgggccctgctaccggcaacagagactttcaaagactgctaacgacaacaacaacagtaactttccttggacagcggccagcaaatatcatctcaatggccgcgactcgctggtgaatccaggaccagctatggccagtcacaaggacgatgaagaaaaatttttccctatgcacggcaatctaatatttggcaaagaagggacaacggcaagtaacgcagaattagataatgtaatgattacggatgaagaagagattcgtaccaccaatcctgtggcaacagagcagtatggaactgtggcaaataacttgcagagctcaaatacagctcccacgactagaactgtcaatgatcagggggccttacctggcatggtgtggcaagatcgtgacgtgtaccttcaaggacctatctgggcaaagattcctcacacggatggacactttcatccttctcctctgatgggaggctttggactgaaacatccgcctcctcaaatcatgatcaaaaatactccggtaccggcaaatcctccgacgactttcagcccggccaagtttgcttcatttatcactcagtactccactggacaggtcagcgtggaaattgagtgggagctacagaaagaaaacagcaaacgttggaatccagagattcagtacacttccaactacaacaagtctgttaatgtggactttactgtagacactaatggtgtttatagtgaacctcgccccattggcacccgttaccttacccgtcccctgtaa

SEQ ID NO: 5229 - protein, 736 aa, synthetic construct
  REGION 1..736: note = Description of Artificial Sequence: Synthetic polypeptide
MAADGYLPDWLEDNLSEGIREWWALQPGAPKPKANQQHQDNARGLVLPGYKYLGPGNGLDKGEPVNAADAAALEHDKAYDQQLKAGDNPYLKYNHADAEFQERLKEDTSFGGNLGRAVFQAKKRLLEPLGLVEEAAKTAPGKKRPVDQSPQEPDSSSGVGKSGKQPARKRLNFGQTGDSESVPDPQPLGEPPAAPTSLGSNTMASGGGAPMADNNEGADGVGNSSGNWHCDSQWLGDRVITTSTRTWALPTYNNHLYKQISSQSGASNDNHYFGYSTPWGYFDFNRFHCHFSPRDWQRLINNNWGFRPKKLSFKLFNIQVKEVTQNDGTTTIANNLTSTVQVFTDSEYQLPYVLGSAHQGCLPPFPADVFMVPQYGYLTLNNGSQAVGRSSFYCLEYFPSQMLRTGNNFQFSYTFEDVPFHSSYAHSQSLDRLMNPLIDQYLYYLNRTQGTTSGTTNQSRLLFSQAGPQSMSLQARNWLPGPCYRQQRLSKTANDNNNSNFPWTAASKYHLNGRDSLVNPGPAMASHKDDEEKFFPMHGNLIFGKEGTTASNAELDNVMITDEEEIRTTNPVATEQYGTVANNLQSSNTAPTTRTVNDQGALPGMVWQDRDVYLQGPIWAKIPHTDGHFHPSPLMGGFGLKHPPPQIMIKNTPVPANPPTTFSPAKFASFITQYSTGQVSVEIEWELQKENSKRWNPEIQYTSNYNKSVNVDFTVDTNGVYSEPRPIGTRYLTRPL

SEQ ID NO: 5230 - DNA, 2211 bp, synthetic construct
  misc_feature 1..2211: note = Description of Artificial Sequence: Synthetic polynucleotide
  source 1..2211: mol_type = other DNA
atggctgccgatggttatcttccagattggctcgaggacaaccttagtgaaggaattcgcgagtggtgggctttgaaacctggagcccctcaacccaaggcaaatcaacaacatcaagacaacgctcgaggtcttgtgcttccgggttacaaataccttggacccggcaacggactcgacaagggggagccggtcaacgcagcagacgcggcggccctcgagcacgacaaggcctacgaccagcagctcaaggccggagacaacccgtacctcaagtacaaccacgccgacgccgagttccaggagcggctcaaagaagatacgtcttttgggggcaacctcgggcgagcagtcttccaggccaaaaagaggcttcttgaacctcttggtctggttgaggaagcggctaagacggctcctggaaagaagagaccggtagagccatcaccccagcgttctccagactcctctacgggcatcggcaagaaaggccaacagcccgctaaaaagagactcaattttggtcagactggcgactcagagtcagtccccgacccacaacctctcggagaacctccagcaacccccgctgctgtgggacctactacaatggcttcaggcggtggcgcaccaatggcagacaataacgagggtgccgatggagtgggtaattcctcaggaaattggcattgcgattcccaatggctgggcgacagagtcatcaccaccagcaccagaacctgggccctgcccacttacaacaaccatctctacaagcaaatctccagccaatcaggagcttcaaacgacaaccactactttggctacagcaccccttgggggtattttgactttaacagattccactgccacttttcaccacgtgactggcaaagactcatcaacaacaactggggattccgacccaagagactcaacttcaagctcttcaacatccaagtcaaggaggtcacgacgaatgatggcgtcacgaccatcgctaataaccttaccagcacggttcaagtcttctcggactcggagtaccagttgccgtacgtcctcggctctgcgcaccagggctgcctccctccgttcccggcggacgtgttcatgattccgcagtacggctacctaacgctcaacaatggcagccaagccgtgggacgttcatccttttactgcctggaatatttcccttctcagatgctgagaacgggcaacaactttaccttcagctacacttttgaggacgttcctttccacagcagctacgctcacagccagagtctggaccgtctcatgaatcctctcatcgaccagtacctgtattacttgagcagaacaaacactccaagtggaaccaccacgcagtcaaggcttcagttttctcaggccggagcgagtgacattcgggaccagtctaggaactggcttcctggaccctgttaccgccagcagcgcgtttctaaaacaaaaacagacaacaacaacagcaattttacctggactggtgcttcaaaatataaccttaatgggcgtgaatctataatcaaccctggcactgctatggcctcacacaaagacgacgaagacaagttctttcccatgagcggtgtcatgatttttggaaaagagagcgccggagcttcaaacactgcattggacaatgtcatgattacagacgaagaggaaattaaagccactaaccctgtggccaccgaaagatttgggaccgtggcagtcaatttccagagcagcagcacagaccctgcgaccggagatgtgcatgttatgggagccttacctggaatggtgtggcaagacagagacgtatacctgcagggtcctatttgggccaaaattcctcacacggatggacactttcacccgtctcctcttatgggcggctttggactcaagaacccgcctcctcagatcctcatcaaaaacacgcctgttcctgcgaatcctccggcggagttttcagctacaaagtttgcttcattcatcacccaatactccacaggacaagtgagtgtggaaattgaatgggagctgcagaaagaaaacagcaagcgctggaatcccgaagtgcagtacacatccaattatgcaaaatctgccaacgttgattttactgtggacaacaatggactttatactgagcctcgccccattggcacccgttaccttacccgtcccctgtaa

SEQ ID NO: 5231 - protein, 736 aa, synthetic construct
  REGION 1..736: note = Description of Artificial Sequence: Synthetic polypeptide
MAADGYLPDWLEDNLSEGIREWWALKPGAPQPKANQQHQDNARGLVLPGYKYLGPGNGLDKGEPVNAADAAALEHDKAYDQQLKAGDNPYLKYNHADAEFQERLKEDTSFGGNLGRAVFQAKKRLLEPLGLVEEAAKTAPGKKRPVEPSPQRSPDSSTGIGKKGQQPAKKRLNFGQTGDSESVPDPQPLGEPPATPAAVGPTTMASGGGAPMADNNEGADGVGNSSGNWHCDSQWLGDRVITTSTRTWALPTYNNHLYKQISSQSGASNDNHYFGYSTPWGYFDFNRFHCHFSPRDWQRLINNNWGFRPKRLNFKLFNIQVKEVTTNDGVTTIANNLTSTVQVFSDSEYQLPYVLGSAHQGCLPPFPADVFMIPQYGYLTLNNGSQAVGRSSFYCLEYFPSQMLRTGNNFTFSYTFEDVPFHSSYAHSQSLDRLMNPLIDQYLYYLSRTNTPSGTTTQSRLQFSQAGASDIRDQSRNWLPGPCYRQQRVSKTKTDNNNSNFTWTGASKYNLNGRESIINPGTAMASHKDDEDKFFPMSGVMIFGKESAGASNTALDNVMITDEEEIKATNPVATERFGTVAVNFQSSSTDPATGDVHVMGALPGMVWQDRDVYLQGPIWAKIPHTDGHFHPSPLMGGFGLKNPPPQILIKNTPVPANPPAEFSATKFASFITQYSTGQVSVEIEWELQKENSKRWNPEVQYTSNYAKSANVDFTVDNNGLYTEPRPIGTRYLTRPL

SEQ ID NO: 5232 - DNA, 2211 bp, synthetic construct
  misc_feature 1..2211: note = Description of Artificial Sequence: Synthetic polynucleotide
  source 1..2211: mol_type = other DNA
atggctgccgatggttatcttccagattggctcgaggacaacctctctgagggcattcgcgagtggtgggacttgaaacctggagcccctaaacccaaggcaaatcaacaacatcaggacaacgctcgaggtcttgtgcttccgggttacaaataccttggacccggcaacggactcgacaagggggagccggtcaacgcagcagacgcggcggccctcgagcacgacaaggcctacgaccagcagctcaaggccggagacaacccgtacctcaagtacaaccacgccgacgccgagttccaggagcggctcaaagaagatacgtcttttgggggcaacctcgggcgagcagtcttccaggccaaaaagaggcttcttgaacctcttggtctggttgaggaagcggctaagacggctcctggaaagaagagaccggtagagccatcaccccagcgttctccagactcctctacgggcatcggcaagaaaggccaacagcccgctaaaaagagactcaattttggtcagactggcgactcagagtcagtccccgacccacaacctctcggagaacctccagcaacccccgctgctgtgggacctactacaatggcttcaggcggtggcgcaccaatggcagacaataacgagggtgccgatggagtgggtaattcctcaggaaattggcattgcgattcccaatggctgggcgacagagtcatcaccaccagcaccagaacctgggccctgcccacttacaacaaccatctctacaagcaaatctccagccaatcaggagcttcaaacgacaaccactactttggctacagcaccccttgggggtattttgactttaacagattccactgccacttttcaccacgtgactggcaaagactcatcaacaacaactggggattccgacccaagagactcaacttcaagctcttcaacatccaagtcaaggaggtcacgacgaatgatggcgtcacgaccatcgctaataaccttaccagcacggttcaagtcttctcggactcggagtaccagttgccgtacgtcctcggctctgcgcaccagggctgcctccctccgttcccggcggacgtgttcatgattccgcagtacggctacctaacgctcaacaatggcagccaagccgtgggacgttcatccttttactgcctggaatatttcccttctcagatgctgagaacgggcaacaactttaccttcagctacacttttgaggacgttcctttccacagcagctacgctcacagccagagtctggaccgtctcatgaatcccctcatcgaccagtacctgtattacttgagcagaacaaacactccaagtggaaccaccacgcagtcaaggcttcagttttctcaggccggagcgagtgacattcgggaccagtctaggaactggcttcctggaccctgttaccggcagcagcgcgtttctaaaacaaaaacagacaacaacaacagcaactttacctggactggtgcttcaaaatataaccttaatgggcgtgaatctataatcaaccctggcactgctatggcctcacacaaagacgacgaagacaagttctttcccatgagcggtgtcatgatttttggaaaggagagcgccggagcttcaaacactgcattggacaatgtcatgatcacagacgaagaggaaatcaaagccactaaccccgtggccaccgaaagatttgggactgtggcagtcaatctccagagcagcagcacagaccctgcgaccggagatgtgcatgttatgggagccttacctggaatggtgtggcaagacagagacgtgtacctgcagggtcctatttgggccaaaattcctcacacggatggacactttcacccgtctcctctcatgggcggctttggacttaagcacccgcctcctcagatcctcatcaaaaacacgcctgttcctgcgaatcctccggcagagttttcggctacaaagtttgcttcattcatcacccagtattccacaggacaagtgagtgtggaaattgaatgggagctgcagaaagaaaacagcaagcgctggaatcccgaagtgcagtacacatccaattatgcaaaatctgccaacgttgattttactgtggacaacaatggactttatactgagcctcgccccattggcacccgttacctcacccgtcccctgtaa

SEQ ID NO: 5233 - protein, 736 aa, synthetic construct
  REGION 1..736: note = Description of Artificial Sequence: Synthetic polypeptide
MAADGYLPDWLEDNLSEGIREWWDLKPGAPKPKANQQHQDNARGLVLPGYKYLGPGNGLDKGEPVNAADAAALEHDKAYDQQLKAGDNPYLKYNHADAEFQERLKEDTSFGGNLGRAVFQAKKRLLEPLGLVEEAAKTAPGKKRPVEPSPQRSPDSSTGIGKKGQQPAKKRLNFGQTGDSESVPDPQPLGEPPATPAAVGPTTMASGGGAPMADNNEGADGVGNSSGNWHCDSQWLGDRVITTSTRTWALPTYNNHLYKQISSQSGASNDNHYFGYSTPWGYFDFNRFHCHFSPRDWQRLINNNWGFRPKRLNFKLFNIQVKEVTTNDGVTTIANNLTSTVQVFSDSEYQLPYVLGSAHQGCLPPFPADVFMIPQYGYLTLNNGSQAVGRSSFYCLEYFPSQMLRTGNNFTFSYTFEDVPFHSSYAHSQSLDRLMNPLIDQYLYYLSRTNTPSGTTTQSRLQFSQAGASDIRDQSRNWLPGPCYRQQRVSKTKTDNNNSNFTWTGASKYNLNGRESIINPGTAMASHKDDEDKFFPMSGVMIFGKESAGASNTALDNVMITDEEEIKATNPVATERFGTVAVNLQSSSTDPATGDVHVMGALPGMVWQDRDVYLQGPIWAKIPHTDGHFHPSPLMGGFGLKHPPPQILIKNTPVPANPPAEFSATKFASFITQYSTGQVSVEIEWELQKENSKRWNPEVQYTSNYAKSANVDFTVDNNGLYTEPRPIGTRYLTRPL

SEQ ID NO: 5234 - DNA, 2214 bp, synthetic construct
  misc_feature 1..2214: note = Description of Artificial Sequence: Synthetic polynucleotide
  source 1..2214: mol_type = other DNA
atggctgccgatggttatcttccagattggctcgaggacaaccttagtgaaggaattcgcgagtggtgggctttgaaacctggagcccctcaacccaaggcaaatcaacaacatcaagacaacgctcgaggtcttgtgcttccgggttacaaataccttggacccggcaacggactcgacaagggggagccggtcaacgcagcagacgcggcggccctcgagcacgacaaggcctacgaccagcagctgcaggcgggtgacaatccgtacctgcggtataaccacgccgacgccgagtttcaggagcgtctgcaagaagatacgtcttttgggggcaaccttggcagagcagtcttccaggccaaaaagaggatccttgagcctcttggtctggttgaggaagcagctaaaacggctcctggaaagaagaggcctgtagatcagtctcctcaggaaccggactcatcatctggtgttggcaaatcgggcaaacagcctgccagaaaaagactaaatttcggtcagactggcgactcagagtcagtcccagaccctcaacctctcggagaaccaccagcagcccccacaagtttgggatctaatacaatggcttcaggcggtggcgcaccaatggcagacaataacgagggtgccgatggggtgggtagttcctcgggaaattggcattgcgattcccaatgactgggggacagagtcatcaccaccagcacccgaacctgggccctgcccacctacaacaatcacctctacaagcaaatctccaacgggacatcgggaggagccaccaacgacaacacctacttcggctacagcaccccctgggggtattttgactttaacagattccactgccacttttcaccacgtgactggcagcgactcatcaacaacaactggggattccggcccaagagactcagcttcaagctcttcaacatccaggtcaaggaggtcacgcagaatgaaggcaccaagaccatcgccaataacctcaccagcaccatccaggtgtttacggactcggagtaccagctgccgtacgttctcggctctgcgcaccagggctgcctccctccgttcccggcggacgtgttcatgattccgcaatacggctacctgacgctcaacaatggcagccaagccgtgggacgttcatccttttactgcctggaatatttcccttctcagatgctgagaacgggcaacaactttaccttcagctacacctttgaggaagtgcctttccacagcagctacgcgcacagccagagcttggaccggctgatgaatcctctgattgaccagtacctgtactacttgtctcggactcaaacaacaggaggcacggcaaatacgcagactctgggcttcagccaaggtgggcctaatacaatggccaatcaggcaaagaactggctgccaggaccctgttaccgccaacaacgcgtctcaacgacaaccgggcaaaacaacaatagcaactttgcctggactgctgggaccaaataccatctgaatggaagaaattcattggctaatcctggcatcgctatggcaacacacaaagacgacgaggagcgtttttttcccagtaacgggatcctgatttttggcaaacaaaatgctgccagagacaatgcggattacagcgatgtcatgctcaccagcgaggaagaaatcaaaaccactaaccctgtggctacagaggaatacggtatcgtggcagataacttgcagcagcaaaacacggctcctcaaattggaactgtcaacagccagggggccttacccggtatggtctggcagaaccgggacgtgtacctgcagggtcccatctgggccaagattcctcacacggacggcaacttccacccgtctccgctgatgggcggctttggcctgaaacatcctccgcctcagatcctgatcaagaacacgcctgtacctgcggatcctccgaccaccttcaaccagtcaaagctgaactctttcatcacgcaatacagcaccggacaggtcagcgtggagatcgagtgggagctgcagaaggaaaacagcaagcgctggaacccggagatccagtacacttccaactattacaagtctaataatgttgaatttgctgttaatactgaaggtgtatatagtgaaccccgccccattggcaccagatacctgactcgtaatctgtaa

SEQ ID NO: 5235 - protein, 736 aa, synthetic construct
  REGION 1..736: note = Description of Artificial Sequence: Synthetic polypeptide
MAADGYLPDWLEDNLSEGIREWWALKPGAPQPKANQQHQDNARGLVLPGYKYLGPGNGLDKGEPVNAADAAALEHDKAYDQQLQAGDNPYLRYNHADAEFQERLQEDTSFGGNLGRAVFQAKKRILEPLGLVEEAAKTAPGKKRPVDQSPQEPDSSSGVGKSGKQPARKRLNFGQTGDSESVPDPQPLGEPPAAPTSLGSNTMASGGGAPMADNNEGADGVGSSSGNWHCDSQLGDRVITTSTRTWALPTYNNHLYKQISNGTSGGATNDNTYFGYSTPWGYFDFNRFHCHFSPRDWQRLINNNWGFRPKRLSFKLFNIQVKEVTQNEGTKTIANNLTSTIQVFTDSEYQLPYVLGSAHQGCLPPFPADVFMIPQYGYLTLNNGSQAVGRSSFYCLEYFPSQMLRTGNNFTFSYTFEEVPFHSSYAHSQSLDRLMNPLIDQYLYYLSRTQTTGGTANTQTLGFSQGGPNTMANQAKNWLPGPCYRQQRVSTTTGQNNNSNFAWTAGTKYHLNGRNSLANPGIAMATHKDDEERFFPSNGILIFGKQNAARDNADYSDVMLTSEEEIKTTNPVATEEYGIVADNLQQQNTAPQIGTVNSQGALPGMVWQNRDVYLQGPIWAKIPHTDGNFHPSPLMGGFGLKHPPPQILIKNTPVPADPPTTFNQSKLNSFITQYSTGQVSVEIEWELQKENSKRWNPEIQYTSNYYKSNNVEFAVNTEGVYSEPRPIGTRYLTRNL

SEQ ID NO: 5236 - DNA, 2214 bp, synthetic construct
  misc_feature 1..2214: note = Description of Artificial Sequence: Synthetic polynucleotide
  source 1..2214: mol_type = other DNA
atggctgccgatggttatcttccagattggctcgaggacaaccttagtgaaggaattcgcgagtggtgggctttgaaacctggagcccctcaacccaaggcaaatcaacaacatcaagacaacgctcgaggtcttgtgcttccgggttacaaataccttggacccggcaacggactcgacaagggggagccggtcaacgcagcagacgcggcggccctcgagcacgacaaggcctacgaccagcagctgcaggcgggtgacaatccgtacctgcggtataaccacgccgacgccgagtttcaggagcgtctgcaagaagatacgtcttttgggggcaaccttggcagagcagtcttccaggccaaaaagaggatccttgagcctcttggtctggttgaggaagcagctaaaacggctcctggaaagaagaggcctgtagatcagtctcctcaggaaccggactcatcatctggtgttggcaaatcgggcaaacagcctgccagaaaaagactaaatttcggtcagactggcgactcagagtcagtcccagaccctcaacctctcggagaaccaccagcagcccccacaagtttgggatctaatacaatggcttcaggcggtggcgcaccaatggcagacaataacgagggtgccgatggggtgggtagttcctcgggaaattggcattgcgattcccaatggctgggggacagagtcatcaccaccagcacccgaacctgggccctgcccacctacaacaatcacctctacaagcaaatctccaacgggacatcgggaggagccaccaacgacaacacctacttcggctacagcaccccctgggggtattttgactttaacagattccactgccacttttcaccacgtgactggcagcgactcatcaacaacaactggggattccggcccaagagactcagcttcaagctcttcaacatccaggtcaaggaggtcacgcagaatgaaggcaccaagaccatcgccaataacctcaccagcaccatccaggtgtttacggactcggagtaccagctgccgtacgttctcggctctgcgcaccagggctgcctccctccgttcccggcggacgtgttcatgattccgcaatacggctacctgacgctcaacaatggcagccaagccgtgggacgttcatccttttactgcctggaatatttcccttctcagatgctgagaacgggcaacaactttaccttcagctacacctttgaggaagtgccttttcacagcagctacgcgcacagccagagcttggaccggctgatgaatcctctgattgaccagtacctgtactacttgtctcggactcaaacaacaggaggcacggcaaatacgcagactctgggcttcagccaaggtgggcctaatacaatggccaatcaggcaaagaactggctgccaggaccctgttaccgccaacaacgcgtctcaacgacaaccgggcaaaacaacaatagcaactttgcctggactgctgggaccaaataccatctgaatggaagaaattcattggctaatcctggcatcgctatggcaacacacaaagacgacgaggagcgtttttttcccagtaacgggatcctgatttttggcaaacaaaatgctgccagagacaatgcggattacagcgatgtcatgctcaccagcgaggaagaaatcaaaaccactaaccctgtggctacagaggaatacggtatcgtggcagataacttgcagcagcaaaacacggctcctcaaattggaactgtcaacagccagggggccttacccggtatggtctggcagaaccgggacgtgtacctgcagggtcccatctgggccaagattcctcacacggacggcaacttccacccgtctccgctgatgggcggctttggcctgaaacatcctccgcctcagatcctgatcaagaacacgcctgtacctgcggatcctccgaccaccttcaaccagtcaaagctgaactctttcatcacgcaatacagcaccggacaggtcagcgtggagatcgagtgggagctgcagaaggaaaacagcaagcgctggaacccggagatccagtacacttccaactattacaagtctaataatgttgaatttgctgttaatactgaaggtgtatatagtgaaccccgccccattggcaccagatacctgactcgtaatctgtaa

SEQ ID NO: 5237 - protein, 737 aa, synthetic construct; identical to SEQ ID NO: 5225
  REGION 1..737: note = Description of Artificial Sequence: Synthetic polypeptide

SEQ ID NO: 5238 - DNA, 2211 bp, synthetic construct
  misc_feature 1..2211: note = Description of Artificial Sequence: Synthetic polynucleotide
  source 1..2211: mol_type = other DNA
atggctgccgatggttatcttccagattggctcgaggacaacctctctgagggcattcgcgagtggtgggacttgaaacctggagcccctaaacccaaggcaaatcaacaacatcaggacaacgctcgaggtcttgtgcttccgggttacaaataccttggacccggcaacggactcgacaagggggagccggtcaacgcagcagacgcggcggccctcgagcacgacaaggcctacgaccagcagctcaaggccggagacaacccgtacctcaagtacaaccacgccgacgccgagttccaggagcggctcaaagaagatacgtcttttgggggcaacctcgggcgagcagtcttccaggccaaaaagaggcttcttgaacctcttggtctggttgaggaagcggctaagacggctcctggaaagaagagaccggtagagccatcaccccagcgttctccagactcctctacgggcatcggcaagaaaggccaacagcccgctaaaaagagactcaattttggtcagactggcgactcagagtcagtccccgacccacaacctctcggagaacctccagcaacccccgctgctgtgggacctactacaatggcttcaggcggtggcgcaccaatggcagacaataacgagggtgccgatggagtgggtaattcctcaggaaattggcattgcgattcccaatggctgggcgacagagtcatcaccaccagcaccagaacctgggccctgcccacttacaacaaccatctctacaagcaaatctccagccaatcaggagcttcaaacgacaaccactactttggctacagcaccccttgggggtattttgactttaacagattccactgccacttttcaccacgtgactggcaaagactcatcaacaacaactggggattccgacccaagagactcaacttcaagctcttcaacatccaagtcaaggaggtcacgacgaatgatggcgtcacgaccatcgctaataaccttaccagcacggttcaagtcttctcggactcggagtaccagttgccgtacgtcctcggctctgcgcaccagggctgcctccctccgttcccggcggacgtgttcatgattccgcagtacggctacctaacgctcaacaatggcagccaagccgtgggacgttcatccttttactgcctggaatatttcccttctcagatgctgagaacgggcaacaactttaccttcagctacacttttgaggacgttcctttccacagcagctacgctcacagccagagtctggaccgtctcatgaatcctctcatcgaccagtacctgtattacttgagcagaacaaacactccaagtggaaccaccacgcagtcaaggcttcagttttctcaggccggagcgagtgacattcgggaccagtctaggaactggcttcctggaccctgttaccgccagcagcgcgtttctaaaacaaaaacagacaacaacaacagcaattttacctggactggtgcttcaaaatataaccttaatgggcgtgaatctataatcaaccctggcactgctatggcctcacacaaagacgacgaagacaagttctttcccatgagcggtgtcatgatttttggaaaagagagcgccggagcttcaaacactgcattggacaatgtcatgattacagacgaagaggaaattaaagccactaaccctgtggccaccgaaagatttgggaccgtggcagtcaatttccagagcagcagcacagaccctgcgaccggagatgtgcatgctatgggagcattacctggcatggtgtggcaagatagagacgtgtacctgcagggtcccatttgggccaaaattcctcacacagatggacactttcacccgtctcctcttatgggcggctttggactcaagaacccgcctcctcagatcctcatcaaaaacacgcctgttcctgcgaatcctccggcggagttttcagctacaaagtttgcttcattcatcacccaatactccacaggacaagtgagtgtggaaattgaatgggagctgcagaaagaaaacagcaagcgctggaatcccgaagtgcagtacacatccaattatgcaaaatctgccaacgttgattttactgtggacaacaatggactttatactgagcctcgccccattggcacccgttaccttacccgtcccctgtaa

SEQ ID NO: 5239 - protein, 736 aa, synthetic construct
  REGION 1..736: note = Description of Artificial Sequence: Synthetic polypeptide
MAADGYLPDWLEDNLSEGIREWWDLKPGAPKPKANQQHQDNARGLVLPGYKYLGPGNGLDKGEPVNAADAAALEHDKAYDQQLKAGDNPYLKYNHADAEFQERLKEDTSFGGNLGRAVFQAKKRLLEPLGLVEEAAKTAPGKKRPVEPSPQRSPDSSTGIGKKGQQPAKKRLNFGQTGDSESVPDPQPLGEPPATPAAVGPTTMASGGGAPMADNNEGADGVGNSSGNWHCDSQWLGDRVITTSTRTWALPTYNNHLYKQISSQSGASNDNHYFGYSTPWGYFDFNRFHCHFSPRDWQRLINNNWGFRPKRLNFKLFNIQVKEVTTNDGVTTIANNLTSTVQVFSDSEYQLPYVLGSAHQGCLPPFPADVFMIPQYGYLTLNNGSQAVGRSSFYCLEYFPSQMLRTGNNFTFSYTFEDVPFHSSYAHSQSLDRLMNPLIDQYLYYLSRTNTPSGTTTQSRLQFSQAGASDIRDQSRNWLPGPCYRQQRVSKTKTDNNNSNFTWTGASKYNLNGRESIINPGTAMASHKDDEDKFFPMSGVMIFGKESAGASNTALDNVMITDEEEIKATNPVATERFGTVAVNFQSSSTDPATGDVHAMGALPGMVWQDRDVYLQGPIWAKIPHTDGHFHPSPLMGGFGLKNPPPQILIKNTPVPANPPAEFSATKFASFITQYSTGQVSVEIEWELQKENSKRWNPEVQYTSNYAKSANVDFTVDNNGLYTEPRPIGTRYLTRPL

SEQ ID NO: 5240 - DNA, 2211 bp, synthetic construct
  misc_feature 1..2211: note = Description of Artificial Sequence: Synthetic polynucleotide
  source 1..2211: mol_type = other DNA
atggctgccgatggttatcttccagattggctcgaggacaaccttagtgaaggaattcgcgagtggtgggcgctgaaacctggagccccgaagcccaaagccaaccagcaaaagcaggacgacggccggggtctggtgcttccgggttacaaatacctcggacccggtaacggactcgacaaaggagagccggtcaacgaggcggacgcggcagccctcgagcacgacaaggcctacgaccagcagctcaaagcgggtgacaatccgtacctgcggtataaccacgccgacgccgagtttcaggagcgtctgcaagaagatacgtcttttgggggcaacctcgggcgagcagtcttccaggccaagaagcgggttctcgaacctctcggtctggttgaggaaggcgctaagacggctcccggaaagaaacgtccggtagagcagtcgccacaagagccagactcctctacgggcatcggcaagaaaggccaacagcccgccagaaaaagactcaatttcggtcagactggcgactcagagtcagttccagaccctcaacctctcggagaacctccagcagcgccctctggtgtgggacctactacaatggcttcaggcggtggcgcaccaatggcagacaataacgaaggcgccgacggagtgggtaatgcctcaggaaattggcattgcgattccacatggctgggcgacagagtcatcaccaccagcacccgaacatgggccttgcccacctataacaaccacctctacaagcaaatctccagtgcttcaacgggggccagcaacgacaacacctacttcggctacagcaccccctgggggtattttgatttcaacagattccactgccatttctcaccacgtgactggcagcgactcatcaacaacaattggggattccggcccaagagactcaacttcaaactcttcaacatccaagtcaaggaggtcacgacgaatgatggcgtcacgaccatcgctaataaccttaccagcacggttcaagtcttctcggactcggagtaccagttgccgtacgtcctcggctctgcgcaccagggctgcctccctccgttcccggcggacgtgttcatgattccgcagtacggctacctaacgctcaacaatggcagccaggcagtgggacggtcatccttttactgcctggaatatttcccatcgcagatgctgagaacgggcaataactttaccttcagctacaccttcgaggacgtgcctttccacagcagctacgcgcacagccagagcctggaccggctgatgaatcctctcatcgaccagtacctgtattacctgaacagaactcagaatcagtccggaagtgcccaaaacaaggacttgctgtttagccgggggtctccagctggcatgtctgttcagcccaaaaactggctacctggaccctgttatcggcagcagcgcgtttctaaaacaaaaacagacaacaacaacagcaattttacctggactggtgcttcaaaatataacctcaatgggcgtgaatccatcatcaaccctggcactgctatggcctcacacaaagacgacgaagacaagttctttcccatgagcggtgtcatgatttttggaaaagagagcgccggagcttcaaacactgcattggacaatgtcatgattacagacgaagaggaaattaaagccactaaccctgtggccaccgaaagatttgggaccgtggcagtcaatttccagagcagcagcacagaccctgcgaccggagatgtgcatgttatgggagccttacctggaatggtgtggcaagacagagacgtatacctgcagggtcctatttgggccaaaattcctcacacagatggacactttcacccgtctcctcttatgggcggctttggactcaagaacccgcctcctcagatcctcatcaaaaacacgcctgttcctgcgaatcctccggcagagttttcggctacaaagtttgcttcattcatcacccagtattccacaggacaagtgagcgtggagattgaatgggagctgcagaaagaaaacagcaaacgctggaatcccgaagtgcagtatacatctaactatgcaaaatctgccaacgttgatttcactgtggacaacaatggactttatactgagcctcgccccattggcacccgttacctcacccgtcccctgtaa

SEQ ID NO: 5241 - protein, 736 aa, synthetic construct
  REGION 1..736: note = Description of Artificial Sequence: Synthetic polypeptide
MAADGYLPDWLEDNLSEGIREWWALKPGAPKPKANQQKQDDGRGLVLPGYKYLGPGNGLDKGEPVNEADAAALEHDKAYDQQLKAGDNPYLRYNHADAEFQERLQEDTSFGGNLGRAVFQAKKRVLEPLGLVEEGAKTAPGKKRPVEQSPQEPDSSTGIGKKGQQPARKRLNFGQTGDSESVPDPQPLGEPPAAPSGVGPTTMASGGGAPMADNNEGADGVGNASGNWHCDSTWLGDRVITTSTRTWALPTYNNHLYKQISSASTGASNDNTYFGYSTPWGYFDFNRFHCHFSPRDWQRLINNNWGFRPKRLNFKLFNIQVKEVTTNDGVTTIANNLTSTVQVFSDSEYQLPYVLGSAHQGCLPPFPADVFMIPQYGYLTLNNGSQAVGRSSFYCLEYFPSQMLRTGNNFTFSYTFEDVPFHSSYAHSQSLDRLMNPLIDQYLYYLNRTQNQSGSAQNKDLLFSRGSPAGMSVQPKNWLPGPCYRQQRVSKTKTDNNNSNFTWTGASKYNLNGRESIINPGTAMASHKDDEDKFFPMSGVMIFGKESAGASNTALDNVMITDEEEIKATNPVATERFGTVAVNFQSSSTDPATGDVHVMGALPGMVWQDRDVYLQGPIWAKIPHTDGHFHPSPLMGGFGLKNPPPQILIKNTPVPANPPAEFSATKFASFITQYSTGQVSVEIEWELQKENSKRWNPEVQYTSNYAKSANVDFTVDNNGLYTEPRPIGTRYLTRPL

SEQ ID NO: 5242 - DNA, 2205 bp, synthetic construct
  misc_feature 1..2205: note = Description of Artificial Sequence: Synthetic polynucleotide
  source 1..2205: mol_type = other DNA
atggctgctgacggttatcttccagattggctcgaggacaacctttctgaaggcattcgtgagtggtgggctctgaaacctggagtccctcaacccaaagcgaaccaacaacaccaggacaaccgtcggggtcttgtgcttccgggttacaaatacctcggacccggtaacggactcgacaaaggagagccggtcaacgaggcggacgcggcagccctcgaacacgacaaggcctacgaccagcagctcaaggccggagacaacccgtacctcaagtacaaccacgccgacgccgagttccaggagcggctcaaagaagatacgtcttttgggggcaacctcgggcgagcagtcttccaggccaaaaagaggcttcttgaacctcttggtctggttgaggaagcggctaagacggctcctggaaagaagaggcctgtagagcagtctcctcaggaaccggactcctccgcgggtattggcaaatcgggtgcacagcccgctaaaaagagactcaatttcggtcagactggcgacacagagtcagtcccagaccctcaaccaatcggagaacctcccgcagccccctcaggtgtgggatctcttacaatggcttcaggtggtggcgcaccagtggcagacaataacgaaggtgccgatggagtgggtagttcctcgggaaattggcattgcgattcccaatggctgggggacagagtcatcaccaccagcacccgaacctgggccctgcccacctacaacaaccacctctacaaacaaatttccagccaatcaggagcctcgaacgacaatcactactttggctacagcaccccttgggggtattttgacttcaacagattccactgccacttttcaccacgtgactggcagcgactcatcaacaacaactggggattccggcccaagagactcagcttcaagctcttcaacatccaggtcaaagaggttacggacaacaatggagtcaagaccatcgccaataaccttaccagcacggtccaggtcttcacggactcagactatcagctcccgtacgtgctcgggtcggctcacgagggctgcctcccgccgttcccagcggacgttttcatgattcctcagtacgggtatctgacgcttaatgatggaagccaggccgtgggtcgttcgtccttttactgcctggaatatttcccgtcgcaaatgctaagaacgggtaacaacttccagttcagctacgagtttgagaacgtacctttccatagcagctacgctcacagccaaagcctggaccgactaatgaatccactcatcgaccaatacttgtactatctctcaaagactattaacggttctggacagaatcaacaaacgctaaaattcagtgtggccggacccagcaacatggctgtccagggaagaaactacatacctggacccagctaccgacaacaacgtgtctcaaccactgtgactcaaaacaacaacagcgaatttgcttggcctggagcttcttcttgggctctcaatggacgtaatagcttgatgaatcctggacctgctatggccagccacaaagaaggagaggaccgtttctttcctttgtctggatctttaatttttggcaaacaaggaactggaagagacaacgtggatgcggacaaagtcatgataaccaacgaagaagaaattaaaactactaacccggtagcaacggagtcctatggacaagtggccacaaaccaccagagtgcccaagcacaggcgcagaccggctgggttcaaaaccaaggaatacttccgggtatggtttggcaggacagagatgtgtacctgcaaggacccatctgggccaagattcctcacacggacggcaacttccacccgtctccgctgatgggcggctttggcctgaaacatcctccgcctcagatcctgatcaagaacacgcctgtacctgcggatcctccgaccaccttcaaccagtcaaagctgaactctttcatcacgcaatacagcaccggacaggtcagcgtggaaattgaatgggagctgcagaaggaaaacagcaagcgctggaatcccgaagtgcagtatacatctaactatgcaaaatctgccaacgttgatttcactgtggacaacaatggactttatactgagcctcgccccattggcacccgttacctcacccgtcccctgtaa

SEQ ID NO: 5243 - protein, 734 aa, synthetic construct
  REGION 1..734: note = Description of Artificial Sequence: Synthetic polypeptide
MAADGYLPDWLEDNLSEGIREWWALKPGVPQPKANQQHQDNRRGLVLPGYKYLGPGNGLDKGEPVNEADAAALEHDKAYDQQLKAGDNPYLKYNHADAEFQERLKEDTSFGGNLGRAVFQAKKRLLEPLGLVEEAAKTAPGKKRPVEQSPQEPDSSAGIGKSGAQPAKKRLNFGQTGDTESVPDPQPIGEPPAAPSGVGSLTMASGGGAPVADNNEGADGVGSSSGNWHCDSQWLGDRVITTSTRTWALPTYNNHLYKQISSQSGASNDNHYFGYSTPWGYFDFNRFHCHFSPRDWQRLINNNWGFRPKRLSFKLFNIQVKEVTDNNGVKTIANNLTSTVQVFTDSDYQLPYVLGSAHEGCLPPFPADVFMIPQYGYLTLNDGSQAVGRSSFYCLEYFPSQMLRTGNNFQFSYEFENVPFHSSYAHSQSLDRLMNPLIDQYLYYLSKTINGSGQNQQTLKFSVAGPSNMAVQGRNYIPGPSYRQQRVSTTVTQNNNSEFAWPGASSWALNGRNSLMNPGPAMASHKEGEDRFFPLSGSLIFGKQGTGRDNVDADKVMITNEEEIKTTNPVATESYGQVATNHQSAQAQAQTGWVQNQGILPGMVWQDRDVYLQGPIWAKIPHTDGNFHPSPLMGGFGLKHPPPQILIKNTPVPADPPTTFNQSKLNSFITQYSTGQVSVEIEWELQKENSKRWNPEVQYTSNYAKSANVDFTVDNNGLYTEPRPIGTRYLTRPL

SEQ ID NO: 5244 - DNA, 2211 bp, synthetic construct
  misc_feature 1..2211: note = Description of Artificial Sequence: Synthetic polynucleotide
  source 1..2211: mol_type = other DNA
atggctgccgatggttatcttccagattggctcgaggacaacctctctgagggcattcgcgagtggtgggcgctgaaacctggagccccgaagcccaaagccaaccagcaaaagcaggacgacggccggggtctggtgcttcctggctacaagtacctcggacccttcaacggactcgacaagggggagcccgtcaacgcggcggacgcagcggccctcgagcacgacaaggcctacgaccagcagctgcaggcgggtgacaatccgtacctgcggtataaccacgccgacgccgagtttcaggagcgtctgcaagaagatacgtcttttgggggcaacctcgggcgagcagtcttccaggccaagaagtgggttctcgaacctctcggtctggttgaggaaggcgctaagacggctcctggaaagaaacgtccggtagagcagtcgccacaagagccagactcctcctcgggcatcggcaagacaggccagcagcccgctaaaaagagactcaattttggtcagactggcgactcagagtcagtccccgacccacaacctctcggagaacctccagcaacccccgctgctgtgggacctactacaatggcttcaggcggtggcgcaccaatggcagacaataacgaaggcgccgacggagtgggtaatgcctcaggaaattggcattgcgattccacatggctgggcgacagagtcatcaccaccagcacccgcacctgggccttgcccacctacaataaccacctctacaagcaaatctccagtgcttcaacgggggccagcaacgacaaccactacttcggctacagcaccccctgggggtattttgatttcaacagattccactgccatttctcaccacgtgactggcagcgactcatcaacaacaattggggattccggcccaagagactcaacttcaagctcttcaacatccaagtcaaggaggtcacgacgaatgatggcgtcacaaccatcgctaataaccttaccagcacggttcaagtcttctcggactcggagtaccagcttccgtacgtcctcggctctgcgcaccagggctgcctccctccgttcccggcggacgtgttcatgattccgcaatacggctacctgacgctcaacaatggcagccaagccgtgggacgttcatccttttactgcctggaatatttcccttctcagatgctgagaacgggcaacaactttaccttcagctacacctttgaggaagtgcctttccacagcagctacgcgcacagccagagcctggaccggctgatgaatcctctcatcgaccaatacctgtattacctgaacagaactcaaaatcagtccggaagtgcccaaaacaaggacttgctgtttagccgtgggtctccagctggcatgtctgttcagcccaaaaactggctacctggaccctgttatcggcagcagcgcgtttctaaaacaaaaacagacaacaacaacagcaattttacctggactggtgcttcaaaatataacctcaatgggcgtgaatccatcatcaaccctggcactgctatggcctcacacaaagacgacgaagacaagttctttcccatgagcggtgtcatgatttttggaaaggagagcgccggagcttcaaacactgcattggacaatgtcatgatcaccgacgaagaggaaatcaaagccactaaccccgtggccaccgaaagatttgggactgtggcagtcaatctccagagcagcagcacagaccctgcgaccggagatgtgcatgttatgggagccttacctggcatggtgtggcaagatagagacgtgtacctgcagggtcccatttgggccaaaattcctcacacagatggacactttcacccgtctcctcttatgggcggctttggactcaagaacccgcctcctcagatcctcatcaaaaacacgcctgttcctgcgaatcctccggcggagttttcagctacaaagtttgcttcattcatcacccaatactccacaggacaagtgagtgtggaaattgaatgggagctgcagaaagaaaacagcaagcgctggaatcccgaagtgcagtacacatccaattatgcaaaatctgccaacgttgattttactgtggacaacaatggactttatactgagcctcgccccattggcacccgttacctcacccgtcccctgtaa

SEQ ID NO: 5245 - protein, 736 aa, synthetic construct
  REGION 1..736: note = Description of Artificial Sequence: Synthetic polypeptide
MAADGYLPDWLEDNLSEGIREWWALKPGAPKPKANQQKQDDGRGLVLPGYKYLGPFNGLDKGEPVNAADAAALEHDKAYDQQLQAGDNPYLRYNHADAEFQERLQEDTSFGGNLGRAVFQAKKWVLEPLGLVEEGAKTAPGKKRPVEQSPQEPDSSSGIGKTGQQPAKKRLNFGQTGDSESVPDPQPLGEPPATPAAVGPTTMASGGGAPMADNNEGADGVGNASGNWHCDSTWLGDRVITTSTRTWALPTYNNHLYKQISSASTGASNDNHYFGYSTPWGYFDFNRFHCHFSPRDWQRLINNNWGFRPKRLNFKLFNIQVKEVTTNDGVTTIANNLTSTVQVFSDSEYQLPYVLGSAHQGCLPPFPADVFMIPQYGYLTLNNGSQAVGRSSFYCLEYFPSQMLRTGNNFTFSYTFEEVPFHSSYAHSQSLDRLMNPLIDQYLYYLNRTQNQSGSAQNKDLLFSRGSPAGMSVQPKNWLPGPCYRQQRVSKTKTDNNNSNFTWTGASKYNLNGRESIINPGTAMASHKDDEDKFFPMSGVMIFGKESAGASNTALDNVMITDEEEIKATNPVATERFGTVAVNLQSSSTDPATGDVHVMGALPGMVWQDRDVYLQGPIWAKIPHTDGHFHPSPLMGGFGLKNPPPQILIKNTPVPANPPAEFSATKFASFITQYSTGQVSVEIEWELQKENSKRWNPEVQYTSNYAKSANVDFTVDNNGLYTEPRPIGTRYLTRPL

SEQ ID NO: 5246 - DNA, 2214 bp, synthetic construct
  misc_feature 1..2214: note = Description of Artificial Sequence: Synthetic polynucleotide
  source 1..2214: mol_type = other DNA
atggctgccgatggttatcttccagattggctcgaggacaaccttagtgaaggaattcgcgagtggtgggctttgaaacctggagcccctcaacccaaggcaaatcaacaacatcaagacaacgctcgaggtcttgtgcttccgggttacaaataccttggacccggcaacggactcgacaagggggagccggtcaacgcagcagacgcggcggccctcgagcacgacaaggcctacgaccagcagctgcaggcgggtgacaatccgtacctgcggtataaccacgccgacgccgagtttcaggagcgtctgcaagaagatacgtcttttgggggcaaccttggcagagcagtcttccaggccaaaaagaggatccttgagcctcttggtctggttgaggaagcagctaaaacggctcctggaaagaagaggcctgtagatcagtctcctcaggaaccggactcatcatctggtgttggcaaatcgggcaaacagcctgccagaaaaagactaaatttcggtcagactggcgactcagagtcagtcccagaccctcaacctctcggagaaccaccagcagcccccacaagtttgggatctaatacaatggcttcaggcggtggcgcaccaatggcagacaataacgagggtgccgatggggtgggtagttcctcgggaaattggcattgcgattcccaatggctgggggacagagtcatcaccaccagcacccgaacctgggccctgcccacctacaacaatcacctctacaagcaaatctccaacgggacatcgggaggagccaccaacgacaacacctacttcggctacagcaccccctgggggtattttgactttaacagattccactgccacttttcaccacgtgactggcagcgactcatcaacaacaactggggattccggcccaagagactcagcttcaagctcttcaacatccaggtcaaggaggtcacgcagaatgaaggcaccaagaccatcgccaataacctcaccagcaccatccaggtgtttacggactcggagtaccagctgccgtacgttctcggctcggcgcaccagggctgcctccctccgttcccggcggacgtcttcatggtgccacagtatggatacctgacgctcaacaatggcagccaagccgtgggacgttcatccttttactgcctggaatatttcccttctcagatgctgagaacgggcaacaactttaccttcagctacacctttgaggaagtgcctttccacagcagctacgcgcacagccagagcttggaccggctgatgaatcctctgattgaccagtacctgtactacttgtctcggactcaaacaacaggaggcacggcaaatacgcagactctgggcttcagccaaggtgggcctaatacaatggccaatcaggcaaagaactggctgccaggaccctgttaccgccaacaacgcgtctcaacgacaaccgggcaaaacaacaatagcaactttgcctggactgctgggaccaaataccatctgaatggaagaaattcattggctaatcctggcatcgctatggcaacacacaaagacgacgaggagcgtttttttcccagtaacgggatcctgatttttggcaaacaaaatgctgccagagacaatgcggattacagcgatgtcatgctcaccagcgaggaagaaatcaaaaccactaaccctgtggctacagaggaatacggtatcgtggcagataacttgcagcagcaaaacacggctcctcaaattggaactgtcaacagccagggggacttacccggtatggtctggcagaaccgggacgtgtacctgcagggtcccatctgggccaagattcctcacacggacggcaacttccacccgtctccgctgatgggcggctttggcctgaaacatcctccgcctcagatcctgatcaagaacacgcctgtacctgcggatcctccgaccaccttcaaccagtcaaagctgaactctttcatcacgcaatacagcaccggacaggtcagcgtggagatcgagtgggagctgcagaaggaaaacagcaagcgctggaacccggagatccagtacacttccaactattacaagtctaataatgttgaatttgctgttaatactgaaggtgtatatagtgaaccccgccccattggcaccagatacctgactcgtaatctgtaa

SEQ ID NO: 5247 - protein, 737 aa, synthetic construct
  REGION 1..737: note = Description of Artificial Sequence: Synthetic polypeptide
MAADGYLPDWLEDNLSEGIREWWALKPGAPQPKANQQHQDNARGLVLPGYKYLGPGNGLDKGEPVNAADAAALEHDKAYDQQLQAGDNPYLRYNHADAEFQERLQEDTSFGGNLGRAVFQAKKRILEPLGLVEEAAKTAPGKKRPVDQSPQEPDSSSGVGKSGKQPARKRLNFGQTGDSESVPDPQPLGEPPAAPTSLGSNTMASGGGAPMADNNEGADGVGSSSGNWHCDSQWLGDRVITTSTRTWALPTYNNHLYKQISNGTSGGATNDNTYFGYSTPWGYFDFNRFHCHFSPRDWQRLINNNWGFRPKRLSFKLFNIQVKEVTQNEGTKTIANNLTSTIQVFTDSEYQLPYVLGSAHQGCLPPFPADVFMVPQYGYLTLNNGSQAVGRSSFYCLEYFPSQMLRTGNNFTFSYTFEEVPFHSSYAHSQSLDRLMNPLIDQYLYYLSRTQTTGGTANTQTLGFSQGGPNTMANQAKNWLPGPCYRQQRVSTTTGQNNNSNFAWTAGTKYHLNGRNSLANPGIAMATHKDDEERFFPSNGILIFGKQNAARDNADYSDVMLTSEEEIKTTNPVATEEYGIVADNLQQQNTAPQIGTVNSQGDLPGMVWQNRDVYLQGPIWAKIPHTDGNFHPSPLMGGFGLKHPPPQILIKNTPVPADPPTTFNQSKLNSFITQYSTGQVSVEIEWELQKENSKRWNPEIQYTSNYYKSNNVEFAVNTEGVYSEPRPIGTRYLTRNL

SEQ ID NO: 5248 - DNA, 2205 bp, synthetic construct
  misc_feature 1..2205: note = Description of Artificial Sequence: Synthetic polynucleotide
  source 1..2205: mol_type = other DNA
atggctgctgacggttatcttccagattggctcgaggacaacctttctgaaggcattcgtgagtggtgggctctgaaacctggagtccctcaacccaaagcgaaccaacaacaccaggacaactgtcggggtcttgtgcttccgggttacaaatacctcggacccggtaacggactcgacaaaggagagccggtcaacgaggcggacgcggcagccctcgaacacgacaaggcctacgaccagcagctcaaggccggagacaacccgtacctcaagtacaaccacgccgacgccgagttccaggagcggctcaaagaagatacgtcttttgggggcaacctcgggcgagcagtcttccagaccaaaaagaggcttcttgaacctcttggtctggttgaggaagcggctaagacggctcctggaaagaagaggcctgtagagcagtctcctcaggaaccggactcctccgcgggtattggcaaatcgggtgcacagcccgctaaaaagagactcaatttcggtcagactggcgacacagagtcagtcccagaccctcaaccaatcggagaacctcccgcagccccctcaggtgtgggatctcttacaatggcttcaggtggtggcgcaccagtggcagacaataacgaaggtgccgatggagtgggtagttcctcgggaaattggcattgcgattcccaatggctgggggacagagtcatcaccaccagcacccgaacctgggccctgcccacctacaacaaccacctctacaaacaaatttccagccaatcaggagcctcgaacgacaatcactactttggctacagcaccccttgggggtattttgacttcaacagattccactgccacttttcaccacgtgactggcagcgactcatcaacaacaactggggattccggcccaagagactcagcttcaagctcttcaacatccaggtcaaagaggttacggacaacaatggagtcaagaccatcgccaataaccttaccagcacggtccaggtcttcacggactcagactatcagctcccgtacgtgctcgggtcggctcacgagggctgcctcccgccgttcccagcggacgttttcatgattcctcagtacgggtatctgacgcttaatgatggaagccaggccgtgggtcgttcgtccttttactgcctggaatatttcccgtcgcaaatgctaagaacgggtaacaacttccagttcagctacgagtttgagaacgtacctttccatagcagctacgctcacagccaaagcctggaccgactaatgaatccactcatcgaccaatacttgtactatctctcaaagactattaacggttctggacagaatcaacaaacgctaaaattcagtgtggccggacccagcaacatggctgtccagggaagaaactacatacctggacccagctaccgacaacaacgtgtctcaaccactgtgactcaaaacaacaacagcgaatttgcttggcctggagcttcttcttgggctctcaatggacgtaatagcttgatgaatcctggacctgctatggccagccacaaagaaggagaggaccgtttctttcctttgtctggatctttaatttttggcaaacaaggaactggaagagacaacgtggatgcggacaaagtcatgataaccaacgaagaagaaattaaaactactaacccggtagcaacggagtcctatggacaagtggccacaaaccaccagagtgcccaagcacaggcgcagaccggctgggttcaaaaccaaggaatacttccgggtatggtttggcaggacagagatgtgtacctgcaaggacccatctgggccaagattcctcacacggacggcaacttccacccgtctccgctgatgggcggctttggcctgaaacatcctccgcctcagatcctgatcaagaacacgcctgttcctgcgaatcctccggcggagttttcagctacaaagtttgcttcattcatcacccagtactccacaggacaagtgagtgtggaaattgaatgggagctgcagaaagaaaacagcaagcgctggaatcccgaagtgcagtacacatccaattatgcaaaatctgccaacgttgattttactgtggacaacaatggactttatactgagcctcgccccattggcacccgttaccttaccaaacctctgtaa

SEQ ID NO: 5249 - protein, 734 aa, synthetic construct
  REGION 1..734: note = Description of Artificial Sequence: Synthetic polypeptide
MAADGYLPDWLEDNLSEGIREWWALKPGVPQPKANQQHQDNCRGLVLPGYKYLGPGNGLDKGEPVNEADAAALEHDKAYDQQLKAGDNPYLKYNHADAEFQERLKEDTSFGGNLGRAVFQTKKRLLEPLGLVEEAAKTAPGKKRPVEQSPQEPDSSAGIGKSGAQPAKKRLNFGQTGDTESVPDPQPIGEPPAAPSGVGSLTMASGGGAPVADNNEGADGVGSSSGNWHCDSQWLGDRVITTSTRTWALPTYNNHLYKQISSQSGASNDNHYFGYSTPWGYFDFNRFHCHFSPRDWQRLINNNWGFRPKRLSFKLFNIQVKEVTDNNGVKTIANNLTSTVQVFTDSDYQLPYVLGSAHEGCLPPFPADVFMIPQYGYLTLNDGSQAVGRSSFYCLEYFPSQMLRTGNNFQFSYEFENVPFHSSYAHSQSLDRLMNPLIDQYLYYLSKTINGSGQNQQTLKFSVAGPSNMAVQGRNYIPGPSYRQQRVSTTVTQNNNSEFAWPGASSWALNGRNSLMNPGPAMASHKEGEDRFFPLSGSLIFGKQGTGRDNVDADKVMITNEEEIKTTNPVATESYGQVATNHQSAQAQAQTGWVQNQGILPGMVWQDRDVYLQGPIWAKIPHTDGNFHPSPLMGGFGLKHPPPQILIKNTPVPANPPAEFSATKFASFITQYSTGQVSVEIEWELQKENSKRWNPEVQYTSNYAKSANVDFTVDNNGLYTEPRPIGTRYLTKPL

SEQ ID NO: 5250 - DNA, 2211 bp, synthetic construct
  misc_feature 1..2211: note = Description of Artificial Sequence: Synthetic polynucleotide
  source 1..2211: mol_type = other DNA
atggctgccgatggttatcttccagattggctcgaggacaacctctctgagggcattcgcgagtggtgggacttgaaacctggagcccctaaacccaaggcaaatcaacaacatcaggacaacgctcgaggtcttgtgcttccgggttacaaataccttggacccggcaacggactcgacaagggggagccggtcaacgcagcagacgcggcggccctcgagcacgacaaggcctacgaccagcagctcaaggccggagacaacccgtacctcaagtacaaccacgccgacgccgagttccaggagcggctcaaagaagatacgtcttttgggggcaacctcgggcgagcagtcttccaggccaaaaagaggcttcttgaacctcttggtctggttgaggaagcggctaagacggctcctggaaagaagagaccggtagagccatcaccccagcgttctccagactcctctacgggcatcggcaagaaaggccaacagcccgctaaaaagagactcaattttggtcagactggcgactcagagtcagtccccgacccacaacctctcggagaacctccagcaacccccgctgctgtgggacctactacaatggcttcaggcggtggcgcaccaatggcagacaataacgagggtgccgatggagtgggtaattcctcaggaaattggcattgcgattcccaatggctgggcgacagagtcatcaccaccagcaccagaacctgggccctgcccacttacaacaaccatctctacaagcaaatctccagccaatcaggagcttcaaacgacaaccactactttggctacagcaccccttgggggtattttgactttaacagattccactgccacttttcaccacgtgactggcaaagactcatcaacaacaactggggattccgacccaagagactcaacttcaagctcttcaacatccaagtcaaggaggtcacgacgaatgatggcgtcacgaccatcgctaataaccttaccagcacggttcaagtcttctcggactcggagtaccagttgccgtacgtcctcggctctgcgcaccagggctgcctccctccgttcccggcggacgtgttcatgattccgcagtacggctacctaacgctcaacaatggcagccaagccgtgggacgttcatccttttactgcctggaatatttcccttctcagatgctgagaacgggcaacaactttaccttcagctacacttttgaggacgttcctttccacagcagctacgctcacagccagagtctggaccgtctcatgaatcctctcatcgaccagtacctgtattacttgagcagaacaaacactccaagtggaaccaccacgcagtcaaggcttcagttttctcaggccggagcgagtgacattcgggaccagtctaggaactggcttcctggaccctgttaccgccagcagcgcgtttctaaaacaaaaacagacaacaacaacagcaattttacctggactggtgcttcaaaatataaccttaatgggcgtgaatctataatcaaccctggcactgctatggcctcacacaaagacgacgaagacaagttctttcccatgagcggtgtcatgatttttggaaaagagagcgccggagcttcaaacactgcattggacaatgtcatgatcacagacgaagaggaaatcaaagccactaaccccgtggccaccgaaagatttgggactgtggcagtcaatctccagagcagcagcacagaccctgcgaccggagatgtgcatgttatgggagcattacctggcatggtgtggcaagatagagacgtgtacctgcagggtcccatttgggccaaaattcctcacacagatggacactttcacccgtctcctcttatgggcggctttggactcaagaacccgcctcctcagatcctcatcaaaaacacgcctgttcctgcgaatcctccggcggagttttcagctacaaagtttgcttcattcatcacccaatactccacaggacaagtgagtgtggaaattgaatgggagctgcagaaagaaaacagcaagcgctggaatcccgaagtgcagtacacatccaattatgcaaaatctgccaacgttgattttactgtggacaacaatggactttatactgagcctcgccccattggcacccgttaccttacccgtcccctgtaa

SEQ ID NO: 5251 - protein, 736 aa, synthetic construct
  REGION 1..736: note = Description of Artificial Sequence: Synthetic polypeptide
MAADGYLPDWLEDNLSEGIREWWDLKPGAPKPKANQQHQDNARGLVLPGYKYLGPGNGLDKGEPVNAADAAALEHDKAYDQQLKAGDNPYLKYNHADAEFQERLKEDTSFGGNLGRAVFQAKKRLLEPLGLVEEAAKTAPGKKRPVEPSPQRSPDSSTGIGKKGQQPAKKRLNFGQTGDSESVPDPQPLGEPPATPAAVGPTTMASGGGAPMADNNEGADGVGNSSGNWHCDSQWLGDRVITTSTRTWALPTYNNHLYKQISSQSGASNDNHYFGYSTPWGYFDFNRFHCHFSPRDWQRLINNNWGFRPKRLNFKLFNIQVKEVTTNDGVTTIANNLTSTVQVFSDSEYQLPYVLGSAHQGCLPPFPADVFMIPQYGYLTLNNGSQAVGRSSFYCLEYFPSQMLRTGNNFTFSYTFEDVPFHSSYAHSQSLDRLMNPLIDQYLYYLSRTNTPSGTTTQSRLQFSQAGASDIRDQSRNWLPGPCYRQQRVSKTKTDNNNSNFTWTGASKYNLNGRESIINPGTAMASHKDDEDKFFPMSGVMIFGKESAGASNTALDNVMITDEEEIKATNPVATERFGTVAVNLQSSSTDPATGDVHVMGALPGMVWQDRDVYLQGPIWAKIPHTDGHFHPSPLMGGFGLKNPPPQILIKNTPVPANPPAEFSATKFASFITQYSTGQVSVEIEWELQKENSKRWNPEVQYTSNYAKSANVDFTVDNNGLYTEPRPIGTRYLTRPL

SEQ ID NO: 5252 - DNA, 2214 bp, synthetic construct; identical to SEQ ID NO: 5224
  misc_feature 1..2214: note = Description of Artificial Sequence: Synthetic polynucleotide
  source 1..2214: mol_type = other DNA

SEQ ID NO: 5253 - protein, 737 aa, synthetic construct; identical to SEQ ID NO: 5225
  REGION 1..737: note = Description of Artificial Sequence: Synthetic polypeptide

SEQ ID NO: 5254 - DNA, 2205 bp, synthetic construct
  misc_feature 1..2205: note = Description of Artificial Sequence: Synthetic polynucleotide
  source 1..2205: mol_type = other DNA
atggctgctgacggttatcttccagattggctcgaggacaacctttctgaaggcattcgtgagtggtgggctctgaaacctggagtccctcaacccaaagcgaaccaacaacaccaggacaaccgtcggggtcttgtgcttccgggttacaaatacctcggacccggtaacggactcgacaaaggagagccggtcaacgaggcggacgcggcagccctcgaacacgacaaggcctacgaccagcagctcaaggccggagacaacccgtacctcaagtacaaccacgccgacgccgagttccaggagcggctcaaagaagatacgtcttttgggggcaacctcgggcgagcagtcttccaggccaaaaagaggcttcttgaacctcttggtctggttgaggaagcggctaagacggctcctggaaagaagaggcctgtagagcagtctcctcaggaaccggactcctccgcgggtattggcaaatcgggtgcacagcccgctaaaaagagactcaatttcggtcagactggcgacacagagtcagtcccagaccctcaaccaatcggagaacctcccgcagccccctcaggtgtgggatctcttacaatggcttcaggtggtggcgcaccagtggcagacaataacgaaggtgccgatggagtgggtagttcctcgggaaattggcattgcgattcccaatggctgggggacagagtcatcaccaccagcacccgaacctgggccctgcccacctacaacaaccacctctacaaacaaatttccagccaatcaggagcctcgaacgacaatcactactttggctacagcaccccttgggggtattttgacttcaacagattccactgccacttttcaccacgtgactggcagcgactcatcaacaacaactggggattccggcccaagagactcagcttcaagctcttcaacatccaggtcaaagaggttacggacaacaatggagtcaagaccatcgccaataaccttaccagcacggtccaggtcttcacggactcagactatcagctcccgtacgtgctcgggtcggctcacgagggctgcctcccgccgttcccagcggacgttttcatgattcctcagtacgggtatctgacgcttaatgatggaagccaggccgtgggtcgttcgtccttttactgcctggaatatttcccgtcgcaaatgctaagaacgggtaacaacttccagttcagctacgagtttgagaacgtacctttccatagcagctacgctcacagccaaagcctggaccgactaatgaatccactcatcgaccaatacttgtactatctctcaaagactattaacggttctggacagaatcaacaaacgctaaaattcagtgtggccggacccagcaacatggctgtccagggaagaaactacatacctggacccagctaccgacaacaacgtgtctcaaccactgtgactcaaaacaacaacagcgaatttgcttggcctggagcttcttcttgggctctcaatggacgtaatagcttgatgaatcctggacctgctatggccagccacaaagaaggagaggaccgtttctttcctttgtctggatctttaatttttggcaaacaaggaactggaagagacaacgtggatgcggacaaagtcatgataaccaacgaagaagaaattaaaactactaacccggtagcaacggagtcctatggacaagtggccacaaaccaccagagtgcccaagcacaggcgcagaccggctgggttcaaaaccaaggaatacttccgggtatggtttggcaggacagagatgtgtacctgcaaggacccatttgggccaaaattcctcacacggacggcaactttcacccttctccgctgatgggagggtttggaatgaaacacccgcctcctcagatcctcatcaaaaacacacctgtacctgcggatcctccaacggccttcaacaaggacaagctgaactctttcatcacccagtattctactggccaagtcagcgtggagatcgagtgggagctgcagaaggaaaacagcaagcgctggaaccccgagatccagtacacctccaactactacaaatctacaagtgtggactttgctgttaatacagaaggcgtgtactctgaaccccgccccattggcacccgttacctcacccgtaatctgtaa

SEQ ID NO: 5255 - protein, 734 aa, synthetic construct
  REGION 1..734: note = Description of Artificial Sequence: Synthetic polypeptide
MAADGYLPDWLEDNLSEGIREWWALKPGVPQPKANQQHQDNRRGLVLPGYKYLGPGNGLDKGEPVNEADAAALEHDKAYDQQLKAGDNPYLKYNHADAEFQERLKEDTSFGGNLGRAVFQAKKRLLEPLGLVEEAAKTAPGKKRPVEQSPQEPDSSAGIGKSGAQPAKKRLNFGQTGDTESVPDPQPIGEPPAAPSGVGSLTMASGGGAPVADNNEGADGVGSSSGNWHCDSQWLGDRVITTSTRTWALPTYNNHLYKQISSQSGASNDNHYFGYSTPWGYFDFNRFHCHFSPRDWQRLINNNWGFRPKRLSFKLFNIQVKEVTDNNGVKTIANNLTSTVQVFTDSDYQLPYVLGSAHEGCLPPFPADVFMIPQYGYLTLNDGSQAVGRSSFYCLEYFPSQMLRTGNNFQFSYEFENVPFHSSYAHSQSLDRLMNPLIDQYLYYLSKTINGSGQNQQTLKFSVAGPSNMAVQGRNYIPGPSYRQQRVSTTVTQNNNSEFAWPGASSWALNGRNSLMNPGPAMASHKEGEDRFFPLSGSLIFGKQGTGRDNVDADKVMITNEEEIKTTNPVATESYGQVATNHQSAQAQAQTGWVQNQGILPGMVWQDRDVYLQGPIWAKIPHTDGNFHPSPLMGGFGMKHPPPQILIKNTPVPADPPTAFNKDKLNSFITQYSTGQVSVEIEWELQKENSKRWNPEIQYTSNYYKSTSVDFAVNTEGVYSEPRPIGTRYLTRNL

SEQ ID NO: 5256 - DNA, 2217 bp, synthetic construct
  misc_feature 1..2217: note = Description of Artificial Sequence: Synthetic polynucleotide
  source 1..2217: mol_type = other DNA
atggctgccgatggttatcttccagattggctcgaggacaacctctctgagggcattcgcgagtggtgggcgctgaaacctggagccccgaagcccaaagccaaccagcaaaagcaggacgacggccggggtctggtgcttcctggctacaagtacctcggacccttcaacggactcgacaagggggagcccgtcaacgcggcggacgcagcggccctcgagcacgacaaggcctacgaccagcagctgcaggcgggtgacaatccgtacctgcggtataaccacgccgacgccgagtttcaggagcgtctgcaagaagatacgtcttttgggggcaacctcgggcgagcagtcttccaggccaagaagcgggttctcgaacctctcggtctggttgaggaaggcgctaagacggctcctggaaagaagagaccggtagagccatcaccccagcgttctccagactcctctacgggcatcggcaagaaaggccaacagcccgccagaaaaagactcaattttggtcagactggcgactcagagtcagttccagaccctcaacctctcggagaacctccagcagcgccctctggtgtgggacctaatacaatggctgcaggcggtggcgcaccaatggcagacaataacgaaggcgccgacggagtgggtagttcctcgggaaattggcattgcgattccacatggctgggcgacagagtcatcaccaccagcacccgaacctgggccctgcccacctacaacaaccacctctacaagcaaatctccaacgggacatcgggaggagccaccaacgacaacacctacttcggctacagcaccccctgggggtattttgactttaacagattccactgccacttttcaccacgtgactggcagcgactcatcaacaacaactggggattccggcccaagagactcagcttcaagctcttcaacatccaggtcaaggaggtcacgcagaatgaaggcaccaagaccatcgccaataacctcaccagcaccatccaggtgtttacggactcggagtaccagctgccgtacgttctcggctctgcccaccagggctgcctgcctccgttcccggcggacgtgttcatgattccccagtacggctacctaacactcaacaacggtagtcaggccgtgggacgctcctccttctactgcctggaatactttccttcgcagatgctgagaaccggcaacaacttccagtttacttacaccttcgaggacgtgcctttccacagcagctacgcccacagccagagcttggaccggctgatgaatcctctgattgaccagtacctgtactacttgtctcggactcaaacaacaggaggcacggcaaatacgcagactctgggcttcagccaaggtgggcctaatacaatggccaatcaggcaaagaactggctgccaggaccctgttaccgccaacaacgcgtctcaacgacaaccgggcaaaacaacaatagcaactttgcctggactgctgggaccaaataccatctgaatggaagaaattcattggctaatcctggcatcgctatggcaacacacaaagacgacgaggagcgtttttttcccagtaacgggatcctgatttttggcaaacaaaatgctgccagagacaatgcggattacagcgatgtcatgctcaccagcgaggaagaaatcaaaaccactaaccctgtggctacagaggaatacggtatcgtggcagataacttgcagcagcaaaacacggctcctcaaattggaactgtcaacagccagggggccttacccggtatggtctggcagaaccgggacgtgtacctgcagggtcccatctgggccaagattcctcacacggacggcaacttccacccctctcccctcatgggtggattcggacttaaacatcctccgcctcagatcctgatcaagaacacgcctgtacctgcggatcctccgaccaccttcaaccagtcaaagctgaactctttcatcacgcaatacagcaccggacaggtcagcgtggaaattgaatgggagctgcagaaggaaaacagcaagcgctggaaccccgagatccagtacacctccaactactacaaatctacaagtgtggactttgctgttaatacagaaggcgtgtactctgaaccccgccccattggcacccgttacctcacccgtaatctgtaa

SEQ ID NO: 5257 - protein, 738 aa, synthetic construct; identical to SEQ ID NO: 5159
  REGION 1..738: note = Description of Artificial Sequence: Synthetic polypeptide

SEQ ID NO: 5258 - DNA, 2211 bp, synthetic construct
  misc_feature 1..2211: note = Description of Artificial Sequence: Synthetic polynucleotide
  source 1..2211: mol_type = other DNA
atggctgctgacggttatcttccagattggctcgaggacaacctttctgaaggcattcgagagtggtgggcgctgcaacctggagcccctaaacccaaggcaaatcaacaacatcaggacaacgctcggggtcttgtgcttccgggttacaaatacctcggacccggcaacggactcgacaagggggaacccgtcaacgcagcggacgcggcagccctcgagcacgacaaggcctacgaccagcagctcaaggccggtgacaacccctacctcaagtacaaccacgccgacgccgagttccaggagcggctcaaagaagatacgtcttttgggggcaacctcgggcgagcagtcttccaggccaaaaagaggcttcttgaacctcttggtctggttgaggaagcggctaagacggctcctggaaagaagaggcctgtagatcagtctcctcaggaaccggactcatcatctggtgttggcaaatcgggcaaacagcctgccagaaaaagactaaatttcggtcagactggcgactcagagtcagtcccagaccctcaacctctcggagaaccaccagcagcccccacaagtttgggatctaatacaatggcttcaggcggtggcgcaccaatggcagacaataacgagggtgccgatggagtgggtaattcctcaggaaattggcattgcgattcccaatggctgggcgacagagtcatcaccaccagcaccagaacctgggccctgcccacttacaacaaccatctctacaagcaaatctccagccaatcaggagcttcaaacgacaaccactactttggctacagcaccccttgggggtattttgactttaacagattccactgccacttctcaccacgtgactggcagcgactcattaacaacaactggggattccggcccaagaaactcagcttcaagctcttcaacatccaagttaaagaggtcacgcagaacgatggcacgacgactattgccaataaccttaccagcacggttcaggtgtttacggactcggagtatcagctcccgtacgtgctcgggtcggcgcaccaaggctgtctcccgccgtttccagcggacgtcttcatggtccctcagtatggatacctcaccctgaacaacggaagtcaagcggtgggacgctcatccttttactgcctggagtacttcccttcgcagatgctaaggactggaaataacttccaattcagctataccttcgaggatgtaccttttcacagcagctacgctcacagccagagtttggatcgcttgatgaatcctcttattgatcagtatctgtactacctgaacagaacgcaaggaacaacctctggaacaaccaaccaatcacggctgctttttagccaggctgggcctcagtctatgtctttgcaggccagaaattggctacctgggccctgctaccggcaacagagactttcaaagactgctaacgacaacaacaacagtaactttccttggacagcggccagcaaatatcatctcaatggccgcgactcgctggtgaatccaggaccagctatggccagtcacaaggacgatgaagaaaaatttttccctatgcacggcaatctaatatttggcaaagaagggacaacggcaagtaacgcagaattagataatgtaatgattacggatgaagaagagattcgtaccaccaatcctgtggcaacagagcagtatggaactgtggcaaataacttgcagagctcaaatacagctcccacgactagaactgtcaatgatcagggggccttacctggcatggtgtggcaagatcgtgacgtgtaccttcaaggacctatctgggcaaagattcctcacacggatggacactttcatccttctcctctgatgggaggctttggactgaaacatccgcctcctcaaatcatgatcaaaaatactccggtaccggcaaatcctccgacgactttcagcccggccaagtttgcttcatttatcactcagtactccactggacaggtcagcgtggaaattgagtgggagctacagaaagaaaacagcaaacgttggaatccagagattcagtacacttccaactacaacaagtctgttaatgtggactttactgtagacactaatggtgtttatagtgaacctcgccccattggcacccgttaccttacccgtcccctgtaa

SEQ ID NO: 5259 - protein, 736 aa, synthetic construct; identical to SEQ ID NO: 5229
  REGION 1..736: note = Description of Artificial Sequence: Synthetic polypeptide

SEQ ID NO: 5260 - DNA, 2211 bp, synthetic construct; identical to SEQ ID NO: 5228
  misc_feature 1..2211: note = Description of Artificial Sequence: Synthetic polynucleotide
  source 1..2211: mol_type = other DNA

SEQ ID NO: 5261 - protein, 736 aa, synthetic construct; identical to SEQ ID NO: 5229
  REGION 1..736: note = Description of Artificial Sequence: Synthetic polypeptide

SEQ ID NO: 5262 - DNA, 2211 bp, synthetic construct
  misc_feature 1..2211: note = Description of Artificial Sequence: Synthetic polynucleotide
  source 1..2211: mol_type = other DNA
atggctgctgacggttatcttccagattggctcgaggacaacctttctgaaggcattcgtgagtggtgggctctgaaacctggagtccctcaacccaaagcgaaccaacaacaccaggacaaccgtcggggtcttgtgcttccgggttacaaatacctcggacccggtaacggactcgacaaaggagagcccgtcaacgcggcggatgcagcggccctcgagcacgacaaggcctacgaccagcagctcaaagcgggtgacaatccgtacctgcggtataaccacgccgacgccgagtttcaggagcgtctgcaagaagatacgtcttttgggggcaacctcgggcgagcagtcttccaggccaagaagagggttctcgaaccttttggtctggttgaggaaggtgctaagacggctcctggaaagaaacgtccggtagagcagtcgccacaagagccagactcctcctcgggcatcggcaagacaggccagcagcccgctaaaaagagactcaattttggtcagactggcgactcagagtcagtccccgacccacaacctctcggagaacctccagcaacccccgctgctgtgggacctactacaatggcttcaggcggtggcgcaccaatggcagacaataacgaaggcgccgacggagtgggtaatgcctcaggaaattggcattgcgattccacatggctgggcgacagagtcatcaccaccagcacccgcacctgggccttgcccacctacaataaccacctctacaagcaaatctccagtgcttcaacgggggccagcaacgacaaccactacttcggctacagcaccccctgggggtattttgatttcaacagattccactgccatttctcaccacgtgactggcagcgactcatcaacaacaattggggattccggcccaagagactcaacttcaagctcttcaacatccaagtcaaggaggtcacgacgaatgatggcgtcacgaccatcgctaataaccttaccagcacggttcaagtcttctcggactcggagtaccagcttccgtacgtcctcggctctgcgcaccagggctgcctccctccgttcccggcggacgtgttcatgattccgcaatacggctacctgacgctcaacaatggcagccaagccgtgggacgttcatccttttactgcctggaatatttcccttctcagatgctgagaacgggcaacaactttaccttcagctacacctttgaggaagtgcctttccacagcagctacgcgcacagccagagcctggaccggctgatgaatcctctcatcgaccaatacctgtattacctgaacagaactcaaaatcagtccggaagtgcccaaaacaaggacttgctgtttagccgtgggtctccagctggcatgtctgttcagcccaaaaactggctacctggaccctgttatcggcagcagcgcgtttctaaaacaaaaacagacaacaacaacagcaattttacctggactggtgcttcaaaatataacctcaatgggcgtgaatccatcatcaaccctggcactgctatggcctcacacaaagacgacgaagacaagttctttcccatgagcggtgtcatgatttttggaaaagagagcgccggagcttcaaacactgcattggacaatgtcatgattacagacgaagaggaaattaaagccactaaccctgtggccaccgaaagatttgggaccgtggcagtcaatttccagagcagcagcacagaccctgcgaccggagatgtgcatgttatgggagccttacctggaatggtgtggcaagacagagacgtatacctgcagggtcctatttgggccaaaattcctcacacggatggacactttcacccgtctcctctcatgggcggctttggacttaagcacccgcctcctcagatcctcatcaaaaacacgcctgttcctgcgaatcctccggcagagttttcggctacaaagtttgcttcattcatcacccagtattccacaggacaagtgagcgtggagattgaatgggagctgcagaaagaaaacagcaaacgctggaatcccgaagtgcagtatacatctaactatgcaaaatctgccaacgttgatttcactgtggacaacaatggactttatactgagcctcgccccattggcacccgttacctcacccgtcccctgtaa

SEQ ID NO: 5263 - protein, 736 aa, synthetic construct
  REGION 1..736: note = Description of Artificial Sequence: Synthetic polypeptide
MAADGYLPDWLEDNLSEGIREWWALKPGVPQPKANQQHQDNRRGLVLPGYKYLGPGNGLDKGEPVNAADAAALEHDKAYDQQLKAGDNPYLRYNHADAEFQERLQEDTSFGGNLGRAVFQAKKRVLEPFGLVEEGAKTAPGKKRPVEQSPQEPDSSSGIGKTGQQPAKKRLNFGQTGDSESVPDPQPLGEPPATPAAVGPTTMASGGGAPMADNNEGADGVGNASGNWHCDSTWLGDRVITTSTRTWALPTYNNHLYKQISSASTGASNDNHYFGYSTPWGYFDFNRFHCHFSPRDWQRLINNNWGFRPKRLNFKLFNIQVKEVTTNDGVTTIANNLTSTVQVFSDSEYQLPYVLGSAHQGCLPPFPADVFMIPQYGYLTLNNGSQAVGRSSFYCLEYFPSQMLRTGNNFTFSYTFEEVPFHSSYAHSQSLDRLMNPLIDQYLYYLNRTQNQSGSAQNKDLLFSRGSPAGMSVQPKNWLPGPCYRQQRVSKTKTDNNNSNFTWTGASKYNLNGRESIINPGTAMASHKDDEDKFFPMSGVMIFGKESAGASNTALDNVMITDEEEIKATNPVATERFGTVAVNFQSSSTDPATGDVHVMGALPGMVWQDRDVYLQGPIWAKIPHTDGHFHPSPLMGGFGLKHPPPQILIKNTPVPANPPAEFSATKFASFITQYSTGQVSVEIEWELQKENSKRWNPEVQYTSNYAKSANVDFTVDNNGLYTEPRPIGTRYLTRPL

SEQ ID NO: 5264 - DNA, 2217 bp, synthetic construct
  misc_feature 1..2217: note = Description of Artificial Sequence: Synthetic polynucleotide
  source 1..2217: mol_type = other DNA
atggctgccgatggttatcttccagattggctcgaggacaacctctctgagggcattcgcgagtggtgggacttgaaacctggagccccgaaacccaaagccaaccagcaaaagcaggacgacggccggggtctggtgcttcctggctacaagtacctcggacccttcaacggactcgacaagggggagcccgtcaacgcggcggatgcaacggccctcgagcacgacaaggcctacgaccagcagctgcaggcgggtgacaatccgtacctgcggtataaccacgccgacgccgagtttcaggagcgtctgcaagaagatacgtcttttgggggcaacctcgggcgagcagtcttccaggccaagaagcgggttctcgaacctctcggtctggttgaggaaggcgctaagacggctcctggaaagaagagaccggtagagccatcaccccagcgttctccagactcctctacgggcatcggcaagaaaggccaacagcccgccagaaaaagactcaattttggtcagactggcgactcagagtcagttccagaccctcaacctctcggagaaccaccagcagcccccacaagtttgggatctaatacaatggcttcaggcggtggcgcaccaatggcagacaataacgagggtgccgatggagtgggtaattcctcaggaaattggcattgcgattcccaatggctgggcgacagagtcatcaccaccagcacccgcacctgggccttgcccacctacaataaccacctctacaagcaaatctccagtgcttcaacgggggccagcaacgacaaccactacttcggctacagcaccccctgggggtattttgactttaaccgcttccactgccacttctcgccaagagactggcaaagactcatcaacaacaattggggattccggcccaagagactcaacttcaaactcttcaacatccaagtcaaggaggtcacgacgaatgatggcgtcacgaccatcgccaataacctcaccagcaccatccaggtgtttacggactcggagtaccagctgccgtacgttctcggctctgcccaccagggctgcctgcctccgttcccggcggacgtgttcatgattccccagtatggatacctcaccctgaacaacggaagtcaagcggtgggacgctcatccttttactgcctggagtacttcccttcgcagatgctaaggactggaaataacttccaattcagctataccttcgaggatgtaccttttcacagcagctacgctcacagccagagtttggatcgcttgatgaatcctcttattgatcagtatctgtactacctgaacagaacgcaaggaacaacctctggaacaaccaaccaatcacggctgctttttagccaggctgggcctcagtctatgtctttgcaggccagaaattggctacctgggccctgctaccggcaacagagactttcaaagactgctaacgacaacaacaacagtaactttccttggacagcagccagcaaatatcatctcaatggccgcgactcgctggtgaatccaggaccagctatggccagtcacaaggacgatgaagaaaaatttttccctatgcacggcaatctaatatttggcaaagaagggacaacggcaagtaacgcagaattagataatgtaatgattacggatgaagaagagattcgtaccaccaatcctgtggcaacagagcagtatggaactgtggcaaataacttgcagagctcaaatacagctcccacgactagaactgtcaatgatcagggggccttacctggcatggtgtggcaagatcgtgacgtgtaccttcaggggcccatctgggcaaagattccacacacggacggacattttcacccctctcccctcatgggtggattcggacttaaacaccctcctccgcagattctcatcaagaacaccccggtacctgcgaatccttcgaccaccttcagtgcggcaaagtttgcttccttcatcacacagtactccacgggacaggtcagcgtggagatcgagtgggagctgcagaaggaaaacagcaagcgctggaacccggagatccagtacacttccaactattacaagtctaataatgttgaatttgctgttaatactgaaggtgtatatagtgaaccccgccccattggcaccagatacctgactcgtaatctgtaa

SEQ ID NO: 5265 - protein, 738 aa, synthetic construct
  REGION 1..738: note = Description of Artificial Sequence: Synthetic polypeptide
MAADGYLPDWLEDNLSEGIREWWDLKPGAPKPKANQQKQDDGRGLVLPGYKYLGPFNGLDKGEPVNAADATALEHDKAYDQQLQAGDNPYLRYNHADAEFQERLQEDTSFGGNLGRAVFQAKKRVLEPLGLVEEGAKTAPGKKRPVEPSPQRSPDSSTGIGKKGQQPARKRLNFGQTGDSESVPDPQPLGEPPAAPTSLGSNTMASGGGAPMADNNEGADGVGNSSGNWHCDSQWLGDRVITTSTRTWALPTYNNHLYKQISSASTGASNDNHYFGYSTPWGYFDFNRFHCHFSPRDWQRLINNNWGFRPKRLNFKLFNIQVKEVTTNDGVTTIANNLTSTIQVFTDSEYQLPYVLGSAHQGCLPPFPADVFMIPQYGYLTLNNGSQAVGRSSFYCLEYFPSQMLRTGNNFQFSYTFEDVPFHSSYAHSQSLDRLMNPLIDQYLYYLNRTQGTTSGTTNQSRLLFSQAGPQSMSLQARNWLPGPCYRQQRLSKTANDNNNSNFPWTAASKYHLNGRDSLVNPGPAMASHKDDEEKFFPMHGNLIFGKEGTTASNAELDNVMITDEEEIRTTNPVATEQYGTVANNLQSSNTAPTTRTVNDQGALPGMVWQDRDVYLQGPIWAKIPHTDGHFHPSPLMGGFGLKHPPPQILIKNTPVPANPSTTFSAAKFASFITQYSTGQVSVEIEWELQKENSKRWNPEIQYTSNYYKSNNVEFAVNTEGVYSEPRPIGTRYLTRNL

SEQ ID NO: 5266 - DNA, 2208 bp, synthetic construct
  misc_feature 1..2208: note = Description of Artificial Sequence: Synthetic polynucleotide
  source 1..2208: mol_type = other DNA
atggctgccgatggttatcttccagattggctcgaggacaaccttagtgaaggaattcgcgagtggtgggacttgaaacctggagccccgaagcccaaagccaaccagcaaaagcaggacgacggccggggtctggtgcttcctggctacaagtacctcggacccttcaacggactcgacaagggggagcccgtcaacgcggcggacgcagcggccctcgagcacgacaaggcctacgaccagcagctcaaagcgggtgacaatccgtacctgcggtataaccacgccgacgccgagtttcaggagcgtctgcaagaagatacgtcttttgggggcaacctcgggcgagcagtcttccaggccaagaagcgggttctcgaacctctcggtctggttgaggaaggtgctaagacggctcctggaaagaaacgtccggtagagcagtcgccacaagagccagactcctcctcgggcattggcaagacaggccagcagcccgctaaaaagagactcaattttggtcagactggcgactcagagtcagtccccgacccacaacctctcggagaacctccagcaacccccgctgctgtgggacctactacaatggcttcaggcggtggcgcaccaatggcagacaataacgaaggcgccgacggagtgggtaatgcctcaggaaattggcattgcgattccacatggctgggcgacagagtcatcaccaccagcacccgaacctgggccctgcccacctacaacaaccacctctacaaacaaatttccagccaatcaggagcctcgaacgacaatcactactttggctacagcaccccttgggggtattttgatttcaacagattccactgccacttttcaccacgtgactggcagcgactcatcaacaacaattggggattccggcccaagagactcagcttcaagctcttcaacatccaggtcaaggaggtcacgcagaatgaaggcaccaagaccatcgccaataaccttaccagcacggttcaagtgtttacggactcggagtatcagctcccgtacgtgctcggctcggcgcatcaaggatgcctcccgccgttcccagcagacgtcttcatggtgccacagtatggatacctcaccctgaacaacgggagtcaggcagtaggacgctcttcattttactgcctggagtactttccttctcagatgctgcgtaccggaaacaactttaccttcagctacacttttgaggacgttcctttccacagcagctacgctcacagccagagtctggaccgtctcatgaatcctctgattgaccagtacctgtattacttgagcagaacaaacactccaagtggaaccaccacgcagtcaaggcttcagttttctcaggccggagcgagtgacattcgggaccagtctaggaactggcttcctggaccctgttaccgccagcagcgagtatcaaagacatctgcggataacaacaacagtgaatactcgtggactggagctaccaagtaccacctcaatggcagagactctctggtgaatccgggcccggccatggcaagccacaaggactatgaagaaaagttttttcctcagagcggggttctcatctttgggaagcaaggctcagagaaaacaaatgtggacattgaaaaggtcatgattacagacgaagaggaaatcaggacaaccaatcccgtggctacggagcagtatggttctgtatctaccaacctccagagaggcaacagacaagcagctaccgcagatgtcaacacacaaggcgttcttccaggcatggtctggcaggacagagatgtgtaccttcaggggcccatctgggcaaagattccacacacggacggacattttcacccgtctccgctgatgggcggctttggcctgaaacatcctccgcctcagatcctgatcaagaacacgcctgtacctgcggatcctccgaccaccttcaaccagtcaaagctgaactctttcatcactcagtattctactggccaagtcagcgtggagatcgagtgggagctgcagaaggaaaacagcaagcgctggaaccccgagatccagtacacctccaactactacaaatctacaagtgtggactttgctgttaatacagaaggcgtgtactctgaaccccgccccattggcacccgttacctcacccgtaatctgtaa

SEQ ID NO: 5267 - protein, 735 aa, synthetic construct
  REGION 1..735: note = Description of Artificial Sequence: Synthetic polypeptide
MAADGYLPDWLEDNLSEGIREWWDLKPGAPKPKANQQKQDDGRGLVLPGYKYLGPFNGLDKGEPVNAADAAALEHDKAYDQQLKAGDNPYLRYNHADAEFQERLQEDTSFGGNLGRAVFQAKKRVLEPLGLVEEGAKTAPGKKRPVEQSPQEPDSSSGIGKTGQQPAKKRLNFGQTGDSESVPDPQPLGEPPATPAAVGPTTMASGGGAPMADNNEGADGVGNASGNWHCDSTWLGDRVITTSTRTWALPTYNNHLYKQISSQSGASNDNHYFGYSTPWGYFDFNRFHCHFSPRDWQRLINNNWGFRPKRLSFKLFNIQVKEVTQNEGTKTIANNLTSTVQVFTDSEYQLPYVLGSAHQGCLPPFPADVFMVPQYGYLTLNNGSQAVGRSSFYCLEYFPSQMLRTGNNFTFSYTFEDVPFHSSYAHSQSLDRLMNPLIDQYLYYLSRTNTPSGTTTQSRLQFSQAGASDIRDQSRNWLPGPCYRQQRVSKTSADNNNSEYSWTGATKYHLNGRDSLVNPGPAMASHKDYEEKFFPQSGVLIFGKQGSEKTNVDIEKVMITDEEEIRTTNPVATEQYGSVSTNLQRGNRQAATADVNTQGVLPGMVWQDRDVYLQGPIWAKIPHTDGHFHPSPLMGGFGLKHPPPQILIKNTPVPADPPTTFNQSKLNSFITQYSTGQVSVEIEWELQKENSKRWNPEIQYTSNYYKSTSVDFAVNTEGVYSEPRPIGTRYLTRNL

SEQ ID NO: 5268 - DNA, 2214 bp, synthetic construct
  misc_feature 1..2214: note = Description of Artificial Sequence: Synthetic polynucleotide
  source 1..2214: mol_type = other DNA
atggctgccgatggttatcttccagattggctcgaggacaacctctctgagggcattcgcgagtggtgggacttgaaacctggagccccgaaacccaaagccaaccagcaaaagcaggacgacggccggggtctggtgcttcctggctacaagtacctcggacccttcaacggactcgacaagggggagcccgtcaacgcggcggatgcagcggccctcgagcacgacaaggcctacgaccagcagctcaaagcgggtgacaatccgtacctgcggtataaccacgccgacgccgagtttcaggagcgtctgcaagaagatacgtcttttgggggcaacctcgggcgagcagtcttccaggccaagaagagggttctcgaaccttttggtctggttgaggaaggtgctaagacggctcctggaaagaaacgtccggtagagcagtcgccacaagagccagactcctcctcgggcattggcaagacaggccagcagcctgcaagaaaaagattgaattttggtcagactggagacgcagactcagtacctgacccccagcctctcggacagccaccagcagccccctctggtctgggaactaatacgatggctacaggcagtggcgcaccaatggcagacaataacgagggcgccgacggagtgggtaattcctcgggaaattggcattgcgattcccaatggctgggggacagagtcatcaccaccagcacccgaacctgggccctgcccacctacaacaatcacctctacaagcaaatctccaacagcacatctggaggatcttcaaatgacaacgcctacttcggctacagcaccccctgggggtattttgatttcaacagattccactgccatttctcaccacgtgactggcagcgactcatcaacaacaattggggattccggcccaagagactcaacttcaagctcttcaacatccaggtcaaggaggtcacgcagaatgaaggcaccaagaccatcgccaataacctcaccagcaccatccaggtgtttacggactcggagtaccagctgccgtacgttctcggctctgcccaccagggctgcctgcctccgttcccggcggacgtgttcatgattccccagtacggctacctaacactcaacaacggtagtcaggccgtgggacgctcctccttctactgcctggaatactttccttcgcagatgctgagaaccggcaacaacttccagtttacttacaccttcgaggacgtgcctttccacagcagctacgcccacagccagagcttggaccggctgatgaatcctctgattgaccagtacctgtactacttgtctcggactcaaacaacaggaggcacgacaaatacgcagactctgggcttcagccaaggtgggcctaatacaatggccaatcaggcaaagaactggctgccaggaccctgttaccgccagcagcgagtatcaaagacatttgcggataacaacaacagtgaatactcgtggactggagctaccaagtaccacctcaatggcagagactctctggtgaatccgggcccggccatggcaagccacaaggacgatgaagaaaagttttttcctcagagcggggttctcatctttgggaagcaaggctcagagaaaacaaatgtggacattgaaaaggtcatgattacagacgaagaggaaatcaggacaaccaatcccgtggctacggagcagtatggttctgtatctaccaacctccagagaggcaacagacaagcagctaccgcagatgtcaacacacaaggcgttcttccaggcatggtctggcaggacagagatgtgtaccttcaggggcccatctgggcaaagattccacacacggacggacattttcacccctctcccctcatgggtggattcggacttaaacaccctccgcctcagatcctgatcaagaacacgcctgtacccgcggatcctccgaccaccttcaaccagtcaaagctgaactctttcatcacccagtattctactggccaagtcagcgtggagatcgagtgggagctgcagaaggaaaacagcaagcgctggaaccccgagatccagtacacctccaactactacaaatctacaagtgtggactttgctgttaatacagaaggcgtgtactctgaaccccgccccattggcacccgttacctcacccgtaatctgtaa

SEQ ID NO: 5269 - protein, 737 aa, synthetic construct
  REGION 1..737: note = Description of Artificial Sequence: Synthetic polypeptide
MAADGYLPDWLEDNLSEGIREWWDLKPGAPKPKANQQKQDDGRGLVLPGYKYLGPFNGLDKGEPVNAADAAALEHDKAYDQQLKAGDNPYLRYNHADAEFQERLQEDTSFGGNLGRAVFQAKKRVLEPFGLVEEGAKTAPGKKRPVEQSPQEPDSSSGIGKTGQQPARKRLNFGQTGDADSVPDPQPLGQPPAAPSGLGTNTMATGSGAPMADNNEGADGVGNSSGNWHCDSQWLGDRVITTSTRTWALPTYNNHLYKQISNSTSGGSSNDNAYFGYSTPWGYFDFNRFHCHFSPRDWQRLINNNWGFRPKRLNFKLFNIQVKEVTQNEGTKTIANNLTSTIQVFTDSEYQLPYVLGSAHQGCLPPFPADVFMIPQYGYLTLNNGSQAVGRSSFYCLEYFPSQMLRTGNNFQFTYTFEDVPFHSSYAHSQSLDRLMNPLIDQYLYYLSRTQTTGGTTNTQTLGFSQGGPNTMANQAKNWLPGPCYRQQRVSKTFADNNNSEYSWTGATKYHLNGRDSLVNPGPAMASHKDDEEKFFPQSGVLIFGKQGSEKTNVDIEKVMITDEEEIRTTNPVATEQYGSVSTNLQRGNRQAATADVNTQGVLPGMVWQDRDVYLQGPIWAKIPHTDGHFHPSPLMGGFGLKHPPPQILIKNTPVPADPPTTFNQSKLNSFITQYSTGQVSVEIEWELQKENSKRWNPEIQYTSNYYKSTSVDFAVNTEGVYSEPRPIGTRYLTRNL

SEQ ID NO: 5270 - DNA, 2217 bp, synthetic construct
  misc_feature 1..2217: note = Description of Artificial Sequence: Synthetic polynucleotide
  source 1..2217: mol_type = other DNA
atggctgccgatggttatcttccagattggctcgaggacactctctctgaaggaataagacagtggtgggcgctgaaacctggagccccgaagcccaaagccaaccagcaaaagcaggacgacggccggggtctggtgcttcctggctacaagtacctcggacccttcaacggactcgacaagggggagcccgtcaacgcggcggatgcagcggccctcgagcacgacaaggcctacgaccagcagctcaaagcgggtgacaatccgtacctgcggtataaccacgccgacgccgagtttcaggagcgtctgcaagaagatacgtcttttgggggcaacctcgggcgagcagtcttccaggccaagaagcgggttctcgaacctctcggtctggttgaggaaggcgctaagacggctcctggaaagaagagaccggtagagccatcaccccagcgttctccagactcctctacgggcatcggcaagaaaggccaacagcccgccagaaaaagactcaattttggtcagactggcgactcagagtcagttccagaccctcaacctctcggagaaccaccagcagcccccacaagtttgggatctaatacaatggcttcaggcggtggcgcaccaatggcagacaataacgagggtgccgatggagtgggtaattcctcaggaaattggcattgcgattcccaatggctgggcgacagagtcatcaccaccagcacccgcacctgggccttgcccacctacaataaccacctctacaagcaaatctccagtgcttcaacgggggccagcaacgacaaccactacttcggctacagcaccccctgggggtattttgactttaaccgcttccactgccacttctcgccaagagactggcaaagactcatcaacaacaattggggattccggcccaagagactcaacttcaaactcttcaacatccaagtcaaggaggtcacgacgaatgatggcgtcacgaccatcgccaataacctcaccagcaccatccaggtgtttacggactcggagtaccagctgccgtacgttctcggctctgcccaccagggctgcctgcctccgttcccggcggacgtgttcatgattccccagtatggatacctcaccctgaacaacggaagtcaagcggtgggacgctcatccttttactgcctggagtacttcccttcgcagatgctaaggactggaaataacttccaattcagctataccttcgaggatgtaccttttcacagcagctacgctcacagccagagtttggatcgcttgatgaatcctcttattgatcagtatctgtactacctgaacagaacgcaaggaacaacctctggaacaaccaaccaatcacggctgctttttagccaggctgggcctcagtctatgtctttgcaggccagaaattggctacctgggccctgctaccggcaacagagactttcaaagactgctaacgacaacaacaacagtaactttccttggacagcagccagcaaatatcatctcaatggccgcgactcgctggtgaatccaggaccagctatggccagtcacaaggacgatgaagaaaaatttttccctatgcacggcaatctaatatttggcaaagaagggacaacggcaagtaacgcagaattagataatgtaatgattacggatgaagaagagattcgtaccaccaatcctgtggcaacagagcagtatggaactgtggcaaataacttgcagagctcaaatacagctcccacgactagaactgtcaatgatcagggggccttacctggcatggtgtggcaagatcgtgacgtgtaccttcaggggcccatctgggcaaagattccacacacggacggacattttcacccctctcccctcatgggtggattcggacttaaacaccctcctccgcagattctcatcaagaacaccccggtacctgcgaatccttcgaccaccttcagtgcggcaaagtttgcttccttcatcacacagtactccacgggacaggtcagcgtggagatcgagtgggagctgcagaaggaaaacagcaagcgctggaacccggagatccagtacacttccaactattacaagtctaataatgttgaatttgctgttaatactgaaggtgtatatagtgaaccccgccccattggcaccagatacctgactcgtaatctgtaa

SEQ ID NO: 5271 - protein, 738 aa, synthetic construct
  REGION 1..738: note = Description of Artificial Sequence: Synthetic polypeptide
MAADGYLPDWLEDTLSEGIRQWWALKPGAPKPKANQQKQDDGRGLVLPGYKYLGPFNGLDKGEPVNAADAAALEHDKAYDQQLKAGDNPYLRYNHADAEFQERLQEDTSFGGNLGRAVFQAKKRVLEPLGLVEEGAKTAPGKKRPVEPSPQRSPDSSTGIGKKGQQPARKRLNFGQTGDSESVPDPQPLGEPPAAPTSLGSNTMASGGGAPMADNNEGADGVGNSSGNWHCDSQWLGDRVITTSTRTWALPTYNNHLYKQISSASTGASNDNHYFGYSTPWGYFDFNRFHCHFSPRDWQRLINNNWGFRPKRLNFKLFNIQVKEVTTNDGVTTIANNLTSTIQVFTDSEYQLPYVLGSAHQGCLPPFPADVFMIPQYGYLTLNNGSQAVGRSSFYCLEYFPSQMLRTGNNFQFSYTFEDVPFHSSYAHSQSLDRLMNPLIDQYLYYLNRTQGTTSGTTNQSRLLFSQAGPQSMSLQARNWLPGPCYRQQRLSKTANDNNNSNFPWTAASKYHLNGRDSLVNPGPAMASHKDDEEKFFPMHGNLIFGKEGTTASNAELDNVMITDEEEIRTTNPVATEQYGTVANNLQSSNTAPTTRTVNDQGALPGMVWQDRDVYLQGPIWAKIPHTDGHFHPSPLMGGFGLKHPPPQILIKNTPVPANPSTTFSAAKFASFITQYSTGQVSVEIEWELQKENSKRWNPEIQYTSNYYKSNNVEFAVNTEGVYSEPRPIGTRYLTRNL

SEQ ID NO: 5272 - DNA, 2208 bp, synthetic construct; identical to SEQ ID NO: 5102
  misc_feature 1..2208: note = Description of Artificial Sequence: Synthetic polynucleotide
  source 1..2208: mol_type = other DNA

SEQ ID NO: 5273 - protein, 735 aa, synthetic construct [sequence omitted]

SEQ ID NO: 5274 - DNA, 2208 bp, synthetic construct
  misc_feature 1..2208: note = Description of Artificial Sequence: Synthetic polynucleotide
  source 1..2208: mol_type = other DNA
atggctgccgatggttatcttccagattggctcgaggacaacctctctgagggcattcgcgagtggtgggcgctgaaacctggagccccgaagcccaaagccaaccagcaaaagcaggacgacggccggggtctggtgcttcctggctacaagtacctcggacccttcaacggactcgacaagggggagcccgtcaacgcggcggacgccgcggccctcgagcacgacaaggcctacgaccagcagctgcaggcgggtgacaatccgtacctgcggtataaccacgccgacgccgagtttcaggagcgtctgcaagaagatacgtcttttgggggcaacctcgggcgagcagtcttccaggccaaaaagaggcttcttgaacctcttggtctggttgaggaagcagctaaaacggctcctggaaagaagaggcctgtagagcagtctcctcaggaaccggactcctccgcgggtattggcaaatcgggtgcacagcccgccaaaaagagactcaatttcggtcagactggcgactcagagtcagtcccagaccctcaacctctcggagaaccaccagcagcccccacaagtttgggatctaatacaatggcttcaggcggtggcgcaccaatggcagacaataacgaaggcgccgacggagtgggtaatgcctcaggaaattggcattgcgattccacatggctgggcgacagagtcatcaccaccagcacccgcacctgggccttgcccacctacagcaaccatctctacaagcaaatctccagccaatcaggagcttcaaacgacaacgactactttggctacagcaccccttgggggtattttgatttcaacagattccactgccacttttcaccacgtgactggcaaagactcatcaacaacaactggggattccgacccaagagactcaacttcaagctctttaacattcaagtcaaagaggtcacgcagaatgacggtacgacgacgattgccaataaccttaccagcacggttcaggtgtttactgactcggagtaccagctcccgtacgtcctcggctcggcgcatcaaggatgcctcccgccgttcccagcagacgtcttcatggtgccacagtatggatacctcaccctgaacaacgggagtcaggcagtaggacgctcttcattttactgcctggagtactttccttctcagatgctgcgtaccggaaacaactttaccttcagctacacttttgaggacgttcctttccacagcagctacgctcacagccagagtctggaccgtctcatgaatcctctcatcgaccagtacctgtattacttgagcagaacaaacactccaagtggaaccaccacgcagtcaaggcttcagttttctcaggccggagcgagtgacattcgggaccagtctaggaactggcttcctggaccctgttaccgccagcagcgagtatcaaagacatctgaggataacaacaacagtgaatactcgtggactggagctaccaagtaccacctcaatggcagagactctctggtgaatccgggcccggccatggcaagccacaaggacgatgaagaaaagttttttcctcagagcggggttctcatctttgggaagcaaggctcagagaaaacaaatgtggacattgaaaaggtcatgattacagacgaagaggaaatcaggacaaccaatcccgtggctacggagcagtatggttctgtatctaccaacctccagagaggcaacagacaagcagctaccgcagatgtcaacacacaaggcgttcttccaggcatggtctggcaggacagagatgtgtaccttcaggggcccatctgggcaaagattccacacacggacggacattttcacccctctcccctcatgggtggattcggacttaaacaccctcctccacagattctcatcaagaacaccccggtacctgcgaatccttcgaccaccttcagtgcggcaaagtttgcttccttcatcacacagtactccacgggacaggtcagcgtggagatcgagtgggagctgcagaaggaaaacagcaaacgctggaatcccgaaattcagtacacttccaactacaacaagtctgttaatgtggactttactgtggacactaatggcgtgtattcagagcctcgccccattggcaccagatacctgactcgtaatctgtaa

SEQ ID NO: 5275 - protein, 735 aa, synthetic construct
  REGION 1..735: note = Description of Artificial Sequence: Synthetic polypeptide
MAADGYLPDWLEDNLSEGIREWWALKPGAPKPKANQQKQDDGRGLVLPGYKYLGPFNGLDKGEPVNAADAAALEHDKAYDQQLQAGDNPYLRYNHADAEFQERLQEDTSFGGNLGRAVFQAKKRLLEPLGLVEEAAKTAPGKKRPVEQSPQEPDSSAGIGKSGAQPAKKRLNFGQTGDSESVPDPQPLGEPPAAPTSLGSNTMASGGGAPMADNNEGADGVGNASGNWHCDSTWLGDRVITTSTRTWALPTYSNHLYKQISSQSGASNDNDYFGYSTPWGYFDFNRFHCHFSPRDWQRLINNNWGFRPKRLNFKLFNIQVKEVTQNDGTTTIANNLTSTVQVFTDSEYQLPYVLGSAHQGCLPPFPADVFMVPQYGYLTLNNGSQAVGRSSFYCLEYFPSQMLRTGNNFTFSYTFEDVPFHSSYAHSQSLDRLMNPLIDQYLYYLSRTNTPSGTTTQSRLQFSQAGASDIRDQSRNWLPGPCYRQQRVSKTSEDNNNSEYSWTGATKYHLNGRDSLVNPGPAMASHKDDEEKFFPQSGVLIFGKQGSEKTNVDIEKVMITDEEEIRTTNPVATEQYGSVSTNLQRGNRQAATADVNTQGVLPGMVWQDRDVYLQGPIWAKIPHTDGHFHPSPLMGGFGLKHPPPQILIKNTPVPANPSTTFSAAKFASFITQYSTGQVSVEIEWELQKENSKRWNPEIQYTSNYNKSVNVDFTVDTNGVYSEPRPIGTRYLTRNL

SEQ ID NO: 5276 - DNA, 2208 bp, synthetic construct
  misc_feature 1..2208: note = Description of Artificial Sequence: Synthetic polynucleotide
  source 1..2208: mol_type = other DNA
atggctgccgatggttatcttccagattggctcgaggacaacctctctgagggcattcgcgagtggtgggcgctgaaacctggagccccgaagcccaaagccaaccagcaaaagcaggacgacggccggggtctggtgcttcctggctacaagtacctcggacccttcaacggactcgacaagggggagcccgtcaacgcggcggacgcagcggccctcgagcacgacaaggcctacgaccagcagctgcaggcgggtgacaatccgtacctgcggtataaccacgccgacgccgagttccaggagcgtctgcaagaagatacgtcttttgggggcaacctcgggcgagcagtcttccaggccaagaagagggttctcgaaccttttggtctggttgaggaaggtgctaagacggctcctggaaagaaacgtccggtagagcagtcgccacaagagccagactcctcctcgggcattggcaagacaggccagcagcccgctaaaaagagactcaattttggtcagactggcgactcagagtcagtcccagaccctcaacctctcggagaaccaccagcagcccccacaagtttgggatctaatacaatggcttcaggcggtggcgcaccaatggcagacaataacgagggcgccgacggagtgggtaattcctcgggaaattggcattgcgattccacatggatgggcgacagagtcatcaccaccagcacccgaacctgggccctgcccacctacaacaaccacctctacaaacaaatttccagccaatcaggagcttcaaacgacaaccactactttggctacagcaccccttgggggtattttgactttaacagattccactgccacttttcaccacgtgactggcagcgactcattaacaacaactggggattccggcccaagaaactcaacttcaagctctttaacatccaggtcaaggaggtcacgcagaatgaaggcaccaagaccatcgccaataacctcaccagcaccatccaggtgtttacggactcggagtaccagctgccgtacgttctcggctctgcccaccagggctgcctgcctccgttcccggcggacgtgttcatgattccccagtacggctacctaacactcaacaacggtagtcaggccgtgggacgctcctccttctactgcctggaatactttccttcgcagatgctgagaaccggcaacaacttccagtttacttacaccttcgaggacgtgcctttccacagcagctacgcccacagccagagcttggaccggctgatgaatcctctgattgaccagtacctgtattacttgtctcggactcaaacaacaggaggcacgacaaatacgcagactctgggcttcagccaaggtgggcctaatacaatggccaatcaggcaaagaactggctgcctggaccctgttaccgccagcagcgagtatcaaagacatctgcggataacaacaacagtgaatactcgtggactggagctaccaagtaccacctcaatggcagagactctctggtgaatccgggcccggccatggcaagccacaaggacgatgaagaaaagttttttcctcagagcggggttctcatctttgggaagcaaggctcagagaaaacaaatgtggacattgaaaaggttatgattacagacgaagaggaaatcaggacaaccaatcccgtggctacggagcagtatggttctgtatctaccaacctccagagaggcaacagacaagcagctaccgcagatgtcaacacacagggcgttcttccaggcatggtctggcaggacagagatgtgtaccttcagggtcccatttgggccaaaattcctcacacagatggacactttcacccgtcccctcttatgggcggctttggactcaagaacccgcctcctcagatcctcatcaaaaacacgcctgttcctgcgaatcctccggcagagttttcagctacaaagtttgcttcattcatcacccaatactccacaggacaagtgagtgtggaaattgaatgggagctgcagaaagaaaacagcaagcgctggaatcccgaagtgcagtacacatccaattatgcaaaatctgccaacgttgattttactgtggacactaatggcgtgtattcagagcctcgccccattggcaccagatacctcacccgtaatctgtaa

SEQ ID NO: 5277 - protein, 735 aa, synthetic construct
  REGION 1..735: note = Description of Artificial Sequence: Synthetic polypeptide
MAADGYLPDWLEDNLSEGIREWWALKPGAPKPKANQQKQDDGRGLVLPGYKYLGPFNGLDKGEPVNAADAAALEHDKAYDQQLQAGDNPYLRYNHADAEFQERLQEDTSFGGNLGRAVFQAKKRVLEPFGLVEEGAKTAPGKKRPVEQSPQEPDSSSGIGKTGQQPAKKRLNFGQTGDSESVPDPQPLGEPPAAPTSLGSNTMASGGGAPMADNNEGADGVGNSSGNWHCDSTWMGDRVITTSTRTWALPTYNNHLYKQISSQSGASNDNHYFGYSTPWGYFDFNRFHCHFSPRDWQRLINNNWGFRPKKLNFKLFNIQVKEVTQNEGTKTIANNLTSTIQVFTDSEYQLPYVLGSAHQGCLPPFPADVFMIPQYGYLTLNNGSQAVGRSSFYCLEYFPSQMLRTGNNFQFTYTFEDVPFHSSYAHSQSLDRLMNPLIDQYLYYLSRTQTTGGTTNTQTLGFSQGGPNTMANQAKNWLPGPCYRQQRVSKTSADNNNSEYSWTGATKYHLNGRDSLVNPGPAMASHKDDEEKFFPQSGVLIFGKQGSEKTNVDIEKVMITDEEEIRTTNPVATEQYGSVSTNLQRGNRQAATADVNTQGVLPGMVWQDRDVYLQGPIWAKIPHTDGHFHPSPLMGGFGLKNPPPQILIKNTPVPANPPAEFSATKFASFITQYSTGQVSVEIEWELQKENSKRWNPEVQYTSNYAKSANVDFTVDTNGVYSEPRPIGTRYLTRNL

SEQ ID NO: 5278 - DNA, 2214 bp, synthetic construct; identical to SEQ ID NO: 5268
  misc_feature 1..2214: note = Description of Artificial Sequence: Synthetic polynucleotide
  source 1..2214: mol_type = other DNA

SEQ ID NO: 5279 - protein, 737 aa, synthetic construct; identical to SEQ ID NO: 5269
  REGION 1..737: note = Description of Artificial Sequence: Synthetic polypeptide

SEQ ID NO: 5280 - protein, 736 aa, synthetic construct; identical to SEQ ID NO: 5093
  REGION 1..736: note = Description of Artificial Sequence: Synthetic polypeptide

SEQ ID NO: 5281 - protein, 736 aa, synthetic construct
  REGION 1..736: note = Description of Artificial Sequence: Synthetic polypeptide
MAADGYLPDWLEDNLSEGIREWWDLKPGAPKPKANQQKQDDGRGLVLPGYKYLGPFNGLDKGEPVNAADAAALEHDKAYDQQLKAGDNPYLRYNHADAEFQERLQEDTSFGGNLGRAVFQAKKRVLEPLGLVEEGAKTAPGKKRPVEQSPQEPDSSSGIGKTGQQPAKKRLNFGQTGDSESVPDPQPLGEPPAAPSGLGPNTMASGGGAPMADNNEGADGVGNSSGNWHCDSTWLGDRVITTSTRTWALPTYNNHLYKQISNGTSGGSTNDNTYFGYSTPWGYFDFNRFHCHFSPRDWQRLINNNWGFRPKRLNFKLFNIQVKEVTTNEGTKTIANNLTSTVQVFTDSEYQLPYVLGSAHQGCLPPFPADVFMVPQYGYLTLNNGSQALGRSSFYCLEYFPSQMLRTGNNFQFSYTFEDVPFHSSYAHSQSLDRLMNPLIDQYLYYLVRTQTTGTGGTQTLAFSQAGPSSMANQARNWVPGPCYRQQRVSTTTNQNNNSNFAWTGAAKFKLNGRDSLMNPGVAMASHKDDEDRFFPSSGVLIFGKQGAGNDGVDYSQVLITDEEEIKATNPVATEEYGAVAINNQRANTQAQTGLVHNQGVIPGMVWQNRDVYLQGPIWAKIPHTDGNFHPSPLMGGFGLKHPPPQILIKNTPVPADPPLTFNQAKLNSFITQYSTGQVSVEIEWELQKENSKRWNPEIQYTSNYYKSTNVDFAVNTEGVYSEPRPIGTRYLTRNL

SEQ ID NO: 5282 - protein, 736 aa, synthetic construct
  REGION 1..736: note = Description of Artificial Sequence: Synthetic polypeptide
MAADGYLPDWLEDNLSEGIREWWDLKPGAPKPKANQQKQDDGRGLVLPGYKYLGPFNGLDKGEPVNAADAAALEHDKAYDQQLKAGDNPYLRYNHADAEFQERLQEDTSFGGNLGRAVFQAKKRVLEPLGLVEEGAKTAPGKKRPVEQSPQEPDSSSGIGKTGQQPAKKRLNFGQTGDSESVPDPQPLGEPPAAPSGLGPNTMASGGGAPMADNNEGADGVGNSSGNWHCDSTWLGDRVITTSTRTWALPTYNNHLYKQISNGTSGGSTNDNTYFGYSTPWGYFDFNRFHCHFSPRDWQRLINNNWGFRPKRLNFKLFNIQVKEVTTNEGTKTIANNLTSTVQVFTDSEYQLPYVLGSAHQGCLPPFPADVFMVPQYGYLTLNNGSQALGRSSFYCLEYFPSQMLRTGNNFQFSYTFEDVPFHSSYAHSQSLDRLMNPLIDQYLYYLVRTQTTGTGGTQTLAFSQAGPSSMANQARNWVPGPCYRQQRVSTTTNQNNNSNFAWTGAAKFKLNGRDSLMNPGVAMASHKDDEDAFFPSSGVLIFGKQGAGNDGVDYSQVLITDEEEIKATNPVATEEYGAVAINNQAANTQAQTGLVHNQGVIPGMVWQNRDVYLQGPIWAKIPHTDGNFHPSPLMGGFGLKHPPPQILIKNTPVPADPPLTFNQAKLNSFITQYSTGQVSVEIEWELQKENSKRWNPEIQYTSNYYKSTNVDFAVNTEGVYSEPRPIGTRYLTRNL

SEQ ID NO: 5283 - protein, 538 aa, synthetic construct
  REGION 1..538: note = Description of Artificial Sequence: Synthetic polypeptide
MRAAAGGNGGDAGQGAEGVGNASGDWHCDSTWSESHVTTTSTRTWVLPTYNNHLYLRLGSSNASDTFNGFSTPWGYFDFNRFHCHFSPRDWQRLINNHWGLRPKSMQVRIFNIQVKEVTTSNGETTVSNNLTSTVQIFADSTYELPYVMDAGQEGSLPPFPNDVFMVPQYGYCGLVTGGSSQNQTDRNAFYCLEYFPSQMLRTGNNFEMVYKFENVPFHSMYAHSQSLDRLMNPLLDQYLWELQSTTSGGTLNQGNSATNFAKLTKTNFSGYRKNWLPGPMMKQQRFSKTASQNYKIPQGRNNSLLHYETRTTLDGRWSNFAPGTAMATAANDATDFSQAQLIFAGPNITGNTTTDANNLMFTSEDELRATNPRDTDLFGHLATNQQNATTVPTVDDVDGVGVYPGMVWQDRDIYYQGPIWAKIPHTDGHFHPSPLIGGFGLKSPPPQIFIKNTPVPANPATTFSPARINSFITQYSTGQVAVKIEWEIQKERSKRWNPEVQFTSNYGAQDSLLWAPDNAGAYKEPRAIGSRYLTNHL

SEQ ID NO: 5284 - protein, 736 aa, synthetic construct
  REGION 1..736: note = Description of Artificial Sequence: Synthetic polypeptide
MSFVDHPPDWLESIGDGFREFLGLEAGPPKPKANQQKQDNARGLVLPGYKYLGPGNGLDKGDPVNFADEVAREHDLSYQKQLEAGDNPYLKYNHADAEFQEKLASDTSFGGNLGKAVFQAKKRILEPLGLVETPDKTAPAAKKRPLEQSPQEPDSSSGVGKKGKQPARKRLNFDDEPGAGDGPPPEGPSSGAMSTETEMRAAAGGNGGDAGQGAEGVGNASGDWHCDSTWSESHVTTTSTRTWVLPTYNNHLYLRLGSSNASDTFNGFSTPWGYFDFNRFHCHFSPRDWQRLINNHWGLRPKSMQVRIFNIQVKEVTTSNGETTVSNNLTSTVHIFADSTYELPYVMDAGQEGSLPPFPNDVFMVPQYGYCGLVTGGSSQNQTDRNAFYCLEYFPSQMLRTGNNFEMVYKFENVPFHSMYAHSQSLDRLMNPLLDQYLWELQSTTSGGTLNQGNSATNFAKLTNKNFSGYRKNWLPGPMMKQQRFSKTASQNYKIPQGGNNSLLHYETRTTLDRRWSNFAPGTAMATAANDATDFSQAQLIFAGPNITGNTTTDANNLMFTSEDELRATNPRDTDLFGHLATNQQNATTVPTVDDVDGVGVYPGMVWQDRDIYYQGPIWAKIPHTDGHFHPSPLIGGFGLKSPPPQIFIKNTPVPANPATTFSPARINSFITQYSTGQVAVKIEWEIQKERSKRWNPEVQFTSNYGAQDSLLWAPDNAGAYKEPRAIGSRYLTNHL

SEQ ID NO: 5285 - protein, 736 aa, synthetic construct
  REGION 1..736: note = Description of Artificial Sequence: Synthetic polypeptide
MSFVDHPPDWLESIGDGFREFLGLEAGPPKPKANQQKQDNARGLVLPGYKYLGPGNGLDKGDPVNFADEVAREHDLSYQKQLEAGDNPYLKYNHADAEFQEKLASDTSFGGNLGKAVFQAKKRILEPLGLVETPDKTAPAAKKRPLEQSPQEPDSSSGVGKKGKQPARKRLNFDDEPGAGDGPPPEGPSSGAMSTETEMRAAAGGNGGDAGQGAEGVGNASGDWHCDSTWSESHVTTTSTRTWVLPTYNNHLYLRLGSSNASDTFNGFSTPWGYFDFNRFHCHFSPRDWQRLINNHWGLRPKSMQVRIFNIQVKEVTTSNGETTVSNNLTSTVQIFADSTYELPYVMDAGQEGSLPPFPNDVFMVPQYGYCGLVTGGSSQNQTDRNAFYCLEYFPSQMLRTGNNFEMVYKFENVPFHSMYAHSQSLDRLMNPLLDQYLWELQSTTSGGTLNQGNSATNFAKLTKTNFSGYRKNWLPGPMMKQQRFSKTASQNYKIPQGRNNSLLHYETRTTLDGRWSNFAPGTAMATAANDATDFSQAQLIFAGPNITGNTTTDANNLMFTSEDELRATNPRDTDLFGHLATNQQNATTVPTVDDVDGVGVYPGMVWQDRDIYYQGPIWAKIPHTDGHFHPSPLIGGFGLKSPPPQIFIKNTPVPANPATTFSPARINSFITQYSTGQVAVKIEWEIQKERSKRWNPEVQFTSNYGAQDSLLWAPDNAGAYKEPRAIGSRYLTNHL

SEQ ID NO: 5286 - DNA, 2214 bp, synthetic construct
  misc_feature 1..2214: note = Description of Artificial Sequence: Synthetic polynucleotide
  source 1..2214: mol_type = other DNA
atggctgccgatggttatcttccagattggctcgaggacactctctctgaaggaataagacagtggtggaagctcaaacctggcccaccaccaccaaagcccgcagagcggcataaggacgacagcaggggtcttgtgcttcctgggtacaagtacctcggacccttcaacggactcgacaagggagagccggtcaacgaggcagacgccgcggccctcgagcacgacaaagcctacgaccggcagctcgacagcggagacaacccgtacctcaagtacaaccacgccgacgcggagtttcaggagcgccttaaagaagatacgtcttttgggggcaacctcgggcgagcagtcttccaggccaaaaagaggcttcttgaacctcttggtctggttgaggaagcggctaagacggctcctggaaagaagaggcctgtagagcagtctcctcaggaaccggactcctcctcgggcatcggcaagacaggccagcagcccgctaaaaagagactcaatttcggtcagactggcgacacagagtcagtcccagaccctcaaccaatcggagaacctcccgcagccccctcaggtgtgggatctcttacaatggcttcaggtggtggcgcaccagtggcagacaataacgaaggtgccgatggagtgggtagttcctcgggaaattggcattgcgattcccaatggctgggggacagagtcatcaccaccagcacccgaacctgggccctgcccacctacaacaatcacctctacaagcaaatctccaacgggacatcgggaggagccaccaacgacaacacctacttcggctacagcaccccctgggggtattttgactttaacagattccactgccacttttcaccacgtgactggcagcgactcatcaacaacaactggggattccggcccaagagactcagcttcaagctcttcaacatccaggtcaaggaggtcacgcagaatgaaggcaccaagaccatcgccaataaccttaccagcacggtccaggtcttcacggactcggagtaccagctgccgtacgttctcggctctgcccaccagggctgcctgcctccgttcccggcggacgtgttcatgattccccagtacggctacctaacactcaacaacggtagtcaggccgtgggacgctcctccttctactgcctggaatactttccttcgcagatgctgagaaccggcaacaacttccagtttacttacaccttcgaggacgtgcctttccacagcagctacgcccacagccagagcttggaccggctgatgaatcctctgattgaccagtacctgtactacttgtctcggactcaaacaacaggaggcacggcaaatacgcagactctgggcttcagccaaggtgggcctaatacaatggccaatcaggcaaagaactggctgccaggaccctgttaccgccaacaacgcgtctcaacgacaaccgggcaaaacaacaatagcaactttgcctggactgctgggaccaaataccatctgaatggaagaaattcattggctaatcctggcatcgctatggcaacacacaaagacgacaaggagcgtttttttcccagtaacgggatcctgatttttggcaaacaaaatgctgccagagacaatgcggattacagcgatgtcatgctcaccagcgaggaagaaatcaaaaccactaaccctgtggctacagaggaatacggtatcgtggcagataacttgcagcagcaaaacacggctcctcaaattggaactgtcaacagccagggggccttacccggtatggtttggcagaaccgggacgtgtacctgcagggtcccatctgggccaagattcctcacacggacggcaacttccacccgtctccgctgatgggcggctttggcctgaaacatcctccgcctcagatcctgatcaagaacacgcctgtacctgcggatcctccgaccaccttcaaccagtcaaagctgaactctttcatcacgcaatacagcaccggacaggtcagcgtggaaattgaatgggagctgcagaaggaaaacagcaagcgctggaaccccgagatccagtacacctccaactactacaaatctacaagtgtggactttgctgttaatacagaaggcgtgtactctgaaccccaccccattggcacccgttacctcacccgtcccctgtaa

SEQ ID NO: 5287 - protein, 737 aa, synthetic construct
  REGION 1..737: note = Description of Artificial Sequence: Synthetic polypeptide
MAADGYLPDWLEDTLSEGIRQWWKLKPGPPPPKPAERHKDDSRGLVLPGYKYLGPFNGLDKGEPVNEADAAALEHDKAYDRQLDSGDNPYLKYNHADAEFQERLKEDTSFGGNLGRAVFQAKKRLLEPLGLVEEAAKTAPGKKRPVEQSPQEPDSSSGIGKTGQQPAKKRLNFGQTGDTESVPDPQPIGEPPAAPSGVGSLTMASGGGAPVADNNEGADGVGSSSGNWHCDSQWLGDRVITTSTRTWALPTYNNHLYKQISNGTSGGATNDNTYFGYSTPWGYFDFNRFHCHFSPRDWQRLINNNWGFRPKRLSFKLFNIQVKEVTQNEGTKTIANNLTSTVQVFTDSEYQLPYVLGSAHQGCLPPFPADVFMIPQYGYLTLNNGSQAVGRSSFYCLEYFPSQMLRTGNNFQFTYTFEDVPFHSSYAHSQSLDRLMNPLIDQYLYYLSRTQTTGGTANTQTLGFSQGGPNTMANQAKNWLPGPCYRQQRVSTTTGQNNNSNFAWTAGTKYHLNGRNSLANPGIAMATHKDDKERFFPSNGILIFGKQNAARDNADYSDVMLTSEEEIKTTNPVATEEYGIVADNLQQQNTAPQIGTVNSQGALPGMVWQNRDVYLQGPIWAKIPHTDGNFHPSPLMGGFGLKHPPPQILIKNTPVPADPPTTFNQSKLNSFITQYSTGQVSVEIEWELQKENSKRWNPEIQYTSNYYKSTSVDFAVNTEGVYSEPHPIGTRYLTRPL

SEQ ID NO: 5288 - protein, 736 aa, synthetic construct
  REGION 1..736: note = Description of Artificial Sequence: Synthetic polypeptide
MAADGYLPDWLEDNLSEGIREWWDLKPGAPKPKANQQKQDDGRGLVLPGYKYLGPFNGLDKGEPVNAADAAALEHDKAYDQQLKAGDNPYLRYNHADAEFQERLQEDTSFGGNLGRAVFQAKKRVLEPLGLVEEGAKTAPGKKRPVEQSPQEPDSSSGIGKTGQQPAKKRLNFGQTGDTESVPDPQPIGEPPAAPSGVGSLTMASGGGAPVADNNEGADGVGSSSGNWHCDSQWLGDRVITTSTRTWALPTYNNHLYKQISSASTGASNDNHYFGYSTPWGYFDFNRFHCHFSPRDWQRLINNNWGFRPKRLNFKLFNIQVKEVTDNNGVKTIANNLTSTVQVFTDSDYQLPYVLGSAHQGCLPPFPADVFMIPQYGYLTLNNGSQAVGRSSFYCLEYFPSQMLRTGNNFQFTYTFEDVPFHSSYAHSQSLDRLMNPLIDQYLYYLSRTQTTGGTANTQTLGFSQGGPNTMANQAKNWLPGPCYRQQRVSTTTGQNNNSNFAWTAGTKYHLNGRNSLANPGIAMATHKDDKERFFPSNGILIFGKQNAARDNADYSDVMLTSEEEIKTTNPVATEEYGIVADNLQQQNTAPQIGTVNSQGALPGMVWQNRDVYLQGPIWAKIPHTDGNFHPSPLMGGFGLKHPPPQILIKNTPVPADPPTTFNQSKLNSFITQYSTGQVSVEIEWELQKENSKRWNPEIQYTSNYYKSTSVDFAVNTEGVYSEPHPIGTRYLTRPL

SEQ ID NO: 5289 - protein, 736 aa, synthetic construct
  REGION 1..736: note = Description of Artificial Sequence: Synthetic polypeptide
MAADGYLPDWLEDTLSEGIRQWWKLKPGPPPPKPAERHKDDSRGLVLPGYKYLGPFNGLDKGEPVNEADAAALEHDKAYDRQLDSGDNPYLKYNHADAEFQERLQGDTSFGGNLGRAVFQAKKRVLEPLGLVEEGAKTAPGKKRPVEQSPQEPDSSSGIGETGQQPAKKRLNFGQTGDSESVPDPQPLGEPPATPAAVGPTTMASGGGAPMADNNEGADGVGSSSGNWHCDSQWLGDRVITTSTRTWALPTYNNHLYKQISSASTGASNDNHYFGYSTPWGYFDFNRFHCHFSPRDWQRLINNNWGFRPKRLSFKLFNIQVKEVTDNNGVKTIANNLTSTVQVFTDSEYQLPYVLGSAHQGCLPPFPADVFMIPQYGYLTLNNGSQAVGRSSFYCLEYFPSQMLRTGNNFTFSYTFEDVPFHSSYAHSQSLDRLMNPLIDQYLYYLSRTQTTGGTANTQTLGFSQGGPNTMANQAKNWLPGPCYRQQRVSTTTGQNNNSNFAWTAGTKYHLNGRNSLANPGIAMATHKDDKERFFPSNGILIFGKQNAARDNADYSDVMLTSEEEIKTTNPVATEEYGIVADNLQQQNTAPQIGTVNSQGALPGMVWQNRDVYLQGPIWAKIPHTDGNFHPSPLMGGFGLKHPPPQILIKNTPVPADPPTTFNQSKLNSFITQYSTGQVSVEIEWELQKENSKRWNPEIQYTSNYYKSTSVDFAVNTEGVYSEPHPIGTRYLTRPL

SEQ ID NO: 5290 - DNA, 2181 bp, synthetic construct
  misc_feature 1..2181: note = Description of Artificial Sequence: Synthetic polynucleotide
  source 1..2181: mol_type = other DNA
atgtcttttgttgatcaccctccagattggttggaagaagttggtgaaggtcttcgcgagtttttgggccttgaagcgggcccaccgaaaccaaaacccaatcagcagcatcaagatcaagcccgtggtcttgtgctgcctggttataactatctcggacccggaaacggtctcgatcgaggagagcctgtcaacagggcagacgaggtcgcgcgagagcacgacatctcgtacaacgagcagcttgaggcgggagacaacccctacctcaagtacaaccacgcggacgccgagtttcaggagaagctcgccgacgacacatccttcgggggaaacctcggaaaggcagtctttcaggccaagaaaagggttctcgaaccttttggcctggttgaagagggtgctaagacggcccctaccggaaagcggatagacgaccactttccaaaaagaaagaaggctcggaccgaagaggactccaagccttccacctcgtcagacgccgaagctggacccagcggatcccagcagctgcaaatcccagcacaaccagcctcaagtttgggagctgatacaatgtctgcgggaggtggcggcccattgggcgacaataaccaaggtgccgatggagtgggcaatgcctcgggagattggcattgcgattccacgtggatgggggacagagtcgtcaccaagtccacccgcacctgggtgctgcccagctacaacaaccaccagtaccgagagatcaaaagcggctccgtcgacggaagcaacgccaacgcctactttggatacagcaccccctgggggtactttgactttaaccgcttccacagccactggagcccccgagactggcaaagactcatcaacaactattggggcttcagaccccggtctctcagagtcaaaatcttcaacatccaagtcaaagaggtcacggtgcaggactccaccaccaccatcgccaacaacctcacctccaccgtccaagtgtttacggacgacgactaccaactcccgtacgtcgtcggcaacgggaccgagggatgcctgccggccttccccccgcaggtctttacgctgccgcagtacggctacgcgacgctgaaccgagacaacggagacaacccgacagagcggagcagcttcttttgcctagagtactttcccagcaagatgctgaggacgggcaacaactttgagtttacctacagctttgaagaggtgcccttccactgcagcttcgccccgagccagaacctctttaagctggccaacccgctggtggaccagtacctgtaccgcttcgtgagcacctcggccacgggcgccatccagttccaaaagaacctggcgggcagatacgccaacacctacaaaaactggttcccggggcccatgggccgaacccagggctggaacacgagctctggggtcagcagcaccaacagagtcagcgtcaacaacttttccgtctcaaaccggatgaacctggagggggccagctaccaagtgaacccccagcccaacgggatgacaaacacgctccaaggcagcaaccgctacgcgctggaaaacaccatgatcttcaacgctcaaaacgccacgccgggaactacctcggtgtacccagaggacaatctactgctgaccagcgagagcgagactcagcccgtcaaccgggtggcttacaacacgggcggtcagatggccaccaacgcccagaacgccaccacggctcccacggtcgggacctacaacctccaggaagtgcttcctggcagcgtatggatggagagggacgtgtacctccaaggacccatctgggccaagatcccagagacgggggcgcactttcacccctctccggccatgggcggattcggactcaaacacccgccgcccatgatgctcatcaaaaacacgccggtgcccggcaacatcaccagcttctcggacgtgcccgtcagcagcttcatcacccagtacagcaccgggcaggtcaccgtggagatggaatgggagctcaaaaaggaaaactccaagaggtggaacccagagatccagtacaccaacaactacaacgacccccagtttgtggactttgctccagacggctccggcgaatacagaaccaccagagccatcggaacccgatacctcacccgacccctt

SEQ ID NO: 5291 - protein, 726 aa, synthetic construct
  REGION 1..726: note = Description of Artificial Sequence: Synthetic polypeptide
MSFVDHPPDWLEEVGEGLREFLGLEAGPPKPKPNQQHQDQARGLVLPGYNYLGPGNGLDRGEPVNRADEVAREHDISYNEQLEAGDNPYLKYNHADAEFQEKLADDTSFGGNLGKAVFQAKKRVLEPFGLVEEGAKTAPTGKRIDDHFPKRKKARTEEDSKPSTSSDAEAGPSGSQQLQIPAQPASSLGADTMSAGGGGPLGDNNQGADGVGNASGDWHCDSTWMGDRVVTKSTRTWVLPSYNNHQYREIKSGSVDGSNANAYFGYSTPWGYFDFNRFHSHWSPRDWQRLINNYWGFRPRSLRVKIFNIQVKEVTVQDSTTTIANNLTSTVQVFTDDDYQLPYVVGNGTEGCLPAFPPQVFTLPQYGYATLNRDNGDNPTERSSFFCLEYFPSKMLRTGNNFEFTYSFEEVPFHCSFAPSQNLFKLANPLVDQYLYRFVSTSATGAIQFQKNLAGRYANTYKNWFPGPMGRTQGWNTSSGSSTNRVSVNNFSVSNRMNLEGASYQVNPQPNGMTNTLQGSNRYALENTMIFNAQNATPGTTSVYPEDNLLLTSESETQPVNRVAYNTGGQMATNAQNATTAPTVGTYNLQEVLPGSVWMERDVYLQGPIWAKIPETGAHFHPSPAMGGFGLKHPPPMMLIKNTPVPGNITSFSDVPVSSFITQYSTGQVTVEMEWELKKENSKRWNPEIQYTNNYNDPQFVDFAPDGSGEYRTTRAIGTRYLTRPL

SEQ ID NO: 5292 - protein, 735 aa, synthetic construct
  REGION 1..735: note = Description of Artificial Sequence: Synthetic polypeptide
MAADGYLPDWLEDTLSEGIRQWWKLKPGPPPPKPAERHKDDSRGLVLPGYKYLGPFNGLDKGEPVNEADAAALEHDKAYDRQLDSGDNPYLKYNHADAEFQERLKEDTSFGGNLGRAVFQAKKRILEPLGLVEEPVKTAPGKKRPVEHSPAEPDSSSGTGKSGQQPARKRLNFGQTGDADSVPDPQPLGQPPAAPSGLGTNTMASGSGAPMADNNEGADGVGNSSGNWHCDSTWMGDRVITTSTRTWALPTYNNHLYKQISSQSGASNDNHYFGYSTPWGYFDFNRFHCHFSPRDWQRLINNNWGFRPKRLSFKLFNIQVKEVTQNDGTTTIANNLTSTVQVFTDSEYQLPYVLGSAHQGCLPPFPADVFMVPQYGYLTLNNGSQAVGRSSFYCLEYFPSQMLRTGNNFTFSYTFEDVPFHSSYAHSQSLDRLMNPLIDQYLYYLSRTNTPSGTTTMSRLQFSQAGASDIRDQSRNWLPGPCYRQQRVSKTAADNNNSDYSWTGATKYHLNGRDSLVNPGPAMASHKDDEEKYFPQSGVLIFGKQDSGKTNVDIEKVMITDEEEIRTTNPVATEQYGSVSTNLQSGNTQAATSDVNTQGVLPGMVWQDRDVYLQGPIWAKIPHTDGHFHPSPLMGGFGLKHPPPQILIKNTPVPANPSTTFSAAKFASFITQYSTGQVSVEIEWELQKENSKRWNPEIQYTSNYNKSVNVDFTVDTNGVYSEPRPIGTRYLTRNL

SEQ ID NO: 5293 - DNA, 1803 bp, Bovine adeno-associated virus
  source 1..1803: mol_type = other DNA
acggcgcctgcggcaaaaaagaggcctctagagcagagtcctcaagagccagactcctcgagcggagttggcaagaaaggcaaacagcctgccagaaagagactcaactttgacgacgaacctggagccggagacgggcctcccccagaaggaccatcttccggagctatgtctactgagactgaaatgcgtgcagcagctggcggaaatggtggcgatgcgggacaaggtgccgagggagtgggtaatgcctccggtgattggcattgcgattccacttggtcagagagccacgtcaccaccacctcaacccgcacctgggtcctgccgacctacaacaaccacctgtacctgcggctcggctcgagcaacgccagcgacaccttcaacggattctccaccccctggggatactttgactttaaccgcttccactgccacttctcgccaagagactggcaaaggctcatcaacaaccactggggactgcgccccaaaagcatgcaagtccgcatcttcaacatccaagttaaggaggtcacgacgtctaacggggagacgaccgtatccaacaacctcaccagcacggtccagatctttgcggacagcacgtacgagctcccgtacgtgatggatgcaggtcaggagggcagcttgcctcctttccccaacgacgtgttcatggtgcctcagtacgggtactgcggactggtaaccggaggcagctctcaaaaccagacagacagaaatgccttctactgtctggagtactttcccagccagatgctgagaaccggaaacaactttgagatggtgtacaagtttgaaaacgtgcccttccactccatgtacgctcacagccagagcctggataggctgatgaacccgctgctggaccagtacctgtgggagctccagtctaccacctctggaggaactctcaaccagggcaattcagccaccaactttgccaagctgaccaaaacaaacttttctggctaccgcaaaaactggctcccggggcccatgatgaagcagcagagattctccaagactgccagtcaaaactacaagattccccagggaagaaacaacagtctgctccattatgagaccagaactaccctcgacggaagatggagcaattttgccccgggaacggccatggcaaccgcagccaacgacgccaccgacttctctcaggcccagctcatctttgcggggcccaacatcaccggcaacaccaccacagatgccaataacctgatgttcacttcagaagatgaacttagggccaccaacccccgggacactgacctgtttggccacctggcaaccaaccagcaaaacgccaccaccgttcctaccgtagacgacgtggacggagtcggcgtgtacccgggaatggtgtggcaggacagagacatttactaccaagggcccatttgggccaaaattccacacacggatggacactttcacccgtctcctctcattggcggatttggactgaaaagcccgcctccacaaatattcatcaaaaacactcctgtacccgccaatcccgcaacgaccttctctccggccagaatcaacagcttcatcacccagtacagcaccggacaggtggctgtcaaaatagaatgggaaatccagaaggagcggtccaagagatggaacccagaggtccagttcacgtccaactacggagcacaggactcgcttctctgggctcccgacaacgccggagcctacaaagagcccagggccattggatcccgatacctcaccaaccacctctag

SEQ ID NO: 5294 - DNA, 1617 bp, Bovine adeno-associated virus
  source 1..1617: mol_type = other DNA
atgcgtgcagcagctggcggaaatggtggcgatgcgggacaaggtgccgagggagtgggtaatgcctccggtgattggcattgcgattccacttggtcagagagccacgtcaccaccacctcaacccgcacctgggtcctgccgacctacaacaaccacctgtacctgcggctcggctcgagcaacgccagcgacaccttcaacggattctccaccccctggggatactttgactttaaccgcttccactgccacttctcgccaagagactggcaaaggctcatcaacaaccactggggactgcgccccaaaagcatgcaagtccgcatcttcaacatccaagttaaggaggtcacgacgtctaacggggagacgaccgtatccaacaacctcaccagcacggtccagatctttgcggacagcacgtacgagctcccgtacgtgatggatgcaggtcaggagggcagcttgcctcctttccccaacgacgtgttcatggtgcctcagtacgggtactgcggactggtaaccggaggcagctctcaaaaccagacagacagaaatgccttctactgtctggagtactttcccagccagatgctgagaaccggaaacaactttgagatggtgtacaagtttgaaaacgtgcccttccactccatgtacgctcacagccagagcctggataggctgatgaacccgctgctggaccagtacctgtgggagctccagtctaccacctctggaggaactctcaaccagggcaattcagccaccaactttgccaagctgaccaaaacaaacttttctggctaccgcaaaaactggctcccggggcccatgatgaagcagcagagattctccaagactgccagtcaaaactacaagattccccagggaagaaacaacagtctgctccattatgagaccagaactaccctcgacggaagatggagcaattttgccccgggaacggccatggcaaccgcagccaacgacgccaccgacttctctcaggcccagctcatctttgcggggcccaacatcaccggcaacaccaccacagatgccaataacctgatgttcacttcagaagatgaacttagggccaccaacccccgggacactgacctgtttggccacctggcaaccaaccagcaaaacgccaccaccgttcctaccgtagacgacgtggacggagtcggcgtgtacccgggaatggtgtggcaggacagagacatttactaccaagggcccatttgggccaaaattccacacacggatggacactttcacccgtctcctctcattggcggatttggactgaaaagcccgcctccacaaatattcatcaaaaacactcctgtacccgccaatcccgcaacgaccttctctccggccagaatcaacagcttcatcacccagtacagcaccggacaggtggctgtcaaaatagaatgggaaatccagaaggagcggtccaagagatggaacccagaggtccagttcacgtccaactacggagcacaggactcgcttctctgggctcccgacaacgccggagcctacaaagagcccagggccattggatcccgatacctcaccaaccacctctag

SEQ ID NO: 5295 - DNA, 1173 bp, Bovine adeno-associated virus
  source 1..1173: mol_type = other DNA
atggcgctggtaagctggctggtggaacatggcatcacttccgagaagcagtggattcaggagaatcaggagagctacctgtccttcaactccacgggaaactctcggagccagattaaagccgcgcttgacaacgcgtcaaaaattatgagtctgaccaaatctgcctcagactatctcgtgggacagactgttccagaggacatttctgaaaacagaatctggcagatttttgatctcaacggctacgacccggcatacgcgggctctgttctctacggctggtgcactcgcgcctttggaaagaggaacaccgtctggctgtatggacccgcgaccaccggaaagaccaacatcgcggaagccatctctcacaccgtgcccttttatggctgtgtgaactggactaatgagaactttccctttaatgactgtgtggaaaaaatgttgatctggtgggaggagggaaagatgaccagcaaggtggtggaacccgccaaggccatcttgggggggtctagagtacgagtggatcaaaaatgtaaatcctctgtacaagtagactctaccccggtgattatcacctccaatactaacatgtgtgtggtggtggatgggaactccacgacctttgaacaccagcagccgctggaagaccgcatgttcagatttgaactcatgcggcggctcccgccagattttggcaagattaccaagcaggaagtcaaagacttttttgcttgggcaaaggtcaaccaggtgccggtgactcacgagtttatggttcccaagaaagtggcgggaactgagagggcggagacttctagaaaacgcccactggatgacgtcaccaataccaactataaaagtccggagaagcgggcccggctctcagttgttcctgagacgcctcgcagttcagacgtgcctgtagagcccgctcctctgcgacctctcaactggtcttccaggtatgaatgcagatgtgactatcatgctaaatttgactctgtaacgggggaatgtgacgagtgtgaatatttgaatcggggcaaaaatggctgtatctttcataatgctacacattgtcaaatttgtcacgctgttcctccatgggaaaaggaaaatgtgtcagattttaatgattttgatgactgtaataaagagcagtaa

SEQ ID NO: 5296 - DNA, 1833 bp, Bovine adeno-associated virus
  source 1..1833: mol_type = other DNA
atggctaccttctatgaagtcattgttcgcgttccatttgatgtggaagagcacctgcctggaatttctgacaactttgtagactgggtaactggtcaaatttgggagctgcctcccgagtcagatttgaatttgactctgattgagcagcctcagctgacggtggctgacagaattcgccgcgtgttcctgtacgagtggaacaaattttccaagcaggagagcaaattctttgtgcagtttgaaaagggatctgaatattttcatctgcacacgctcgtggagacctccggcatctcttctatggtccttggccgctacgtgagtcagattcgcgcccagctggtgaaggtggtgttccagaacattgagccgcggattaacgactgggtcgccatcaccaaggtaaagaagggcggagccaataaggtggtggattctgggtatattcccgcctacctgctgccgaaggtccaaccagagcttcagtgggcgtggactaacctcgaagagtataaattggccgccctcaatctggaggagcgcaaacggctcgtcgctcagtttcagcttgagtcctcgcagcgctcgcaagaggcatcttcccagagggacgtttcggctgacccggtcatcaagagcaagacttcccagaaatacatggcgctggtaagctggctggtggaacatggcatcacttccgagaagcagtggattcaggagaatcaggagagctacctgtccttcaactccacgggaaactctcggagccagattaaagccgcgcttgacaacgcgtcaaaaattatgagtctgaccaaatctgcctcagactatctcgtgggacagactgttccagaggacatttctgaaaacagaatctggcagatttttgatctcaacggctacgacccggcatacgcgggctctgttctctacggctggtgcactcgcgcctttggaaagaggaacaccgtctggctgtatggacccgcgaccaccggaaagaccaacatcgcggaagccatctctcacaccgtgcccttttatggctgtgtgaactggactaatgagaactttccctttaatgactgtgtggaaaaaatgttgatctggtgggaggagggaaagatgaccagcaaggtggtggaacccgccaaggccatcttgggggggtctagagtacgagtggatcaaaaatgtaaatcctctgtacaagtagactctaccccggtgattatcacctccaatactaacatgtgtgtggtggtggatgggaactccacgacctttgaacaccagcagccgctggaagaccgcatgttcagatttgaactcatgcggcggctcccgccagattttggcaagattaccaagcaggaagtcaaagacttttttgcttgggcaaaggtcaaccaggtgccggtgactcacgagtttatggttcccaagaaagtggcgggaactgagagggcggagacttctagaaaacgcccactggatgacgtcaccaataccaactataaaagtccggagaagcgggcccggctctcagttgttcctgagacgcctcgcagttcagacgtgcctgtagagcccgctcctctgcgacctctcaactggtcttccaggtatgaatgcagatgtgactatcatgctaaatttgactctgtaacgggggaatgtgacgagtgtgaatatttgaatcggggcaaaaatggctgtatctttcataatgctacacattgtcaaatttgtcacgctgttcctccatgggaaaaggaaaatgtgtcagattttaatgattttgatgactgtaataaagagcagtaa

SEQ ID NO: 5297 - DNA, 2211 bp, Bovine adeno-associated virus
  source 1..2211: mol_type = other DNA
atgtcttttgttgaccaccctccagattggttggaatcgatcggcgacggctttcgtgaatttctcggccttgaggcgggtcccccgaaacccaaggccaatcaacagaagcaagataacgctcgaggtcttgtgcttcctgggtacaagtatcttggtcctgggaacggccttgataagggcgatcctgtcaattttgctgacgaggttgcccgagagcacgacctctcctaccagaaacagcttgaggcgggcgataacccttacctcaagtacaaccacgcggacgcagagtttcaggagaaactcgcttctgacacttcttttgggggaaaccttgggaaggctgttttccaggctaaaaagaggattctcgaacctcttggcctggttgagacgccggataaaacggcgcctgcggcaaaaaagaggcctctagagcagagtcctcaagagccagactcctcgagcggagttggcaagaaaggcaaacagcctgccagaaagagactcaactttgacgacgaacctggagccggagacgggcctcccccagaaggaccatcttccggagctatgtctactgagactgaaatgcgtgcagcagctggcggaaatggtggcgatgcgggacaaggtgccgagggagtgggtaatgcctccggtgattggcattgcgattccacttggtcagagagccacgtcaccaccacctcaacccgcacctgggtcctgccgacctacaacaaccacctgtacctgcggctcggctcgagcaacgccagcgacaccttcaacggattctccaccccctggggatactttgactttaaccgcttccactgccacttctcgccaagagactggcaaaggctcatcaacaaccactggggactgcgccccaaaagcatgcaagtccgcatcttcaacatccaagttaaggaggtcacgacgtctaacggggagacgaccgtatccaacaacctcaccagcacggtccagatctttgcggacagcacgtacgagctcccgtacgtgatggatgcaggtcaggagggcagcttgcctcctttccccaacgacgtgttcatggtgcctcagtacgggtactgcggactggtaaccggaggcagctctcaaaaccagacagacagaaatgccttctactgtctggagtactttcccagccagatgctgagaaccggaaacaactttgagatggtgtacaagtttgaaaacgtgcccttccactccatgtacgctcacagccagagcctggataggctgatgaacccgctgctggaccagtacctgtgggagctccagtctaccacctctggaggaactctcaaccagggcaattcagccaccaactttgccaagctgaccaaaacaaacttttctggctaccgcaaaaactggctcccggggcccatgatgaagcagcagagattctccaagactgccagtcaaaactacaagattccccagggaagaaacaacagtctgctccattatgagaccagaactaccctcgacggaagatggagcaattttgccccgggaacggccatggcaaccgcagccaacgacgccaccgacttctctcaggcccagctcatctttgcggggcccaacatcaccggcaacaccaccacagatgccaataacctgatgttcacttcagaagatgaacttagggccaccaacccccgggacactgacctgtttggccacctggcaaccaaccagcaaaacgccaccaccgttcctaccgtagacgacgtggacggagtcggcgtgtacccgggaatggtgtggcaggacagagacatttactaccaagggcccatttgggccaaaattccacacacggatggacactttcacccgtctcctctcattggcggatttggactgaaaagcccgcctccacaaatattcatcaaaaacactcctgtacccgccaatcccgcaacgaccttctctccggccagaatcaacagcttcatcacccagtacagcaccggacaggtggctgtcaaaatagaatgggaaatccagaaggagcggtccaagagatggaacccagaggtccagttcacgtccaactacggagcacaggactcgcttctctgggctcccgacaacgccggagcctacaaagagcccagggccattggatcccgatacctcaccaaccacctctag

SEQ ID NO: 5298 - DNA, 4694 bp, Bovine adeno-associated virus
  source 1..4694: mol_type = other DNA
gtggcactcccccccctgtcgcgttcgctcgttcgctggctcgattgggggggtggcagctcaaagagctgccagacgacggccctctgggccgtcgcccccccaatcgagccagcgaacgagcgaacgcgacaggggggggagtgccacactctctagcaagggggttttgtaggtggtgatgtcattgttgatgtcattatagttgtcacgcgatagttaatgattaacagtcatgtgatgtgtgttatccaataggatgaaagcgcgcgaatgagatctcgcgagacttccggggtataaaaggggtgagtgaacgagcccgccgccattctctgctctggactgctagaggaccctcgctgccatggctaccttctatgaagtcattgttcgcgttccatttgatgtggaagagcacctgcctggaatttctgacaactttgtagactgggtaactggtcaaatttgggagctgcctcccgagtcagatttgaatttgactctgattgagcagcctcagctgacggtggctgacagaattcgccgcgtgttcctgtacgagtggaacaaattttccaagcaggagagcaaattctttgtgcagtttgaaaagggatctgaatattttcatctgcacacgctcgtggagacctccggcatctcttctatggtccttggccgctacgtgagtcagattcgcgcccagctggtgaaggtggtgttccagaacattgagccgcggattaacgactgggtcgccatcaccaaggtaaagaagggcggagccaataaggtggtggattctgggtatattcccgcctacctgctgccgaaggtccaaccagagcttcagtgggcgtggactaacctcgaagagtataaattggccgccctcaatctggaggagcgcaaacggctcgtcgctcagtttcagcttgagtcctcgcagcgctcgcaagaggcatcttcccagagggacgtttcggctgacccggtcatcaagagcaagacttcccagaaatacatggcgctggtaagctggctggtggaacatggcatcacttccgagaagcagtggattcaggagaatcaggagagctacctgtccttcaactccacgggaaactctcggagccagattaaagccgcgcttgacaacgcgtcaaaaattatgagtctgaccaaatctgcctcagactatctcgtgggacagactgttccagaggacatttctgaaaacagaatctggcagatttttgatctcaacggctacgacccggcatacgcgggctctgttctctacggctggtgcactcgcgcctttggaaagaggaacaccgtctggctgtatggacccgcgaccaccggaaagaccaacatcgcggaagccatctctcacaccgtgcccttttatggctgtgtgaactggactaatgagaactttccctttaatgactgtgtggaaaaaatgttgatctggtgggaggagggaaagatgaccagcaaggtggtggaacccgccaaggccatcttgggggggtctagagtacgagtggatcaaaaatgtaaatcctctgtacaagtagactctaccccggtgattatcacctccaatactaacatgtgtgtggtggtggatgggaactccacgacctttgaacaccagcagccgctggaagaccgcatgttcagatttgaactcatgcggcggctcccgccagattttggcaagattaccaagcaggaagtcaaagacttttttgcttgggcaaaggtcaaccaggtgccggtgactcacgagtttatggttcccaagaaagtggcgggaactgagagggcggagacttctagaaaacgcccactggatgacgtcaccaataccaactataaaagtccggagaagcgggcccggctctcagttgttcctgagacgcctcgcagttcagacgtgcctgtagagcccgctcctctgcgacctctcaactggtcttccaggtatgaatgcagatgtgactatcatgctaaatttgactctgtaacgggggaatgtgacgagtgtgaatatttgaatcggggcaaaaatggctgtatctttcataatgctacacattgtcaaatttgtcacgctgttcctccatgggaaaaggaaaatgtgtcagattttaatgattttgatgactgtaataaagagcagtaaataaagtgagtagtcatgtcttttgttgaccaccctccagattggttggaatcgatcggcgacggctttcgtgaatttctcggccttgaggcgggtcccccgaaacccaaggccaatcaacagaagcaagataacgctcgaggtcttgtgcttcctgggtacaagtatcttggtcctgggaacggccttgataagggcgatcctgtcaattttgctgacgaggttgcccgagagcacgacctctcctaccagaaacagcttgaggcgggcgataacccttacctcaagtacaaccacgcggacgcagagtttcaggagaaactcgcttctgacacttcttttgggggaaaccttgggaaggctgttttccaggctaaaaagaggattctcgaacctcttggcctggttgagacgccggataaaacggcgcctgcggcaaaaaagaggcctctagagcagagtcctcaagagccagactcctcgagcggagttggcaagaaaggcaaacagcctgccagaaagagactcaactttgacgacgaacctggagccggagacgggcctcccccagaaggaccatcttccggagctatgtctactgagactgaaatgcgtgcagcagctggcggaaatggtggcgatgcgggacaaggtgccgagggagtgggtaatgcctccggtgattggcattgcgattccacttggtcagagagccacgtcaccaccacctcaacccgcacctgggtcctgccgacctacaacaaccacctgtacctgcggctcggctcgagcaacgccagcgacaccttcaacggattctccaccccctggggatactttgactttaaccgcttccactgccacttctcgccaagagactggcaaaggctcatcaacaaccactggggactgcgccccaaaagcatgcaagtccgcatcttcaacatccaagttaaggaggtcacgacgtctaacggggagacgaccgtatccaacaacctcaccagcacggtccagatctttgcggacagcacgtacgagctcccgtacgtgatggatgcaggtcaggagggcagcttgcctcctttccccaacgacgtgttcatggtgcctcagtacgggtactgcggactggtaaccggaggcagctctcaaaaccagacagacagaaatgccttctactgtctggagtactttcccagccagatgctgagaaccggaaacaactttgagatggtgtacaagtttgaaaacgtgcccttccactccatgtacgctcacagccagagcctggataggctgatgaacccgctgctggaccagtacctgtgggagctccagtctaccacctctggaggaactctcaaccagggcaattcagccaccaactttgccaagctgaccaaaacaaacttttctggctaccgcaaaaactggctcccggggcccatgatgaagcagcagagattctccaagactgccagtcaaaactacaagattccccagggaagaaacaacagtctgctccattatgagaccagaactaccctcgacggaagatggagcaattttgccccgggaacggccatggcaaccgcagccaacgacgccaccgacttctctcaggcccagctcatctttgcggggcccaacatcaccggcaacaccaccacagatgccaataacctgatgttcacttcagaagatgaacttagggccaccaacccccgggacactgacctgtttggccacctggcaaccaaccagcaaaacgccaccaccgttcctaccgtagacgacgtggacggagtcggcgtgtacccgggaatggtgtggcaggacagagacatttactaccaagggcccatttgggccaaaattccacacacggatggacactttcacccgtctcctctcattggcggatttggactgaaaagcccgcctccacaaatattcatcaaaaacactcctgtacccgccaatcccgcaacgaccttctctccggccagaatcaacagcttcatcacccagtacagcaccggacaggtggctgtcaaaatagaatgggaaatccagaaggagcggtccaagagatggaacccagaggtccagttcacgtccaactacggagcacaggactcgcttctctgggctcccgacaacgccggagcctacaaagagcccagggccattggatcccgatacctcaccaaccacctctagcccaattctgttgcataccctcaataaaccgtgtattcgtttcagtaaaatactgcctcttgtggtcattcggcgtacaacagcttacaacaacaacaaaacccccttgctagagagtgtggcactcccccccctgtcgcgttcgctcgttcgctggctcgattgggggggtggcagctcaaagagctgccagacgacggccctctgggccgtcgcccccccaatcgagccagcgaacgagcgaacgcgacaggggggggagtgccac

SEQ ID NO: 5299 - protein, 390 aa, Bovine adeno-associated virus
MALVSWLVEHGITSEKQWIQENQESYLSFNSTGNSRSQIKAALDNASKIMSLTKSASDYLVGQTVPEDISENRIWQIFDLNGYDPAYAGSVLYGWCTRAFGKRNTVWLYGPATTGKTNIAEAISHTVPFYGCVNWTNENFPFNDCVEKMLIWWEEGKMTSKVVEPAKAILGGSRVRVDQKCKSSVQVDSTPVIITSNTNMCVVVDGNSTTFEHQQPLEDRMFRFELMRRLPPDFGKITKQEVKDFFAWAKVNQVPVTHEFMVPKKVAGTERAETSRKRPLDDVTNTNYKSPEKRARLSVVPETPRSSDVPVEPAPLRPLNWSSRYECRCDYHAKFDSVTGECDECEYLNRGKNGCIFHNATHCQICHAVPPWEKENVSDFNDFDDCNKEQ

SEQ ID NO: 5300 - protein, 610 aa, Bovine adeno-associated virus
MATFYEVIVRVPFDVEEHLPGISDNFVDWVTGQIWELPPESDLNLTLIEQPQLTVADRIRRVFLYEWNKFSKQESKFFVQFEKGSEYFHLHTLVETSGISSMVLGRYVSQIRAQLVKVVFQNIEPRINDWVAITKVKKGGANKVVDSGYIPAYLLPKVQPELQWAWTNLEEYKLAALNLEERKRLVAQFQLESSQRSQEASSQRDVSADPVIKSKTSQKYMALVSWLVEHGITSEKQWIQENQESYLSFNSTGNSRSQIKAALDNASKIMSLTKSASDYLVGQTVPEDISENRIWQIFDLNGYDPAYAGSVLYGWCTRAFGKRNTVWLYGPATTGKTNIAEAISHTVPFYGCVNWTNENFPFNDCVEKMLIWWEEGKMTSKVVEPAKAILGGSRVRVDQKCKSSVQVDSTPVIITSNTNMCVVVDGNSTTFEHQQPLEDRMFRFELMRRLPPDFGKITKQEVKDFFAWAKVNQVPVTHEFMVPKKVAGTERAETSRKRPLDDVTNTNYKSPEKRARLSVVPETPRSSDVPVEPAPLRPLNWSSRYECRCDYHAKFDSVTGECDECEYLNRGKNGCIFHNATHCQICHAVPPWEKENVSDFNDFDDCNKEQ

SEQ ID NO: 5301 - protein, 736 aa, Bovine adeno-associated virus; identical to SEQ ID NO: 5285

SEQ ID NO: 5302 - protein, 600 aa, Bovine adeno-associated virus
TAPAAKKRPLEQSPQEPDSSSGVGKKGKQPARKRLNFDDEPGAGDGPPPEGPSSGAMSTETEMRAAAGGNGGDAGQGAEGVGNASGDWHCDSTWSESHVTTTSTRTWVLPTYNNHLYLRLGSSNASDTFNGFSTPWGYFDFNRFHCHFSPRDWQRLINNHWGLRPKSMQVRIFNIQVKEVTTSNGETTVSNNLTSTVQIFADSTYELPYVMDAGQEGSLPPFPNDVFMVPQYGYCGLVTGGSSQNQTDRNAFYCLEYFPSQMLRTGNNFEMVYKFENVPFHSMYAHSQSLDRLMNPLLDQYLWELQSTTSGGTLNQGNSATNFAKLTKTNFSGYRKNWLPGPMMKQQRFSKTASQNYKIPQGRNNSLLHYETRTTLDGRWSNFAPGTAMATAANDATDFSQAQLIFAGPNITGNTTTDANNLMFTSEDELRATNPRDTDLFGHLATNQQNATTVPTVDDVDGVGVYPGMVWQDRDIYYQGPIWAKIPHTDGHFHPSPLIGGFGLKSPPPQIFIKNTPVPANPATTFSPARINSFITQYSTGQVAVKIEWEIQKERSKRWNPEVQFTSNYGAQDSLLWAPDNAGAYKEPRAIGSRYLTNHL

SEQ ID NO: 5303 - DNA, 11085 bp, Homo sapiens
  source 1..11085: mol_type = genomic DNA
atgcgagcccagaaaagtctctcctggtcttgggatggaggtcacacgaagcctccgcaaggcaaggacttttggtgagttccgggctccgctgaactcagctctttttcttttccttcctttctttccttcttcctttctttccctccttccttccttcctctttctctctttcctttctctctctcttttctctctctctctccttcttccctccctccctacctctctctcttttctttttccgtccttccttccttctttccttctttctctctcttttctttcttttcttttcttttctcttctttcattttgagacgtactctggctctgtcgcccaggctggagcgcaatggcgccatctcggcgcactgcaacctccacctcccgggttcaagcgattctactgcctcagcctcccgagtagctgggactacaggcgcgcactaccaagcccggctaatttttttttgtatttttagtagagactgggtttcacgatgttggccgggctggtctggaagtcttgacctcaagcgtgcgccctctccgccactgggtaaggcgggggcggaatagggggcttgcaatttcacactagaggcgggcaccgtgggggaaagaagagtcacgtctcccacggttcgtagaggaaggcctgcctgagcctggagcgggggcgggagagccacagtttggcatccccagggcatcccccagcccgcagactaccaggcctccagaggacaggaccccacccccggccacaggccctgcccccagcactccccgcaccccgcctccaagactcctccgcccactccgcacccaacttataaaaaccgtcctcgggcgcggcggggagaagccgagctgagcggatcctcacacgactgtgatccgattctttccagcggcttctgcaaccaagcgggtcttacccccggtcctccgcgtctccagtcctcgcacctggaaccccaacgtccccgagagtccccgaatccccgctcccaggctacctaagaggatgagcggtgctccgacggccggggcagccctgatgctctgcgccgccaccgccgtgctactgagcgctcagggcggacccgtgcagtccaagtcgccgcgctttgcgtcctgggacgagatgaatgtcctggcgcacggactcctgcagctcggccaggggctgcgcgaacacgcggagcgcacccgcagtcagctgagcgcgctggagcggcgcctgagcgcgtgcgggtccgcctgtcagggaaccgaggggtccaccgacctcccgttagcccctgagagccgggtggaccctgaggtccttcacagcctgcaggtacgtgtccccagggctggttctccgcgcccctagtggctctcctggcttggaagggtatggacaggagtggggcgtgggggcggggtgcgcaactgtggctccctgggcttccctgcgtcaagggatgggctccccccttaggaagccgaggagggaggttcgctcaaggccaggaattcaagaccacctaaagcaaaatagcgagacccccgtctcttctacacacacacacacacacacacaaaataaataaaataaaataaaataaatataaaattaaaaaacgaccgggcgcagtggctcacggagcctccacctgctgtcgagactagcctggccaacatggagaaacctcgtctctactaaaaatacaaaaaattagcctggcatggtgtgcatgcctgtaatcccagctacttgggaggctgaggcaggagaatctcttgaacccgggaggcagaggttgcagtgagccgagatcgcagcactgcactccagcctgggcaacagagtgagactcctcaaaaaaataatagcgataaaataaaaataaagccaggtgcggtgactcacgcttgtagtcccagcactttgggagggcgaggccagtggatcacctgaggtcaggagttcaagaccagcctgaccaacacagtgaaaccccgtctctactaaaaatacaaaaattagctgggtgtggtggtgggcgcctgtaatcccagctactggggaggctgaggcaggagaacctcttgaacccgggaggcggaggttgcagtgagccgggatcatgccattgcactccagcctgggcgacagagctcgactccatctcaaaataataataataataaataaaataaaatacaaatacaaaaattagccaggtgtggtggcagctacttgggaggctgagacacaagaatcacttgagtctgggaggcagaggttgcagtgagccaagattgcgccactgcactccaacctgggtgacagagcgagactctgtctgaaaaaataaaaaataagccaggcatagagctgcatgactgtagtcccagctacacaggaggctgaaaacaggaggatcgcctgaccccaggagttggaggctgcagtgagctgtgacagcaccactgcactccagcctgggcgagagaacgagaccccgtcattgggaaaaaaaagaaaaaagaaagactcccttgcctggcctcagcggatggagatttggaaggatggatgagtggatgaattaagaggttggggtaggcaagctgggtcctcaccaaggttttcacccctccccagacacaactcaaggctcagaacagcaggatccagcaactcttccacaaggtggcccagcagcagcggcacctggagaagcagcacctgcgaattcagcatctgcaaagccaggtaaccctaggatcaagggagaaaaggtccctctgatagctggaccccaggttgagagggaggtggtgagaactggacgtgtggctggggacgtggggccaggcaggacctgacaccctcctcccgtcccatcctagtttggcctcctggaccacaagcacctagaccatgaggtggccaagcctgcccgaagaaagaggctgcccgagatggcccagccagttgacccggctcacaatgtcagccgcctgcaccgtgagtgtctgcccctcgatgctctccggtggccacccctaccccgccacttgccattgctggtcctctccttgtcaggtccaccttaaggagaagatgtcctggcctggagtccctgagggctcaccagtctctgggtcaaagctgatgggagcacctccttcctcagccctgacctggcccagccaggccacccaacccttctcctctgcaagccagtgggctgtccctgaagccctgctgatcactgattggaacagaggtggagaaagaggtcttgagggacttgagctgcaggggtgctggagaaggtagaaatggggttcggggtgccatcctgaaggttagaaccttctaggggagggtgtcatggaggagggggtgccaggtagtagtgtttgtagatttgggccctccacaatgtcttggggtatgtgggaattagggctgggaacccccagctcccagaccagaaacactcttgtatcttacaaatccaatgctccaggtccctgacccctcttcctccttcctctcttgttctcctcctccctccccgcccccgccggccccctccccaccgcagaaagtgggcttttgctgccaccacaagttgtaggtgctttattcccaaatctccgttcatctcgaaccacagcatgtccacgtgtgtccgatgcagactcgcggttctctaagttcacggccccacacggtttctctgtggtcctcatccttccctgcatctgtggctgtccacagccaactgggtgaaagtttggatccccctctcacaccctagggtcagtggcaggcttccagcactgtagacctgagggttctctcctccccaagctcccgctccttcccacctccgtgctgcccgcccccaaccccgccaggctagcatctcagcgtggtcagggtcctgtccaccctcccaaagccaccatcccaggatgaggggcttctggagggtgacgggggaaggcacaagtcctggctgggaaatgcggtggaagggggcaggggttctgtgggttcgggactcccagactcttggctcaggcccgccaagtaggagaaagttcagagctgggaaggcgaacagctggcattcatggaagccacactggtggtttggccgcgtgcccatccttactggatgggaggaaagtaggggaaaggggagatgcctgaggggccggaaagcgtcttcctggtcactctgggcccgcccccacccccaccgtgcagactcatttcgacctttcccctacttttccggctgggctgggggcggttcctcccagtctggagcgtctgagcctccagacgtgctcaacgccatcctcccctcctccctccctctttctttcctcaaccctgcctcctctccctctaggagctgggaccccaggcagagcctctgagatgctcctgctcagcacagttcttcccgttctggacctgctgcctcattcattcattcattcattcatttgtcaagactgttttgtttgctttttgagacggagtctcgctctgttgtccaggctggagtgcagtggcgcaatctcagctcactgcaacctctgcctcccactgggttcaagtgattctcctgcctcagcctctcaagtagatgggattataggcgcctaccgccaccacgcccagctaatttttattcatttatcaagtcttttttttttttgagacagagtctcactctgtcacccaggttggagtgcaatggttcaacctcagctgactgcaacctctgcctcccgggttcaagtgattctcctgcctctgcctcctaaggagctgggattactggcgtccaccatcacacccagctaatctttgtatgttttactagagatggggtttggccatgttgaccaggctggtctcaaactcctgaccgatccgcccgcctcccaaagtgctggattacaggcatgaaccactgcgcccggcccattcctcaagtctttattgagcagctgctatgcgctggggcctgcgtggatgctggtgccaggctgtgggcagagctgctccttgtccccagcctcatggagcctccattgagtcagaggagagaccattagatgacctcagtgtccaggagtgggaagtccttgctcaattcccatttggggtgttctggcctggtctgggggtgaggcaaggcagggtgtccttccagaagctgggacccagagagagaagtgaggaaagagagtcccgccgggcgcagtggttcacacctgtaatcccagcactttgggaggccaaggctggcggatcacgaggtcaggagatcgagaccagtctggccaacatggtgaaacccccgtctctacaaataatgcaaaaactagtcgggcgtggtggcacatgcctgtagtcccagctgctccggaggctgcggcagaattgcttgaacctgggaggcggaggttgcagtgagccaagattgcgccactgcactccagcctggcgacagagcgagactccgtatcaaaaaacaaaacaaaaaaagagagtcccaggcagggggaacagcatgtgcaaagtccctgtggcaggacggtgtgtggtacaagggtgggaagaaagcctgtgtgccagagagggtgtgggtacagcatggcaggaggaggatgggcacgggggctggtcctccaggtgccttgtggaccatgctgaggaaggacatagggagccatggaagaggttaggcagatggcagagaggtggtcatgagataagatttgccttttacttccctggtcatccactgttaagcccccagatatgcctggctcctgagaccccccccaggggctgccctcctgtttcaagtctccactttatctcccttcagggctgcccagggattgccaggagctgttccaggttggggagaggcagagtggactatttgaaatccagcctcaggggtctccgccatttttggtgaactgcaagatgacctcaggtagggtgtgttagtccaccaggggcccctctccccataggccctgttgtctttctttaaattgaaaacaaaacaaaacaaaaaaattaaaggcagggtcttgctatgttgcccaagctggtctttttttttttttttttttttgagatggagttttgctcttggagctggagtgcaatgccacgatctcagctcactgaaacctccgcctcccgggttcaagcaattctccagcgtcagcctccccagtagctgagactacaggtgcgagcaaccacacccagctaatttttgtatttttagtagagactgggtttcaccatgttggtctggctggtctcaaactcctgacctcaaatgatttgccgactttggcctcccaaaatgctgggattataggcattagccactgctcctggcctcttttctttaaaatgcagcccttgtctgggtgtagtggctcatatctgtaatcccgacactttgggaggcctatcatgaggatcacttgagcccagaagttcgagaccagcctggacaacatagtgagagctcatctttacaaaaaattttgtaaaagtaaaaaaaaaggccaagtgcagtggctcacacctgtaatcccagcactttgggaggttgaggcagacagatcacgaggtcaggagttcgagaccagcctgaccaacatggtgaaaccccgtctctactaaaaatacaaaaattagccgggcatggtggtgtgcacctgtaatcccagctactcaggtggctgaggcaggagaatctcttgaacctgggaggcagaggttgcagtgagctgagatgacgccaccgcactccagcctgggcgacagagcgagactccgtccccccatcaaaaaaataaaaaagagaaaataaaataaaataaaataaaattcagcccttgctgggcatggtggcacatgcctgtagtcccagctactcgggaggccaaggcaggagggtcacttcagcccaggagttaaaggctgccgtgagccgtgatcacacctgtgaatagccaccgcactccaacctgggcaacacaacaaaacctcgtttctaaaaaaaaacaaaggctgagcacggtggcttacacctgaaatgccagcactttgggaggctgaggcgggcaaatcacttgaggtcagaagttcaagaccagcctggccaacatggtgaaaccctatctctaccaacataaacattagccgggcgtgcctgtgattccagctgcttgtggggctgaagcacaagaatcgcttgagccccgaaggcagaggttgcagtgagctgagattgcggcactgcgatccagcctgggcaacagagtgagactccatctctaaaaaaaaaaaaaaaaaaaaagaaagcttttttttccactgagaagtcctttccattacaagaggttacaacacggggttttacccagttcagctggcccagagaggctttgcagatttccactgcctactccctcccacactcagtccctgctgggttcttgggacaaagatcttcccaaggccagcccataatattcctccctctgacccaccctcctcgagtcctccagggatgagtgagggagctgctgtcttcctgggtttggagggggtttggtgcttggcagccagatgagggagtggggtcgtctgtgaagagggacttcctggtgaccttgtacctttctgggcagatggaggctggacagtaattcagaggcgccacgatggctcagtggacttcaaccggccctgggaagcctacaaggcggggtttggggatccccacggtaggtgtttctagtggggacagaggcaggggaggaagagggaccctcagaagtggccctgcctcatggagtggcctctcccactccaggcgagttctggctgggtctggagaaggtgcatagcatcacgggggaccgcaacagccgcctggccgtgcagctgcgggactgggatggcaacgccgagttgctgcagttctccgtgcacctgggtggcgaggacacggcctatagcctgcagctcactgcacccgtggccggccagctgggcgccaccaccgtcccacccagcggcctctccgtacccttctccacttgggaccaggatcacgacctccgcagggacaagaactgcgccaagagcctctctggtgagcaggccctgccatgccacacccagccagcagcttccctccttatctttctgctgctctgtcctgccttcaaccccacattgcatctgtttcctgcccccacctcttccttacatgccgtgtgtgtgattgggccactaacttagcctatctggcctcagttttcccatcctgaaaagggtcttgaccgtctttacttttatttacttatgtgtttgtttatttatttatttatgtatttattttttgagacggagtctcactttgtcacccaggctggagtgctttgtggcacgatcttggctcactgcaagctccacctcctgagttcacaccattctcctgcctcagcctcccgagtagctgggactataggtgcccaccaccacgcctggctaatttttttgtatttttagtagagatggggtttcaccgtgttagccaggatggtctcgatctcctgacctcgtgatctgcctgcctcagcctcccaaagtgctgggattacaggcgtgagccaccgcgcccggcctacttatttattttttgagacagagtcccgctgtgtctcccaggctggagtgcaagtgacgtgatcttggctcactgcagcctccgcctcctgggttcaagtgattctcctgcctcagcctcctgagtagctgggattacaggttcccgccaccatgcacagataattgttttgtatttttagtagagacggggtttcaccatgttggccagggtggtcttgaactcctgacctcaagtgatctgcccacctcggcctcccaaagtgttgggattacaggcgtgagccacaatacccggccacaaacatctttataatggtgctccacaggattctttttttttttttttttttgaaacagggtctcactctgttgcctaagctggagtgcagtggtgcgatctcggctcactgcaacctccacctcccgggttcaagcaattctcaaaaaaaaaaaaaaattaggcacggtggctcacacttgcaatcccagcactttgggaggctgaagcgagtggatcacttgagcccaggagaccaatctgagcaacagggcgaaatcctgtctcaattaaaaatacaaaaaactagctgggcatggtggtgcctgcctgtgttcccatctacttgggaggctgagttgggaggatctcttgagcctaggagataaggctgcagtgagctgagactgcgccactgcactcaagcctgggtgacagagtgagacccctgcctcaaaagaaaaagaaaaaatgcaggcatggtggctcacacctgtggtcccagctacttgggaggcccaggtacaagaatcacttgagcccgtaaggttgacgctgcattgagccatcaccacaccactgcactccagcctgggcaatggagccaggccctgtctcaaaaaaaattgtttttaaacttaaaaataaggccgggtgtgggggctcacacctgtaatcccagcactttgggaggccgaggtgggtggatcacctgaggtcaggagttcaaaactagcctggccaacatggtgaaaccctgtctctactaaaaatacaaaaattaggccaggcgcagtgggtcatacctgtaatcccagcactttgggaggctgaggagggtggatcacatgaggtaaggagtttgagaccaacctggccaacatggtgaaaccccctcactactaaaaatacaaaaactagccaggcgtggtggcgggtgcctgtaatcccggctactcaggaggctgaggcatgagaatcccttgaacctgggaggcagaggtgcagtgagccgagattgtgccactgcactccagcctgggagatagagtgagactcagtctcaaaaaaaaagaccaaaaattagccaggtgtggtggcaggcgcctgtaatcccagctactcgggaggctgagggaggagaatcacttaaacctgagagacggaggttgcagtgagctgagatcgcaccactgcactccagcctgggtgacagagtaagactcaatctcaaaaaaaaaaaagtcaagtccaaagcccagcctggtccccaacctgcctcatcctcaaccctatccctatctcctttcagccccatcggtggctcaaagacctgaccatgttccctctcccctgaccccggcaggaggctggtggtttggcacctgcagccattccaacctcaacggccagtacttccgctccatcccacagcagcggcagaagcttaagaagggaatcttctggaagacctggcggggccgctactacccgctgcaggccaccaccatgttgatccagcccatggcagcagaggcagcctcctagcgtcctggctgggcctggtcccaggcccacgaaagacggtgactcttggctctgcccgaggatgtggccgttccctgcctgggcaggggctccaaggaggggccatctggaaacttgtggacagagaagaagaccacgactggagaagccccctttctgagtgcaggggggctgcatgcgttgcctcctgagatcgaggctgcaggatatgctcagactctagaggcgtggaccaaggggcatggagcttcactccttgctggccagggagttggggactcagagggaccacttggggccagccagactggcctcaatggcggactcagtcacattgactgacggggaccagggcttgtgtgggtcgagagcgccctcatggtgctggtgctgttgtgtgtaggtcccctggggacacaagcaggcgccaatggtatctgggcggagctcacagagttcttggaataaaagcaacctcagaacactt

SEQ ID NO: 5304 - DNA, 20223 bp, Homo sapiens
  source 1..20223: mol_type = genomic DNA
agacagagtcttgctctgtcacccaagctggagtgcaatggtacgatctccgcttactgcagcctccacctcctgggttcaagcgaatctcccacctcagcctcacaaatagctgagattacggccacacaccaccatgcctgctaatttctgtatttttagtagagatggggtttcaccatgctggccaggctggtctcgaactcccagactcaagtgatccacccacctcagcctcccaaagtgctaggattacaggtgtgagccaccatgccgggccccagctaatttttttttttttttgagacagagtctcgccctgttgcccaggctggagtgcagtggcgcaatctctgcttactgcaccctctgcctcccgggttccagcgattctcctgccccagcctcccgagtaactgggattacaggcgcgcgcctccacgcctggctaatttttacatttttagtagagaccgggtttcaccatgttggtcaggctggtctcgaacttctgacctcacgatctgcccaccttggactcccaaagtgctggtattacaggcatgagccaccgtgcccagcctggccccagctaattttttaaattttttgtacagacagggtcttgccatgttacccaatcttgaactcctgggctcaagcagtcctcccaccttggcctcccaaagtactgggattacaagcatgagccaccttgcctagcttaatggcatttacatttgtagtgaaatacacataacaggctgggcgcagtggctcatacctgtaatcccagcactttgggaggccgaggtaggcggatcacctgaggtcaggagttagagaccagcctggacatggcgaaaccccgtctctactaaaatacaaaaattagccaggcgtggtggtgggcacctgtaatcccagctactcgggaggctgaggcaggagaatcatttgaacccaggaggtggaagttgcagtgagcagagattgcaccactgcactccagccttggcgacagagcaagactctgtctcaaaaaaaagaaaaaaaaaagaaaagaaaagaaaaaaaagaaaaagaaaaaaagaaatatacataatataaaattggtcattttaacaatttttaactatgttggccaaagtagcccacgcgttgggattggagacccggtcttgcccaccgtgatcgccccagtacagtgcctggcatatagtaggtgctccaggaacaattgatcaggatgactttgtctttgctgggtaagaggccacattctaaaggtcagtttttggccaggcacagtgactcacacctgtcatcccagcactttgggaggccgaggcgagtgaatcccttgagctcaggagttcaagaccagcctgggcaacacggcaaaaatcctgtctctacaaaatctacagaaattaggcaggtctggtggcacatgcctatagtcccagctgcttgggaggctgaggtgggaggatcacttgagcctgggagtttgaggttgcggtgagctgtgattgtgacactgcactccagcctgggtgagtgagacccatctcagaaaaaaaaaaaaaaatacataaaacagggctgggcgtggtggctcatgcctgtaatcctagcactttgggaggctgaggtggtggatagcctaagcttaggagtttgagaccagcctgggcaacatggcgaaaccccaccccctctactagaatacaaaaaattagcgggcgtggtggtgggcacctgtagtcccagctactcaggaggctgaggcaggagaatggcgggaacctgggaggtggagcttgcagtgagccgagatgaggccactgcactccagcctgggcaacagagcaagactctgtctcaaaaaaaaaaaaaaaaaaaaggctaggccaggcacagtggctcacacctgtaatcccagcacgttgggaggccgagacaggtggatcacctgaggtcaggaatttgagaccagcagagccaacatagtgaaaccccgtttgcactaaaaatacaaaaaattagtcaggtgtggtggtgcacacctgtaatccccgctactcgggaggctgaggctggagaatcgcttgaacctgggaggcagaggttgcagtgagcggagattgcgccgttgcactccagcctgggcgacaagagggaaactccatctcaaaaaaataaataaataaaataaaaaataggctgggcgcggtggctcatgcctgtaatcccagcactttgggaggccgaagcgggcggatcacgaggtcaggagatcgagaccatcctggctaacatggtgaaaccctgtctctattaaaaatacaaaaaattagctgggcatggtggcaggtgcctgtagtcccagctactcgggaggctgaggcaggagaatggcactaacccgggaggtggagcttgcagtgagccgagattgcgccactgcactccagcgtgggcgacagagcgagactccttctcaaaaaataaataaataaataaataaataaataaataaataaaaaataaagagcagtttttagaataaaatctagagccaacttgaggcgacagtatagactcttttgtagattgctcacagcaggtgcccttaagaccctgggtctgtgatgtgttttgtgctgtgggacacatggctccaaagaagtccctgaaaatcagatcatgaaaaggtcatcaggttggggaagtaattgatcagttctctcagtttaagaaggtggggaagaggaggagcttgcattctgggatagcctgggatagctgtgtccctactcagagagaggctgggggcttgggggtggacaggccagacggtgaccatctgaacctactcctcactggggttttcctccctccctttcctgtccactgctgctgggagggatttgctgtcctggcatctggcccagctgacggggccaagtgtatgagtggcagcctgcacgtcagcccttgggtgtgcagtttcagattccagagaatgagctggcttggagccctgctgagtcaatgcccttctccttgccagtgctctgagccaacctgccccgagttcttcctggcaggctggttttctgtgccagcctccccttcctgacagggtataggggaatgggtagggaagaggcagaggagatcggtgcaagtttgaatgaacacttagccctgtggaatgaatgtggtccagccctttagcctcactcagtacttcctttgtcccaactctatccctaccccaggctcagaatgttggggtatctccacctgcctgagaacttcaaacatacaggggctgggcttagagggcagcagcaccttcgttcagtgcatgagtgaatgaatgaatgagggagagaaagaggaaggtcttccatgtctgaaacttttttttttttttttgacacacagtctcactctgtcacccaggctggagtgctgtggtgcaatctcagctcactgcaacctccgtctcctgagttcaagcgattctcctgacacagtctcccgagtagctgtaagcacgtgccaccacacccggctaattttttatttttagtagagacgaggtttcaccatgttggccaggctgatctcgaacccctgacctcaggtgatccgcccccccccccctcccaccacccggcctcccaaagtgctgggattacaggcgtgagccaccgcgcctggccacagacttttattttatttcttttttagagacaggatctcactctgttgcccaggctggagtgcagtggcaccattgtggctcactgcagcctctacctcctgggctcaagtgagcctcccacctcaggctcccaagtagctgcgaccacagtcatgggcgaccgccctggttcctcccttccttgtgtctcctctttctgttctctaagttcctgctttattataggcaaagctcaggacattaaagaccctggcggtagagggtaggctatgggggtgaggccctgatccaagtcctgccgctaaggcactcataatttcgggctcaggggagaaatggaagtcaaagaatctcataaacacagctgcgatgacgaaccctttcacgggaaggaacatgcgagcccagaaaagtctctcctggtcttgggatggaggtcacacgaagcctccgcaaggcaaggacttttggtgagttccgggctccgctgaactcagctctttttcttttccttcctttctttccttcttcctttctttccctccttccttccttcctctttctctctttcctttctctctctcttttctctctctctctccttcttccctccctccctacctctctctcttttctttttccgtccttccttccttctttccttctttctctctcttttctttcttttcttttcttttctcttctttcattttgagacgtactctggctctgtcgcccaggctggagcgcaatggcgccatctcggcgcactgcaacctccacctcccgggttcaagcgattctactgcctcagcctcccgagtagctgggactacaggcgcgcactaccaagcccggctaatttttttttgtatttttagtagagactgggtttcacgatgttggccgggctggtctggaagtcttgacctcaagcgtgcgccctctccgccactgggtaaggcgggggcggaatagggggcttgcaatttcacactagaggcgggcaccgtgggggaaagaagagtcacgtctcccacggttcgtagaggaaggcctgcctgagcctggagcgggggcgggagagccacagtttggcatccccagggcatcccccagcccgcagactaccaggcctccagaggacaggaccccacccccggccacaggccctgcccccagcactccccgcaccccgcctccaagactcctccgcccactccgcacccaacttataaaaaccgtcctcgggcgcggcggggagaagccgagctgagcggatcctcacacgactgtgatccgattctttccagcggcttctgcaaccaagcgggtcttacccccggtcctccgcgtctccagtcctcgcacctggaaccccaacgtccccgagagtccccgaatccccgctcccaggctacctaagaggatgagcggtgctccgacggccggggcagccctgatgctctgcgccgccaccgccgtgctactgagcgctcagggcggacccgtgcagtccaagtcgccgcgctttgcgtcctgggacgagatgaatgtcctggcgcacggactcctgcagctcggccaggggctgcgcgaacacgcggagcgcacccgcagtcagctgagcgcgctggagcggcgcctgagcgcgtgcgggtccgcctgtcagggaaccgaggggtccaccgacctcccgttagcccctgagagccgggtggaccctgaggtccttcacagcctgcaggtacgtgtccccagggctggttctccgcgcccctagtggctctcctggcttggaagggtatggacaggagtggggcgtgggggcggggtgcgcaactgtggctccctgggcttccctgcgtcaagggatgggctccccccttaggaagccgaggagggaggttcgctcaaggccaggaattcaagaccacctaaagcaaaatagcgagacccccgtctcttctacacacacacacacacacacacaaaataaataaaataaaataaaataaatataaaattaaaaaacgaccgggcgcagtggctcacggagcctccacctgctgtcgagactagcctggccaacatggagaaacctcgtctctactaaaaatacaaaaaattagcctggcatggtgtgcatgcctgtaatcccagctacttgggaggctgaggcaggagaatctcttgaacccgggaggcagaggttgcagtgagccgagatcgcagcactgcactccagcctgggcaacagagtgagactcctcaaaaaaataatagcgataaaataaaaataaagccaggtgcggtgactcacgcttgtagtcccagcactttgggagggcgaggccagtggatcacctgaggtcaggagttcaagaccagcctgaccaacacagtgaaaccccgtctctactaaaaatacaaaaattagctgggtgtggtggtgggcgcctgtaatcccagctactggggaggctgaggcaggagaacctcttgaacccgggaggcggaggttgcagtgagccgggatcatgccattgcactccagcctgggcgacagagctcgactccatctcaaaataataataataataaataaaataaaatacaaatacaaaaattagccaggtgtggtggcagctacttgggaggctgagacacaagaatcacttgagtctgggaggcagaggttgcagtgagccaagattgcgccactgcactccaacctgggtgacagagcgagactctgtctgaaaaaataaaaaataagccaggcatagagctgcatgactgtagtcccagctacacaggaggctgaaaacaggaggatcgcctgaccccaggagttggaggctgcagtgagctgtgacagcaccactgcactccagcctgggcgagagaacgagaccccgtcattgggaaaaaaaagaaaaaagaaagactcccttgcctggcctcagcggatggagatttggaaggatggatgagtggatgaattaagaggttggggtaggcaagctgggtcctcaccaaggttttcacccctccccagacacaactcaaggctcagaacagcaggatccagcaactcttccacaaggtggcccagcagcagcggcacctggagaagcagcacctgcgaattcagcatctgcaaagccaggtaaccctaggatcaagggagaaaaggtccctctgatagctggaccccaggttgagagggaggtggtgagaactggacgtgtggctggggacgtggggccaggcaggacctgacaccctcctcccgtcccatcctagtttggcctcctggaccacaagcacctagaccatgaggtggccaagcctgcccgaagaaagaggctgcccgagatggcccagccagttgacccggctcacaatgtcagccgcctgcaccgtgagtgtctgcccctcgatgctctccggtggccacccctaccccgccacttgccattgctggtcctctccttgtcaggtccaccttaaggagaagatgtcctggcctggagtccctgagggctcaccagtctctgggtcaaagctgatgggagcacctccttcctcagccctgacctggcccagccaggccacccaacccttctcctctgcaagccagtgggctgtccctgaagccctgctgatcactgattggaacagaggtggagaaagaggtcttgagggacttgagctgcaggggtgctggagaaggtagaaatggggttcggggtgccatcctgaaggttagaaccttctaggggagggtgtcatggaggagggggtgccaggtagtagtgtttgtagatttgggccctccacaatgtcttggggtatgtgggaattagggctgggaacccccagctcccagaccagaaacactcttgtatcttacaaatccaatgctccaggtccctgacccctcttcctccttcctctcttgttctcctcctccctccccgcccccgccggccccctccccaccgcagaaagtgggcttttgctgccaccacaagttgtaggtgctttattcccaaatctccgttcatctcgaaccacagcatgtccacgtgtgtccgatgcagactcgcggttctctaagttcacggccccacacggtttctctgtggtcctcatccttccctgcatctgtggctgtccacagccaactgggtgaaagtttggatccccctctcacaccctagggtcagtggcaggcttccagcactgtagacctgagggttctctcctccccaagctcccgctccttcccacctccgtgctgcccgcccccaaccccgccaggctagcatctcagcgtggtcagggtcctgtccaccctcccaaagccaccatcccaggatgaggggcttctggagggtgacgggggaaggcacaagtcctggctgggaaatgcggtggaagggggcaggggttctgtgggttcgggactcccagactcttggctcaggcccgccaagtaggagaaagttcagagctgggaaggcgaacagctggcattcatggaagccacactggtggtttggccgcgtgcccatccttactggatgggaggaaagtaggggaaaggggagatgcctgaggggccggaaagcgtcttcctggtcactctgggcccgcccccacccccaccgtgcagactcatttcgacctttcccctacttttccggctgggctgggggcggttcctcccagtctggagcgtctgagcctccagacgtgctcaacgccatcctcccctcctccctccctctttctttcctcaaccctgcctcctctccctctaggagctgggaccccaggcagagcctctgagatgctcctgctcagcacagttcttcccgttctggacctgctgcctcattcattcattcattcattcatttgtcaagactgttttgtttgctttttgagacggagtctcgctctgttgtccaggctggagtgcagtggcgcaatctcagctcactgcaacctctgcctcccactgggttcaagtgattctcctgcctcagcctctcaagtagatgggattataggcgcctaccgccaccacgcccagctaatttttattcatttatcaagtcttttttttttttgagacagagtctcactctgtcacccaggttggagtgcaatggttcaacctcagctgactgcaacctctgcctcccgggttcaagtgattctcctgcctctgcctcctaaggagctgggattactggcgtccaccatcacacccagctaatctttgtatgttttactagagatggggtttggccatgttgaccaggctggtctcaaactcctgaccgatccgcccgcctcccaaagtgctggattacaggcatgaaccactgcgcccggcccattcctcaagtctttattgagcagctgctatgcgctggggcctgcgtggatgctggtgccaggctgtgggcagagctgctccttgtccccagcctcatggagcctccattgagtcagaggagagaccattagatgacctcagtgtccaggagtgggaagtccttgctcaattcccatttggggtgttctggcctggtctgggggtgaggcaaggcagggtgtccttccagaagctgggacccagagagagaagtgaggaaagagagtcccgccgggcgcagtggttcacacctgtaatcccagcactttgggaggccaaggctggcggatcacgaggtcaggagatcgagaccagtctggccaacatggtgaaacccccgtctctacaaataatgcaaaaactagtcgggcgtggtggcacatgcctgtagtcccagctgctccggaggctgcggcagaattgcttgaacctgggaggcggaggttgcagtgagccaagattgcgccactgcactccagcctggcgacagagcgagactccgtatcaaaaaacaaaacaaaaaaagagagtcccaggcagggggaacagcatgtgcaaagtccctgtggcaggacggtgtgtggtacaagggtgggaagaaagcctgtgtgccagagagggtgtgggtacagcatggcaggaggaggatgggcacgggggctggtcctccaggtgccttgtggaccatgctgaggaaggacatagggagccatggaagaggttaggcagatggcagagaggtggtcatgagataagatttgccttttacttccctggtcatccactgttaagcccccagatatgcctggctcctgagaccccccccaggggctgccctcctgtttcaagtctccactttatctcccttcagggctgcccagggattgccaggagctgttccaggttggggagaggcagagtggactatttgaaatccagcctcaggggtctccgccatttttggtgaactgcaagatgacctcaggtagggtgtgttagtccaccaggggcccctctccccataggccctgttgtctttctttaaattgaaaacaaaacaaaacaaaaaaattaaaggcagggtcttgctatgttgcccaagctggtctttttttttttttttttttttgagatggagttttgctcttggagctggagtgcaatgccacgatctcagctcactgaaacctccgcctcccgggttcaagcaattctccagcgtcagcctccccagtagctgagactacaggtgcgagcaaccacacccagctaatttttgtatttttagtagagactgggtttcaccatgttggtctggctggtctcaaactcctgacctcaaatgatttgccgactttggcctcccaaaatgctgggattataggcattagccactgctcctggcctcttttctttaaaatgcagcccttgtctgggtgtagtggctcatatctgtaatcccgacactttgggaggcctatcatgaggatcacttgagcccagaagttcgagaccagcctggacaacatagtgagagctcatctttacaaaaaattttgtaaaagtaaaaaaaaaggccaagtgcagtggctcacacctgtaatcccagcactttgggaggttgaggcagacagatcacgaggtcaggagttcgagaccagcctgaccaacatggtgaaaccccgtctctactaaaaatacaaaaattagccgggcatggtggtgtgcacctgtaatcccagctactcaggtggctgaggcaggagaatctcttgaacctgggaggcagaggttgcagtgagctgagatgacgccaccgcactccagcctgggcgacagagcgagactccgtccccccatcaaaaaaataaaaaagagaaaataaaataaaataaaataaaattcagcccttgctgggcatggtggcacatgcctgtagtcccagctactcgggaggccaaggcaggagggtcacttcagcccaggagttaaaggctgccgtgagccgtgatcacacctgtgaatagccaccgcactccaacctgggcaacacaacaaaacctcgtttctaaaaaaaaacaaaggctgagcacggtggcttacacctgaaatgccagcactttgggaggctgaggcgggcaaatcacttgaggtcagaagttcaagaccagcctggccaacatggtgaaaccctatctctaccaacataaacattagccgggcgtgcctgtgattccagctgcttgtggggctgaagcacaagaatcgcttgagccccgaaggcagaggttgcagtgagctgagattgcggcactgcgatccagcctgggcaacagagtgagactccatctctaaaaaaaaaaaaaaaaaaaaagaaagcttttttttccactgagaagtcctttccattacaagaggttacaacacggggttttacccagttcagctggcccagagaggctttgcagatttccactgcctactccctcccacactcagtccctgctgggttcttgggacaaagatcttcccaaggccagcccataatattcctccctctgacccaccctcctcgagtcctccagggatgagtgagggagctgctgtcttcctgggtttggagggggtttggtgcttggcagccagatgagggagtggggtcgtctgtgaagagggacttcctggtgaccttgtacctttctgggcagatggaggctggacagtaattcagaggcgccacgatggctcagtggacttcaaccggccctgggaagcctacaaggcggggtttggggatccccacggtaggtgtttctagtggggacagaggcaggggaggaagagggaccctcagaagtggccctgcctcatggagtggcctctcccactccaggcgagttctggctgggtctggagaaggtgcatagcatcacgggggaccgcaacagccgcctggccgtgcagctgcgggactgggatggcaacgccgagttgctgcagttctccgtgcacctgggtggcgaggacacggcctatagcctgcagctcactgcacccgtggccggccagctgggcgccaccaccgtcccacccagcggcctctccgtacccttctccacttgggaccaggatcacgacctccgcagggacaagaactgcgccaagagcctctctggtgagcaggccctgccatgccacacccagccagcagcttccctccttatctttctgctgctctgtcctgccttcaaccccacattgcatctgtttcctgcccccacctcttccttacatgccgtgtgtgtgattgggccactaacttagcctatctggcctcagttttcccatcctgaaaagggtcttgaccgtctttacttttatttacttatgtgtttgtttatttatttatttatgtatttattttttgagacggagtctcactttgtcacccaggctggagtgctttgtggcacgatcttggctcactgcaagctccacctcctgagttcacaccattctcctgcctcagcctcccgagtagctgggactataggtgcccaccaccacgcctggctaatttttttgtatttttagtagagatggggtttcaccgtgttagccaggatggtctcgatctcctgacctcgtgatctgcctgcctcagcctcccaaagtgctgggattacaggcgtgagccaccgcgcccggcctacttatttattttttgagacagagtcccgctgtgtctcccaggctggagtgcaagtgacgtgatcttggctcactgcagcctccgcctcctgggttcaagtgattctcctgcctcagcctcctgagtagctgggattacaggttcccgccaccatgcacagataattgttttgtatttttagtagagacggggtttcaccatgttggccagggtggtcttgaactcctgacctcaagtgatctgcccacctcggcctcccaaagtgttgggattacaggcgtgagccacaatacccggccacaaacatctttataatggtgctccacaggattctttttttttttttttttttgaaacagggtctcactctgttgcctaagctggagtgcagtggtgcgatctcggctcactgcaacctccacctcccgggttcaagcaattctcaaaaaaaaaaaaaaattaggcacggtggctcacacttgcaatcccagcactttgggaggctgaagcgagtggatcacttgagcccaggagaccaatctgagcaacagggcgaaatcctgtctcaattaaaaatacaaaaaactagctgggcatggtggtgcctgcctgtgttcccatctacttgggaggctgagttgggaggatctcttgagcctaggagataaggctgcagtgagctgagactgcgccactgcactcaagcctgggtgacagagtgagacccctgcctcaaaagaaaaagaaaaaatgcaggcatggtggctcacacctgtggtcccagctacttgggaggcccaggtacaagaatcacttgagcccgtaaggttgacgctgcattgagccatcaccacaccactgcactccagcctgggcaatggagccaggccctgtctcaaaaaaaattgtttttaaacttaaaaataaggccgggtgtgggggctcacacctgtaatcccagcactttgggaggccgaggtgggtggatcacctgaggtcaggagttcaaaactagcctggccaacatggtgaaaccctgtctctactaaaaatacaaaaattaggccaggcgcagtgggtcatacctgtaatcccagcactttgggaggctgaggagggtggatcacatgaggtaaggagtttgagaccaacctggccaacatggtgaaaccccctcactactaaaaatacaaaaactagccaggcgtggtggcgggtgcctgtaatcccggctactcaggaggctgaggcatgagaatcccttgaacctgggaggcagaggtgcagtgagccgagattgtgccactgcactccagcctgggagatagagtgagactcagtctcaaaaaaaaagaccaaaaattagccaggtgtggtggcaggcgcctgtaatcccagctactcgggaggctgagggaggagaatcacttaaacctgagagacggaggttgcagtgagctgagatcgcaccactgcactccagcctgggtgacagagtaagactcaatctcaaaaaaaaaaaagtcaagtccaaagcccagcctggtccccaacctgcctcatcctcaaccctatccctatctcctttcagccccatcggtggctcaaagacctgaccatgttccctctcccctgaccccggcaggaggctggtggtttggcacctgcagccattccaacctcaacggccagtacttccgctccatcccacagcagcggcagaagcttaagaagggaatcttctggaagacctggcggggccgctactacccgctgcaggccaccaccatgttgatccagcccatggcagcagaggcagcctcctagcgtcctggctgggcctggtcccaggcccacgaaagacggtgactcttggctctgcccgaggatgtggccgttccctgcctgggcaggggctccaaggaggggccatctggaaacttgtggacagagaagaagaccacgactggagaagccccctttctgagtgcaggggggctgcatgcgttgcctcctgagatcgaggctgcaggatatgctcagactctagaggcgtggaccaaggggcatggagcttcactccttgctggccagggagttggggactcagagggaccacttggggccagccagactggcctcaatggcggactcagtcacattgactgacggggaccagggcttgtgtgggtcgagagcgccctcatggtgctggtgctgttgtgtgtaggtcccctggggacacaagcaggcgccaatggtatctgggcggagctcacagagttcttggaataaaagcaacctcagaacactttgttctttgttcttgtttgttttctttcttttttttctctttctttagttcacagatctagtaagttaccctcagtttgttttaaaaagtgaacaaagtccatgtaaacatgttcccagggccaggcacggtgtctcgtgcctgtaatcccagccatttgtgaggccgagacaggcaggtcacttgaggtcagcagttcgagaccagccgggccaacatggtggaacccccatctctacaaaaaaatacaaaaattagccgagcatggtggtgcacgtctgtagtcccagctactctagaggctgacgcagaagaatcacttgagccaaggaggcagaggctgcaaataagccgagattgcgccactgcactccagcctgggcaacagagcaagactccatctcaaaacaaaaataatttttttttcgtagaggcagggtctcattctattgtccaggctggtctcaaacaccgagactcaagggatcctcctgccttggcttcacaaagtgatgggattaaaggtgtgagcgccactgcacccacccctgaaggctctaattctacatctgtgttttgttaaaaaaaaaaaaaaaagatggcgtggtcgctcatgcctgtaatcccagcactttaggaggccgaggcaggtggatcatctgacattacgagttccaggcccgcctgaccaacatggtgaaaccccgtctctactaaaaatacaaaaattagccgggtgtggtggcgggtgcctgtaatcccagctactcaggaggctgaggcaggagaatcacttgaactcgggaggtggaggttgcggtgagcagagatcatgccactgcactccagcctgggtgacagagcaagacttgatttcaaaaaaaaaaaaaaaaaaaaaaagaatagggctgggcgcattggctcacacttgtaacactagcactttgggaggccaacgagcggatcacccgaggtcgggtgatcccgctgtattgctctatatagtgagatccctatatagggtctcactctattgtccaggctggtctggcctggccaatgtggtgaaacctcatttctactaaaaatacaaaaattagctgggcatagtgatgcgcacctataatcccagctactcaggaggctgaggccggagaattgcttgaacccaggaggtggaggttgcagtgagccgagatggcgctgagaggtgacagcgtgctggcagtcctcacagccctcgctcactctctgcgactcctctgcctgggctcccactgtggcggcacttcaggagcccttcagcccaccgctgcactgtgggagcccctttctgggctggccaaggccggagctggctccctcagcttgcagggaagtgtggagggagaggcgcgagccggaatcggggctgcgcgcggtgcttgtgggccagctggagttccgggtgggcgtgggcttggcggaccctgcactcagagcagccgtccggccctgctggccccgggcaatgaggggcttagcacccgggccggacagcggctgcggagggtgtactgggtcccccagcagtgccagcgcaccggcgctgcgcttgatttctcaccaggccttagctgccttcccgcggggcagggatcgggacctgcagcccgccatgcctgagcctcccaccccctccatgggctcctgtgcggcccgcgcctccctgacgagcactgccccatgctccatggtgcccagtcccatccaccacccaagggctgaggagtgcaggcgcacggcgtgggactggcaggcagctccacctgcagccccggtgcaggatccactgggtgaagctagctgggctcctgagtctggtggggacgtggagaacctttgtctagctcagggattgtaaatacaccaatcatcaccctatgtctagctcagggtttgtgaatgcaccaatgaacactctgtatctagctactctggtggggccttggagaacctttatgtctagctcagggattgtaaatacaccaatcggcactctgtatctagctcaaggtttgtaaacacaccaatcagcaccctgtgtctagctcagggtttgtgaatgcaccaatcgacactctgtatctagctactgtggtggggccttggagaacctttgtgttgacactctgtatctagttaatctggtggggatgtggagaacctttgtgtctagctcaggaattgtaaacgcaccaatcagcgccctgtcaaaacagaccagtgggctctaccaatcagcaggatgtgggtggggccagataagagaataaaagcaggctgcccgagccagcagtggcaacccacttgggtccccttccacactgtggaagctttgttcttttgctctttgcaataaatcttgtactgctcactctttgggtccccactgcttttatgagctgtaacactcactgcgaaggtctgcagcttcactcctgagccagtgaaaccatgaacccaccagaaggaagaaacgctgaacacacctgaacatcagaagaaacaaactccagacgcgccaccttaagagctggaacacttaccgcaagggtccatggcttcattcttgaagtcagtgagaccaagaaccccccaattccggatacagtgccactgcactccagcccaggcaacagagcgagattctgtctaaaaaataaataaataaatatgaaataaaataaaaattgtaataattggataccctacatctaggacatgtatttgaggaaaaccacatctgtccattttctgaaccccagctgctgttaattttttttttttttttttccgagacaagagtctcactctgtcacccaggctggagcgcggtagtgcgatctcagcttactgcaacctccacctcccgggttcaagcgattctcctgcctcggcctcccgagtagctgagattacaggcgcctcccactgcacccagctaatttttgtatttttagtatagatgggtttggccaggctggtctcaaactcctgacctcaagtgatctgcccgcctcggcctccgaaactggtgggattacaggcgcaagccactgtgcccggcctgttaatttatttttgccccagtatctccctccaaatattccttatagatgtctcttggggaggtggtgggggttcttgcgctagaagaaaaaatatctgtgatttccttgtcttgacccttcctggcaggtgctggggacacagctgtttccctggggctgtggctgggtataggtgacaaactttttagctttgtagaggtaggtcctacagctgccaggccagggaggctagaggctgccctctccaggttccttgtttgcctgtgtcctgtactgagcaggcttagaggatctcctctgagcccactgtcactggagctggtggtgagtccagtctgcaggagagggggttcctctagccacaccctcttcatttccaggctctgccaatgatgggctcatctcttcaatgtcatcctttttcctgcagccaccttgacctcaaagcatttcctgcccctccaacctggggaacgacagaaaaaaaaaaaaaaaaaccaccacctgggcacggtggcgcactcctacactccccgcactctgggaggctgaggtgggtagatcacaaggtcaggagatcaagaccatactggctgacacggtgaaaccccgtctctactaaaaatacaaaaaattagccaggcatggtggcacatgcccgtagtcccagctattcgggaggctaaggcaggagaatcacttgaacctgggaggcggaggttgcagtgagctgagattgcaccactgcactccagcctgggtgacagagcaagactctgtctcaaaaaagaaagaaaaaaagaaagaaaagaaaaacaccatggcaggaaactaacaaggggccaggaagctgggatgtgaacctggacctgttaaactccagagctgcagctgtaaatcacatccctctcctggaccacaggagctcactggccccagttcctgcatttggaaaatggggatggttttgacaccccacccctccatgccaccatcccttcctggcctcatggtgtggggagggggtggtaaagaattaataaggcattaatattcatcacaggctgggtccagtgcctcgcgactgtaatcccagctctttgggaggctgaggctggaggaccttggagtttgagaccagcctacgcaacacagcaagacctcatctctacgataaatttttaaaaagtccgggtgcagtggctcatgcctataatcccagcactttgggaggccaaggcgggtggatcatgaggttaggagttcaagaccagcctggccaagatagtgaaaccccatctctactaaaaatacaaaaaaattagccaggtgtggtggtgggcgcctgtaatcccagctacttgagaggctaaggcagagaattgcttggactcgggaggcagagggtgcagtgagccgagatcatgccactgcactccagcctgggcaacagagtgagaccctgcctcaaaaaaaaaaaaaaagaatcaagagaaatttcagagggaggagagacagaataaggcaactgaggatgatagagggagggaggcagagaggagaagatgagacagaagtccatgtcctctgggtttgatgggagggagggaaggaaggatggagacacaagagggggagtggatatggggaaggagtcaaatttgtttatgggattgagaggtgaagccggctaggcttctgggtcgggtggggacttgaacttttctgtctagctaaaggattgtaaacgtaccaatcagcactctgtgtctagctaaaggattgtaaatgcaccaatcagcactctgtgtctagctaaaggtttgtaaatgcaccaatcagcgctctgtgtctagctaatcaggtaggggacttggagaattttct

SEQ ID NO: 5305 - DNA, 20 bp, synthetic construct
  misc_feature 1..20: note = Description of Artificial Sequence: Synthetic oligonucleotide
  misc_feature 1..20: note = Target: ANGPTL4; (-) strand; PAM type: NAAAAC; PAM sequence: AAAAAC
  source 1..20: mol_type = other DNA
gtgagtcactgtgcctggcc

SEQ ID NO: 5306 - DNA, 20 bp, synthetic construct
  misc_feature 1..20: note = Description of Artificial Sequence: Synthetic oligonucleotide
  misc_feature 1..20: note = Target: ANGPTL4; (-) strand; PAM type: NAAAAC; PAM sequence: AAAAAC
  source 1..20: mol_type = other DNA
ttggctctagattttattct

SEQ ID NO: 5307 - DNA, 20 bp, synthetic construct
  misc_feature 1..20: note = Description of Artificial Sequence: Synthetic oligonucleotide
  misc_feature 1..20: note = Target: ANGPTL4; (-) strand; PAM type: NAAAAC; PAM sequence: CAAAAC
  source 1..20: mol_type = other DNA
gagccatgtgtcccacagca

SEQ ID NO: 5308 - DNA, 20 bp, synthetic construct
  misc_feature 1..20: note = Description of Artificial Sequence: Synthetic oligonucleotide
  misc_feature 1..20: note = Target: ANGPTL4; (-) strand; PAM type: NAAAAC; PAM sequence: GAAAAC
  source 1..20: mol_type = other DNA
tggacaggaaagggagggag

SEQ ID NO: 5309 - DNA, 20 bp, synthetic construct
  misc_feature 1..20: note = Description of Artificial Sequence: Synthetic oligonucleotide
  misc_feature 1..20: note = Target: ANGPTL4; (-) strand; PAM type: NAAAAC; PAM sequence: GAAAAC
  source 1..20: mol_type = other DNA
aggaaggggaggctggcaca

SEQ ID NO: 5310 - DNA, 20 bp, synthetic construct
  misc_feature 1..20: note = Description of Artificial Sequence: Synthetic oligonucleotide
  misc_feature 1..20: note = Target: ANGPTL4; (-) strand; PAM type: NAAAAC; PAM sequence: GAAAAC
  source 1..20: mol_type = other DNA
agttgtgtctggggaggggt

SEQ ID NO: 5311 - DNA, 20 bp, synthetic construct
  misc_feature 1..20: note = Description of Artificial Sequence: Synthetic oligonucleotide
  misc_feature 1..20: note = Target: ANGPTL4; (-) strand; PAM type: NAAAAC; PAM sequence: CAAAAC
  source 1..20: mol_type = other DNA
actccgtctcaaaaagcaaa

SEQ ID NO: 5312 - DNA, 20 bp, synthetic construct
  misc_feature 1..20: note = Description of Artificial Sequence: Synthetic oligonucleotide
  misc_feature 1..20: note = Target: ANGPTL4; (-) strand; PAM type: NAAAAC; PAM sequence: TAAAAC
  source 1..20: mol_type = other DNA
tggccaaaccccatctctag

SEQ ID NO: 5313 - DNA, 20 bp, synthetic construct
  misc_feature 1..20: note = Description of Artificial Sequence: Synthetic oligonucleotide
  misc_feature 1..20: note = Target: ANGPTL4; (-) strand; PAM type: NAAAAC; PAM sequence: CAAAAC
  source 1..20: mol_type = other DNA
ttgcactccagctccaagag

SEQ ID NO: 5314 - DNA, 20 bp, synthetic construct
  misc_feature 1..20: note = Description of Artificial Sequence: Synthetic oligonucleotide
  misc_feature 1..20: note = Target: ANGPTL4; (-) strand; PAM type: NAAAAC; PAM sequence: TAAAAC
  source 1..20: mol_type = other DNA
tctgggccagctgaactggg

SEQ ID NO: 5315 - DNA, 20 bp, synthetic construct
  misc_feature 1..20: note = Description of Artificial Sequence: Synthetic oligonucleotide
  misc_feature 1..20: note = Target: ANGPTL4; (-) strand; PAM type: NAAAAC; PAM sequence: GAAAAC
  source 1..20: mol_type = other DNA
caagacccttttcaggatgg

SEQ ID NO: 5316 - DNA, 20 bp, synthetic construct
  misc_feature 1..20: note = Description of Artificial Sequence: Synthetic oligonucleotide
  misc_feature 1..20: note = Target: ANGPTL4; (-) strand; PAM type: NAAAAC; PAM sequence: CAAAAC
  source 1..20: mol_type = other DNA
ccccgtctctactaaaaata

SEQ ID NO: 5317 - DNA, 20 bp, synthetic construct
  misc_feature 1..20: note = Description of Artificial Sequence: Synthetic oligonucleotide
  misc_feature 1..20: note = Target: ANGPTL4; (-) strand; PAM type: NAAAAC; PAM sequence: AAAAAC
  source 1..20: mol_type = other DNA
ccggccttatttttaagttt

SEQ ID NO: 5318 - DNA, 20 bp, synthetic construct
  misc_feature 1..20: note = Description of Artificial Sequence: Synthetic oligonucleotide
  misc_feature 1..20: note = Target: ANGPTL4; (-) strand; PAM type: NAAAAC; PAM sequence: GAAAAC
  source 1..20: mol_type = other DNA
agaaagagaaaaaaaagaaa

SEQ ID NO: 5319 - DNA, 20 bp, synthetic construct
  misc_feature 1..20: note = Description of Artificial Sequence: Synthetic oligonucleotide
  misc_feature 1..20: note = Target: ANGPTL4; (-) strand; PAM type: NAAAAC; PAM sequence: TAAAAC
  source 1..20: mol_type = other DNA
catggactttgttcactttt

SEQ ID NO: 5320 - DNA, 20 bp, synthetic construct
  misc_feature 1..20: note = Description of Artificial Sequence: Synthetic oligonucleotide
  misc_feature 1..20: note = Target: ANGPTL4; (-) strand; PAM type: NAAAAC; PAM sequence: CAAAAC
  source 1..20: mol_type = other DNA
tcttttttttttttttttaa

SEQ ID NO: 5321 - DNA, 20 bp, synthetic construct
  misc_feature 1..20: note = Description of Artificial Sequence: Synthetic oligonucleotide
  misc_feature 1..20: note = Target: ANGPTL4; (-) strand; PAM type: NAAAAC; PAM sequence: CAAAAC
  source 1..20: mol_type = other DNA
ggcatggaggggtggggtgt

SEQ ID NO: 5322 - DNA, 20 bp, synthetic construct
  misc_feature 1..20: note = Description of Artificial Sequence: Synthetic oligonucleotide
  misc_feature 1..20: note = Target: ANGPTL4; (+) strand; PAM type: NAAAAC; PAM sequence: TAAAAC
  source 1..20: mol_type = other DNA
gaaaaaaaaaaaaaaataca

SEQ ID NO: 5323 - DNA, 20 bp, synthetic construct
  misc_feature 1..20: note = Description of Artificial Sequence: Synthetic oligonucleotide
  misc_feature 1..20: note = Target: ANGPTL4; (+) strand; PAM type: NAAAAC; PAM sequence: AAAAAC
  source 1..20: mol_type = other DNA
ccactccgcacccaacttat

SEQ ID NO: 5324 - DNA, 20 bp, synthetic construct
  misc_feature 1..20: note = Description of Artificial Sequence: Synthetic oligonucleotide
  misc_feature 1..20: note = Target: ANGPTL4; (+) strand; PAM type: NAAAAC; PAM sequence: AAAAAC
  source 1..20: mol_type = other DNA
ataaaataaatataaaatta

SEQ ID NO: 5325 - DNA, 20 bp, synthetic construct
  misc_feature 1..20: note = Description of Artificial Sequence: Synthetic oligonucleotide
  misc_feature 1..20: note = Target: ANGPTL4; (+) strand; PAM type: NAAAAC; PAM sequence: GAAAAC
  source 1..20: mol_type = other DNA
tcccagctacacaggaggct

SEQ ID NO: 5326 - DNA, 20 bp, synthetic construct
  misc_feature 1..20: note = Description of Artificial Sequence: Synthetic oligonucleotide
  misc_feature 1..20: note = Target: ANGPTL4; (+) strand; PAM type: NAAAAC; PAM sequence: AAAAAC
  source 1..20: mol_type = other DNA
cccgtctctacaaataatgc

SEQ ID NO: 5327 - DNA, 20 bp, synthetic construct
  misc_feature 1..20: note = Description of Artificial Sequence: Synthetic oligonucleotide
  misc_feature 1..20: note = Target: ANGPTL4; (+) strand; PAM type: NAAAAC; PAM sequence: AAAAAC
  source 1..20: mol_type = other DNA
cagagcgagactccgtatca

SEQ ID NO: 5328 - DNA, 20 bp, synthetic construct
  misc_feature 1..20: note = Description of Artificial Sequence: Synthetic oligonucleotide
  misc_feature 1..20: note = Target: ANGPTL4; (+) strand; PAM type: NAAAAC; PAM sequence: CAAAAC
  source 1..20: mol_type = other DNA
cgagactccgtatcaaaaaa

SEQ ID NO: 5329 - DNA, 20 bp, synthetic construct
  misc_feature 1..20: note = Description of Artificial Sequence: Synthetic oligonucleotide
  misc_feature 1..20: note = Target: ANGPTL4; (+) strand; PAM type: NAAAAC; PAM sequence: GAAAAC
  source 1..20: mol_type = other DNA
ctgttgtctttctttaaatt

SEQ ID NO: 5330 - DNA, 20 bp, synthetic construct
  misc_feature 1..20: note = Description of Artificial Sequence: Synthetic oligonucleotide
  misc_feature 1..20: note = Target: ANGPTL4; (+) strand; PAM type: NAAAAC; PAM sequence: CAAAAC
  source 1..20: mol_type = other DNA
gtctttctttaaattgaaaa

SEQ ID NO: 5331 - DNA, 20 bp, synthetic construct
  misc_feature 1..20: note = Description of Artificial Sequence: Synthetic oligonucleotide
  misc_feature 1..20: note = Target: ANGPTL4; (+) strand; PAM type: NAAAAC; PAM sequence: CAAAAC
  source 1..20: mol_type = other DNA
tctttaaattgaaaacaaaa

SEQ ID NO: 5332 - DNA, 20 bp, synthetic construct
  misc_feature 1..20: note = Description of Artificial Sequence: Synthetic oligonucleotide
  misc_feature 1..20: note = Target: ANGPTL4; (+) strand; PAM type: NAAAAC; PAM sequence: CAAAAC
  source 1..20: mol_type = other DNA
ctccaacctgggcaacacaa

SEQ ID NO: 5333 - DNA, 20 bp, synthetic construct
  misc_feature 1..20: note = Description of Artificial Sequence: Synthetic oligonucleotide
  misc_feature 1..20: note = Target: ANGPTL4; (+) strand; PAM type: NAAAAC; PAM sequence: AAAAAC
  source 1..20: mol_type = other DNA
acaaaacctcgtttctaaaa

SEQ ID NO: 5334 - DNA, 20 bp, synthetic construct
  misc_feature 1..20: note = Description of Artificial Sequence: Synthetic oligonucleotide
  misc_feature 1..20: note = Target: ANGPTL4; (+) strand; PAM type: NAAAAC; PAM sequence: AAAAAC
  source 1..20: mol_type = other DNA
ctgtctcaattaaaaataca

SEQ ID NO: 5335 - DNA, 20 bp, synthetic construct
  misc_feature 1..20: note = Description of Artificial Sequence: Synthetic oligonucleotide
  misc_feature 1..20: note = Target: ANGPTL4; (+) strand; PAM type: NAAAAC; PAM sequence: CAAAAC
  source 1..20: mol_type = other DNA
atcacctgaggtcaggagtt

SEQ ID NO: 5336 - DNA, 20 bp, synthetic construct
  misc_feature 1..20: note = Description of Artificial Sequence: Synthetic oligonucleotide
  misc_feature 1..20: note = Target: ANGPTL4; (+) strand; PAM type: NAAAAC; PAM sequence: AAAAAC
  source 1..20: mol_type = other DNA
cccctcactactaaaaatac

SEQ ID NO: 5337 - DNA, 20 bp, synthetic construct
  misc_feature 1..20: note = Description of Artificial Sequence: Synthetic oligonucleotide
  misc_feature 1..20: note = Target: ANGPTL4; (+) strand; PAM type: NAAAAC; PAM sequence: CAAAAC
  source 1..20: mol_type = other DNA
aacagagcaagactccatct

SEQ ID NO: 5338 - DNA, 20 bp, synthetic construct
  misc_feature 1..20: note = Description of Artificial Sequence: Synthetic oligonucleotide
  misc_feature 1..20: note = Target: ANGPTL4; (+) strand; PAM type: NAAAAC; PAM sequence: CAAAAC
  source 1..20: mol_type = other DNA
cgcaccaatcagcgccctgt

SEQ ID NO: 5339 - DNA, 20 bp, synthetic construct
  misc_feature 1..20: note = Description of Artificial Sequence: Synthetic oligonucleotide
  misc_feature 1..20: note = Target: ANGPTL4; (+) strand; PAM type: NAAAAC; PAM sequence: GAAAAC
  source 1..20: mol_type = other DNA
atctaggacatgtatttgag

SEQ ID NO: 5340 - DNA, 20 bp, synthetic construct
  misc_feature 1..20: note = Description of Artificial Sequence: Synthetic oligonucleotide
  misc_feature 1..20: note = Target: ANGPTL4; (+) strand; PAM type: NAAAAC; PAM sequence: AAAAAC
  source 1..20: mol_type = other DNA
aacgacagaaaaaaaaaaaa

SEQ ID NO: 5341 - DNA, 20 bp, synthetic construct
  misc_feature 1..20: note = Description of Artificial Sequence: Synthetic oligonucleotide
  misc_feature 1..20: note = Target: ANGPTL4; (+) strand; PAM type: NAAAAC; PAM sequence: AAAAAC
  source 1..20: mol_type = other DNA
aagaaaaaaagaaagaaaag

SEQ ID NO: 5342 - DNA, 20 bp, synthetic construct
  misc_feature 1..20: note = Description of Artificial Sequence: Synthetic oligonucleotide
  misc_feature 1..20: note = Target: ANGPTL4; (-) strand; PAM type: NNAGAAW; PAM sequence: ACAGAAA
  source 1..20: mol_type = other DNA
accccatctctactaaaaat

SEQ ID NO: 5343 - DNA, 20 bp, synthetic construct
  misc_feature 1..20: note = Description of Artificial Sequence: Synthetic oligonucleotide
  misc_feature 1..20: note = Target: ANGPTL4; (-) strand; PAM type: NNAGAAW; PAM sequence: GGAGAAT
  source 1..20: mol_type = other DNA
ttactcgggaggctggggca

SEQ ID NO: 5344 - DNA, 20 bp, synthetic construct
  misc_feature 1..20: note = Description of Artificial Sequence: Synthetic oligonucleotide
  misc_feature 1..20: note = Target: ANGPTL4; (-) strand; PAM type: NNAGAAW; PAM sequence: TTAGAAT
  source 1..20: mol_type = other DNA
gcctggccaaaaactgacct

SEQ ID NO: 5345 - DNA, 20 bp, synthetic construct
  misc_feature 1..20: note = Description of Artificial Sequence: Synthetic oligonucleotide
  misc_feature 1..20: note = Target: ANGPTL4; (-) strand; PAM type: NNAGAAW; PAM sequence: CCAGAAT
  source 1..20: mol_type = other DNA
cacagctatcccaggctatc

SEQ ID NO: 5346 - DNA, 20 bp, synthetic construct
  misc_feature 1..20: note = Description of Artificial Sequence: Synthetic oligonucleotide
  misc_feature 1..20: note = Target: ANGPTL4; (-) strand; PAM type: NNAGAAW; PAM sequence: ACAGAAA
  source 1..20: mol_type = other DNA
gtcaggaaggggaggctggc

SEQ ID NO: 5347 - DNA, 20 bp, synthetic construct
  misc_feature 1..20: note = Description of Artificial Sequence: Synthetic oligonucleotide
  misc_feature 1..20: note = Target: ANGPTL4; (-) strand; PAM type: NNAGAAW; PAM sequence: GGAGAAT
  source 1..20: mol_type = other DNA
ctactcgggagactgtgtca

SEQ ID NO: 5348 - DNA, 20 bp, synthetic construct
  misc_feature 1..20: note = Description of Artificial Sequence: Synthetic oligonucleotide
  misc_feature 1..20: note = Target: ANGPTL4; (-) strand; PAM type: NNAGAAW; PAM sequence: AAAGAAA
  source 1..20: mol_type = other DNA
agtgagatcctgtctctaaa

SEQ ID NO: 5349 - DNA, 20 bp, synthetic construct
  misc_feature 1..20: note = Description of Artificial Sequence: Synthetic oligonucleotide
  misc_feature 1..20: note = Target: ANGPTL4; (-) strand; PAM type: NNAGAAW; PAM sequence: ACAGAAA
  source 1..20: mol_type = other DNA
ataaagcaggaacttagaga

SEQ ID NO: 5350 - DNA, 20 bp, synthetic construct
  misc_feature 1..20: note = Description of Artificial Sequence: Synthetic oligonucleotide
  misc_feature 1..20: note = Target: ANGPTL4; (-) strand; PAM type: NNAGAAW; PAM sequence: AAAGAAA
  source 1..20: mol_type = other DNA
agaaggaaagaaaggaagga

SEQ ID NO: 5351 - DNA, 20 bp, synthetic construct
  misc_feature 1..20: note = Description of Artificial Sequence: Synthetic oligonucleotide
  misc_feature 1..20: note = Target: ANGPTL4; (-) strand; PAM type: NNAGAAW; PAM sequence: AAAGAAA
  source 1..20: mol_type = other DNA
agggaaagaaaggaagaagg

SEQ ID NO: 5352 - DNA, 20 bp, synthetic construct
  misc_feature 1..20: note = Description of Artificial Sequence: Synthetic oligonucleotide
  misc_feature 1..20: note = Target: ANGPTL4; (-) strand; PAM type: NNAGAAW; PAM sequence: AAAGAAA
  source 1..20: mol_type = other DNA
gaggaaggaaggaaggaggg

SEQ ID NO: 5353 - DNA, 20 bp, synthetic construct
  misc_feature 1..20: note = Description of Artificial Sequence: Synthetic oligonucleotide
  misc_feature 1..20: note = Target: ANGPTL4; (-) strand; PAM type: NNAGAAW; PAM sequence: AGAGAAA
  source 1..20: mol_type = other DNA
aagagagagagaaaggaaag

SEQ ID NO: 5354 - DNA, 20 bp, synthetic construct
  misc_feature 1..20: note = Description of Artificial Sequence: Synthetic oligonucleotide
  misc_feature 1..20: note = Target: ANGPTL4; (-) strand; PAM type: NNAGAAW; PAM sequence: AGAGAAA
  source 1..20: mol_type = other DNA
gagagagagagaaaagagag

SEQ ID NO: 5355 - DNA, 20 bp, synthetic construct
  misc_feature 1..20: note = Description of Artificial Sequence: Synthetic oligonucleotide
  misc_feature 1..20: note = Target: ANGPTL4; (-) strand; PAM type: NNAGAAW; PAM sequence: AGAGAAA
  source 1..20: mol_type = other DNA
gagggaagaaggagagagag

SEQ ID NO: 5356 - DNA, 20 bp, synthetic construct
  misc_feature 1..20: note = Description of Artificial Sequence: Synthetic oligonucleotide
  misc_feature 1..20: note = Target: ANGPTL4; (-) strand; PAM type: NNAGAAW; PAM sequence: AAAGAAA
  source 1..20: mol_type = other DNA
agaaggaaggaaggacggaa

SEQ ID NO: 5357 - DNA, 20 bp, synthetic construct
  misc_feature 1..20: note = Description of Artificial Sequence: Synthetic oligonucleotide
  misc_feature 1..20: note = Target: ANGPTL4; (-) strand; PAM type: NNAGAAW; PAM sequence: AGAGAAA
  source 1..20: mol_type = other DNA
aaagaaaagaaagaaaagag

SEQ ID NO: 5358 - DNA, 20 bp, synthetic construct
  misc_feature 1..20: note = Description of Artificial Sequence: Synthetic oligonucleotide
  misc_feature 1..20: note = Target: ANGPTL4; (-) strand; PAM type: NNAGAAW; PAM sequence: AAAGAAA
  source 1..20: mol_type = other DNA
aagagaaaagaaaagaaaag

SEQ ID NO: 5359 - DNA, 20 bp, synthetic construct
  misc_feature 1..20: note = Description of Artificial Sequence: Synthetic oligonucleotide
  misc_feature 1..20: note = Target: ANGPTL4; (-) strand; PAM type: NNAGAAW; PAM sequence: AAAGAAA
  source 1..20: mol_type = other DNA
aaagaagagaaaagaaaaga

SEQ ID NO: 5360 - DNA, 20 bp, synthetic construct
  misc_feature 1..20: note = Description of Artificial Sequence: Synthetic oligonucleotide
  misc_feature 1..20: note = Target: ANGPTL4; (-) strand; PAM type: NNAGAAW; PAM sequence: AAAGAAA
  source 1..20: mol_type = other DNA
aaatgaaagaagagaaaaga

SEQ ID NO: 5361 - DNA, 20 bp, synthetic construct
  misc_feature 1..20: note = Description of Artificial Sequence: Synthetic oligonucleotide
  misc_feature 1..20: note = Target: ANGPTL4; (-) strand; PAM type: NNAGAAW; PAM sequence: AAAGAAA
  source 1..20: mol_type = other DNA
tctcaaaatgaaagaagaga

SEQ ID NO: 5362 - DNA, 20 bp, synthetic construct
  misc_feature 1..20: note = Description of Artificial Sequence: Synthetic oligonucleotide
  misc_feature 1..20: note = Target: ANGPTL4; (-) strand; PAM type: NNAGAAW; PAM sequence: AGAGAAA
  source 1..20: mol_type = other DNA
gtacgtctcaaaatgaaaga

SEQ ID NO: 5363 - DNA, 20 bp, synthetic construct
  misc_feature 1..20: note = Description of Artificial Sequence: Synthetic oligonucleotide
  misc_feature 1..20: note = Target: ANGPTL4; (-) strand; PAM type: NNAGAAW; PAM sequence: GTAGAAT
  source 1..20: mol_type = other DNA
ctactcgggaggctgaggca

SEQ ID NO: 5364 - DNA, 20 bp, synthetic construct
  misc_feature 1..20: note = Description of Artificial Sequence: Synthetic oligonucleotide
  misc_feature 1..20: note = Target: ANGPTL4; (-) strand; PAM type: NNAGAAW; PAM sequence: AAAGAAT
  source 1..20: mol_type = other DNA
ttggttgcagaagccgctgg

SEQ ID NO: 5365 - DNA, 20 bp, synthetic construct
  misc_feature 1..20: note = Description of Artificial Sequence: Synthetic oligonucleotide
  misc_feature 1..20: note = Target: ANGPTL4; (-) strand; PAM type: NNAGAAW; PAM sequence: AGAGAAA
  source 1..20: mol_type = other DNA
cagggaaggatgaggaccac

SEQ ID NO: 5366 - DNA, 20 bp, synthetic construct
  misc_feature 1..20: note = Description of Artificial Sequence: Synthetic oligonucleotide
  misc_feature 1..20: note = Target: ANGPTL4; (-) strand; PAM type: NNAGAAW; PAM sequence: AAAGAAA
  source 1..20: mol_type = other DNA
gagaggaggcagggttgagg

SEQ ID NO: 5367 - DNA, 20 bp, synthetic construct
  misc_feature 1..20: note = Description of Artificial Sequence: Synthetic oligonucleotide
  misc_feature 1..20: note = Target: ANGPTL4; (-) strand; PAM type: NNAGAAW; PAM sequence: GGAGAAT
  source 1..20: mol_type = other DNA
ctacttgagaggctgaggca

SEQ ID NO: 5368 - DNA, 20 bp, synthetic construct
  misc_feature 1..20: note = Description of Artificial Sequence: Synthetic oligonucleotide
  misc_feature 1..20: note = Target: ANGPTL4; (-) strand; PAM type: NNAGAAW; PAM sequence: GGAGAAT
  source 1..20: mol_type = other DNA
ctccttaggaggcagaggca

SEQ ID NO: 5369 - DNA, 20 bp, synthetic construct
  misc_feature 1..20: note = Description of Artificial Sequence: Synthetic oligonucleotide
  misc_feature 1..20: note = Target: ANGPTL4; (-) strand; PAM type: NNAGAAW; PAM sequence: AAAGAAA
  source 1..20: mol_type = other DNA
ttttgttttgttttcaattt

SEQ ID NO: 5370 - DNA, 20 bp, synthetic construct
  misc_feature 1..20: note = Description of Artificial Sequence: Synthetic oligonucleotide
  misc_feature 1..20: note = Target: ANGPTL4; (-) strand; PAM type: NNAGAAW; PAM sequence: GGAGAAT
  source 1..20: mol_type = other DNA
ctactggggaggctgacgct

SEQ ID NO: 5371 - DNA, 20 bp, synthetic construct
  misc_feature 1..20: note = Description of Artificial Sequence: Synthetic oligonucleotide
  misc_feature 1..20: note = Target: ANGPTL4; (-) strand; PAM type: NNAGAAW; PAM sequence: AAAGAAA
  source 1..20: mol_type = other DNA
ccagacaagggctgcatttt

SEQ ID NO: 5372 - DNA, 20 bp, synthetic construct
  misc_feature 1..20: note = Description of Artificial Sequence: Synthetic oligonucleotide
  misc_feature 1..20: note = Target: ANGPTL4; (-) strand; PAM type: NNAGAAW; PAM sequence: TTAGAAA
  source 1..20: mol_type = other DNA
tgctcagcctttgttttttt

SEQ ID NO: 5373 - DNA, 20 bp, synthetic construct
  misc_feature 1..20: note = Description of Artificial Sequence: Synthetic oligonucleotide
  misc_feature 1..20: note = Target: ANGPTL4; (-) strand; PAM type: NNAGAAW; PAM sequence: CCAGAAA
  source 1..20: mol_type = other DNA
actgtccagcctccatctgc

SEQ ID NO: 5374 - DNA, 20 bp, synthetic construct
  misc_feature 1..20: note = Description of Artificial Sequence: Synthetic oligonucleotide
  misc_feature 1..20: note = Target: ANGPTL4; (-) strand; PAM type: NNAGAAW; PAM sequence: CTAGAAA
  source 1..20: mol_type = other DNA
ctcccctgcctctgtcccca

SEQ ID NO: 5375 - DNA, 20 bp, synthetic construct
  misc_feature 1..20: note = Description of Artificial Sequence: Synthetic oligonucleotide
  misc_feature 1..20: note = Target: ANGPTL4; (-) strand; PAM type: NNAGAAW; PAM sequence: GCAGAAA
  source 1..20: mol_type = other DNA
gttgaaggcaggacagagca

SEQ ID NO: 5376 - DNA, 20 bp, synthetic construct
  misc_feature 1..20: note = Description of Artificial Sequence: Synthetic oligonucleotide
  misc_feature 1..20: note = Target: ANGPTL4; (-) strand; PAM type: NNAGAAW; PAM sequence: GGAGAAT
  source 1..20: mol_type = other DNA
ctactcgggaggctgaggca

SEQ ID NO: 5377 - DNA, 20 bp, synthetic construct
  misc_feature 1..20: note = Description of Artificial Sequence: Synthetic oligonucleotide
  misc_feature 1..20: note = Target: ANGPTL4; (-) strand; PAM type: NNAGAAW; PAM sequence: GGAGAAT
  source 1..20: mol_type = other DNA
ctactcaggaggctgaggca

SEQ ID NO: 5378 - DNA, 20 bp, synthetic construct
  misc_feature 1..20: note = Description of Artificial Sequence: Synthetic oligonucleotide
  misc_feature 1..20: note = Target: ANGPTL4; (-) strand; PAM type: NNAGAAW; PAM sequence: AAAGAAT
  source 1..20: mol_type = other DNA
tttcaaaaaaaaaaaaaaaa

SEQ ID NO: 5379 - DNA, 20 bp, synthetic construct
  misc_feature 1..20: note = Description of Artificial Sequence: Synthetic oligonucleotide
  misc_feature 1..20: note = Target: ANGPTL4; (-) strand; PAM type: NNAGAAW; PAM sequence: TGAGAAT
  source 1..20: mol_type = other DNA
gcctaatttttttttttttt

SEQ ID NO: 5380 - DNA, 20 bp, synthetic construct
  misc_feature 1..20: note = Description of Artificial Sequence: Synthetic oligonucleotide
  misc_feature 1..20: note = Target: ANGPTL4; (-) strand; PAM type: NNAGAAW; PAM sequence: TCAGAAA
  source 1..20: mol_type = other DNA
cgcatgcagcccccctgcac

SEQ ID NO: 5381 - DNA, 20 bp, synthetic construct
  misc_feature 1..20: note = Description of Artificial Sequence: Synthetic oligonucleotide
  misc_feature 1..20: note = Target: ANGPTL4; (-) strand; PAM type: NNAGAAW; PAM sequence: AAAGAAA
  source 1..20: mol_type = other DNA
taaagaaagagaaaaaaaag

SEQ ID NO: 5382 - DNA, 20 bp, synthetic construct
  misc_feature 1..20: note = Description of Artificial Sequence: Synthetic oligonucleotide
  misc_feature 1..20: note = Target: ANGPTL4; (-) strand; PAM type: NNAGAAW; PAM sequence: AAAGAAA
  source 1..20: mol_type = other DNA
gaactaaagaaagagaaaaa

SEQ ID NO: 5383 - DNA, 20 bp, synthetic construct
  misc_feature 1..20: note = Description of Artificial Sequence: Synthetic oligonucleotide
  misc_feature 1..20: note = Target: ANGPTL4; (-) strand; PAM type: NNAGAAW; PAM sequence: AGAGAAA
  source 1..20: mol_type = other DNA
tagatctgtgaactaaagaa

SEQ ID NO: 5384 - DNA, 20 bp, synthetic construct
  misc_feature 1..20: note = Description of Artificial Sequence: Synthetic oligonucleotide
  misc_feature 1..20: note = Target: ANGPTL4; (-) strand; PAM type: NNAGAAW; PAM sequence: AAAGAAA
  source 1..20: mol_type = other DNA
acttactagatctgtgaact

SEQ ID NO: 5385 - DNA, 20 bp, synthetic construct
  misc_feature 1..20: note = Description of Artificial Sequence: Synthetic oligonucleotide
  misc_feature 1..20: note = Target: ANGPTL4; (-) strand; PAM type: NNAGAAW; PAM sequence: ATAGAAT
  source 1..20: mol_type = other DNA
gtttgagaccagcctggaca

SEQ ID NO: 5386 - DNA, 20 bp, synthetic construct
  misc_feature 1..20: note = Description of Artificial Sequence: Synthetic oligonucleotide
  misc_feature 1..20: note = Target: ANGPTL4; (-) strand; PAM type: NNAGAAW; PAM sequence: GTAGAAT
  source 1..20: mol_type = other DNA
ttttttaacaaaacacagat

SEQ ID NO: 5387 - DNA, 20 bp, synthetic construct
  misc_feature 1..20: note = Description of Artificial Sequence: Synthetic oligonucleotide
  misc_feature 1..20: note = Target: ANGPTL4; (-) strand; PAM type: NNAGAAW; PAM sequence: GTAGAAA
  source 1..20: mol_type = other DNA
agctaatttttgtattttta

SEQ ID NO: 5388 - DNA, 20 bp, synthetic construct
  misc_feature 1..20: note = Description of Artificial Sequence: Synthetic oligonucleotide
  misc_feature 1..20: note = Target: ANGPTL4; (-) strand; PAM type: NNAGAAW; PAM sequence: CCAGAAA
  source 1..20: mol_type = other DNA
cagctccggccttggccagc

SEQ ID NO: 5389 - DNA, 20 bp, synthetic construct
  misc_feature 1..20: note = Description of Artificial Sequence: Synthetic oligonucleotide
  misc_feature 1..20: note = Target: ANGPTL4; (-) strand; PAM type: NNAGAAW; PAM sequence: TGAGAAA
  source 1..20: mol_type = other DNA
ggaaggcagctaaggcctgg

SEQ ID NO: 5390 - DNA, 20 bp, synthetic construct
  misc_feature 1..20: note = Description of Artificial Sequence: Synthetic oligonucleotide
  misc_feature 1..20: note = Target: ANGPTL4; (-) strand; PAM type: NNAGAAW; PAM sequence: CAAGAAT
  source 1..20: mol_type = other DNA
gttcttggtctcactgactt

SEQ ID NO: 5391 - DNA, 20 bp, synthetic construct
  misc_feature 1..20: note = Description of Artificial Sequence: Synthetic oligonucleotide
  misc_feature 1..20: note = Target: ANGPTL4; (-) strand; PAM type: NNAGAAW; PAM sequence: ACAGAAT
  source 1..20: mol_type = other DNA
tttatttatttattttttag

SEQ ID NO: 5392 - DNA, 20 bp, synthetic construct
  misc_feature 1..20: note = Description of Artificial Sequence: Synthetic oligonucleotide
  misc_feature 1..20: note = Target: ANGPTL4; (-) strand; PAM type: NNAGAAW; PAM sequence: TCAGAAA
  source 1..20: mol_type = other DNA
aaattaacagcagctggggt

SEQ ID NO: 5393 - DNA, 20 bp, synthetic construct
  misc_feature 1..20: note = Description of Artificial Sequence: Synthetic oligonucleotide
  misc_feature 1..20: note = Target: ANGPTL4; (-) strand; PAM type: NNAGAAW; PAM sequence: GGAGAAT
  source 1..20: mol_type = other DNA
ctactcgggaggccgaggca

SEQ ID NO: 5394 - DNA, 20 bp, synthetic construct
  misc_feature 1..20: note = Description of Artificial Sequence: Synthetic oligonucleotide
  misc_feature 1..20: note = Target: ANGPTL4; (-) strand; PAM type: NNAGAAW; PAM sequence: ACAGAAA
  source 1..20: mol_type = other DNA
gtttacaatcctttagctag

SEQ ID NO: 5395 - DNA, 20 bp, synthetic construct
  misc_feature 1..20: note = Description of Artificial Sequence: Synthetic oligonucleotide
  misc_feature 1..20: note = Target: ANGPTL4; (+) strand; PAM type: NNAGAAW; PAM sequence: GGAGAAT
  source 1..20: mol_type = other DNA
ctactcgggaggctgaggca

SEQ ID NO: 5396 - DNA, 20 bp, synthetic construct
  misc_feature 1..20: note = Description of Artificial Sequence: Synthetic oligonucleotide
  misc_feature 1..20: note = Target: ANGPTL4; (+) strand; PAM type: NNAGAAW; PAM sequence: AAAGAAA
  source 1..20: mol_type = other DNA
gcaagactctgtctcaaaaa

SEQ ID NO: 5397 - DNA, 20 bp, synthetic construct
  misc_feature 1..20: note = Description of Artificial Sequence: Synthetic oligonucleotide
  misc_feature 1..20: note = Target: ANGPTL4; (+) strand; PAM type: NNAGAAW; PAM sequence: AAAGAAA
  source 1..20: mol_type = other DNA
tctcaaaaaaaagaaaaaaa

SEQ ID NO: 5398 - DNA, 20 bp, synthetic construct
  misc_feature 1..20: note = Description of Artificial Sequence: Synthetic oligonucleotide
  misc_feature 1..20: note = Target: ANGPTL4; (+) strand; PAM type: NNAGAAW; PAM sequence: AAAGAAA
  source 1..20: mol_type = other DNA
aaaaaaagaaaaaaaaaaga

SEQ ID NO: 5399 - DNA, 20 bp, synthetic construct
  misc_feature 1..20: note = Description of Artificial Sequence: Synthetic oligonucleotide
  misc_feature 1..20: note = Target: ANGPTL4; (+) strand; PAM type: NNAGAAW; PAM sequence: AAAGAAA
  source 1..20: mol_type = other DNA
aagaaaaaaaaaagaaaaga

SEQ ID NO: 5400 - DNA, 20 bp, synthetic construct
  misc_feature 1..20: note = Description of Artificial Sequence: Synthetic oligonucleotide
  misc_feature 1..20: note = Target: ANGPTL4; (+) strand; PAM type: NNAGAAW; PAM sequence: AAAGAAA
  source 1..20: mol_type = other DNA
aaaagaaaagaaaagaaaaa

SEQ ID NO: 5401 - DNA, 20 bp, synthetic construct
  misc_feature 1..20: note = Description of Artificial Sequence: Synthetic oligonucleotide
  misc_feature 1..20: note = Target: ANGPTL4; (+) strand; PAM type: NNAGAAW; PAM sequence: AAAGAAA
  source 1..20: mol_type = other DNA
aaagaaaagaaaaaaaagaa

SEQ ID NO: 5402 - DNA, 20 bp, synthetic construct
  misc_feature 1..20: note = Description of Artificial Sequence: Synthetic oligonucleotide
  misc_feature 1..20: note = Target: ANGPTL4; (+) strand; PAM type: NNAGAAW; PAM sequence: AAAGAAA
  source 1..20: mol_type = other DNA
gaaaaaaaagaaaaagaaaa

SEQ ID NO: 5403 - DNA, 20 bp, synthetic construct
  misc_feature 1..20: note = Description of Artificial Sequence: Synthetic oligonucleotide
  misc_feature 1..20: note = Target: ANGPTL4; (+) strand; PAM type: NNAGAAW; PAM sequence: ACAGAAA
  source 1..20: mol_type = other DNA
atcctgtctctacaaaatct

SEQ ID NO: 5404 - DNA, 20 bp, synthetic construct
  misc_feature 1..20: note = Description of Artificial Sequence: Synthetic oligonucleotide
  misc_feature 1..20: note = Target: ANGPTL4; (+) strand; PAM type: NNAGAAW; PAM sequence: TCAGAAA
  source 1..20: mol_type = other DNA
ctgggtgagtgagacccatc

SEQ ID NO: 5405 - DNA, 20 bp, synthetic construct
  misc_feature 1..20: note = Description of Artificial Sequence: Synthetic oligonucleotide
  misc_feature 1..20: note = Target: ANGPTL4; (+) strand; PAM type: NNAGAAW; PAM sequence: CTAGAAT
  source 1..20: mol_type = other DNA
gcgaaaccccaccccctcta

SEQ ID NO: 5406 - DNA, 20 bp, synthetic construct
  misc_feature 1..20: note = Description of Artificial Sequence: Synthetic oligonucleotide
  misc_feature 1..20: note = Target: ANGPTL4; (+) strand; PAM type: NNAGAAW; PAM sequence: GGAGAAT
  source 1..20: mol_type = other DNA
ctactcaggaggctgaggca

SEQ ID NO: 5407 - DNA, 20 bp, synthetic construct
  misc_feature 1..20: note = Description of Artificial Sequence: Synthetic oligonucleotide
  misc_feature 1..20: note = Target: ANGPTL4; (+) strand; PAM type: NNAGAAW; PAM sequence: GGAGAAT
  source 1..20: mol_type = other DNA
ctactcgggaggctgaggct

SEQ ID NO: 5408 - DNA, 20 bp, synthetic construct
  misc_feature 1..20: note = Description of Artificial Sequence: Synthetic oligonucleotide
  misc_feature 1..20: note = Target: ANGPTL4; (+) strand; PAM type: NNAGAAW; PAM sequence: GGAGAAT
  source 1..20: mol_type = other DNA
ctactcgggaggctgaggca

SEQ ID NO: 5409 - DNA, 20 bp, synthetic construct
  misc_feature 1..20: note = Description of Artificial Sequence: Synthetic oligonucleotide
  misc_feature 1..20: note = Target: ANGPTL4; (+) strand; PAM type: NNAGAAW; PAM sequence: TTAGAAT
  source 1..20: mol_type = other DNA
taaaaaataaagagcagttt

SEQ ID NO: 5410 - DNA, 20 bp, synthetic construct
  misc_feature 1..20: note = Description of Artificial Sequence: Synthetic oligonucleotide
  misc_feature 1..20: note = Target: ANGPTL4; (+) strand; PAM type: NNAGAAW; PAM sequence: AGAGAAT
  source 1..20: mol_type = other DNA
ggtgtgcagtttcagattcc

SEQ ID NO: 5411 - DNA, 20 bp, synthetic construct
  misc_feature 1..20: note = Description of Artificial Sequence: Synthetic oligonucleotide
  misc_feature 1..20: note = Target: ANGPTL4; (+) strand; PAM type: NNAGAAW; PAM sequence: TCAGAAT
  source 1..20: mol_type = other DNA
actctatccctaccccaggc

SEQ ID NO: 5412 - DNA, 20 bp, synthetic construct
  misc_feature 1..20: note = Description of Artificial Sequence: Synthetic oligonucleotide
  misc_feature 1..20: note = Target: ANGPTL4; (+) strand; PAM type: NNAGAAW; PAM sequence: AGAGAAA
  source 1..20: mol_type = other DNA
agtgaatgaatgaatgaggg

SEQ ID NO: 5413 - DNA, 20 bp, synthetic construct
  misc_feature 1..20: note = Description of Artificial Sequence: Synthetic oligonucleotide
  misc_feature 1..20: note = Target: ANGPTL4; (+) strand; PAM type: NNAGAAW; PAM sequence: GGAGAAA
  source 1..20: mol_type = other DNA
ctcataatttcgggctcagg

SEQ ID NO: 5414 - DNA, 20 bp, synthetic construct
  misc_feature 1..20: note = Description of Artificial Sequence: Synthetic oligonucleotide
  misc_feature 1..20: note = Target: ANGPTL4; (+) strand; PAM type: NNAGAAW; PAM sequence: AAAGAAT
  source 1..20: mol_type = other DNA
tcaggggagaaatggaagtc

SEQ ID NO: 5415 - DNA, 20 bp, synthetic construct
  misc_feature 1..20: note = Description of Artificial Sequence: Synthetic oligonucleotide
  misc_feature 1..20: note = Target: ANGPTL4; (+) strand; PAM type: NNAGAAW; PAM sequence: CCAGAAA
  source 1..20: mol_type = other DNA
acgggaaggaacatgcgagc

SEQ ID NO: 5416 - DNA, 20 bp, synthetic construct
  misc_feature 1..20: note = Description of Artificial Sequence: Synthetic oligonucleotide
  misc_feature 1..20: note = Target: ANGPTL4; (+) strand; PAM type: NNAGAAW; PAM sequence: GGAGAAA
  source 1..20: mol_type = other DNA
gagactagcctggccaacat

SEQ ID NO: 5417 - DNA, 20 bp, synthetic construct
  misc_feature 1..20: note = Description of Artificial Sequence: Synthetic oligonucleotide
  misc_feature 1..20: note = Target: ANGPTL4; (+) strand; PAM type: NNAGAAW; PAM sequence: GGAGAAT
  source 1..20: mol_type = other DNA
ctacttgggaggctgaggca

SEQ ID NO: 5418 - DNA, 20 bp, synthetic construct
  misc_feature 1..20: note = Description of Artificial Sequence: Synthetic oligonucleotide
  misc_feature 1..20: note = Target: ANGPTL4; (+) strand; PAM type: NNAGAAW; PAM sequence: CAAGAAT
  source 1..20: mol_type = other DNA
ctacttgggaggctgagaca

SEQ ID NO: 5419 - DNA, 20 bp, synthetic construct
  misc_feature 1..20: note = Description of Artificial Sequence: Synthetic oligonucleotide
  misc_feature 1..20: note = Target: ANGPTL4; (+) strand; PAM type: NNAGAAW; PAM sequence: AAAGAAA
  source 1..20: mol_type = other DNA
gaccccgtcattgggaaaaa

SEQ ID NO: 5420 - DNA, 20 bp, synthetic construct
  misc_feature 1..20: note = Description of Artificial Sequence: Synthetic oligonucleotide
  misc_feature 1..20: note = Target: ANGPTL4; (+) strand; PAM type: NNAGAAW; PAM sequence: AAAGAAA
  source 1..20: mol_type = other DNA
tcattgggaaaaaaaagaaa

SEQ ID NO: 5421 - DNA, 20 bp, synthetic construct
  misc_feature 1..20: note = Description of Artificial Sequence: Synthetic oligonucleotide
  misc_feature 1..20: note = Target: ANGPTL4; (+) strand; PAM type: NNAGAAW; PAM sequence: GGAGAAA
  source 1..20: mol_type = other DNA
caggtaaccctaggatcaag

SEQ ID NO: 5422 - DNA, 20 bp, synthetic construct
  misc_feature 1..20: note = Description of Artificial Sequence: Synthetic oligonucleotide
  misc_feature 1..20: note = Target: ANGPTL4; (+) strand; PAM type: NNAGAAW; PAM sequence: GAAGAAA
  source 1..20: mol_type = other DNA
tgaggtggccaagcctgccc

SEQ ID NO: 5423 - DNA, 20 bp, synthetic construct
  misc_feature 1..20: note = Description of Artificial Sequence: Synthetic oligonucleotide
  misc_feature 1..20: note = Target: ANGPTL4; (+) strand; PAM type: NNAGAAW; PAM sequence: GGAGAAA
  source 1..20: mol_type = other DNA
tcactgattggaacagaggt

SEQ ID NO: 5424 - DNA, 20 bp, synthetic construct
  misc_feature 1..20: note = Description of Artificial Sequence: Synthetic oligonucleotide
  misc_feature 1..20: note = Target: ANGPTL4; (+) strand; PAM type: NNAGAAW; PAM sequence: GTAGAAA
  source 1..20: mol_type = other DNA
ctgcaggggtgctggagaag

SEQ ID NO: 5425 - DNA, 20 bp, synthetic construct
  misc_feature 1..20: note = Description of Artificial Sequence: Synthetic oligonucleotide
  misc_feature 1..20: note = Target: ANGPTL4; (+) strand; PAM type: NNAGAAW; PAM sequence: CCAGAAA
  source 1..20: mol_type = other DNA
gggaacccccagctcccaga

SEQ ID NO: 5426 - DNA, 20 bp, synthetic construct
  misc_feature 1..20: note = Description of Artificial Sequence: Synthetic oligonucleotide
  misc_feature 1..20: note = Target: ANGPTL4; (+) strand; PAM type: NNAGAAW; PAM sequence: GCAGAAA
  source 1..20: mol_type = other DNA
ccgccggccccctccccacc

SEQ ID NO: 5427 - DNA, 20 bp, synthetic construct
  misc_feature 1..20: note = Description of Artificial Sequence: Synthetic oligonucleotide
  misc_feature 1..20: note = Target: ANGPTL4; (+) strand; PAM type: NNAGAAW; PAM sequence: GGAGAAA
  source 1..20: mol_type = other DNA
tggctcaggcccgccaagta

SEQ ID NO: 5428 - DNA, 20 bp, synthetic construct
  misc_feature 1..20: note = Description of Artificial Sequence: Synthetic oligonucleotide
  misc_feature 1..20: note = Target: ANGPTL4; (+) strand; PAM type: NNAGAAW; PAM sequence: GCAGAAT
  source 1..20: mol_type = other DNA
cagctgctccggaggctgcg

SEQ ID NO: 5429 - DNA, 20 bp, synthetic construct
  misc_feature 1..20: note = Description of Artificial Sequence: Synthetic oligonucleotide
  misc_feature 1..20: note = Target: ANGPTL4; (+) strand; PAM type: NNAGAAW; PAM sequence: GAAGAAA
  source 1..20: mol_type = other DNA
ggtgtgtggtacaagggtgg

SEQ ID NO: 5430 - DNA, 20 bp, synthetic construct
  misc_feature 1..20: note = Description of Artificial Sequence: Synthetic oligonucleotide
  misc_feature 1..20: note = Target: ANGPTL4; (+) strand; PAM type: NNAGAAW; PAM sequence: GGAGAAT
  source 1..20: mol_type = other DNA
ctactcaggtggctgaggca

SEQ ID NO: 5431 - DNA, 20 bp, synthetic construct
  misc_feature 1..20: note = Description of Artificial Sequence: Synthetic oligonucleotide
  misc_feature 1..20: note = Target: ANGPTL4; (+) strand; PAM type: NNAGAAW; PAM sequence: AGAGAAA
  source 1..20: mol_type = other DNA
ccccatcaaaaaaataaaaa

SEQ ID NO: 5432 - DNA, 20 bp, synthetic construct
  misc_feature 1..20: note = Description of Artificial Sequence: Synthetic oligonucleotide
  misc_feature 1..20: note = Target: ANGPTL4; (+) strand; PAM type: NNAGAAW; PAM sequence: CAAGAAT
  source 1..20: mol_type = other DNA
ctgcttgtggggctgaagca

SEQ ID NO: 5433 - DNA, 20 bp, synthetic construct
  misc_feature 1..20: note = Description of Artificial Sequence: Synthetic oligonucleotide
  misc_feature 1..20: note = Target: ANGPTL4; (+) strand; PAM type: NNAGAAW; PAM sequence: AAAGAAA
  source 1..20: mol_type = other DNA
ctaaaaaaaaaaaaaaaaaa

SEQ ID NO: 5434 - DNA, 20 bp, synthetic construct
  misc_feature 1..20: note = Description of Artificial Sequence: Synthetic oligonucleotide
  misc_feature 1..20: note = Target: ANGPTL4; (+) strand; PAM type: NNAGAAW; PAM sequence: AAAGAAA
  source 1..20: mol_type = other DNA
agagtgagacccctgcctca

SEQ ID NO: 5435 - DNA, 20 bp, synthetic construct
  misc_feature 1..20: note = Description of Artificial Sequence: Synthetic oligonucleotide
  misc_feature 1..20: note = Target: ANGPTL4; (+) strand; PAM type: NNAGAAW; PAM sequence: AAAGAAA
  source 1..20: mol_type = other DNA
agacccctgcctcaaaagaa

SEQ ID NO: 5436 - DNA, 20 bp, synthetic construct
  misc_feature 1..20: note = Description of Artificial Sequence: Synthetic oligonucleotide
  misc_feature 1..20: note = Target: ANGPTL4; (+) strand; PAM type: NNAGAAW; PAM sequence: CAAGAAT
  source 1..20: mol_type = other DNA
ctacttgggaggcccaggta

SEQ ID NO: 5437 - DNA, 20 bp, synthetic construct
  misc_feature 1..20: note = Description of Artificial Sequence: Synthetic oligonucleotide
  misc_feature 1..20: note = Target: ANGPTL4; (+) strand; PAM type: NNAGAAW; PAM sequence: TGAGAAT
  source 1..20: mol_type = other DNA
ctactcaggaggctgaggca

SEQ ID NO: 5438 - DNA, 20 bp, synthetic construct
  misc_feature 1..20: note = Description of Artificial Sequence: Synthetic oligonucleotide
  misc_feature 1..20: note = Target: ANGPTL4; (+) strand; PAM type: NNAGAAW; PAM sequence: GGAGAAT
  source 1..20: mol_type = other DNA
ctactcgggaggctgaggga

SEQ ID NO: 5439 - DNA, 20 bp, synthetic construct
  misc_feature 1..20: note = Description of Artificial Sequence: Synthetic oligonucleotide
  misc_feature 1..20: note = Target: ANGPTL4; (+) strand; PAM type: NNAGAAW; PAM sequence: GAAGAAT
  source 1..20: mol_type = other DNA
ctactctagaggctgacgca

SEQ ID NO: 5440 - DNA, 20 bp, synthetic construct
  misc_feature 1..20: note = Description of Artificial Sequence: Synthetic oligonucleotide
  misc_feature 1..20: note = Target: ANGPTL4; (+) strand; PAM type: NNAGAAW; PAM sequence: GGAGAAT
  source 1..20: mol_type = other DNA
ctactcaggaggctgaggca

SEQ ID NO: 5441 - DNA, 20 bp, synthetic construct
  misc_feature 1..20: note = Description of Artificial Sequence: Synthetic oligonucleotide
  misc_feature 1..20: note = Target: ANGPTL4; (+) strand; PAM type: NNAGAAW; PAM sequence: AAAGAAT
  source 1..20: mol_type = other DNA
aaaaaaaaaaaaaaaaaaaa

SEQ ID NO: 5442 - DNA, 20 bp, synthetic construct
  misc_feature 1..20: note = Description of Artificial Sequence: Synthetic oligonucleotide
  misc_feature 1..20: note = Target: ANGPTL4; (+) strand; PAM type: NNAGAAW; PAM sequence: GGAGAAT
  source 1..20: mol_type = other DNA
ctactcaggaggctgaggcc

SEQ ID NO: 5443 - DNA, 20 bp, synthetic construct
  misc_feature 1..20: note = Description of Artificial Sequence: Synthetic oligonucleotide
  misc_feature 1..20: note = Target: ANGPTL4; (+) strand; PAM type: NNAGAAW; PAM sequence: AGAGAAT
  source 1..20: mol_type = other DNA
gatgtgggtggggccagata

SEQ ID NO: 5444 - DNA, 20 bp, synthetic construct
  misc_feature 1..20: note = Description of Artificial Sequence: Synthetic oligonucleotide
  misc_feature 1..20: note = Target: ANGPTL4; (+) strand; PAM type: NNAGAAW; PAM sequence: GAAGAAA
  source 1..20: mol_type = other DNA
aaccatgaacccaccagaag

SEQ ID NO: 5445 - DNA, 20 bp, synthetic construct
  misc_feature 1..20: note = Description of Artificial Sequence: Synthetic oligonucleotide
  misc_feature 1..20: note = Target: ANGPTL4; (+) strand; PAM type: NNAGAAW; PAM sequence: GAAGAAA
  source 1..20: mol_type = other DNA
ctgaacacacctgaacatca

SEQ ID NO: 5446 - DNA, 20 bp, synthetic construct
  misc_feature 1..20: note = Description of Artificial Sequence: Synthetic oligonucleotide
  misc_feature 1..20: note = Target: ANGPTL4; (+) strand; PAM type: NNAGAAW; PAM sequence: GAAGAAA
  source 1..20: mol_type = other DNA
tggtgggggttcttgcgcta

SEQ ID NO: 5447 - DNA, 20 bp, synthetic construct
  misc_feature 1..20: note = Description of Artificial Sequence: Synthetic oligonucleotide
  misc_feature 1..20: note = Target: ANGPTL4; (+) strand; PAM type: NNAGAAW; PAM sequence: ACAGAAA
  source 1..20: mol_type = other DNA
cccctccaacctggggaacg

SEQ ID NO: 5448 - DNA, 20 bp, synthetic construct
  misc_feature 1..20: note = Description of Artificial Sequence: Synthetic oligonucleotide
  misc_feature 1..20: note = Target: ANGPTL4; (+) strand; PAM type: NNAGAAW; PAM sequence: GGAGAAT
  source 1..20: mol_type = other DNA
ctattcgggaggctaaggca

SEQ ID NO: 5449 - DNA, 20 bp, synthetic construct
  misc_feature 1..20: note = Description of Artificial Sequence: Synthetic oligonucleotide
  misc_feature 1..20: note = Target: ANGPTL4; (+) strand; PAM type: NNAGAAW; PAM sequence: AAAGAAA
  source 1..20: mol_type = other DNA
gagcaagactctgtctcaaa

SEQ ID NO: 5450 - DNA, 20 bp, synthetic construct
  misc_feature 1..20: note = Description of Artificial Sequence: Synthetic oligonucleotide
  misc_feature 1..20: note = Target: ANGPTL4; (+) strand; PAM type: NNAGAAW; PAM sequence: AAAGAAA
  source 1..20: mol_type = other DNA
aagactctgtctcaaaaaag

SEQ ID NO: 5451 - DNA, 20 bp, synthetic construct
  misc_feature 1..20: note = Description of Artificial Sequence: Synthetic oligonucleotide
  misc_feature 1..20: note = Target: ANGPTL4; (+) strand; PAM type: NNAGAAW; PAM sequence: AAAGAAA
  source 1..20: mol_type = other DNA
gtctcaaaaaagaaagaaaa

SEQ ID NO: 5452 - DNA, 20 bp, synthetic construct
  misc_feature 1..20: note = Description of Artificial Sequence: Synthetic oligonucleotide
  misc_feature 1..20: note = Target: ANGPTL4; (+) strand; PAM type: NNAGAAW; PAM sequence: AAAGAAA
  source 1..20: mol_type = other DNA
caaaaaagaaagaaaaaaag

SEQ ID NO: 5453 - DNA, 20 bp, synthetic construct
  misc_feature 1..20: note = Description of Artificial Sequence: Synthetic oligonucleotide
  misc_feature 1..20: note = Target: ANGPTL4; (+) strand; PAM type: NNAGAAW; PAM sequence: AAAGAAA
  source 1..20: mol_type = other DNA
aagaaagaaaaaaagaaaga

SEQ ID NO: 5454 - DNA, 20 bp, synthetic construct
  misc_feature 1..20: note = Description of Artificial Sequence: Synthetic oligonucleotide
  misc_feature 1..20: note = Target: ANGPTL4; (+) strand; PAM type: NNAGAAW; PAM sequence: AAAGAAT
  source 1..20: mol_type = other DNA
tggtgtggggagggggtggt

SEQ ID NO: 5455 - DNA, 20 bp, synthetic construct
  misc_feature 1..20: note = Description of Artificial Sequence: Synthetic oligonucleotide
  misc_feature 1..20: note = Target: ANGPTL4; (+) strand; PAM type: NNAGAAW; PAM sequence: AGAGAAT
  source 1..20: mol_type = other DNA
gctacttgagaggctaaggc

SEQ ID NO: 5456 - DNA, 20 bp, synthetic construct
  misc_feature 1..20: note = Description of Artificial Sequence: Synthetic oligonucleotide
  misc_feature 1..20: note = Target: ANGPTL4; (+) strand; PAM type: NNAGAAW; PAM sequence: AAAGAAT
  source 1..20: mol_type = other DNA
cctgcctcaaaaaaaaaaaa

SEQ ID NO: 5457 - DNA, 20 bp, synthetic construct
  misc_feature 1..20: note = Description of Artificial Sequence: Synthetic oligonucleotide
  misc_feature 1..20: note = Target: ANGPTL4; (+) strand; PAM type: NNAGAAW; PAM sequence: AGAGAAA
  source 1..20: mol_type = other DNA
aaaaaaaaaaaaaagaatca

SEQ ID NO: 5458 - DNA, 20 bp, synthetic construct
  misc_feature 1..20: note = Description of Artificial Sequence: Synthetic oligonucleotide
  misc_feature 1..20: note = Target: ANGPTL4; (+) strand; PAM type: NNAGAAW; PAM sequence: ACAGAAT
  source 1..20: mol_type = other DNA
aaatttcagagggaggagag

SEQ ID NO: 5459 - DNA, 20 bp, synthetic construct
  misc_feature 1..20: note = Description of Artificial Sequence: Synthetic oligonucleotide
  misc_feature 1..20: note = Target: ANGPTL4; (+) strand; PAM type: NNAGAAW; PAM sequence: GGAGAAT
  source 1..20: mol_type = other DNA
gctaatcaggtaggggactt

SEQ ID NO: 5460 - DNA, 20 bp, synthetic construct
  misc_feature 1..20: note = Description of Artificial Sequence: Synthetic oligonucleotide
  misc_feature 1..20: note = Target: ANGPTL4; (-) strand; PAM type: NNGRRT; PAM sequence: TTGGGT
  source 1..20: mol_type = other DNA
tcgtaccattgcactccagc

SEQ ID NO: 5461 - DNA, 20 bp, synthetic construct
  misc_feature 1..20: note = Description of Artificial Sequence: Synthetic oligonucleotide
  misc_feature 1..20: note = Target: ANGPTL4; (-) strand; PAM type: NNGRRT; PAM sequence: GGGAGT
  source 1..20: mol_type = other DNA
tgggtggatcacttgagtct

SEQ ID NO: 5462 - DNA, 20 bp, synthetic construct
  misc_feature 1..20: note = Description of Artificial Sequence: Synthetic oligonucleotide
  misc_feature 1..20: note = Target: ANGPTL4; (-) strand; PAM type: NNGRRT; PAM sequence: TTGAGT
  source 1..20: mol_type = other DNA
ggctgaggtgggtggatcac

SEQ ID NO: 5463 - DNA, 20 bp, synthetic construct
  misc_feature 1..20: note = Description of Artificial Sequence: Synthetic oligonucleotide
  misc_feature 1..20: note = Target: ANGPTL4; (-) strand; PAM type: NNGRRT; PAM sequence: GTGGAT
  source 1..20: mol_type = other DNA
actttgggaggctgaggtgg

SEQ ID NO: 5464 - DNA, 20 bp, synthetic construct
  misc_feature 1..20: note = Description of Artificial Sequence: Synthetic oligonucleotide
  misc_feature 1..20: note = Target: ANGPTL4; (-) strand; PAM type: NNGRRT; PAM sequence: GTGGGT
  source 1..20: mol_type = other DNA
tagcactttgggaggctgag

SEQ ID NO: 5465 - DNA, 20 bp, synthetic construct
  misc_feature 1..20: note = Description of Artificial Sequence: Synthetic oligonucleotide
  misc_feature 1..20: note = Target: ANGPTL4; (-) strand; PAM type: NNGRRT; PAM sequence: GAGGGT
  source 1..20: mol_type = other DNA
tcgctggaacccgggaggca

SEQ ID NO: 5466 - DNA, 20 bp, synthetic construct
  misc_feature 1..20: note = Description of Artificial Sequence: Synthetic oligonucleotide
  misc_feature 1..20: note = Target: ANGPTL4; (-) strand; PAM type: NNGRRT; PAM sequence: GAGAAT
  source 1..20: mol_type = other DNA
tactcgggaggctggggcag

SEQ ID NO: 5467 - DNA, 20 bp, synthetic construct
  misc_feature 1..20: note = Description of Artificial Sequence: Synthetic oligonucleotide
  misc_feature 1..20: note = Target: ANGPTL4; (-) strand; PAM type: NNGRRT; PAM sequence: GGGAGT
  source 1..20: mol_type = other DNA
gcctgtaataccagcacttt

SEQ ID NO: 5468 - DNA, 20 bp, synthetic construct
  misc_feature 1..20: note = Description of Artificial Sequence: Synthetic oligonucleotide
  misc_feature 1..20: note = Target: ANGPTL4; (-) strand; PAM type: NNGRRT; PAM sequence: TTGGGT
  source 1..20: mol_type = other DNA
ttgagcccaggagttcaaga

SEQ ID NO: 5469 - DNA, 20 bp, synthetic construct
  misc_feature 1..20: note = Description of Artificial Sequence: Synthetic oligonucleotide
  misc_feature 1..20: note = Target: ANGPTL4; (-) strand; PAM type: NNGRRT; PAM sequence: AGGAGT
  source 1..20: mol_type = other DNA
tgggaggactgcttgagccc

SEQ ID NO: 5470 - DNA, 20 bp, synthetic construct
  misc_feature 1..20: note = Description of Artificial Sequence: Synthetic oligonucleotide
  misc_feature 1..20: note = Target: ANGPTL4; (-) strand; PAM type: NNGRRT; PAM sequence: TGGGAT
  source 1..20: mol_type = other DNA
acctcggcctcccaaagtgc

SEQ ID NO: 5471 - DNA, 20 bp, synthetic construct
  misc_feature 1..20: note = Description of Artificial Sequence: Synthetic oligonucleotide
  misc_feature 1..20: note = Target: ANGPTL4; (-) strand; PAM type: NNGRRT; PAM sequence: CGGGGT
  source 1..20: mol_type = other DNA
tttttgtattttagtagaga

SEQ ID NO: 5472 - DNA, 20 bp, synthetic construct
  misc_feature 1..20: note = Description of Artificial Sequence: Synthetic oligonucleotide
  misc_feature 1..20: note = Target: ANGPTL4; (-) strand; PAM type: NNGRRT; PAM sequence: TGGGAT
  source 1..20: mol_type = other DNA
gcctcagcctcccgagtagc

SEQ ID NO: 5473 - DNA, 20 bp, synthetic construct
  misc_feature 1..20: note = Description of Artificial Sequence: Synthetic oligonucleotide
  misc_feature 1..20: note = Target: ANGPTL4; (-) strand; PAM type: NNGRRT; PAM sequence: CCGAGT
  source 1..20: mol_type = other DNA
gattctcctgcctcagcctc

SEQ ID NO: 5474 - DNA, 20 bp, synthetic construct
  misc_feature 1..20: note = Description of Artificial Sequence: Synthetic oligonucleotide
  misc_feature 1..20: note = Target: ANGPTL4; (-) strand; PAM type: NNGRRT; PAM sequence: CTGGGT
  source 1..20: mol_type = other DNA
ctcactgcaacttccacctc

SEQ ID NO: 5475 - DNA, 20 bp, synthetic construct
  misc_feature 1..20: note = Description of Artificial Sequence: Synthetic oligonucleotide
  misc_feature 1..20: note = Target: ANGPTL4; (-) strand; PAM type: NNGRRT; PAM sequence: TGGAGT
  source 1..20: mol_type = other DNA
tcttgctctgtcgccaaggc

SEQ ID NO: 5476 - DNA, 20 bp, synthetic construct
  misc_feature 1..20: note = Description of Artificial Sequence: Synthetic oligonucleotide
  misc_feature 1..20: note = Target: ANGPTL4; (-) strand; PAM type: NNGRRT; PAM sequence: CAGAGT
  source 1..20: mol_type = other DNA
tttttttcttttttttgaga

SEQ ID NO: 5477 - DNA, 20 bp, synthetic construct
  misc_feature 1..20: note = Description of Artificial Sequence: Synthetic oligonucleotide
  misc_feature 1..20: note = Target: ANGPTL4; (-) strand; PAM type: NNGRRT; PAM sequence: CCGGGT
  source 1..20: mol_type = other DNA
ggcgatcacggtgggcaaga

SEQ ID NO: 5478 - DNA, 20 bp, synthetic construct
  misc_feature 1..20: note = Description of Artificial Sequence: Synthetic oligonucleotide
  misc_feature 1..20: note = Target: ANGPTL4; (-) strand; PAM type: NNGRRT; PAM sequence: TAGAAT
  source 1..20: mol_type = other DNA
cctggccaaaaactgacctt

SEQ ID NO: 5479 - DNA, 20 bp, synthetic construct
  misc_feature 1..20: note = Description of Artificial Sequence: Synthetic oligonucleotide
  misc_feature 1..20: note = Target: ANGPTL4; (-) strand; PAM type: NNGRRT; PAM sequence: GTGAGT
  source 1..20: mol_type = other DNA
aaagtgctgggatgacaggt

SEQ ID NO: 5480 - DNA, 20 bp, synthetic construct
  misc_feature 1..20: note = Description of Artificial Sequence: Synthetic oligonucleotide
  misc_feature 1..20: note = Target: ANGPTL4; (-) strand; PAM type: NNGRRT; PAM sequence: TGGGAT
  source 1..20: mol_type = other DNA
gcctcggcctcccaaagtgc

SEQ ID NO: 5481 - DNA, 20 bp, synthetic construct
  misc_feature 1..20: note = Description of Artificial Sequence: Synthetic oligonucleotide
  misc_feature 1..20: note = Target: ANGPTL4; (-) strand; PAM type: NNGRRT; PAM sequence: AGGGAT
  source 1..20: mol_type = other DNA
gtcttgaactcctgagctca

SEQ ID NO: 5482 - DNA, 20 bp, synthetic construct
  misc_feature 1..20: note = Description of Artificial Sequence: Synthetic oligonucleotide
  misc_feature 1..20: note = Target: ANGPTL4; (-) strand; PAM type: NNGRRT; PAM sequence: CAGGAT
  source 1..20: mol_type = other DNA
ttctgtagattttgtagaga

SEQ ID NO: 5483 - DNA, 20 bp, synthetic construct
  misc_feature 1..20: note = Description of Artificial Sequence: Synthetic oligonucleotide
  misc_feature 1..20: note = Target: ANGPTL4; (-) strand; PAM type: NNGRRT; PAM sequence: TGGAGT
  source 1..20: mol_type = other DNA
tgggtctcactcacccaggc

SEQ ID NO: 5484 - DNA, 20 bp, synthetic construct
  misc_feature 1..20: note = Description of Artificial Sequence: Synthetic oligonucleotide
  misc_feature 1..20: note = Target: ANGPTL4; (-) strand; PAM type: NNGRRT; PAM sequence: ATGGGT
  source 1..20: mol_type = other DNA
tttttttttttttttctgag

SEQ ID NO: 5485 - DNA, 20 bp, synthetic construct
  misc_feature 1..20: note = Description of Artificial Sequence: Synthetic oligonucleotide
  misc_feature 1..20: note = Target: ANGPTL4; (-) strand; PAM type: NNGRRT; PAM sequence: TAGGAT
  source 1..20: mol_type = other DNA
acctcagcctcccaaagtgc

SEQ ID NO: 5486 - DNA, 20 bp, synthetic construct
  misc_feature 1..20: note = Description of Artificial Sequence: Synthetic oligonucleotide
  misc_feature 1..20: note = Target: ANGPTL4; (-) strand; PAM type: NNGRRT; PAM sequence: TGGGGT
  source 1..20: mol_type = other DNA
ttgtattctagtagaggggg

SEQ ID NO: 5487 - DNA, 20 bp, synthetic construct
  misc_feature 1..20: note = Description of Artificial Sequence: Synthetic oligonucleotide
  misc_feature 1..20: note = Target: ANGPTL4; (-) strand; PAM type: NNGRRT; PAM sequence: GGGGGT
  source 1..20: mol_type = other DNA
attttttgtattctagtaga

SEQ ID NO: 5488 - DNA, 20 bp, synthetic construct
  misc_feature 1..20: note = Description of Artificial Sequence: Synthetic oligonucleotide
  misc_feature 1..20: note = Target: ANGPTL4; (-) strand; PAM type: NNGRRT; PAM sequence: CTGAGT
  source 1..20: mol_type = other DNA
cattctcctgcctcagcctc

SEQ ID NO: 5489 - DNA, 20 bp, synthetic construct
  misc_feature 1..20: note = Description of Artificial Sequence: Synthetic oligonucleotide
  misc_feature 1..20: note = Target: ANGPTL4; (-) strand; PAM type: NNGRRT; PAM sequence: TGGAGT
  source 1..20: mol_type = other DNA
tcttgctctgttgcccaggc

SEQ ID NO: 5490 - DNA, 20 bp, synthetic construct
  misc_feature 1..20: note = Description of Artificial Sequence: Synthetic oligonucleotide
  misc_feature 1..20: note = Target: ANGPTL4; (-) strand; PAM type: NNGRRT; PAM sequence: CAGAGT
  source 1..20: mol_type = other DNA
ttttttttttttttttgaga

SEQ ID NO: 5491 - DNA, 20 bp, synthetic construct
  misc_feature 1..20: note = Description of Artificial Sequence: Synthetic oligonucleotide
  misc_feature 1..20: note = Target: ANGPTL4; (-) strand; PAM type: NNGRRT; PAM sequence: TGGGAT
  source 1..20: mol_type = other DNA
gtctcggcctcccaacgtgc

SEQ ID NO: 5492 - DNA, 20 bp, synthetic construct
  misc_feature 1..20: note = Description of Artificial Sequence: Synthetic oligonucleotide
  misc_feature 1..20: note = Target: ANGPTL4; (-) strand; PAM type: NNGRRT; PAM sequence: CGGGGT
  source 1..20: mol_type = other DNA
ttttgtatttttagtgcaaa

SEQ ID NO: 5493 - DNA, 20 bp, synthetic construct
  misc_feature 1..20: note = Description of Artificial Sequence: Synthetic oligonucleotide
  misc_feature 1..20: note = Target: ANGPTL4; (-) strand; PAM type: NNGRRT; PAM sequence: GGGGAT
  source 1..20: mol_type = other DNA
gcctcagcctcccgagtagc

SEQ ID NO: 5494 - DNA, 20 bp, synthetic construct
  misc_feature 1..20: note = Description of Artificial Sequence: Synthetic oligonucleotide
  misc_feature 1..20: note = Target: ANGPTL4; (-) strand; PAM type: NNGRRT; PAM sequence: CCGAGT
  source 1..20: mol_type = other DNA
gattctccagcctcagcctc

SEQ ID NO: 5495 - DNA, 20 bp, synthetic construct
  misc_feature 1..20: note = Description of Artificial Sequence: Synthetic oligonucleotide
  misc_feature 1..20: note = Target: ANGPTL4; (-) strand; PAM type: NNGRRT; PAM sequence: TGGAGT
  source 1..20: mol_type = other DNA
ttccctcttgtcgcccaggc

SEQ ID NO: 5496 - DNA, 20 bp, synthetic construct
  misc_feature 1..20: note = Description of Artificial Sequence: Synthetic oligonucleotide
  misc_feature 1..20: note = Target: ANGPTL4; (-) strand; PAM type: NNGRRT; PAM sequence: TGGAGT
  source 1..20: mol_type = other DNA
atttatttatttttttgaga

SEQ ID NO: 5497 - DNA, 20 bp, synthetic construct
  misc_feature 1..20: note = Description of Artificial Sequence: Synthetic oligonucleotide
  misc_feature 1..20: note = Target: ANGPTL4; (-) strand; PAM type: NNGRRT; PAM sequence: TGGGAT
  source 1..20: mol_type = other DNA
gcttcggcctcccaaagtgc

SEQ ID NO: 5498 - DNA, 20 bp, synthetic construct
  misc_feature 1..20: note = Description of Artificial Sequence: Synthetic oligonucleotide
  misc_feature 1..20: note = Target: ANGPTL4; (-) strand; PAM type: NNGRRT; PAM sequence: CAGGAT
  source 1..20: mol_type = other DNA
cagggtttcaccatgttagc

SEQ ID NO: 5499 - DNA, 20 bp, synthetic construct
  misc_feature 1..20: note = Description of Artificial Sequence: Synthetic oligonucleotide
  misc_feature 1..20: note = Target: ANGPTL4; (-) strand; PAM type: NNGRRT; PAM sequence: CAGGGT
  source 1..20: mol_type = other DNA
ttttgtatttttaatagaga

SEQ ID NO: 5500 - DNA, 20 bp, synthetic construct
  misc_feature 1..20: note = Description of Artificial Sequence: Synthetic oligonucleotide
  misc_feature 1..20: note = Target: ANGPTL4; (-) strand; PAM type: NNGRRT; PAM sequence: CCGAGT
  source 1..20: mol_type = other DNA
cattctcctgcctcagcctc

SEQ ID NO: 5501 - DNA, 20 bp, synthetic construct
  misc_feature 1..20: note = Description of Artificial Sequence: Synthetic oligonucleotide
  misc_feature 1..20: note = Target: ANGPTL4; (-) strand; PAM type: NNGRRT; PAM sequence: CCGGGT
  source 1..20: mol_type = other DNA
ctcactgcaagctccacctc

SEQ ID NO: 5502 - DNA, 20 bp, synthetic construct
  misc_feature 1..20: note = Description of Artificial Sequence: Synthetic oligonucleotide
  misc_feature 1..20: note = Target: ANGPTL4; (-) strand; PAM type: NNGRRT; PAM sequence: TGGAGT
  source 1..20: mol_type = other DNA
tctcgctctgtcgcccacgc

SEQ ID NO: 5503 - DNA, 20 bp, synthetic construct
  misc_feature 1..20: note = Description of Artificial Sequence: Synthetic oligonucleotide
  misc_feature 1..20: note = Target: ANGPTL4; (-) strand; PAM type: NNGRRT; PAM sequence: AGGAGT
  source 1..20: mol_type = other DNA
tatttatttattttttgaga

SEQ ID NO: 5504 - DNA, 20 bp, synthetic construct
  misc_feature 1..20: note = Description of Artificial Sequence: Synthetic oligonucleotide
  misc_feature 1..20: note = Target: ANGPTL4; (-) strand; PAM type: NNGRRT; PAM sequence: AAGAGT
  source 1..20: mol_type = other DNA
ctgctgtgagcaatctacaa

SEQ ID NO: 5505 - DNA, 20 bp, synthetic construct
  misc_feature 1..20: note = Description of Artificial Sequence: Synthetic oligonucleotide
  misc_feature 1..20: note = Target: ANGPTL4; (-) strand; PAM type: NNGRRT; PAM sequence: CAGGGT
  source 1..20: mol_type = other DNA
cacaaaacacatcacagacc

SEQ ID NO: 5506 - DNA, 20 bp, synthetic construct
  misc_feature 1..20: note = Description of Artificial Sequence: Synthetic oligonucleotide
  misc_feature 1..20: note = Target: ANGPTL4; (-) strand; PAM type: NNGRRT; PAM sequence: CAGAAT
  source 1..20: mol_type = other DNA
acagctatcccaggctatcc

SEQ ID NO: 5507 - DNA, 20 bp, synthetic construct
  misc_feature 1..20: note = Description of Artificial Sequence: Synthetic oligonucleotide
  misc_feature 1..20: note = Target: ANGPTL4; (-) strand; PAM type: NNGRRT; PAM sequence: CTGAGT
  source 1..20: mol_type = other DNA
cccaagcccccagcctctct

SEQ ID NO: 5508 - DNA, 20 bp, synthetic construct
  misc_feature 1..20: note = Description of Artificial Sequence: Synthetic oligonucleotide
  misc_feature 1..20: note = Target: ANGPTL4; (-) strand; PAM type: NNGRRT; PAM sequence: AGGAGT
  source 1..20: mol_type = other DNA
gagggaggaaaaccccagtg

SEQ ID NO: 5509 - DNA, 20 bp, synthetic construct
  misc_feature 1..20: note = Description of Artificial Sequence: Synthetic oligonucleotide
  misc_feature 1..20: note = Target: ANGPTL4; (-) strand; PAM type: NNGRRT; PAM sequence: TGGAAT
  source 1..20: mol_type = other DNA
ctccaagccagctcattctc

SEQ ID NO: 5510 - DNA, 20 bp, synthetic construct
  misc_feature 1..20: note = Description of Artificial Sequence: Synthetic oligonucleotide
  misc_feature 1..20: note = Target: ANGPTL4; (-) strand; PAM type: NNGRRT; PAM sequence: CTGAGT
  source 1..20: mol_type = other DNA
gagttgggacaaaggaagta

SEQ ID NO: 5511 - DNA, 20 bp, synthetic construct
  misc_feature 1..20: note = Description of Artificial Sequence: Synthetic oligonucleotide
  misc_feature 1..20: note = Target: ANGPTL4; (-) strand; PAM type: NNGRRT; PAM sequence: TAGAGT
  source 1..20: mol_type = other DNA
ttctgagcctggggtaggga

SEQ ID NO: 5512 - DNA, 20 bp, synthetic construct
  misc_feature 1..20: note = Description of Artificial Sequence: Synthetic oligonucleotide
  misc_feature 1..20: note = Target: ANGPTL4; (-) strand; PAM type: NNGRRT; PAM sequence: AGGGAT
  source 1..20: mol_type = other DNA
caacattctgagcctggggt

SEQ ID NO: 5513 - DNA, 20 bp, synthetic construct
  misc_feature 1..20: note = Description of Artificial Sequence: Synthetic oligonucleotide
  misc_feature 1..20: note = Target: ANGPTL4; (-) strand; PAM type: NNGRRT; PAM sequence: TGGGGT
  source 1..20: mol_type = other DNA
ataccccaacattctgagcc

SEQ ID NO: 5514 - DNA, 20 bp, synthetic construct
  misc_feature 1..20: note = Description of Artificial Sequence: Synthetic oligonucleotide
  misc_feature 1..20: note = Target: ANGPTL4; (-) strand; PAM type: NNGRRT; PAM sequence: CAGAGT
  source 1..20: mol_type = other DNA
cagcactccagcctgggtga

SEQ ID NO: 5515 - DNA, 20 bp, synthetic construct
  misc_feature 1..20: note = Description of Artificial Sequence: Synthetic oligonucleotide
  misc_feature 1..20: note = Target: ANGPTL4; (-) strand; PAM type: NNGRRT; PAM sequence: CTGGGT
  source 1..20: mol_type = other DNA
ttgcaccacagcactccagc

SEQ ID NO: 5516 - DNA, 20 bp, synthetic construct
  misc_feature 1..20: note = Description of Artificial Sequence: Synthetic oligonucleotide
  misc_feature 1..20: note = Target: ANGPTL4; (-) strand; PAM type: NNGRRT; PAM sequence: GAGAAT
  source 1..20: mol_type = other DNA
tactcgggagactgtgtcag

SEQ ID NO: 5517 - DNA, 20 bp, synthetic construct
  misc_feature 1..20: note = Description of Artificial Sequence: Synthetic oligonucleotide
  misc_feature 1..20: note = Target: ANGPTL4; (-) strand; PAM type: NNGRRT; PAM sequence: CCGGGT
  source 1..20: mol_type = other DNA
tactaaaaataaaaaattag

SEQ ID NO: 5518 - DNA, 20 bp, synthetic construct
  misc_feature 1..20: note = Description of Artificial Sequence: Synthetic oligonucleotide
  misc_feature 1..20: note = Target: ANGPTL4; (-) strand; PAM type: NNGRRT; PAM sequence: AGGGGT
  source 1..20: mol_type = other DNA
ggggcggatcacctgaggtc

SEQ ID NO: 5519 - DNA, 20 bp, synthetic construct
  misc_feature 1..20: note = Description of Artificial Sequence: Synthetic oligonucleotide
  misc_feature 1..20: note = Target: ANGPTL4; (-) strand; PAM type: NNGRRT; PAM sequence: GCGGAT
  source 1..20: mol_type = other DNA
gtggtgggaggggggggggg

SEQ ID NO: 5520 - DNA, 20 bp, synthetic construct
  misc_feature 1..20: note = Description of Artificial Sequence: Synthetic oligonucleotide
  misc_feature 1..20: note = Target: ANGPTL4; (-) strand; PAM type: NNGRRT; PAM sequence: CCGGGT
  source 1..20: mol_type = other DNA
aatcccagcactttgggagg

SEQ ID NO: 5521 - DNA, 20 bp, synthetic construct
  misc_feature 1..20: note = Description of Artificial Sequence: Synthetic oligonucleotide
  misc_feature 1..20: note = Target: ANGPTL4; (-) strand; PAM type: NNGRRT; PAM sequence: CAGAGT
  source 1..20: mol_type = other DNA
ctgcactccagcctgggcaa

SEQ ID NO: 5522 - DNA, 20 bp, synthetic construct
  misc_feature 1..20: note = Description of Artificial Sequence: Synthetic oligonucleotide
  misc_feature 1..20: note = Target: ANGPTL4; (-) strand; PAM type: NNGRRT; PAM sequence: CAGGGT
  source 1..20: mol_type = other DNA
catagcctaccctctaccgc

SEQ ID NO: 5523 - DNA, 20 bp, synthetic construct
  misc_feature 1..20: note = Description of Artificial Sequence: Synthetic oligonucleotide
  misc_feature 1..20: note = Target: ANGPTL4; (-) strand; PAM type: NNGRRT; PAM sequence: TTGGAT
  source 1..20: mol_type = other DNA
gagtgccttagcggcaggac

SEQ ID NO: 5524 - DNA, 20 bp, synthetic construct
  misc_feature 1..20: note = Description of Artificial Sequence: Synthetic oligonucleotide
  misc_feature 1..20: note = Target: ANGPTL4; (-) strand; PAM type: NNGRRT; PAM sequence: ATGAGT
  source 1..20: mol_type = other DNA
tctcccctgagcccgaaatt

SEQ ID NO: 5525 - DNA, 20 bp, synthetic construct
  misc_feature 1..20: note = Description of Artificial Sequence: Synthetic oligonucleotide
  misc_feature 1..20: note = Target: ANGPTL4; (-) strand; PAM type: NNGRRT; PAM sequence: AAGGGT
  source 1..20: mol_type = other DNA
tcgcatgttccttcccgtga

SEQ ID NO: 5526 - DNA, 20 bp, synthetic construct
  misc_feature 1..20: note = Description of Artificial Sequence: Synthetic oligonucleotide
  misc_feature 1..20: note = Target: ANGPTL4; (-) strand; PAM type: NNGRRT; PAM sequence: CTGAGT
  source 1..20: mol_type = other DNA
aggaaggaaaagaaaaagag

SEQ ID NO: 5527 - DNA, 20 bp, synthetic construct
  misc_feature 1..20: note = Description of Artificial Sequence: Synthetic oligonucleotide
  misc_feature 1..20: note = Target: ANGPTL4; (-) strand; PAM type: NNGRRT; PAM sequence: CAGAGT
  source 1..20: mol_type = other DNA
tccagcctgggcgacagagc

SEQ ID NO: 5528 - DNA, 20 bp, synthetic construct
  misc_feature 1..20: note = Description of Artificial Sequence: Synthetic oligonucleotide
  misc_feature 1..20: note = Target: ANGPTL4; (-) strand; PAM type: NNGRRT; PAM sequence: TAGAAT
  source 1..20: mol_type = other DNA
tactcgggaggctgaggcag

SEQ ID NO: 5529 - DNA, 20 bp, synthetic construct
  misc_feature 1..20: note = Description of Artificial Sequence: Synthetic oligonucleotide
  misc_feature 1..20: note = Target: ANGPTL4; (-) strand; PAM type: NNGRRT; PAM sequence: GGGGAT
  source 1..20: mol_type = other DNA
tgcgggctgggggatgccct

SEQ ID NO: 5530 - DNA, 20 bp, synthetic construct
  misc_feature 1..20: note = Description of Artificial Sequence: Synthetic oligonucleotide
  misc_feature 1..20: note = Target: ANGPTL4; (-) strand; PAM type: NNGRRT; PAM sequence: GGGGAT
  source 1..20: mol_type = other DNA
gcctggtagtctgcgggctg

SEQ ID NO: 5531 - DNA, 20 bp, synthetic construct
  misc_feature 1..20: note = Description of Artificial Sequence: Synthetic oligonucleotide
  misc_feature 1..20: note = Target: ANGPTL4; (-) strand; PAM type: NNGRRT; PAM sequence: TGGGGT
  source 1..20: mol_type = other DNA
gcagggcctgtggccggggg

SEQ ID NO: 5532 - DNA, 20 bp, synthetic construct
  misc_feature 1..20: note = Description of Artificial Sequence: Synthetic oligonucleotide
  misc_feature 1..20: note = Target: ANGPTL4; (-) strand; PAM type: NNGRRT; PAM sequence: GGGGGT
  source 1..20: mol_type = other DNA
tgggggcagggcctgtggcc

SEQ ID NO: 5533 - DNA, 20 bp, synthetic construct
  misc_feature 1..20: note = Description of Artificial Sequence: Synthetic oligonucleotide
  misc_feature 1..20: note = Target: ANGPTL4; (-) strand; PAM type: NNGRRT; PAM sequence: GGGAGT
  source 1..20: mol_type = other DNA
agtcttggaggcggggtgcg

SEQ ID NO: 5534 - DNA, 20 bp, synthetic construct
  misc_feature 1..20: note = Description of Artificial Sequence: Synthetic oligonucleotide
  misc_feature 1..20: note = Target: ANGPTL4; (-) strand; PAM type: NNGRRT; PAM sequence: CGGGGT
  source 1..20: mol_type = other DNA
gggcggaggagtcttggagg

SEQ ID NO: 5535 - DNA, 20 bp, synthetic construct
  misc_feature 1..20: note = Description of Artificial Sequence: Synthetic oligonucleotide
  misc_feature 1..20: note = Target: ANGPTL4; (-) strand; PAM type: NNGRRT; PAM sequence: AGGAGT
  source 1..20: mol_type = other DNA
gttgggtgcggagtgggcgg

SEQ ID NO: 5536 - DNA, 20 bp, synthetic construct
  misc_feature 1..20: note = Description of Artificial Sequence: Synthetic oligonucleotide
  misc_feature 1..20: note = Target: ANGPTL4; (-) strand; PAM type: NNGRRT; PAM sequence: CGGAGT
  source 1..20: mol_type = other DNA
cggtttttataagttgggtg

SEQ ID NO: 5537 - DNA, 20 bp, synthetic construct
  misc_feature 1..20: note = Description of Artificial Sequence: Synthetic oligonucleotide
  misc_feature 1..20: note = Target: ANGPTL4; (-) strand; PAM type: NNGRRT; PAM sequence: TTGGGT
  source 1..20: mol_type = other DNA
ccgaggacggtttttataag

SEQ ID NO: 5538 - DNA, 20 bp, synthetic construct
  misc_feature 1..20: note = Description of Artificial Sequence: Synthetic oligonucleotide
  misc_feature 1..20: note = Target: ANGPTL4; (-) strand; PAM type: NNGRRT; PAM sequence: GAGGAT
  source 1..20: mol_type = other DNA
gaatcggatcacagtcgtgt

SEQ ID NO: 5539 - DNA, 20 bp, synthetic construct
  misc_feature 1..20: note = Description of Artificial Sequence: Synthetic oligonucleotide
  misc_feature 1..20: note = Target: ANGPTL4; (-) strand; PAM type: NNGRRT; PAM sequence: TCGGAT
  source 1..20: mol_type = other DNA
gcagaagccgctggaaagaa

SEQ ID NO: 5540 - DNA, 20 bp, synthetic construct
  misc_feature 1..20: note = Description of Artificial Sequence: Synthetic oligonucleotide
  misc_feature 1..20: note = Target: ANGPTL4; (-) strand; PAM type: NNGRRT; PAM sequence: AAGAAT
  source 1..20: mol_type = other DNA
tggttgcagaagccgctgga

SEQ ID NO: 5541 - DNA, 20 bp, synthetic construct
  misc_feature 1..20: note = Description of Artificial Sequence: Synthetic oligonucleotide
  misc_feature 1..20: note = Target: ANGPTL4; (-) strand; PAM type: NNGRRT; PAM sequence: GGGGGT
  source 1..20: mol_type = other DNA
gactggagacgcggaggacc

SEQ ID NO: 5542 - DNA, 20 bp, synthetic construct
  misc_feature 1..20: note = Description of Artificial Sequence: Synthetic oligonucleotide
  misc_feature 1..20: note = Target: ANGPTL4; (-) strand; PAM type: NNGRRT; PAM sequence: TGGGGT
  source 1..20: mol_type = other DNA
tcggggactctcggggacgt

SEQ ID NO: 5543 - DNA, 20 bp, synthetic construct
  misc_feature 1..20: note = Description of Artificial Sequence: Synthetic oligonucleotide
  misc_feature 1..20: note = Target: ANGPTL4; (-) strand; PAM type: NNGRRT; PAM sequence: GGGGAT
  source 1..20: mol_type = other DNA
ctcttaggtagcctgggagc

SEQ ID NO: 5544 - DNA, 20 bp, synthetic construct
  misc_feature 1..20: note = Description of Artificial Sequence: Synthetic oligonucleotide
  misc_feature 1..20: note = Target: ANGPTL4; (-) strand; PAM type: NNGRRT; PAM sequence: ACGGGT
  source 1..20: mol_type = other DNA
agcgcggcgacttggactgc

SEQ ID NO: 5545 - DNA, 20 bp, synthetic construct
  misc_feature 1..20: note = Description of Artificial Sequence: Synthetic oligonucleotide
  misc_feature 1..20: note = Target: ANGPTL4; (-) strand; PAM type: NNGRRT; PAM sequence: AGGAGT
  source 1..20: mol_type = other DNA
gcagcccctggccgagctgc

SEQ ID NO: 5546 - DNA, 20 bp, synthetic construct
  misc_feature 1..20: note = Description of Artificial Sequence: Synthetic oligonucleotide
  misc_feature 1..20: note = Target: ANGPTL4; (-) strand; PAM type: NNGRRT; PAM sequence: GCGGGT
  source 1..20: mol_type = other DNA
tccagcgcgctcagctgact

SEQ ID NO: 5547 - DNA, 20 bp, synthetic construct
  misc_feature 1..20: note = Description of Artificial Sequence: Synthetic oligonucleotide
  misc_feature 1..20: note = Target: ANGPTL4; (-) strand; PAM type: NNGRRT; PAM sequence: CAGGGT
  source 1..20: mol_type = other DNA
ctgcaggctgtgaaggacct

SEQ ID NO: 5548 - DNA, 20 bp, synthetic construct
  misc_feature 1..20: note = Description of Artificial Sequence: Synthetic oligonucleotide
  misc_feature 1..20: note = Target: ANGPTL4; (-) strand; PAM type: NNGRRT; PAM sequence: TTGAAT
  source 1..20: mol_type = other DNA
ctattttgctttaggtggtc

SEQ ID NO: 5549 - DNA, 20 bp, synthetic construct
  misc_feature 1..20: note = Description of Artificial Sequence: Synthetic oligonucleotide
  misc_feature 1..20: note = Target: ANGPTL4; (-) strand; PAM type: NNGRRT; PAM sequence: GGGGGT
  source 1..20: mol_type = other DNA
tgtgtgtgtgtagaagagac

SEQ ID NO: 5550 - DNA, 20 bp, synthetic construct
  misc_feature 1..20: note = Description of Artificial Sequence: Synthetic oligonucleotide
  misc_feature 1..20: note = Target: ANGPTL4; (-) strand; PAM type: NNGRRT; PAM sequence: TGGGAT
  source 1..20: mol_type = other DNA
gcctcagcctcccaagtagc

SEQ ID NO: 5551 - DNA, 20 bp, synthetic construct
  misc_feature 1..20: note = Description of Artificial Sequence: Synthetic oligonucleotide
  misc_feature 1..20: note = Target: ANGPTL4; (-) strand; PAM type: NNGRRT; PAM sequence: CCGGGT
  source 1..20: mol_type = other DNA
ctcactgcaacctctgcctc

SEQ ID NO: 5552 - DNA, 20 bp, synthetic construct
  misc_feature 1..20: note = Description of Artificial Sequence: Synthetic oligonucleotide
  misc_feature 1..20: note = Target: ANGPTL4; (-) strand; PAM type: NNGRRT; PAM sequence: TGGAGT
  source 1..20: mol_type = other DNA
tctcactctgttgcccaggc

SEQ ID NO: 5553 - DNA, 20 bp, synthetic construct
  misc_feature 1..20: note = Description of Artificial Sequence: Synthetic oligonucleotide
  misc_feature 1..20: note = Target: ANGPTL4; (-) strand; PAM type: NNGRRT; PAM sequence: AGGAGT
  source 1..20: mol_type = other DNA
ttatcgctattatttttttg

SEQ ID NO: 5554 - DNA, 20 bp, synthetic construct
  misc_feature 1..20: note = Description of Artificial Sequence: Synthetic oligonucleotide
  misc_feature 1..20: note = Target: ANGPTL4; (-) strand; PAM type: NNGRRT; PAM sequence: GTGAGT
  source 1..20: mol_type = other DNA
aaagtgctgggactacaagc

SEQ ID NO: 5555 - DNA, 20 bp, synthetic construct
  misc_feature 1..20: note = Description of Artificial Sequence: Synthetic oligonucleotide
  misc_feature 1..20: note = Target: ANGPTL4; (-) strand; PAM type: NNGRRT; PAM sequence: CGGGGT
  source 1..20: mol_type = other DNA
ttttgtatttttagtagaga

SEQ ID NO: 5556 - DNA, 20 bp, synthetic construct
  misc_feature 1..20: note = Description of Artificial Sequence: Synthetic oligonucleotide
  misc_feature 1..20: note = Target: ANGPTL4; (-) strand; PAM type: NNGRRT; PAM sequence: TGGGAT
  source 1..20: mol_type = other DNA
gcctcagcctccccagtagc

SEQ ID NO: 5557 - DNA, 20 bp, synthetic construct
  misc_feature 1..20: note = Description of Artificial Sequence: Synthetic oligonucleotide
  misc_feature 1..20: note = Target: ANGPTL4; (-) strand; PAM type: NNGRRT; PAM sequence: CCGGGT
  source 1..20: mol_type = other DNA
ctcactgcaacctccgcctc

SEQ ID NO: 5558 - DNA, 20 bp, synthetic construct
  misc_feature 1..20: note = Description of Artificial Sequence: Synthetic oligonucleotide
  misc_feature 1..20: note = Target: ANGPTL4; (-) strand; PAM type: NNGRRT; PAM sequence: TGGAGT
  source 1..20: mol_type = other DNA
tcgagctctgtcgcccaggc

SEQ ID NO: 5559 - DNA, 20 bp, synthetic construct
  misc_feature 1..20: note = Description of Artificial Sequence: Synthetic oligonucleotide
  misc_feature 1..20: note = Target: ANGPTL4; (-) strand; PAM type: NNGRRT; PAM sequence: TGGAGT
  source 1..20: mol_type = other DNA
ttattattattattttgaga

SEQ ID NO: 5560 - DNA, 20 bp, synthetic construct
  misc_feature 1..20: note = Description of Artificial Sequence: Synthetic oligonucleotide
  misc_feature 1..20: note = Target: ANGPTL4; (-) strand; PAM type: NNGRRT; PAM sequence: TGGAGT
  source 1..20: mol_type = other DNA
tctcgctctgtcacccaggt

SEQ ID NO: 5561 - DNA, 20 bp, synthetic construct
  misc_feature 1..20: note = Description of Artificial Sequence: Synthetic oligonucleotide
  misc_feature 1..20: note = Target: ANGPTL4; (-) strand; PAM type: NNGRRT; PAM sequence: CAGAGT
  source 1..20: mol_type = other DNA
ttattttttattttttcaga

SEQ ID NO: 5562 - DNA, 20 bp, synthetic construct
  misc_feature 1..20: note = Description of Artificial Sequence: Synthetic oligonucleotide
  misc_feature 1..20: note = Target: ANGPTL4; (-) strand; PAM type: NNGRRT; PAM sequence: TGGGGT
  source 1..20: mol_type = other DNA
tcactgcagcctccaactcc

SEQ ID NO: 5563 - DNA, 20 bp, synthetic construct
  misc_feature 1..20: note = Description of Artificial Sequence: Synthetic oligonucleotide
  misc_feature 1..20: note = Target: ANGPTL4; (-) strand; PAM type: NNGRRT; PAM sequence: TGGAGT
  source 1..20: mol_type = other DNA
tctcgttctctcgcccaggc

SEQ ID NO: 5564 - DNA, 20 bp, synthetic construct
  misc_feature 1..20: note = Description of Artificial Sequence: Synthetic oligonucleotide
  misc_feature 1..20: note = Target: ANGPTL4; (-) strand; PAM type: NNGRRT; PAM sequence: CGGGGT
  source 1..20: mol_type = other DNA
tttcttttttttcccaatga

SEQ ID NO: 5565 - DNA, 20 bp, synthetic construct
  misc_feature 1..20: note = Description of Artificial Sequence: Synthetic oligonucleotide
  misc_feature 1..20: note = Target: ANGPTL4; (-) strand; PAM type: NNGRRT; PAM sequence: GGGAGT
  source 1..20: mol_type = other DNA
catccgctgaggccaggcaa

SEQ ID NO: 5566 - DNA, 20 bp, synthetic construct
  misc_feature 1..20: note = Description of Artificial Sequence: Synthetic oligonucleotide
  misc_feature 1..20: note = Target: ANGPTL4; (-) strand; PAM type: NNGRRT; PAM sequence: AGGGGT
  source 1..20: mol_type = other DNA
gccttgagttgtgtctgggg

SEQ ID NO: 5567 - DNA, 20 bp, synthetic construct
  misc_feature 1..20: note = Description of Artificial Sequence: Synthetic oligonucleotide
  misc_feature 1..20: note = Target: ANGPTL4; (-) strand; PAM type: NNGRRT; PAM sequence: TTGAGT
  source 1..20: mol_type = other DNA
ggatcctgctgttctgagcc

SEQ ID NO: 5568 - DNA, 20 bp, synthetic construct
  misc_feature 1..20: note = Description of Artificial Sequence: Synthetic oligonucleotide
  misc_feature 1..20: note = Target: ANGPTL4; (-) strand; PAM type: NNGRRT; PAM sequence: CTGGAT
  source 1..20: mol_type = other DNA
gccaccttgtggaagagttg

SEQ ID NO: 5569 - DNA, 20 bp, synthetic construct
  misc_feature 1..20: note = Description of Artificial Sequence: Synthetic oligonucleotide
  misc_feature 1..20: note = Target: ANGPTL4; (-) strand; PAM type: NNGRRT; PAM sequence: AAGAGT
  source 1..20: mol_type = other DNA
gctgctgggccaccttgtgg

SEQ ID NO: 5570 - DNA, 20 bp, synthetic construct
  misc_feature 1..20: note = Description of Artificial Sequence: Synthetic oligonucleotide
  misc_feature 1..20: note = Target: ANGPTL4; (-) strand; PAM type: NNGRRT; PAM sequence: CTGAAT
  source 1..20: mol_type = other DNA
gttacctggctttgcagatg

SEQ ID NO: 5571 - DNA, 20 bp, synthetic construct
  misc_feature 1..20: note = Description of Artificial Sequence: Synthetic oligonucleotide
  misc_feature 1..20: note = Target: ANGPTL4; (-) strand; PAM type: NNGRRT; PAM sequence: TAGGGT
  source 1..20: mol_type = other DNA
gaccttttctcccttgatcc

SEQ ID NO: 5572 - DNA, 20 bp, synthetic construct
  misc_feature 1..20: note = Description of Artificial Sequence: Synthetic oligonucleotide
  misc_feature 1..20: note = Target: ANGPTL4; (-) strand; PAM type: NNGRRT; PAM sequence: TGGGGT
  source 1..20: mol_type = other DNA
tcaccacctccctctcaacc

SEQ ID NO: 5573 - DNA, 20 bp, synthetic construct
  misc_feature 1..20: note = Description of Artificial Sequence: Synthetic oligonucleotide
  misc_feature 1..20: note = Target: ANGPTL4; (-) strand; PAM type: NNGRRT; PAM sequence: GAGGGT
  source 1..20: mol_type = other DNA
aaactaggatgggacgggag

SEQ ID NO: 5574 - DNA, 20 bp, synthetic construct
  misc_feature 1..20: note = Description of Artificial Sequence: Synthetic oligonucleotide
  misc_feature 1..20: note = Target: ANGPTL4; (-) strand; PAM type: NNGRRT; PAM sequence: TAGGAT
  source 1..20: mol_type = other DNA
tgtggtccaggaggccaaac

SEQ ID NO: 5575 - DNA, 20 bp, synthetic construct
  misc_feature 1..20: note = Description of Artificial Sequence: Synthetic oligonucleotide
  misc_feature 1..20: note = Target: ANGPTL4; (-) strand; PAM type: NNGRRT; PAM sequence: CCGGGT
  source 1..20: mol_type = other DNA
caggcggctgacattgtgag

SEQ ID NO: 5576 - DNA, 20 bp, synthetic construct
  misc_feature 1..20: note = Description of Artificial Sequence: Synthetic oligonucleotide
  misc_feature 1..20: note = Target: ANGPTL4; (-) strand; PAM type: NNGRRT; PAM sequence: AGGGGT
  source 1..20: mol_type = other DNA
gcaatggcaagtggcggggt

SEQ ID NO: 5577 - DNA, 20 bp, synthetic construct
  misc_feature 1..20: note = Description of Artificial Sequence: Synthetic oligonucleotide
  misc_feature 1..20: note = Target: ANGPTL4; (-) strand; PAM type: NNGRRT; PAM sequence: CGGGGT
  source 1..20: mol_type = other DNA
ggaccagcaatggcaagtgg

SEQ ID NO: 5578 - DNA, 20 bp, synthetic construct
  misc_feature 1..20: note = Description of Artificial Sequence: Synthetic oligonucleotide
  misc_feature 1..20: note = Target: ANGPTL4; (-) strand; PAM type: NNGRRT; PAM sequence: TTGGGT
  source 1..20: mol_type = other DNA
tggcttgcagaggagaaggg

SEQ ID NO: 5579 - DNA, 20 bp, synthetic construct
  misc_feature 1..20: note = Description of Artificial Sequence: Synthetic oligonucleotide
  misc_feature 1..20: note = Target: ANGPTL4; (-) strand; PAM type: NNGRRT; PAM sequence: AAGGGT
  source 1..20: mol_type = other DNA
cccactggcttgcagaggag

SEQ ID NO: 5580 - DNA, 20 bp, synthetic construct
  misc_feature 1..20: note = Description of Artificial Sequence: Synthetic oligonucleotide
  misc_feature 1..20: note = Target: ANGPTL4; (-) strand; PAM type: NNGRRT; PAM sequence: CAGGAT
  source 1..20: mol_type = other DNA
ccctagaaggttctaacctt

SEQ ID NO: 5581 - DNA, 20 bp, synthetic construct
  misc_feature 1..20: note = Description of Artificial Sequence: Synthetic oligonucleotide
  misc_feature 1..20: note = Target: ANGPTL4; (-) strand; PAM type: NNGRRT; PAM sequence: GGGGGT
  source 1..20: mol_type = other DNA
gtgtttctggtctgggagct

SEQ ID NO: 5582 - DNA, 20 bp, synthetic construct
  misc_feature 1..20: note = Description of Artificial Sequence: Synthetic oligonucleotide
  misc_feature 1..20: note = Target: ANGPTL4; (-) strand; PAM type: NNGRRT; PAM sequence: AAGAGT
  source 1..20: mol_type = other DNA
gcattggatttgtaagatac

SEQ ID NO: 5583 - DNA, 20 bp, synthetic construct
  misc_feature 1..20: note = Description of Artificial Sequence: Synthetic oligonucleotide
  misc_feature 1..20: note = Target: ANGPTL4; (-) strand; PAM type: NNGRRT; PAM sequence: TTGGAT
  source 1..20: mol_type = other DNA
ggggtcagggacctggagca

SEQ ID NO: 5584 - DNA, 20 bp, synthetic construct
  misc_feature 1..20: note = Description of Artificial Sequence: Synthetic oligonucleotide
  misc_feature 1..20: note = Target: ANGPTL4; (-) strand; PAM type: NNGRRT; PAM sequence: AGGGGT
  source 1..20: mol_type = other DNA
acaagagaggaaggaggaag

SEQ ID NO: 5585 - DNA, 20 bp, synthetic construct
  misc_feature 1..20: note = Description of Artificial Sequence: Synthetic oligonucleotide
  misc_feature 1..20: note = Target: ANGPTL4; (-) strand; PAM type: NNGRRT; PAM sequence: GGGAAT
  source 1..20: mol_type = other DNA
ttcgagatgaacggagattt

SEQ ID NO: 5586 - DNA, 20 bp, synthetic construct
  misc_feature 1..20: note = Description of Artificial Sequence: Synthetic oligonucleotide
  misc_feature 1..20: note = Target: ANGPTL4; (-) strand; PAM type: NNGRRT; PAM sequence: GCGAGT
  source 1..20: mol_type = other DNA
ggccgtgaacttagagaacc

SEQ ID NO: 5587 - DNA, 20 bp, synthetic construct
  misc_feature 1..20: note = Description of Artificial Sequence: Synthetic oligonucleotide
  misc_feature 1..20: note = Target: ANGPTL4; (-) strand; PAM type: NNGRRT; PAM sequence: AAGGAT
  source 1..20: mol_type = other DNA
ggacagccacagatgcaggg

SEQ ID NO: 5588 - DNA, 20 bp, synthetic construct
  misc_feature 1..20: note = Description of Artificial Sequence: Synthetic oligonucleotide
  misc_feature 1..20: note = Target: ANGPTL4; (-) strand; PAM type: NNGRRT; PAM sequence: GGGGAT
  source 1..20: mol_type = other DNA
ctgaccctagggtgtgagag

SEQ ID NO: 5589 - DNA, 20 bp, synthetic construct
  misc_feature 1..20: note = Description of Artificial Sequence: Synthetic oligonucleotide
  misc_feature 1..20: note = Target: ANGPTL4; (-) strand; PAM type: NNGRRT; PAM sequence: TAGGGT
  source 1..20: mol_type = other DNA
tggaagcctgccactgaccc

SEQ ID NO: 5590 - DNA, 20 bp, synthetic construct
  misc_feature 1..20: note = Description of Artificial Sequence: Synthetic oligonucleotide
  misc_feature 1..20: note = Target: ANGPTL4; (-) strand; PAM type: NNGRRT; PAM sequence: CGGGGT
  source 1..20: mol_type = other DNA
acgctgagatgctagcctgg

SEQ ID NO: 5591 - DNA, 20 bp, synthetic construct
  misc_feature 1..20: note = Description of Artificial Sequence: Synthetic oligonucleotide
  misc_feature 1..20: note = Target: ANGPTL4; (-) strand; PAM type: NNGRRT; PAM sequence: GAGGGT
  source 1..20: mol_type = other DNA
tcctgggatggtggctttgg

SEQ ID NO: 5592 - DNA, 20 bp, synthetic construct
  misc_feature 1..20: note = Description of Artificial Sequence: Synthetic oligonucleotide
  misc_feature 1..20: note = Target: ANGPTL4; (-) strand; PAM type: NNGRRT; PAM sequence: TGGGAT
  source 1..20: mol_type = other DNA
cctccagaagcccctcatcc

SEQ ID NO: 5593 - DNA, 20 bp, synthetic construct
  misc_feature 1..20: note = Description of Artificial Sequence: Synthetic oligonucleotide
  misc_feature 1..20: note = Target: ANGPTL4; (-) strand; PAM type: NNGRRT; PAM sequence: GGGAGT
  source 1..20: mol_type = other DNA
cgggcctgagccaagagtct

SEQ ID NO: 5594 - DNA, 20 bp, synthetic construct
  misc_feature 1..20: note = Description of Artificial Sequence: Synthetic oligonucleotide
  misc_feature 1..20: note = Target: ANGPTL4; (-) strand; PAM type: NNGRRT; PAM sequence: AAGAGT
  source 1..20: mol_type = other DNA
ctacttggcgggcctgagcc

SEQ ID NO: 5595 - DNA, 20 bp, synthetic construct
  misc_feature 1..20: note = Description of Artificial Sequence: Synthetic oligonucleotide
  misc_feature 1..20: note = Target: ANGPTL4; (-) strand; PAM type: NNGRRT; PAM sequence: ATGAAT
  source 1..20: mol_type = other DNA
aaaccaccagtgtggcttcc

SEQ ID NO: 5596 - DNA, 20 bp, synthetic construct
  misc_feature 1..20: note = Description of Artificial Sequence: Synthetic oligonucleotide
  misc_feature 1..20: note = Target: ANGPTL4; (-) strand; PAM type: NNGRRT; PAM sequence: AAGGAT
  source 1..20: mol_type = other DNA
ctactttcctcccatccagt

SEQ ID NO: 5597 - DNA, 20 bp, synthetic construct
  misc_feature 1..20: note = Description of Artificial Sequence: Synthetic oligonucleotide
  misc_feature 1..20: note = Target: ANGPTL4; (-) strand; PAM type: NNGRRT; PAM sequence: CAGAGT
  source 1..20: mol_type = other DNA
ggtgggggtgggggcgggcc

SEQ ID NO: 5598 - DNA, 20 bp, synthetic construct
  misc_feature 1..20: note = Description of Artificial Sequence: Synthetic oligonucleotide
  misc_feature 1..20: note = Target: ANGPTL4; (-) strand; PAM type: NNGRRT; PAM sequence: GGGGGT
  source 1..20: mol_type = other DNA
tcgaaatgagtctgcacggt

SEQ ID NO: 5599 - DNA, 20 bp, synthetic construct
  misc_feature 1..20: note = Description of Artificial Sequence: Synthetic oligonucleotide
  misc_feature 1..20: note = Target: ANGPTL4; (-) strand; PAM type: NNGRRT; PAM sequence: ATGAGT
  source 1..20: mol_type = other DNA
aaagtaggggaaaggtcgaa

SEQ ID NO: 5600 - DNA, 20 bp, synthetic construct
  misc_feature 1..20: note = Description of Artificial Sequence: Synthetic oligonucleotide
  misc_feature 1..20: note = Target: ANGPTL4; (-) strand; PAM type: NNGRRT; PAM sequence: GAGGAT
  source 1..20: mol_type = other DNA
gaaagagggagggaggaggg

SEQ ID NO: 5601 - DNA, 20 bp, synthetic construct
  misc_feature 1..20: note = Description of Artificial Sequence: Synthetic oligonucleotide
  misc_feature 1..20: note = Target: ANGPTL4; (-) strand; PAM type: NNGRRT; PAM sequence: CAGGGT
  source 1..20: mol_type = other DNA
gctcctagagggagaggagg

SEQ ID NO: 5602 - DNA, 20 bp, synthetic construct
  misc_feature 1..20: note = Description of Artificial Sequence: Synthetic oligonucleotide
  misc_feature 1..20: note = Target: ANGPTL4; (-) strand; PAM type: NNGRRT; PAM sequence: TGGGGT
  source 1..20: mol_type = other DNA
agcatctcagaggctctgcc

SEQ ID NO: 5603 - DNA, 20 bp, synthetic construct
  misc_feature 1..20: note = Description of Artificial Sequence: Synthetic oligonucleotide
  misc_feature 1..20: note = Target: ANGPTL4; (-) strand; PAM type: NNGRRT; PAM sequence: ATGAAT
  source 1..20: mol_type = other DNA
acaaatgaatgaatgaatga

SEQ ID NO: 5604 - DNA, 20 bp, synthetic construct
  misc_feature 1..20: note = Description of Artificial Sequence: Synthetic oligonucleotide
  misc_feature 1..20: note = Target: ANGPTL4; (-) strand; PAM type: NNGRRT; PAM sequence: ATGAAT
  source 1..20: mol_type = other DNA
cttgacaaatgaatgaatga

SEQ ID NO: 5605 - DNA, 20 bp, synthetic construct
  misc_feature 1..20: note = Description of Artificial Sequence: Synthetic oligonucleotide
  misc_feature 1..20: note = Target: ANGPTL4; (-) strand; PAM type: NNGRRT; PAM sequence: ATGAAT
  source 1..20: mol_type = other DNA
cagtcttgacaaatgaatga

SEQ ID NO: 5606 - DNA, 20 bp, synthetic construct
  misc_feature 1..20: note = Description of Artificial Sequence: Synthetic oligonucleotide
  misc_feature 1..20: note = Target: ANGPTL4; (-) strand; PAM type: NNGRRT; PAM sequence: ATGAAT
  source 1..20: mol_type = other DNA
aaaacagtcttgacaaatga

SEQ ID NO: 5607 - DNA, 20 bp, synthetic construct
  misc_feature 1..20: note = Description of Artificial Sequence: Synthetic oligonucleotide
  misc_feature 1..20: note = Target: ANGPTL4; (-) strand; PAM type: NNGRRT; PAM sequence: ATGAAT
  source 1..20: mol_type = other DNA
aaacaaaacagtcttgacaa

SEQ ID NO: 5608 - DNA, 20 bp, synthetic construct
  misc_feature 1..20: note = Description of Artificial Sequence: Synthetic oligonucleotide
  misc_feature 1..20: note = Target: ANGPTL4; (-) strand; PAM type: NNGRRT; PAM sequence: GAGAAT
  source 1..20: mol_type = other DNA
tacttgagaggctgaggcag

SEQ ID NO: 5609 - DNA, 20 bp, synthetic construct
  misc_feature 1..20: note = Description of Artificial Sequence: Synthetic oligonucleotide
  misc_feature 1..20: note = Target: ANGPTL4; (-) strand; PAM type: NNGRRT; PAM sequence: ATGAAT
  source 1..20: mol_type = other DNA
aaaaaaaaaagacttgataa

SEQ ID NO: 5610 - DNA, 20 bp, synthetic construct
  misc_feature 1..20: note = Description of Artificial Sequence: Synthetic oligonucleotide
  misc_feature 1..20: note = Target: ANGPTL4; (-) strand; PAM type: NNGRRT; PAM sequence: CAGAGT
  source 1..20: mol_type = other DNA
ttgcactccaacctgggtga

SEQ ID NO: 5611 - DNA, 20 bp, synthetic construct
  misc_feature 1..20: note = Description of Artificial Sequence: Synthetic oligonucleotide
  misc_feature 1..20: note = Target: ANGPTL4; (-) strand; PAM type: NNGRRT; PAM sequence: CTGGGT
  source 1..20: mol_type = other DNA
ttgaaccattgcactccaac

SEQ ID NO: 5612 - DNA, 20 bp, synthetic construct
  misc_feature 1..20: note = Description of Artificial Sequence: Synthetic oligonucleotide
  misc_feature 1..20: note = Target: ANGPTL4; (-) strand; PAM type: NNGRRT; PAM sequence: GAGAAT
  source 1..20: mol_type = other DNA
tccttaggaggcagaggcag

SEQ ID NO: 5613 - DNA, 20 bp, synthetic construct
  misc_feature 1..20: note = Description of Artificial Sequence: Synthetic oligonucleotide
  misc_feature 1..20: note = Target: ANGPTL4; (-) strand; PAM type: NNGRRT; PAM sequence: CTGGGT
  source 1..20: mol_type = other DNA
gtaaaacatacaaagattag

SEQ ID NO: 5614 - DNA, 20 bp, synthetic construct
  misc_feature 1..20: note = Description of Artificial Sequence: Synthetic oligonucleotide
  misc_feature 1..20: note = Target: ANGPTL4; (-) strand; PAM type: NNGRRT; PAM sequence: AGGAGT
  source 1..20: mol_type = other DNA
gggaggcgggcggatcggtc

SEQ ID NO: 5615 - DNA, 20 bp, synthetic construct
  misc_feature 1..20: note = Description of Artificial Sequence: Synthetic oligonucleotide
  misc_feature 1..20: note = Target: ANGPTL4; (-) strand; PAM type: NNGRRT; PAM sequence: GCGGAT
  source 1..20: mol_type = other DNA
tccagcactttgggaggcgg

SEQ ID NO: 5616 - DNA, 20 bp, synthetic construct
  misc_feature 1..20: note = Description of Artificial Sequence: Synthetic oligonucleotide
  misc_feature 1..20: note = Target: ANGPTL4; (-) strand; PAM type: NNGRRT; PAM sequence: AGGAAT
  source 1..20: mol_type = other DNA
agctgctcaataaagacttg

SEQ ID NO: 5617 - DNA, 20 bp, synthetic construct
  misc_feature 1..20: note = Description of Artificial Sequence: Synthetic oligonucleotide
  misc_feature 1..20: note = Target: ANGPTL4; (-) strand; PAM type: NNGRRT; PAM sequence: GGGAAT
  source 1..20: mol_type = other DNA
caggccagaacaccccaaat

SEQ ID NO: 5618 - DNA, 20 bp, synthetic construct
  misc_feature 1..20: note = Description of Artificial Sequence: Synthetic oligonucleotide
  misc_feature 1..20: note = Target: ANGPTL4; (-) strand; PAM type: NNGRRT; PAM sequence: CTGGGT
  source 1..20: mol_type = other DNA
ctctttcctcacttctctct

SEQ ID NO: 5619 - DNA, 20 bp, synthetic construct
  misc_feature 1..20: note = Description of Artificial Sequence: Synthetic oligonucleotide
  misc_feature 1..20: note = Target: ANGPTL4; (-) strand; PAM type: NNGRRT; PAM sequence: TGGGAT
  source 1..20: mol_type = other DNA
gccttggcctcccaaagtgc

SEQ ID NO: 5620 - DNA, 20 bp, synthetic construct
  misc_feature 1..20: note = Description of Artificial Sequence: Synthetic oligonucleotide
  misc_feature 1..20: note = Target: ANGPTL4; (-) strand; PAM type: NNGRRT; PAM sequence: GGGGGT
  source 1..20: mol_type = other DNA
tttgcattatttgtagagac

SEQ ID NO: 5621 - DNA, 20 bp, synthetic construct
  misc_feature 1..20: note = Description of Artificial Sequence: Synthetic oligonucleotide
  misc_feature 1..20: note = Target: ANGPTL4; (-) strand; PAM type: NNGRRT; PAM sequence: TGGAGT
  source 1..20: mol_type = other DNA
gtctcgctctgtcgccaggc

SEQ ID NO: 5622 - DNA, 20 bp, synthetic construct
  misc_feature 1..20: note = Description of Artificial Sequence: Synthetic oligonucleotide
  misc_feature 1..20: note = Target: ANGPTL4; (-) strand; PAM type: NNGRRT; PAM sequence: CGGAGT
  source 1..20: mol_type = other DNA
ttttgttttgttttttgata

SEQ ID NO: 5623 - DNA, 20 bp, synthetic construct
  misc_feature 1..20: note = Description of Artificial Sequence: Synthetic oligonucleotide
  misc_feature 1..20: note = Target: ANGPTL4; (-) strand; PAM type: NNGRRT; PAM sequence: GTGGAT
  source 1..20: mol_type = other DNA
gcatatctgggggcttaaca

SEQ ID NO: 5624 - DNA, 20 bp, synthetic construct
  misc_feature 1..20: note = Description of Artificial Sequence: Synthetic oligonucleotide
  misc_feature 1..20: note = Target: ANGPTL4; (-) strand; PAM type: NNGRRT; PAM sequence: GGGGGT
  source 1..20: mol_type = other DNA
acaggagggcagcccctggg

SEQ ID NO: 5625 - DNA, 20 bp, synthetic construct
  misc_feature 1..20: note = Description of Artificial Sequence: Synthetic oligonucleotide
  misc_feature 1..20: note = Target: ANGPTL4; (-) strand; PAM type: NNGRRT; PAM sequence: CTGGAT
  source 1..20: mol_type = other DNA
aatggcggagacccctgagg

SEQ ID NO: 5626 - DNA, 20 bp, synthetic construct
  misc_feature 1..20: note = Description of Artificial Sequence: Synthetic oligonucleotide
  misc_feature 1..20: note = Target: ANGPTL4; (-) strand; PAM type: NNGRRT; PAM sequence: GAGAAT
  source 1..20: mol_type = other DNA
tactggggaggctgacgctg

SEQ ID NO: 5627 - DNA, 20 bp, synthetic construct
  misc_feature 1..20: note = Description of Artificial Sequence: Synthetic oligonucleotide
  misc_feature 1..20: note = Target: ANGPTL4; (-) strand; PAM type: NNGRRT; PAM sequence: CTGGGT
  source 1..20: mol_type = other DNA
actaaaaatacaaaaattag

SEQ ID NO: 5628 - DNA, 20 bp, synthetic construct
  misc_feature 1..20: note = Description of Artificial Sequence: Synthetic oligonucleotide
  misc_feature 1..20: note = Target: ANGPTL4; (-) strand; PAM type: NNGRRT; PAM sequence: AGGAGT
  source 1..20: mol_type = other DNA
tcggcaaatcatttgaggtc

SEQ ID NO: 5629 - DNA, 20 bp, synthetic construct
  misc_feature 1..20: note = Description of Artificial Sequence: Synthetic oligonucleotide
  misc_feature 1..20: note = Target: ANGPTL4; (-) strand; PAM type: NNGRRT; PAM sequence: CGGGAT
  source 1..20: mol_type = other DNA
tgataggcctcccaaagtgt

SEQ ID NO: 5630 - DNA, 20 bp, synthetic construct
  misc_feature 1..20: note = Description of Artificial Sequence: Synthetic oligonucleotide
  misc_feature 1..20: note = Target: ANGPTL4; (-) strand; PAM type: NNGRRT; PAM sequence: TGGGAT
  source 1..20: mol_type = other DNA
gcctcaacctcccaaagtgc

SEQ ID NO: 5631 - DNA, 20 bp, synthetic construct
  misc_feature 1..20: note = Description of Artificial Sequence: Synthetic oligonucleotide
  misc_feature 1..20: note = Target: ANGPTL4; (-) strand; PAM type: NNGRRT; PAM sequence: CGGGGT
  source 1..20: mol_type = other DNA
ttttgtatttttagtagaga

SEQ ID NO: 5632 - DNA, 20 bp, synthetic construct
  misc_feature 1..20: note = Description of Artificial Sequence: Synthetic oligonucleotide
  misc_feature 1..20: note = Target: ANGPTL4; (-) strand; PAM type: NNGRRT; PAM sequence: TGGGAT
  source 1..20: mol_type = other DNA
gcctcagccacctgagtagc

SEQ ID NO: 5633 - DNA, 20 bp, synthetic construct
  misc_feature 1..20: note = Description of Artificial Sequence: Synthetic oligonucleotide
  misc_feature 1..20: note = Target: ANGPTL4; (-) strand; PAM type: NNGRRT; PAM sequence: CTGAGT
  source 1..20: mol_type = other DNA
gattctcctgcctcagccac

SEQ ID NO: 5634 - DNA, 20 bp, synthetic construct
  misc_feature 1..20: note = Description of Artificial Sequence: Synthetic oligonucleotide
  misc_feature 1..20: note = Target: ANGPTL4; (-) strand; PAM type: NNGRRT; PAM sequence: TGGAGT
  source 1..20: mol_type = other DNA
tctcgctctgtcgcccaggc

SEQ ID NO: 5635 - DNA, 20 bp, synthetic construct
  misc_feature 1..20: note = Description of Artificial Sequence: Synthetic oligonucleotide
  misc_feature 1..20: note = Target: ANGPTL4; (-) strand; PAM type: NNGRRT; PAM sequence: CGGAGT
  source 1..20: mol_type = other DNA
ttatttttttgatgggggga

SEQ ID NO: 5636 - DNA, 20 bp, synthetic construct
  misc_feature 1..20: note = Description of Artificial Sequence: Synthetic oligonucleotide
  misc_feature 1..20: note = Target: ANGPTL4; (-) strand; PAM type: NNGRRT; PAM sequence: CTGAAT
  source 1..20: mol_type = other DNA
gccaccatgcccagcaaggg

SEQ ID NO: 5637 - DNA, 20 bp, synthetic construct
  misc_feature 1..20: note = Description of Artificial Sequence: Synthetic oligonucleotide
  misc_feature 1..20: note = Target: ANGPTL4; (-) strand; PAM type: NNGRRT; PAM sequence: CCGAGT
  source 1..20: mol_type = other DNA
gaccctcctgccttggcctc

SEQ ID NO: 5638 - DNA, 20 bp, synthetic construct
  misc_feature 1..20: note = Description of Artificial Sequence: Synthetic oligonucleotide
  misc_feature 1..20: note = Target: ANGPTL4; (-) strand; PAM type: NNGRRT; PAM sequence: TGGAGT
  source 1..20: mol_type = other DNA
ttttgttgtgttgcccaggt

SEQ ID NO: 5639 - DNA, 20 bp, synthetic construct
  misc_feature 1..20: note = Description of Artificial Sequence: Synthetic oligonucleotide
  misc_feature 1..20: note = Target: ANGPTL4; (-) strand; PAM type: NNGRRT; PAM sequence: TAGGGT
  source 1..20: mol_type = other DNA
aatgtttatgttggtagaga

SEQ ID NO: 5640 - DNA, 20 bp, synthetic construct
  misc_feature 1..20: note = Description of Artificial Sequence: Synthetic oligonucleotide
  misc_feature 1..20: note = Target: ANGPTL4; (-) strand; PAM type: NNGRRT; PAM sequence: TGGAAT
  source 1..20: mol_type = other DNA
gcttcagccccacaagcagc

SEQ ID NO: 5641 - DNA, 20 bp, synthetic construct
  misc_feature 1..20: note = Description of Artificial Sequence: Synthetic oligonucleotide
  misc_feature 1..20: note = Target: ANGPTL4; (-) strand; PAM type: NNGRRT; PAM sequence: CTGGAT
  source 1..20: mol_type = other DNA
gtctcactctgttgcccagg

SEQ ID NO: 5642 - DNA, 20 bp, synthetic construct
  misc_feature 1..20: note = Description of Artificial Sequence: Synthetic oligonucleotide
  misc_feature 1..20: note = Target: ANGPTL4; (-) strand; PAM type: NNGRRT; PAM sequence: TGGAGT
  source 1..20: mol_type = other DNA
tttttttttttttttagaga

SEQ ID NO: 5643 - DNA, 20 bp, synthetic construct
  misc_feature 1..20: note = Description of Artificial Sequence: Synthetic oligonucleotide
  misc_feature 1..20: note = Target: ANGPTL4; (-) strand; PAM type: NNGRRT; PAM sequence: CTGGGT
  source 1..20: mol_type = other DNA
gcctctctgggccagctgaa

SEQ ID NO: 5644 - DNA, 20 bp, synthetic construct
  misc_feature 1..20: note = Description of Artificial Sequence: Synthetic oligonucleotide
  misc_feature 1..20: note = Target: ANGPTL4; (-) strand; PAM type: NNGRRT; PAM sequence: GGGAGT
  source 1..20: mol_type = other DNA
agcagggactgagtgtggga

SEQ ID NO: 5645 - DNA, 20 bp, synthetic construct
  misc_feature 1..20: note = Description of Artificial Sequence: Synthetic oligonucleotide
  misc_feature 1..20: note = Target: ANGPTL4; (-) strand; PAM type: NNGRRT; PAM sequence: CTGAGT
  source 1..20: mol_type = other DNA
tcccaagaacccagcaggga

SEQ ID NO: 5646 - DNA, 20 bp, synthetic construct
  misc_feature 1..20: note = Description of Artificial Sequence: Synthetic oligonucleotide
  misc_feature 1..20: note = Target: ANGPTL4; (-) strand; PAM type: NNGRRT; PAM sequence: AGGAAT
  source 1..20: mol_type = other DNA
gaggagggtgggtcagaggg

SEQ ID NO: 5647 - DNA, 20 bp, synthetic construct
  misc_feature 1..20: note = Description of Artificial Sequence: Synthetic oligonucleotide
  misc_feature 1..20: note = Target: ANGPTL4; (-) strand; PAM type: NNGRRT; PAM sequence: GTGGGT
  source 1..20: mol_type = other DNA
ccctggaggactcgaggagg

SEQ ID NO: 5648 - DNA, 20 bp, synthetic construct
  misc_feature 1..20: note = Description of Artificial Sequence: Synthetic oligonucleotide
  misc_feature 1..20: note = Target: ANGPTL4; (-) strand; PAM type: NNGRRT; PAM sequence: GAGGGT
  source 1..20: mol_type = other DNA
tcatccctggaggactcgag

SEQ ID NO: 5649 - DNA, 20 bp, synthetic construct
  misc_feature 1..20: note = Description of Artificial Sequence: Synthetic oligonucleotide
  misc_feature 1..20: note = Target: ANGPTL4; (-) strand; PAM type: NNGRRT; PAM sequence: CTGAAT
  source 1..20: mol_type = other DNA
actgagccatcgtggcgcct

SEQ ID NO: 5650 - DNA, 20 bp, synthetic construct
  misc_feature 1..20: note = Description of Artificial Sequence: Synthetic oligonucleotide
  misc_feature 1..20: note = Target: ANGPTL4; (-) strand; PAM type: NNGRRT; PAM sequence: GGGGAT
  source 1..20: mol_type = other DNA
ccactagaaacacctaccgt

SEQ ID NO: 5651 - DNA, 20 bp, synthetic construct
  misc_feature 1..20: note = Description of Artificial Sequence: Synthetic oligonucleotide
  misc_feature 1..20: note = Target: ANGPTL4; (-) strand; PAM type: NNGRRT; PAM sequence: GAGGGT
  source 1..20: mol_type = other DNA
catgaggcagggccacttct

SEQ ID NO: 5652 - DNA, 20 bp, synthetic construct
  misc_feature 1..20: note = Description of Artificial Sequence: Synthetic oligonucleotide
  misc_feature 1..20: note = Target: ANGPTL4; (-) strand; PAM type: NNGRRT; PAM sequence: TGGAGT
  source 1..20: mol_type = other DNA
agacccagccagaactcgcc

SEQ ID NO: 5653 - DNA, 20 bp, synthetic construct
  misc_feature 1..20: note = Description of Artificial Sequence: Synthetic oligonucleotide
  misc_feature 1..20: note = Target: ANGPTL4; (-) strand; PAM type: NNGRRT; PAM sequence: ACGGGT
  source 1..20: mol_type = other DNA
tggcgcccagctggccggcc

SEQ ID NO: 5654 - DNA, 20 bp, synthetic construct
  misc_feature 1..20: note = Description of Artificial Sequence: Synthetic oligonucleotide
  misc_feature 1..20: note = Target: ANGPTL4; (-) strand; PAM type: NNGRRT; PAM sequence: CTGGGT
  source 1..20: mol_type = other DNA
agaagggtacggagaggccg

SEQ ID NO: 5655 - DNA, 20 bp, synthetic construct
  misc_feature 1..20: note = Description of Artificial Sequence: Synthetic oligonucleotide
  misc_feature 1..20: note = Target: ANGPTL4; (-) strand; PAM type: NNGRRT; PAM sequence: AAGGGT
  source 1..20: mol_type = other DNA
gatcctggtcccaagtggag

SEQ ID NO: 5656 - DNA, 20 bp, synthetic construct
  misc_feature 1..20: note = Description of Artificial Sequence: Synthetic oligonucleotide
  misc_feature 1..20: note = Target: ANGPTL4; (-) strand; PAM type: NNGRRT; PAM sequence: CTGGGT
  source 1..20: mol_type = other DNA
ataaggagggaagctgctgg

SEQ ID NO: 5657 - DNA, 20 bp, synthetic construct
  misc_feature 1..20: note = Description of Artificial Sequence: Synthetic oligonucleotide
  misc_feature 1..20: note = Target: ANGPTL4; (-) strand; PAM type: NNGRRT; PAM sequence: TGGGGT
  source 1..20: mol_type = other DNA
ggcaggaaacagatgcaatg

SEQ ID NO: 5658 - DNA, 20 bp, synthetic construct
  misc_feature 1..20: note = Description of Artificial Sequence: Synthetic oligonucleotide
  misc_feature 1..20: note = Target: ANGPTL4; (-) strand; PAM type: NNGRRT; PAM sequence: CAGGAT
  source 1..20: mol_type = other DNA
aagacggtcaagaccctttt

SEQ ID NO: 5659 - DNA, 20 bp, synthetic construct
  misc_feature 1..20: note = Description of Artificial Sequence: Synthetic oligonucleotide
  misc_feature 1..20: note = Target: ANGPTL4; (-) strand; PAM type: NNGRRT; PAM sequence: CTGGGT
  source 1..20: mol_type = other DNA
gtgccacaaagcactccagc

SEQ ID NO: 5660 - DNA, 20 bp, synthetic construct
  misc_feature 1..20: note = Description of Artificial Sequence: Synthetic oligonucleotide
  misc_feature 1..20: note = Target: ANGPTL4; (-) strand; PAM type: NNGRRT; PAM sequence: GAGAAT
  source 1..20: mol_type = other DNA
tactcgggaggctgaggcag

SEQ ID NO: 5661 - DNA, 20 bp, synthetic construct
  misc_feature 1..20: note = Description of Artificial Sequence: Synthetic oligonucleotide
  misc_feature 1..20: note = Target: ANGPTL4; (-) strand; PAM type: NNGRRT; PAM sequence: GAGAAT
  source 1..20: mol_type = other DNA
tactcaggaggctgaggcag

SEQ ID NO: 5662 - DNA, 20 bp, synthetic construct
  misc_feature 1..20: note = Description of Artificial Sequence: Synthetic oligonucleotide
  misc_feature 1..20: note = Target: ANGPTL4; (-) strand; PAM type: NNGRRT; PAM sequence: AGGAGT
  source 1..20: mol_type = other DNA
tgggcagatcacttgaggtc

SEQ ID NO: 5663 - DNA, 20 bp, synthetic construct
  misc_feature 1..20: note = Description of Artificial Sequence: Synthetic oligonucleotide
  misc_feature 1..20: note = Target: ANGPTL4; (-) strand; PAM type: NNGRRT; PAM sequence: CCGGGT
  source 1..20: mol_type = other DNA
cattataaagatgtttgtgg

SEQ ID NO: 5664 - DNA, 20 bp, synthetic construct
  misc_feature 1..20: note = Description of Artificial Sequence: Synthetic oligonucleotide
  misc_feature 1..20: note = Target: ANGPTL4; (-) strand; PAM type: NNGRRT; PAM sequence: AAGAAT
  source 1..20: mol_type = other DNA
ttcaaaaaaaaaaaaaaaaa

SEQ ID NO: 5665 - DNA, 20 bp, synthetic construct
  misc_feature 1..20: note = Description of Artificial Sequence: Synthetic oligonucleotide
  misc_feature 1..20: note = Target: ANGPTL4; (-) strand; PAM type: NNGRRT; PAM sequence: CAGAGT
  source 1..20: mol_type = other DNA
ctgcactccagcttaggcaa

SEQ ID NO: 5666 - DNA, 20 bp, synthetic construct
  misc_feature 1..20: note = Description of Artificial Sequence: Synthetic oligonucleotide
  misc_feature 1..20: note = Target: ANGPTL4; (-) strand; PAM type: NNGRRT; PAM sequence: GAGAAT
  source 1..20: mol_type = other DNA
cctaattttttttttttttt

SEQ ID NO: 5667 - DNA, 20 bp, synthetic construct
  misc_feature 1..20: note = Description of Artificial Sequence: Synthetic oligonucleotide
  misc_feature 1..20: note = Target: ANGPTL4; (-) strand; PAM type: NNGRRT; PAM sequence: TGGGAT
  source 1..20: mol_type = other DNA
gcttcagcctcccaaagtgc

SEQ ID NO: 5668 - DNA, 20 bp, synthetic construct
  misc_feature 1..20: note = Description of Artificial Sequence: Synthetic oligonucleotide
  misc_feature 1..20: note = Target: ANGPTL4; (-) strand; PAM type: NNGRRT; PAM sequence: CAGGAT
  source 1..20: mol_type = other DNA
ttttgtatttttaattgaga

SEQ ID NO: 5669 - DNA, 20 bp, synthetic construct
  misc_feature 1..20: note = Description of Artificial Sequence: Synthetic oligonucleotide
  misc_feature 1..20: note = Target: ANGPTL4; (-) strand; PAM type: NNGRRT; PAM sequence: TTGAGT
  source 1..20: mol_type = other DNA
tctcactctgtcacccaggc

SEQ ID NO: 5670 - DNA, 20 bp, synthetic construct
  misc_feature 1..20: note = Description of Artificial Sequence: Synthetic oligonucleotide
  misc_feature 1..20: note = Target: ANGPTL4; (-) strand; PAM type: NNGRRT; PAM sequence: AGGGGT
  source 1..20: mol_type = other DNA
ttttctttttcttttgaggc

SEQ ID NO: 5671 - DNA, 20 bp, synthetic construct
  misc_feature 1..20: note = Description of Artificial Sequence: Synthetic oligonucleotide
  misc_feature 1..20: note = Target: ANGPTL4; (-) strand; PAM type: NNGRRT; PAM sequence: TGGAGT
  source 1..20: mol_type = other DNA
cctggctccattgcccaggc

SEQ ID NO: 5672 - DNA, 20 bp, synthetic construct
  misc_feature 1..20: note = Description of Artificial Sequence: Synthetic oligonucleotide
  misc_feature 1..20: note = Target: ANGPTL4; (-) strand; PAM type: NNGRRT; PAM sequence: TGGGAT
  source 1..20: mol_type = other DNA
acctcggcctcccaaagtgc

SEQ ID NO: 5673 - DNA, 20 bp, synthetic construct
  misc_feature 1..20: note = Description of Artificial Sequence: Synthetic oligonucleotide
  misc_feature 1..20: note = Target: ANGPTL4; (-) strand; PAM type: NNGRRT; PAM sequence: CAGGGT
  source 1..20: mol_type = other DNA
ttttgtatttttagtagaga

SEQ ID NO: 5674 - DNA, 20 bp, synthetic construct
  misc_feature 1..20: note = Description of Artificial Sequence: Synthetic oligonucleotide
  misc_feature 1..20: note = Target: ANGPTL4; (-) strand; PAM type: NNGRRT; PAM sequence: TGGGAT
  source 1..20: mol_type = other DNA
tcctcagcctcccaaagtgc

SEQ ID NO: 5675 - DNA, 20 bp, synthetic construct
  misc_feature 1..20: note = Description of Artificial Sequence: Synthetic oligonucleotide
  misc_feature 1..20: note = Target: ANGPTL4; (-) strand; PAM type: NNGRRT; PAM sequence: GGGGGT
  source 1..20: mol_type = other DNA
ttttgtatttttagtagtga

SEQ ID NO: 5676 - DNA, 20 bp, synthetic construct
  misc_feature 1..20: note = Description of Artificial Sequence: Synthetic oligonucleotide
  misc_feature 1..20: note = Target: ANGPTL4; (-) strand; PAM type: NNGRRT; PAM sequence: CGGGAT
  source 1..20: mol_type = other DNA
gcctcagcctcctgagtagc

SEQ ID NO: 5677 - DNA, 20 bp, synthetic construct
  misc_feature 1..20: note = Description of Artificial Sequence: Synthetic oligonucleotide
  misc_feature 1..20: note = Target: ANGPTL4; (-) strand; PAM type: NNGRRT; PAM sequence: CTGAGT
  source 1..20: mol_type = other DNA
gattctcatgcctcagcctc

SEQ ID NO: 5678 - DNA, 20 bp, synthetic construct
  misc_feature 1..20: note = Description of Artificial Sequence: Synthetic oligonucleotide
  misc_feature 1..20: note = Target: ANGPTL4; (-) strand; PAM type: NNGRRT; PAM sequence: AGGGAT
  source 1..20: mol_type = other DNA
acctctgcctcccaggttca

SEQ ID NO: 5679 - DNA, 20 bp, synthetic construct
  misc_feature 1..20: note = Description of Artificial Sequence: Synthetic oligonucleotide
  misc_feature 1..20: note = Target: ANGPTL4; (-) strand; PAM type: NNGRRT; PAM sequence: TGGAGT
  source 1..20: mol_type = other DNA
tctcactctatctcccaggc

SEQ ID NO: 5680 - DNA, 20 bp, synthetic construct
  misc_feature 1..20: note = Description of Artificial Sequence: Synthetic oligonucleotide
  misc_feature 1..20: note = Target: ANGPTL4; (-) strand; PAM type: NNGRRT; PAM sequence: CTGAGT
  source 1..20: mol_type = other DNA
tttggtctttttttttgaga

SEQ ID NO: 5681 - DNA, 20 bp, synthetic construct
  misc_feature 1..20: note = Description of Artificial Sequence: Synthetic oligonucleotide
  misc_feature 1..20: note = Target: ANGPTL4; (-) strand; PAM type: NNGRRT; PAM sequence: TGGGAT
  source 1..20: mol_type = other DNA
ccctcagcctcccgagtagc

SEQ ID NO: 5682 - DNA, 20 bp, synthetic construct
  misc_feature 1..20: note = Description of Artificial Sequence: Synthetic oligonucleotide
  misc_feature 1..20: note = Target: ANGPTL4; (-) strand; PAM type: NNGRRT; PAM sequence: CCGAGT
  source 1..20: mol_type = other DNA
gattctcctccctcagcctc

SEQ ID NO: 5683 - DNA, 20 bp, synthetic construct
  misc_feature 1..20: note = Description of Artificial Sequence: Synthetic oligonucleotide
  misc_feature 1..20: note = Target: ANGPTL4; (-) strand; PAM type: NNGRRT; PAM sequence: TGGAGT
  source 1..20: mol_type = other DNA
tcttactctgtcacccaggc

SEQ ID NO: 5684 - DNA, 20 bp, synthetic construct
  misc_feature 1..20: note = Description of Artificial Sequence: Synthetic oligonucleotide
  misc_feature 1..20: note = Target: ANGPTL4; (-) strand; PAM type: NNGRRT; PAM sequence: TTGAGT
  source 1..20: mol_type = other DNA
tgacttttttttttttgaga

SEQ ID NO: 5685 - DNA, 20 bp, synthetic construct
  misc_feature 1..20: note = Description of Artificial Sequence: Synthetic oligonucleotide
  misc_feature 1..20: note = Target: ANGPTL4; (-) strand; PAM type: NNGRRT; PAM sequence: GAGGAT
  source 1..20: mol_type = other DNA
aaggagatagggatagggtt

SEQ ID NO: 5686 - DNA, 20 bp, synthetic construct
  misc_feature 1..20: note = Description of Artificial Sequence: Synthetic oligonucleotide
  misc_feature 1..20: note = Target: ANGPTL4; (-) strand; PAM type: NNGRRT; PAM sequence: TAGGGT
  source 1..20: mol_type = other DNA
gggctgaaaggagataggga

SEQ ID NO: 5687 - DNA, 20 bp, synthetic construct
  misc_feature 1..20: note = Description of Artificial Sequence: Synthetic oligonucleotide
  misc_feature 1..20: note = Target: ANGPTL4; (-) strand; PAM type: NNGRRT; PAM sequence: AGGGAT
  source 1..20: mol_type = other DNA
cgatggggctgaaaggagat

SEQ ID NO: 5688 - DNA, 20 bp, synthetic construct
  misc_feature 1..20: note = Description of Artificial Sequence: Synthetic oligonucleotide
  misc_feature 1..20: note = Target: ANGPTL4; (-) strand; PAM type: NNGRRT; PAM sequence: CGGGGT
  source 1..20: mol_type = other DNA
ccaaaccaccagcctcctgc

SEQ ID NO: 5689 - DNA, 20 bp, synthetic construct
  misc_feature 1..20: note = Description of Artificial Sequence: Synthetic oligonucleotide
  misc_feature 1..20: note = Target: ANGPTL4; (-) strand; PAM type: NNGRRT; PAM sequence: TGGAAT
  source 1..20: mol_type = other DNA
gaagtactggccgttgaggt

SEQ ID NO: 5690 - DNA, 20 bp, synthetic construct
  misc_feature 1..20: note = Description of Artificial Sequence: Synthetic oligonucleotide
  misc_feature 1..20: note = Target: ANGPTL4; (-) strand; PAM type: NNGRRT; PAM sequence: TGGGAT
  source 1..20: mol_type = other DNA
ttaagcttctgccgctgctg

SEQ ID NO: 5691 - DNA, 20 bp, synthetic construct
  misc_feature 1..20: note = Description of Artificial Sequence: Synthetic oligonucleotide
  misc_feature 1..20: note = Target: ANGPTL4; (-) strand; PAM type: NNGRRT; PAM sequence: GCGGGT
  source 1..20: mol_type = other DNA
caacatggtggtggcctgca

SEQ ID NO: 5692 - DNA, 20 bp, synthetic construct
  misc_feature 1..20: note = Description of Artificial Sequence: Synthetic oligonucleotide
  misc_feature 1..20: note = Target: ANGPTL4; (-) strand; PAM type: NNGRRT; PAM sequence: CTGGAT
  source 1..20: mol_type = other DNA
gctgcctctgctgccatggg

SEQ ID NO: 5693 - DNA, 20 bp, synthetic construct
  misc_feature 1..20: note = Description of Artificial Sequence: Synthetic oligonucleotide
  misc_feature 1..20: note = Target: ANGPTL4; (-) strand; PAM type: NNGRRT; PAM sequence: AAGAGT
  source 1..20: mol_type = other DNA
ccacatcctcgggcagagcc

SEQ ID NO: 5694 - DNA, 20 bp, synthetic construct
  misc_feature 1..20: note = Description of Artificial Sequence: Synthetic oligonucleotide
  misc_feature 1..20: note = Target: ANGPTL4; (-) strand; PAM type: NNGRRT; PAM sequence: TAGAGT
  source 1..20: mol_type = other DNA
tgccccttggtccacgcctc

SEQ ID NO: 5695 - DNA, 20 bp, synthetic construct
  misc_feature 1..20: note = Description of Artificial Sequence: Synthetic oligonucleotide
  misc_feature 1..20: note = Target: ANGPTL4; (-) strand; PAM type: NNGRRT; PAM sequence: AGGAGT
  source 1..20: mol_type = other DNA
ccccaactccctggccagca

SEQ ID NO: 5696 - DNA, 20 bp, synthetic construct
  misc_feature 1..20: note = Description of Artificial Sequence: Synthetic oligonucleotide
  misc_feature 1..20: note = Target: ANGPTL4; (-) strand; PAM type: NNGRRT; PAM sequence: CTGAGT
  source 1..20: mol_type = other DNA
gctggccccaagtggtccct

SEQ ID NO: 5697 - DNA, 20 bp, synthetic construct
  misc_feature 1..20: note = Description of Artificial Sequence: Synthetic oligonucleotide
  misc_feature 1..20: note = Target: ANGPTL4; (-) strand; PAM type: NNGRRT; PAM sequence: CTGAGT
  source 1..20: mol_type = other DNA
gtccccgtcagtcaatgtga

SEQ ID NO: 5698 - DNA, 20 bp, synthetic construct
  misc_feature 1..20: note = Description of Artificial Sequence: Synthetic oligonucleotide
  misc_feature 1..20: note = Target: ANGPTL4; (-) strand; PAM type: NNGRRT; PAM sequence: GAGGGT
  source 1..20: mol_type = other DNA
ttcactttttaaaacaaact

SEQ ID NO: 5699 - DNA, 20 bp, synthetic construct
  misc_feature 1..20: note = Description of Artificial Sequence: Synthetic oligonucleotide
  misc_feature 1..20: note = Target: ANGPTL4; (-) strand; PAM type: NNGRRT; PAM sequence: TGGGAT
  source 1..20: mol_type = other DNA
gtctcggcctcacaaatggc

SEQ ID NO: 5700 - DNA, 20 bp, synthetic construct
  misc_feature 1..20: note = Description of Artificial Sequence: Synthetic oligonucleotide
  misc_feature 1..20: note = Target: ANGPTL4; (-) strand; PAM type: NNGRRT; PAM sequence: GGGGGT
  source 1..20: mol_type = other DNA
ttgtatttttttgtagagat

SEQ ID NO: 5701 - DNA, 20 bp, synthetic construct
  misc_feature 1..20: note = Description of Artificial Sequence: Synthetic oligonucleotide
  misc_feature 1..20: note = Target: ANGPTL4; (-) strand; PAM type: NNGRRT; PAM sequence: TAGAGT
  source 1..20: mol_type = other DNA
gattcttctgcgtcagcctc

SEQ ID NO: 5702 - DNA, 20 bp, synthetic construct
  misc_feature 1..20: note = Description of Artificial Sequence: Synthetic oligonucleotide
  misc_feature 1..20: note = Target: ANGPTL4; (-) strand; PAM type: NNGRRT; PAM sequence: TGGAGT
  source 1..20: mol_type = other DNA
tcttgctctgttgcccaggc

SEQ ID NO: 5703 - DNA, 20 bp, synthetic construct
  misc_feature 1..20: note = Description of Artificial Sequence: Synthetic oligonucleotide
  misc_feature 1..20: note = Target: ANGPTL4; (-) strand; PAM type: NNGRRT; PAM sequence: TGGAGT
  source 1..20: mol_type = other DNA
aaattatttttgttttgaga

SEQ ID NO: 5704 - DNA, 20 bp, synthetic construct
  misc_feature 1..20: note = Description of Artificial Sequence: Synthetic oligonucleotide
  misc_feature 1..20: note = Target: ANGPTL4; (-) strand; PAM type: NNGRRT; PAM sequence: TAGAAT
  source 1..20: mol_type = other DNA
tttgagaccagcctggacaa

SEQ ID NO: 5705 - DNA, 20 bp, synthetic construct
  misc_feature 1..20: note = Description of Artificial Sequence: Synthetic oligonucleotide
  misc_feature 1..20: note = Target: ANGPTL4; (-) strand; PAM type: NNGRRT; PAM sequence: TTGAGT
  source 1..20: mol_type = other DNA
agccaaggcaggaggatccc

SEQ ID NO: 5706 - DNA, 20 bp, synthetic construct
  misc_feature 1..20: note = Description of Artificial Sequence: Synthetic oligonucleotide
  misc_feature 1..20: note = Target: ANGPTL4; (-) strand; PAM type: NNGRRT; PAM sequence: GAGGAT
  source 1..20: mol_type = other DNA
actttgtgaagccaaggcag

SEQ ID NO: 5707 - DNA, 20 bp, synthetic construct
  misc_feature 1..20: note = Description of Artificial Sequence: Synthetic oligonucleotide
  misc_feature 1..20: note = Target: ANGPTL4; (-) strand; PAM type: NNGRRT; PAM sequence: GTGGGT
  source 1..20: mol_type = other DNA
tagaattagagccttcaggg

SEQ ID NO: 5708 - DNA, 20 bp, synthetic construct
  misc_feature 1..20: note = Description of Artificial Sequence: Synthetic oligonucleotide
  misc_feature 1..20: note = Target: ANGPTL4; (-) strand; PAM type: NNGRRT; PAM sequence: AGGGGT
  source 1..20: mol_type = other DNA
gatgtagaattagagccttc

SEQ ID NO: 5709 - DNA, 20 bp, synthetic construct
  misc_feature 1..20: note = Description of Artificial Sequence: Synthetic oligonucleotide
  misc_feature 1..20: note = Target: ANGPTL4; (-) strand; PAM type: NNGRRT; PAM sequence: TAGAAT
  source 1..20: mol_type = other DNA
tttttaacaaaacacagatg

SEQ ID NO: 5710 - DNA, 20 bp, synthetic construct
  misc_feature 1..20: note = Description of Artificial Sequence: Synthetic oligonucleotide
  misc_feature 1..20: note = Target: ANGPTL4; (-) strand; PAM type: NNGRRT; PAM sequence: TGGGAT
  source 1..20: mol_type = other DNA
gcctcggcctcctaaagtgc

SEQ ID NO: 5711 - DNA, 20 bp, synthetic construct
  misc_feature 1..20: note = Description of Artificial Sequence: Synthetic oligonucleotide
  misc_feature 1..20: note = Target: ANGPTL4; (-) strand; PAM type: NNGRRT; PAM sequence: CGGGGT
  source 1..20: mol_type = other DNA
ttttgtatttttagtagaga

SEQ ID NO: 5712 - DNA, 20 bp, synthetic construct
  misc_feature 1..20: note = Description of Artificial Sequence: Synthetic oligonucleotide
  misc_feature 1..20: note = Target: ANGPTL4; (-) strand; PAM type: NNGRRT; PAM sequence: TGGGAT
  source 1..20: mol_type = other DNA
gcctcagcctcctgagtagc

SEQ ID NO: 5713 - DNA, 20 bp, synthetic construct
  misc_feature 1..20: note = Description of Artificial Sequence: Synthetic oligonucleotide
  misc_feature 1..20: note = Target: ANGPTL4; (-) strand; PAM type: NNGRRT; PAM sequence: CTGAGT
  source 1..20: mol_type = other DNA
gattctcctgcctcagcctc

SEQ ID NO: 5714 - DNA, 20 bp, synthetic construct
  misc_feature 1..20: note = Description of Artificial Sequence: Synthetic oligonucleotide
  misc_feature 1..20: note = Target: ANGPTL4; (-) strand; PAM type: NNGRRT; PAM sequence: CCGAGT
  source 1..20: mol_type = other DNA
ctcaccgcaacctccacctc

SEQ ID NO: 5715 - DNA, 20 bp, synthetic construct
  misc_feature 1..20: note = Description of Artificial Sequence: Synthetic oligonucleotide
  misc_feature 1..20: note = Target: ANGPTL4; (-) strand; PAM type: NNGRRT; PAM sequence: TGGAGT
  source 1..20: mol_type = other DNA
tcttgctctgtcacccaggc

SEQ ID NO: 5716 - DNA, 20 bp, synthetic construct
  misc_feature 1..20: note = Description of Artificial Sequence: Synthetic oligonucleotide
  misc_feature 1..20: note = Target: ANGPTL4; (-) strand; PAM type: NNGRRT; PAM sequence: TCGGGT
  source 1..20: mol_type = other DNA
tacagcgggatcacccgacc

SEQ ID NO: 5717 - DNA, 20 bp, synthetic construct
  misc_feature 1..20: note = Description of Artificial Sequence: Synthetic oligonucleotide
  misc_feature 1..20: note = Target: ANGPTL4; (-) strand; PAM type: NNGRRT; PAM sequence: CGGGAT
  source 1..20: mol_type = other DNA
cactatatagagcaatacag

SEQ ID NO: 5718 - DNA, 20 bp, synthetic construct
  misc_feature 1..20: note = Description of Artificial Sequence: Synthetic oligonucleotide
  misc_feature 1..20: note = Target: ANGPTL4; (-) strand; PAM type: NNGRRT; PAM sequence: AGGGAT
  source 1..20: mol_type = other DNA
aatagagtgagaccctatat

SEQ ID NO: 5719 - DNA, 20 bp, synthetic construct
  misc_feature 1..20: note = Description of Artificial Sequence: Synthetic oligonucleotide
  misc_feature 1..20: note = Target: ANGPTL4; (-) strand; PAM type: NNGRRT; PAM sequence: TAGAGT
  source 1..20: mol_type = other DNA
ggccagaccagcctggacaa

SEQ ID NO: 5720 - DNA, 20 bp, synthetic construct
  misc_feature 1..20: note = Description of Artificial Sequence: Synthetic oligonucleotide
  misc_feature 1..20: note = Target: ANGPTL4; (-) strand; PAM type: NNGRRT; PAM sequence: TGGGAT
  source 1..20: mol_type = other DNA
gcctcagcctcctgagtagc

SEQ ID NO: 5721 - DNA, 20 bp, synthetic construct
  misc_feature 1..20: note = Description of Artificial Sequence: Synthetic oligonucleotide
  misc_feature 1..20: note = Target: ANGPTL4; (-) strand; PAM type: NNGRRT; PAM sequence: CTGAGT
  source 1..20: mol_type = other DNA
aattctccggcctcagcctc

SEQ ID NO: 5722 - DNA, 20 bp, synthetic construct
  misc_feature 1..20: note = Description of Artificial Sequence: Synthetic oligonucleotide
  misc_feature 1..20: note = Target: ANGPTL4; (-) strand; PAM type: NNGRRT; PAM sequence: CTGGGT
  source 1..20: mol_type = other DNA
ctcactgcaacctccacctc

SEQ ID NO: 5723 - DNA, 20 bp, synthetic construct
  misc_feature 1..20: note = Description of Artificial Sequence: Synthetic oligonucleotide
  misc_feature 1..20: note = Target: ANGPTL4; (-) strand; PAM type: NNGRRT; PAM sequence: GAGAGT
  source 1..20: mol_type = other DNA
gcccaggcagaggagtcgca

SEQ ID NO: 5724 - DNA, 20 bp, synthetic construct
  misc_feature 1..20: note = Description of Artificial Sequence: Synthetic oligonucleotide
  misc_feature 1..20: note = Target: ANGPTL4; (-) strand; PAM type: NNGRRT; PAM sequence: AGGAGT
  source 1..20: mol_type = other DNA
cacagtgggagcccaggcag

SEQ ID NO: 5725 - DNA, 20 bp, synthetic construct
  misc_feature 1..20: note = Description of Artificial Sequence: Synthetic oligonucleotide
  misc_feature 1..20: note = Target: ANGPTL4; (-) strand; PAM type: NNGRRT; PAM sequence: CAGGGT
  source 1..20: mol_type = other DNA
ccggacggctgctctgagtg

SEQ ID NO: 5726 - DNA, 20 bp, synthetic construct
  misc_feature 1..20: note = Description of Artificial Sequence: Synthetic oligonucleotide
  misc_feature 1..20: note = Target: ANGPTL4; (-) strand; PAM type: NNGRRT; PAM sequence: CTGAGT
  source 1..20: mol_type = other DNA
agcagggccggacggctgct

SEQ ID NO: 5727 - DNA, 20 bp, synthetic construct
  misc_feature 1..20: note = Description of Artificial Sequence: Synthetic oligonucleotide
  misc_feature 1..20: note = Target: ANGPTL4; (-) strand; PAM type: NNGRRT; PAM sequence: CCGGGT
  source 1..20: mol_type = other DNA
ctccgcagccgctgtccggc

SEQ ID NO: 5728 - DNA, 20 bp, synthetic construct
  misc_feature 1..20: note = Description of Artificial Sequence: Synthetic oligonucleotide
  misc_feature 1..20: note = Target: ANGPTL4; (-) strand; PAM type: NNGRRT; PAM sequence: GGGGGT
  source 1..20: mol_type = other DNA
gccgcacaggagcccatgga

SEQ ID NO: 5729 - DNA, 20 bp, synthetic construct
  misc_feature 1..20: note = Description of Artificial Sequence: Synthetic oligonucleotide
  misc_feature 1..20: note = Target: ANGPTL4; (-) strand; PAM type: NNGRRT; PAM sequence: GTGGAT
  source 1..20: mol_type = other DNA
cactcctcagcccttgggtg

SEQ ID NO: 5730 - DNA, 20 bp, synthetic construct
  misc_feature 1..20: note = Description of Artificial Sequence: Synthetic oligonucleotide
  misc_feature 1..20: note = Target: ANGPTL4; (-) strand; PAM type: NNGRRT; PAM sequence: TTGGGT
  source 1..20: mol_type = other DNA
gcgcctgcactcctcagccc

SEQ ID NO: 5731 - DNA, 20 bp, synthetic construct
  misc_feature 1..20: note = Description of Artificial Sequence: Synthetic oligonucleotide
  misc_feature 1..20: note = Target: ANGPTL4; (-) strand; PAM type: NNGRRT; PAM sequence: GTGGAT
  source 1..20: mol_type = other DNA
agcccagctagcttcaccca

SEQ ID NO: 5732 - DNA, 20 bp, synthetic construct
  misc_feature 1..20: note = Description of Artificial Sequence: Synthetic oligonucleotide
  misc_feature 1..20: note = Target: ANGPTL4; (-) strand; PAM type: NNGRRT; PAM sequence: TAGGGT
  source 1..20: mol_type = other DNA
cacaaaccctgagctagaca

SEQ ID NO: 5733 - DNA, 20 bp, synthetic construct
  misc_feature 1..20: note = Description of Artificial Sequence: Synthetic oligonucleotide
  misc_feature 1..20: note = Target: ANGPTL4; (-) strand; PAM type: NNGRRT; PAM sequence: CAGAGT
  source 1..20: mol_type = other DNA
cccaccagagtagctagata

SEQ ID NO: 5734 - DNA, 20 bp, synthetic construct
  misc_feature 1..20: note = Description of Artificial Sequence: Synthetic oligonucleotide
  misc_feature 1..20: note = Target: ANGPTL4; (-) strand; PAM type: NNGRRT; PAM sequence: CAGAGT
  source 1..20: mol_type = other DNA
aaggttctccaaggccccac

SEQ ID NO: 5735 - DNA, 20 bp, synthetic construct
  misc_feature 1..20: note = Description of Artificial Sequence: Synthetic oligonucleotide
  misc_feature 1..20: note = Target: ANGPTL4; (-) strand; PAM type: NNGRRT; PAM sequence: CAGAGT
  source 1..20: mol_type = other DNA
tacaaaccttgagctagata

SEQ ID NO: 5736 - DNA, 20 bp, synthetic construct
  misc_feature 1..20: note = Description of Artificial Sequence: Synthetic oligonucleotide
  misc_feature 1..20: note = Target: ANGPTL4; (-) strand; PAM type: NNGRRT; PAM sequence: CAGGGT
  source 1..20: mol_type = other DNA
cacaaaccctgagctagaca

SEQ ID NO: 5737 - DNA, 20 bp, synthetic construct
  misc_feature 1..20: note = Description of Artificial Sequence: Synthetic oligonucleotide
  misc_feature 1..20: note = Target: ANGPTL4; (-) strand; PAM type: NNGRRT; PAM sequence: CAGAGT
  source 1..20: mol_type = other DNA
cccaccacagtagctagata

SEQ ID NO: 5738 - DNA, 20 bp, synthetic construct
  misc_feature 1..20: note = Description of Artificial Sequence: Synthetic oligonucleotide
  misc_feature 1..20: note = Target: ANGPTL4; (-) strand; PAM type: NNGRRT; PAM sequence: CAGAGT
  source 1..20: mol_type = other DNA
cccaccagattaactagata

SEQ ID NO: 5739 - DNA, 20 bp, synthetic construct
  misc_feature 1..20: note = Description of Artificial Sequence: Synthetic oligonucleotide
  misc_feature 1..20: note = Target: ANGPTL4; (-) strand; PAM type: NNGRRT; PAM sequence: GTGGGT
  source 1..20: mol_type = other DNA
cagtgtggaaggggacccaa

SEQ ID NO: 5740 - DNA, 20 bp, synthetic construct
  misc_feature 1..20: note = Description of Artificial Sequence: Synthetic oligonucleotide
  misc_feature 1..20: note = Target: ANGPTL4; (-) strand; PAM type: NNGRRT; PAM sequence: AAGAGT
  source 1..20: mol_type = other DNA
ataaaagcagtggggaccca

SEQ ID NO: 5741 - DNA, 20 bp, synthetic construct
  misc_feature 1..20: note = Description of Artificial Sequence: Synthetic oligonucleotide
  misc_feature 1..20: note = Target: ANGPTL4; (-) strand; PAM type: NNGRRT; PAM sequence: GTGAGT
  source 1..20: mol_type = other DNA
tgaagctgcagaccttcgca

SEQ ID NO: 5742 - DNA, 20 bp, synthetic construct
  misc_feature 1..20: note = Description of Artificial Sequence: Synthetic oligonucleotide
  misc_feature 1..20: note = Target: ANGPTL4; (-) strand; PAM type: NNGRRT; PAM sequence: AGGAGT
  source 1..20: mol_type = other DNA
gttcatggtttcactggctc

SEQ ID NO: 5743 - DNA, 20 bp, synthetic construct
  misc_feature 1..20: note = Description of Artificial Sequence: Synthetic oligonucleotide
  misc_feature 1..20: note = Target: ANGPTL4; (-) strand; PAM type: NNGRRT; PAM sequence: GTGGGT
  source 1..20: mol_type = other DNA
ttcagcgtttcttccttctg

SEQ ID NO: 5744 - DNA, 20 bp, synthetic construct
  misc_feature 1..20: note = Description of Artificial Sequence: Synthetic oligonucleotide
  misc_feature 1..20: note = Target: ANGPTL4; (-) strand; PAM type: NNGRRT; PAM sequence: TGGAGT
  source 1..20: mol_type = other DNA
agctcttaaggtggcgcgtc

SEQ ID NO: 5745 - DNA, 20 bp, synthetic construct
  misc_feature 1..20: note = Description of Artificial Sequence: Synthetic oligonucleotide
  misc_feature 1..20: note = Target: ANGPTL4; (-) strand; PAM type: NNGRRT; PAM sequence: AAGAAT
  source 1..20: mol_type = other DNA
ttcttggtctcactgacttc

SEQ ID NO: 5746 - DNA, 20 bp, synthetic construct
  misc_feature 1..20: note = Description of Artificial Sequence: Synthetic oligonucleotide
  misc_feature 1..20: note = Target: ANGPTL4; (-) strand; PAM type: NNGRRT; PAM sequence: GGGGGT
  source 1..20: mol_type = other DNA
tggcactgtatccggaattg

SEQ ID NO: 5747 - DNA, 20 bp, synthetic construct
  misc_feature 1..20: note = Description of Artificial Sequence: Synthetic oligonucleotide
  misc_feature 1..20: note = Target: ANGPTL4; (-) strand; PAM type: NNGRRT; PAM sequence: CGGAAT
  source 1..20: mol_type = other DNA
gagtgcagtggcactgtatc

SEQ ID NO: 5748 - DNA, 20 bp, synthetic construct
  misc_feature 1..20: note = Description of Artificial Sequence: Synthetic oligonucleotide
  misc_feature 1..20: note = Target: ANGPTL4; (-) strand; PAM type: NNGRRT; PAM sequence: TGGAGT
  source 1..20: mol_type = other DNA
tctcgctctgttgcctgggc

SEQ ID NO: 5749 - DNA, 20 bp, synthetic construct
  misc_feature 1..20: note = Description of Artificial Sequence: Synthetic oligonucleotide
  misc_feature 1..20: note = Target: ANGPTL4; (-) strand; PAM type: NNGRRT; PAM sequence: CAGAAT
  source 1..20: mol_type = other DNA
ttatttatttattttttaga

SEQ ID NO: 5750 - DNA, 20 bp, synthetic construct
  misc_feature 1..20: note = Description of Artificial Sequence: Synthetic oligonucleotide
  misc_feature 1..20: note = Target: ANGPTL4; (-) strand; PAM type: NNGRRT; PAM sequence: TAGGGT
  source 1..20: mol_type = other DNA
tcaaatacatgtcctagatg

SEQ ID NO: 5751 - DNA, 20 bp, synthetic construct
  misc_feature 1..20: note = Description of Artificial Sequence: Synthetic oligonucleotide
  misc_feature 1..20: note = Target: ANGPTL4; (-) strand; PAM type: NNGRRT; PAM sequence: TGGGGT
  source 1..20: mol_type = other DNA
aaaaaaaaattaacagcagc

SEQ ID NO: 5752 - DNA, 20 bp, synthetic construct
  misc_feature 1..20: note = Description of Artificial Sequence: Synthetic oligonucleotide
  misc_feature 1..20: note = Target: ANGPTL4; (-) strand; PAM type: NNGRRT; PAM sequence: CAGAGT
  source 1..20: mol_type = other DNA
ccgcgctccagcctgggtga

SEQ ID NO: 5753 - DNA, 20 bp, synthetic construct
  misc_feature 1..20: note = Description of Artificial Sequence: Synthetic oligonucleotide
  misc_feature 1..20: note = Target: ANGPTL4; (-) strand; PAM type: NNGRRT; PAM sequence: CTGGGT
  source 1..20: mol_type = other DNA
tcgcactaccgcgctccagc

SEQ ID NO: 5754 - DNA, 20 bp, synthetic construct
  misc_feature 1..20: note = Description of Artificial Sequence: Synthetic oligonucleotide
  misc_feature 1..20: note = Target: ANGPTL4; (-) strand; PAM type: NNGRRT; PAM sequence: GAGAAT
  source 1..20: mol_type = other DNA
tactcgggaggccgaggcag

SEQ ID NO: 5755 - DNA, 20 bp, synthetic construct
  misc_feature 1..20: note = Description of Artificial Sequence: Synthetic oligonucleotide
  misc_feature 1..20: note = Target: ANGPTL4; (-) strand; PAM type: NNGRRT; PAM sequence: CTGGGT
  source 1..20: mol_type = other DNA
actaaaaatacaaaaattag

SEQ ID NO: 5756 - DNA, 20 bp, synthetic construct
  misc_feature 1..20: note = Description of Artificial Sequence: Synthetic oligonucleotide
  misc_feature 1..20: note = Target: ANGPTL4; (-) strand; PAM type: NNGRRT; PAM sequence: AGGAGT
  source 1..20: mol_type = other DNA
cgggcagatcacttgaggtc

SEQ ID NO: 5757 - DNA, 20 bp, synthetic construct
  misc_feature 1..20: note = Description of Artificial Sequence: Synthetic oligonucleotide
  misc_feature 1..20: note = Target: ANGPTL4; (-) strand; PAM type: NNGRRT; PAM sequence: AGGAAT
  source 1..20: mol_type = other DNA
ctccccaagagacatctata

SEQ ID NO: 5758 - DNA, 20 bp, synthetic construct
  misc_feature 1..20: note = Description of Artificial Sequence: Synthetic oligonucleotide
  misc_feature 1..20: note = Target: ANGPTL4; (-) strand; PAM type: NNGRRT; PAM sequence: AAGGGT
  source 1..20: mol_type = other DNA
tgtccccagcacctgccagg

SEQ ID NO: 5759 - DNA, 20 bp, synthetic construct
  misc_feature 1..20: note = Description of Artificial Sequence: Synthetic oligonucleotide
  misc_feature 1..20: note = Target: ANGPTL4; (-) strand; PAM type: NNGRRT; PAM sequence: GAGGGT
  source 1..20: mol_type = other DNA
tggcagagcctggaaatgaa

SEQ ID NO: 5760 - DNA, 20 bp, synthetic construct
  misc_feature 1..20: note = Description of Artificial Sequence: Synthetic oligonucleotide
  misc_feature 1..20: note = Target: ANGPTL4; (-) strand; PAM type: NNGRRT; PAM sequence: AAGGAT
  source 1..20: mol_type = other DNA
gtcaaggtggctgcaggaaa

SEQ ID NO: 5761 - DNA, 20 bp, synthetic construct
  misc_feature 1..20: note = Description of Artificial Sequence: Synthetic oligonucleotide
  misc_feature 1..20: note = Target: ANGPTL4; (-) strand; PAM type: NNGRRT; PAM sequence: AGGAGT
  source 1..20: mol_type = other DNA
tcccagagtgcggggagtgt

SEQ ID NO: 5762 - DNA, 20 bp, synthetic construct
  misc_feature 1..20: note = Description of Artificial Sequence: Synthetic oligonucleotide
  misc_feature 1..20: note = Target: ANGPTL4; (-) strand; PAM type: NNGRRT; PAM sequence: GGGAGT
  source 1..20: mol_type = other DNA
cctcagcctcccagagtgcg

SEQ ID NO: 5763 - DNA, 20 bp, synthetic construct
  misc_feature 1..20: note = Description of Artificial Sequence: Synthetic oligonucleotide
  misc_feature 1..20: note = Target: ANGPTL4; (-) strand; PAM type: NNGRRT; PAM sequence: CAGAGT
  source 1..20: mol_type = other DNA
atctacccacctcagcctcc

SEQ ID NO: 5764 - DNA, 20 bp, synthetic construct
  misc_feature 1..20: note = Description of Artificial Sequence: Synthetic oligonucleotide
  misc_feature 1..20: note = Target: ANGPTL4; (-) strand; PAM type: NNGRRT; PAM sequence: CGGGGT
  source 1..20: mol_type = other DNA
ttttgtatttttagtagaga

SEQ ID NO: 5765 - DNA, 20 bp, synthetic construct
  misc_feature 1..20: note = Description of Artificial Sequence: Synthetic oligonucleotide
  misc_feature 1..20: note = Target: ANGPTL4; (-) strand; PAM type: NNGRRT; PAM sequence: CCGAAT
  source 1..20: mol_type = other DNA
gattctcctgccttagcctc

SEQ ID NO: 5766 - DNA, 20 bp, synthetic construct
  misc_feature 1..20: note = Description of Artificial Sequence: Synthetic oligonucleotide
  misc_feature 1..20: note = Target: ANGPTL4; (-) strand; PAM type: NNGRRT; PAM sequence: TGGAGT
  source 1..20: mol_type = other DNA
tcttgctctgtcacccaggc

SEQ ID NO: 5767 - DNA, 20 bp, synthetic construct
  misc_feature 1..20: note = Description of Artificial Sequence: Synthetic oligonucleotide
  misc_feature 1..20: note = Target: ANGPTL4; (-) strand; PAM type: NNGRRT; PAM sequence: CAGAGT
  source 1..20: mol_type = other DNA
tttttctttcttttttgaga

SEQ ID NO: 5768 - DNA, 20 bp, synthetic construct
  misc_feature 1..20: note = Description of Artificial Sequence: Synthetic oligonucleotide
  misc_feature 1..20: note = Target: ANGPTL4; (-) strand; PAM type: NNGRRT; PAM sequence: TGGAGT
  source 1..20: mol_type = other DNA
gtgatttacagctgcagctc

SEQ ID NO: 5769 - DNA, 20 bp, synthetic construct
  misc_feature 1..20: note = Description of Artificial Sequence: Synthetic oligonucleotide
  misc_feature 1..20: note = Target: ANGPTL4; (-) strand; PAM type: NNGRRT; PAM sequence: AGGGAT
  source 1..20: mol_type = other DNA
gagctcctgtggtccaggag

SEQ ID NO: 5770 - DNA, 20 bp, synthetic construct
  misc_feature 1..20: note = Description of Artificial Sequence: Synthetic oligonucleotide
  misc_feature 1..20: note = Target: ANGPTL4; (-) strand; PAM type: NNGRRT; PAM sequence: TGGGGT
  source 1..20: mol_type = other DNA
gggatggtggcatggagggg

SEQ ID NO: 5771 - DNA, 20 bp, synthetic construct
  misc_feature 1..20: note = Description of Artificial Sequence: Synthetic oligonucleotide
  misc_feature 1..20: note = Target: ANGPTL4; (-) strand; PAM type: NNGRRT; PAM sequence: AGGGGT
  source 1..20: mol_type = other DNA
aggaagggatggtggcatgg

SEQ ID NO: 5772 - DNA, 20 bp, synthetic construct
  misc_feature 1..20: note = Description of Artificial Sequence: Synthetic oligonucleotide
  misc_feature 1..20: note = Target: ANGPTL4; (-) strand; PAM type: NNGRRT; PAM sequence: AGGGAT
  source 1..20: mol_type = other DNA
cccacaccatgaggccagga

SEQ ID NO: 5773 - DNA, 20 bp, synthetic construct
  misc_feature 1..20: note = Description of Artificial Sequence: Synthetic oligonucleotide
  misc_feature 1..20: note = Target: ANGPTL4; (-) strand; PAM type: NNGRRT; PAM sequence: ATGAAT
  source 1..20: mol_type = other DNA
ggcactggacccagcctgtg

SEQ ID NO: 5774 - DNA, 20 bp, synthetic construct
  misc_feature 1..20: note = Description of Artificial Sequence: Synthetic oligonucleotide
  misc_feature 1..20: note = Target: ANGPTL4; (-) strand; PAM type: NNGRRT; PAM sequence: TGGGAT
  source 1..20: mol_type = other DNA
gcctcagcctcccaaagagc

SEQ ID NO: 5775 - DNA, 20 bp, synthetic construct
  misc_feature 1..20: note = Description of Artificial Sequence: Synthetic oligonucleotide
  misc_feature 1..20: note = Target: ANGPTL4; (-) strand; PAM type: NNGRRT; PAM sequence: TGGGAT
  source 1..20: mol_type = other DNA
gccttggcctcccaaagtgc

SEQ ID NO: 5776 - DNA, 20 bp, synthetic construct
  misc_feature 1..20: note = Description of Artificial Sequence: Synthetic oligonucleotide
  misc_feature 1..20: note = Target: ANGPTL4; (-) strand; PAM type: NNGRRT; PAM sequence: TGGGGT
  source 1..20: mol_type = other DNA
ttttgtatttttagtagaga

SEQ ID NO: 5777 - DNA, 20 bp, synthetic construct
  misc_feature 1..20: note = Description of Artificial Sequence: Synthetic oligonucleotide
  misc_feature 1..20: note = Target: ANGPTL4; (-) strand; PAM type: NNGRRT; PAM sequence: TGGGAT
  source 1..20: mol_type = other DNA
gccttagcctctcaagtagc

SEQ ID NO: 5778 - DNA, 20 bp, synthetic construct
  misc_feature 1..20: note = Description of Artificial Sequence: Synthetic oligonucleotide
  misc_feature 1..20: note = Target: ANGPTL4; (-) strand; PAM type: NNGRRT; PAM sequence: CCGAGT
  source 1..20: mol_type = other DNA
ctcactgcaccctctgcctc

SEQ ID NO: 5779 - DNA, 20 bp, synthetic construct
  misc_feature 1..20: note = Description of Artificial Sequence: Synthetic oligonucleotide
  misc_feature 1..20: note = Target: ANGPTL4; (-) strand; PAM type: NNGRRT; PAM sequence: TGGAGT
  source 1..20: mol_type = other DNA
tctcactctgttgcccaggc

SEQ ID NO: 5780 - DNA, 20 bp, synthetic construct
  misc_feature 1..20: note = Description of Artificial Sequence: Synthetic oligonucleotide
  misc_feature 1..20: note = Target: ANGPTL4; (-) strand; PAM type: NNGRRT; PAM sequence: CAGGGT
  source 1..20: mol_type = other DNA
ctttttttttttttttgagg

SEQ ID NO: 5781 - DNA, 20 bp, synthetic construct
  misc_feature 1..20: note = Description of Artificial Sequence: Synthetic oligonucleotide
  misc_feature 1..20: note = Target: ANGPTL4; (-) strand; PAM type: NNGRRT; PAM sequence: CAGAGT
  source 1..20: mol_type = other DNA
tacaatcctttagctagaca

SEQ ID NO: 5782 - DNA, 20 bp, synthetic construct
  misc_feature 1..20: note = Description of Artificial Sequence: Synthetic oligonucleotide
  misc_feature 1..20: note = Target: ANGPTL4; (-) strand; PAM type: NNGRRT; PAM sequence: CAGAGT
  source 1..20: mol_type = other DNA
tacaaacctttagctagaca

SEQ ID NO: 5783 - DNA, 20 bp, synthetic construct
  misc_feature 1..20: note = Description of Artificial Sequence: Synthetic oligonucleotide
  misc_feature 1..20: note = Target: ANGPTL4; (+) strand; PAM type: NNGRRT; PAM sequence: TGGAGT
  source 1..20: mol_type = other DNA
tcttgctctgtcacccaagc

SEQ ID NO: 5784 - DNA, 20 bp, synthetic construct
  misc_feature 1..20: note = Description of Artificial Sequence: Synthetic oligonucleotide
  misc_feature 1..20: note = Target: ANGPTL4; (+) strand; PAM type: NNGRRT; PAM sequence: CTGGGT
  source 1..20: mol_type = other DNA
cttactgcagcctccacctc

SEQ ID NO: 5785 - DNA, 20 bp, synthetic construct
  misc_feature 1..20: note = Description of Artificial Sequence: Synthetic oligonucleotide
  misc_feature 1..20: note = Target: ANGPTL4; (+) strand; PAM type: NNGRRT; PAM sequence: GCGAAT
  source 1..20: mol_type = other DNA
cctccacctcctgggttcaa

SEQ ID NO: 5786 - DNA, 20 bp, synthetic construct
  misc_feature 1..20: note = Description of Artificial Sequence: Synthetic oligonucleotide
  misc_feature 1..20: note = Target: ANGPTL4; (+) strand; PAM type: NNGRRT; PAM sequence: TGGGGT
  source 1..20: mol_type = other DNA
ttctgtatttttagtagaga

SEQ ID NO: 5787 - DNA, 20 bp, synthetic construct
  misc_feature 1..20: note = Description of Artificial Sequence: Synthetic oligonucleotide
  misc_feature 1..20: note = Target: ANGPTL4; (+) strand; PAM type: NNGRRT; PAM sequence: TAGGAT
  source 1..20: mol_type = other DNA
acctcagcctcccaaagtgc

SEQ ID NO: 5788 - DNA, 20 bp, synthetic construct
  misc_feature 1..20: note = Description of Artificial Sequence: Synthetic oligonucleotide
  misc_feature 1..20: note = Target: ANGPTL4; (+) strand; PAM type: NNGRRT; PAM sequence: CAGAGT
  source 1..20: mol_type = other DNA
atttttttttttttttgaga

SEQ ID NO: 5789 - DNA, 20 bp, synthetic construct
  misc_feature 1..20: note = Description of Artificial Sequence: Synthetic oligonucleotide
  misc_feature 1..20: note = Target: ANGPTL4; (+) strand; PAM type: NNGRRT; PAM sequence: TGGAGT
  source 1..20: mol_type = other DNA
tctcgccctgttgcccaggc

SEQ ID NO: 5790 - DNA, 20 bp, synthetic construct
  misc_feature 1..20: note = Description of Artificial Sequence: Synthetic oligonucleotide
  misc_feature 1..20: note = Target: ANGPTL4; (+) strand; PAM type: NNGRRT; PAM sequence: CCGGGT
  source 1..20: mol_type = other DNA
cttactgcaccctctgcctc

SEQ ID NO: 5791 - DNA, 20 bp, synthetic construct
  misc_feature 1..20: note = Description of Artificial Sequence: Synthetic oligonucleotide
  misc_feature 1..20: note = Target: ANGPTL4; (+) strand; PAM type: NNGRRT; PAM sequence: CCGAGT
  source 1..20: mol_type = other DNA
gattctcctgccccagcctc

SEQ ID NO: 5792 - DNA, 20 bp, synthetic construct
  misc_feature 1..20: note = Description of Artificial Sequence: Synthetic oligonucleotide
  misc_feature 1..20: note = Target: ANGPTL4; (+) strand; PAM type: NNGRRT; PAM sequence: TGGGAT
  source 1..20: mol_type = other DNA
gccccagcctcccgagtaac

SEQ ID NO: 5793 - DNA, 20 bp, synthetic construct
  misc_feature 1..20: note = Description of Artificial Sequence: Synthetic oligonucleotide
  misc_feature 1..20: note = Target: ANGPTL4; (+) strand; PAM type: NNGRRT; PAM sequence: CCGGGT
  source 1..20: mol_type = other DNA
ttttacatttttagtagaga

SEQ ID NO: 5794 - DNA, 20 bp, synthetic construct
  misc_feature 1..20: note = Description of Artificial Sequence: Synthetic oligonucleotide
  misc_feature 1..20: note = Target: ANGPTL4; (+) strand; PAM type: NNGRRT; PAM sequence: CAGGGT
  source 1..20: mol_type = other DNA
ttttaaattttttgtacaga

SEQ ID NO: 5795 - DNA, 20 bp, synthetic construct
  misc_feature 1..20: note = Description of Artificial Sequence: Synthetic oligonucleotide
  misc_feature 1..20: note = Target: ANGPTL4; (+) strand; PAM type: NNGRRT; PAM sequence: TGGGAT
  source 1..20: mol_type = other DNA
accttggcctcccaaagtac

SEQ ID NO: 5796 - DNA, 20 bp, synthetic construct
  misc_feature 1..20: note = Description of Artificial Sequence: Synthetic oligonucleotide
  misc_feature 1..20: note = Target: ANGPTL4; (+) strand; PAM type: NNGRRT; PAM sequence: GCGGAT
  source 1..20: mol_type = other DNA
actttgggaggccgaggtag

SEQ ID NO: 5797 - DNA, 20 bp, synthetic construct
  misc_feature 1..20: note = Description of Artificial Sequence: Synthetic oligonucleotide
  misc_feature 1..20: note = Target: ANGPTL4; (+) strand; PAM type: NNGRRT; PAM sequence: AGGAGT
  source 1..20: mol_type = other DNA
taggcggatcacctgaggtc

SEQ ID NO: 5798 - DNA, 20 bp, synthetic construct
  misc_feature 1..20: note = Description of Artificial Sequence: Synthetic oligonucleotide
  misc_feature 1..20: note = Target: ANGPTL4; (+) strand; PAM type: NNGRRT; PAM sequence: GAGAAT
  source 1..20: mol_type = other DNA
tactcgggaggctgaggcag

SEQ ID NO: 5799 - DNA, 20 bp, synthetic construct
  misc_feature 1..20: note = Description of Artificial Sequence: Synthetic oligonucleotide
  misc_feature 1..20: note = Target: ANGPTL4; (+) strand; PAM type: NNGRRT; PAM sequence: TGGGAT
  source 1..20: mol_type = other DNA
ggccaaagtagcccacgcgt

SEQ ID NO: 5800 - DNA, 20 bp, synthetic construct
  misc_feature 1..20: note = Description of Artificial Sequence: Synthetic oligonucleotide
  misc_feature 1..20: note = Target: ANGPTL4; (+) strand; PAM type: NNGRRT; PAM sequence: CAGGAT
  source 1..20: mol_type = other DNA
gtgctccaggaacaattgat

SEQ ID NO: 5801 - DNA, 20 bp, synthetic construct
  misc_feature 1..20: note = Description of Artificial Sequence: Synthetic oligonucleotide
  misc_feature 1..20: note = Target: ANGPTL4; (+) strand; PAM type: NNGRRT; PAM sequence: CTGGGT
  source 1..20: mol_type = other DNA
tcaggatgactttgtctttg

SEQ ID NO: 5802 - DNA, 20 bp, synthetic construct
  misc_feature 1..20: note = Description of Artificial Sequence: Synthetic oligonucleotide
  misc_feature 1..20: note = Target: ANGPTL4; (+) strand; PAM type: NNGRRT; PAM sequence: GCGAGT
  source 1..20: mol_type = other DNA
cagcactttgggaggccgag

SEQ ID NO: 5803 - DNA, 20 bp, synthetic construct
  misc_feature 1..20: note = Description of Artificial Sequence: Synthetic oligonucleotide
  misc_feature 1..20: note = Target: ANGPTL4; (+) strand; PAM type: NNGRRT; PAM sequence: GTGAAT
  source 1..20: mol_type = other DNA
actttgggaggccgaggcga

SEQ ID NO: 5804 - DNA, 20 bp, synthetic construct
  misc_feature 1..20: note = Description of Artificial Sequence: Synthetic oligonucleotide
  misc_feature 1..20: note = Target: ANGPTL4; (+) strand; PAM type: NNGRRT; PAM sequence: AGGAGT
  source 1..20: mol_type = other DNA
cgagtgaatcccttgagctc

SEQ ID NO: 5805 - DNA, 20 bp, synthetic construct
  misc_feature 1..20: note = Description of Artificial Sequence: Synthetic oligonucleotide
  misc_feature 1..20: note = Target: ANGPTL4; (+) strand; PAM type: NNGRRT; PAM sequence: GAGGAT
  source 1..20: mol_type = other DNA
tgcttgggaggctgaggtgg

SEQ ID NO: 5806 - DNA, 20 bp, synthetic construct
  misc_feature 1..20: note = Description of Artificial Sequence: Synthetic oligonucleotide
  misc_feature 1..20: note = Target: ANGPTL4; (+) strand; PAM type: NNGRRT; PAM sequence: GGGAGT
  source 1..20: mol_type = other DNA
tgggaggatcacttgagcct

SEQ ID NO: 5807 - DNA, 20 bp, synthetic construct
  misc_feature 1..20: note = Description of Artificial Sequence: Synthetic oligonucleotide
  misc_feature 1..20: note = Target: ANGPTL4; (+) strand; PAM type: NNGRRT; PAM sequence: CTGGGT
  source 1..20: mol_type = other DNA
ttgtgacactgcactccagc

SEQ ID NO: 5808 - DNA, 20 bp, synthetic construct
  misc_feature 1..20: note = Description of Artificial Sequence: Synthetic oligonucleotide
  misc_feature 1..20: note = Target: ANGPTL4; (+) strand; PAM type: NNGRRT; PAM sequence: GTGAGT
  source 1..20: mol_type = other DNA
gacactgcactccagcctgg

SEQ ID NO: 5809 - DNA, 20 bp, synthetic construct
  misc_feature 1..20: note = Description of Artificial Sequence: Synthetic oligonucleotide
  misc_feature 1..20: note = Target: ANGPTL4; (+) strand; PAM type: NNGRRT; PAM sequence: GTGGAT
  source 1..20: mol_type = other DNA
cactttgggaggctgaggtg

SEQ ID NO: 5810 - DNA, 20 bp, synthetic construct
  misc_feature 1..20: note = Description of Artificial Sequence: Synthetic oligonucleotide
  misc_feature 1..20: note = Target: ANGPTL4; (+) strand; PAM type: NNGRRT; PAM sequence: AGGAGT
  source 1..20: mol_type = other DNA
gtggtggatagcctaagctt

SEQ ID NO: 5811 - DNA, 20 bp, synthetic construct
  misc_feature 1..20: note = Description of Artificial Sequence: Synthetic oligonucleotide
  misc_feature 1..20: note = Target: ANGPTL4; (+) strand; PAM type: NNGRRT; PAM sequence: TAGAAT
  source 1..20: mol_type = other DNA
cgaaaccccaccccctctac

SEQ ID NO: 5812 - DNA, 20 bp, synthetic construct
  misc_feature 1..20: note = Description of Artificial Sequence: Synthetic oligonucleotide
  misc_feature 1..20: note = Target: ANGPTL4; (+) strand; PAM type: NNGRRT; PAM sequence: GAGAAT
  source 1..20: mol_type = other DNA
tactcaggaggctgaggcag

SEQ ID NO: 5813 - DNA, 20 bp, synthetic construct
  misc_feature 1..20: note = Description of Artificial Sequence: Synthetic oligonucleotide
  misc_feature 1..20: note = Target: ANGPTL4; (+) strand; PAM type: NNGRRT; PAM sequence: GTGGAT
  source 1..20: mol_type = other DNA
acgttgggaggccgagacag

SEQ ID NO: 5814 - DNA, 20 bp, synthetic construct
  misc_feature 1..20: note = Description of Artificial Sequence: Synthetic oligonucleotide
  misc_feature 1..20: note = Target: ANGPTL4; (+) strand; PAM type: NNGRRT; PAM sequence: AGGAAT
  source 1..20: mol_type = other DNA
caggtggatcacctgaggtc

SEQ ID NO: 5815 - DNA, 20 bp, synthetic construct
  misc_feature 1..20: note = Description of Artificial Sequence: Synthetic oligonucleotide
  misc_feature 1..20: note = Target: ANGPTL4; (+) strand; PAM type: NNGRRT; PAM sequence: GAGAAT
  source 1..20: mol_type = other DNA
tactcgggaggctgaggctg

SEQ ID NO: 5816 - DNA, 20 bp, synthetic construct
  misc_feature 1..20: note = Description of Artificial Sequence: Synthetic oligonucleotide
  misc_feature 1..20: note = Target: ANGPTL4; (+) strand; PAM type: NNGRRT; PAM sequence: GCGGAT
  source 1..20: mol_type = other DNA
actttgggaggccgaagcgg

SEQ ID NO: 5817 - DNA, 20 bp, synthetic construct
  misc_feature 1..20: note = Description of Artificial Sequence: Synthetic oligonucleotide
  misc_feature 1..20: note = Target: ANGPTL4; (+) strand; PAM type: NNGRRT; PAM sequence: GAGAAT
  source 1..20: mol_type = other DNA
tactcgggaggctgaggcag

SEQ ID NO: 5818 - DNA, 20 bp, synthetic construct
  misc_feature 1..20: note = Description of Artificial Sequence: Synthetic oligonucleotide
  misc_feature 1..20: note = Target: ANGPTL4; (+) strand; PAM type: NNGRRT; PAM sequence: TAGAAT
  source 1..20: mol_type = other DNA
aaaaaataaagagcagtttt

SEQ ID NO: 5819 - DNA, 20 bp, synthetic construct
  misc_feature 1..20: note = Description of Artificial Sequence: Synthetic oligonucleotide
  misc_feature 1..20: note = Target: ANGPTL4; (+) strand; PAM type: NNGRRT; PAM sequence: CTGGGT
  source 1..20: mol_type = other DNA
cagcaggtgcccttaagacc

SEQ ID NO: 5820 - DNA, 20 bp, synthetic construct
  misc_feature 1..20: note = Description of Artificial Sequence: Synthetic oligonucleotide
  misc_feature 1..20: note = Target: ANGPTL4; (+) strand; PAM type: NNGRRT; PAM sequence: TGGGAT
  source 1..20: mol_type = other DNA
aagaggaggagcttgcattc

SEQ ID NO: 5821 - DNA, 20 bp, synthetic construct
  misc_feature 1..20: note = Description of Artificial Sequence: Synthetic oligonucleotide
  misc_feature 1..20: note = Target: ANGPTL4; (+) strand; PAM type: NNGRRT; PAM sequence: TGGGAT
  source 1..20: mol_type = other DNA
gcttgcattctgggatagcc

SEQ ID NO: 5822 - DNA, 20 bp, synthetic construct
  misc_feature 1..20: note = Description of Artificial Sequence: Synthetic oligonucleotide
  misc_feature 1..20: note = Target: ANGPTL4; (+) strand; PAM type: NNGRRT; PAM sequence: GGGGGT
  source 1..20: mol_type = other DNA
cagagagaggctgggggctt

SEQ ID NO: 5823 - DNA, 20 bp, synthetic construct
  misc_feature 1..20: note = Description of Artificial Sequence: Synthetic oligonucleotide
  misc_feature 1..20: note = Target: ANGPTL4; (+) strand; PAM type: NNGRRT; PAM sequence: TGGGGT
  source 1..20: mol_type = other DNA
catctgaacctactcctcac

SEQ ID NO: 5824 - DNA, 20 bp, synthetic construct
  misc_feature 1..20: note = Description of Artificial Sequence: Synthetic oligonucleotide
  misc_feature 1..20: note = Target: ANGPTL4; (+) strand; PAM type: NNGRRT; PAM sequence: AGGGAT
  source 1..20: mol_type = other DNA
tcctgtccactgctgctggg

SEQ ID NO: 5825 - DNA, 20 bp, synthetic construct
  misc_feature 1..20: note = Description of Artificial Sequence: Synthetic oligonucleotide
  misc_feature 1..20: note = Target: ANGPTL4; (+) strand; PAM type: NNGRRT; PAM sequence: ATGAGT
  source 1..20: mol_type = other DNA
cagctgacggggccaagtgt

SEQ ID NO: 5826 - DNA, 20 bp, synthetic construct
  misc_feature 1..20: note = Description of Artificial Sequence: Synthetic oligonucleotide
  misc_feature 1..20: note = Target: ANGPTL4; (+) strand; PAM type: NNGRRT; PAM sequence: TTGGGT
  source 1..20: mol_type = other DNA
ggcagcctgcacgtcagccc

SEQ ID NO: 5827 - DNA, 20 bp, synthetic construct
  misc_feature 1..20: note = Description of Artificial Sequence: Synthetic oligonucleotide
  misc_feature 1..20: note = Target: ANGPTL4; (+) strand; PAM type: NNGRRT; PAM sequence: GAGAAT
  source 1..20: mol_type = other DNA
gtgtgcagtttcagattcca

SEQ ID NO: 5828 - DNA, 20 bp, synthetic construct
  misc_feature 1..20: note = Description of Artificial Sequence: Synthetic oligonucleotide
  misc_feature 1..20: note = Target: ANGPTL4; (+) strand; PAM type: NNGRRT; PAM sequence: CTGAGT
  source 1..20: mol_type = other DNA
tgagctggcttggagccctg

SEQ ID NO: 5829 - DNA, 20 bp, synthetic construct
  misc_feature 1..20: note = Description of Artificial Sequence: Synthetic oligonucleotide
  misc_feature 1..20: note = Target: ANGPTL4; (+) strand; PAM type: NNGRRT; PAM sequence: CCGAGT
  source 1..20: mol_type = other DNA
gtgctctgagccaacctgcc

SEQ ID NO: 5830 - DNA, 20 bp, synthetic construct
  misc_feature 1..20: note = Description of Artificial Sequence: Synthetic oligonucleotide
  misc_feature 1..20: note = Target: ANGPTL4; (+) strand; PAM type: NNGRRT; PAM sequence: CAGGGT
  source 1..20: mol_type = other DNA
tgccagcctccccttcctga

SEQ ID NO: 5831 - DNA, 20 bp, synthetic construct
  misc_feature 1..20: note = Description of Artificial Sequence: Synthetic oligonucleotide
  misc_feature 1..20: note = Target: ANGPTL4; (+) strand; PAM type: NNGRRT; PAM sequence: GGGAAT
  source 1..20: mol_type = other DNA
cccttcctgacagggtatag

SEQ ID NO: 5832 - DNA, 20 bp, synthetic construct
  misc_feature 1..20: note = Description of Artificial Sequence: Synthetic oligonucleotide
  misc_feature 1..20: note = Target: ANGPTL4; (+) strand; PAM type: NNGRRT; PAM sequence: ATGGGT
  source 1..20: mol_type = other DNA
tcctgacagggtatagggga

SEQ ID NO: 5833 - DNA, 20 bp, synthetic construct
  misc_feature 1..20: note = Description of Artificial Sequence: Synthetic oligonucleotide
  misc_feature 1..20: note = Target: ANGPTL4; (+) strand; PAM type: NNGRRT; PAM sequence: TTGAAT
  source 1..20: mol_type = other DNA
cagaggagatcggtgcaagt

SEQ ID NO: 5834 - DNA, 20 bp, synthetic construct
  misc_feature 1..20: note = Description of Artificial Sequence: Synthetic oligonucleotide
  misc_feature 1..20: note = Target: ANGPTL4; (+) strand; PAM type: NNGRRT; PAM sequence: TGGAAT
  source 1..20: mol_type = other DNA
tgaatgaacacttagccctg

SEQ ID NO: 5835 - DNA, 20 bp, synthetic construct
  misc_feature 1..20: note = Description of Artificial Sequence: Synthetic oligonucleotide
  misc_feature 1..20: note = Target: ANGPTL4; (+) strand; PAM type: NNGRRT; PAM sequence: ATGAAT
  source 1..20: mol_type = other DNA
tgaacacttagccctgtgga

SEQ ID NO: 5836 - DNA, 20 bp, synthetic construct
  misc_feature 1..20: note = Description of Artificial Sequence: Synthetic oligonucleotide
  misc_feature 1..20: note = Target: ANGPTL4; (+) strand; PAM type: NNGRRT; PAM sequence: CAGAAT
  source 1..20: mol_type = other DNA
ctctatccctaccccaggct

SEQ ID NO: 5837 - DNA, 20 bp, synthetic construct
  misc_feature 1..20: note = Description of Artificial Sequence: Synthetic oligonucleotide
  misc_feature 1..20: note = Target: ANGPTL4; (+) strand; PAM type: NNGRRT; PAM sequence: TGGGGT
  source 1..20: mol_type = other DNA
ctaccccaggctcagaatgt

SEQ ID NO: 5838 - DNA, 20 bp, synthetic construct
  misc_feature 1..20: note = Description of Artificial Sequence: Synthetic oligonucleotide
  misc_feature 1..20: note = Target: ANGPTL4; (+) strand; PAM type: NNGRRT; PAM sequence: ATGAGT
  source 1..20: mol_type = other DNA
gcagcaccttcgttcagtgc

SEQ ID NO: 5839 - DNA, 20 bp, synthetic construct
  misc_feature 1..20: note = Description of Artificial Sequence: Synthetic oligonucleotide
  misc_feature 1..20: note = Target: ANGPTL4; (+) strand; PAM type: NNGRRT; PAM sequence: GTGAAT
  source 1..20: mol_type = other DNA
caccttcgttcagtgcatga

SEQ ID NO: 5840 - DNA, 20 bp, synthetic construct
  misc_feature 1..20: note = Description of Artificial Sequence: Synthetic oligonucleotide
  misc_feature 1..20: note = Target: ANGPTL4; (+) strand; PAM type: NNGRRT; PAM sequence: ATGAAT
  source 1..20: mol_type = other DNA
ttcgttcagtgcatgagtga

SEQ ID NO: 5841 - DNA, 20 bp, synthetic construct
  misc_feature 1..20: note = Description of Artificial Sequence: Synthetic oligonucleotide
  misc_feature 1..20: note = Target: ANGPTL4; (+) strand; PAM type: NNGRRT; PAM sequence: ATGAAT
  source 1..20: mol_type = other DNA
ttcagtgcatgagtgaatga

SEQ ID NO: 5842 - DNA, 20 bp, synthetic construct
  misc_feature 1..20: note = Description of Artificial Sequence: Synthetic oligonucleotide
  misc_feature 1..20: note = Target: ANGPTL4; (+) strand; PAM type: NNGRRT; PAM sequence: TGGAGT
  source 1..20: mol_type = other DNA
tctcactctgtcacccaggc

SEQ ID NO: 5843 - DNA, 20 bp, synthetic construct
  misc_feature 1..20: note = Description of Artificial Sequence: Synthetic oligonucleotide
  misc_feature 1..20: note = Target: ANGPTL4; (+) strand; PAM type: NNGRRT; PAM sequence: CTGAGT
  source 1..20: mol_type = other DNA
ctcactgcaacctccgtctc

SEQ ID NO: 5844 - DNA, 20 bp, synthetic construct
  misc_feature 1..20: note = Description of Artificial Sequence: Synthetic oligonucleotide
  misc_feature 1..20: note = Target: ANGPTL4; (+) strand; PAM type: NNGRRT; PAM sequence: CCGAGT
  source 1..20: mol_type = other DNA
gattctcctgacacagtctc

SEQ ID NO: 5845 - DNA, 20 bp, synthetic construct
  misc_feature 1..20: note = Description of Artificial Sequence: Synthetic oligonucleotide
  misc_feature 1..20: note = Target: ANGPTL4; (+) strand; PAM type: NNGRRT; PAM sequence: TGGGAT
  source 1..20: mol_type = other DNA
cacccggcctcccaaagtgc

SEQ ID NO: 5846 - DNA, 20 bp, synthetic construct
  misc_feature 1..20: note = Description of Artificial Sequence: Synthetic oligonucleotide
  misc_feature 1..20: note = Target: ANGPTL4; (+) strand; PAM type: NNGRRT; PAM sequence: CAGGAT
  source 1..20: mol_type = other DNA
ttttatttcttttttagaga

SEQ ID NO: 5847 - DNA, 20 bp, synthetic construct
  misc_feature 1..20: note = Description of Artificial Sequence: Synthetic oligonucleotide
  misc_feature 1..20: note = Target: ANGPTL4; (+) strand; PAM type: NNGRRT; PAM sequence: TGGAGT
  source 1..20: mol_type = other DNA
tctcactctgttgcccaggc

SEQ ID NO: 5848 - DNA, 20 bp, synthetic construct
  misc_feature 1..20: note = Description of Artificial Sequence: Synthetic oligonucleotide
  misc_feature 1..20: note = Target: ANGPTL4; (+) strand; PAM type: NNGRRT; PAM sequence: GAGGGT
  source 1..20: mol_type = other DNA
cattaaagaccctggcggta

SEQ ID NO: 5849 - DNA, 20 bp, synthetic construct
  misc_feature 1..20: note = Description of Artificial Sequence: Synthetic oligonucleotide
  misc_feature 1..20: note = Target: ANGPTL4; (+) strand; PAM type: NNGRRT; PAM sequence: GGGGGT
  source 1..20: mol_type = other DNA
ggcggtagagggtaggctat

SEQ ID NO: 5850 - DNA, 20 bp, synthetic construct
  misc_feature 1..20: note = Description of Artificial Sequence: Synthetic oligonucleotide
  misc_feature 1..20: note = Target: ANGPTL4; (+) strand; PAM type: NNGRRT; PAM sequence: AAGAAT
  source 1..20: mol_type = other DNA
caggggagaaatggaagtca

SEQ ID NO: 5851 - DNA, 20 bp, synthetic construct
  misc_feature 1..20: note = Description of Artificial Sequence: Synthetic oligonucleotide
  misc_feature 1..20: note = Target: ANGPTL4; (+) strand; PAM type: NNGRRT; PAM sequence: TGGGAT
  source 1..20: mol_type = other DNA
agaaaagtctctcctggtct

SEQ ID NO: 5852 - DNA, 20 bp, synthetic construct
  misc_feature 1..20: note = Description of Artificial Sequence: Synthetic oligonucleotide
  misc_feature 1..20: note = Target: ANGPTL4; (+) strand; PAM type: NNGRRT; PAM sequence: GTGAGT
  source 1..20: mol_type = other DNA
ccgcaaggcaaggacttttg

SEQ ID NO: 5853 - DNA, 20 bp, synthetic construct
  misc_feature 1..20: note = Description of Artificial Sequence: Synthetic oligonucleotide
  misc_feature 1..20: note = Target: ANGPTL4; (+) strand; PAM type: NNGRRT; PAM sequence: CCGGGT
  source 1..20: mol_type = other DNA
cgcactgcaacctccacctc

SEQ ID NO: 5854 - DNA, 20 bp, synthetic construct
  misc_feature 1..20: note = Description of Artificial Sequence: Synthetic oligonucleotide
  misc_feature 1..20: note = Target: ANGPTL4; (+) strand; PAM type: NNGRRT; PAM sequence: CCGAGT
  source 1..20: mol_type = other DNA
gattctactgcctcagcctc

SEQ ID NO: 5855 - DNA, 20 bp, synthetic construct
  misc_feature 1..20: note = Description of Artificial Sequence: Synthetic oligonucleotide
  misc_feature 1..20: note = Target: ANGPTL4; (+) strand; PAM type: NNGRRT; PAM sequence: CTGGGT
  source 1..20: mol_type = other DNA
ttttgtatttttagtagaga

SEQ ID NO: 5856 - DNA, 20 bp, synthetic construct
  misc_feature 1..20: note = Description of Artificial Sequence: Synthetic oligonucleotide
  misc_feature 1..20: note = Target: ANGPTL4; (+) strand; PAM type: NNGRRT; PAM sequence: CTGGGT
  source 1..20: mol_type = other DNA
agcgtgcgccctctccgcca

SEQ ID NO: 5857 - DNA, 20 bp, synthetic construct
  misc_feature 1..20: note = Description of Artificial Sequence: Synthetic oligonucleotide
  misc_feature 1..20: note = Target: ANGPTL4; (+) strand; PAM type: NNGRRT; PAM sequence: CGGAAT
  source 1..20: mol_type = other DNA
gccactgggtaaggcggggg

SEQ ID NO: 5858 - DNA, 20 bp, synthetic construct
  misc_feature 1..20: note = Description of Artificial Sequence: Synthetic oligonucleotide
  misc_feature 1..20: note = Target: ANGPTL4; (+) strand; PAM type: NNGRRT; PAM sequence: AAGAGT
  source 1..20: mol_type = other DNA
gcgggcaccgtgggggaaag

SEQ ID NO: 5859 - DNA, 20 bp, synthetic construct
  misc_feature 1..20: note = Description of Artificial Sequence: Synthetic oligonucleotide
  misc_feature 1..20: note = Target: ANGPTL4; (+) strand; PAM type: NNGRRT; PAM sequence: GCGGAT
  source 1..20: mol_type = other DNA
gcggggagaagccgagctga

SEQ ID NO: 5860 - DNA, 20 bp, synthetic construct
  misc_feature 1..20: note = Description of Artificial Sequence: Synthetic oligonucleotide
  misc_feature 1..20: note = Target: ANGPTL4; (+) strand; PAM type: NNGRRT; PAM sequence: GCGGGT
  source 1..20: mol_type = other DNA
ccagcggcttctgcaaccaa

SEQ ID NO: 5861 - DNA, 20 bp, synthetic construct
  misc_feature 1..20: note = Description of Artificial Sequence: Synthetic oligonucleotide
  misc_feature 1..20: note = Target: ANGPTL4; (+) strand; PAM type: NNGRRT; PAM sequence: GAGAGT
  source 1..20: mol_type = other DNA
cctggaaccccaacgtcccc

SEQ ID NO: 5862 - DNA, 20 bp, synthetic construct
  misc_feature 1..20: note = Description of Artificial Sequence: Synthetic oligonucleotide
  misc_feature 1..20: note = Target: ANGPTL4; (+) strand; PAM type: NNGRRT; PAM sequence: CCGAAT
  source 1..20: mol_type = other DNA
cccaacgtccccgagagtcc

SEQ ID NO: 5863 - DNA, 20 bp, synthetic construct
  misc_feature 1..20: note = Description of Artificial Sequence: Synthetic oligonucleotide
  misc_feature 1..20: note = Target: ANGPTL4; (+) strand; PAM type: NNGRRT; PAM sequence: GAGGAT
  source 1..20: mol_type = other DNA
cccgctcccaggctacctaa

SEQ ID NO: 5864 - DNA, 20 bp, synthetic construct
  misc_feature 1..20: note = Description of Artificial Sequence: Synthetic oligonucleotide
  misc_feature 1..20: note = Target: ANGPTL4; (+) strand; PAM type: NNGRRT; PAM sequence: ATGAAT
  source 1..20: mol_type = other DNA
gctttgcgtcctgggacgag

SEQ ID NO: 5865 - DNA, 20 bp, synthetic construct
  misc_feature 1..20: note = Description of Artificial Sequence: Synthetic oligonucleotide
  misc_feature 1..20: note = Target: ANGPTL4; (+) strand; PAM type: NNGRRT; PAM sequence: GCGGGT
  source 1..20: mol_type = other DNA
ggagcggcgcctgagcgcgt

SEQ ID NO: 5866 - DNA, 20 bp, synthetic construct
  misc_feature 1..20: note = Description of Artificial Sequence: Synthetic oligonucleotide
  misc_feature 1..20: note = Target: ANGPTL4; (+) strand; PAM type: NNGRRT; PAM sequence: AGGGGT
  source 1..20: mol_type = other DNA
gtccgcctgtcagggaaccg

SEQ ID NO: 5867 - DNA, 20 bp, synthetic construct
  misc_feature 1..20: note = Description of Artificial Sequence: Synthetic oligonucleotide
  misc_feature 1..20: note = Target: ANGPTL4; (+) strand; PAM type: NNGRRT; PAM sequence: CCGGGT
  source 1..20: mol_type = other DNA
ctcccgttagcccctgagag

SEQ ID NO: 5868 - DNA, 20 bp, synthetic construct
  misc_feature 1..20: note = Description of Artificial Sequence: Synthetic oligonucleotide
  misc_feature 1..20: note = Target: ANGPTL4; (+) strand; PAM type: NNGRRT; PAM sequence: AAGGGT
  source 1..20: mol_type = other DNA
tagtggctctcctggcttgg

SEQ ID NO: 5869 - DNA, 20 bp, synthetic construct
  misc_feature 1..20: note = Description of Artificial Sequence: Synthetic oligonucleotide
  misc_feature 1..20: note = Target: ANGPTL4; (+) strand; PAM type: NNGRRT; PAM sequence: AGGAGT
  source 1..20: mol_type = other DNA
tggcttggaagggtatggac

SEQ ID NO: 5870 - DNA, 20 bp, synthetic construct
  misc_feature 1..20: note = Description of Artificial Sequence: Synthetic oligonucleotide
  misc_feature 1..20: note = Target: ANGPTL4; (+) strand; PAM type: NNGRRT; PAM sequence: CGGGGT
  source 1..20: mol_type = other DNA
acaggagtggggcgtggggg

SEQ ID NO: 5871 - DNA, 20 bp, synthetic construct
  misc_feature 1..20: note = Description of Artificial Sequence: Synthetic oligonucleotide
  misc_feature 1..20: note = Target: ANGPTL4; (+) strand; PAM type: NNGRRT; PAM sequence: AGGGAT
  source 1..20: mol_type = other DNA
ccctgggcttccctgcgtca

SEQ ID NO: 5872 - DNA, 20 bp, synthetic construct
  misc_feature 1..20: note = Description of Artificial Sequence: Synthetic oligonucleotide
  misc_feature 1..20: note = Target: ANGPTL4; (+) strand; PAM type: NNGRRT; PAM sequence: AGGAAT
  source 1..20: mol_type = other DNA
agggaggttcgctcaaggcc

SEQ ID NO: 5873 - DNA, 20 bp, synthetic construct
  misc_feature 1..20: note = Description of Artificial Sequence: Synthetic oligonucleotide
  misc_feature 1..20: note = Target: ANGPTL4; (+) strand; PAM type: NNGRRT; PAM sequence: GAGAAT
  source 1..20: mol_type = other DNA
tacttgggaggctgaggcag

SEQ ID NO: 5874 - DNA, 20 bp, synthetic construct
  misc_feature 1..20: note = Description of Artificial Sequence: Synthetic oligonucleotide
  misc_feature 1..20: note = Target: ANGPTL4; (+) strand; PAM type: NNGRRT; PAM sequence: CAGAGT
  source 1..20: mol_type = other DNA
ctgcactccagcctgggcaa

SEQ ID NO: 5875 - DNA, 20 bp, synthetic construct
  misc_feature 1..20: note = Description of Artificial Sequence: Synthetic oligonucleotide
  misc_feature 1..20: note = Target: ANGPTL4; (+) strand; PAM type: NNGRRT; PAM sequence: GTGGAT
  source 1..20: mol_type = other DNA
actttgggagggcgaggcca

SEQ ID NO: 5876 - DNA, 20 bp, synthetic construct
  misc_feature 1..20: note = Description of Artificial Sequence: Synthetic oligonucleotide
  misc_feature 1..20: note = Target: ANGPTL4; (+) strand; PAM type: NNGRRT; PAM sequence: AGGAGT
  source 1..20: mol_type = other DNA
ccagtggatcacctgaggtc

SEQ ID NO: 5877 - DNA, 20 bp, synthetic construct
  misc_feature 1..20: note = Description of Artificial Sequence: Synthetic oligonucleotide
  misc_feature 1..20: note = Target: ANGPTL4; (+) strand; PAM type: NNGRRT; PAM sequence: CTGGGT
  source 1..20: mol_type = other DNA
actaaaaatacaaaaattag

SEQ ID NO: 5878 - DNA, 20 bp, synthetic construct
  misc_feature 1..20: note = Description of Artificial Sequence: Synthetic oligonucleotide
  misc_feature 1..20: note = Target: ANGPTL4; (+) strand; PAM type: NNGRRT; PAM sequence: CGGGAT
  source 1..20: mol_type = other DNA
aggcggaggttgcagtgagc

SEQ ID NO: 5879 - DNA, 20 bp, synthetic construct
  misc_feature 1..20: note = Description of Artificial Sequence: Synthetic oligonucleotide
  misc_feature 1..20: note = Target: ANGPTL4; (+) strand; PAM type: NNGRRT; PAM sequence: AAGAAT
  source 1..20: mol_type = other DNA
tacttgggaggctgagacac

SEQ ID NO: 5880 - DNA, 20 bp, synthetic construct
  misc_feature 1..20: note = Description of Artificial Sequence: Synthetic oligonucleotide
  misc_feature 1..20: note = Target: ANGPTL4; (+) strand; PAM type: NNGRRT; PAM sequence: TTGAGT
  source 1..20: mol_type = other DNA
ggctgagacacaagaatcac

SEQ ID NO: 5881 - DNA, 20 bp, synthetic construct
  misc_feature 1..20: note = Description of Artificial Sequence: Synthetic oligonucleotide
  misc_feature 1..20: note = Target: ANGPTL4; (+) strand; PAM type: NNGRRT; PAM sequence: CTGGGT
  source 1..20: mol_type = other DNA
ttgcgccactgcactccaac

SEQ ID NO: 5882 - DNA, 20 bp, synthetic construct
  misc_feature 1..20: note = Description of Artificial Sequence: Synthetic oligonucleotide
  misc_feature 1..20: note = Target: ANGPTL4; (+) strand; PAM type: NNGRRT; PAM sequence: GAGGAT
  source 1..20: mol_type = other DNA
acacaggaggctgaaaacag

SEQ ID NO: 5883 - DNA, 20 bp, synthetic construct
  misc_feature 1..20: note = Description of Artificial Sequence: Synthetic oligonucleotide
  misc_feature 1..20: note = Target: ANGPTL4; (+) strand; PAM type: NNGRRT; PAM sequence: AGGAGT
  source 1..20: mol_type = other DNA
caggaggatcgcctgacccc

SEQ ID NO: 5884 - DNA, 20 bp, synthetic construct
  misc_feature 1..20: note = Description of Artificial Sequence: Synthetic oligonucleotide
  misc_feature 1..20: note = Target: ANGPTL4; (+) strand; PAM type: NNGRRT; PAM sequence: GCGGAT
  source 1..20: mol_type = other DNA
gactcccttgcctggcctca

SEQ ID NO: 5885 - DNA, 20 bp, synthetic construct
  misc_feature 1..20: note = Description of Artificial Sequence: Synthetic oligonucleotide
  misc_feature 1..20: note = Target: ANGPTL4; (+) strand; PAM type: NNGRRT; PAM sequence: AAGGAT
  source 1..20: mol_type = other DNA
ctcagcggatggagatttgg

SEQ ID NO: 5886 - DNA, 20 bp, synthetic construct
  misc_feature 1..20: note = Description of Artificial Sequence: Synthetic oligonucleotide
  misc_feature 1..20: note = Target: ANGPTL4; (+) strand; PAM type: NNGRRT; PAM sequence: ATGGAT
  source 1..20: mol_type = other DNA
gcggatggagatttggaagg

SEQ ID NO: 5887 - DNA, 20 bp, synthetic construct
  misc_feature 1..20: note = Description of Artificial Sequence: Synthetic oligonucleotide
  misc_feature 1..20: note = Target: ANGPTL4; (+) strand; PAM type: NNGRRT; PAM sequence: ATGAGT
  source 1..20: mol_type = other DNA
atggagatttggaaggatgg

SEQ ID NO: 5888 - DNA, 20 bp, synthetic construct
  misc_feature 1..20: note = Description of Artificial Sequence: Synthetic oligonucleotide
  misc_feature 1..20: note = Target: ANGPTL4; (+) strand; PAM type: NNGRRT; PAM sequence: GTGGAT
  source 1..20: mol_type = other DNA
agatttggaaggatggatga

SEQ ID NO: 5889 - DNA, 20 bp, synthetic construct
  misc_feature 1..20: note = Description of Artificial Sequence: Synthetic oligonucleotide
  misc_feature 1..20: note = Target: ANGPTL4; (+) strand; PAM type: NNGRRT; PAM sequence: ATGAAT
  source 1..20: mol_type = other DNA
ttggaaggatggatgagtgg

SEQ ID NO: 5890 - DNA, 20 bp, synthetic construct
  misc_feature 1..20: note = Description of Artificial Sequence: Synthetic oligonucleotide
  misc_feature 1..20: note = Target: ANGPTL4; (+) strand; PAM type: NNGRRT; PAM sequence: TGGGGT
  source 1..20: mol_type = other DNA
gagtggatgaattaagaggt

SEQ ID NO: 5891 - DNA, 20 bp, synthetic construct
  misc_feature 1..20: note = Description of Artificial Sequence: Synthetic oligonucleotide
  misc_feature 1..20: note = Target: ANGPTL4; (+) strand; PAM type: NNGRRT; PAM sequence: CTGGGT
  source 1..20: mol_type = other DNA
aagaggttggggtaggcaag

SEQ ID NO: 5892 - DNA, 20 bp, synthetic construct
  misc_feature 1..20: note = Description of Artificial Sequence: Synthetic oligonucleotide
  misc_feature 1..20: note = Target: ANGPTL4; (+) strand; PAM type: NNGRRT; PAM sequence: CAGGAT
  source 1..20: mol_type = other DNA
caactcaaggctcagaacag

SEQ ID NO: 5893 - DNA, 20 bp, synthetic construct
  misc_feature 1..20: note = Description of Artificial Sequence: Synthetic oligonucleotide
  misc_feature 1..20: note = Target: ANGPTL4; (+) strand; PAM type: NNGRRT; PAM sequence: GCGAAT
  source 1..20: mol_type = other DNA
cacctggagaagcagcacct

SEQ ID NO: 5894 - DNA, 20 bp, synthetic construct
  misc_feature 1..20: note = Description of Artificial Sequence: Synthetic oligonucleotide
  misc_feature 1..20: note = Target: ANGPTL4; (+) strand; PAM type: NNGRRT; PAM sequence: TAGGAT
  source 1..20: mol_type = other DNA
tctgcaaagccaggtaaccc

SEQ ID NO: 5895 - DNA, 20 bp, synthetic construct
  misc_feature 1..20: note = Description of Artificial Sequence: Synthetic oligonucleotide
  misc_feature 1..20: note = Target: ANGPTL4; (+) strand; PAM type: NNGRRT; PAM sequence: GTGAGT
  source 1..20: mol_type = other DNA
caatgtcagccgcctgcacc

SEQ ID NO: 5896 - DNA, 20 bp, synthetic construct
  misc_feature 1..20: note = Description of Artificial Sequence: Synthetic oligonucleotide
  misc_feature 1..20: note = Target: ANGPTL4; (+) strand; PAM type: NNGRRT; PAM sequence: TGGAGT
  source 1..20: mol_type = other DNA
aaggagaagatgtcctggcc

SEQ ID NO: 5897 - DNA, 20 bp, synthetic construct
  misc_feature 1..20: note = Description of Artificial Sequence: Synthetic oligonucleotide
  misc_feature 1..20: note = Target: ANGPTL4; (+) strand; PAM type: NNGRRT; PAM sequence: CTGGGT
  source 1..20: mol_type = other DNA
ccctgagggctcaccagtct

SEQ ID NO: 5898 - DNA, 20 bp, synthetic construct
  misc_feature 1..20: note = Description of Artificial Sequence: Synthetic oligonucleotide
  misc_feature 1..20: note = Target: ANGPTL4; (+) strand; PAM type: NNGRRT; PAM sequence: AGGGGT
  source 1..20: mol_type = other DNA
tcttgagggacttgagctgc

SEQ ID NO: 5899 - DNA, 20 bp, synthetic construct
  misc_feature 1..20: note = Description of Artificial Sequence: Synthetic oligonucleotide
  misc_feature 1..20: note = Target: ANGPTL4; (+) strand; PAM type: NNGRRT; PAM sequence: TGGGGT
  source 1..20: mol_type = other DNA
ggtgctggagaaggtagaaa

SEQ ID NO: 5900 - DNA, 20 bp, synthetic construct
  misc_feature 1..20: note = Description of Artificial Sequence: Synthetic oligonucleotide
  misc_feature 1..20: note = Target: ANGPTL4; (+) strand; PAM type: NNGRRT; PAM sequence: CGGGGT
  source 1..20: mol_type = other DNA
gagaaggtagaaatggggtt

SEQ ID NO: 5901 - DNA, 20 bp, synthetic construct
  misc_feature 1..20: note = Description of Artificial Sequence: Synthetic oligonucleotide
  misc_feature 1..20: note = Target: ANGPTL4; (+) strand; PAM type: NNGRRT; PAM sequence: GAGGGT
  source 1..20: mol_type = other DNA
aaggttagaaccttctaggg

SEQ ID NO: 5902 - DNA, 20 bp, synthetic construct
  misc_feature 1..20: note = Description of Artificial Sequence: Synthetic oligonucleotide
  misc_feature 1..20: note = Target: ANGPTL4; (+) strand; PAM type: NNGRRT; PAM sequence: GGGGGT
  source 1..20: mol_type = other DNA
ggggagggtgtcatggagga

SEQ ID NO: 5903 - DNA, 20 bp, synthetic construct
  misc_feature 1..20: note = Description of Artificial Sequence: Synthetic oligonucleotide
  misc_feature 1..20: note = Target: ANGPTL4; (+) strand; PAM type: NNGRRT; PAM sequence: TGGGGT
  source 1..20: mol_type = other DNA
ttgggccctccacaatgtct

SEQ ID NO: 5904 - DNA, 20 bp, synthetic construct
  misc_feature 1..20: note = Description of Artificial Sequence: Synthetic oligonucleotide
  misc_feature 1..20: note = Target: ANGPTL4; (+) strand; PAM type: NNGRRT; PAM sequence: GGGAAT
  source 1..20: mol_type = other DNA
cacaatgtcttggggtatgt

SEQ ID NO: 5905 - DNA, 20 bp, synthetic construct
  misc_feature 1..20: note = Description of Artificial Sequence: Synthetic oligonucleotide
  misc_feature 1..20: note = Target: ANGPTL4; (+) strand; PAM type: NNGRRT; PAM sequence: CTGGGT
  source 1..20: mol_type = other DNA
ctgtggctgtccacagccaa

SEQ ID NO: 5906 - DNA, 20 bp, synthetic construct
  misc_feature 1..20: note = Description of Artificial Sequence: Synthetic oligonucleotide
  misc_feature 1..20: note = Target: ANGPTL4; (+) strand; PAM type: NNGRRT; PAM sequence: TTGGAT
  source 1..20: mol_type = other DNA
acagccaactgggtgaaagt

SEQ ID NO: 5907 - DNA, 20 bp, synthetic construct
  misc_feature 1..20: note = Description of Artificial Sequence: Synthetic oligonucleotide
  misc_feature 1..20: note = Target: ANGPTL4; (+) strand; PAM type: NNGRRT; PAM sequence: TAGGGT
  source 1..20: mol_type = other DNA
tggatccccctctcacaccc

SEQ ID NO: 5908 - DNA, 20 bp, synthetic construct
  misc_feature 1..20: note = Description of Artificial Sequence: Synthetic oligonucleotide
  misc_feature 1..20: note = Target: ANGPTL4; (+) strand; PAM type: NNGRRT; PAM sequence: GAGGGT
  source 1..20: mol_type = other DNA
gcttccagcactgtagacct

SEQ ID NO: 5909 - DNA, 20 bp, synthetic construct
  misc_feature 1..20: note = Description of Artificial Sequence: Synthetic oligonucleotide
  misc_feature 1..20: note = Target: ANGPTL4; (+) strand; PAM type: NNGRRT; PAM sequence: CAGGGT
  source 1..20: mol_type = other DNA
ggctagcatctcagcgtggt

SEQ ID NO: 5910 - DNA, 20 bp, synthetic construct
  misc_feature 1..20: note = Description of Artificial Sequence: Synthetic oligonucleotide
  misc_feature 1..20: note = Target: ANGPTL4; (+) strand; PAM type: NNGRRT; PAM sequence: CAGGAT
  source 1..20: mol_type = other DNA
ccctcccaaagccaccatcc

SEQ ID NO: 5911 - DNA, 20 bp, synthetic construct
  misc_feature 1..20: note = Description of Artificial Sequence: Synthetic oligonucleotide
  misc_feature 1..20: note = Target: ANGPTL4; (+) strand; PAM type: NNGRRT; PAM sequence: GAGGGT
  source 1..20: mol_type = other DNA
cccaggatgaggggcttctg

SEQ ID NO: 5912 - DNA, 20 bp, synthetic construct
  misc_feature 1..20: note = Description of Artificial Sequence: Synthetic oligonucleotide
  misc_feature 1..20: note = Target: ANGPTL4; (+) strand; PAM type: NNGRRT; PAM sequence: AGGGGT
  source 1..20: mol_type = other DNA
gaaatgcggtggaagggggc

SEQ ID NO: 5913 - DNA, 20 bp, synthetic construct
  misc_feature 1..20: note = Description of Artificial Sequence: Synthetic oligonucleotide
  misc_feature 1..20: note = Target: ANGPTL4; (+) strand; PAM type: NNGRRT; PAM sequence: GTGGGT
  source 1..20: mol_type = other DNA
tggaagggggcaggggttct

SEQ ID NO: 5914 - DNA, 20 bp, synthetic construct
  misc_feature 1..20: note = Description of Artificial Sequence: Synthetic oligonucleotide
  misc_feature 1..20: note = Target: ANGPTL4; (+) strand; PAM type: NNGRRT; PAM sequence: CTGGAT
  source 1..20: mol_type = other DNA
tggccgcgtgcccatcctta

SEQ ID NO: 5915 - DNA, 20 bp, synthetic construct
  misc_feature 1..20: note = Description of Artificial Sequence: Synthetic oligonucleotide
  misc_feature 1..20: note = Target: ANGPTL4; (+) strand; PAM type: NNGRRT; PAM sequence: CGGAGT
  source 1..20: mol_type = other DNA
gttttgtttgctttttgaga

SEQ ID NO: 5916 - DNA, 20 bp, synthetic construct
  misc_feature 1..20: note = Description of Artificial Sequence: Synthetic oligonucleotide
  misc_feature 1..20: note = Target: ANGPTL4; (+) strand; PAM type: NNGRRT; PAM sequence: TGGAGT
  source 1..20: mol_type = other DNA
tctcgctctgttgtccaggc

SEQ ID NO: 5917 - DNA, 20 bp, synthetic construct
  misc_feature 1..20: note = Description of Artificial Sequence: Synthetic oligonucleotide
  misc_feature 1..20: note = Target: ANGPTL4; (+) strand; PAM type: NNGRRT; PAM sequence: CTGGGT
  source 1..20: mol_type = other DNA
actgcaacctctgcctccca

SEQ ID NO: 5918 - DNA, 20 bp, synthetic construct
  misc_feature 1..20: note = Description of Artificial Sequence: Synthetic oligonucleotide
  misc_feature 1..20: note = Target: ANGPTL4; (+) strand; PAM type: NNGRRT; PAM sequence: TGGGAT
  source 1..20: mol_type = other DNA
gcctcagcctctcaagtaga

SEQ ID NO: 5919 - DNA, 20 bp, synthetic construct
  misc_feature 1..20: note = Description of Artificial Sequence: Synthetic oligonucleotide
  misc_feature 1..20: note = Target: ANGPTL4; (+) strand; PAM type: NNGRRT; PAM sequence: CAGAGT
  source 1..20: mol_type = other DNA
agtcttttttttttttgaga

SEQ ID NO: 5920 - DNA, 20 bp, synthetic construct
  misc_feature 1..20: note = Description of Artificial Sequence: Synthetic oligonucleotide
  misc_feature 1..20: note = Target: ANGPTL4; (+) strand; PAM type: NNGRRT; PAM sequence: TGGAGT
  source 1..20: mol_type = other DNA
tctcactctgtcacccaggt

SEQ ID NO: 5921 - DNA, 20 bp, synthetic construct
  misc_feature 1..20: note = Description of Artificial Sequence: Synthetic oligonucleotide
  misc_feature 1..20: note = Target: ANGPTL4; (+) strand; PAM type: NNGRRT; PAM sequence: CCGGGT
  source 1..20: mol_type = other DNA
ctgactgcaacctctgcctc

SEQ ID NO: 5922 - DNA, 20 bp, synthetic construct
  misc_feature 1..20: note = Description of Artificial Sequence: Synthetic oligonucleotide
  misc_feature 1..20: note = Target: ANGPTL4; (+) strand; PAM type: NNGRRT; PAM sequence: TGGGAT
  source 1..20: mol_type = other DNA
gcctctgcctcctaaggagc

SEQ ID NO: 5923 - DNA, 20 bp, synthetic construct
  misc_feature 1..20: note = Description of Artificial Sequence: Synthetic oligonucleotide
  misc_feature 1..20: note = Target: ANGPTL4; (+) strand; PAM type: NNGRRT; PAM sequence: TGGGGT
  source 1..20: mol_type = other DNA
tttgtatgttttactagaga

SEQ ID NO: 5924 - DNA, 20 bp, synthetic construct
  misc_feature 1..20: note = Description of Artificial Sequence: Synthetic oligonucleotide
  misc_feature 1..20: note = Target: ANGPTL4; (+) strand; PAM type: NNGRRT; PAM sequence: CTGGAT
  source 1..20: mol_type = other DNA
tccgcccgcctcccaaagtg

SEQ ID NO: 5925 - DNA, 20 bp, synthetic construct
  misc_feature 1..20: note = Description of Artificial Sequence: Synthetic oligonucleotide
  misc_feature 1..20: note = Target: ANGPTL4; (+) strand; PAM type: NNGRRT; PAM sequence: GTGGAT
  source 1..20: mol_type = other DNA
tgctatgcgctggggcctgc

SEQ ID NO: 5926 - DNA, 20 bp, synthetic construct
  misc_feature 1..20: note = Description of Artificial Sequence: Synthetic oligonucleotide
  misc_feature 1..20: note = Target: ANGPTL4; (+) strand; PAM type: NNGRRT; PAM sequence: TTGAGT
  source 1..20: mol_type = other DNA
ccagcctcatggagcctcca

SEQ ID NO: 5927 - DNA, 20 bp, synthetic construct
  misc_feature 1..20: note = Description of Artificial Sequence: Synthetic oligonucleotide
  misc_feature 1..20: note = Target: ANGPTL4; (+) strand; PAM type: NNGRRT; PAM sequence: AGGAGT
  source 1..20: mol_type = other DNA
attagatgacctcagtgtcc

SEQ ID NO: 5928 - DNA, 20 bp, synthetic construct
  misc_feature 1..20: note = Description of Artificial Sequence: Synthetic oligonucleotide
  misc_feature 1..20: note = Target: ANGPTL4; (+) strand; PAM type: NNGRRT; PAM sequence: TGGGGT
  source 1..20: mol_type = other DNA
gtccttgctcaattcccatt

SEQ ID NO: 5929 - DNA, 20 bp, synthetic construct
  misc_feature 1..20: note = Description of Artificial Sequence: Synthetic oligonucleotide
  misc_feature 1..20: note = Target: ANGPTL4; (+) strand; PAM type: NNGRRT; PAM sequence: GGGGGT
  source 1..20: mol_type = other DNA
ggggtgttctggcctggtct

SEQ ID NO: 5930 - DNA, 20 bp, synthetic construct
  misc_feature 1..20: note = Description of Artificial Sequence: Synthetic oligonucleotide
  misc_feature 1..20: note = Target: ANGPTL4; (+) strand; PAM type: NNGRRT; PAM sequence: CAGGGT
  source 1..20: mol_type = other DNA
ggtctgggggtgaggcaagg

SEQ ID NO: 5931 - DNA, 20 bp, synthetic construct
  misc_feature 1..20: note = Description of Artificial Sequence: Synthetic oligonucleotide
  misc_feature 1..20: note = Target: ANGPTL4; (+) strand; PAM type: NNGRRT; PAM sequence: GAGAGT
  source 1..20: mol_type = other DNA
cagagagagaagtgaggaaa

SEQ ID NO: 5932 - DNA, 20 bp, synthetic construct
  misc_feature 1..20: note = Description of Artificial Sequence: Synthetic oligonucleotide
  misc_feature 1..20: note = Target: ANGPTL4; (+) strand; PAM type: NNGRRT; PAM sequence: GCGGAT
  source 1..20: mol_type = other DNA
actttgggaggccaaggctg

SEQ ID NO: 5933 - DNA, 20 bp, synthetic construct
  misc_feature 1..20: note = Description of Artificial Sequence: Synthetic oligonucleotide
  misc_feature 1..20: note = Target: ANGPTL4; (+) strand; PAM type: NNGRRT; PAM sequence: CAGAAT
  source 1..20: mol_type = other DNA
agctgctccggaggctgcgg

SEQ ID NO: 5934 - DNA, 20 bp, synthetic construct
  misc_feature 1..20: note = Description of Artificial Sequence: Synthetic oligonucleotide
  misc_feature 1..20: note = Target: ANGPTL4; (+) strand; PAM type: NNGRRT; PAM sequence: GAGAGT
  source 1..20: mol_type = other DNA
caaaaaacaaaacaaaaaaa

SEQ ID NO: 5935 - DNA, 20 bp, synthetic construct
  misc_feature 1..20: note = Description of Artificial Sequence: Synthetic oligonucleotide
  misc_feature 1..20: note = Target: ANGPTL4; (+) strand; PAM type: NNGRRT; PAM sequence: AAGGGT
  source 1..20: mol_type = other DNA
ggcaggacggtgtgtggtac

SEQ ID NO: 5936 - DNA, 20 bp, synthetic construct
  misc_feature 1..20: note = Description of Artificial Sequence: Synthetic oligonucleotide
  misc_feature 1..20: note = Target: ANGPTL4; (+) strand; PAM type: NNGRRT; PAM sequence: GAGGGT
  source 1..20: mol_type = other DNA
aagaaagcctgtgtgccaga

SEQ ID NO: 5937 - DNA, 20 bp, synthetic construct
  misc_feature 1..20: note = Description of Artificial Sequence: Synthetic oligonucleotide
  misc_feature 1..20: note = Target: ANGPTL4; (+) strand; PAM type: NNGRRT; PAM sequence: GTGGGT
  source 1..20: mol_type = other DNA
gcctgtgtgccagagagggt

SEQ ID NO: 5938 - DNA, 20 bp, synthetic construct
  misc_feature 1..20: note = Description of Artificial Sequence: Synthetic oligonucleotide
  misc_feature 1..20: note = Target: ANGPTL4; (+) strand; PAM type: NNGRRT; PAM sequence: GAGGAT
  source 1..20: mol_type = other DNA
tgggtacagcatggcaggag

SEQ ID NO: 5939 - DNA, 20 bp, synthetic construct
  misc_feature 1..20: note = Description of Artificial Sequence: Synthetic oligonucleotide
  misc_feature 1..20: note = Target: ANGPTL4; (+) strand; PAM type: NNGRRT; PAM sequence: AGGGAT
  source 1..20: mol_type = other DNA
atctcccttcagggctgccc

SEQ ID NO: 5940 - DNA, 20 bp, synthetic construct
  misc_feature 1..20: note = Description of Artificial Sequence: Synthetic oligonucleotide
  misc_feature 1..20: note = Target: ANGPTL4; (+) strand; PAM type: NNGRRT; PAM sequence: CAGAGT
  source 1..20: mol_type = other DNA
tgttccaggttggggagagg

SEQ ID NO: 5941 - DNA, 20 bp, synthetic construct
  misc_feature 1..20: note = Description of Artificial Sequence: Synthetic oligonucleotide
  misc_feature 1..20: note = Target: ANGPTL4; (+) strand; PAM type: NNGRRT; PAM sequence: AGGGGT
  source 1..20: mol_type = other DNA
actatttgaaatccagcctc

SEQ ID NO: 5942 - DNA, 20 bp, synthetic construct
  misc_feature 1..20: note = Description of Artificial Sequence: Synthetic oligonucleotide
  misc_feature 1..20: note = Target: ANGPTL4; (+) strand; PAM type: NNGRRT; PAM sequence: TAGGGT
  source 1..20: mol_type = other DNA
aactgcaagatgacctcagg

SEQ ID NO: 5943 - DNA, 20 bp, synthetic construct
  misc_feature 1..20: note = Description of Artificial Sequence: Synthetic oligonucleotide
  misc_feature 1..20: note = Target: ANGPTL4; (+) strand; PAM type: NNGRRT; PAM sequence: CAGGGT
  source 1..20: mol_type = other DNA
caaaacaaaaaaattaaagg

SEQ ID NO: 5944 - DNA, 20 bp, synthetic construct
  misc_feature 1..20: note = Description of Artificial Sequence: Synthetic oligonucleotide
  misc_feature 1..20: note = Target: ANGPTL4; (+) strand; PAM type: NNGRRT; PAM sequence: TGGAGT
  source 1..20: mol_type = other DNA
ttttttttttttttttgaga

SEQ ID NO: 5945 - DNA, 20 bp, synthetic construct
  misc_feature 1..20: note = Description of Artificial Sequence: Synthetic oligonucleotide
  misc_feature 1..20: note = Target: ANGPTL4; (+) strand; PAM type: NNGRRT; PAM sequence: TGGAGT
  source 1..20: mol_type = other DNA
tggagttttgctcttggagc

SEQ ID NO: 5946 - DNA, 20 bp, synthetic construct
  misc_feature 1..20: note = Description of Artificial Sequence: Synthetic oligonucleotide
  misc_feature 1..20: note = Target: ANGPTL4; (+) strand; PAM type: NNGRRT; PAM sequence: CCGGGT
  source 1..20: mol_type = other DNA
ctcactgaaacctccgcctc

SEQ ID NO: 5947 - DNA, 20 bp, synthetic construct
  misc_feature 1..20: note = Description of Artificial Sequence: Synthetic oligonucleotide
  misc_feature 1..20: note = Target: ANGPTL4; (+) strand; PAM type: NNGRRT; PAM sequence: CTGGGT
  source 1..20: mol_type = other DNA
ttttgtatttttagtagaga

SEQ ID NO: 5948 - DNA, 20 bp, synthetic construct
  misc_feature 1..20: note = Description of Artificial Sequence: Synthetic oligonucleotide
  misc_feature 1..20: note = Target: ANGPTL4; (+) strand; PAM type: NNGRRT; PAM sequence: TGGGAT
  source 1..20: mol_type = other DNA
actttggcctcccaaaatgc

SEQ ID NO: 5949 - DNA, 20 bp, synthetic construct
  misc_feature 1..20: note = Description of Artificial Sequence: Synthetic oligonucleotide
  misc_feature 1..20: note = Target: ANGPTL4; (+) strand; PAM type: NNGRRT; PAM sequence: CTGGGT
  source 1..20: mol_type = other DNA
ctttaaaatgcagcccttgt

SEQ ID NO: 5950 - DNA, 20 bp, synthetic construct
  misc_feature 1..20: note = Description of Artificial Sequence: Synthetic oligonucleotide
  misc_feature 1..20: note = Target: ANGPTL4; (+) strand; PAM type: NNGRRT; PAM sequence: GAGGAT
  source 1..20: mol_type = other DNA
cactttgggaggcctatcat

SEQ ID NO: 5951 - DNA, 20 bp, synthetic construct
  misc_feature 1..20: note = Description of Artificial Sequence: Synthetic oligonucleotide
  misc_feature 1..20: note = Target: ANGPTL4; (+) strand; PAM type: NNGRRT; PAM sequence: AGGAGT
  source 1..20: mol_type = other DNA
ggcagacagatcacgaggtc

SEQ ID NO: 5952 - DNA, 20 bp, synthetic construct
  misc_feature 1..20: note = Description of Artificial Sequence: Synthetic oligonucleotide
  misc_feature 1..20: note = Target: ANGPTL4; (+) strand; PAM type: NNGRRT; PAM sequence: GAGAAT
  source 1..20: mol_type = other DNA
tactcaggtggctgaggcag

SEQ ID NO: 5953 - DNA, 20 bp, synthetic construct
  misc_feature 1..20: note = Description of Artificial Sequence: Synthetic oligonucleotide
  misc_feature 1..20: note = Target: ANGPTL4; (+) strand; PAM type: NNGRRT; PAM sequence: GAGGGT
  source 1..20: mol_type = other DNA
tactcgggaggccaaggcag

SEQ ID NO: 5954 - DNA, 20 bp, synthetic construct
  misc_feature 1..20: note = Description of Artificial Sequence: Synthetic oligonucleotide
  misc_feature 1..20: note = Target: ANGPTL4; (+) strand; PAM type: NNGRRT; PAM sequence: AGGAGT
  source 1..20: mol_type = other DNA
caggagggtcacttcagccc

SEQ ID NO: 5955 - DNA, 20 bp, synthetic construct
  misc_feature 1..20: note = Description of Artificial Sequence: Synthetic oligonucleotide
  misc_feature 1..20: note = Target: ANGPTL4; (+) strand; PAM type: NNGRRT; PAM sequence: GTGAAT
  source 1..20: mol_type = other DNA
cgtgagccgtgatcacacct

SEQ ID NO: 5956 - DNA, 20 bp, synthetic construct
  misc_feature 1..20: note = Description of Artificial Sequence: Synthetic oligonucleotide
  misc_feature 1..20: note = Target: ANGPTL4; (+) strand; PAM type: NNGRRT; PAM sequence: AAGAAT
  source 1..20: mol_type = other DNA
tgcttgtggggctgaagcac

SEQ ID NO: 5957 - DNA, 20 bp, synthetic construct
  misc_feature 1..20: note = Description of Artificial Sequence: Synthetic oligonucleotide
  misc_feature 1..20: note = Target: ANGPTL4; (+) strand; PAM type: NNGRRT; PAM sequence: CAGAGT
  source 1..20: mol_type = other DNA
ctgcgatccagcctgggcaa

SEQ ID NO: 5958 - DNA, 20 bp, synthetic construct
  misc_feature 1..20: note = Description of Artificial Sequence: Synthetic oligonucleotide
  misc_feature 1..20: note = Target: ANGPTL4; (+) strand; PAM type: NNGRRT; PAM sequence: CGGGGT
  source 1..20: mol_type = other DNA
cattacaagaggttacaaca

SEQ ID NO: 5959 - DNA, 20 bp, synthetic construct
  misc_feature 1..20: note = Description of Artificial Sequence: Synthetic oligonucleotide
  misc_feature 1..20: note = Target: ANGPTL4; (+) strand; PAM type: NNGRRT; PAM sequence: CTGGGT
  source 1..20: mol_type = other DNA
cctcccacactcagtccctg

SEQ ID NO: 5960 - DNA, 20 bp, synthetic construct
  misc_feature 1..20: note = Description of Artificial Sequence: Synthetic oligonucleotide
  misc_feature 1..20: note = Target: ANGPTL4; (+) strand; PAM type: NNGRRT; PAM sequence: TCGAGT
  source 1..20: mol_type = other DNA
ctccctctgacccaccctcc

SEQ ID NO: 5961 - DNA, 20 bp, synthetic construct
  misc_feature 1..20: note = Description of Artificial Sequence: Synthetic oligonucleotide
  misc_feature 1..20: note = Target: ANGPTL4; (+) strand; PAM type: NNGRRT; PAM sequence: AGGGAT
  source 1..20: mol_type = other DNA
ccaccctcctcgagtcctcc

SEQ ID NO: 5962 - DNA, 20 bp, synthetic construct
  misc_feature 1..20: note = Description of Artificial Sequence: Synthetic oligonucleotide
  misc_feature 1..20: note = Target: ANGPTL4; (+) strand; PAM type: NNGRRT; PAM sequence: ATGAGT
  source 1..20: mol_type = other DNA
cctcctcgagtcctccaggg

SEQ ID NO: 5963 - DNA, 20 bp, synthetic construct
  misc_feature 1..20: note = Description of Artificial Sequence: Synthetic oligonucleotide
  misc_feature 1..20: note = Target: ANGPTL4; (+) strand; PAM type: NNGRRT; PAM sequence: CTGGGT
  source 1..20: mol_type = other DNA
gtgagggagctgctgtcttc

SEQ ID NO: 5964 - DNA, 20 bp, synthetic construct
  misc_feature 1..20: note = Description of Artificial Sequence: Synthetic oligonucleotide
  misc_feature 1..20: note = Target: ANGPTL4; (+) strand; PAM type: NNGRRT; PAM sequence: GGGGGT
  source 1..20: mol_type = other DNA
gctgtcttcctgggtttgga

SEQ ID NO: 5965 - DNA, 20 bp, synthetic construct
  misc_feature 1..20: note = Description of Artificial Sequence: Synthetic oligonucleotide
  misc_feature 1..20: note = Target: ANGPTL4; (+) strand; PAM type: NNGRRT; PAM sequence: GGGAGT
  source 1..20: mol_type = other DNA
ggtgcttggcagccagatga

SEQ ID NO: 5966 - DNA, 20 bp, synthetic construct
  misc_feature 1..20: note = Description of Artificial Sequence: Synthetic oligonucleotide
  misc_feature 1..20: note = Target: ANGPTL4; (+) strand; PAM type: NNGRRT; PAM sequence: TGGGGT
  source 1..20: mol_type = other DNA
ttggcagccagatgagggag

SEQ ID NO: 5967 - DNA, 20 bp, synthetic construct
  misc_feature 1..20: note = Description of Artificial Sequence: Synthetic oligonucleotide
  misc_feature 1..20: note = Target: ANGPTL4; (+) strand; PAM type: NNGRRT; PAM sequence: CGGGGT
  source 1..20: mol_type = other DNA
gccctgggaagcctacaagg

SEQ ID NO: 5968 - DNA, 20 bp, synthetic construct
  misc_feature 1..20: note = Description of Artificial Sequence: Synthetic oligonucleotide
  misc_feature 1..20: note = Target: ANGPTL4; (+) strand; PAM type: NNGRRT; PAM sequence: GGGGAT
  source 1..20: mol_type = other DNA
aagcctacaaggcggggttt

SEQ ID NO: 5969 - DNA, 20 bp, synthetic construct
  misc_feature 1..20: note = Description of Artificial Sequence: Synthetic oligonucleotide
  misc_feature 1..20: note = Target: ANGPTL4; (+) strand; PAM type: NNGRRT; PAM sequence: TGGAGT
  source 1..20: mol_type = other DNA
tcagaagtggccctgcctca

SEQ ID NO: 5970 - DNA, 20 bp, synthetic construct
  misc_feature 1..20: note = Description of Artificial Sequence: Synthetic oligonucleotide
  misc_feature 1..20: note = Target: ANGPTL4; (+) strand; PAM type: NNGRRT; PAM sequence: GCGAGT
  source 1..20: mol_type = other DNA
agtggcctctcccactccag

SEQ ID NO: 5971 - DNA, 20 bp, synthetic construct
  misc_feature 1..20: note = Description of Artificial Sequence: Synthetic oligonucleotide
  misc_feature 1..20: note = Target: ANGPTL4; (+) strand; PAM type: NNGRRT; PAM sequence: CTGGGT
  source 1..20: mol_type = other DNA
ccactccaggcgagttctgg

SEQ ID NO: 5972 - DNA, 20 bp, synthetic construct
  misc_feature 1..20: note = Description of Artificial Sequence: Synthetic oligonucleotide
  misc_feature 1..20: note = Target: ANGPTL4; (+) strand; PAM type: NNGRRT; PAM sequence: TGGGAT
  source 1..20: mol_type = other DNA
tggccgtgcagctgcgggac

SEQ ID NO: 5973 - DNA, 20 bp, synthetic construct
  misc_feature 1..20: note = Description of Artificial Sequence: Synthetic oligonucleotide
  misc_feature 1..20: note = Target: ANGPTL4; (+) strand; PAM type: NNGRRT; PAM sequence: CCGAGT
  source 1..20: mol_type = other DNA
gcgggactgggatggcaacg

SEQ ID NO: 5974 - DNA, 20 bp, synthetic construct
  misc_feature 1..20: note = Description of Artificial Sequence: Synthetic oligonucleotide
  misc_feature 1..20: note = Target: ANGPTL4; (+) strand; PAM type: NNGRRT; PAM sequence: CTGGGT
  source 1..20: mol_type = other DNA
tgctgcagttctccgtgcac

SEQ ID NO: 5975 - DNA, 20 bp, synthetic construct
  misc_feature 1..20: note = Description of Artificial Sequence: Synthetic oligonucleotide
  misc_feature 1..20: note = Target: ANGPTL4; (+) strand; PAM type: NNGRRT; PAM sequence: CAGGAT
  source 1..20: mol_type = other DNA
tacccttctccacttgggac

SEQ ID NO: 5976 - DNA, 20 bp, synthetic construct
  misc_feature 1..20: note = Description of Artificial Sequence: Synthetic oligonucleotide
  misc_feature 1..20: note = Target: ANGPTL4; (+) strand; PAM type: NNGRRT; PAM sequence: AAGGGT
  source 1..20: mol_type = other DNA
ctcagttttcccatcctgaa

SEQ ID NO: 5977 - DNA, 20 bp, synthetic construct
  misc_feature 1..20: note = Description of Artificial Sequence: Synthetic oligonucleotide
  misc_feature 1..20: note = Target: ANGPTL4; (+) strand; PAM type: NNGRRT; PAM sequence: CGGAGT
  source 1..20: mol_type = other DNA
tatgtatttattttttgaga

SEQ ID NO: 5978 - DNA, 20 bp, synthetic construct
  misc_feature 1..20: note = Description of Artificial Sequence: Synthetic oligonucleotide
  misc_feature 1..20: note = Target: ANGPTL4; (+) strand; PAM type: NNGRRT; PAM sequence: TGGAGT
  source 1..20: mol_type = other DNA
tctcactttgtcacccaggc

SEQ ID NO: 5979 - DNA, 20 bp, synthetic construct
  misc_feature 1..20: note = Description of Artificial Sequence: Synthetic oligonucleotide
  misc_feature 1..20: note = Target: ANGPTL4; (+) strand; PAM type: NNGRRT; PAM sequence: CTGAGT
  source 1..20: mol_type = other DNA
ctcactgcaagctccacctc

SEQ ID NO: 5980 - DNA, 20 bp, synthetic construct
  misc_feature 1..20: note = Description of Artificial Sequence: Synthetic oligonucleotide
  misc_feature 1..20: note = Target: ANGPTL4; (+) strand; PAM type: NNGRRT; PAM sequence: CCGAGT
  source 1..20: mol_type = other DNA
cattctcctgcctcagcctc

SEQ ID NO: 5981 - DNA, 20 bp, synthetic construct
  misc_feature 1..20: note = Description of Artificial Sequence: Synthetic oligonucleotide
  misc_feature 1..20: note = Target: ANGPTL4; (+) strand; PAM type: NNGRRT; PAM sequence: TGGGGT
  source 1..20: mol_type = other DNA
ttttgtatttttagtagaga

SEQ ID NO: 5982 - DNA, 20 bp, synthetic construct
  misc_feature 1..20: note = Description of Artificial Sequence: Synthetic oligonucleotide
  misc_feature 1..20: note = Target: ANGPTL4; (+) strand; PAM type: NNGRRT; PAM sequence: CAGGAT
  source 1..20: mol_type = other DNA
tggggtttcaccgtgttagc

SEQ ID NO: 5983 - DNA, 20 bp, synthetic construct
  misc_feature 1..20: note = Description of Artificial Sequence: Synthetic oligonucleotide
  misc_feature 1..20: note = Target: ANGPTL4; (+) strand; PAM type: NNGRRT; PAM sequence: TGGGAT
  source 1..20: mol_type = other DNA
gcctcagcctcccaaagtgc

SEQ ID NO: 5984 - DNA, 20 bp, synthetic construct
  misc_feature 1..20: note = Description of Artificial Sequence: Synthetic oligonucleotide
  misc_feature 1..20: note = Target: ANGPTL4; (+) strand; PAM type: NNGRRT; PAM sequence: CAGAGT
  source 1..20: mol_type = other DNA
tacttatttattttttgaga

SEQ ID NO: 5985 - DNA, 20 bp, synthetic construct
  misc_feature 1..20: note = Description of Artificial Sequence: Synthetic oligonucleotide
  misc_feature 1..20: note = Target: ANGPTL4; (+) strand; PAM type: NNGRRT; PAM sequence: TGGAGT
  source 1..20: mol_type = other DNA
tcccgctgtgtctcccaggc

SEQ ID NO: 5986 - DNA, 20 bp, synthetic construct
  misc_feature 1..20: note = Description of Artificial Sequence: Synthetic oligonucleotide
  misc_feature 1..20: note = Target: ANGPTL4; (+) strand; PAM type: NNGRRT; PAM sequence: CTGGGT
  source 1..20: mol_type = other DNA
ctcactgcagcctccgcctc

SEQ ID NO: 5987 - DNA, 20 bp, synthetic construct
  misc_feature 1..20: note = Description of Artificial Sequence: Synthetic oligonucleotide
  misc_feature 1..20: note = Target: ANGPTL4; (+) strand; PAM type: NNGRRT; PAM sequence: CTGAGT
  source 1..20: mol_type = other DNA
gattctcctgcctcagcctc

SEQ ID NO: 5988 - DNA, 20 bp, synthetic construct
  misc_feature 1..20: note = Description of Artificial Sequence: Synthetic oligonucleotide
  misc_feature 1..20: note = Target: ANGPTL4; (+) strand; PAM type: NNGRRT; PAM sequence: TGGGAT
  source 1..20: mol_type = other DNA
gcctcagcctcctgagtagc

SEQ ID NO: 5989 - DNA, 20 bp, synthetic construct
  misc_feature 1..20: note = Description of Artificial Sequence: Synthetic oligonucleotide
  misc_feature 1..20: note = Target: ANGPTL4; (+) strand; PAM type: NNGRRT; PAM sequence: CGGGGT
  source 1..20: mol_type = other DNA
ttttgtatttttagtagaga

SEQ ID NO: 5990 - DNA, 20 bp, synthetic construct
  misc_feature 1..20: note = Description of Artificial Sequence: Synthetic oligonucleotide
  misc_feature 1..20: note = Target: ANGPTL4; (+) strand; PAM type: NNGRRT; PAM sequence: CAGGGT
  source 1..20: mol_type = other DNA
cggggtttcaccatgttggc

SEQ ID NO: 5991 - DNA, 20 bp, synthetic construct
  misc_feature 1..20: note = Description of Artificial Sequence: Synthetic oligonucleotide
  misc_feature 1..20: note = Target: ANGPTL4; (+) strand; PAM type: NNGRRT; PAM sequence: TGGGAT
  source 1..20: mol_type = other DNA
acctcggcctcccaaagtgt

SEQ ID NO: 5992 - DNA, 20 bp, synthetic construct
  misc_feature 1..20: note = Description of Artificial Sequence: Synthetic oligonucleotide
  misc_feature 1..20: note = Target: ANGPTL4; (+) strand; PAM type: NNGRRT; PAM sequence: CAGGAT
  source 1..20: mol_type = other DNA
atctttataatggtgctcca

SEQ ID NO: 5993 - DNA, 20 bp, synthetic construct
  misc_feature 1..20: note = Description of Artificial Sequence: Synthetic oligonucleotide
  misc_feature 1..20: note = Target: ANGPTL4; (+) strand; PAM type: NNGRRT; PAM sequence: CAGGGT
  source 1..20: mol_type = other DNA
ttttttttttttttttgaaa

SEQ ID NO: 5994 - DNA, 20 bp, synthetic construct
  misc_feature 1..20: note = Description of Artificial Sequence: Synthetic oligonucleotide
  misc_feature 1..20: note = Target: ANGPTL4; (+) strand; PAM type: NNGRRT; PAM sequence: TGGAGT
  source 1..20: mol_type = other DNA
tctcactctgttgcctaagc

SEQ ID NO: 5995 - DNA, 20 bp, synthetic construct
  misc_feature 1..20: note = Description of Artificial Sequence: Synthetic oligonucleotide
  misc_feature 1..20: note = Target: ANGPTL4; (+) strand; PAM type: NNGRRT; PAM sequence: CCGGGT
  source 1..20: mol_type = other DNA
ctcactgcaacctccacctc

SEQ ID NO: 5996 - DNA, 20 bp, synthetic construct
  misc_feature 1..20: note = Description of Artificial Sequence: Synthetic oligonucleotide
  misc_feature 1..20: note = Target: ANGPTL4; (+) strand; PAM type: NNGRRT; PAM sequence: GCGAGT
  source 1..20: mol_type = other DNA
cagcactttgggaggctgaa

SEQ ID NO: 5997 - DNA, 20 bp, synthetic construct
  misc_feature 1..20: note = Description of Artificial Sequence: Synthetic oligonucleotide
  misc_feature 1..20: note = Target: ANGPTL4; (+) strand; PAM type: NNGRRT; PAM sequence: GTGGAT
  source 1..20: mol_type = other DNA
actttgggaggctgaagcga

SEQ ID NO: 5998 - DNA, 20 bp, synthetic construct
  misc_feature 1..20: note = Description of Artificial Sequence: Synthetic oligonucleotide
  misc_feature 1..20: note = Target: ANGPTL4; (+) strand; PAM type: NNGRRT; PAM sequence: CTGAGT
  source 1..20: mol_type = other DNA
gttcccatctacttgggagg

SEQ ID NO: 5999 - DNA, 20 bp, synthetic construct
  misc_feature 1..20: note = Description of Artificial Sequence: Synthetic oligonucleotide
  misc_feature 1..20: note = Target: ANGPTL4; (+) strand; PAM type: NNGRRT; PAM sequence: GAGGAT
  source 1..20: mol_type = other DNA
tacttgggaggctgagttgg

SEQ ID NO: 6000 - DNA, 20 bp, synthetic construct
  misc_feature 1..20: note = Description of Artificial Sequence: Synthetic oligonucleotide
  misc_feature 1..20: note = Target: ANGPTL4; (+) strand; PAM type: NNGRRT; PAM sequence: CTGGGT
  source 1..20: mol_type = other DNA
ctgcgccactgcactcaagc

SEQ ID NO: 6001 - DNA, 20 bp, synthetic construct
  misc_feature 1..20: note = Description of Artificial Sequence: Synthetic oligonucleotide
  misc_feature 1..20: note = Target: ANGPTL4; (+) strand; PAM type: NNGRRT; PAM sequence: CAGAGT
  source 1..20: mol_type = other DNA
ctgcactcaagcctgggtga

SEQ ID NO: 6002 - DNA, 20 bp, synthetic construct
  misc_feature 1..20: note = Description of Artificial Sequence: Synthetic oligonucleotide
  misc_feature 1..20: note = Target: ANGPTL4; (+) strand; PAM type: NNGRRT; PAM sequence: AAGAAT
  source 1..20: mol_type = other DNA
tacttgggaggcccaggtac

SEQ ID NO: 6003 - DNA, 20 bp, synthetic construct
  misc_feature 1..20: note = Description of Artificial Sequence: Synthetic oligonucleotide
  misc_feature 1..20: note = Target: ANGPTL4; (+) strand; PAM type: NNGRRT; PAM sequence: CCGGGT
  source 1..20: mol_type = other DNA
ttttaaacttaaaaataagg

SEQ ID NO: 6004 - DNA, 20 bp, synthetic construct
  misc_feature 1..20: note = Description of Artificial Sequence: Synthetic oligonucleotide
  misc_feature 1..20: note = Target: ANGPTL4; (+) strand; PAM type: NNGRRT; PAM sequence: GTGGGT
  source 1..20: mol_type = other DNA
cagcactttgggaggccgag

SEQ ID NO: 6005 - DNA, 20 bp, synthetic construct
  misc_feature 1..20: note = Description of Artificial Sequence: Synthetic oligonucleotide
  misc_feature 1..20: note = Target: ANGPTL4; (+) strand; PAM type: NNGRRT; PAM sequence: GTGGAT
  source 1..20: mol_type = other DNA
actttgggaggccgaggtgg

SEQ ID NO: 6006 - DNA, 20 bp, synthetic construct
  misc_feature 1..20: note = Description of Artificial Sequence: Synthetic oligonucleotide
  misc_feature 1..20: note = Target: ANGPTL4; (+) strand; PAM type: NNGRRT; PAM sequence: AGGAGT
  source 1..20: mol_type = other DNA
tgggtggatcacctgaggtc

SEQ ID NO: 6007 - DNA, 20 bp, synthetic construct
  misc_feature 1..20: note = Description of Artificial Sequence: Synthetic oligonucleotide
  misc_feature 1..20: note = Target: ANGPTL4; (+) strand; PAM type: NNGRRT; PAM sequence: GTGGGT
  source 1..20: mol_type = other DNA
caaaaattaggccaggcgca

SEQ ID NO: 6008 - DNA, 20 bp, synthetic construct
  misc_feature 1..20: note = Description of Artificial Sequence: Synthetic oligonucleotide
  misc_feature 1..20: note = Target: ANGPTL4; (+) strand; PAM type: NNGRRT; PAM sequence: GAGGGT
  source 1..20: mol_type = other DNA
cagcactttgggaggctgag

SEQ ID NO: 6009 - DNA, 20 bp, synthetic construct
  misc_feature 1..20: note = Description of Artificial Sequence: Synthetic oligonucleotide
  misc_feature 1..20: note = Target: ANGPTL4; (+) strand; PAM type: NNGRRT; PAM sequence: GTGGAT
  source 1..20: mol_type = other DNA
actttgggaggctgaggagg

SEQ ID NO: 6010 - DNA, 20 bp, synthetic construct
  misc_feature 1..20: note = Description of Artificial Sequence: Synthetic oligonucleotide
  misc_feature 1..20: note = Target: ANGPTL4; (+) strand; PAM type: NNGRRT; PAM sequence: AGGAGT
  source 1..20: mol_type = other DNA
agggtggatcacatgaggta

SEQ ID NO: 6011 - DNA, 20 bp, synthetic construct
  misc_feature 1..20: note = Description of Artificial Sequence: Synthetic oligonucleotide
  misc_feature 1..20: note = Target: ANGPTL4; (+) strand; PAM type: NNGRRT; PAM sequence: GCGGGT
  source 1..20: mol_type = other DNA
aaaactagccaggcgtggtg

SEQ ID NO: 6012 - DNA, 20 bp, synthetic construct
  misc_feature 1..20: note = Description of Artificial Sequence: Synthetic oligonucleotide
  misc_feature 1..20: note = Target: ANGPTL4; (+) strand; PAM type: NNGRRT; PAM sequence: GAGAAT
  source 1..20: mol_type = other DNA
tactcaggaggctgaggcat

SEQ ID NO: 6013 - DNA, 20 bp, synthetic construct
  misc_feature 1..20: note = Description of Artificial Sequence: Synthetic oligonucleotide
  misc_feature 1..20: note = Target: ANGPTL4; (+) strand; PAM type: NNGRRT; PAM sequence: TAGAGT
  source 1..20: mol_type = other DNA
ctgcactccagcctgggaga

SEQ ID NO: 6014 - DNA, 20 bp, synthetic construct
  misc_feature 1..20: note = Description of Artificial Sequence: Synthetic oligonucleotide
  misc_feature 1..20: note = Target: ANGPTL4; (+) strand; PAM type: NNGRRT; PAM sequence: GAGAAT
  source 1..20: mol_type = other DNA
tactcgggaggctgagggag

SEQ ID NO: 6015 - DNA, 20 bp, synthetic construct
  misc_feature 1..20: note = Description of Artificial Sequence: Synthetic oligonucleotide
  misc_feature 1..20: note = Target: ANGPTL4; (+) strand; PAM type: NNGRRT; PAM sequence: CTGGGT
  source 1..20: mol_type = other DNA
tcgcaccactgcactccagc

SEQ ID NO: 6016 - DNA, 20 bp, synthetic construct
  misc_feature 1..20: note = Description of Artificial Sequence: Synthetic oligonucleotide
  misc_feature 1..20: note = Target: ANGPTL4; (+) strand; PAM type: NNGRRT; PAM sequence: CAGAGT
  source 1..20: mol_type = other DNA
ctgcactccagcctgggtga

SEQ ID NO: 6017 - DNA, 20 bp, synthetic construct
  misc_feature 1..20: note = Description of Artificial Sequence: Synthetic oligonucleotide
  misc_feature 1..20: note = Target: ANGPTL4; (+) strand; PAM type: NNGRRT; PAM sequence: GGGAAT
  source 1..20: mol_type = other DNA
cagcggcagaagcttaagaa

SEQ ID NO: 6018 - DNA, 20 bp, synthetic construct
  misc_feature 1..20: note = Description of Artificial Sequence: Synthetic oligonucleotide
  misc_feature 1..20: note = Target: ANGPTL4; (+) strand; PAM type: NNGRRT; PAM sequence: GAGGAT
  source 1..20: mol_type = other DNA
ggtgactcttggctctgccc

SEQ ID NO: 6019 - DNA, 20 bp, synthetic construct
  misc_feature 1..20: note = Description of Artificial Sequence: Synthetic oligonucleotide
  misc_feature 1..20: note = Target: ANGPTL4; (+) strand; PAM type: NNGRRT; PAM sequence: CTGAGT
  source 1..20: mol_type = other DNA
cgactggagaagcccccttt

SEQ ID NO: 6020 - DNA, 20 bp, synthetic construct
  misc_feature 1..20: note = Description of Artificial Sequence: Synthetic oligonucleotide
  misc_feature 1..20: note = Target: ANGPTL4; (+) strand; PAM type: NNGRRT; PAM sequence: CAGGAT
  source 1..20: mol_type = other DNA
gcctcctgagatcgaggctg

SEQ ID NO: 6021 - DNA, 20 bp, synthetic construct
  misc_feature 1..20: note = Description of Artificial Sequence: Synthetic oligonucleotide
  misc_feature 1..20: note = Target: ANGPTL4; (+) strand; PAM type: NNGRRT; PAM sequence: GGGAGT
  source 1..20: mol_type = other DNA
gcttcactccttgctggcca

SEQ ID NO: 6022 - DNA, 20 bp, synthetic construct
  misc_feature 1..20: note = Description of Artificial Sequence: Synthetic oligonucleotide
  misc_feature 1..20: note = Target: ANGPTL4; (+) strand; PAM type: NNGRRT; PAM sequence: GTGGGT
  source 1..20: mol_type = other DNA
tgacggggaccagggcttgt

SEQ ID NO: 6023 - DNA, 20 bp, synthetic construct
  misc_feature 1..20: note = Description of Artificial Sequence: Synthetic oligonucleotide
  misc_feature 1..20: note = Target: ANGPTL4; (+) strand; PAM type: NNGRRT; PAM sequence: CAGAGT
  source 1..20: mol_type = other DNA
tggtatctgggcggagctca

SEQ ID NO: 6024 - DNA, 20 bp, synthetic construct
  misc_feature 1..20: note = Description of Artificial Sequence: Synthetic oligonucleotide
  misc_feature 1..20: note = Target: ANGPTL4; (+) strand; PAM type: NNGRRT; PAM sequence: TGGAAT
  source 1..20: mol_type = other DNA
ggcggagctcacagagttct

SEQ ID NO: 6025 - DNA, 20 bp, synthetic construct
  misc_feature 1..20: note = Description of Artificial Sequence: Synthetic oligonucleotide
  misc_feature 1..20: note = Target: ANGPTL4; (+) strand; PAM type: NNGRRT; PAM sequence: AAGAAT
  source 1..20: mol_type = other DNA
tactctagaggctgacgcag

SEQ ID NO: 6026 - DNA, 20 bp, synthetic construct
  misc_feature 1..20: note = Description of Artificial Sequence: Synthetic oligonucleotide
  misc_feature 1..20: note = Target: ANGPTL4; (+) strand; PAM type: NNGRRT; PAM sequence: CAGGGT
  source 1..20: mol_type = other DNA
taatttttttttcgtagagg

SEQ ID NO: 6027 - DNA, 20 bp, synthetic construct
  misc_feature 1..20: note = Description of Artificial Sequence: Synthetic oligonucleotide
  misc_feature 1..20: note = Target: ANGPTL4; (+) strand; PAM type: NNGRRT; PAM sequence: AGGGAT
  source 1..20: mol_type = other DNA
gtctcaaacaccgagactca

SEQ ID NO: 6028 - DNA, 20 bp, synthetic construct
  misc_feature 1..20: note = Description of Artificial Sequence: Synthetic oligonucleotide
  misc_feature 1..20: note = Target: ANGPTL4; (+) strand; PAM type: NNGRRT; PAM sequence: TGGGAT
  source 1..20: mol_type = other DNA
gccttggcttcacaaagtga

SEQ ID NO: 6029 - DNA, 20 bp, synthetic construct
  misc_feature 1..20: note = Description of Artificial Sequence: Synthetic oligonucleotide
  misc_feature 1..20: note = Target: ANGPTL4; (+) strand; PAM type: NNGRRT; PAM sequence: GTGGAT
  source 1..20: mol_type = other DNA
actttaggaggccgaggcag

SEQ ID NO: 6030 - DNA, 20 bp, synthetic construct
  misc_feature 1..20: note = Description of Artificial Sequence: Synthetic oligonucleotide
  misc_feature 1..20: note = Target: ANGPTL4; (+) strand; PAM type: NNGRRT; PAM sequence: ACGAGT
  source 1..20: mol_type = other DNA
caggtggatcatctgacatt

SEQ ID NO: 6031 - DNA, 20 bp, synthetic construct
  misc_feature 1..20: note = Description of Artificial Sequence: Synthetic oligonucleotide
  misc_feature 1..20: note = Target: ANGPTL4; (+) strand; PAM type: NNGRRT; PAM sequence: CCGGGT
  source 1..20: mol_type = other DNA
actaaaaatacaaaaattag

SEQ ID NO: 6032 - DNA, 20 bp, synthetic construct
  misc_feature 1..20: note = Description of Artificial Sequence: Synthetic oligonucleotide
  misc_feature 1..20: note = Target: ANGPTL4; (+) strand; PAM type: NNGRRT; PAM sequence: GCGGGT
  source 1..20: mol_type = other DNA
aaaattagccgggtgtggtg

SEQ ID NO: 6033 - DNA, 20 bp, synthetic construct
  misc_feature 1..20: note = Description of Artificial Sequence: Synthetic oligonucleotide
  misc_feature 1..20: note = Target: ANGPTL4; (+) strand; PAM type: NNGRRT; PAM sequence: GAGAAT
  source 1..20: mol_type = other DNA
tactcaggaggctgaggcag

SEQ ID NO: 6034 - DNA, 20 bp, synthetic construct
  misc_feature 1..20: note = Description of Artificial Sequence: Synthetic oligonucleotide
  misc_feature 1..20: note = Target: ANGPTL4; (+) strand; PAM type: NNGRRT; PAM sequence: CTGGGT
  source 1..20: mol_type = other DNA
tcatgccactgcactccagc

SEQ ID NO: 6035 - DNA, 20 bp, synthetic construct
  misc_feature 1..20: note = Description of Artificial Sequence: Synthetic oligonucleotide
  misc_feature 1..20: note = Target: ANGPTL4; (+) strand; PAM type: NNGRRT; PAM sequence: AAGAAT
  source 1..20: mol_type = other DNA
aaaaaaaaaaaaaaaaaaaa

SEQ ID NO: 6036 - DNA, 20 bp, synthetic construct
  misc_feature 1..20: note = Description of Artificial Sequence: Synthetic oligonucleotide
  misc_feature 1..20: note = Target: ANGPTL4; (+) strand; PAM type: NNGRRT; PAM sequence: GCGGAT
  source 1..20: mol_type = other DNA
gcactttgggaggccaacga

SEQ ID NO: 6037 - DNA, 20 bp, synthetic construct
  misc_feature 1..20: note = Description of Artificial Sequence: Synthetic oligonucleotide
  misc_feature 1..20: note = Target: ANGPTL4; (+) strand; PAM type: NNGRRT; PAM sequence: TCGGGT
  source 1..20: mol_type = other DNA
aacgagcggatcacccgagg

SEQ ID NO: 6038 - DNA, 20 bp, synthetic construct
  misc_feature 1..20: note = Description of Artificial Sequence: Synthetic oligonucleotide
  misc_feature 1..20: note = Target: ANGPTL4; (+) strand; PAM type: NNGRRT; PAM sequence: TAGGGT
  source 1..20: mol_type = other DNA
tatatagtgagatccctata

SEQ ID NO: 6039 - DNA, 20 bp, synthetic construct
  misc_feature 1..20: note = Description of Artificial Sequence: Synthetic oligonucleotide
  misc_feature 1..20: note = Target: ANGPTL4; (+) strand; PAM type: NNGRRT; PAM sequence: GAGAAT
  source 1..20: mol_type = other DNA
tactcaggaggctgaggccg

SEQ ID NO: 6040 - DNA, 20 bp, synthetic construct
  misc_feature 1..20: note = Description of Artificial Sequence: Synthetic oligonucleotide
  misc_feature 1..20: note = Target: ANGPTL4; (+) strand; PAM type: NNGRRT; PAM sequence: CGGAAT
  source 1..20: mol_type = other DNA
gtggagggagaggcgcgagc

SEQ ID NO: 6041 - DNA, 20 bp, synthetic construct
  misc_feature 1..20: note = Description of Artificial Sequence: Synthetic oligonucleotide
  misc_feature 1..20: note = Target: ANGPTL4; (+) strand; PAM type: NNGRRT; PAM sequence: TGGAGT
  source 1..20: mol_type = other DNA
cgcggtgcttgtgggccagc

SEQ ID NO: 6042 - DNA, 20 bp, synthetic construct
  misc_feature 1..20: note = Description of Artificial Sequence: Synthetic oligonucleotide
  misc_feature 1..20: note = Target: ANGPTL4; (+) strand; PAM type: NNGRRT; PAM sequence: CCGGGT
  source 1..20: mol_type = other DNA
cttgtgggccagctggagtt

SEQ ID NO: 6043 - DNA, 20 bp, synthetic construct
  misc_feature 1..20: note = Description of Artificial Sequence: Synthetic oligonucleotide
  misc_feature 1..20: note = Target: ANGPTL4; (+) strand; PAM type: NNGRRT; PAM sequence: GAGGGT
  source 1..20: mol_type = other DNA
cgggccggacagcggctgcg

SEQ ID NO: 6044 - DNA, 20 bp, synthetic construct
  misc_feature 1..20: note = Description of Artificial Sequence: Synthetic oligonucleotide
  misc_feature 1..20: note = Target: ANGPTL4; (+) strand; PAM type: NNGRRT; PAM sequence: CTGGGT
  source 1..20: mol_type = other DNA
cagcggctgcggagggtgta

SEQ ID NO: 6045 - DNA, 20 bp, synthetic construct
  misc_feature 1..20: note = Description of Artificial Sequence: Synthetic oligonucleotide
  misc_feature 1..20: note = Target: ANGPTL4; (+) strand; PAM type: NNGRRT; PAM sequence: AGGGAT
  source 1..20: mol_type = other DNA
tagctgccttcccgcggggc

SEQ ID NO: 6046 - DNA, 20 bp, synthetic construct
  misc_feature 1..20: note = Description of Artificial Sequence: Synthetic oligonucleotide
  misc_feature 1..20: note = Target: ANGPTL4; (+) strand; PAM type: NNGRRT; PAM sequence: AGGAGT
  source 1..20: mol_type = other DNA
catccaccacccaagggctg

SEQ ID NO: 6047 - DNA, 20 bp, synthetic construct
  misc_feature 1..20: note = Description of Artificial Sequence: Synthetic oligonucleotide
  misc_feature 1..20: note = Target: ANGPTL4; (+) strand; PAM type: NNGRRT; PAM sequence: CAGGAT
  source 1..20: mol_type = other DNA
ctccacctgcagccccggtg

SEQ ID NO: 6048 - DNA, 20 bp, synthetic construct
  misc_feature 1..20: note = Description of Artificial Sequence: Synthetic oligonucleotide
  misc_feature 1..20: note = Target: ANGPTL4; (+) strand; PAM type: NNGRRT; PAM sequence: CTGGGT
  source 1..20: mol_type = other DNA
cagccccggtgcaggatcca

SEQ ID NO: 6049 - DNA, 20 bp, synthetic construct
  misc_feature 1..20: note = Description of Artificial Sequence: Synthetic oligonucleotide
  misc_feature 1..20: note = Target: ANGPTL4; (+) strand; PAM type: NNGRRT; PAM sequence: CTGAGT
  source 1..20: mol_type = other DNA
gggtgaagctagctgggctc

SEQ ID NO: 6050 - DNA, 20 bp, synthetic construct
  misc_feature 1..20: note = Description of Artificial Sequence: Synthetic oligonucleotide
  misc_feature 1..20: note = Target: ANGPTL4; (+) strand; PAM type: NNGRRT; PAM sequence: AGGGAT
  source 1..20: mol_type = other DNA
ggagaacctttgtctagctc

SEQ ID NO: 6051 - DNA, 20 bp, synthetic construct
  misc_feature 1..20: note = Description of Artificial Sequence: Synthetic oligonucleotide
  misc_feature 1..20: note = Target: ANGPTL4; (+) strand; PAM type: NNGRRT; PAM sequence: CAGGGT
  source 1..20: mol_type = other DNA
tcatcaccctatgtctagct

SEQ ID NO: 6052 - DNA, 20 bp, synthetic construct
  misc_feature 1..20: note = Description of Artificial Sequence: Synthetic oligonucleotide
  misc_feature 1..20: note = Target: ANGPTL4; (+) strand; PAM type: NNGRRT; PAM sequence: GTGAAT
  source 1..20: mol_type = other DNA
ctatgtctagctcagggttt

SEQ ID NO: 6053 - DNA, 20 bp, synthetic construct
  misc_feature 1..20: note = Description of Artificial Sequence: Synthetic oligonucleotide
  misc_feature 1..20: note = Target: ANGPTL4; (+) strand; PAM type: NNGRRT; PAM sequence: AGGGAT
  source 1..20: mol_type = other DNA
agaacctttatgtctagctc

SEQ ID NO: 6054 - DNA, 20 bp, synthetic construct
  misc_feature 1..20: note = Description of Artificial Sequence: Synthetic oligonucleotide
  misc_feature 1..20: note = Target: ANGPTL4; (+) strand; PAM type: NNGRRT; PAM sequence: CAGGGT
  source 1..20: mol_type = other DNA
tcagcaccctgtgtctagct

SEQ ID NO: 6055 - DNA, 20 bp, synthetic construct
  misc_feature 1..20: note = Description of Artificial Sequence: Synthetic oligonucleotide
  misc_feature 1..20: note = Target: ANGPTL4; (+) strand; PAM type: NNGRRT; PAM sequence: GTGAAT
  source 1..20: mol_type = other DNA
ctgtgtctagctcagggttt

SEQ ID NO: 6056 - DNA, 20 bp, synthetic construct
  misc_feature 1..20: note = Description of Artificial Sequence: Synthetic oligonucleotide
  misc_feature 1..20: note = Target: ANGPTL4; (+) strand; PAM type: NNGRRT; PAM sequence: GGGGAT
  source 1..20: mol_type = other DNA
ctgtatctagttaatctggt

SEQ ID NO: 6057 - DNA, 20 bp, synthetic construct
  misc_feature 1..20: note = Description of Artificial Sequence: Synthetic oligonucleotide
  misc_feature 1..20: note = Target: ANGPTL4; (+) strand; PAM type: NNGRRT; PAM sequence: AGGAAT
  source 1..20: mol_type = other DNA
agaacctttgtgtctagctc

SEQ ID NO: 6058 - DNA, 20 bp, synthetic construct
  misc_feature 1..20: note = Description of Artificial Sequence: Synthetic oligonucleotide
  misc_feature 1..20: note = Target: ANGPTL4; (+) strand; PAM type: NNGRRT; PAM sequence: CAGGAT
  source 1..20: mol_type = other DNA
cagtgggctctaccaatcag

SEQ ID NO: 6059 - DNA, 20 bp, synthetic construct
  misc_feature 1..20: note = Description of Artificial Sequence: Synthetic oligonucleotide
  misc_feature 1..20: note = Target: ANGPTL4; (+) strand; PAM type: NNGRRT; PAM sequence: GTGGGT
  source 1..20: mol_type = other DNA
gctctaccaatcagcaggat

SEQ ID NO: 6060 - DNA, 20 bp, synthetic construct
  misc_feature 1..20: note = Description of Artificial Sequence: Synthetic oligonucleotide
  misc_feature 1..20: note = Target: ANGPTL4; (+) strand; PAM type: NNGRRT; PAM sequence: GAGAAT
  source 1..20: mol_type = other DNA
atgtgggtggggccagataa

SEQ ID NO: 6061 - DNA, 20 bp, synthetic construct
  misc_feature 1..20: note = Description of Artificial Sequence: Synthetic oligonucleotide
  misc_feature 1..20: note = Target: ANGPTL4; (+) strand; PAM type: NNGRRT; PAM sequence: TTGGGT
  source 1..20: mol_type = other DNA
agccagcagtggcaacccac

SEQ ID NO: 6062 - DNA, 20 bp, synthetic construct
  misc_feature 1..20: note = Description of Artificial Sequence: Synthetic oligonucleotide
  misc_feature 1..20: note = Target: ANGPTL4; (+) strand; PAM type: NNGRRT; PAM sequence: TTGGGT
  source 1..20: mol_type = other DNA
aatcttgtactgctcactct

SEQ ID NO: 6063 - DNA, 20 bp, synthetic construct
  misc_feature 1..20: note = Description of Artificial Sequence: Synthetic oligonucleotide
  misc_feature 1..20: note = Target: ANGPTL4; (+) strand; PAM type: NNGRRT; PAM sequence: AAGGGT
  source 1..20: mol_type = other DNA
agagctggaacacttaccgc

SEQ ID NO: 6064 - DNA, 20 bp, synthetic construct
  misc_feature 1..20: note = Description of Artificial Sequence: Synthetic oligonucleotide
  misc_feature 1..20: note = Target: ANGPTL4; (+) strand; PAM type: NNGRRT; PAM sequence: CCGGAT
  source 1..20: mol_type = other DNA
agaccaagaaccccccaatt

SEQ ID NO: 6065 - DNA, 20 bp, synthetic construct
  misc_feature 1..20: note = Description of Artificial Sequence: Synthetic oligonucleotide
  misc_feature 1..20: note = Target: ANGPTL4; (+) strand; PAM type: NNGRRT; PAM sequence: TTGGAT
  source 1..20: mol_type = other DNA
taaaataaaaattgtaataa

SEQ ID NO: 6066 - DNA, 20 bp, synthetic construct
  misc_feature 1..20: note = Description of Artificial Sequence: Synthetic oligonucleotide
  misc_feature 1..20: note = Target: ANGPTL4; (+) strand; PAM type: NNGRRT; PAM sequence: AAGAGT
  source 1..20: mol_type = other DNA
tttttttttttttccgagac

SEQ ID NO: 6067 - DNA, 20 bp, synthetic construct
  misc_feature 1..20: note = Description of Artificial Sequence: Synthetic oligonucleotide
  misc_feature 1..20: note = Target: ANGPTL4; (+) strand; PAM type: NNGRRT; PAM sequence: CCGGGT
  source 1..20: mol_type = other DNA
cttactgcaacctccacctc

SEQ ID NO: 6068 - DNA, 20 bp, synthetic construct
  misc_feature 1..20: note = Description of Artificial Sequence: Synthetic oligonucleotide
  misc_feature 1..20: note = Target: ANGPTL4; (+) strand; PAM type: NNGRRT; PAM sequence: CCGAGT
  source 1..20: mol_type = other DNA
gattctcctgcctcggcctc

SEQ ID NO: 6069 - DNA, 20 bp, synthetic construct
  misc_feature 1..20: note = Description of Artificial Sequence: Synthetic oligonucleotide
  misc_feature 1..20: note = Target: ANGPTL4; (+) strand; PAM type: NNGRRT; PAM sequence: ATGGGT
  source 1..20: mol_type = other DNA
tttttgtatttttagtatag

SEQ ID NO: 6070 - DNA, 20 bp, synthetic construct
  misc_feature 1..20: note = Description of Artificial Sequence: Synthetic oligonucleotide
  misc_feature 1..20: note = Target: ANGPTL4; (+) strand; PAM type: NNGRRT; PAM sequence: TGGGAT
  source 1..20: mol_type = other DNA
gcctcggcctccgaaactgg

SEQ ID NO: 6071 - DNA, 20 bp, synthetic construct
  misc_feature 1..20: note = Description of Artificial Sequence: Synthetic oligonucleotide
  misc_feature 1..20: note = Target: ANGPTL4; (+) strand; PAM type: NNGRRT; PAM sequence: GGGGGT
  source 1..20: mol_type = other DNA
atgtctcttggggaggtggt

SEQ ID NO: 6072 - DNA, 20 bp, synthetic construct
  misc_feature 1..20: note = Description of Artificial Sequence: Synthetic oligonucleotide
  misc_feature 1..20: note = Target: ANGPTL4; (+) strand; PAM type: NNGRRT; PAM sequence: CTGGGT
  source 1..20: mol_type = other DNA
ctgtttccctggggctgtgg

SEQ ID NO: 6073 - DNA, 20 bp, synthetic construct
  misc_feature 1..20: note = Description of Artificial Sequence: Synthetic oligonucleotide
  misc_feature 1..20: note = Target: ANGPTL4; (+) strand; PAM type: NNGRRT; PAM sequence: GAGGAT
  source 1..20: mol_type = other DNA
tcctgtactgagcaggctta

SEQ ID NO: 6074 - DNA, 20 bp, synthetic construct
  misc_feature 1..20: note = Description of Artificial Sequence: Synthetic oligonucleotide
  misc_feature 1..20: note = Target: ANGPTL4; (+) strand; PAM type: NNGRRT; PAM sequence: GTGAGT
  source 1..20: mol_type = other DNA
cactgtcactggagctggtg

SEQ ID NO: 6075 - DNA, 20 bp, synthetic construct
  misc_feature 1..20: note = Description of Artificial Sequence: Synthetic oligonucleotide
  misc_feature 1..20: note = Target: ANGPTL4; (+) strand; PAM type: NNGRRT; PAM sequence: GGGGGT
  source 1..20: mol_type = other DNA
tgagtccagtctgcaggaga

SEQ ID NO: 6076 - DNA, 20 bp, synthetic construct
  misc_feature 1..20: note = Description of Artificial Sequence: Synthetic oligonucleotide
  misc_feature 1..20: note = Target: ANGPTL4; (+) strand; PAM type: NNGRRT; PAM sequence: GTGGGT
  source 1..20: mol_type = other DNA
ccgcactctgggaggctgag

SEQ ID NO: 6077 - DNA, 20 bp, synthetic construct
  misc_feature 1..20: note = Description of Artificial Sequence: Synthetic oligonucleotide
  misc_feature 1..20: note = Target: ANGPTL4; (+) strand; PAM type: NNGRRT; PAM sequence: GAGAAT
  source 1..20: mol_type = other DNA
tattcgggaggctaaggcag

SEQ ID NO: 6078 - DNA, 20 bp, synthetic construct
  misc_feature 1..20: note = Description of Artificial Sequence: Synthetic oligonucleotide
  misc_feature 1..20: note = Target: ANGPTL4; (+) strand; PAM type: NNGRRT; PAM sequence: CTGGGT
  source 1..20: mol_type = other DNA
ttgcaccactgcactccagc

SEQ ID NO: 6079 - DNA, 20 bp, synthetic construct
  misc_feature 1..20: note = Description of Artificial Sequence: Synthetic oligonucleotide
  misc_feature 1..20: note = Target: ANGPTL4; (+) strand; PAM type: NNGRRT; PAM sequence: TGGGAT
  source 1..20: mol_type = other DNA
ctaacaaggggccaggaagc

SEQ ID NO: 6080 - DNA, 20 bp, synthetic construct
  misc_feature 1..20: note = Description of Artificial Sequence: Synthetic oligonucleotide
  misc_feature 1..20: note = Target: ANGPTL4; (+) strand; PAM type: NNGRRT; PAM sequence: GGGGAT
  source 1..20: mol_type = other DNA
agttcctgcatttggaaaat

SEQ ID NO: 6081 - DNA, 20 bp, synthetic construct
  misc_feature 1..20: note = Description of Artificial Sequence: Synthetic oligonucleotide
  misc_feature 1..20: note = Target: ANGPTL4; (+) strand; PAM type: NNGRRT; PAM sequence: GGGGGT
  source 1..20: mol_type = other DNA
ctggcctcatggtgtgggga

SEQ ID NO: 6082 - DNA, 20 bp, synthetic construct
  misc_feature 1..20: note = Description of Artificial Sequence: Synthetic oligonucleotide
  misc_feature 1..20: note = Target: ANGPTL4; (+) strand; PAM type: NNGRRT; PAM sequence: AAGAAT
  source 1..20: mol_type = other DNA
ggtgtggggagggggtggta

SEQ ID NO: 6083 - DNA, 20 bp, synthetic construct
  misc_feature 1..20: note = Description of Artificial Sequence: Synthetic oligonucleotide
  misc_feature 1..20: note = Target: ANGPTL4; (+) strand; PAM type: NNGRRT; PAM sequence: CTGGGT
  source 1..20: mol_type = other DNA
gcattaatattcatcacagg

SEQ ID NO: 6084 - DNA, 20 bp, synthetic construct
  misc_feature 1..20: note = Description of Artificial Sequence: Synthetic oligonucleotide
  misc_feature 1..20: note = Target: ANGPTL4; (+) strand; PAM type: NNGRRT; PAM sequence: TGGAGT
  source 1..20: mol_type = other DNA
aggctgaggctggaggacct

SEQ ID NO: 6085 - DNA, 20 bp, synthetic construct
  misc_feature 1..20: note = Description of Artificial Sequence: Synthetic oligonucleotide
  misc_feature 1..20: note = Target: ANGPTL4; (+) strand; PAM type: NNGRRT; PAM sequence: CCGGGT
  source 1..20: mol_type = other DNA
acgataaatttttaaaaagt

SEQ ID NO: 6086 - DNA, 20 bp, synthetic construct
  misc_feature 1..20: note = Description of Artificial Sequence: Synthetic oligonucleotide
  misc_feature 1..20: note = Target: ANGPTL4; (+) strand; PAM type: NNGRRT; PAM sequence: GCGGGT
  source 1..20: mol_type = other DNA
cagcactttgggaggccaag

SEQ ID NO: 6087 - DNA, 20 bp, synthetic construct
  misc_feature 1..20: note = Description of Artificial Sequence: Synthetic oligonucleotide
  misc_feature 1..20: note = Target: ANGPTL4; (+) strand; PAM type: NNGRRT; PAM sequence: GTGGAT
  source 1..20: mol_type = other DNA
actttgggaggccaaggcgg

SEQ ID NO: 6088 - DNA, 20 bp, synthetic construct
  misc_feature 1..20: note = Description of Artificial Sequence: Synthetic oligonucleotide
  misc_feature 1..20: note = Target: ANGPTL4; (+) strand; PAM type: NNGRRT; PAM sequence: AGGAGT
  source 1..20: mol_type = other DNA
ggcgggtggatcatgaggtt

SEQ ID NO: 6089 - DNA, 20 bp, synthetic construct
  misc_feature 1..20: note = Description of Artificial Sequence: Synthetic oligonucleotide
  misc_feature 1..20: note = Target: ANGPTL4; (+) strand; PAM type: NNGRRT; PAM sequence: GAGAAT
  source 1..20: mol_type = other DNA
ctacttgagaggctaaggca

SEQ ID NO: 6090 - DNA, 20 bp, synthetic construct
  misc_feature 1..20: note = Description of Artificial Sequence: Synthetic oligonucleotide
  misc_feature 1..20: note = Target: ANGPTL4; (+) strand; PAM type: NNGRRT; PAM sequence: GAGGGT
  source 1..20: mol_type = other DNA
ttgcttggactcgggaggca

SEQ ID NO: 6091 - DNA, 20 bp, synthetic construct
  misc_feature 1..20: note = Description of Artificial Sequence: Synthetic oligonucleotide
  misc_feature 1..20: note = Target: ANGPTL4; (+) strand; PAM type: NNGRRT; PAM sequence: CAGAGT
  source 1..20: mol_type = other DNA
ctgcactccagcctgggcaa

SEQ ID NO: 6092 - DNA, 20 bp, synthetic construct
  misc_feature 1..20: note = Description of Artificial Sequence: Synthetic oligonucleotide
  misc_feature 1..20: note = Target: ANGPTL4; (+) strand; PAM type: NNGRRT; PAM sequence: AAGAAT
  source 1..20: mol_type = other DNA
ctgcctcaaaaaaaaaaaaa

SEQ ID NO: 6093 - DNA, 20 bp, synthetic construct
  misc_feature 1..20: note = Description of Artificial Sequence: Synthetic oligonucleotide
  misc_feature 1..20: note = Target: ANGPTL4; (+) strand; PAM type: NNGRRT; PAM sequence: CAGAAT
  source 1..20: mol_type = other DNA
aatttcagagggaggagaga

SEQ ID NO: 6094 - DNA, 20 bp, synthetic construct
  misc_feature 1..20: note = Description of Artificial Sequence: Synthetic oligonucleotide
  misc_feature 1..20: note = Target: ANGPTL4; (+) strand; PAM type: NNGRRT; PAM sequence: GAGGAT
  source 1..20: mol_type = other DNA
agagacagaataaggcaact

SEQ ID NO: 6095 - DNA, 20 bp, synthetic construct
  misc_feature 1..20: note = Description of Artificial Sequence: Synthetic oligonucleotide
  misc_feature 1..20: note = Target: ANGPTL4; (+) strand; PAM type: NNGRRT; PAM sequence: CTGGGT
  source 1..20: mol_type = other DNA
gagacagaagtccatgtcct

SEQ ID NO: 6096 - DNA, 20 bp, synthetic construct
  misc_feature 1..20: note = Description of Artificial Sequence: Synthetic oligonucleotide
  misc_feature 1..20: note = Target: ANGPTL4; (+) strand; PAM type: NNGRRT; PAM sequence: AAGGAT
  source 1..20: mol_type = other DNA
ttgatgggagggagggaagg

SEQ ID NO: 6097 - DNA, 20 bp, synthetic construct
  misc_feature 1..20: note = Description of Artificial Sequence: Synthetic oligonucleotide
  misc_feature 1..20: note = Target: ANGPTL4; (+) strand; PAM type: NNGRRT; PAM sequence: GGGAGT
  source 1..20: mol_type = other DNA
aaggatggagacacaagagg

SEQ ID NO: 6098 - DNA, 20 bp, synthetic construct
  misc_feature 1..20: note = Description of Artificial Sequence: Synthetic oligonucleotide
  misc_feature 1..20: note = Target: ANGPTL4; (+) strand; PAM type: NNGRRT; PAM sequence: GTGGAT
  source 1..20: mol_type = other DNA
atggagacacaagaggggga

SEQ ID NO: 6099 - DNA, 20 bp, synthetic construct
  misc_feature 1..20: note = Description of Artificial Sequence: Synthetic oligonucleotide
  misc_feature 1..20: note = Target: ANGPTL4; (+) strand; PAM type: NNGRRT; PAM sequence: AGGAGT
  source 1..20: mol_type = other DNA
agggggagtggatatgggga

SEQ ID NO: 6100 - DNA, 20 bp, synthetic construct
  misc_feature 1..20: note = Description of Artificial Sequence: Synthetic oligonucleotide
  misc_feature 1..20: note = Target: ANGPTL4; (+) strand; PAM type: NNGRRT; PAM sequence: TGGGAT
  source 1..20: mol_type = other DNA
gaaggagtcaaatttgttta

SEQ ID NO: 6101 - DNA, 20 bp, synthetic construct
  misc_feature 1..20: note = Description of Artificial Sequence: Synthetic oligonucleotide
  misc_feature 1..20: note = Target: ANGPTL4; (+) strand; PAM type: NNGRRT; PAM sequence: CTGGGT
  source 1..20: mol_type = other DNA
aggtgaagccggctaggctt

SEQ ID NO: 6102 - DNA, 20 bp, synthetic construct
  misc_feature 1..20: note = Description of Artificial Sequence: Synthetic oligonucleotide
  misc_feature 1..20: note = Target: ANGPTL4; (+) strand; PAM type: NNGRRT; PAM sequence: TCGGGT
  source 1..20: mol_type = other DNA
aagccggctaggcttctggg

SEQ ID NO: 6103 - DNA, 20 bp, synthetic construct
  misc_feature 1..20: note = Description of Artificial Sequence: Synthetic oligonucleotide
  misc_feature 1..20: note = Target: ANGPTL4; (+) strand; PAM type: NNGRRT; PAM sequence: AAGGAT
  source 1..20: mol_type = other DNA
tgaacttttctgtctagcta

SEQ ID NO: 6104 - DNA, 20 bp, synthetic construct
  misc_feature 1..20: note = Description of Artificial Sequence: Synthetic oligonucleotide
  misc_feature 1..20: note = Target: ANGPTL4; (+) strand; PAM type: NNGRRT; PAM sequence: AAGGAT
  source 1..20: mol_type = other DNA
cagcactctgtgtctagcta

SEQ ID NO: 6105 - DNA, 20 bp, synthetic construct
  misc_feature 1..20: note = Description of Artificial Sequence: Synthetic oligonucleotide
  misc_feature 1..20: note = Target: ANGPTL4; (+) strand; PAM type: NNGRRT; PAM sequence: GAGAAT
  source 1..20: mol_type = other DNA
ctaatcaggtaggggacttg

SEQ ID NO: 6106 - DNA, 20 bp, synthetic construct
  misc_feature 1..20: note = Description of Artificial Sequence: Synthetic oligonucleotide
  misc_feature 1..20: note = Target: ANGPTL4; (-) strand; PAM type: NNNNGHTT; PAM sequence: TCCAGCTT
  source 1..20: mol_type = other DNA
cggagatcgtaccattgcac

SEQ ID NO: 6107 - DNA, 20 bp, synthetic construct
  misc_feature 1..20: note = Description of Artificial Sequence: Synthetic oligonucleotide
  misc_feature 1..20: note = Target: ANGPTL4; (-) strand; PAM type: NNNNGHTT; PAM sequence: ATTCGCTT
  source 1..20: mol_type = other DNA
ttgtgaggctgaggtgggag

SEQ ID NO: 6108 - DNA, 20 bp, synthetic construct
  misc_feature 1..20: note = Description of Artificial Sequence: Synthetic oligonucleotide
  misc_feature 1..20: note = Target: ANGPTL4; (-) strand; PAM type: NNNNGHTT; PAM sequence: GGGAGATT
  source 1..20: mol_type = other DNA
gctatttgtgaggctgaggt

SEQ ID NO: 6109 - DNA, 20 bp, synthetic construct
  misc_feature 1..20: note = Description of Artificial Sequence: Synthetic oligonucleotide
  misc_feature 1..20: note = Target: ANGPTL4; (-) strand; PAM type: NNNNGHTT; PAM sequence: CAGAGATT
  source 1..20: mol_type = other DNA
gaggcagagggtgcagtaag

SEQ ID NO: 6110 - DNA, 20 bp, synthetic construct
  misc_feature 1..20: note = Description of Artificial Sequence: Synthetic oligonucleotide
  misc_feature 1..20: note = Target: ANGPTL4; (-) strand; PAM type: NNNNGHTT; PAM sequence: TCAAGATT
  source 1..20: mol_type = other DNA
gactgcttgagcccaggagt

SEQ ID NO: 6111 - DNA, 20 bp, synthetic construct
  misc_feature 1..20: note = Description of Artificial Sequence: Synthetic oligonucleotide
  misc_feature 1..20: note = Target: ANGPTL4; (-) strand; PAM type: NNNNGHTT; PAM sequence: GACTGCTT
  source 1..20: mol_type = other DNA
ttgggaggccaaggtgggag

SEQ ID NO: 6112 - DNA, 20 bp, synthetic construct
  misc_feature 1..20: note = Description of Artificial Sequence: Synthetic oligonucleotide
  misc_feature 1..20: note = Target: ANGPTL4; (-) strand; PAM type: NNNNGHTT; PAM sequence: TCATGCTT
  source 1..20: mol_type = other DNA
attaagctaggcaaggtggc

SEQ ID NO: 6113 - DNA, 20 bp, synthetic construct
  misc_feature 1..20: note = Description of Artificial Sequence: Synthetic oligonucleotide
  misc_feature 1..20: note = Target: ANGPTL4; (-) strand; PAM type: NNNNGHTT; PAM sequence: CTGGGATT
  source 1..20: mol_type = other DNA
tacctcggcctcccaaagtg

SEQ ID NO: 6114 - DNA, 20 bp, synthetic construct
  misc_feature 1..20: note = Description of Artificial Sequence: Synthetic oligonucleotide
  misc_feature 1..20: note = Target: ANGPTL4; (-) strand; PAM type: NNNNGHTT; PAM sequence: CGGGGTTT
  source 1..20: mol_type = other DNA
tttttgtattttagtagaga

SEQ ID NO: 6115 - DNA, 20 bp, synthetic construct
  misc_feature 1..20: note = Description of Artificial Sequence: Synthetic oligonucleotide
  misc_feature 1..20: note = Target: ANGPTL4; (-) strand; PAM type: NNNNGHTT; PAM sequence: CTGGGATT
  source 1..20: mol_type = other DNA
tgcctcagcctcccgagtag

SEQ ID NO: 6116 - DNA, 20 bp, synthetic construct
  misc_feature 1..20: note = Description of Artificial Sequence: Synthetic oligonucleotide
  misc_feature 1..20: note = Target: ANGPTL4; (-) strand; PAM type: NNNNGHTT; PAM sequence: AAATGATT
  source 1..20: mol_type = other DNA
aacttccacctcctgggttc

SEQ ID NO: 6117 - DNA, 20 bp, synthetic construct
  misc_feature 1..20: note = Description of Artificial Sequence: Synthetic oligonucleotide
  misc_feature 1..20: note = Target: ANGPTL4; (-) strand; PAM type: NNNNGHTT; PAM sequence: AAGGGATT
  source 1..20: mol_type = other DNA
ggtcttgaactcctgagctc

SEQ ID NO: 6118 - DNA, 20 bp, synthetic construct
  misc_feature 1..20: note = Description of Artificial Sequence: Synthetic oligonucleotide
  misc_feature 1..20: note = Target: ANGPTL4; (-) strand; PAM type: NNNNGHTT; PAM sequence: ACAGGATT
  source 1..20: mol_type = other DNA
tttctgtagattttgtagag

SEQ ID NO: 6119 - DNA, 20 bp, synthetic construct
  misc_feature 1..20: note = Description of Artificial Sequence: Synthetic oligonucleotide
  misc_feature 1..20: note = Target: ANGPTL4; (-) strand; PAM type: NNNNGHTT; PAM sequence: TGTAGATT
  source 1..20: mol_type = other DNA
caccagacctgcctaatttc

SEQ ID NO: 6120 - DNA, 20 bp, synthetic construct
  misc_feature 1..20: note = Description of Artificial Sequence: Synthetic oligonucleotide
  misc_feature 1..20: note = Target: ANGPTL4; (-) strand; PAM type: NNNNGHTT; PAM sequence: CCCTGTTT
  source 1..20: mol_type = other DNA
gcatgagccaccacgcccag

SEQ ID NO: 6121 - DNA, 20 bp, synthetic construct
  misc_feature 1..20: note = Description of Artificial Sequence: Synthetic oligonucleotide
  misc_feature 1..20: note = Target: ANGPTL4; (-) strand; PAM type: NNNNGHTT; PAM sequence: CTAGGATT
  source 1..20: mol_type = other DNA
cacctcagcctcccaaagtg

SEQ ID NO: 6122 - DNA, 20 bp, synthetic construct
  misc_feature 1..20: note = Description of Artificial Sequence: Synthetic oligonucleotide
  misc_feature 1..20: note = Target: ANGPTL4; (-) strand; PAM type: NNNNGHTT; PAM sequence: CTAAGCTT
  source 1..20: mol_type = other DNA
cccaggctggtctcaaactc

SEQ ID NO: 6123 - DNA, 20 bp, synthetic construct
  misc_feature 1..20: note = Description of Artificial Sequence: Synthetic oligonucleotide
  misc_feature 1..20: note = Target: ANGPTL4; (-) strand; PAM type: NNNNGHTT; PAM sequence: TGGGGTTT
  source 1..20: mol_type = other DNA
ttgtattctagtagaggggg

SEQ ID NO: 6124 - DNA, 20 bp, synthetic construct
  misc_feature 1..20: note = Description of Artificial Sequence: Synthetic oligonucleotide
  misc_feature 1..20: note = Target: ANGPTL4; (-) strand; PAM type: NNNNGHTT; PAM sequence: CTGGGATT
  source 1..20: mol_type = other DNA
tgtctcggcctcccaacgtg

SEQ ID NO: 6125 - DNA, 20 bp, synthetic construct
  misc_feature 1..20: note = Description of Artificial Sequence: Synthetic oligonucleotide
  misc_feature 1..20: note = Target: ANGPTL4; (-) strand; PAM type: NNNNGHTT; PAM sequence: CGGGGTTT
  source 1..20: mol_type = other DNA
ttttgtatttttagtgcaaa

SEQ ID NO: 6126 - DNA, 20 bp, synthetic construct
  misc_feature 1..20: note = Description of Artificial Sequence: Synthetic oligonucleotide
  misc_feature 1..20: note = Target: ANGPTL4; (-) strand; PAM type: NNNNGHTT; PAM sequence: CGGGGATT
  source 1..20: mol_type = other DNA
agcctcagcctcccgagtag

SEQ ID NO: 6127 - DNA, 20 bp, synthetic construct
  misc_feature 1..20: note = Description of Artificial Sequence: Synthetic oligonucleotide
  misc_feature 1..20: note = Target: ANGPTL4; (-) strand; PAM type: NNNNGHTT; PAM sequence: AAGCGATT
  source 1..20: mol_type = other DNA
aacctctgcctcccaggttc

SEQ ID NO: 6128 - DNA, 20 bp, synthetic construct
  misc_feature 1..20: note = Description of Artificial Sequence: Synthetic oligonucleotide
  misc_feature 1..20: note = Target: ANGPTL4; (-) strand; PAM type: NNNNGHTT; PAM sequence: TGGAGTTT
  source 1..20: mol_type = other DNA
atttatttatttttttgaga

SEQ ID NO: 6129 - DNA, 20 bp, synthetic construct
  misc_feature 1..20: note = Description of Artificial Sequence: Synthetic oligonucleotide
  misc_feature 1..20: note = Target: ANGPTL4; (-) strand; PAM type: NNNNGHTT; PAM sequence: CTGGGATT
  source 1..20: mol_type = other DNA
cgcttcggcctcccaaagtg

SEQ ID NO: 6130 - DNA, 20 bp, synthetic construct
  misc_feature 1..20: note = Description of Artificial Sequence: Synthetic oligonucleotide
  misc_feature 1..20: note = Target: ANGPTL4; (-) strand; PAM type: NNNNGHTT; PAM sequence: GCCCGCTT
  source 1..20: mol_type = other DNA
atctcctgacctcgtgatcc

SEQ ID NO: 6131 - DNA, 20 bp, synthetic construct
  misc_feature 1..20: note = Description of Artificial Sequence: Synthetic oligonucleotide
  misc_feature 1..20: note = Target: ANGPTL4; (-) strand; PAM type: NNNNGHTT; PAM sequence: CAGGGTTT
  source 1..20: mol_type = other DNA
ttttgtatttttaatagaga

SEQ ID NO: 6132 - DNA, 20 bp, synthetic construct
  misc_feature 1..20: note = Description of Artificial Sequence: Synthetic oligonucleotide
  misc_feature 1..20: note = Target: ANGPTL4; (-) strand; PAM type: NNNNGHTT; PAM sequence: TCTAGATT
  source 1..20: mol_type = other DNA
tactgtcgcctcaagttggc

SEQ ID NO: 6133 - DNA, 20 bp, synthetic construct
  misc_feature 1..20: note = Description of Artificial Sequence: Synthetic oligonucleotide
  misc_feature 1..20: note = Target: ANGPTL4; (-) strand; PAM type: NNNNGHTT; PAM sequence: ATCTGATT
  source 1..20: mol_type = other DNA
aacctgatgaccttttcatg

SEQ ID NO: 6134 - DNA, 20 bp, synthetic construct
  misc_feature 1..20: note = Description of Artificial Sequence: Synthetic oligonucleotide
  misc_feature 1..20: note = Target: ANGPTL4; (-) strand; PAM type: NNNNGHTT; PAM sequence: GTATGTTT
  source 1..20: mol_type = other DNA
gccctctaagcccagcccct

SEQ ID NO: 6135 - DNA, 20 bp, synthetic construct
  misc_feature 1..20: note = Description of Artificial Sequence: Synthetic oligonucleotide
  misc_feature 1..20: note = Target: ANGPTL4; (-) strand; PAM type: NNNNGHTT; PAM sequence: AAAAGTTT
  source 1..20: mol_type = other DNA
tgtgtgtcaaaaaaaaaaaa

SEQ ID NO: 6136 - DNA, 20 bp, synthetic construct
  misc_feature 1..20: note = Description of Artificial Sequence: Synthetic oligonucleotide
  misc_feature 1..20: note = Target: ANGPTL4; (-) strand; PAM type: NNNNGHTT; PAM sequence: CTGAGATT
  source 1..20: mol_type = other DNA
gagacggaggttgcagtgag

SEQ ID NO: 6137 - DNA, 20 bp, synthetic construct
  misc_feature 1..20: note = Description of Artificial Sequence: Synthetic oligonucleotide
  misc_feature 1..20: note = Target: ANGPTL4; (-) strand; PAM type: NNNNGHTT; PAM sequence: AATCGCTT
  source 1..20: mol_type = other DNA
tcgggagactgtgtcaggag

SEQ ID NO: 6138 - DNA, 20 bp, synthetic construct
  misc_feature 1..20: note = Description of Artificial Sequence: Synthetic oligonucleotide
  misc_feature 1..20: note = Target: ANGPTL4; (-) strand; PAM type: NNNNGHTT; PAM sequence: ACGTGCTT
  source 1..20: mol_type = other DNA
aattagccgggtgtggtggc

SEQ ID NO: 6139 - DNA, 20 bp, synthetic construct
  misc_feature 1..20: note = Description of Artificial Sequence: Synthetic oligonucleotide
  misc_feature 1..20: note = Target: ANGPTL4; (-) strand; PAM type: NNNNGHTT; PAM sequence: CTGAGCTT
  source 1..20: mol_type = other DNA
ccgccagggtctttaatgtc

SEQ ID NO: 6140 - DNA, 20 bp, synthetic construct
  misc_feature 1..20: note = Description of Artificial Sequence: Synthetic oligonucleotide
  misc_feature 1..20: note = Target: ANGPTL4; (-) strand; PAM type: NNNNGHTT; PAM sequence: ATGAGATT
  source 1..20: mol_type = other DNA
tcgtcatcgcagctgtgttt

SEQ ID NO: 6141 - DNA, 20 bp, synthetic construct
  misc_feature 1..20: note = Description of Artificial Sequence: Synthetic oligonucleotide
  misc_feature 1..20: note = Target: ANGPTL4; (-) strand; PAM type: NNNNGHTT; PAM sequence: CTGTGTTT
  source 1..20: mol_type = other DNA
gaaagggttcgtcatcgcag

SEQ ID NO: 6142 - DNA, 20 bp, synthetic construct
  misc_feature 1..20: note = Description of Artificial Sequence: Synthetic oligonucleotide
  misc_feature 1..20: note = Target: ANGPTL4; (-) strand; PAM type: NNNNGHTT; PAM sequence: GGAGGCTT
  source 1..20: mol_type = other DNA
accaaaagtccttgccttgc

SEQ ID NO: 6143 - DNA, 20 bp, synthetic construct
  misc_feature 1..20: note = Description of Artificial Sequence: Synthetic oligonucleotide
  misc_feature 1..20: note = Target: ANGPTL4; (-) strand; PAM type: NNNNGHTT; PAM sequence: AATCGCTT
  source 1..20: mol_type = other DNA
tcgggaggctgaggcagtag

SEQ ID NO: 6144 - DNA, 20 bp, synthetic construct
  misc_feature 1..20: note = Description of Artificial Sequence: Synthetic oligonucleotide
  misc_feature 1..20: note = Target: ANGPTL4; (-) strand; PAM type: NNNNGHTT; PAM sequence: CCGGGCTT
  source 1..20: mol_type = other DNA
aaaatacaaaaaaaaattag

SEQ ID NO: 6145 - DNA, 20 bp, synthetic construct
  misc_feature 1..20: note = Description of Artificial Sequence: Synthetic oligonucleotide
  misc_feature 1..20: note = Target: ANGPTL4; (-) strand; PAM type: NNNNGHTT; PAM sequence: GCACGCTT
  source 1..20: mol_type = other DNA
tacccagtggcggagagggc

SEQ ID NO: 6146 - DNA, 20 bp, synthetic construct
  misc_feature 1..20: note = Description of Artificial Sequence: Synthetic oligonucleotide
  misc_feature 1..20: note = Target: ANGPTL4; (-) strand; PAM type: NNNNGHTT; PAM sequence: GACGGTTT
  source 1..20: mol_type = other DNA
ttctccccgccgcgcccgag

SEQ ID NO: 6147 - DNA, 20 bp, synthetic construct
  misc_feature 1..20: note = Description of Artificial Sequence: Synthetic oligonucleotide
  misc_feature 1..20: note = Target: ANGPTL4; (-) strand; PAM type: NNNNGHTT; PAM sequence: CTCGGCTT
  source 1..20: mol_type = other DNA
tcgtgtgaggatccgctcag

SEQ ID NO: 6148 - DNA, 20 bp, synthetic construct
  misc_feature 1..20: note = Description of Artificial Sequence: Synthetic oligonucleotide
  misc_feature 1..20: note = Target: ANGPTL4; (-) strand; PAM type: NNNNGHTT; PAM sequence: ACCCGCTT
  source 1..20: mol_type = other DNA
cgcggaggaccgggggtaag

SEQ ID NO: 6149 - DNA, 20 bp, synthetic construct
  misc_feature 1..20: note = Description of Artificial Sequence: Synthetic oligonucleotide
  misc_feature 1..20: note = Target: ANGPTL4; (-) strand; PAM type: NNNNGHTT; PAM sequence: CGGGGATT
  source 1..20: mol_type = other DNA
cctcttaggtagcctgggag

SEQ ID NO: 6150 - DNA, 20 bp, synthetic construct
  misc_feature 1..20: note = Description of Artificial Sequence: Synthetic oligonucleotide
  misc_feature 1..20: note = Target: ANGPTL4; (-) strand; PAM type: NNNNGHTT; PAM sequence: CTCGGCTT
  source 1..20: mol_type = other DNA
gccttgagcgaacctccctc

SEQ ID NO: 6151 - DNA, 20 bp, synthetic construct
  misc_feature 1..20: note = Description of Artificial Sequence: Synthetic oligonucleotide
  misc_feature 1..20: note = Target: ANGPTL4; (-) strand; PAM type: NNNNGHTT; PAM sequence: TTTTGCTT
  source 1..20: mol_type = other DNA
aagagacgggggtctcgcta

SEQ ID NO: 6152 - DNA, 20 bp, synthetic construct
  misc_feature 1..20: note = Description of Artificial Sequence: Synthetic oligonucleotide
  misc_feature 1..20: note = Target: ANGPTL4; (-) strand; PAM type: NNNNGHTT; PAM sequence: GGTCGTTT
  source 1..20: mol_type = other DNA
ctccgtgagccactgcgccc

SEQ ID NO: 6153 - DNA, 20 bp, synthetic construct
  misc_feature 1..20: note = Description of Artificial Sequence: Synthetic oligonucleotide
  misc_feature 1..20: note = Target: ANGPTL4; (-) strand; PAM type: NNNNGHTT; PAM sequence: CGAGGTTT
  source 1..20: mol_type = other DNA
ttttgtatttttagtagaga

SEQ ID NO: 6154 - DNA, 20 bp, synthetic construct
  misc_feature 1..20: note = Description of Artificial Sequence: Synthetic oligonucleotide
  misc_feature 1..20: note = Target: ANGPTL4; (-) strand; PAM type: NNNNGHTT; PAM sequence: CTGGGATT
  source 1..20: mol_type = other DNA
tgcctcagcctcccaagtag

SEQ ID NO: 6155 - DNA, 20 bp, synthetic construct
  misc_feature 1..20: note = Description of Artificial Sequence: Synthetic oligonucleotide
  misc_feature 1..20: note = Target: ANGPTL4; (-) strand; PAM type: NNNNGHTT; PAM sequence: AAGAGATT
  source 1..20: mol_type = other DNA
aacctctgcctcccgggttc

SEQ ID NO: 6156 - DNA, 20 bp, synthetic construct
  misc_feature 1..20: note = Description of Artificial Sequence: Synthetic oligonucleotide
  misc_feature 1..20: note = Target: ANGPTL4; (-) strand; PAM type: NNNNGHTT; PAM sequence: CCTGGCTT
  source 1..20: mol_type = other DNA
tacaagcgtgagtcaccgca

SEQ ID NO: 6157 - DNA, 20 bp, synthetic construct
  misc_feature 1..20: note = Description of Artificial Sequence: Synthetic oligonucleotide
  misc_feature 1..20: note = Target: ANGPTL4; (-) strand; PAM type: NNNNGHTT; PAM sequence: CGGGGTTT
  source 1..20: mol_type = other DNA
ttttgtatttttagtagaga

SEQ ID NO: 6158 - DNA, 20 bp, synthetic construct
  misc_feature 1..20: note = Description of Artificial Sequence: Synthetic oligonucleotide
  misc_feature 1..20: note = Target: ANGPTL4; (-) strand; PAM type: NNNNGHTT; PAM sequence: CTGGGATT
  source 1..20: mol_type = other DNA
tgcctcagcctccccagtag

SEQ ID NO: 6159 - DNA, 20 bp, synthetic construct
  misc_feature 1..20: note = Description of Artificial Sequence: Synthetic oligonucleotide
  misc_feature 1..20: note = Target: ANGPTL4; (-) strand; PAM type: NNNNGHTT; PAM sequence: AAGTGATT
  source 1..20: mol_type = other DNA
aacctctgcctcccagactc

SEQ ID NO: 6160 - DNA, 20 bp, synthetic construct
  misc_feature 1..20: note = Description of Artificial Sequence: Synthetic oligonucleotide
  misc_feature 1..20: note = Target: ANGPTL4; (-) strand; PAM type: NNNNGHTT; PAM sequence: CCTGGCTT
  source 1..20: mol_type = other DNA
tacagtcatgcagctctatg

SEQ ID NO: 6161 - DNA, 20 bp, synthetic construct
  misc_feature 1..20: note = Description of Artificial Sequence: Synthetic oligonucleotide
  misc_feature 1..20: note = Target: ANGPTL4; (-) strand; PAM type: NNNNGHTT; PAM sequence: TCCTGTTT
  source 1..20: mol_type = other DNA
ctcctggggtcaggcgatcc

SEQ ID NO: 6162 - DNA, 20 bp, synthetic construct
  misc_feature 1..20: note = Description of Artificial Sequence: Synthetic oligonucleotide
  misc_feature 1..20: note = Target: ANGPTL4; (-) strand; PAM type: NNNNGHTT; PAM sequence: CCCAGCTT
  source 1..20: mol_type = other DNA
ggtgaaaaccttggtgagga

SEQ ID NO: 6163 - DNA, 20 bp, synthetic construct
  misc_feature 1..20: note = Description of Artificial Sequence: Synthetic oligonucleotide
  misc_feature 1..20: note = Target: ANGPTL4; (-) strand; PAM type: NNNNGHTT; PAM sequence: TGCTGCTT
  source 1..20: mol_type = other DNA
gcagatgctgaattcgcagg

SEQ ID NO: 6164 - DNA, 20 bp, synthetic construct
  misc_feature 1..20: note = Description of Artificial Sequence: Synthetic oligonucleotide
  misc_feature 1..20: note = Target: ANGPTL4; (-) strand; PAM type: NNNNGHTT; PAM sequence: CCTGGCTT
  source 1..20: mol_type = other DNA
ctcccttgatcctagggtta

SEQ ID NO: 6165 - DNA, 20 bp, synthetic construct
  misc_feature 1..20: note = Description of Artificial Sequence: Synthetic oligonucleotide
  misc_feature 1..20: note = Target: ANGPTL4; (-) strand; PAM type: NNNNGHTT; PAM sequence: AGGTGCTT
  source 1..20: mol_type = other DNA
gcttggccacctcatggtct

SEQ ID NO: 6166 - DNA, 20 bp, synthetic construct
  misc_feature 1..20: note = Description of Artificial Sequence: Synthetic oligonucleotide
  misc_feature 1..20: note = Target: ANGPTL4; (-) strand; PAM type: NNNNGHTT; PAM sequence: GCAGGCTT
  source 1..20: mol_type = other DNA
cgggcagcctctttcttcgg

SEQ ID NO: 6167 - DNA, 20 bp, synthetic construct
  misc_feature 1..20: note = Description of Artificial Sequence: Synthetic oligonucleotide
  misc_feature 1..20: note = Target: ANGPTL4; (-) strand; PAM type: NNNNGHTT; PAM sequence: ATCAGCTT
  source 1..20: mol_type = other DNA
ctgaggaaggaggtgctccc

SEQ ID NO: 6168 - DNA, 20 bp, synthetic construct
  misc_feature 1..20: note = Description of Artificial Sequence: Synthetic oligonucleotide
  misc_feature 1..20: note = Target: ANGPTL4; (-) strand; PAM type: NNNNGHTT; PAM sequence: ACTGGCTT
  source 1..20: mol_type = other DNA
cagggcttcagggacagccc

SEQ ID NO: 6169 - DNA, 20 bp, synthetic construct
  misc_feature 1..20: note = Description of Artificial Sequence: Synthetic oligonucleotide
  misc_feature 1..20: note = Target: ANGPTL4; (-) strand; PAM type: NNNNGHTT; PAM sequence: CAGGGCTT
  source 1..20: mol_type = other DNA
ctgttccaatcagtgatcag

SEQ ID NO: 6170 - DNA, 20 bp, synthetic construct
  misc_feature 1..20: note = Description of Artificial Sequence: Synthetic oligonucleotide
  misc_feature 1..20: note = Target: ANGPTL4; (-) strand; PAM type: NNNNGHTT; PAM sequence: GAGTGTTT
  source 1..20: mol_type = other DNA
attggatttgtaagatacaa

SEQ ID NO: 6171 - DNA, 20 bp, synthetic construct
  misc_feature 1..20: note = Description of Artificial Sequence: Synthetic oligonucleotide
  misc_feature 1..20: note = Target: ANGPTL4; (-) strand; PAM type: NNNNGHTT; PAM sequence: ATTGGATT
  source 1..20: mol_type = other DNA
aggggtcagggacctggagc

SEQ ID NO: 6172 - DNA, 20 bp, synthetic construct
  misc_feature 1..20: note = Description of Artificial Sequence: Synthetic oligonucleotide
  misc_feature 1..20: note = Target: ANGPTL4; (-) strand; PAM type: NNNNGHTT; PAM sequence: CGGAGATT
  source 1..20: mol_type = other DNA
atgctgtggttcgagatgaa

SEQ ID NO: 6173 - DNA, 20 bp, synthetic construct
  misc_feature 1..20: note = Description of Artificial Sequence: Synthetic oligonucleotide
  misc_feature 1..20: note = Target: ANGPTL4; (-) strand; PAM type: NNNNGHTT; PAM sequence: GGGAGCTT
  source 1..20: mol_type = other DNA
gcacggaggtgggaaggagc

SEQ ID NO: 6174 - DNA, 20 bp, synthetic construct
  misc_feature 1..20: note = Description of Artificial Sequence: Synthetic oligonucleotide
  misc_feature 1..20: note = Target: ANGPTL4; (-) strand; PAM type: NNNNGHTT; PAM sequence: GGTGGCTT
  source 1..20: mol_type = other DNA
gaagcccctcatcctgggat

SEQ ID NO: 6175 - DNA, 20 bp, synthetic construct
  misc_feature 1..20: note = Description of Artificial Sequence: Synthetic oligonucleotide
  misc_feature 1..20: note = Target: ANGPTL4; (-) strand; PAM type: NNNNGHTT; PAM sequence: TGTGGCTT
  source 1..20: mol_type = other DNA
gcacgcggccaaaccaccag

SEQ ID NO: 6176 - DNA, 20 bp, synthetic construct
  misc_feature 1..20: note = Description of Artificial Sequence: Synthetic oligonucleotide
  misc_feature 1..20: note = Target: ANGPTL4; (-) strand; PAM type: NNNNGHTT; PAM sequence: AGACGCTT
  source 1..20: mol_type = other DNA
cgggcccagagtgaccagga

SEQ ID NO: 6177 - DNA, 20 bp, synthetic construct
  misc_feature 1..20: note = Description of Artificial Sequence: Synthetic oligonucleotide
  misc_feature 1..20: note = Target: ANGPTL4; (-) strand; PAM type: NNNNGHTT; PAM sequence: CTGAGATT
  source 1..20: mol_type = other DNA
gaggcagaggttgcagtgag

SEQ ID NO: 6178 - DNA, 20 bp, synthetic construct
  misc_feature 1..20: note = Description of Artificial Sequence: Synthetic oligonucleotide
  misc_feature 1..20: note = Target: ANGPTL4; (-) strand; PAM type: NNNNGHTT; PAM sequence: CAAAGATT
  source 1..20: mol_type = other DNA
cccatctctagtaaaacata

SEQ ID NO: 6179 - DNA, 20 bp, synthetic construct
  misc_feature 1..20: note = Description of Artificial Sequence: Synthetic oligonucleotide
  misc_feature 1..20: note = Target: ANGPTL4; (-) strand; PAM type: NNNNGHTT; PAM sequence: AGGAGTTT
  source 1..20: mol_type = other DNA
gggaggcgggcggatcggtc

SEQ ID NO: 6180 - DNA, 20 bp, synthetic construct
  misc_feature 1..20: note = Description of Artificial Sequence: Synthetic oligonucleotide
  misc_feature 1..20: note = Target: ANGPTL4; (-) strand; PAM type: NNNNGHTT; PAM sequence: CCCAGCTT
  source 1..20: mol_type = other DNA
cctcacttctctctctgggt

SEQ ID NO: 6181 - DNA, 20 bp, synthetic construct
  misc_feature 1..20: note = Description of Artificial Sequence: Synthetic oligonucleotide
  misc_feature 1..20: note = Target: ANGPTL4; (-) strand; PAM type: NNNNGHTT; PAM sequence: CTGGGATT
  source 1..20: mol_type = other DNA
agccttggcctcccaaagtg

SEQ ID NO: 6182 - DNA, 20 bp, synthetic construct
  misc_feature 1..20: note = Description of Artificial Sequence: Synthetic oligonucleotide
  misc_feature 1..20: note = Target: ANGPTL4; (-) strand; PAM type: NNNNGHTT; PAM sequence: GGGGGTTT
  source 1..20: mol_type = other DNA
tttgcattatttgtagagac

SEQ ID NO: 6183 - DNA, 20 bp, synthetic construct
  misc_feature 1..20: note = Description of Artificial Sequence: Synthetic oligonucleotide
  misc_feature 1..20: note = Target: ANGPTL4; (-) strand; PAM type: NNNNGHTT; PAM sequence: ACTAGTTT
  source 1..20: mol_type = other DNA
ggcatgtgccaccacgcccg

SEQ ID NO: 6184 - DNA, 20 bp, synthetic construct
  misc_feature 1..20: note = Description of Artificial Sequence: Synthetic oligonucleotide
  misc_feature 1..20: note = Target: ANGPTL4; (-) strand; PAM type: NNNNGHTT; PAM sequence: TTTTGTTT
  source 1..20: mol_type = other DNA
cctgggactctctttttttg

SEQ ID NO: 6185 - DNA, 20 bp, synthetic construct
  misc_feature 1..20: note = Description of Artificial Sequence: Synthetic oligonucleotide
  misc_feature 1..20: note = Target: ANGPTL4; (-) strand; PAM type: NNNNGHTT; PAM sequence: TTTTGTTT
  source 1..20: mol_type = other DNA
ccctgcctgggactctcttt

SEQ ID NO: 6186 - DNA, 20 bp, synthetic construct
  misc_feature 1..20: note = Description of Artificial Sequence: Synthetic oligonucleotide
  misc_feature 1..20: note = Target: ANGPTL4; (-) strand; PAM type: NNNNGHTT; PAM sequence: ACAGGCTT
  source 1..20: mol_type = other DNA
acccacaccctctctggcac

SEQ ID NO: 6187 - DNA, 20 bp, synthetic construct
  misc_feature 1..20: note = Description of Artificial Sequence: Synthetic oligonucleotide
  misc_feature 1..20: note = Target: ANGPTL4; (-) strand; PAM type: NNNNGHTT; PAM sequence: GGGGGCTT
  source 1..20: mol_type = other DNA
ctcaggagccaggcatatct

SEQ ID NO: 6188 - DNA, 20 bp, synthetic construct
  misc_feature 1..20: note = Description of Artificial Sequence: Synthetic oligonucleotide
  misc_feature 1..20: note = Target: ANGPTL4; (-) strand; PAM type: NNNNGHTT; PAM sequence: GCTGGATT
  source 1..20: mol_type = other DNA
aaatggcggagacccctgag

SEQ ID NO: 6189 - DNA, 20 bp, synthetic construct
  misc_feature 1..20: note = Description of Artificial Sequence: Synthetic oligonucleotide
  misc_feature 1..20: note = Target: ANGPTL4; (-) strand; PAM type: NNNNGHTT; PAM sequence: TTTTGTTT
  source 1..20: mol_type = other DNA
cctttaatttttttgttttg

SEQ ID NO: 6190 - DNA, 20 bp, synthetic construct
  misc_feature 1..20: note = Description of Artificial Sequence: Synthetic oligonucleotide
  misc_feature 1..20: note = Target: ANGPTL4; (-) strand; PAM type: NNNNGHTT; PAM sequence: TTTTGTTT
  source 1..20: mol_type = other DNA
ccctgcctttaatttttttg

SEQ ID NO: 6191 - DNA, 20 bp, synthetic construct
  misc_feature 1..20: note = Description of Artificial Sequence: Synthetic oligonucleotide
  misc_feature 1..20: note = Target: ANGPTL4; (-) strand; PAM type: NNNNGHTT; PAM sequence: TTTTGTTT
  source 1..20: mol_type = other DNA
caagaccctgcctttaattt

SEQ ID NO: 6192 - DNA, 20 bp, synthetic construct
  misc_feature 1..20: note = Description of Artificial Sequence: Synthetic oligonucleotide
  misc_feature 1..20: note = Target: ANGPTL4; (-) strand; PAM type: NNNNGHTT; PAM sequence: ACCAGCTT
  source 1..20: mol_type = other DNA
aaaaaaaaaaaaaaaaaaag

SEQ ID NO: 6193 - DNA, 20 bp, synthetic construct
  misc_feature 1..20: note = Description of Artificial Sequence: Synthetic oligonucleotide
  misc_feature 1..20: note = Target: ANGPTL4; (-) strand; PAM type: NNNNGHTT; PAM sequence: GGAGGTTT
  source 1..20: mol_type = other DNA
attgcttgaacccgggaggc

SEQ ID NO: 6194 - DNA, 20 bp, synthetic construct
  misc_feature 1..20: note = Description of Artificial Sequence: Synthetic oligonucleotide
  misc_feature 1..20: note = Target: ANGPTL4; (-) strand; PAM type: NNNNGHTT; PAM sequence: AATTGCTT
  source 1..20: mol_type = other DNA
tggggaggctgacgctggag

SEQ ID NO: 6195 - DNA, 20 bp, synthetic construct
  misc_feature 1..20: note = Description of Artificial Sequence: Synthetic oligonucleotide
  misc_feature 1..20: note = Target: ANGPTL4; (-) strand; PAM type: NNNNGHTT; PAM sequence: AGGAGTTT
  source 1..20: mol_type = other DNA
tcggcaaatcatttgaggtc

SEQ ID NO: 6196 - DNA, 20 bp, synthetic construct
  misc_feature 1..20: note = Description of Artificial Sequence: Synthetic oligonucleotide
  misc_feature 1..20: note = Target: ANGPTL4; (-) strand; PAM type: NNNNGHTT; PAM sequence: TCGGGATT
  source 1..20: mol_type = other DNA
atgataggcctcccaaagtg

SEQ ID NO: 6197 - DNA, 20 bp, synthetic construct
  misc_feature 1..20: note = Description of Artificial Sequence: Synthetic oligonucleotide
  misc_feature 1..20: note = Target: ANGPTL4; (-) strand; PAM type: NNNNGHTT; PAM sequence: CTGGGATT
  source 1..20: mol_type = other DNA
tgcctcaacctcccaaagtg

SEQ ID NO: 6198 - DNA, 20 bp, synthetic construct
  misc_feature 1..20: note = Description of Artificial Sequence: Synthetic oligonucleotide
  misc_feature 1..20: note = Target: ANGPTL4; (-) strand; PAM type: NNNNGHTT; PAM sequence: CGGGGTTT
  source 1..20: mol_type = other DNA
ttttgtatttttagtagaga

SEQ ID NO: 6199 - DNA, 20 bp, synthetic construct
  misc_feature 1..20: note = Description of Artificial Sequence: Synthetic oligonucleotide
  misc_feature 1..20: note = Target: ANGPTL4; (-) strand; PAM type: NNNNGHTT; PAM sequence: CTGGGATT
  source 1..20: mol_type = other DNA
tgcctcagccacctgagtag

SEQ ID NO: 6200 - DNA, 20 bp, synthetic construct
  misc_feature 1..20: note = Description of Artificial Sequence: Synthetic oligonucleotide
  misc_feature 1..20: note = Target: ANGPTL4; (-) strand; PAM type: NNNNGHTT; PAM sequence: AAGAGATT
  source 1..20: mol_type = other DNA
aacctctgcctcccaggttc

SEQ ID NO: 6201 - DNA, 20 bp, synthetic construct
  misc_feature 1..20: note = Description of Artificial Sequence: Synthetic oligonucleotide
  misc_feature 1..20: note = Target: ANGPTL4; (-) strand; PAM type: NNNNGHTT; PAM sequence: CGAGGTTT
  source 1..20: mol_type = other DNA
cctttgtttttttttagaaa

SEQ ID NO: 6202 - DNA, 20 bp, synthetic construct
  misc_feature 1..20: note = Description of Artificial Sequence: Synthetic oligonucleotide
  misc_feature 1..20: note = Target: ANGPTL4; (-) strand; PAM type: NNNNGHTT; PAM sequence: CTTTGTTT
  source 1..20: mol_type = other DNA
tgtaagccaccgtgctcagc

SEQ ID NO: 6203 - DNA, 20 bp, synthetic construct
  misc_feature 1..20: note = Description of Artificial Sequence: Synthetic oligonucleotide
  misc_feature 1..20: note = Target: ANGPTL4; (-) strand; PAM type: NNNNGHTT; PAM sequence: AAGTGATT
  source 1..20: mol_type = other DNA
ggtcttgaacttctgacctc

SEQ ID NO: 6204 - DNA, 20 bp, synthetic construct
  misc_feature 1..20: note = Description of Artificial Sequence: Synthetic oligonucleotide
  misc_feature 1..20: note = Target: ANGPTL4; (-) strand; PAM type: NNNNGHTT; PAM sequence: TAGGGTTT
  source 1..20: mol_type = other DNA
aatgtttatgttggtagaga

SEQ ID NO: 6205 - DNA, 20 bp, synthetic construct
  misc_feature 1..20: note = Description of Artificial Sequence: Synthetic oligonucleotide
  misc_feature 1..20: note = Target: ANGPTL4; (-) strand; PAM type: NNNNGHTT; PAM sequence: TAATGTTT
  source 1..20: mol_type = other DNA
gaatcacaggcacgcccggc

SEQ ID NO: 6206 - DNA, 20 bp, synthetic construct
  misc_feature 1..20: note = Description of Artificial Sequence: Synthetic oligonucleotide
  misc_feature 1..20: note = Target: ANGPTL4; (-) strand; PAM type: NNNNGHTT; PAM sequence: TTGTGCTT
  source 1..20: mol_type = other DNA
cttcggggctcaagcgattc

SEQ ID NO: 6207 - DNA, 20 bp, synthetic construct
  misc_feature 1..20: note = Description of Artificial Sequence: Synthetic oligonucleotide
  misc_feature 1..20: note = Target: ANGPTL4; (-) strand; PAM type: NNNNGHTT; PAM sequence: AAGCGATT
  source 1..20: mol_type = other DNA
aacctctgccttcggggctc

SEQ ID NO: 6208 - DNA, 20 bp, synthetic construct
  misc_feature 1..20: note = Description of Artificial Sequence: Synthetic oligonucleotide
  misc_feature 1..20: note = Target: ANGPTL4; (-) strand; PAM type: NNNNGHTT; PAM sequence: AAAAGCTT
  source 1..20: mol_type = other DNA
aaggacttctcagtggaaaa

SEQ ID NO: 6209 - DNA, 20 bp, synthetic construct
  misc_feature 1..20: note = Description of Artificial Sequence: Synthetic oligonucleotide
  misc_feature 1..20: note = Target: ANGPTL4; (-) strand; PAM type: NNNNGHTT; PAM sequence: GTAGGCTT
  source 1..20: mol_type = other DNA
ggatccccaaaccccgcctt

SEQ ID NO: 6210 - DNA, 20 bp, synthetic construct
  misc_feature 1..20: note = Description of Artificial Sequence: Synthetic oligonucleotide
  misc_feature 1..20: note = Target: ANGPTL4; (-) strand; PAM type: NNNNGHTT; PAM sequence: TGGAGCTT
  source 1..20: mol_type = other DNA
aatggtgtgaactcaggagg

SEQ ID NO: 6211 - DNA, 20 bp, synthetic construct
  misc_feature 1..20: note = Description of Artificial Sequence: Synthetic oligonucleotide
  misc_feature 1..20: note = Target: ANGPTL4; (-) strand; PAM type: NNNNGHTT; PAM sequence: AGATGTTT
  source 1..20: mol_type = other DNA
cctgtggagcaccattataa

SEQ ID NO: 6212 - DNA, 20 bp, synthetic construct
  misc_feature 1..20: note = Description of Artificial Sequence: Synthetic oligonucleotide
  misc_feature 1..20: note = Target: ANGPTL4; (-) strand; PAM type: NNNNGHTT; PAM sequence: CCCTGTTT
  source 1..20: mol_type = other DNA
gcttaggcaacagagtgaga

SEQ ID NO: 6213 - DNA, 20 bp, synthetic construct
  misc_feature 1..20: note = Description of Artificial Sequence: Synthetic oligonucleotide
  misc_feature 1..20: note = Target: ANGPTL4; (-) strand; PAM type: NNNNGHTT; PAM sequence: TCCAGCTT
  source 1..20: mol_type = other DNA
ccgagatcgcaccactgcac

SEQ ID NO: 6214 - DNA, 20 bp, synthetic construct
  misc_feature 1..20: note = Description of Artificial Sequence: Synthetic oligonucleotide
  misc_feature 1..20: note = Target: ANGPTL4; (-) strand; PAM type: NNNNGHTT; PAM sequence: AATTGCTT
  source 1..20: mol_type = other DNA
aatttttttttttttttgag

SEQ ID NO: 6215 - DNA, 20 bp, synthetic construct
  misc_feature 1..20: note = Description of Artificial Sequence: Synthetic oligonucleotide
  misc_feature 1..20: note = Target: ANGPTL4; (-) strand; PAM type: NNNNGHTT; PAM sequence: CTGGGATT
  source 1..20: mol_type = other DNA
cgcttcagcctcccaaagtg

SEQ ID NO: 6216 - DNA, 20 bp, synthetic construct
  misc_feature 1..20: note = Description of Artificial Sequence: Synthetic oligonucleotide
  misc_feature 1..20: note = Target: ANGPTL4; (-) strand; PAM type: NNNNGHTT; PAM sequence: ACTCGCTT
  source 1..20: mol_type = other DNA
ctcctgggctcaagtgatcc

SEQ ID NO: 6217 - DNA, 20 bp, synthetic construct
  misc_feature 1..20: note = Description of Artificial Sequence: Synthetic oligonucleotide
  misc_feature 1..20: note = Target: ANGPTL4; (-) strand; PAM type: NNNNGHTT; PAM sequence: CTCAGATT
  source 1..20: mol_type = other DNA
gacaggatttcgccctgttg

SEQ ID NO: 6218 - DNA, 20 bp, synthetic construct
  misc_feature 1..20: note = Description of Artificial Sequence: Synthetic oligonucleotide
  misc_feature 1..20: note = Target: ANGPTL4; (-) strand; PAM type: NNNNGHTT; PAM sequence: ACAGGATT
  source 1..20: mol_type = other DNA
tttttgtatttttaattgag

SEQ ID NO: 6219 - DNA, 20 bp, synthetic construct
  misc_feature 1..20: note = Description of Artificial Sequence: Synthetic oligonucleotide
  misc_feature 1..20: note = Target: ANGPTL4; (-) strand; PAM type: NNNNGHTT; PAM sequence: GCTAGTTT
  source 1..20: mol_type = other DNA
ggcaggcaccaccatgccca

SEQ ID NO: 6220 - DNA, 20 bp, synthetic construct
  misc_feature 1..20: note = Description of Artificial Sequence: Synthetic oligonucleotide
  misc_feature 1..20: note = Target: ANGPTL4; (-) strand; PAM type: NNNNGHTT; PAM sequence: CCAGGCTT
  source 1..20: mol_type = other DNA
caggggtctcactctgtcac

SEQ ID NO: 6221 - DNA, 20 bp, synthetic construct
  misc_feature 1..20: note = Description of Artificial Sequence: Synthetic oligonucleotide
  misc_feature 1..20: note = Target: ANGPTL4; (-) strand; PAM type: NNNNGHTT; PAM sequence: AAGTGATT
  source 1..20: mol_type = other DNA
agcgtcaaccttacgggctc

SEQ ID NO: 6222 - DNA, 20 bp, synthetic construct
  misc_feature 1..20: note = Description of Artificial Sequence: Synthetic oligonucleotide
  misc_feature 1..20: note = Target: ANGPTL4; (-) strand; PAM type: NNNNGHTT; PAM sequence: TTAAGTTT
  source 1..20: mol_type = other DNA
ccccacacccggccttattt

SEQ ID NO: 6223 - DNA, 20 bp, synthetic construct
  misc_feature 1..20: note = Description of Artificial Sequence: Synthetic oligonucleotide
  misc_feature 1..20: note = Target: ANGPTL4; (-) strand; PAM type: NNNNGHTT; PAM sequence: CTGGGATT
  source 1..20: mol_type = other DNA
cacctcggcctcccaaagtg

SEQ ID NO: 6224 - DNA, 20 bp, synthetic construct
  misc_feature 1..20: note = Description of Artificial Sequence: Synthetic oligonucleotide
  misc_feature 1..20: note = Target: ANGPTL4; (-) strand; PAM type: NNNNGHTT; PAM sequence: GCTAGTTT
  source 1..20: mol_type = other DNA
ggtttcaccatgttggccag

SEQ ID NO: 6225 - DNA, 20 bp, synthetic construct
  misc_feature 1..20: note = Description of Artificial Sequence: Synthetic oligonucleotide
  misc_feature 1..20: note = Target: ANGPTL4; (-) strand; PAM type: NNNNGHTT; PAM sequence: CAGGGTTT
  source 1..20: mol_type = other DNA
ttttgtatttttagtagaga

SEQ ID NO: 6226 - DNA, 20 bp, synthetic construct
  misc_feature 1..20: note = Description of Artificial Sequence: Synthetic oligonucleotide
  misc_feature 1..20: note = Target: ANGPTL4; (-) strand; PAM type: NNNNGHTT; PAM sequence: CTGGGATT
  source 1..20: mol_type = other DNA
ctcctcagcctcccaaagtg

SEQ ID NO: 6227 - DNA, 20 bp, synthetic construct
  misc_feature 1..20: note = Description of Artificial Sequence: Synthetic oligonucleotide
  misc_feature 1..20: note = Target: ANGPTL4; (-) strand; PAM type: NNNNGHTT; PAM sequence: GGGGGTTT
  source 1..20: mol_type = other DNA
ttttgtatttttagtagtga

SEQ ID NO: 6228 - DNA, 20 bp, synthetic construct
  misc_feature 1..20: note = Description of Artificial Sequence: Synthetic oligonucleotide
  misc_feature 1..20: note = Target: ANGPTL4; (-) strand; PAM type: NNNNGHTT; PAM sequence: GCTAGTTT
  source 1..20: mol_type = other DNA
ggcacccgccaccacgcctg

SEQ ID NO: 6229 - DNA, 20 bp, synthetic construct
  misc_feature 1..20: note = Description of Artificial Sequence: Synthetic oligonucleotide
  misc_feature 1..20: note = Target: ANGPTL4; (-) strand; PAM type: NNNNGHTT; PAM sequence: CCGGGATT
  source 1..20: mol_type = other DNA
tgcctcagcctcctgagtag

SEQ ID NO: 6230 - DNA, 20 bp, synthetic construct
  misc_feature 1..20: note = Description of Artificial Sequence: Synthetic oligonucleotide
  misc_feature 1..20: note = Target: ANGPTL4; (-) strand; PAM type: NNNNGHTT; PAM sequence: AAGGGATT
  source 1..20: mol_type = other DNA
cacctctgcctcccaggttc

SEQ ID NO: 6231 - DNA, 20 bp, synthetic construct
  misc_feature 1..20: note = Description of Artificial Sequence: Synthetic oligonucleotide
  misc_feature 1..20: note = Target: ANGPTL4; (-) strand; PAM type: NNNNGHTT; PAM sequence: CTGGGATT
  source 1..20: mol_type = other DNA
tccctcagcctcccgagtag

SEQ ID NO: 6232 - DNA, 20 bp, synthetic construct
  misc_feature 1..20: note = Description of Artificial Sequence: Synthetic oligonucleotide
  misc_feature 1..20: note = Target: ANGPTL4; (-) strand; PAM type: NNNNGHTT; PAM sequence: AAGTGATT
  source 1..20: mol_type = other DNA
aacctccgtctctcaggttt

SEQ ID NO: 6233 - DNA, 20 bp, synthetic construct
  misc_feature 1..20: note = Description of Artificial Sequence: Synthetic oligonucleotide
  misc_feature 1..20: note = Target: ANGPTL4; (-) strand; PAM type: NNNNGHTT; PAM sequence: TCAGGTTT
  source 1..20: mol_type = other DNA
ctcactgcaacctccgtctc

SEQ ID NO: 6234 - DNA, 20 bp, synthetic construct
  misc_feature 1..20: note = Description of Artificial Sequence: Synthetic oligonucleotide
  misc_feature 1..20: note = Target: ANGPTL4; (-) strand; PAM type: NNNNGHTT; PAM sequence: TTGAGATT
  source 1..20: mol_type = other DNA
tggacttgactttttttttt

SEQ ID NO: 6235 - DNA, 20 bp, synthetic construct
  misc_feature 1..20: note = Description of Artificial Sequence: Synthetic oligonucleotide
  misc_feature 1..20: note = Target: ANGPTL4; (-) strand; PAM type: NNNNGHTT; PAM sequence: CTGGGCTT
  source 1..20: mol_type = other DNA
gaggcaggttggggaccagg

SEQ ID NO: 6236 - DNA, 20 bp, synthetic construct
  misc_feature 1..20: note = Description of Artificial Sequence: Synthetic oligonucleotide
  misc_feature 1..20: note = Target: ANGPTL4; (-) strand; PAM type: NNNNGHTT; PAM sequence: TTAAGCTT
  source 1..20: mol_type = other DNA
tcttccagaagattcccttc

SEQ ID NO: 6237 - DNA, 20 bp, synthetic construct
  misc_feature 1..20: note = Description of Artificial Sequence: Synthetic oligonucleotide
  misc_feature 1..20: note = Target: ANGPTL4; (-) strand; PAM type: NNNNGHTT; PAM sequence: AGAAGATT
  source 1..20: mol_type = other DNA
gcggccccgccaggtcttcc

SEQ ID NO: 6238 - DNA, 20 bp, synthetic construct
  misc_feature 1..20: note = Description of Artificial Sequence: Synthetic oligonucleotide
  misc_feature 1..20: note = Target: ANGPTL4; (-) strand; PAM type: NNNNGHTT; PAM sequence: ACAAGTTT
  source 1..20: mol_type = other DNA
cgtggtcttcttctctgtcc

SEQ ID NO: 6239 - DNA, 20 bp, synthetic construct
  misc_feature 1..20: note = Description of Artificial Sequence: Synthetic oligonucleotide
  misc_feature 1..20: note = Target: ANGPTL4; (-) strand; PAM type: NNNNGHTT; PAM sequence: GGGGGCTT
  source 1..20: mol_type = other DNA
agcccccctgcactcagaaa

SEQ ID NO: 6240 - DNA, 20 bp, synthetic construct
  misc_feature 1..20: note = Description of Artificial Sequence: Synthetic oligonucleotide
  misc_feature 1..20: note = Target: ANGPTL4; (-) strand; PAM type: NNNNGHTT; PAM sequence: GCCTGCTT
  source 1..20: mol_type = other DNA
tccgcccagataccattggc

SEQ ID NO: 6241 - DNA, 20 bp, synthetic construct
  misc_feature 1..20: note = Description of Artificial Sequence: Synthetic oligonucleotide
  misc_feature 1..20: note = Target: ANGPTL4; (-) strand; PAM type: NNNNGHTT; PAM sequence: GGTTGCTT
  source 1..20: mol_type = other DNA
caaagaacaaagtgttctga

SEQ ID NO: 6242 - DNA, 20 bp, synthetic construct
  misc_feature 1..20: note = Description of Artificial Sequence: Synthetic oligonucleotide
  misc_feature 1..20: note = Target: ANGPTL4; (-) strand; PAM type: NNNNGHTT; PAM sequence: ACATGTTT
  source 1..20: mol_type = other DNA
caccgtgcctggccctggga

SEQ ID NO: 6243 - DNA, 20 bp, synthetic construct
  misc_feature 1..20: note = Description of Artificial Sequence: Synthetic oligonucleotide
  misc_feature 1..20: note = Target: ANGPTL4; (-) strand; PAM type: NNNNGHTT; PAM sequence: CTGGGATT
  source 1..20: mol_type = other DNA
tgtctcggcctcacaaatgg

SEQ ID NO: 6244 - DNA, 20 bp, synthetic construct
  misc_feature 1..20: note = Description of Artificial Sequence: Synthetic oligonucleotide
  misc_feature 1..20: note = Target: ANGPTL4; (-) strand; PAM type: NNNNGHTT; PAM sequence: AAGTGATT
  source 1..20: mol_type = other DNA
agcctctgcctccttggctc

SEQ ID NO: 6245 - DNA, 20 bp, synthetic construct
  misc_feature 1..20: note = Description of Artificial Sequence: Synthetic oligonucleotide
  misc_feature 1..20: note = Target: ANGPTL4; (-) strand; PAM type: NNNNGHTT; PAM sequence: CTCGGCTT
  source 1..20: mol_type = other DNA
ctggagtgcagtggcgcaat

SEQ ID NO: 6246 - DNA, 20 bp, synthetic construct
  misc_feature 1..20: note = Description of Artificial Sequence: Synthetic oligonucleotide
  misc_feature 1..20: note = Target: ANGPTL4; (-) strand; PAM type: NNNNGHTT; PAM sequence: TTTTGTTT
  source 1..20: mol_type = other DNA
ctctacgaaaaaaaaattat

SEQ ID NO: 6247 - DNA, 20 bp, synthetic construct
  misc_feature 1..20: note = Description of Artificial Sequence: Synthetic oligonucleotide
  misc_feature 1..20: note = Target: ANGPTL4; (-) strand; PAM type: NNNNGHTT; PAM sequence: CGGTGTTT
  source 1..20: mol_type = other DNA
caggaggatcccttgagtct

SEQ ID NO: 6248 - DNA, 20 bp, synthetic construct
  misc_feature 1..20: note = Description of Artificial Sequence: Synthetic oligonucleotide
  misc_feature 1..20: note = Target: ANGPTL4; (-) strand; PAM type: NNNNGHTT; PAM sequence: CTGGGATT
  source 1..20: mol_type = other DNA
tgcctcggcctcctaaagtg

SEQ ID NO: 6249 - DNA, 20 bp, synthetic construct
  misc_feature 1..20: note = Description of Artificial Sequence: Synthetic oligonucleotide
  misc_feature 1..20: note = Target: ANGPTL4; (-) strand; PAM type: NNNNGHTT; PAM sequence: CGGGGTTT
  source 1..20: mol_type = other DNA
ttttgtatttttagtagaga

SEQ ID NO: 6250 - DNA, 20 bp, synthetic construct
  misc_feature 1..20: note = Description of Artificial Sequence: Synthetic oligonucleotide
  misc_feature 1..20: note = Target: ANGPTL4; (-) strand; PAM type: NNNNGHTT; PAM sequence: CTGGGATT
  source 1..20: mol_type = other DNA
tgcctcagcctcctgagtag

SEQ ID NO: 6251 - DNA, 20 bp, synthetic construct
  misc_feature 1..20: note = Description of Artificial Sequence: Synthetic oligonucleotide
  misc_feature 1..20: note = Target: ANGPTL4; (-) strand; PAM type: NNNNGHTT; PAM sequence: AAGTGATT
  source 1..20: mol_type = other DNA
aacctccacctcccgagttc

SEQ ID NO: 6252 - DNA, 20 bp, synthetic construct
  misc_feature 1..20: note = Description of Artificial Sequence: Synthetic oligonucleotide
  misc_feature 1..20: note = Target: ANGPTL4; (-) strand; PAM type: NNNNGHTT; PAM sequence: TGAGGTTT
  source 1..20: mol_type = other DNA
ttttgtatttttagtagaaa

SEQ ID NO: 6253 - DNA, 20 bp, synthetic construct
  misc_feature 1..20: note = Description of Artificial Sequence: Synthetic oligonucleotide
  misc_feature 1..20: note = Target: ANGPTL4; (-) strand; PAM type: NNNNGHTT; PAM sequence: CTGGGATT
  source 1..20: mol_type = other DNA
ggcctcagcctcctgagtag

SEQ ID NO: 6254 - DNA, 20 bp, synthetic construct
  misc_feature 1..20: note = Description of Artificial Sequence: Synthetic oligonucleotide
  misc_feature 1..20: note = Target: ANGPTL4; (-) strand; PAM type: NNNNGHTT; PAM sequence: CCCCGATT
  source 1..20: mol_type = other DNA
cccacaagcaccgcgcgcag

SEQ ID NO: 6255 - DNA, 20 bp, synthetic construct
  misc_feature 1..20: note = Description of Artificial Sequence: Synthetic oligonucleotide
  misc_feature 1..20: note = Target: ANGPTL4; (-) strand; PAM type: NNNNGHTT; PAM sequence: GCTAGCTT
  source 1..20: mol_type = other DNA
ccaccagactcaggagccca

SEQ ID NO: 6256 - DNA, 20 bp, synthetic construct
  misc_feature 1..20: note = Description of Artificial Sequence: Synthetic oligonucleotide
  misc_feature 1..20: note = Target: ANGPTL4; (-) strand; PAM type: NNNNGHTT; PAM sequence: TGATGATT
  source 1..20: mol_type = other DNA
accctgagctagacataggg

SEQ ID NO: 6257 - DNA, 20 bp, synthetic construct
  misc_feature 1..20: note = Description of Artificial Sequence: Synthetic oligonucleotide
  misc_feature 1..20: note = Target: ANGPTL4; (-) strand; PAM type: NNNNGHTT; PAM sequence: TGCCGATT
  source 1..20: mol_type = other DNA
accttgagctagatacagag

SEQ ID NO: 6258 - DNA, 20 bp, synthetic construct
  misc_feature 1..20: note = Description of Artificial Sequence: Synthetic oligonucleotide
  misc_feature 1..20: note = Target: ANGPTL4; (-) strand; PAM type: NNNNGHTT; PAM sequence: GTGTGTTT
  source 1..20: mol_type = other DNA
tagacacagggtgctgattg

SEQ ID NO: 6259 - DNA, 20 bp, synthetic construct
  misc_feature 1..20: note = Description of Artificial Sequence: Synthetic oligonucleotide
  misc_feature 1..20: note = Target: ANGPTL4; (-) strand; PAM type: NNNNGHTT; PAM sequence: TGCTGATT
  source 1..20: mol_type = other DNA
accctgagctagacacaggg

SEQ ID NO: 6260 - DNA, 20 bp, synthetic construct
  misc_feature 1..20: note = Description of Artificial Sequence: Synthetic oligonucleotide
  misc_feature 1..20: note = Target: ANGPTL4; (-) strand; PAM type: NNNNGHTT; PAM sequence: TGTCGATT
  source 1..20: mol_type = other DNA
cacagtagctagatacagag

SEQ ID NO: 6261 - DNA, 20 bp, synthetic construct
  misc_feature 1..20: note = Description of Artificial Sequence: Synthetic oligonucleotide
  misc_feature 1..20: note = Target: ANGPTL4; (-) strand; PAM type: NNNNGHTT; PAM sequence: ACCAGATT
  source 1..20: mol_type = other DNA
caaaggttctccacatcccc

SEQ ID NO: 6262 - DNA, 20 bp, synthetic construct
  misc_feature 1..20: note = Description of Artificial Sequence: Synthetic oligonucleotide
  misc_feature 1..20: note = Target: ANGPTL4; (-) strand; PAM type: NNNNGHTT; PAM sequence: GTGCGTTT
  source 1..20: mol_type = other DNA
ttttgacagggcgctgattg

SEQ ID NO: 6263 - DNA, 20 bp, synthetic construct
  misc_feature 1..20: note = Description of Artificial Sequence: Synthetic oligonucleotide
  misc_feature 1..20: note = Target: ANGPTL4; (-) strand; PAM type: NNNNGHTT; PAM sequence: CGCTGATT
  source 1..20: mol_type = other DNA
actggtctgttttgacaggg

SEQ ID NO: 6264 - DNA, 20 bp, synthetic construct
  misc_feature 1..20: note = Description of Artificial Sequence: Synthetic oligonucleotide
  misc_feature 1..20: note = Target: ANGPTL4; (-) strand; PAM type: NNNNGHTT; PAM sequence: GTCTGTTT
  source 1..20: mol_type = other DNA
ctgattggtagagcccactg

SEQ ID NO: 6265 - DNA, 20 bp, synthetic construct
  misc_feature 1..20: note = Description of Artificial Sequence: Synthetic oligonucleotide
  misc_feature 1..20: note = Target: ANGPTL4; (-) strand; PAM type: NNNNGHTT; PAM sequence: TGCTGATT
  source 1..20: mol_type = other DNA
atctggccccacccacatcc

SEQ ID NO: 6266 - DNA, 20 bp, synthetic construct
  misc_feature 1..20: note = Description of Artificial Sequence: Synthetic oligonucleotide
  misc_feature 1..20: note = Target: ANGPTL4; (-) strand; PAM type: NNNNGHTT; PAM sequence: GCCTGCTT
  source 1..20: mol_type = other DNA
tgccactgctggctcgggca

SEQ ID NO: 6267 - DNA, 20 bp, synthetic construct
  misc_feature 1..20: note = Description of Artificial Sequence: Synthetic oligonucleotide
  misc_feature 1..20: note = Target: ANGPTL4; (-) strand; PAM type: NNNNGHTT; PAM sequence: CAAAGCTT
  source 1..20: mol_type = other DNA
tattgcaaagagcaaaagaa

SEQ ID NO: 6268 - DNA, 20 bp, synthetic construct
  misc_feature 1..20: note = Description of Artificial Sequence: Synthetic oligonucleotide
  misc_feature 1..20: note = Target: ANGPTL4; (-) strand; PAM type: NNNNGHTT; PAM sequence: ACAAGATT
  source 1..20: mol_type = other DNA
ggacccaaagagtgagcagt

SEQ ID NO: 6269 - DNA, 20 bp, synthetic construct
  misc_feature 1..20: note = Description of Artificial Sequence: Synthetic oligonucleotide
  misc_feature 1..20: note = Target: ANGPTL4; (-) strand; PAM type: NNNNGHTT; PAM sequence: CATGGTTT
  source 1..20: mol_type = other DNA
tttcttccttctggtgggtt

SEQ ID NO: 6270 - DNA, 20 bp, synthetic construct
  misc_feature 1..20: note = Description of Artificial Sequence: Synthetic oligonucleotide
  misc_feature 1..20: note = Target: ANGPTL4; (-) strand; PAM type: NNNNGHTT; PAM sequence: CAGCGTTT
  source 1..20: mol_type = other DNA
ttctgatgttcaggtgtgtt

SEQ ID NO: 6271 - DNA, 20 bp, synthetic construct
  misc_feature 1..20: note = Description of Artificial Sequence: Synthetic oligonucleotide
  misc_feature 1..20: note = Target: ANGPTL4; (-) strand; PAM type: NNNNGHTT; PAM sequence: GTTTGTTT
  source 1..20: mol_type = other DNA
cttaaggtggcgcgtctgga

SEQ ID NO: 6272 - DNA, 20 bp, synthetic construct
  misc_feature 1..20: note = Description of Artificial Sequence: Synthetic oligonucleotide
  misc_feature 1..20: note = Target: ANGPTL4; (-) strand; PAM type: NNNNGHTT; PAM sequence: TGGAGTTT
  source 1..20: mol_type = other DNA
agctcttaaggtggcgcgtc

SEQ ID NO: 6273 - DNA, 20 bp, synthetic construct
  misc_feature 1..20: note = Description of Artificial Sequence: Synthetic oligonucleotide
  misc_feature 1..20: note = Target: ANGPTL4; (-) strand; PAM type: NNNNGHTT; PAM sequence: TGTGGTTT
  source 1..20: mol_type = other DNA
gggttcagaaaatggacaga

SEQ ID NO: 6274 - DNA, 20 bp, synthetic construct
  misc_feature 1..20: note = Description of Artificial Sequence: Synthetic oligonucleotide
  misc_feature 1..20: note = Target: ANGPTL4; (-) strand; PAM type: NNNNGHTT; PAM sequence: AATCGCTT
  source 1..20: mol_type = other DNA
tcgggaggccgaggcaggag

SEQ ID NO: 6275 - DNA, 20 bp, synthetic construct
  misc_feature 1..20: note = Description of Artificial Sequence: Synthetic oligonucleotide
  misc_feature 1..20: note = Target: ANGPTL4; (-) strand; PAM type: NNNNGHTT; PAM sequence: AGGAGTTT
  source 1..20: mol_type = other DNA
cgggcagatcacttgaggtc

SEQ ID NO: 6276 - DNA, 20 bp, synthetic construct
  misc_feature 1..20: note = Description of Artificial Sequence: Synthetic oligonucleotide
  misc_feature 1..20: note = Target: ANGPTL4; (-) strand; PAM type: NNNNGHTT; PAM sequence: ACCAGTTT
  source 1..20: mol_type = other DNA
tggcttgcgcctgtaatccc

SEQ ID NO: 6277 - DNA, 20 bp, synthetic construct
  misc_feature 1..20: note = Description of Artificial Sequence: Synthetic oligonucleotide
  misc_feature 1..20: note = Target: ANGPTL4; (-) strand; PAM type: NNNNGHTT; PAM sequence: AGTGGCTT
  source 1..20: mol_type = other DNA
taaattaacaggccgggcac

SEQ ID NO: 6278 - DNA, 20 bp, synthetic construct
  misc_feature 1..20: note = Description of Artificial Sequence: Synthetic oligonucleotide
  misc_feature 1..20: note = Target: ANGPTL4; (-) strand; PAM type: NNNNGHTT; PAM sequence: AAAAGTTT
  source 1..20: mol_type = other DNA
gacctacctctacaaagcta

SEQ ID NO: 6279 - DNA, 20 bp, synthetic construct
  misc_feature 1..20: note = Description of Artificial Sequence: Synthetic oligonucleotide
  misc_feature 1..20: note = Target: ANGPTL4; (-) strand; PAM type: NNNNGHTT; PAM sequence: AAATGCTT
  source 1..20: mol_type = other DNA
ccccaggttggaggggcagg

SEQ ID NO: 6280 - DNA, 20 bp, synthetic construct
  misc_feature 1..20: note = Description of Artificial Sequence: Synthetic oligonucleotide
  misc_feature 1..20: note = Target: ANGPTL4; (-) strand; PAM type: NNNNGHTT; PAM sequence: GGTGGTTT
  source 1..20: mol_type = other DNA
gtgcgccaccgtgcccaggt

SEQ ID NO: 6281 - DNA, 20 bp, synthetic construct
  misc_feature 1..20: note = Description of Artificial Sequence: Synthetic oligonucleotide
  misc_feature 1..20: note = Target: ANGPTL4; (-) strand; PAM type: NNNNGHTT; PAM sequence: CGGGGTTT
  source 1..20: mol_type = other DNA
ttttgtatttttagtagaga

SEQ ID NO: 6282 - DNA, 20 bp, synthetic construct
  misc_feature 1..20: note = Description of Artificial Sequence: Synthetic oligonucleotide
  misc_feature 1..20: note = Target: ANGPTL4; (-) strand; PAM type: NNNNGHTT; PAM sequence: AAGTGATT
  source 1..20: mol_type = other DNA
aacctccgcctcccaggttc

SEQ ID NO: 6283 - DNA, 20 bp, synthetic construct
  misc_feature 1..20: note = Description of Artificial Sequence: Synthetic oligonucleotide
  misc_feature 1..20: note = Target: ANGPTL4; (-) strand; PAM type: NNNNGHTT; PAM sequence: TGGTGTTT
  source 1..20: mol_type = other DNA
cccttgttagtttcctgcca

SEQ ID NO: 6284 - DNA, 20 bp, synthetic construct
  misc_feature 1..20: note = Description of Artificial Sequence: Synthetic oligonucleotide
  misc_feature 1..20: note = Target: ANGPTL4; (-) strand; PAM type: NNNNGHTT; PAM sequence: GTTAGTTT
  source 1..20: mol_type = other DNA
tcccagcttcctggcccctt

SEQ ID NO: 6285 - DNA, 20 bp, synthetic construct
  misc_feature 1..20: note = Description of Artificial Sequence: Synthetic oligonucleotide
  misc_feature 1..20: note = Target: ANGPTL4; (-) strand; PAM type: NNNNGHTT; PAM sequence: CCCAGCTT
  source 1..20: mol_type = other DNA
taacaggtccaggttcacat

SEQ ID NO: 6286 - DNA, 20 bp, synthetic construct
  misc_feature 1..20: note = Description of Artificial Sequence: Synthetic oligonucleotide
  misc_feature 1..20: note = Target: ANGPTL4; (-) strand; PAM type: NNNNGHTT; PAM sequence: TGGAGTTT
  source 1..20: mol_type = other DNA
gtgatttacagctgcagctc

SEQ ID NO: 6287 - DNA, 20 bp, synthetic construct
  misc_feature 1..20: note = Description of Artificial Sequence: Synthetic oligonucleotide
  misc_feature 1..20: note = Target: ANGPTL4; (-) strand; PAM type: NNNNGHTT; PAM sequence: ATGTGATT
  source 1..20: mol_type = other DNA
tcctgtggtccaggagaggg

SEQ ID NO: 6288 - DNA, 20 bp, synthetic construct
  misc_feature 1..20: note = Description of Artificial Sequence: Synthetic oligonucleotide
  misc_feature 1..20: note = Target: ANGPTL4; (-) strand; PAM type: NNNNGHTT; PAM sequence: CTGGGATT
  source 1..20: mol_type = other DNA
agcctcagcctcccaaagag

SEQ ID NO: 6289 - DNA, 20 bp, synthetic construct
  misc_feature 1..20: note = Description of Artificial Sequence: Synthetic oligonucleotide
  misc_feature 1..20: note = Target: ANGPTL4; (-) strand; PAM type: NNNNGHTT; PAM sequence: CTGGGATT
  source 1..20: mol_type = other DNA
cgccttggcctcccaaagtg

SEQ ID NO: 6290 - DNA, 20 bp, synthetic construct
  misc_feature 1..20: note = Description of Artificial Sequence: Synthetic oligonucleotide
  misc_feature 1..20: note = Target: ANGPTL4; (-) strand; PAM type: NNNNGHTT; PAM sequence: TGGGGTTT
  source 1..20: mol_type = other DNA
ttttgtatttttagtagaga

SEQ ID NO: 6291 - DNA, 20 bp, synthetic construct
  misc_feature 1..20: note = Description of Artificial Sequence: Synthetic oligonucleotide
  misc_feature 1..20: note = Target: ANGPTL4; (-) strand; PAM type: NNNNGHTT; PAM sequence: CTGGGATT
  source 1..20: mol_type = other DNA
tgccttagcctctcaagtag

SEQ ID NO: 6292 - DNA, 20 bp, synthetic construct
  misc_feature 1..20: note = Description of Artificial Sequence: Synthetic oligonucleotide
  misc_feature 1..20: note = Target: ANGPTL4; (-) strand; PAM type: NNNNGHTT; PAM sequence: TCTTGATT
  source 1..20: mol_type = other DNA
tctcctccctctgaaatttc

SEQ ID NO: 6293 - DNA, 20 bp, synthetic construct
  misc_feature 1..20: note = Description of Artificial Sequence: Synthetic oligonucleotide
  misc_feature 1..20: note = Target: ANGPTL4; (-) strand; PAM type: NNNNGHTT; PAM sequence: GCCGGCTT
  source 1..20: mol_type = other DNA
ccacccgacccagaagccta

SEQ ID NO: 6294 - DNA, 20 bp, synthetic construct
  misc_feature 1..20: note = Description of Artificial Sequence: Synthetic oligonucleotide
  misc_feature 1..20: note = Target: ANGPTL4; (-) strand; PAM type: NNNNGHTT; PAM sequence: GTACGTTT
  source 1..20: mol_type = other DNA
tagacacagagtgctgattg

SEQ ID NO: 6295 - DNA, 20 bp, synthetic construct
  misc_feature 1..20: note = Description of Artificial Sequence: Synthetic oligonucleotide
  misc_feature 1..20: note = Target: ANGPTL4; (-) strand; PAM type: NNNNGHTT; PAM sequence: TGCTGATT
  source 1..20: mol_type = other DNA
tcctttagctagacacagag

SEQ ID NO: 6296 - DNA, 20 bp, synthetic construct
  misc_feature 1..20: note = Description of Artificial Sequence: Synthetic oligonucleotide
  misc_feature 1..20: note = Target: ANGPTL4; (-) strand; PAM type: NNNNGHTT; PAM sequence: TGCTGATT
  source 1..20: mol_type = other DNA
acctttagctagacacagag

SEQ ID NO: 6297 - DNA, 20 bp, synthetic construct
  misc_feature 1..20: note = Description of Artificial Sequence: Synthetic oligonucleotide
  misc_feature 1..20: note = Target: ANGPTL4; (-) strand; PAM type: NNNNGHTT; PAM sequence: CGCTGATT
  source 1..20: mol_type = other DNA
ctgattagctagacacagag

SEQ ID NO: 6298 - DNA, 20 bp, synthetic construct
  misc_feature 1..20: note = Description of Artificial Sequence: Synthetic oligonucleotide
  misc_feature 1..20: note = Target: ANGPTL4; (-) strand; PAM type: NNNNGHTT; PAM sequence: ACCTGATT
  source 1..20: mol_type = other DNA
gaaaattctccaagtcccct

SEQ ID NO: 6299 - DNA, 20 bp, synthetic construct
  misc_feature 1..20: note = Description of Artificial Sequence: Synthetic oligonucleotide
  misc_feature 1..20: note = Target: ANGPTL4; (+) strand; PAM type: NNNNGHTT; PAM sequence: CTCCGCTT
  source 1..20: mol_type = other DNA
ctggagtgcaatggtacgat

SEQ ID NO: 6300 - DNA, 20 bp, synthetic construct
  misc_feature 1..20: note = Description of Artificial Sequence: Synthetic oligonucleotide
  misc_feature 1..20: note = Target: ANGPTL4; (+) strand; PAM type: NNNNGHTT; PAM sequence: CTGAGATT
  source 1..20: mol_type = other DNA
cacctcagcctcacaaatag

SEQ ID NO: 6301 - DNA, 20 bp, synthetic construct
  misc_feature 1..20: note = Description of Artificial Sequence: Synthetic oligonucleotide
  misc_feature 1..20: note = Target: ANGPTL4; (+) strand; PAM type: NNNNGHTT; PAM sequence: TGGGGTTT
  source 1..20: mol_type = other DNA
ttctgtatttttagtagaga

SEQ ID NO: 6302 - DNA, 20 bp, synthetic construct
  misc_feature 1..20: note = Description of Artificial Sequence: Synthetic oligonucleotide
  misc_feature 1..20: note = Target: ANGPTL4; (+) strand; PAM type: NNNNGHTT; PAM sequence: CTAGGATT
  source 1..20: mol_type = other DNA
cacctcagcctcccaaagtg

SEQ ID NO: 6303 - DNA, 20 bp, synthetic construct
  misc_feature 1..20: note = Description of Artificial Sequence: Synthetic oligonucleotide
  misc_feature 1..20: note = Target: ANGPTL4; (+) strand; PAM type: NNNNGHTT; PAM sequence: CTCTGCTT
  source 1..20: mol_type = other DNA
ctggagtgcagtggcgcaat

SEQ ID NO: 6304 - DNA, 20 bp, synthetic construct
  misc_feature 1..20: note = Description of Artificial Sequence: Synthetic oligonucleotide
  misc_feature 1..20: note = Target: ANGPTL4; (+) strand; PAM type: NNNNGHTT; PAM sequence: CAGCGATT
  source 1..20: mol_type = other DNA
accctctgcctcccgggttc

SEQ ID NO: 6305 - DNA, 20 bp, synthetic construct
  misc_feature 1..20: note = Description of Artificial Sequence: Synthetic oligonucleotide
  misc_feature 1..20: note = Target: ANGPTL4; (+) strand; PAM type: NNNNGHTT; PAM sequence: CTGGGATT
  source 1..20: mol_type = other DNA
tgccccagcctcccgagtaa

SEQ ID NO: 6306 - DNA, 20 bp, synthetic construct
  misc_feature 1..20: note = Description of Artificial Sequence: Synthetic oligonucleotide
  misc_feature 1..20: note = Target: ANGPTL4; (+) strand; PAM type: NNNNGHTT; PAM sequence: CCGGGTTT
  source 1..20: mol_type = other DNA
ttttacatttttagtagaga

SEQ ID NO: 6307 - DNA, 20 bp, synthetic construct
  misc_feature 1..20: note = Description of Artificial Sequence: Synthetic oligonucleotide
  misc_feature 1..20: note = Target: ANGPTL4; (+) strand; PAM type: NNNNGHTT; PAM sequence: CTGGGATT
  source 1..20: mol_type = other DNA
caccttggcctcccaaagta

SEQ ID NO: 6308 - DNA, 20 bp, synthetic construct
  misc_feature 1..20: note = Description of Artificial Sequence: Synthetic oligonucleotide
  misc_feature 1..20: note = Target: ANGPTL4; (+) strand; PAM type: NNNNGHTT; PAM sequence: CCTAGCTT
  source 1..20: mol_type = other DNA
tacaagcatgagccaccttg

SEQ ID NO: 6309 - DNA, 20 bp, synthetic construct
  misc_feature 1..20: note = Description of Artificial Sequence: Synthetic oligonucleotide
  misc_feature 1..20: note = Target: ANGPTL4; (+) strand; PAM type: NNNNGHTT; PAM sequence: CAGAGATT
  source 1..20: mol_type = other DNA
gaggtggaagttgcagtgag

SEQ ID NO: 6310 - DNA, 20 bp, synthetic construct
  misc_feature 1..20: note = Description of Artificial Sequence: Synthetic oligonucleotide
  misc_feature 1..20: note = Target: ANGPTL4; (+) strand; PAM type: NNNNGHTT; PAM sequence: TTGGGATT
  source 1..20: mol_type = other DNA
tggccaaagtagcccacgcg

SEQ ID NO: 6311 - DNA, 20 bp, synthetic construct
  misc_feature 1..20: note = Description of Artificial Sequence: Synthetic oligonucleotide
  misc_feature 1..20: note = Target: ANGPTL4; (+) strand; PAM type: NNNNGHTT; PAM sequence: GTCAGTTT
  source 1..20: mol_type = other DNA
taagaggccacattctaaag

SEQ ID NO: 6312 - DNA, 20 bp, synthetic construct
  misc_feature 1..20: note = Description of Artificial Sequence: Synthetic oligonucleotide
  misc_feature 1..20: note = Target: ANGPTL4; (+) strand; PAM type: NNNNGHTT; PAM sequence: AGCTGCTT
  source 1..20: mol_type = other DNA
tggcacatgcctatagtccc

SEQ ID NO: 6313 - DNA, 20 bp, synthetic construct
  misc_feature 1..20: note = Description of Artificial Sequence: Synthetic oligonucleotide
  misc_feature 1..20: note = Target: ANGPTL4; (+) strand; PAM type: NNNNGHTT; PAM sequence: GGGAGTTT
  source 1..20: mol_type = other DNA
tgggaggatcacttgagcct

SEQ ID NO: 6314 - DNA, 20 bp, synthetic construct
  misc_feature 1..20: note = Description of Artificial Sequence: Synthetic oligonucleotide
  misc_feature 1..20: note = Target: ANGPTL4; (+) strand; PAM type: NNNNGHTT; PAM sequence: CTGTGATT
  source 1..20: mol_type = other DNA
gagtttgaggttgcggtgag

SEQ ID NO: 6315 - DNA, 20 bp, synthetic construct
  misc_feature 1..20: note = Description of Artificial Sequence: Synthetic oligonucleotide
  misc_feature 1..20: note = Target: ANGPTL4; (+) strand; PAM type: NNNNGHTT; PAM sequence: CTAAGCTT
  source 1..20: mol_type = other DNA
aggctgaggtggtggatagc

SEQ ID NO: 6316 - DNA, 20 bp, synthetic construct
  misc_feature 1..20: note = Description of Artificial Sequence: Synthetic oligonucleotide
  misc_feature 1..20: note = Target: ANGPTL4; (+) strand; PAM type: NNNNGHTT; PAM sequence: AGGAGTTT
  source 1..20: mol_type = other DNA
gtggtggatagcctaagctt

SEQ ID NO: 6317 - DNA, 20 bp, synthetic construct
  misc_feature 1..20: note = Description of Artificial Sequence: Synthetic oligonucleotide
  misc_feature 1..20: note = Target: ANGPTL4; (+) strand; PAM type: NNNNGHTT; PAM sequence: TGGAGCTT
  source 1..20: mol_type = other DNA
aatggcgggaacctgggagg

SEQ ID NO: 6318 - DNA, 20 bp, synthetic construct
  misc_feature 1..20: note = Description of Artificial Sequence: Synthetic oligonucleotide
  misc_feature 1..20: note = Target: ANGPTL4; (+) strand; PAM type: NNNNGHTT; PAM sequence: CCCCGTTT
  source 1..20: mol_type = other DNA
gcagagccaacatagtgaaa

SEQ ID NO: 6319 - DNA, 20 bp, synthetic construct
  misc_feature 1..20: note = Description of Artificial Sequence: Synthetic oligonucleotide
  misc_feature 1..20: note = Target: ANGPTL4; (+) strand; PAM type: NNNNGHTT; PAM sequence: AATCGCTT
  source 1..20: mol_type = other DNA
tcgggaggctgaggctggag

SEQ ID NO: 6320 - DNA, 20 bp, synthetic construct
  misc_feature 1..20: note = Description of Artificial Sequence: Synthetic oligonucleotide
  misc_feature 1..20: note = Target: ANGPTL4; (+) strand; PAM type: NNNNGHTT; PAM sequence: CGGAGATT
  source 1..20: mol_type = other DNA
gaggcagaggttgcagtgag

SEQ ID NO: 6321 - DNA, 20 bp, synthetic construct
  misc_feature 1..20: note = Description of Artificial Sequence: Synthetic oligonucleotide
  misc_feature 1..20: note = Target: ANGPTL4; (+) strand; PAM type: NNNNGHTT; PAM sequence: TGGAGCTT
  source 1..20: mol_type = other DNA
aatggcactaacccgggagg

SEQ ID NO: 6322 - DNA, 20 bp, synthetic construct
  misc_feature 1..20: note = Description of Artificial Sequence: Synthetic oligonucleotide
  misc_feature 1..20: note = Target: ANGPTL4; (+) strand; PAM type: NNNNGHTT; PAM sequence: CCGAGATT
  source 1..20: mol_type = other DNA
gaggtggagcttgcagtgag

SEQ ID NO: 6323 - DNA, 20 bp, synthetic construct
  misc_feature 1..20: note = Description of Artificial Sequence: Synthetic oligonucleotide
  misc_feature 1..20: note = Target: ANGPTL4; (+) strand; PAM type: NNNNGHTT; PAM sequence: AGCAGTTT
  source 1..20: mol_type = other DNA
taaataaataaaaaataaag

SEQ ID NO: 6324 - DNA, 20 bp, synthetic construct
  misc_feature 1..20: note = Description of Artificial Sequence: Synthetic oligonucleotide
  misc_feature 1..20: note = Target: ANGPTL4; (+) strand; PAM type: NNNNGHTT; PAM sequence: TGTAGATT
  source 1..20: mol_type = other DNA
ggcgacagtatagactcttt

SEQ ID NO: 6325 - DNA, 20 bp, synthetic construct
  misc_feature 1..20: note = Description of Artificial Sequence: Synthetic oligonucleotide
  misc_feature 1..20: note = Target: ANGPTL4; (+) strand; PAM type: NNNNGHTT; PAM sequence: ATGTGTTT
  source 1..20: mol_type = other DNA
cttaagaccctgggtctgtg

SEQ ID NO: 6326 - DNA, 20 bp, synthetic construct
  misc_feature 1..20: note = Description of Artificial Sequence: Synthetic oligonucleotide
  misc_feature 1..20: note = Target: ANGPTL4; (+) strand; PAM type: NNNNGHTT; PAM sequence: CTCAGTTT
  source 1..20: mol_type = other DNA
ggaagtaattgatcagttct

SEQ ID NO: 6327 - DNA, 20 bp, synthetic construct
  misc_feature 1..20: note = Description of Artificial Sequence: Synthetic oligonucleotide
  misc_feature 1..20: note = Target: ANGPTL4; (+) strand; PAM type: NNNNGHTT; PAM sequence: AGGAGCTT
  source 1..20: mol_type = other DNA
ttaagaaggtggggaagagg

SEQ ID NO: 6328 - DNA, 20 bp, synthetic construct
  misc_feature 1..20: note = Description of Artificial Sequence: Synthetic oligonucleotide
  misc_feature 1..20: note = Target: ANGPTL4; (+) strand; PAM type: NNNNGHTT; PAM sequence: GGGGGCTT
  source 1..20: mol_type = other DNA
tccctactcagagagaggct

SEQ ID NO: 6329 - DNA, 20 bp, synthetic construct
  misc_feature 1..20: note = Description of Artificial Sequence: Synthetic oligonucleotide
  misc_feature 1..20: note = Target: ANGPTL4; (+) strand; PAM type: NNNNGHTT; PAM sequence: TGGGGTTT
  source 1..20: mol_type = other DNA
catctgaacctactcctcac

SEQ ID NO: 6330 - DNA, 20 bp, synthetic construct
  misc_feature 1..20: note = Description of Artificial Sequence: Synthetic oligonucleotide
  misc_feature 1..20: note = Target: ANGPTL4; (+) strand; PAM type: NNNNGHTT; PAM sequence: GAGGGATT
  source 1..20: mol_type = other DNA
ttcctgtccactgctgctgg

SEQ ID NO: 6331 - DNA, 20 bp, synthetic construct
  misc_feature 1..20: note = Description of Artificial Sequence: Synthetic oligonucleotide
  misc_feature 1..20: note = Target: ANGPTL4; (+) strand; PAM type: NNNNGHTT; PAM sequence: TGCAGTTT
  source 1..20: mol_type = other DNA
tgcacgtcagcccttgggtg

SEQ ID NO: 6332 - DNA, 20 bp, synthetic construct
  misc_feature 1..20: note = Description of Artificial Sequence: Synthetic oligonucleotide
  misc_feature 1..20: note = Target: ANGPTL4; (+) strand; PAM type: NNNNGHTT; PAM sequence: TTCAGATT
  source 1..20: mol_type = other DNA
tcagcccttgggtgtgcagt

SEQ ID NO: 6333 - DNA, 20 bp, synthetic construct
  misc_feature 1..20: note = Description of Artificial Sequence: Synthetic oligonucleotide
  misc_feature 1..20: note = Target: ANGPTL4; (+) strand; PAM type: NNNNGHTT; PAM sequence: GCTGGCTT
  source 1..20: mol_type = other DNA
tttcagattccagagaatga

SEQ ID NO: 6334 - DNA, 20 bp, synthetic construct
  misc_feature 1..20: note = Description of Artificial Sequence: Synthetic oligonucleotide
  misc_feature 1..20: note = Target: ANGPTL4; (+) strand; PAM type: NNNNGHTT; PAM sequence: GCTGGTTT
  source 1..20: mol_type = other DNA
ccccgagttcttcctggcag

SEQ ID NO: 6335 - DNA, 20 bp, synthetic construct
  misc_feature 1..20: note = Description of Artificial Sequence: Synthetic oligonucleotide
  misc_feature 1..20: note = Target: ANGPTL4; (+) strand; PAM type: NNNNGHTT; PAM sequence: GCAAGTTT
  source 1..20: mol_type = other DNA
aagaggcagaggagatcggt

SEQ ID NO: 6336 - DNA, 20 bp, synthetic construct
  misc_feature 1..20: note = Description of Artificial Sequence: Synthetic oligonucleotide
  misc_feature 1..20: note = Target: ANGPTL4; (+) strand; PAM type: NNNNGHTT; PAM sequence: CTGGGCTT
  source 1..20: mol_type = other DNA
gaacttcaaacatacagggg

SEQ ID NO: 6337 - DNA, 20 bp, synthetic construct
  misc_feature 1..20: note = Description of Artificial Sequence: Synthetic oligonucleotide
  misc_feature 1..20: note = Target: ANGPTL4; (+) strand; PAM type: NNNNGHTT; PAM sequence: AAGCGATT
  source 1..20: mol_type = other DNA
aacctccgtctcctgagttc

SEQ ID NO: 6338 - DNA, 20 bp, synthetic construct
  misc_feature 1..20: note = Description of Artificial Sequence: Synthetic oligonucleotide
  misc_feature 1..20: note = Target: ANGPTL4; (+) strand; PAM type: NNNNGHTT; PAM sequence: CGAGGTTT
  source 1..20: mol_type = other DNA
ttttttatttttagtagaga

SEQ ID NO: 6339 - DNA, 20 bp, synthetic construct
  misc_feature 1..20: note = Description of Artificial Sequence: Synthetic oligonucleotide
  misc_feature 1..20: note = Target: ANGPTL4; (+) strand; PAM type: NNNNGHTT; PAM sequence: CTGGGATT
  source 1..20: mol_type = other DNA
ccacccggcctcccaaagtg

SEQ ID NO: 6340 - DNA, 20 bp, synthetic construct
  misc_feature 1..20: note = Description of Artificial Sequence: Synthetic oligonucleotide
  misc_feature 1..20: note = Target: ANGPTL4; (+) strand; PAM type: NNNNGHTT; PAM sequence: TCCTGCTT
  source 1..20: mol_type = other DNA
cctctttctgttctctaagt

SEQ ID NO: 6341 - DNA, 20 bp, synthetic construct
  misc_feature 1..20: note = Description of Artificial Sequence: Synthetic oligonucleotide
  misc_feature 1..20: note = Target: ANGPTL4; (+) strand; PAM type: NNNNGHTT; PAM sequence: AAGCGATT
  source 1..20: mol_type = other DNA
aacctccacctcccgggttc

SEQ ID NO: 6342 - DNA, 20 bp, synthetic construct
  misc_feature 1..20: note = Description of Artificial Sequence: Synthetic oligonucleotide
  misc_feature 1..20: note = Target: ANGPTL4; (+) strand; PAM type: NNNNGHTT; PAM sequence: CTGGGTTT
  source 1..20: mol_type = other DNA
ttttgtatttttagtagaga

SEQ ID NO: 6343 - DNA, 20 bp, synthetic construct
  misc_feature 1..20: note = Description of Artificial Sequence: Synthetic oligonucleotide
  misc_feature 1..20: note = Target: ANGPTL4; (+) strand; PAM type: NNNNGHTT; PAM sequence: GGGGGCTT
  source 1..20: mol_type = other DNA
ggtaaggcgggggcggaata

SEQ ID NO: 6344 - DNA, 20 bp, synthetic construct
  misc_feature 1..20: note = Description of Artificial Sequence: Synthetic oligonucleotide
  misc_feature 1..20: note = Target: ANGPTL4; (+) strand; PAM type: NNNNGHTT; PAM sequence: CACAGTTT
  source 1..20: mol_type = other DNA
tggagcgggggcgggagagc

SEQ ID NO: 6345 - DNA, 20 bp, synthetic construct
  misc_feature 1..20: note = Description of Artificial Sequence: Synthetic oligonucleotide
  misc_feature 1..20: note = Target: ANGPTL4; (+) strand; PAM type: NNNNGHTT; PAM sequence: ATCCGATT
  source 1..20: mol_type = other DNA
cggatcctcacacgactgtg

SEQ ID NO: 6346 - DNA, 20 bp, synthetic construct
  misc_feature 1..20: note = Description of Artificial Sequence: Synthetic oligonucleotide
  misc_feature 1..20: note = Target: ANGPTL4; (+) strand; PAM type: NNNNGHTT; PAM sequence: AGCGGCTT
  source 1..20: mol_type = other DNA
actgtgatccgattctttcc

SEQ ID NO: 6347 - DNA, 20 bp, synthetic construct
  misc_feature 1..20: note = Description of Artificial Sequence: Synthetic oligonucleotide
  misc_feature 1..20: note = Target: ANGPTL4; (+) strand; PAM type: NNNNGHTT; PAM sequence: CCGCGCTT
  source 1..20: mol_type = other DNA
gacccgtgcagtccaagtcg

SEQ ID NO: 6348 - DNA, 20 bp, synthetic construct
  misc_feature 1..20: note = Description of Artificial Sequence: Synthetic oligonucleotide
  misc_feature 1..20: note = Target: ANGPTL4; (+) strand; PAM type: NNNNGHTT; PAM sequence: CCTGGCTT
  source 1..20: mol_type = other DNA
tccgcgcccctagtggctct

SEQ ID NO: 6349 - DNA, 20 bp, synthetic construct
  misc_feature 1..20: note = Description of Artificial Sequence: Synthetic oligonucleotide
  misc_feature 1..20: note = Target: ANGPTL4; (+) strand; PAM type: NNNNGHTT; PAM sequence: CTGGGCTT
  source 1..20: mol_type = other DNA
gggtgcgcaactgtggctcc

SEQ ID NO: 6350 - DNA, 20 bp, synthetic construct
  misc_feature 1..20: note = Description of Artificial Sequence: Synthetic oligonucleotide
  misc_feature 1..20: note = Target: ANGPTL4; (+) strand; PAM type: NNNNGHTT; PAM sequence: TCACGCTT
  source 1..20: mol_type = other DNA
ataaagccaggtgcggtgac

SEQ ID NO: 6351 - DNA, 20 bp, synthetic construct
  misc_feature 1..20: note = Description of Artificial Sequence: Synthetic oligonucleotide
  misc_feature 1..20: note = Target: ANGPTL4; (+) strand; PAM type: NNNNGHTT; PAM sequence: CCAAGATT
  source 1..20: mol_type = other DNA
gaggcagaggttgcagtgag

SEQ ID NO: 6352 - DNA, 20 bp, synthetic construct
  misc_feature 1..20: note = Description of Artificial Sequence: Synthetic oligonucleotide
  misc_feature 1..20: note = Target: ANGPTL4; (+) strand; PAM type: NNNNGHTT; PAM sequence: TGGAGATT
  source 1..20: mol_type = other DNA
ccttgcctggcctcagcgga

SEQ ID NO: 6353 - DNA, 20 bp, synthetic construct
  misc_feature 1..20: note = Description of Artificial Sequence: Synthetic oligonucleotide
  misc_feature 1..20: note = Target: ANGPTL4; (+) strand; PAM type: NNNNGHTT; PAM sequence: CAAGGTTT
  source 1..20: mol_type = other DNA
taggcaagctgggtcctcac

SEQ ID NO: 6354 - DNA, 20 bp, synthetic construct
  misc_feature 1..20: note = Description of Artificial Sequence: Synthetic oligonucleotide
  misc_feature 1..20: note = Target: ANGPTL4; (+) strand; PAM type: NNNNGHTT; PAM sequence: CCTAGTTT
  source 1..20: mol_type = other DNA
acaccctcctcccgtcccat

SEQ ID NO: 6355 - DNA, 20 bp, synthetic construct
  misc_feature 1..20: note = Description of Artificial Sequence: Synthetic oligonucleotide
  misc_feature 1..20: note = Target: ANGPTL4; (+) strand; PAM type: NNNNGHTT; PAM sequence: CACTGATT
  source 1..20: mol_type = other DNA
gtccctgaagccctgctgat

SEQ ID NO: 6356 - DNA, 20 bp, synthetic construct
  misc_feature 1..20: note = Description of Artificial Sequence: Synthetic oligonucleotide
  misc_feature 1..20: note = Target: ANGPTL4; (+) strand; PAM type: NNNNGHTT; PAM sequence: TAGTGTTT
  source 1..20: mol_type = other DNA
gaggagggggtgccaggtag

SEQ ID NO: 6357 - DNA, 20 bp, synthetic construct
  misc_feature 1..20: note = Description of Artificial Sequence: Synthetic oligonucleotide
  misc_feature 1..20: note = Target: ANGPTL4; (+) strand; PAM type: NNNNGHTT; PAM sequence: TGTAGATT
  source 1..20: mol_type = other DNA
gggtgccaggtagtagtgtt

SEQ ID NO: 6358 - DNA, 20 bp, synthetic construct
  misc_feature 1..20: note = Description of Artificial Sequence: Synthetic oligonucleotide
  misc_feature 1..20: note = Target: ANGPTL4; (+) strand; PAM type: NNNNGHTT; PAM sequence: GTGGGCTT
  source 1..20: mol_type = other DNA
ccccctccccaccgcagaaa

SEQ ID NO: 6359 - DNA, 20 bp, synthetic construct
  misc_feature 1..20: note = Description of Artificial Sequence: Synthetic oligonucleotide
  misc_feature 1..20: note = Target: ANGPTL4; (+) strand; PAM type: NNNNGHTT; PAM sequence: AGGTGCTT
  source 1..20: mol_type = other DNA
ttgctgccaccacaagttgt

SEQ ID NO: 6360 - DNA, 20 bp, synthetic construct
  misc_feature 1..20: note = Description of Artificial Sequence: Synthetic oligonucleotide
  misc_feature 1..20: note = Target: ANGPTL4; (+) strand; PAM type: NNNNGHTT; PAM sequence: CACGGTTT
  source 1..20: mol_type = other DNA
tctctaagttcacggcccca

SEQ ID NO: 6361 - DNA, 20 bp, synthetic construct
  misc_feature 1..20: note = Description of Artificial Sequence: Synthetic oligonucleotide
  misc_feature 1..20: note = Target: ANGPTL4; (+) strand; PAM type: NNNNGHTT; PAM sequence: GAAAGTTT
  source 1..20: mol_type = other DNA
ctgtccacagccaactgggt

SEQ ID NO: 6362 - DNA, 20 bp, synthetic construct
  misc_feature 1..20: note = Description of Artificial Sequence: Synthetic oligonucleotide
  misc_feature 1..20: note = Target: ANGPTL4; (+) strand; PAM type: NNNNGHTT; PAM sequence: GCAGGCTT
  source 1..20: mol_type = other DNA
ctcacaccctagggtcagtg

SEQ ID NO: 6363 - DNA, 20 bp, synthetic construct
  misc_feature 1..20: note = Description of Artificial Sequence: Synthetic oligonucleotide
  misc_feature 1..20: note = Target: ANGPTL4; (+) strand; PAM type: NNNNGHTT; PAM sequence: AGGGGCTT
  source 1..20: mol_type = other DNA
aaagccaccatcccaggatg

SEQ ID NO: 6364 - DNA, 20 bp, synthetic construct
  misc_feature 1..20: note = Description of Artificial Sequence: Synthetic oligonucleotide
  misc_feature 1..20: note = Target: ANGPTL4; (+) strand; PAM type: NNNNGHTT; PAM sequence: GGTGGTTT
  source 1..20: mol_type = other DNA
gcattcatggaagccacact

SEQ ID NO: 6365 - DNA, 20 bp, synthetic construct
  misc_feature 1..20: note = Description of Artificial Sequence: Synthetic oligonucleotide
  misc_feature 1..20: note = Target: ANGPTL4; (+) strand; PAM type: NNNNGHTT; PAM sequence: GACTGTTT
  source 1..20: mol_type = other DNA
ttcattcattcatttgtcaa

SEQ ID NO: 6366 - DNA, 20 bp, synthetic construct
  misc_feature 1..20: note = Description of Artificial Sequence: Synthetic oligonucleotide
  misc_feature 1..20: note = Target: ANGPTL4; (+) strand; PAM type: NNNNGHTT; PAM sequence: TTTTGTTT
  source 1..20: mol_type = other DNA
tcattcatttgtcaagactg

SEQ ID NO: 6367 - DNA, 20 bp, synthetic construct
  misc_feature 1..20: note = Description of Artificial Sequence: Synthetic oligonucleotide
  misc_feature 1..20: note = Target: ANGPTL4; (+) strand; PAM type: NNNNGHTT; PAM sequence: GTTTGCTT
  source 1..20: mol_type = other DNA
tcatttgtcaagactgtttt

SEQ ID NO: 6368 - DNA, 20 bp, synthetic construct
  misc_feature 1..20: note = Description of Artificial Sequence: Synthetic oligonucleotide
  misc_feature 1..20: note = Target: ANGPTL4; (+) strand; PAM type: NNNNGHTT; PAM sequence: AAGTGATT
  source 1..20: mol_type = other DNA
ctctgcctcccactgggttc

SEQ ID NO: 6369 - DNA, 20 bp, synthetic construct
  misc_feature 1..20: note = Description of Artificial Sequence: Synthetic oligonucleotide
  misc_feature 1..20: note = Target: ANGPTL4; (+) strand; PAM type: NNNNGHTT; PAM sequence: ATGGGATT
  source 1..20: mol_type = other DNA
tgcctcagcctctcaagtag

SEQ ID NO: 6370 - DNA, 20 bp, synthetic construct
  misc_feature 1..20: note = Description of Artificial Sequence: Synthetic oligonucleotide
  misc_feature 1..20: note = Target: ANGPTL4; (+) strand; PAM type: NNNNGHTT; PAM sequence: AAGTGATT
  source 1..20: mol_type = other DNA
aacctctgcctcccgggttc

SEQ ID NO: 6371 - DNA, 20 bp, synthetic construct
  misc_feature 1..20: note = Description of Artificial Sequence: Synthetic oligonucleotide
  misc_feature 1..20: note = Target: ANGPTL4; (+) strand; PAM type: NNNNGHTT; PAM sequence: CTGGGATT
  source 1..20: mol_type = other DNA
tgcctctgcctcctaaggag

SEQ ID NO: 6372 - DNA, 20 bp, synthetic construct
  misc_feature 1..20: note = Description of Artificial Sequence: Synthetic oligonucleotide
  misc_feature 1..20: note = Target: ANGPTL4; (+) strand; PAM type: NNNNGHTT; PAM sequence: GTATGTTT
  source 1..20: mol_type = other DNA
atcacacccagctaatcttt

SEQ ID NO: 6373 - DNA, 20 bp, synthetic construct
  misc_feature 1..20: note = Description of Artificial Sequence: Synthetic oligonucleotide
  misc_feature 1..20: note = Target: ANGPTL4; (+) strand; PAM type: NNNNGHTT; PAM sequence: TGGGGTTT
  source 1..20: mol_type = other DNA
tttgtatgttttactagaga

SEQ ID NO: 6374 - DNA, 20 bp, synthetic construct
  misc_feature 1..20: note = Description of Artificial Sequence: Synthetic oligonucleotide
  misc_feature 1..20: note = Target: ANGPTL4; (+) strand; PAM type: NNNNGHTT; PAM sequence: GCTGGATT
  source 1..20: mol_type = other DNA
atccgcccgcctcccaaagt

SEQ ID NO: 6375 - DNA, 20 bp, synthetic construct
  misc_feature 1..20: note = Description of Artificial Sequence: Synthetic oligonucleotide
  misc_feature 1..20: note = Target: ANGPTL4; (+) strand; PAM type: NNNNGHTT; PAM sequence: AATTGCTT
  source 1..20: mol_type = other DNA
tgctccggaggctgcggcag

SEQ ID NO: 6376 - DNA, 20 bp, synthetic construct
  misc_feature 1..20: note = Description of Artificial Sequence: Synthetic oligonucleotide
  misc_feature 1..20: note = Target: ANGPTL4; (+) strand; PAM type: NNNNGHTT; PAM sequence: CCAAGATT
  source 1..20: mol_type = other DNA
gaggcggaggttgcagtgag

SEQ ID NO: 6377 - DNA, 20 bp, synthetic construct
  misc_feature 1..20: note = Description of Artificial Sequence: Synthetic oligonucleotide
  misc_feature 1..20: note = Target: ANGPTL4; (+) strand; PAM type: NNNNGHTT; PAM sequence: ATAAGATT
  source 1..20: mol_type = other DNA
ggcagagaggtggtcatgag

SEQ ID NO: 6378 - DNA, 20 bp, synthetic construct
  misc_feature 1..20: note = Description of Artificial Sequence: Synthetic oligonucleotide
  misc_feature 1..20: note = Target: ANGPTL4; (+) strand; PAM type: NNNNGHTT; PAM sequence: TCCTGTTT
  source 1..20: mol_type = other DNA
accccccccaggggctgccc

SEQ ID NO: 6379 - DNA, 20 bp, synthetic construct
  misc_feature 1..20: note = Description of Artificial Sequence: Synthetic oligonucleotide
  misc_feature 1..20: note = Target: ANGPTL4; (+) strand; PAM type: NNNNGHTT; PAM sequence: CAGGGATT
  source 1..20: mol_type = other DNA
tatctcccttcagggctgcc

SEQ ID NO: 6380 - DNA, 20 bp, synthetic construct
  misc_feature 1..20: note = Description of Artificial Sequence: Synthetic oligonucleotide
  misc_feature 1..20: note = Target: ANGPTL4; (+) strand; PAM type: NNNNGHTT; PAM sequence: TGGAGTTT
  source 1..20: mol_type = other DNA
ttttttttttttttttgaga

SEQ ID NO: 6381 - DNA, 20 bp, synthetic construct
  misc_feature 1..20: note = Description of Artificial Sequence: Synthetic oligonucleotide
  misc_feature 1..20: note = Target: ANGPTL4; (+) strand; PAM type: NNNNGHTT; PAM sequence: CTGGGTTT
  source 1..20: mol_type = other DNA
ttttgtatttttagtagaga

SEQ ID NO: 6382 - DNA, 20 bp, synthetic construct
  misc_feature 1..20: note = Description of Artificial Sequence: Synthetic oligonucleotide
  misc_feature 1..20: note = Target: ANGPTL4; (+) strand; PAM type: NNNNGHTT; PAM sequence: AAATGATT
  source 1..20: mol_type = other DNA
ggtctcaaactcctgacctc

SEQ ID NO: 6383 - DNA, 20 bp, synthetic construct
  misc_feature 1..20: note = Description of Artificial Sequence: Synthetic oligonucleotide
  misc_feature 1..20: note = Target: ANGPTL4; (+) strand; PAM type: NNNNGHTT; PAM sequence: CTGGGATT
  source 1..20: mol_type = other DNA
gactttggcctcccaaaatg

SEQ ID NO: 6384 - DNA, 20 bp, synthetic construct
  misc_feature 1..20: note = Description of Artificial Sequence: Synthetic oligonucleotide
  misc_feature 1..20: note = Target: ANGPTL4; (+) strand; PAM type: NNNNGHTT; PAM sequence: CCTCGTTT
  source 1..20: mol_type = other DNA
acctgggcaacacaacaaaa

SEQ ID NO: 6385 - DNA, 20 bp, synthetic construct
  misc_feature 1..20: note = Description of Artificial Sequence: Synthetic oligonucleotide
  misc_feature 1..20: note = Target: ANGPTL4; (+) strand; PAM type: NNNNGHTT; PAM sequence: GGTGGCTT
  source 1..20: mol_type = other DNA
aaaaaacaaaggctgagcac

SEQ ID NO: 6386 - DNA, 20 bp, synthetic construct
  misc_feature 1..20: note = Description of Artificial Sequence: Synthetic oligonucleotide
  misc_feature 1..20: note = Target: ANGPTL4; (+) strand; PAM type: NNNNGHTT; PAM sequence: CTGTGATT
  source 1..20: mol_type = other DNA
taaacattagccgggcgtgc

SEQ ID NO: 6387 - DNA, 20 bp, synthetic construct
  misc_feature 1..20: note = Description of Artificial Sequence: Synthetic oligonucleotide
  misc_feature 1..20: note = Target: ANGPTL4; (+) strand; PAM type: NNNNGHTT; PAM sequence: AGCTGCTT
  source 1..20: mol_type = other DNA
ccgggcgtgcctgtgattcc

SEQ ID NO: 6388 - DNA, 20 bp, synthetic construct
  misc_feature 1..20: note = Description of Artificial Sequence: Synthetic oligonucleotide
  misc_feature 1..20: note = Target: ANGPTL4; (+) strand; PAM type: NNNNGHTT; PAM sequence: AATCGCTT
  source 1..20: mol_type = other DNA
ttgtggggctgaagcacaag

SEQ ID NO: 6389 - DNA, 20 bp, synthetic construct
  misc_feature 1..20: note = Description of Artificial Sequence: Synthetic oligonucleotide
  misc_feature 1..20: note = Target: ANGPTL4; (+) strand; PAM type: NNNNGHTT; PAM sequence: CTGAGATT
  source 1..20: mol_type = other DNA
aaggcagaggttgcagtgag

SEQ ID NO: 6390 - DNA, 20 bp, synthetic construct
  misc_feature 1..20: note = Description of Artificial Sequence: Synthetic oligonucleotide
  misc_feature 1..20: note = Target: ANGPTL4; (+) strand; PAM type: NNNNGHTT; PAM sequence: GAAAGCTT
  source 1..20: mol_type = other DNA
aaaaaaaaaaaaaaaaaaaa

SEQ ID NO: 6391 - DNA, 20 bp, synthetic construct
  misc_feature 1..20: note = Description of Artificial Sequence: Synthetic oligonucleotide
  misc_feature 1..20: note = Target: ANGPTL4; (+) strand; PAM type: NNNNGHTT; PAM sequence: CGGGGTTT
  source 1..20: mol_type = other DNA
cattacaagaggttacaaca

SEQ ID NO: 6392 - DNA, 20 bp, synthetic construct
  misc_feature 1..20: note = Description of Artificial Sequence: Synthetic oligonucleotide
  misc_feature 1..20: note = Target: ANGPTL4; (+) strand; PAM type: NNNNGHTT; PAM sequence: AGAGGCTT
  source 1..20: mol_type = other DNA
acccagttcagctggcccag

SEQ ID NO: 6393 - DNA, 20 bp, synthetic construct
  misc_feature 1..20: note = Description of Artificial Sequence: Synthetic oligonucleotide
  misc_feature 1..20: note = Target: ANGPTL4; (+) strand; PAM type: NNNNGHTT; PAM sequence: TGCAGATT
  source 1..20: mol_type = other DNA
cagctggcccagagaggctt

SEQ ID NO: 6394 - DNA, 20 bp, synthetic construct
  misc_feature 1..20: note = Description of Artificial Sequence: Synthetic oligonucleotide
  misc_feature 1..20: note = Target: ANGPTL4; (+) strand; PAM type: NNNNGHTT; PAM sequence: CTGGGTTT
  source 1..20: mol_type = other DNA
gtgagggagctgctgtcttc

SEQ ID NO: 6395 - DNA, 20 bp, synthetic construct
  misc_feature 1..20: note = Description of Artificial Sequence: Synthetic oligonucleotide
  misc_feature 1..20: note = Target: ANGPTL4; (+) strand; PAM type: NNNNGHTT; PAM sequence: GGGGGTTT
  source 1..20: mol_type = other DNA
gctgtcttcctgggtttgga

SEQ ID NO: 6396 - DNA, 20 bp, synthetic construct
  misc_feature 1..20: note = Description of Artificial Sequence: Synthetic oligonucleotide
  misc_feature 1..20: note = Target: ANGPTL4; (+) strand; PAM type: NNNNGHTT; PAM sequence: TGGTGCTT
  source 1..20: mol_type = other DNA
tcctgggtttggagggggtt

SEQ ID NO: 6397 - DNA, 20 bp, synthetic construct
  misc_feature 1..20: note = Description of Artificial Sequence: Synthetic oligonucleotide
  misc_feature 1..20: note = Target: ANGPTL4; (+) strand; PAM type: NNNNGHTT; PAM sequence: CGGGGTTT
  source 1..20: mol_type = other DNA
gccctgggaagcctacaagg

SEQ ID NO: 6398 - DNA, 20 bp, synthetic construct
  misc_feature 1..20: note = Description of Artificial Sequence: Synthetic oligonucleotide
  misc_feature 1..20: note = Target: ANGPTL4; (+) strand; PAM type: NNNNGHTT; PAM sequence: AGGTGTTT
  source 1..20: mol_type = other DNA
ggtttggggatccccacggt

SEQ ID NO: 6399 - DNA, 20 bp, synthetic construct
  misc_feature 1..20: note = Description of Artificial Sequence: Synthetic oligonucleotide
  misc_feature 1..20: note = Target: ANGPTL4; (+) strand; PAM type: NNNNGHTT; PAM sequence: AGCAGCTT
  source 1..20: mol_type = other DNA
ctgccatgccacacccagcc

SEQ ID NO: 6400 - DNA, 20 bp, synthetic construct
  misc_feature 1..20: note = Description of Artificial Sequence: Synthetic oligonucleotide
  misc_feature 1..20: note = Target: ANGPTL4; (+) strand; PAM type: NNNNGHTT; PAM sequence: ATCTGTTT
  source 1..20: mol_type = other DNA
tgccttcaaccccacattgc

SEQ ID NO: 6401 - DNA, 20 bp, synthetic construct
  misc_feature 1..20: note = Description of Artificial Sequence: Synthetic oligonucleotide
  misc_feature 1..20: note = Target: ANGPTL4; (+) strand; PAM type: NNNNGHTT; PAM sequence: GTGTGATT
  source 1..20: mol_type = other DNA
ctcttccttacatgccgtgt

SEQ ID NO: 6402 - DNA, 20 bp, synthetic construct
  misc_feature 1..20: note = Description of Artificial Sequence: Synthetic oligonucleotide
  misc_feature 1..20: note = Target: ANGPTL4; (+) strand; PAM type: NNNNGHTT; PAM sequence: CTCAGTTT
  source 1..20: mol_type = other DNA
actaacttagcctatctggc

SEQ ID NO: 6403 - DNA, 20 bp, synthetic construct
  misc_feature 1..20: note = Description of Artificial Sequence: Synthetic oligonucleotide
  misc_feature 1..20: note = Target: ANGPTL4; (+) strand; PAM type: NNNNGHTT; PAM sequence: ATGTGTTT
  source 1..20: mol_type = other DNA
gtctttacttttatttactt

SEQ ID NO: 6404 - DNA, 20 bp, synthetic construct
  misc_feature 1..20: note = Description of Artificial Sequence: Synthetic oligonucleotide
  misc_feature 1..20: note = Target: ANGPTL4; (+) strand; PAM type: NNNNGHTT; PAM sequence: GTTTGTTT
  source 1..20: mol_type = other DNA
ttacttttatttacttatgt

SEQ ID NO: 6405 - DNA, 20 bp, synthetic construct
  misc_feature 1..20: note = Description of Artificial Sequence: Synthetic oligonucleotide
  misc_feature 1..20: note = Target: ANGPTL4; (+) strand; PAM type: NNNNGHTT; PAM sequence: GAGTGCTT
  source 1..20: mol_type = other DNA
tcactttgtcacccaggctg

SEQ ID NO: 6406 - DNA, 20 bp, synthetic construct
  misc_feature 1..20: note = Description of Artificial Sequence: Synthetic oligonucleotide
  misc_feature 1..20: note = Target: ANGPTL4; (+) strand; PAM type: NNNNGHTT; PAM sequence: TGGGGTTT
  source 1..20: mol_type = other DNA
ttttgtatttttagtagaga

SEQ ID NO: 6407 - DNA, 20 bp, synthetic construct
  misc_feature 1..20: note = Description of Artificial Sequence: Synthetic oligonucleotide
  misc_feature 1..20: note = Target: ANGPTL4; (+) strand; PAM type: NNNNGHTT; PAM sequence: CTGGGATT
  source 1..20: mol_type = other DNA
tgcctcagcctcccaaagtg

SEQ ID NO: 6408 - DNA, 20 bp, synthetic construct
  misc_feature 1..20: note = Description of Artificial Sequence: Synthetic oligonucleotide
  misc_feature 1..20: note = Target: ANGPTL4; (+) strand; PAM type: NNNNGHTT; PAM sequence: AAGTGATT
  source 1..20: mol_type = other DNA
agcctccgcctcctgggttc

SEQ ID NO: 6409 - DNA, 20 bp, synthetic construct
  misc_feature 1..20: note = Description of Artificial Sequence: Synthetic oligonucleotide
  misc_feature 1..20: note = Target: ANGPTL4; (+) strand; PAM type: NNNNGHTT; PAM sequence: CTGGGATT
  source 1..20: mol_type = other DNA
tgcctcagcctcctgagtag

SEQ ID NO: 6410 - DNA, 20 bp, synthetic construct
  misc_feature 1..20: note = Description of Artificial Sequence: Synthetic oligonucleotide
  misc_feature 1..20: note = Target: ANGPTL4; (+) strand; PAM type: NNNNGHTT; PAM sequence: AATTGTTT
  source 1..20: mol_type = other DNA
tcccgccaccatgcacagat

SEQ ID NO: 6411 - DNA, 20 bp, synthetic construct
  misc_feature 1..20: note = Description of Artificial Sequence: Synthetic oligonucleotide
  misc_feature 1..20: note = Target: ANGPTL4; (+) strand; PAM type: NNNNGHTT; PAM sequence: CGGGGTTT
  source 1..20: mol_type = other DNA
ttttgtatttttagtagaga

SEQ ID NO: 6412 - DNA, 20 bp, synthetic construct
  misc_feature 1..20: note = Description of Artificial Sequence: Synthetic oligonucleotide
  misc_feature 1..20: note = Target: ANGPTL4; (+) strand; PAM type: NNNNGHTT; PAM sequence: TTGGGATT
  source 1..20: mol_type = other DNA
cacctcggcctcccaaagtg

SEQ ID NO: 6413 - DNA, 20 bp, synthetic construct
  misc_feature 1..20: note = Description of Artificial Sequence: Synthetic oligonucleotide
  misc_feature 1..20: note = Target: ANGPTL4; (+) strand; PAM type: NNNNGHTT; PAM sequence: ACAGGATT
  source 1..20: mol_type = other DNA
catctttataatggtgctcc

SEQ ID NO: 6414 - DNA, 20 bp, synthetic construct
  misc_feature 1..20: note = Description of Artificial Sequence: Synthetic oligonucleotide
  misc_feature 1..20: note = Target: ANGPTL4; (+) strand; PAM type: NNNNGHTT; PAM sequence: AATTGTTT
  source 1..20: mol_type = other DNA
ccaggccctgtctcaaaaaa

SEQ ID NO: 6415 - DNA, 20 bp, synthetic construct
  misc_feature 1..20: note = Description of Artificial Sequence: Synthetic oligonucleotide
  misc_feature 1..20: note = Target: ANGPTL4; (+) strand; PAM type: NNNNGHTT; PAM sequence: AGGAGTTT
  source 1..20: mol_type = other DNA
agggtggatcacatgaggta

SEQ ID NO: 6416 - DNA, 20 bp, synthetic construct
  misc_feature 1..20: note = Description of Artificial Sequence: Synthetic oligonucleotide
  misc_feature 1..20: note = Target: ANGPTL4; (+) strand; PAM type: NNNNGHTT; PAM sequence: CCGAGATT
  source 1..20: mol_type = other DNA
ggaggcagaggtgcagtgag

SEQ ID NO: 6417 - DNA, 20 bp, synthetic construct
  misc_feature 1..20: note = Description of Artificial Sequence: Synthetic oligonucleotide
  misc_feature 1..20: note = Target: ANGPTL4; (+) strand; PAM type: NNNNGHTT; PAM sequence: GGTGGTTT
  source 1..20: mol_type = other DNA
cctgaccccggcaggaggct

SEQ ID NO: 6418 - DNA, 20 bp, synthetic construct
  misc_feature 1..20: note = Description of Artificial Sequence: Synthetic oligonucleotide
  misc_feature 1..20: note = Target: ANGPTL4; (+) strand; PAM type: NNNNGHTT; PAM sequence: AGAAGCTT
  source 1..20: mol_type = other DNA
ctccatcccacagcagcggc

SEQ ID NO: 6419 - DNA, 20 bp, synthetic construct
  misc_feature 1..20: note = Description of Artificial Sequence: Synthetic oligonucleotide
  misc_feature 1..20: note = Target: ANGPTL4; (+) strand; PAM type: NNNNGHTT; PAM sequence: TGGAGCTT
  source 1..20: mol_type = other DNA
gaggcgtggaccaaggggca

SEQ ID NO: 6420 - DNA, 20 bp, synthetic construct
  misc_feature 1..20: note = Description of Artificial Sequence: Synthetic oligonucleotide
  misc_feature 1..20: note = Target: ANGPTL4; (+) strand; PAM type: NNNNGHTT; PAM sequence: CAGGGCTT
  source 1..20: mol_type = other DNA
tcacattgactgacggggac

SEQ ID NO: 6421 - DNA, 20 bp, synthetic construct
  misc_feature 1..20: note = Description of Artificial Sequence: Synthetic oligonucleotide
  misc_feature 1..20: note = Target: ANGPTL4; (+) strand; PAM type: NNNNGHTT; PAM sequence: TCTTGTTT
  source 1..20: mol_type = other DNA
cagaacactttgttctttgt

SEQ ID NO: 6422 - DNA, 20 bp, synthetic construct
  misc_feature 1..20: note = Description of Artificial Sequence: Synthetic oligonucleotide
  misc_feature 1..20: note = Target: ANGPTL4; (+) strand; PAM type: NNNNGHTT; PAM sequence: GTTTGTTT
  source 1..20: mol_type = other DNA
acactttgttctttgttctt

SEQ ID NO: 6423 - DNA, 20 bp, synthetic construct
  misc_feature 1..20: note = Description of Artificial Sequence: Synthetic oligonucleotide
  misc_feature 1..20: note = Target: ANGPTL4; (+) strand; PAM type: NNNNGHTT; PAM sequence: CTCAGTTT
  source 1..20: mol_type = other DNA
cacagatctagtaagttacc

SEQ ID NO: 6424 - DNA, 20 bp, synthetic construct
  misc_feature 1..20: note = Description of Artificial Sequence: Synthetic oligonucleotide
  misc_feature 1..20: note = Target: ANGPTL4; (+) strand; PAM type: NNNNGHTT; PAM sequence: GTTTGTTT
  source 1..20: mol_type = other DNA
gatctagtaagttaccctca

SEQ ID NO: 6425 - DNA, 20 bp, synthetic construct
  misc_feature 1..20: note = Description of Artificial Sequence: Synthetic oligonucleotide
  misc_feature 1..20: note = Target: ANGPTL4; (+) strand; PAM type: NNNNGHTT; PAM sequence: CCGAGATT
  source 1..20: mol_type = other DNA
aggcagaggctgcaaataag

SEQ ID NO: 6426 - DNA, 20 bp, synthetic construct
  misc_feature 1..20: note = Description of Artificial Sequence: Synthetic oligonucleotide
  misc_feature 1..20: note = Target: ANGPTL4; (+) strand; PAM type: NNNNGHTT; PAM sequence: CTTGGCTT
  source 1..20: mol_type = other DNA
gactcaagggatcctcctgc

SEQ ID NO: 6427 - DNA, 20 bp, synthetic construct
  misc_feature 1..20: note = Description of Artificial Sequence: Synthetic oligonucleotide
  misc_feature 1..20: note = Target: ANGPTL4; (+) strand; PAM type: NNNNGHTT; PAM sequence: ATGGGATT
  source 1..20: mol_type = other DNA
tgccttggcttcacaaagtg

SEQ ID NO: 6428 - DNA, 20 bp, synthetic construct
  misc_feature 1..20: note = Description of Artificial Sequence: Synthetic oligonucleotide
  misc_feature 1..20: note = Target: ANGPTL4; (+) strand; PAM type: NNNNGHTT; PAM sequence: CTGTGTTT
  source 1..20: mol_type = other DNA
tgaaggctctaattctacat

SEQ ID NO: 6429 - DNA, 20 bp, synthetic construct
  misc_feature 1..20: note = Description of Artificial Sequence: Synthetic oligonucleotide
  misc_feature 1..20: note = Target: ANGPTL4; (+) strand; PAM type: NNNNGHTT; PAM sequence: ACTTGATT
  source 1..20: mol_type = other DNA
agcctgggtgacagagcaag

SEQ ID NO: 6430 - DNA, 20 bp, synthetic construct
  misc_feature 1..20: note = Description of Artificial Sequence: Synthetic oligonucleotide
  misc_feature 1..20: note = Target: ANGPTL4; (+) strand; PAM type: NNNNGHTT; PAM sequence: AATTGCTT
  source 1..20: mol_type = other DNA
tcaggaggctgaggccggag

SEQ ID NO: 6431 - DNA, 20 bp, synthetic construct
  misc_feature 1..20: note = Description of Artificial Sequence: Synthetic oligonucleotide
  misc_feature 1..20: note = Target: ANGPTL4; (+) strand; PAM type: NNNNGHTT; PAM sequence: CTCAGCTT
  source 1..20: mol_type = other DNA
ccaaggccggagctggctcc

SEQ ID NO: 6432 - DNA, 20 bp, synthetic construct
  misc_feature 1..20: note = Description of Artificial Sequence: Synthetic oligonucleotide
  misc_feature 1..20: note = Target: ANGPTL4; (+) strand; PAM type: NNNNGHTT; PAM sequence: CGGTGCTT
  source 1..20: mol_type = other DNA
gccggaatcggggctgcgcg

SEQ ID NO: 6433 - DNA, 20 bp, synthetic construct
  misc_feature 1..20: note = Description of Artificial Sequence: Synthetic oligonucleotide
  misc_feature 1..20: note = Target: ANGPTL4; (+) strand; PAM type: NNNNGHTT; PAM sequence: GTGGGCTT
  source 1..20: mol_type = other DNA
agctggagttccgggtgggc

SEQ ID NO: 6434 - DNA, 20 bp, synthetic construct
  misc_feature 1..20: note = Description of Artificial Sequence: Synthetic oligonucleotide
  misc_feature 1..20: note = Target: ANGPTL4; (+) strand; PAM type: NNNNGHTT; PAM sequence: AGGGGCTT
  source 1..20: mol_type = other DNA
cctgctggccccgggcaatg

SEQ ID NO: 6435 - DNA, 20 bp, synthetic construct
  misc_feature 1..20: note = Description of Artificial Sequence: Synthetic oligonucleotide
  misc_feature 1..20: note = Target: ANGPTL4; (+) strand; PAM type: NNNNGHTT; PAM sequence: CTGCGCTT
  source 1..20: mol_type = other DNA
gcagtgccagcgcaccggcg

SEQ ID NO: 6436 - DNA, 20 bp, synthetic construct
  misc_feature 1..20: note = Description of Artificial Sequence: Synthetic oligonucleotide
  misc_feature 1..20: note = Target: ANGPTL4; (+) strand; PAM type: NNNNGHTT; PAM sequence: GCTTGATT
  source 1..20: mol_type = other DNA
tgccagcgcaccggcgctgc

SEQ ID NO: 6437 - DNA, 20 bp, synthetic construct
  misc_feature 1..20: note = Description of Artificial Sequence: Synthetic oligonucleotide
  misc_feature 1..20: note = Target: ANGPTL4; (+) strand; PAM type: NNNNGHTT; PAM sequence: CAGGGATT
  source 1..20: mol_type = other DNA
tggagaacctttgtctagct

SEQ ID NO: 6438 - DNA, 20 bp, synthetic construct
  misc_feature 1..20: note = Description of Artificial Sequence: Synthetic oligonucleotide
  misc_feature 1..20: note = Target: ANGPTL4; (+) strand; PAM type: NNNNGHTT; PAM sequence: CAGGGTTT
  source 1..20: mol_type = other DNA
tcatcaccctatgtctagct

SEQ ID NO: 6439 - DNA, 20 bp, synthetic construct
  misc_feature 1..20: note = Description of Artificial Sequence: Synthetic oligonucleotide
  misc_feature 1..20: note = Target: ANGPTL4; (+) strand; PAM type: NNNNGHTT; PAM sequence: CAGGGATT
  source 1..20: mol_type = other DNA
gagaacctttatgtctagct

SEQ ID NO: 6440 - DNA, 20 bp, synthetic construct
  misc_feature 1..20: note = Description of Artificial Sequence: Synthetic oligonucleotide
  misc_feature 1..20: note = Target: ANGPTL4; (+) strand; PAM type: NNNNGHTT; PAM sequence: CAAGGTTT
  source 1..20: mol_type = other DNA
tcggcactctgtatctagct

SEQ ID NO: 6441 - DNA, 20 bp, synthetic construct
  misc_feature 1..20: note = Description of Artificial Sequence: Synthetic oligonucleotide
  misc_feature 1..20: note = Target: ANGPTL4; (+) strand; PAM type: NNNNGHTT; PAM sequence: CAGGGTTT
  source 1..20: mol_type = other DNA
tcagcaccctgtgtctagct

SEQ ID NO: 6442 - DNA, 20 bp, synthetic construct
  misc_feature 1..20: note = Description of Artificial Sequence: Synthetic oligonucleotide
  misc_feature 1..20: note = Target: ANGPTL4; (+) strand; PAM type: NNNNGHTT; PAM sequence: GGAAGCTT
  source 1..20: mol_type = other DNA
tgggtccccttccacactgt

SEQ ID NO: 6443 - DNA, 20 bp, synthetic construct
  misc_feature 1..20: note = Description of Artificial Sequence: Synthetic oligonucleotide
  misc_feature 1..20: note = Target: ANGPTL4; (+) strand; PAM type: NNNNGHTT; PAM sequence: CACTGCTT
  source 1..20: mol_type = other DNA
ctgctcactctttgggtccc

SEQ ID NO: 6444 - DNA, 20 bp, synthetic construct
  misc_feature 1..20: note = Description of Artificial Sequence: Synthetic oligonucleotide
  misc_feature 1..20: note = Target: ANGPTL4; (+) strand; PAM type: NNNNGHTT; PAM sequence: TGCAGCTT
  source 1..20: mol_type = other DNA
taacactcactgcgaaggtc

SEQ ID NO: 6445 - DNA, 20 bp, synthetic construct
  misc_feature 1..20: note = Description of Artificial Sequence: Synthetic oligonucleotide
  misc_feature 1..20: note = Target: ANGPTL4; (+) strand; PAM type: NNNNGHTT; PAM sequence: CATGGCTT
  source 1..20: mol_type = other DNA
gaacacttaccgcaagggtc

SEQ ID NO: 6446 - DNA, 20 bp, synthetic construct
  misc_feature 1..20: note = Description of Artificial Sequence: Synthetic oligonucleotide
  misc_feature 1..20: note = Target: ANGPTL4; (+) strand; PAM type: NNNNGHTT; PAM sequence: GCGAGATT
  source 1..20: mol_type = other DNA
actccagcccaggcaacaga

SEQ ID NO: 6447 - DNA, 20 bp, synthetic construct
  misc_feature 1..20: note = Description of Artificial Sequence: Synthetic oligonucleotide
  misc_feature 1..20: note = Target: ANGPTL4; (+) strand; PAM type: NNNNGHTT; PAM sequence: CTCAGCTT
  source 1..20: mol_type = other DNA
ctggagcgcggtagtgcgat

SEQ ID NO: 6448 - DNA, 20 bp, synthetic construct
  misc_feature 1..20: note = Description of Artificial Sequence: Synthetic oligonucleotide
  misc_feature 1..20: note = Target: ANGPTL4; (+) strand; PAM type: NNNNGHTT; PAM sequence: AAGCGATT
  source 1..20: mol_type = other DNA
aacctccacctcccgggttc

SEQ ID NO: 6449 - DNA, 20 bp, synthetic construct
  misc_feature 1..20: note = Description of Artificial Sequence: Synthetic oligonucleotide
  misc_feature 1..20: note = Target: ANGPTL4; (+) strand; PAM type: NNNNGHTT; PAM sequence: CTGAGATT
  source 1..20: mol_type = other DNA
tgcctcggcctcccgagtag

SEQ ID NO: 6450 - DNA, 20 bp, synthetic construct
  misc_feature 1..20: note = Description of Artificial Sequence: Synthetic oligonucleotide
  misc_feature 1..20: note = Target: ANGPTL4; (+) strand; PAM type: NNNNGHTT; PAM sequence: ATGGGTTT
  source 1..20: mol_type = other DNA
tttttgtatttttagtatag

SEQ ID NO: 6451 - DNA, 20 bp, synthetic construct
  misc_feature 1..20: note = Description of Artificial Sequence: Synthetic oligonucleotide
  misc_feature 1..20: note = Target: ANGPTL4; (+) strand; PAM type: NNNNGHTT; PAM sequence: GTGGGATT
  source 1..20: mol_type = other DNA
cgcctcggcctccgaaactg

SEQ ID NO: 6452 - DNA, 20 bp, synthetic construct
  misc_feature 1..20: note = Description of Artificial Sequence: Synthetic oligonucleotide
  misc_feature 1..20: note = Target: ANGPTL4; (+) strand; PAM type: NNNNGHTT; PAM sequence: CTGTGATT
  source 1..20: mol_type = other DNA
tgcgctagaagaaaaaatat

SEQ ID NO: 6453 - DNA, 20 bp, synthetic construct
  misc_feature 1..20: note = Description of Artificial Sequence: Synthetic oligonucleotide
  misc_feature 1..20: note = Target: ANGPTL4; (+) strand; PAM type: NNNNGHTT; PAM sequence: AGCTGTTT
  source 1..20: mol_type = other DNA
ctggcaggtgctggggacac

SEQ ID NO: 6454 - DNA, 20 bp, synthetic construct
  misc_feature 1..20: note = Description of Artificial Sequence: Synthetic oligonucleotide
  misc_feature 1..20: note = Target: ANGPTL4; (+) strand; PAM type: NNNNGHTT; PAM sequence: TTTAGCTT
  source 1..20: mol_type = other DNA
tgggtataggtgacaaactt

SEQ ID NO: 6455 - DNA, 20 bp, synthetic construct
  misc_feature 1..20: note = Description of Artificial Sequence: Synthetic oligonucleotide
  misc_feature 1..20: note = Target: ANGPTL4; (+) strand; PAM type: NNNNGHTT; PAM sequence: CCTTGTTT
  source 1..20: mol_type = other DNA
gaggctgccctctccaggtt

SEQ ID NO: 6456 - DNA, 20 bp, synthetic construct
  misc_feature 1..20: note = Description of Artificial Sequence: Synthetic oligonucleotide
  misc_feature 1..20: note = Target: ANGPTL4; (+) strand; PAM type: NNNNGHTT; PAM sequence: GCAGGCTT
  source 1..20: mol_type = other DNA
ttgcctgtgtcctgtactga

SEQ ID NO: 6457 - DNA, 20 bp, synthetic construct
  misc_feature 1..20: note = Description of Artificial Sequence: Synthetic oligonucleotide
  misc_feature 1..20: note = Target: ANGPTL4; (+) strand; PAM type: NNNNGHTT; PAM sequence: CTGAGATT
  source 1..20: mol_type = other DNA
gaggcggaggttgcagtgag

SEQ ID NO: 6458 - DNA, 20 bp, synthetic construct
  misc_feature 1..20: note = Description of Artificial Sequence: Synthetic oligonucleotide
  misc_feature 1..20: note = Target: ANGPTL4; (+) strand; PAM type: NNNNGHTT; PAM sequence: GATGGTTT
  source 1..20: mol_type = other DNA
tcctgcatttggaaaatggg

SEQ ID NO: 6459 - DNA, 20 bp, synthetic construct
  misc_feature 1..20: note = Description of Artificial Sequence: Synthetic oligonucleotide
  misc_feature 1..20: note = Target: ANGPTL4; (+) strand; PAM type: NNNNGHTT; PAM sequence: TGGAGTTT
  source 1..20: mol_type = other DNA
aggctgaggctggaggacct

SEQ ID NO: 6460 - DNA, 20 bp, synthetic construct
  misc_feature 1..20: note = Description of Artificial Sequence: Synthetic oligonucleotide
  misc_feature 1..20: note = Target: ANGPTL4; (+) strand; PAM type: NNNNGHTT; PAM sequence: AATTGCTT
  source 1..20: mol_type = other DNA
cttgagaggctaaggcagag

SEQ ID NO: 6461 - DNA, 20 bp, synthetic construct
  misc_feature 1..20: note = Description of Artificial Sequence: Synthetic oligonucleotide
  misc_feature 1..20: note = Target: ANGPTL4; (+) strand; PAM type: NNNNGHTT; PAM sequence: CTGGGTTT
  source 1..20: mol_type = other DNA
gagacagaagtccatgtcct

SEQ ID NO: 6462 - DNA, 20 bp, synthetic construct
  misc_feature 1..20: note = Description of Artificial Sequence: Synthetic oligonucleotide
  misc_feature 1..20: note = Target: ANGPTL4; (+) strand; PAM type: NNNNGHTT; PAM sequence: ATTTGTTT
  source 1..20: mol_type = other DNA
ggatatggggaaggagtcaa

SEQ ID NO: 6463 - DNA, 20 bp, synthetic construct
  misc_feature 1..20: note = Description of Artificial Sequence: Synthetic oligonucleotide
  misc_feature 1..20: note = Target: ANGPTL4; (+) strand; PAM type: NNNNGHTT; PAM sequence: ATGGGATT
  source 1..20: mol_type = other DNA
ggaaggagtcaaatttgttt

SEQ ID NO: 6464 - DNA, 20 bp, synthetic construct
  misc_feature 1..20: note = Description of Artificial Sequence: Synthetic oligonucleotide
  misc_feature 1..20: note = Target: ANGPTL4; (+) strand; PAM type: NNNNGHTT; PAM sequence: CTAGGCTT
  source 1..20: mol_type = other DNA
ggattgagaggtgaagccgg

SEQ ID NO: 6465 - DNA, 20 bp, synthetic construct
  misc_feature 1..20: note = Description of Artificial Sequence: Synthetic oligonucleotide
  misc_feature 1..20: note = Target: ANGPTL4; (+) strand; PAM type: NNNNGHTT; PAM sequence: AAAGGATT
  source 1..20: mol_type = other DNA
ttgaacttttctgtctagct

SEQ ID NO: 6466 - DNA, 20 bp, synthetic construct
  misc_feature 1..20: note = Description of Artificial Sequence: Synthetic oligonucleotide
  misc_feature 1..20: note = Target: ANGPTL4; (+) strand; PAM type: NNNNGHTT; PAM sequence: AAAGGATT
  source 1..20: mol_type = other DNA
tcagcactctgtgtctagct

SEQ ID NO: 6467 - DNA, 20 bp, synthetic construct
  misc_feature 1..20: note = Description of Artificial Sequence: Synthetic oligonucleotide
  misc_feature 1..20: note = Target: ANGPTL4; (+) strand; PAM type: NNNNGHTT; PAM sequence: AAAGGTTT
  source 1..20: mol_type = other DNA
tcagcactctgtgtctagct

SEQ ID NO: 6468 - DNA, 20 bp, synthetic construct
  misc_feature 1..20: note = Description of Artificial Sequence: Synthetic oligonucleotide
  misc_feature 1..20: note = Target: ANGPTL4; (-) strand; PAM type: NRG; PAM sequence: AAG
  source 1..20: mol_type = other DNA
tccagcttgggtgacagagc

SEQ ID NO: 6469 - DNA, 20 bp, synthetic construct
  misc_feature 1..20: note = Description of Artificial Sequence: Synthetic oligonucleotide
  misc_feature 1..20: note = Target: ANGPTL4; (-) strand; PAM type: NRG; PAM sequence: GAG
  source 1..20: mol_type = other DNA
gcactccagcttgggtgaca

SEQ ID NO: 6470 - DNA, 20 bp, synthetic construct
  misc_feature 1..20: note = Description of Artificial Sequence: Synthetic oligonucleotide
  misc_feature 1..20: note = Target: ANGPTL4; (-) strand; PAM type: NRG; PAM sequence: CAG
  source 1..20: mol_type = other DNA
ttgcactccagcttgggtga

SEQ ID NO: 6471 - DNA, 20 bp, synthetic construct
  misc_feature 1..20: note = Description of Artificial Sequence: Synthetic oligonucleotide
  misc_feature 1..20: note = Target: ANGPTL4; (-) strand; PAM type: NRG; PAM sequence: GGG
  source 1..20: mol_type = other DNA
gtaccattgcactccagctt

SEQ ID NO: 6472 - DNA, 20 bp, synthetic construct
  misc_feature 1..20: note = Description of Artificial Sequence: Synthetic oligonucleotide
  misc_feature 1..20: note = Target: ANGPTL4; (-) strand; PAM type: NRG; PAM sequence: TGG
  source 1..20: mol_type = other DNA
cgtaccattgcactccagct

SEQ ID NO: 6473 - DNA, 20 bp, synthetic construct
  misc_feature 1..20: note = Description of Artificial Sequence: Synthetic oligonucleotide
  misc_feature 1..20: note = Target: ANGPTL4; (-) strand; PAM type: NRG; PAM sequence: CAG
  source 1..20: mol_type = other DNA
gagatcgtaccattgcactc

SEQ ID NO: 6474 - DNA, 20 bp, synthetic construct
  misc_feature 1..20: note = Description of Artificial Sequence: Synthetic oligonucleotide
  misc_feature 1..20: note = Target: ANGPTL4; (-) strand; PAM type: NRG; PAM sequence: GAG
  source 1..20: mol_type = other DNA
ggtggaggctgcagtaagcg

SEQ ID NO: 6475 - DNA, 20 bp, synthetic construct
  misc_feature 1..20: note = Description of Artificial Sequence: Synthetic oligonucleotide
  misc_feature 1..20: note = Target: ANGPTL4; (-) strand; PAM type: NRG; PAM sequence: CGG
  source 1..20: mol_type = other DNA
gaggtggaggctgcagtaag

SEQ ID NO: 6476 - DNA, 20 bp, synthetic construct
  misc_feature 1..20: note = Description of Artificial Sequence: Synthetic oligonucleotide
  misc_feature 1..20: note = Target: ANGPTL4; (-) strand; PAM type: NRG; PAM sequence: AAG
  source 1..20: mol_type = other DNA
caggaggtggaggctgcagt

SEQ ID NO: 6477 - DNA, 20 bp, synthetic construct
  misc_feature 1..20: note = Description of Artificial Sequence: Synthetic oligonucleotide
  misc_feature 1..20: note = Target: ANGPTL4; (-) strand; PAM type: NRG; PAM sequence: CAG
  source 1..20: mol_type = other DNA
aacccaggaggtggaggctg

SEQ ID NO: 6478 - DNA, 20 bp, synthetic construct
  misc_feature 1..20: note = Description of Artificial Sequence: Synthetic oligonucleotide
  misc_feature 1..20: note = Target: ANGPTL4; (-) strand; PAM type: NRG; PAM sequence: AGG
  source 1..20: mol_type = other DNA
cgcttgaacccaggaggtgg

SEQ ID NO: 6479 - DNA, 20 bp, synthetic construct
  misc_feature 1..20: note = Description of Artificial Sequence: Synthetic oligonucleotide
  misc_feature 1..20: note = Target: ANGPTL4; (-) strand; PAM type: NRG; PAM sequence: GAG
  source 1..20: mol_type = other DNA
tcgcttgaacccaggaggtg

SEQ ID NO: 6480 - DNA, 20 bp, synthetic construct
  misc_feature 1..20: note = Description of Artificial Sequence: Synthetic oligonucleotide
  misc_feature 1..20: note = Target: ANGPTL4; (-) strand; PAM type: NRG; PAM sequence: TGG
  source 1..20: mol_type = other DNA
attcgcttgaacccaggagg

SEQ ID NO: 6481 - DNA, 20 bp, synthetic construct
  misc_feature 1..20: note = Description of Artificial Sequence: Synthetic oligonucleotide
  misc_feature 1..20: note = Target: ANGPTL4; (-) strand; PAM type: NRG; PAM sequence: AGG
  source 1..20: mol_type = other DNA
gagattcgcttgaacccagg

SEQ ID NO: 6482 - DNA, 20 bp, synthetic construct
  misc_feature 1..20: note = Description of Artificial Sequence: Synthetic oligonucleotide
  misc_feature 1..20: note = Target: ANGPTL4; (-) strand; PAM type: NRG; PAM sequence: GAG
  source 1..20: mol_type = other DNA
ggagattcgcttgaacccag

SEQ ID NO: 6483 - DNA, 20 bp, synthetic construct
  misc_feature 1..20: note = Description of Artificial Sequence: Synthetic oligonucleotide
  misc_feature 1..20: note = Target: ANGPTL4; (-) strand; PAM type: NRG; PAM sequence: AGG
  source 1..20: mol_type = other DNA
tgggagattcgcttgaaccc

SEQ ID NO: 6484 - DNA, 20 bp, synthetic construct
  misc_feature 1..20: note = Description of Artificial Sequence: Synthetic oligonucleotide
  misc_feature 1..20: note = Target: ANGPTL4; (-) strand; PAM type: NRG; PAM sequence: CAG
  source 1..20: mol_type = other DNA
gtgggagattcgcttgaacc

SEQ ID NO: 6485 - DNA, 20 bp, synthetic construct
  misc_feature 1..20: note = Description of Artificial Sequence: Synthetic oligonucleotide
  misc_feature 1..20: note = Target: ANGPTL4; (-) strand; PAM type: NRG; PAM sequence: GAG
  source 1..20: mol_type = other DNA
tatttgtgaggctgaggtgg

SEQ ID NO: 6486 - DNA, 20 bp, synthetic construct
  misc_feature 1..20: note = Description of Artificial Sequence: Synthetic oligonucleotide
  misc_feature 1..20: note = Target: ANGPTL4; (-) strand; PAM type: NRG; PAM sequence: GGG
  source 1..20: mol_type = other DNA
gctatttgtgaggctgaggt

SEQ ID NO: 6487 - DNA, 20 bp, synthetic construct
  misc_feature 1..20: note = Description of Artificial Sequence: Synthetic oligonucleotide
  misc_feature 1..20: note = Target: ANGPTL4; (-) strand; PAM type: NRG; PAM sequence: TGG
  source 1..20: mol_type = other DNA
agctatttgtgaggctgagg

SEQ ID NO: 6488 - DNA, 20 bp, synthetic construct
  misc_feature 1..20: note = Description of Artificial Sequence: Synthetic oligonucleotide
  misc_feature 1..20: note = Target: ANGPTL4; (-) strand; PAM type: NRG; PAM sequence: AGG
  source 1..20: mol_type = other DNA
ctcagctatttgtgaggctg

SEQ ID NO: 6489 - DNA, 20 bp, synthetic construct
  misc_feature 1..20: note = Description of Artificial Sequence: Synthetic oligonucleotide
  misc_feature 1..20: note = Target: ANGPTL4; (-) strand; PAM type: NRG; PAM sequence: GAG
  source 1..20: mol_type = other DNA
tctcagctatttgtgaggct

SEQ ID NO: 6490 - DNA, 20 bp, synthetic construct
  misc_feature 1..20: note = Description of Artificial Sequence: Synthetic oligonucleotide
  misc_feature 1..20: note = Target: ANGPTL4; (-) strand; PAM type: NRG; PAM sequence: AGG
  source 1..20: mol_type = other DNA
cgtaatctcagctatttgtg

SEQ ID NO: 6491 - DNA, 20 bp, synthetic construct
  misc_feature 1..20: note = Description of Artificial Sequence: Synthetic oligonucleotide
  misc_feature 1..20: note = Target: ANGPTL4; (-) strand; PAM type: NRG; PAM sequence: GAG
  source 1..20: mol_type = other DNA
ccgtaatctcagctatttgt

SEQ ID NO: 6492 - DNA, 20 bp, synthetic construct
  misc_feature 1..20: note = Description of Artificial Sequence: Synthetic oligonucleotide
  misc_feature 1..20: note = Target: ANGPTL4; (-) strand; PAM type: NRG; PAM sequence: CAG
  source 1..20: mol_type = other DNA
gtggtgtgtggccgtaatct

SEQ ID NO: 6493 - DNA, 20 bp, synthetic construct
  misc_feature 1..20: note = Description of Artificial Sequence: Synthetic oligonucleotide
  misc_feature 1..20: note = Target: ANGPTL4; (-) strand; PAM type: NRG; PAM sequence: TGG
  source 1..20: mol_type = other DNA
ttagcaggcatggtggtgtg

SEQ ID NO: 6494 - DNA, 20 bp, synthetic construct
  misc_feature 1..20: note = Description of Artificial Sequence: Synthetic oligonucleotide
  misc_feature 1..20: note = Target: ANGPTL4; (-) strand; PAM type: NRG; PAM sequence: TGG
  source 1..20: mol_type = other DNA
acagaaattagcaggcatgg

SEQ ID NO: 6495 - DNA, 20 bp, synthetic construct
  misc_feature 1..20: note = Description of Artificial Sequence: Synthetic oligonucleotide
  misc_feature 1..20: note = Target: ANGPTL4; (-) strand; PAM type: NRG; PAM sequence: TGG
  source 1..20: mol_type = other DNA
aatacagaaattagcaggca

SEQ ID NO: 6496 - DNA, 20 bp, synthetic construct
  misc_feature 1..20: note = Description of Artificial Sequence: Synthetic oligonucleotide
  misc_feature 1..20: note = Target: ANGPTL4; (-) strand; PAM type: NRG; PAM sequence: AGG
  source 1..20: mol_type = other DNA
ctaaaaatacagaaattagc

SEQ ID NO: 6497 - DNA, 20 bp, synthetic construct
  misc_feature 1..20: note = Description of Artificial Sequence: Synthetic oligonucleotide
  misc_feature 1..20: note = Target: ANGPTL4; (-) strand; PAM type: NRG; PAM sequence: CAG
  source 1..20: mol_type = other DNA
actaaaaatacagaaattag

SEQ ID NO: 6498 - DNA, 20 bp, synthetic construct
  misc_feature 1..20: note = Description of Artificial Sequence: Synthetic oligonucleotide
  misc_feature 1..20: note = Target: ANGPTL4; (-) strand; PAM type: NRG; PAM sequence: TAG
  source 1..20: mol_type = other DNA
tctactaaaaatacagaaat

SEQ ID NO: 6499 - DNA, 20 bp, synthetic construct
  misc_feature 1..20: note = Description of Artificial Sequence: Synthetic oligonucleotide
  misc_feature 1..20: note = Target: ANGPTL4; (-) strand; PAM type: NRG; PAM sequence: CAG
  source 1..20: mol_type = other DNA
ccccatctctactaaaaata

SEQ ID NO: 6500 - DNA, 20 bp, synthetic construct
  misc_feature 1..20: note = Description of Artificial Sequence: Synthetic oligonucleotide
  misc_feature 1..20: note = Target: ANGPTL4; (-) strand; PAM type: NRG; PAM sequence: TGG
  source 1..20: mol_type = other DNA
cgagaccagcctggccagca

SEQ ID NO: 6501 - DNA, 20 bp, synthetic construct
  misc_feature 1..20: note = Description of Artificial Sequence: Synthetic oligonucleotide
  misc_feature 1..20: note = Target: ANGPTL4; (-) strand; PAM type: NRG; PAM sequence: CAG
  source 1..20: mol_type = other DNA
gagttcgagaccagcctggc

SEQ ID NO: 6502 - DNA, 20 bp, synthetic construct
  misc_feature 1..20: note = Description of Artificial Sequence: Synthetic oligonucleotide
  misc_feature 1..20: note = Target: ANGPTL4; (-) strand; PAM type: NRG; PAM sequence: TGG
  source 1..20: mol_type = other DNA
ctgggagttcgagaccagcc

SEQ ID NO: 6503 - DNA, 20 bp, synthetic construct
  misc_feature 1..20: note = Description of Artificial Sequence: Synthetic oligonucleotide
  misc_feature 1..20: note = Target: ANGPTL4; (-) strand; PAM type: NRG; PAM sequence: CAG
  source 1..20: mol_type = other DNA
tgagtctgggagttcgagac

SEQ ID NO: 6504 - DNA, 20 bp, synthetic construct
  misc_feature 1..20: note = Description of Artificial Sequence: Synthetic oligonucleotide
  misc_feature 1..20: note = Target: ANGPTL4; (-) strand; PAM type: NRG; PAM sequence: GAG
  source 1..20: mol_type = other DNA
tcacttgagtctgggagttc

SEQ ID NO: 6505 - DNA, 20 bp, synthetic construct
  misc_feature 1..20: note = Description of Artificial Sequence: Synthetic oligonucleotide
  misc_feature 1..20: note = Target: ANGPTL4; (-) strand; PAM type: NRG; PAM sequence: GAG
  source 1..20: mol_type = other DNA
ggtggatcacttgagtctgg

SEQ ID NO: 6506 - DNA, 20 bp, synthetic construct
  misc_feature 1..20: note = Description of Artificial Sequence: Synthetic oligonucleotide
  misc_feature 1..20: note = Target: ANGPTL4; (-) strand; PAM type: NRG; PAM sequence: GGG
  source 1..20: mol_type = other DNA
tgggtggatcacttgagtct

SEQ ID NO: 6507 - DNA, 20 bp, synthetic construct
  misc_feature 1..20: note = Description of Artificial Sequence: Synthetic oligonucleotide
  misc_feature 1..20: note = Target: ANGPTL4; (-) strand; PAM type: NRG; PAM sequence: TGG
  source 1..20: mol_type = other DNA
gtgggtggatcacttgagtc

SEQ ID NO: 6508 - DNA, 20 bp, synthetic construct
  misc_feature 1..20: note = Description of Artificial Sequence: Synthetic oligonucleotide
  misc_feature 1..20: note = Target: ANGPTL4; (-) strand; PAM type: NRG; PAM sequence: GAG
  source 1..20: mol_type = other DNA
ctgaggtgggtggatcactt

SEQ ID NO: 6509 - DNA, 20 bp, synthetic construct
  misc_feature 1..20: note = Description of Artificial Sequence: Synthetic oligonucleotide
  misc_feature 1..20: note = Target: ANGPTL4; (-) strand; PAM type: NRG; PAM sequence: TGG
  source 1..20: mol_type = other DNA
ctttgggaggctgaggtggg

SEQ ID NO: 6510 - DNA, 20 bp, synthetic construct
  misc_feature 1..20: note = Description of Artificial Sequence: Synthetic oligonucleotide
  misc_feature 1..20: note = Target: ANGPTL4; (-) strand; PAM type: NRG; PAM sequence: GGG
  source 1..20: mol_type = other DNA
gcactttgggaggctgaggt

SEQ ID NO: 6511 - DNA, 20 bp, synthetic construct
  misc_feature 1..20: note = Description of Artificial Sequence: Synthetic oligonucleotide
  misc_feature 1..20: note = Target: ANGPTL4; (-) strand; PAM type: NRG; PAM sequence: TGG
  source 1..20: mol_type = other DNA
agcactttgggaggctgagg

SEQ ID NO: 6512 - DNA, 20 bp, synthetic construct
  misc_feature 1..20: note = Description of Artificial Sequence: Synthetic oligonucleotide
  misc_feature 1..20: note = Target: ANGPTL4; (-) strand; PAM type: NRG; PAM sequence: AGG
  source 1..20: mol_type = other DNA
cctagcactttgggaggctg

SEQ ID NO: 6513 - DNA, 20 bp, synthetic construct
  misc_feature 1..20: note = Description of Artificial Sequence: Synthetic oligonucleotide
  misc_feature 1..20: note = Target: ANGPTL4; (-) strand; PAM type: NRG; PAM sequence: GAG
  source 1..20: mol_type = other DNA
tcctagcactttgggaggct

SEQ ID NO: 6514 - DNA, 20 bp, synthetic construct
  misc_feature 1..20: note = Description of Artificial Sequence: Synthetic oligonucleotide
  misc_feature 1..20: note = Target: ANGPTL4; (-) strand; PAM type: NRG; PAM sequence: AGG
  source 1..20: mol_type = other DNA
tgtaatcctagcactttggg

SEQ ID NO: 6515 - DNA, 20 bp, synthetic construct
  misc_feature 1..20: note = Description of Artificial Sequence: Synthetic oligonucleotide
  misc_feature 1..20: note = Target: ANGPTL4; (-) strand; PAM type: NRG; PAM sequence: GAG
  source 1..20: mol_type = other DNA
ctgtaatcctagcactttgg

SEQ ID NO: 6516 - DNA, 20 bp, synthetic construct
  misc_feature 1..20: note = Description of Artificial Sequence: Synthetic oligonucleotide
  misc_feature 1..20: note = Target: ANGPTL4; (-) strand; PAM type: NRG; PAM sequence: GGG
  source 1..20: mol_type = other DNA
acctgtaatcctagcacttt

SEQ ID NO: 6517 - DNA, 20 bp, synthetic construct
  misc_feature 1..20: note = Description of Artificial Sequence: Synthetic oligonucleotide
  misc_feature 1..20: note = Target: ANGPTL4; (-) strand; PAM type: NRG; PAM sequence: TGG
  source 1..20: mol_type = other DNA
cacctgtaatcctagcactt

SEQ ID NO: 6518 - DNA, 20 bp, synthetic construct
  misc_feature 1..20: note = Description of Artificial Sequence: Synthetic oligonucleotide
  misc_feature 1..20: note = Target: ANGPTL4; (-) strand; PAM type: NRG; PAM sequence: TAG
  source 1..20: mol_type = other DNA
gtggctcacacctgtaatcc

SEQ ID NO: 6519 - DNA, 20 bp, synthetic construct
  misc_feature 1..20: note = Description of Artificial Sequence: Synthetic oligonucleotide
  misc_feature 1..20: note = Target: ANGPTL4; (-) strand; PAM type: NRG; PAM sequence: TGG
  source 1..20: mol_type = other DNA
ttagctggggcccggcatgg

SEQ ID NO: 6520 - DNA, 20 bp, synthetic construct
  misc_feature 1..20: note = Description of Artificial Sequence: Synthetic oligonucleotide
  misc_feature 1..20: note = Target: ANGPTL4; (-) strand; PAM type: NRG; PAM sequence: TGG
  source 1..20: mol_type = other DNA
aaattagctggggcccggca

SEQ ID NO: 6521 - DNA, 20 bp, synthetic construct
  misc_feature 1..20: note = Description of Artificial Sequence: Synthetic oligonucleotide
  misc_feature 1..20: note = Target: ANGPTL4; (-) strand; PAM type: NRG; PAM sequence: CGG
  source 1..20: mol_type = other DNA
aaaaaaaattagctggggcc

SEQ ID NO: 6522 - DNA, 20 bp, synthetic construct
  misc_feature 1..20: note = Description of Artificial Sequence: Synthetic oligonucleotide
  misc_feature 1..20: note = Target: ANGPTL4; (-) strand; PAM type: NRG; PAM sequence: GGG
  source 1..20: mol_type = other DNA
aaaaaaaaaaaaattagctg

SEQ ID NO: 6523 - DNA, 20 bp, synthetic construct
  misc_feature 1..20: note = Description of Artificial Sequence: Synthetic oligonucleotide
  misc_feature 1..20: note = Target: ANGPTL4; (-) strand; PAM type: NRG; PAM sequence: GGG
  source 1..20: mol_type = other DNA
aaaaaaaaaaaaaattagct

SEQ ID NO: 6524 - DNA, 20 bp, synthetic construct
  misc_feature 1..20: note = Description of Artificial Sequence: Synthetic oligonucleotide
  misc_feature 1..20: note = Target: ANGPTL4; (-) strand; PAM type: NRG; PAM sequence: TGG
  source 1..20: mol_type = other DNA
aaaaaaaaaaaaaaattagc

SEQ ID NO: 6525 - DNA, 20 bp, synthetic construct
  misc_feature 1..20: note = Description of Artificial Sequence: Synthetic oligonucleotide
  misc_feature 1..20: note = Target: ANGPTL4; (-) strand; PAM type: NRG; PAM sequence: TAG
  source 1..20: mol_type = other DNA
tctcaaaaaaaaaaaaaaat

SEQ ID NO: 6526 - DNA, 20 bp, synthetic construct
  misc_feature 1..20: note = Description of Artificial Sequence: Synthetic oligonucleotide
  misc_feature 1..20: note = Target: ANGPTL4; (-) strand; PAM type: NRG; PAM sequence: GAG
  source 1..20: mol_type = other DNA
tccagcctgggcaacagggc

SEQ ID NO: 6527 - DNA, 20 bp, synthetic construct
  misc_feature 1..20: note = Description of Artificial Sequence: Synthetic oligonucleotide
  misc_feature 1..20: note = Target: ANGPTL4; (-) strand; PAM type: NRG; PAM sequence: GGG
  source 1..20: mol_type = other DNA
gcactccagcctgggcaaca

SEQ ID NO: 6528 - DNA, 20 bp, synthetic construct
  misc_feature 1..20: note = Description of Artificial Sequence: Synthetic oligonucleotide
  misc_feature 1..20: note = Target: ANGPTL4; (-) strand; PAM type: NRG; PAM sequence: AGG
  source 1..20: mol_type = other DNA
tgcactccagcctgggcaac

SEQ ID NO: 6529 - DNA, 20 bp, synthetic construct
  misc_feature 1..20: note = Description of Artificial Sequence: Synthetic oligonucleotide
  misc_feature 1..20: note = Target: ANGPTL4; (-) strand; PAM type: NRG; PAM sequence: CAG
  source 1..20: mol_type = other DNA
ctgcactccagcctgggcaa

SEQ ID NO: 6530 - DNA, 20 bp, synthetic construct
  misc_feature 1..20: note = Description of Artificial Sequence: Synthetic oligonucleotide
  misc_feature 1..20: note = Target: ANGPTL4; (-) strand; PAM type: NRG; PAM sequence: GGG
  source 1..20: mol_type = other DNA
gcgccactgcactccagcct

SEQ ID NO: 6531 - DNA, 20 bp, synthetic construct
  misc_feature 1..20: note = Description of Artificial Sequence: Synthetic oligonucleotide
  misc_feature 1..20: note = Target: ANGPTL4; (-) strand; PAM type: NRG; PAM sequence: TGG
  source 1..20: mol_type = other DNA
tgcgccactgcactccagcc

SEQ ID NO: 6532 - DNA, 20 bp, synthetic construct
  misc_feature 1..20: note = Description of Artificial Sequence: Synthetic oligonucleotide
  misc_feature 1..20: note = Target: ANGPTL4; (-) strand; PAM type: NRG; PAM sequence: CAG
  source 1..20: mol_type = other DNA
gagattgcgccactgcactc

SEQ ID NO: 6533 - DNA, 20 bp, synthetic construct
  misc_feature 1..20: note = Description of Artificial Sequence: Synthetic oligonucleotide
  misc_feature 1..20: note = Target: ANGPTL4; (-) strand; PAM type: NRG; PAM sequence: GAG
  source 1..20: mol_type = other DNA
ggcagagggtgcagtaagca

SEQ ID NO: 6534 - DNA, 20 bp, synthetic construct
  misc_feature 1..20: note = Description of Artificial Sequence: Synthetic oligonucleotide
  misc_feature 1..20: note = Target: ANGPTL4; (-) strand; PAM type: NRG; PAM sequence: CAG
  source 1..20: mol_type = other DNA
gaggcagagggtgcagtaag

SEQ ID NO: 6535 - DNA, 20 bp, synthetic construct
  misc_feature 1..20: note = Description of Artificial Sequence: Synthetic oligonucleotide
  misc_feature 1..20: note = Target: ANGPTL4; (-) strand; PAM type: NRG; PAM sequence: AAG
  source 1..20: mol_type = other DNA
cgggaggcagagggtgcagt

SEQ ID NO: 6536 - DNA, 20 bp, synthetic construct
  misc_feature 1..20: note = Description of Artificial Sequence: Synthetic oligonucleotide
  misc_feature 1..20: note = Target: ANGPTL4; (-) strand; PAM type: NRG; PAM sequence: CAG
  source 1..20: mol_type = other DNA
aacccgggaggcagagggtg

SEQ ID NO: 6537 - DNA, 20 bp, synthetic construct
  misc_feature 1..20: note = Description of Artificial Sequence: Synthetic oligonucleotide
  misc_feature 1..20: note = Target: ANGPTL4; (-) strand; PAM type: NRG; PAM sequence: GGG
  source 1..20: mol_type = other DNA
gctggaacccgggaggcaga

SEQ ID NO: 6538 - DNA, 20 bp, synthetic construct
  misc_feature 1..20: note = Description of Artificial Sequence: Synthetic oligonucleotide
  misc_feature 1..20: note = Target: ANGPTL4; (-) strand; PAM type: NRG; PAM sequence: AGG
  source 1..20: mol_type = other DNA
cgctggaacccgggaggcag

SEQ ID NO: 6539 - DNA, 20 bp, synthetic construct
  misc_feature 1..20: note = Description of Artificial Sequence: Synthetic oligonucleotide
  misc_feature 1..20: note = Target: ANGPTL4; (-) strand; PAM type: NRG; PAM sequence: GAG
  source 1..20: mol_type = other DNA
tcgctggaacccgggaggca

SEQ ID NO: 6540 - DNA, 20 bp, synthetic construct
  misc_feature 1..20: note = Description of Artificial Sequence: Synthetic oligonucleotide
  misc_feature 1..20: note = Target: ANGPTL4; (-) strand; PAM type: NRG; PAM sequence: CAG
  source 1..20: mol_type = other DNA
aatcgctggaacccgggagg

SEQ ID NO: 6541 - DNA, 20 bp, synthetic construct
  misc_feature 1..20: note = Description of Artificial Sequence: Synthetic oligonucleotide
  misc_feature 1..20: note = Target: ANGPTL4; (-) strand; PAM type: NRG; PAM sequence: AGG
  source 1..20: mol_type = other DNA
gagaatcgctggaacccggg

SEQ ID NO: 6542 - DNA, 20 bp, synthetic construct
  misc_feature 1..20: note = Description of Artificial Sequence: Synthetic oligonucleotide
  misc_feature 1..20: note = Target: ANGPTL4; (-) strand; PAM type: NRG; PAM sequence: GAG
  source 1..20: mol_type = other DNA
ggagaatcgctggaacccgg

SEQ ID NO: 6543 - DNA, 20 bp, synthetic construct
  misc_feature 1..20: note = Description of Artificial Sequence: Synthetic oligonucleotide
  misc_feature 1..20: note = Target: ANGPTL4; (-) strand; PAM type: NRG; PAM sequence: GGG
  source 1..20: mol_type = other DNA
caggagaatcgctggaaccc

SEQ ID NO: 6544 - DNA, 20 bp, synthetic construct
  misc_feature 1..20: note = Description of Artificial Sequence: Synthetic oligonucleotide
  misc_feature 1..20: note = Target: ANGPTL4; (-) strand; PAM type: NRG; PAM sequence: CGG
  source 1..20: mol_type = other DNA
gcaggagaatcgctggaacc

SEQ ID NO: 6545 - DNA, 20 bp, synthetic construct
  misc_feature 1..20: note = Description of Artificial Sequence: Synthetic oligonucleotide
  misc_feature 1..20: note = Target: ANGPTL4; (-) strand; PAM type: NRG; PAM sequence: TGG
  source 1..20: mol_type = other DNA
ggctggggcaggagaatcgc

SEQ ID NO: 6546 - DNA, 20 bp, synthetic construct
  misc_feature 1..20: note = Description of Artificial Sequence: Synthetic oligonucleotide
  misc_feature 1..20: note = Target: ANGPTL4; (-) strand; PAM type: NRG; PAM sequence: GAG
  source 1..20: mol_type = other DNA
tactcgggaggctggggcag

SEQ ID NO: 6547 - DNA, 20 bp, synthetic construct
  misc_feature 1..20: note = Description of Artificial Sequence: Synthetic oligonucleotide
  misc_feature 1..20: note = Target: ANGPTL4; (-) strand; PAM type: NRG; PAM sequence: AGG
  source 1..20: mol_type = other DNA
gttactcgggaggctggggc

SEQ ID NO: 6548 - DNA, 20 bp, synthetic construct
  misc_feature 1..20: note = Description of Artificial Sequence: Synthetic oligonucleotide
  misc_feature 1..20: note = Target: ANGPTL4; (-) strand; PAM type: NRG; PAM sequence: CAG
  source 1..20: mol_type = other DNA
agttactcgggaggctgggg

SEQ ID NO: 6549 - DNA, 20 bp, synthetic construct
  misc_feature 1..20: note = Description of Artificial Sequence: Synthetic oligonucleotide
  misc_feature 1..20: note = Target: ANGPTL4; (-) strand; PAM type: NRG; PAM sequence: GGG
  source 1..20: mol_type = other DNA
cccagttactcgggaggctg

SEQ ID NO: 6550 - DNA, 20 bp, synthetic construct
  misc_feature 1..20: note = Description of Artificial Sequence: Synthetic oligonucleotide
  misc_feature 1..20: note = Target: ANGPTL4; (-) strand; PAM type: NRG; PAM sequence: GGG
  source 1..20: mol_type = other DNA
tcccagttactcgggaggct

SEQ ID NO: 6551 - DNA, 20 bp, synthetic construct
  misc_feature 1..20: note = Description of Artificial Sequence: Synthetic oligonucleotide
  misc_feature 1..20: note = Target: ANGPTL4; (-) strand; PAM type: NRG; PAM sequence: TGG
  source 1..20: mol_type = other DNA
atcccagttactcgggaggc

SEQ ID NO: 6552 - DNA, 20 bp, synthetic construct
  misc_feature 1..20: note = Description of Artificial Sequence: Synthetic oligonucleotide
  misc_feature 1..20: note = Target: ANGPTL4; (-) strand; PAM type: NRG; PAM sequence: AGG
  source 1..20: mol_type = other DNA
tgtaatcccagttactcggg

SEQ ID NO: 6553 - DNA, 20 bp, synthetic construct
  misc_feature 1..20: note = Description of Artificial Sequence: Synthetic oligonucleotide
  misc_feature 1..20: note = Target: ANGPTL4; (-) strand; PAM type: NRG; PAM sequence: GAG
  source 1..20: mol_type = other DNA
ctgtaatcccagttactcgg

SEQ ID NO: 6554 - DNA, 20 bp, synthetic construct
  misc_feature 1..20: note = Description of Artificial Sequence: Synthetic oligonucleotide
  misc_feature 1..20: note = Target: ANGPTL4; (-) strand; PAM type: NRG; PAM sequence: GGG
  source 1..20: mol_type = other DNA
gcctgtaatcccagttactc

SEQ ID NO: 6555 - DNA, 20 bp, synthetic construct
  misc_feature 1..20: note = Description of Artificial Sequence: Synthetic oligonucleotide
  misc_feature 1..20: note = Target: ANGPTL4; (-) strand; PAM type: NRG; PAM sequence: CGG
  source 1..20: mol_type = other DNA
cgcctgtaatcccagttact

SEQ ID NO: 6556 - DNA, 20 bp, synthetic construct
  misc_feature 1..20: note = Description of Artificial Sequence: Synthetic oligonucleotide
  misc_feature 1..20: note = Target: ANGPTL4; (-) strand; PAM type: NRG; PAM sequence: CAG
  source 1..20: mol_type = other DNA
gaggcgcgcgcctgtaatcc

SEQ ID NO: 6557 - DNA, 20 bp, synthetic construct
  misc_feature 1..20: note = Description of Artificial Sequence: Synthetic oligonucleotide
  misc_feature 1..20: note = Target: ANGPTL4; (-) strand; PAM type: NRG; PAM sequence: AGG
  source 1..20: mol_type = other DNA
taaaaattagccaggcgtgg

SEQ ID NO: 6558 - DNA, 20 bp, synthetic construct
  misc_feature 1..20: note = Description of Artificial Sequence: Synthetic oligonucleotide
  misc_feature 1..20: note = Target: ANGPTL4; (-) strand; PAM type: NRG; PAM sequence: GAG
  source 1..20: mol_type = other DNA
gtaaaaattagccaggcgtg

SEQ ID NO: 6559 - DNA, 20 bp, synthetic construct
  misc_feature 1..20: note = Description of Artificial Sequence: Synthetic oligonucleotide
  misc_feature 1..20: note = Target: ANGPTL4; (-) strand; PAM type: NRG; PAM sequence: TGG
  source 1..20: mol_type = other DNA
atgtaaaaattagccaggcg

SEQ ID NO: 6560 - DNA, 20 bp, synthetic construct
  misc_feature 1..20: note = Description of Artificial Sequence: Synthetic oligonucleotide
  misc_feature 1..20: note = Target: ANGPTL4; (-) strand; PAM type: NRG; PAM sequence: AGG
  source 1..20: mol_type = other DNA
taaaaatgtaaaaattagcc

SEQ ID NO: 6561 - DNA, 20 bp, synthetic construct
  misc_feature 1..20: note = Description of Artificial Sequence: Synthetic oligonucleotide
  misc_feature 1..20: note = Target: ANGPTL4; (-) strand; PAM type: NRG; PAM sequence: CAG
  source 1..20: mol_type = other DNA
ctaaaaatgtaaaaattagc

SEQ ID NO: 6562 - DNA, 20 bp, synthetic construct
  misc_feature 1..20: note = Description of Artificial Sequence: Synthetic oligonucleotide
  misc_feature 1..20: note = Target: ANGPTL4; (-) strand; PAM type: NRG; PAM sequence: TAG
  source 1..20: mol_type = other DNA
tctactaaaaatgtaaaaat

SEQ ID NO: 6563 - DNA, 20 bp, synthetic construct
  misc_feature 1..20: note = Description of Artificial Sequence: Synthetic oligonucleotide
  misc_feature 1..20: note = Target: ANGPTL4; (-) strand; PAM type: NRG; PAM sequence: CGG
  source 1..20: mol_type = other DNA
ctgaccaacatggtgaaacc

SEQ ID NO: 6564 - DNA, 20 bp, synthetic construct
  misc_feature 1..20: note = Description of Artificial Sequence: Synthetic oligonucleotide
  misc_feature 1..20: note = Target: ANGPTL4; (-) strand; PAM type: NRG; PAM sequence: TGG
  source 1..20: mol_type = other DNA
cgagaccagcctgaccaaca

SEQ ID NO: 6565 - DNA, 20 bp, synthetic construct
  misc_feature 1..20: note = Description of Artificial Sequence: Synthetic oligonucleotide
  misc_feature 1..20: note = Target: ANGPTL4; (-) strand; PAM type: NRG; PAM sequence: CAG
  source 1..20: mol_type = other DNA
tgaggtcagaagttcgagac

SEQ ID NO: 6566 - DNA, 20 bp, synthetic construct
  misc_feature 1..20: note = Description of Artificial Sequence: Synthetic oligonucleotide
  misc_feature 1..20: note = Target: ANGPTL4; (-) strand; PAM type: NRG; PAM sequence: GAG
  source 1..20: mol_type = other DNA
gatcgtgaggtcagaagttc

SEQ ID NO: 6567 - DNA, 20 bp, synthetic construct
  misc_feature 1..20: note = Description of Artificial Sequence: Synthetic oligonucleotide
  misc_feature 1..20: note = Target: ANGPTL4; (-) strand; PAM type: NRG; PAM sequence: AAG
  source 1..20: mol_type = other DNA
tgggcagatcgtgaggtcag

SEQ ID NO: 6568 - DNA, 20 bp, synthetic construct
  misc_feature 1..20: note = Description of Artificial Sequence: Synthetic oligonucleotide
  misc_feature 1..20: note = Target: ANGPTL4; (-) strand; PAM type: NRG; PAM sequence: CAG
  source 1..20: mol_type = other DNA
aggtgggcagatcgtgaggt

SEQ ID NO: 6569 - DNA, 20 bp, synthetic construct
  misc_feature 1..20: note = Description of Artificial Sequence: Synthetic oligonucleotide
  misc_feature 1..20: note = Target: ANGPTL4; (-) strand; PAM type: NRG; PAM sequence: AGG
  source 1..20: mol_type = other DNA
tccaaggtgggcagatcgtg

SEQ ID NO: 6570 - DNA, 20 bp, synthetic construct
  misc_feature 1..20: note = Description of Artificial Sequence: Synthetic oligonucleotide
  misc_feature 1..20: note = Target: ANGPTL4; (-) strand; PAM type: NRG; PAM sequence: GAG
  source 1..20: mol_type = other DNA
gtccaaggtgggcagatcgt

SEQ ID NO: 6571 - DNA, 20 bp, synthetic construct
  misc_feature 1..20: note = Description of Artificial Sequence: Synthetic oligonucleotide
  misc_feature 1..20: note = Target: ANGPTL4; (-) strand; PAM type: NRG; PAM sequence: CAG
  source 1..20: mol_type = other DNA
ctttgggagtccaaggtggg

SEQ ID NO: 6572 - DNA, 20 bp, synthetic construct
  misc_feature 1..20: note = Description of Artificial Sequence: Synthetic oligonucleotide
  misc_feature 1..20: note = Target: ANGPTL4; (-) strand; PAM type: NRG; PAM sequence: GGG
  source 1..20: mol_type = other DNA
gcactttgggagtccaaggt

SEQ ID NO: 6573 - DNA, 20 bp, synthetic construct
  misc_feature 1..20: note = Description of Artificial Sequence: Synthetic oligonucleotide
  misc_feature 1..20: note = Target: ANGPTL4; (-) strand; PAM type: NRG; PAM sequence: TGG
  source 1..20: mol_type = other DNA
agcactttgggagtccaagg

SEQ ID NO: 6574 - DNA, 20 bp, synthetic construct
  misc_feature 1..20: note = Description of Artificial Sequence: Synthetic oligonucleotide
  misc_feature 1..20: note = Target: ANGPTL4; (-) strand; PAM type: NRG; PAM sequence: AGG
  source 1..20: mol_type = other DNA
accagcactttgggagtcca

SEQ ID NO: 6575 - DNA, 20 bp, synthetic construct
  misc_feature 1..20: note = Description of Artificial Sequence: Synthetic oligonucleotide
  misc_feature 1..20: note = Target: ANGPTL4; (-) strand; PAM type: NRG; PAM sequence: AAG
  source 1..20: mol_type = other DNA
taccagcactttgggagtcc

SEQ ID NO: 6576 - DNA, 20 bp, synthetic construct
  misc_feature 1..20: note = Description of Artificial Sequence: Synthetic oligonucleotide
  misc_feature 1..20: note = Target: ANGPTL4; (-) strand; PAM type: NRG; PAM sequence: GAG
  source 1..20: mol_type = other DNA
ctgtaataccagcactttgg

SEQ ID NO: 6577 - DNA, 20 bp, synthetic construct
  misc_feature 1..20: note = Description of Artificial Sequence: Synthetic oligonucleotide
  misc_feature 1..20: note = Target: ANGPTL4; (-) strand; PAM type: NRG; PAM sequence: GGG
  source 1..20: mol_type = other DNA
gcctgtaataccagcacttt

SEQ ID NO: 6578 - DNA, 20 bp, synthetic construct
  misc_feature 1..20: note = Description of Artificial Sequence: Synthetic oligonucleotide
  misc_feature 1..20: note = Target: ANGPTL4; (-) strand; PAM type: NRG; PAM sequence: TGG
  source 1..20: mol_type = other DNA
tgcctgtaataccagcactt

SEQ ID NO: 6579 - DNA, 20 bp, synthetic construct
  misc_feature 1..20: note = Description of Artificial Sequence: Synthetic oligonucleotide
  misc_feature 1..20: note = Target: ANGPTL4; (-) strand; PAM type: NRG; PAM sequence: CAG
  source 1..20: mol_type = other DNA
gtggctcatgcctgtaatac

SEQ ID NO: 6580 - DNA, 20 bp, synthetic construct
  misc_feature 1..20: note = Description of Artificial Sequence: Synthetic oligonucleotide
  misc_feature 1..20: note = Target: ANGPTL4; (-) strand; PAM type: NRG; PAM sequence: TGG
  source 1..20: mol_type = other DNA
tggggccaggctgggcacgg

SEQ ID NO: 6581 - DNA, 20 bp, synthetic construct
  misc_feature 1..20: note = Description of Artificial Sequence: Synthetic oligonucleotide
  misc_feature 1..20: note = Target: ANGPTL4; (-) strand; PAM type: NRG; PAM sequence: CGG
  source 1..20: mol_type = other DNA
agctggggccaggctgggca

SEQ ID NO: 6582 - DNA, 20 bp, synthetic construct
  misc_feature 1..20: note = Description of Artificial Sequence: Synthetic oligonucleotide
  misc_feature 1..20: note = Target: ANGPTL4; (-) strand; PAM type: NRG; PAM sequence: GGG
  source 1..20: mol_type = other DNA
aaattagctggggccaggct

SEQ ID NO: 6583 - DNA, 20 bp, synthetic construct
  misc_feature 1..20: note = Description of Artificial Sequence: Synthetic oligonucleotide
  misc_feature 1..20: note = Target: ANGPTL4; (-) strand; PAM type: NRG; PAM sequence: TGG
  source 1..20: mol_type = other DNA
aaaattagctggggccaggc

SEQ ID NO: 6584 - DNA, 20 bp, synthetic construct
  misc_feature 1..20: note = Description of Artificial Sequence: Synthetic oligonucleotide
  misc_feature 1..20: note = Target: ANGPTL4; (-) strand; PAM type: NRG; PAM sequence: AGG
  source 1..20: mol_type = other DNA
ttaaaaaattagctggggcc

SEQ ID NO: 6585 - DNA, 20 bp, synthetic construct
  misc_feature 1..20: note = Description of Artificial Sequence: Synthetic oligonucleotide
  misc_feature 1..20: note = Target: ANGPTL4; (-) strand; PAM type: NRG; PAM sequence: CAG
  source 1..20: mol_type = other DNA
tttaaaaaattagctggggc

SEQ ID NO: 6586 - DNA, 20 bp, synthetic construct
  misc_feature 1..20: note = Description of Artificial Sequence: Synthetic oligonucleotide
  misc_feature 1..20: note = Target: ANGPTL4; (-) strand; PAM type: NRG; PAM sequence: GGG
  source 1..20: mol_type = other DNA
aaaatttaaaaaattagctg

SEQ ID NO: 6587 - DNA, 20 bp, synthetic construct
  misc_feature 1..20: note = Description of Artificial Sequence: Synthetic oligonucleotide
  misc_feature 1..20: note = Target: ANGPTL4; (-) strand; PAM type: NRG; PAM sequence: GGG
  source 1..20: mol_type = other DNA
aaaaatttaaaaaattagct

SEQ ID NO: 6588 - DNA, 20 bp, synthetic construct
  misc_feature 1..20: note = Description of Artificial Sequence: Synthetic oligonucleotide
  misc_feature 1..20: note = Target: ANGPTL4; (-) strand; PAM type: NRG; PAM sequence: TGG
  source 1..20: mol_type = other DNA
aaaaaatttaaaaaattagc

SEQ ID NO: 6589 - DNA, 20 bp, synthetic construct
  misc_feature 1..20: note = Description of Artificial Sequence: Synthetic oligonucleotide
  misc_feature 1..20: note = Target: ANGPTL4; (-) strand; PAM type: NRG; PAM sequence: TAG
  source 1..20: mol_type = other DNA
gtacaaaaaatttaaaaaat

SEQ ID NO: 6590 - DNA, 20 bp, synthetic construct
  misc_feature 1..20: note = Description of Artificial Sequence: Synthetic oligonucleotide
  misc_feature 1..20: note = Target: ANGPTL4; (-) strand; PAM type: NRG; PAM sequence: AAG
  source 1..20: mol_type = other DNA
tcaagattgggtaacatggc

SEQ ID NO: 6591 - DNA, 20 bp, synthetic construct
  misc_feature 1..20: note = Description of Artificial Sequence: Synthetic oligonucleotide
  misc_feature 1..20: note = Target: ANGPTL4; (-) strand; PAM type: NRG; PAM sequence: TGG
  source 1..20: mol_type = other DNA
gagttcaagattgggtaaca

SEQ ID NO: 6592 - DNA, 20 bp, synthetic construct
  misc_feature 1..20: note = Description of Artificial Sequence: Synthetic oligonucleotide
  misc_feature 1..20: note = Target: ANGPTL4; (-) strand; PAM type: NRG; PAM sequence: GGG
  source 1..20: mol_type = other DNA
gagcccaggagttcaagatt

SEQ ID NO: 6593 - DNA, 20 bp, synthetic construct
  misc_feature 1..20: note = Description of Artificial Sequence: Synthetic oligonucleotide
  misc_feature 1..20: note = Target: ANGPTL4; (-) strand; PAM type: NRG; PAM sequence: TGG
  source 1..20: mol_type = other DNA
tgagcccaggagttcaagat

SEQ ID NO: 6594 - DNA, 20 bp, synthetic construct
  misc_feature 1..20: note = Description of Artificial Sequence: Synthetic oligonucleotide
  misc_feature 1..20: note = Target: ANGPTL4; (-) strand; PAM type: NRG; PAM sequence: AAG
  source 1..20: mol_type = other DNA
ctgcttgagcccaggagttc

SEQ ID NO: 6595 - DNA, 20 bp, synthetic construct
  misc_feature 1..20: note = Description of Artificial Sequence: Synthetic oligonucleotide
  misc_feature 1..20: note = Target: ANGPTL4; (-) strand; PAM type: NRG; PAM sequence: GAG
  source 1..20: mol_type = other DNA
ggaggactgcttgagcccag

SEQ ID NO: 6596 - DNA, 20 bp, synthetic construct
  misc_feature 1..20: note = Description of Artificial Sequence: Synthetic oligonucleotide
  misc_feature 1..20: note = Target: ANGPTL4; (-) strand; PAM type: NRG; PAM sequence: AGG
  source 1..20: mol_type = other DNA
tgggaggactgcttgagccc

SEQ ID NO: 6597 - DNA, 20 bp, synthetic construct
  misc_feature 1..20: note = Description of Artificial Sequence: Synthetic oligonucleotide
  misc_feature 1..20: note = Target: ANGPTL4; (-) strand; PAM type: NRG; PAM sequence: CAG
  source 1..20: mol_type = other DNA
gtgggaggactgcttgagcc

SEQ ID NO: 6598 - DNA, 20 bp, synthetic construct
  misc_feature 1..20: note = Description of Artificial Sequence: Synthetic oligonucleotide
  misc_feature 1..20: note = Target: ANGPTL4; (-) strand; PAM type: NRG; PAM sequence: GAG
  source 1..20: mol_type = other DNA
ccaaggtgggaggactgctt

SEQ ID NO: 6599 - DNA, 20 bp, synthetic construct
  misc_feature 1..20: note = Description of Artificial Sequence: Synthetic oligonucleotide
  misc_feature 1..20: note = Target: ANGPTL4; (-) strand; PAM type: NRG; PAM sequence: AGG
  source 1..20: mol_type = other DNA
ctttgggaggccaaggtggg

SEQ ID NO: 6600 - DNA, 20 bp, synthetic construct
  misc_feature 1..20: note = Description of Artificial Sequence: Synthetic oligonucleotide
  misc_feature 1..20: note = Target: ANGPTL4; (-) strand; PAM type: NRG; PAM sequence: GAG
  source 1..20: mol_type = other DNA
actttgggaggccaaggtgg

SEQ ID NO: 6601 - DNA, 20 bp, synthetic construct
  misc_feature 1..20: note = Description of Artificial Sequence: Synthetic oligonucleotide
  misc_feature 1..20: note = Target: ANGPTL4; (-) strand; PAM type: NRG; PAM sequence: GGG
  source 1..20: mol_type = other DNA
gtactttgggaggccaaggt

SEQ ID NO: 6602 - DNA, 20 bp, synthetic construct
  misc_feature 1..20: note = Description of Artificial Sequence: Synthetic oligonucleotide
  misc_feature 1..20: note = Target: ANGPTL4; (-) strand; PAM type: NRG; PAM sequence: TGG
  source 1..20: mol_type = other DNA
agtactttgggaggccaagg

SEQ ID NO: 6603 - DNA, 20 bp, synthetic construct
  misc_feature 1..20: note = Description of Artificial Sequence: Synthetic oligonucleotide
  misc_feature 1..20: note = Target: ANGPTL4; (-) strand; PAM type: NRG; PAM sequence: AGG
  source 1..20: mol_type = other DNA
cccagtactttgggaggcca

SEQ ID NO: 6604 - DNA, 20 bp, synthetic construct
  misc_feature 1..20: note = Description of Artificial Sequence: Synthetic oligonucleotide
  misc_feature 1..20: note = Target: ANGPTL4; (-) strand; PAM type: NRG; PAM sequence: AAG
  source 1..20: mol_type = other DNA
tcccagtactttgggaggcc

SEQ ID NO: 6605 - DNA, 20 bp, synthetic construct
  misc_feature 1..20: note = Description of Artificial Sequence: Synthetic oligonucleotide
  misc_feature 1..20: note = Target: ANGPTL4; (-) strand; PAM type: NRG; PAM sequence: AGG
  source 1..20: mol_type = other DNA
tgtaatcccagtactttggg

SEQ ID NO: 6606 - DNA, 20 bp, synthetic construct
  misc_feature 1..20: note = Description of Artificial Sequence: Synthetic oligonucleotide
  misc_feature 1..20: note = Target: ANGPTL4; (-) strand; PAM type: NRG; PAM sequence: GAG
  source 1..20: mol_type = other DNA
ttgtaatcccagtactttgg

SEQ ID NO: 6607 - DNA, 20 bp, synthetic construct
  misc_feature 1..20: note = Description of Artificial Sequence: Synthetic oligonucleotide
  misc_feature 1..20: note = Target: ANGPTL4; (-) strand; PAM type: NRG; PAM sequence: GGG
  source 1..20: mol_type = other DNA
gcttgtaatcccagtacttt

SEQ ID NO: 6608 - DNA, 20 bp, synthetic construct
  misc_feature 1..20: note = Description of Artificial Sequence: Synthetic oligonucleotide
  misc_feature 1..20: note = Target: ANGPTL4; (-) strand; PAM type: NRG; PAM sequence: TGG
  source 1..20: mol_type = other DNA
tgcttgtaatcccagtactt

SEQ ID NO: 6609 - DNA, 20 bp, synthetic construct
  misc_feature 1..20: note = Description of Artificial Sequence: Synthetic oligonucleotide
  misc_feature 1..20: note = Target: ANGPTL4; (-) strand; PAM type: NRG; PAM sequence: CAG
  source 1..20: mol_type = other DNA
gtggctcatgcttgtaatcc

SEQ ID NO: 6610 - DNA, 20 bp, synthetic construct
  misc_feature 1..20: note = Description of Artificial Sequence: Synthetic oligonucleotide
  misc_feature 1..20: note = Target: ANGPTL4; (-) strand; PAM type: NRG; PAM sequence: TGG
  source 1..20: mol_type = other DNA
tgccattaagctaggcaagg

SEQ ID NO: 6611 - DNA, 20 bp, synthetic construct
  misc_feature 1..20: note = Description of Artificial Sequence: Synthetic oligonucleotide
  misc_feature 1..20: note = Target: ANGPTL4; (-) strand; PAM type: NRG; PAM sequence: AGG
  source 1..20: mol_type = other DNA
aaatgccattaagctaggca

SEQ ID NO: 6612 - DNA, 20 bp, synthetic construct
  misc_feature 1..20: note = Description of Artificial Sequence: Synthetic oligonucleotide
  misc_feature 1..20: note = Target: ANGPTL4; (-) strand; PAM type: NRG; PAM sequence: AAG
  source 1..20: mol_type = other DNA
taaatgccattaagctaggc

SEQ ID NO: 6613 - DNA, 20 bp, synthetic construct
  misc_feature 1..20: note = Description of Artificial Sequence: Synthetic oligonucleotide
  misc_feature 1..20: note = Target: ANGPTL4; (-) strand; PAM type: NRG; PAM sequence: AGG
  source 1..20: mol_type = other DNA
aatgtaaatgccattaagct

SEQ ID NO: 6614 - DNA, 20 bp, synthetic construct
  misc_feature 1..20: note = Description of Artificial Sequence: Synthetic oligonucleotide
  misc_feature 1..20: note = Target: ANGPTL4; (-) strand; PAM type: NRG; PAM sequence: TAG
  source 1..20: mol_type = other DNA
aaatgtaaatgccattaagc

SEQ ID NO: 6615 - DNA, 20 bp, synthetic construct
  misc_feature 1..20: note = Description of Artificial Sequence: Synthetic oligonucleotide
  misc_feature 1..20: note = Target: ANGPTL4; (-) strand; PAM type: NRG; PAM sequence: AAG
  source 1..20: mol_type = other DNA
ctacaaatgtaaatgccatt

SEQ ID NO: 6616 - DNA, 20 bp, synthetic construct
  misc_feature 1..20: note = Description of Artificial Sequence: Synthetic oligonucleotide
  misc_feature 1..20: note = Target: ANGPTL4; (-) strand; PAM type: NRG; PAM sequence: CAG
  source 1..20: mol_type = other DNA
caggtatgagccactgcgcc

SEQ ID NO: 6617 - DNA, 20 bp, synthetic construct
  misc_feature 1..20: note = Description of Artificial Sequence: Synthetic oligonucleotide
  misc_feature 1..20: note = Target: ANGPTL4; (-) strand; PAM type: NRG; PAM sequence: GAG
  source 1..20: mol_type = other DNA
agtgctgggattacaggtat

SEQ ID NO: 6618 - DNA, 20 bp, synthetic construct
  misc_feature 1..20: note = Description of Artificial Sequence: Synthetic oligonucleotide
  misc_feature 1..20: note = Target: ANGPTL4; (-) strand; PAM type: NRG; PAM sequence: AGG
  source 1..20: mol_type = other DNA
tcccaaagtgctgggattac

SEQ ID NO: 6619 - DNA, 20 bp, synthetic construct
  misc_feature 1..20: note = Description of Artificial Sequence: Synthetic oligonucleotide
  misc_feature 1..20: note = Target: ANGPTL4; (-) strand; PAM type: NRG; PAM sequence: CAG
  source 1..20: mol_type = other DNA
ctcccaaagtgctgggatta

SEQ ID NO: 6620 - DNA, 20 bp, synthetic construct
  misc_feature 1..20: note = Description of Artificial Sequence: Synthetic oligonucleotide
  misc_feature 1..20: note = Target: ANGPTL4; (-) strand; PAM type: NRG; PAM sequence: GGG
  source 1..20: mol_type = other DNA
cctcggcctcccaaagtgct

SEQ ID NO: 6621 - DNA, 20 bp, synthetic construct
  misc_feature 1..20: note = Description of Artificial Sequence: Synthetic oligonucleotide
  misc_feature 1..20: note = Target: ANGPTL4; (-) strand; PAM type: NRG; PAM sequence: TGG
  source 1..20: mol_type = other DNA
acctcggcctcccaaagtgc

SEQ ID NO: 6622 - DNA, 20 bp, synthetic construct
  misc_feature 1..20: note = Description of Artificial Sequence: Synthetic oligonucleotide
  misc_feature 1..20: note = Target: ANGPTL4; (-) strand; PAM type: NRG; PAM sequence: AAG
  source 1..20: mol_type = other DNA
ccgcctacctcggcctccca

SEQ ID NO: 6623 - DNA, 20 bp, synthetic construct
  misc_feature 1..20: note = Description of Artificial Sequence: Synthetic oligonucleotide
  misc_feature 1..20: note = Target: ANGPTL4; (-) strand; PAM type: NRG; PAM sequence: CGG
  source 1..20: mol_type = other DNA
ctcaggtgatccgcctacct

SEQ ID NO: 6624 - DNA, 20 bp, synthetic construct
  misc_feature 1..20: note = Description of Artificial Sequence: Synthetic oligonucleotide
  misc_feature 1..20: note = Target: ANGPTL4; (-) strand; PAM type: NRG; PAM sequence: AGG
  source 1..20: mol_type = other DNA
ggtctctaactcctgacctc

SEQ ID NO: 6625 - DNA, 20 bp, synthetic construct
  misc_feature 1..20: note = Description of Artificial Sequence: Synthetic oligonucleotide
  misc_feature 1..20: note = Target: ANGPTL4; (-) strand; PAM type: NRG; PAM sequence: CAG
  source 1..20: mol_type = other DNA
tggtctctaactcctgacct

SEQ ID NO: 6626 - DNA, 20 bp, synthetic construct
  misc_feature 1..20: note = Description of Artificial Sequence: Synthetic oligonucleotide
  misc_feature 1..20: note = Target: ANGPTL4; (-) strand; PAM type: NRG; PAM sequence: TGG
  source 1..20: mol_type = other DNA
gggtttcgccatgtccaggc

SEQ ID NO: 6627 - DNA, 20 bp, synthetic construct
  misc_feature 1..20: note = Description of Artificial Sequence: Synthetic oligonucleotide
  misc_feature 1..20: note = Target: ANGPTL4; (-) strand; PAM type: NRG; PAM sequence: AGG
  source 1..20: mol_type = other DNA
gacggggtttcgccatgtcc

SEQ ID NO: 6628 - DNA, 20 bp, synthetic construct
  misc_feature 1..20: note = Description of Artificial Sequence: Synthetic oligonucleotide
  misc_feature 1..20: note = Target: ANGPTL4; (-) strand; PAM type: NRG; PAM sequence: CAG
  source 1..20: mol_type = other DNA
agacggggtttcgccatgtc

SEQ ID NO: 6629 - DNA, 20 bp, synthetic construct
  misc_feature 1..20: note = Description of Artificial Sequence: Synthetic oligonucleotide
  misc_feature 1..20: note = Target: ANGPTL4; (-) strand; PAM type: NRG; PAM sequence: GGG
  source 1..20: mol_type = other DNA
tttgtattttagtagagacg

SEQ ID NO: 6630 - DNA, 20 bp, synthetic construct
  misc_feature 1..20: note = Description of Artificial Sequence: Synthetic oligonucleotide
  misc_feature 1..20: note = Target: ANGPTL4; (-) strand; PAM type: NRG; PAM sequence: GGG
  source 1..20: mol_type = other DNA
ttttgtattttagtagagac

SEQ ID NO: 6631 - DNA, 20 bp, synthetic construct
  misc_feature 1..20: note = Description of Artificial Sequence: Synthetic oligonucleotide
  misc_feature 1..20: note = Target: ANGPTL4; (-) strand; PAM type: NRG; PAM sequence: CGG
  source 1..20: mol_type = other DNA
tttttgtattttagtagaga

SEQ ID NO: 6632 - DNA, 20 bp, synthetic construct
  misc_feature 1..20: note = Description of Artificial Sequence: Synthetic oligonucleotide
  misc_feature 1..20: note = Target: ANGPTL4; (-) strand; PAM type: NRG; PAM sequence: GAG
  source 1..20: mol_type = other DNA
ctaatttttgtattttagta

SEQ ID NO: 6633 - DNA, 20 bp, synthetic construct
  misc_feature 1..20: note = Description of Artificial Sequence: Synthetic oligonucleotide
  misc_feature 1..20: note = Target: ANGPTL4; (-) strand; PAM type: NRG; PAM sequence: TAG
  source 1..20: mol_type = other DNA
ggctaatttttgtattttag

SEQ ID NO: 6634 - DNA, 20 bp, synthetic construct
  misc_feature 1..20: note = Description of Artificial Sequence: Synthetic oligonucleotide
  misc_feature 1..20: note = Target: ANGPTL4; (-) strand; PAM type: NRG; PAM sequence: TAG
  source 1..20: mol_type = other DNA
cctggctaatttttgtattt

SEQ ID NO: 6635 - DNA, 20 bp, synthetic construct
  misc_feature 1..20: note = Description of Artificial Sequence: Synthetic oligonucleotide
  misc_feature 1..20: note = Target: ANGPTL4; (-) strand; PAM type: NRG; PAM sequence: TGG
  source 1..20: mol_type = other DNA
caggtgcccaccaccacgcc

SEQ ID NO: 6636 - DNA, 20 bp, synthetic construct
  misc_feature 1..20: note = Description of Artificial Sequence: Synthetic oligonucleotide
  misc_feature 1..20: note = Target: ANGPTL4; (-) strand; PAM type: NRG; PAM sequence: AGG
  source 1..20: mol_type = other DNA
tcccgagtagctgggattac

SEQ ID NO: 6637 - DNA, 20 bp, synthetic construct
  misc_feature 1..20: note = Description of Artificial Sequence: Synthetic oligonucleotide
  misc_feature 1..20: note = Target: ANGPTL4; (-) strand; PAM type: NRG; PAM sequence: CAG
  source 1..20: mol_type = other DNA
ctcccgagtagctgggatta

SEQ ID NO: 6638 - DNA, 20 bp, synthetic construct
  misc_feature 1..20: note = Description of Artificial Sequence: Synthetic oligonucleotide
  misc_feature 1..20: note = Target: ANGPTL4; (-) strand; PAM type: NRG; PAM sequence: GGG
  source 1..20: mol_type = other DNA
cctcagcctcccgagtagct

SEQ ID NO: 6639 - DNA, 20 bp, synthetic construct
  misc_feature 1..20: note = Description of Artificial Sequence: Synthetic oligonucleotide
  misc_feature 1..20: note = Target: ANGPTL4; (-) strand; PAM type: NRG; PAM sequence: TGG
  source 1..20: mol_type = other DNA
gcctcagcctcccgagtagc

SEQ ID NO: 6640 - DNA, 20 bp, synthetic construct
  misc_feature 1..20: note = Description of Artificial Sequence: Synthetic oligonucleotide
  misc_feature 1..20: note = Target: ANGPTL4; (-) strand; PAM type: NRG; PAM sequence: TAG
  source 1..20: mol_type = other DNA
tcctgcctcagcctcccgag

SEQ ID NO: 6641 - DNA, 20 bp, synthetic construct
  misc_feature 1..20: note = Description of Artificial Sequence: Synthetic oligonucleotide
  misc_feature 1..20: note = Target: ANGPTL4; (-) strand; PAM type: NRG; PAM sequence: GAG
  source 1..20: mol_type = other DNA
ttctcctgcctcagcctccc

SEQ ID NO: 6642 - DNA, 20 bp, synthetic construct
  misc_feature 1..20: note = Description of Artificial Sequence: Synthetic oligonucleotide
  misc_feature 1..20: note = Target: ANGPTL4; (-) strand; PAM type: NRG; PAM sequence: CAG
  source 1..20: mol_type = other DNA
ttcaaatgattctcctgcct

SEQ ID NO: 6643 - DNA, 20 bp, synthetic construct
  misc_feature 1..20: note = Description of Artificial Sequence: Synthetic oligonucleotide
  misc_feature 1..20: note = Target: ANGPTL4; (-) strand; PAM type: NRG; PAM sequence: GGG
  source 1..20: mol_type = other DNA
cactgcaacttccacctcct

SEQ ID NO: 6644 - DNA, 20 bp, synthetic construct
  misc_feature 1..20: note = Description of Artificial Sequence: Synthetic oligonucleotide
  misc_feature 1..20: note = Target: ANGPTL4; (-) strand; PAM type: NRG; PAM sequence: TGG
  source 1..20: mol_type = other DNA
tcactgcaacttccacctcc

SEQ ID NO: 6645 - DNA, 20 bp, synthetic construct
  misc_feature 1..20: note = Description of Artificial Sequence: Synthetic oligonucleotide
  misc_feature 1..20: note = Target: ANGPTL4; (-) strand; PAM type: NRG; PAM sequence: TGG
  source 1..20: mol_type = other DNA
tcgccaaggctggagtgcag

SEQ ID NO: 6646 - DNA, 20 bp, synthetic construct
  misc_feature 1..20: note = Description of Artificial Sequence: Synthetic oligonucleotide
  misc_feature 1..20: note = Target: ANGPTL4; (-) strand; PAM type: NRG; PAM sequence: CAG
  source 1..20: mol_type = other DNA
ctgtcgccaaggctggagtg

SEQ ID NO: 6647 - DNA, 20 bp, synthetic construct
  misc_feature 1..20: note = Description of Artificial Sequence: Synthetic oligonucleotide
  misc_feature 1..20: note = Target: ANGPTL4; (-) strand; PAM type: NRG; PAM sequence: GAG
  source 1..20: mol_type = other DNA
ttgctctgtcgccaaggctg

SEQ ID NO: 6648 - DNA, 20 bp, synthetic construct
  misc_feature 1..20: note = Description of Artificial Sequence: Synthetic oligonucleotide
  misc_feature 1..20: note = Target: ANGPTL4; (-) strand; PAM type: NRG; PAM sequence: TGG
  source 1..20: mol_type = other DNA
tcttgctctgtcgccaaggc

SEQ ID NO: 6649 - DNA, 20 bp, synthetic construct
  misc_feature 1..20: note = Description of Artificial Sequence: Synthetic oligonucleotide
  misc_feature 1..20: note = Target: ANGPTL4; (-) strand; PAM type: NRG; PAM sequence: AGG
  source 1..20: mol_type = other DNA
agagtcttgctctgtcgcca

SEQ ID NO: 6650 - DNA, 20 bp, synthetic construct
  misc_feature 1..20: note = Description of Artificial Sequence: Synthetic oligonucleotide
  misc_feature 1..20: note = Target: ANGPTL4; (-) strand; PAM type: NRG; PAM sequence: AAG
  source 1..20: mol_type = other DNA
cagagtcttgctctgtcgcc

SEQ ID NO: 6651 - DNA, 20 bp, synthetic construct
  misc_feature 1..20: note = Description of Artificial Sequence: Synthetic oligonucleotide
  misc_feature 1..20: note = Target: ANGPTL4; (-) strand; PAM type: NRG; PAM sequence: GAG
  source 1..20: mol_type = other DNA
tttttcttttttttgagaca

SEQ ID NO: 6652 - DNA, 20 bp, synthetic construct
  misc_feature 1..20: note = Description of Artificial Sequence: Synthetic oligonucleotide
  misc_feature 1..20: note = Target: ANGPTL4; (-) strand; PAM type: NRG; PAM sequence: CAG
  source 1..20: mol_type = other DNA
tttttttcttttttttgaga

SEQ ID NO: 6653 - DNA, 20 bp, synthetic construct
  misc_feature 1..20: note = Description of Artificial Sequence: Synthetic oligonucleotide
  misc_feature 1..20: note = Target: ANGPTL4; (-) strand; PAM type: NRG; PAM sequence: GAG
  source 1..20: mol_type = other DNA
cttttttttttctttttttt

SEQ ID NO: 6654 - DNA, 20 bp, synthetic construct
  misc_feature 1..20: note = Description of Artificial Sequence: Synthetic oligonucleotide
  misc_feature 1..20: note = Target: ANGPTL4; (-) strand; PAM type: NRG; PAM sequence: TAG
  source 1..20: mol_type = other DNA
gtgggctactttggccaaca

SEQ ID NO: 6655 - DNA, 20 bp, synthetic construct
  misc_feature 1..20: note = Description of Artificial Sequence: Synthetic oligonucleotide
  misc_feature 1..20: note = Target: ANGPTL4; (-) strand; PAM type: NRG; PAM sequence: TGG
  source 1..20: mol_type = other DNA
tcccaacgcgtgggctactt

SEQ ID NO: 6656 - DNA, 20 bp, synthetic construct
  misc_feature 1..20: note = Description of Artificial Sequence: Synthetic oligonucleotide
  misc_feature 1..20: note = Target: ANGPTL4; (-) strand; PAM type: NRG; PAM sequence: GGG
  source 1..20: mol_type = other DNA
ggtctccaatcccaacgcgt

SEQ ID NO: 6657 - DNA, 20 bp, synthetic construct
  misc_feature 1..20: note = Description of Artificial Sequence: Synthetic oligonucleotide
  misc_feature 1..20: note = Target: ANGPTL4; (-) strand; PAM type: NRG; PAM sequence: TGG
  source 1..20: mol_type = other DNA
gggtctccaatcccaacgcg

SEQ ID NO: 6658 - DNA, 20 bp, synthetic construct
  misc_feature 1..20: note = Description of Artificial Sequence: Synthetic oligonucleotide
  misc_feature 1..20: note = Target: ANGPTL4; (-) strand; PAM type: NRG; PAM sequence: GGG
  source 1..20: mol_type = other DNA
cgatcacggtgggcaagacc

SEQ ID NO: 6659 - DNA, 20 bp, synthetic construct
  misc_feature 1..20: note = Description of Artificial Sequence: Synthetic oligonucleotide
  misc_feature 1..20: note = Target: ANGPTL4; (-) strand; PAM type: NRG; PAM sequence: CGG
  source 1..20: mol_type = other DNA
gcgatcacggtgggcaagac

SEQ ID NO: 6660 - DNA, 20 bp, synthetic construct
  misc_feature 1..20: note = Description of Artificial Sequence: Synthetic oligonucleotide
  misc_feature 1..20: note = Target: ANGPTL4; (-) strand; PAM type: NRG; PAM sequence: AAG
  source 1..20: mol_type = other DNA
ctggggcgatcacggtgggc

SEQ ID NO: 6661 - DNA, 20 bp, synthetic construct
  misc_feature 1..20: note = Description of Artificial Sequence: Synthetic oligonucleotide
  misc_feature 1..20: note = Target: ANGPTL4; (-) strand; PAM type: NRG; PAM sequence: GGG
  source 1..20: mol_type = other DNA
tgtactggggcgatcacggt

SEQ ID NO: 6662 - DNA, 20 bp, synthetic construct
  misc_feature 1..20: note = Description of Artificial Sequence: Synthetic oligonucleotide
  misc_feature 1..20: note = Target: ANGPTL4; (-) strand; PAM type: NRG; PAM sequence: TGG
  source 1..20: mol_type = other DNA
ctgtactggggcgatcacgg

SEQ ID NO: 6663 - DNA, 20 bp, synthetic construct
  misc_feature 1..20: note = Description of Artificial Sequence: Synthetic oligonucleotide
  misc_feature 1..20: note = Target: ANGPTL4; (-) strand; PAM type: NRG; PAM sequence: CGG
  source 1..20: mol_type = other DNA
gcactgtactggggcgatca

SEQ ID NO: 6664 - DNA, 20 bp, synthetic construct
  misc_feature 1..20: note = Description of Artificial Sequence: Synthetic oligonucleotide
  misc_feature 1..20: note = Target: ANGPTL4; (-) strand; PAM type: NRG; PAM sequence: GGG
  source 1..20: mol_type = other DNA
atatgccaggcactgtactg

SEQ ID NO: 6665 - DNA, 20 bp, synthetic construct
  misc_feature 1..20: note = Description of Artificial Sequence: Synthetic oligonucleotide
  misc_feature 1..20: note = Target: ANGPTL4; (-) strand; PAM type: NRG; PAM sequence: GGG
  source 1..20: mol_type = other DNA
tatatgccaggcactgtact

SEQ ID NO: 6666 - DNA, 20 bp, synthetic construct
  misc_feature 1..20: note = Description of Artificial Sequence: Synthetic oligonucleotide
  misc_feature 1..20: note = Target: ANGPTL4; (-) strand; PAM type: NRG; PAM sequence: TGG
  source 1..20: mol_type = other DNA
ctatatgccaggcactgtac

SEQ ID NO: 6667 - DNA, 20 bp, synthetic construct
  misc_feature 1..20: note = Description of Artificial Sequence: Synthetic oligonucleotide
  misc_feature 1..20: note = Target: ANGPTL4; (-) strand; PAM type: NRG; PAM sequence: AGG
  source 1..20: mol_type = other DNA
tggagcacctactatatgcc

SEQ ID NO: 6668 - DNA, 20 bp, synthetic construct
  misc_feature 1..20: note = Description of Artificial Sequence: Synthetic oligonucleotide
  misc_feature 1..20: note = Target: ANGPTL4; (-) strand; PAM type: NRG; PAM sequence: CAG
  source 1..20: mol_type = other DNA
ctggagcacctactatatgc

SEQ ID NO: 6669 - DNA, 20 bp, synthetic construct
  misc_feature 1..20: note = Description of Artificial Sequence: Synthetic oligonucleotide
  misc_feature 1..20: note = Target: ANGPTL4; (-) strand; PAM type: NRG; PAM sequence: GAG
  source 1..20: mol_type = other DNA
atcctgatcaattgttcctg

SEQ ID NO: 6670 - DNA, 20 bp, synthetic construct
  misc_feature 1..20: note = Description of Artificial Sequence: Synthetic oligonucleotide
  misc_feature 1..20: note = Target: ANGPTL4; (-) strand; PAM type: NRG; PAM sequence: TGG
  source 1..20: mol_type = other DNA
tcatcctgatcaattgttcc

SEQ ID NO: 6671 - DNA, 20 bp, synthetic construct
  misc_feature 1..20: note = Description of Artificial Sequence: Synthetic oligonucleotide
  misc_feature 1..20: note = Target: ANGPTL4; (-) strand; PAM type: NRG; PAM sequence: AAG
  source 1..20: mol_type = other DNA
cctcttacccagcaaagaca

SEQ ID NO: 6672 - DNA, 20 bp, synthetic construct
  misc_feature 1..20: note = Description of Artificial Sequence: Synthetic oligonucleotide
  misc_feature 1..20: note = Target: ANGPTL4; (-) strand; PAM type: NRG; PAM sequence: AAG
  source 1..20: mol_type = other DNA
atgtggcctcttacccagca

SEQ ID NO: 6673 - DNA, 20 bp, synthetic construct
  misc_feature 1..20: note = Description of Artificial Sequence: Synthetic oligonucleotide
  misc_feature 1..20: note = Target: ANGPTL4; (-) strand; PAM type: NRG; PAM sequence: CAG
  source 1..20: mol_type = other DNA
ttagaatgtggcctcttacc

SEQ ID NO: 6674 - DNA, 20 bp, synthetic construct
  misc_feature 1..20: note = Description of Artificial Sequence: Synthetic oligonucleotide
  misc_feature 1..20: note = Target: ANGPTL4; (-) strand; PAM type: NRG; PAM sequence: TGG
  source 1..20: mol_type = other DNA
aaaaactgacctttagaatg

SEQ ID NO: 6675 - DNA, 20 bp, synthetic construct
  misc_feature 1..20: note = Description of Artificial Sequence: Synthetic oligonucleotide
  misc_feature 1..20: note = Target: ANGPTL4; (-) strand; PAM type: NRG; PAM sequence: TAG
  source 1..20: mol_type = other DNA
cctggccaaaaactgacctt

SEQ ID NO: 6676 - DNA, 20 bp, synthetic construct
  misc_feature 1..20: note = Description of Artificial Sequence: Synthetic oligonucleotide
  misc_feature 1..20: note = Target: ANGPTL4; (-) strand; PAM type: NRG; PAM sequence: TGG
  source 1..20: mol_type = other DNA
caggtgtgagtcactgtgcc

SEQ ID NO: 6677 - DNA, 20 bp, synthetic construct
  misc_feature 1..20: note = Description of Artificial Sequence: Synthetic oligonucleotide
  misc_feature 1..20: note = Target: ANGPTL4; (-) strand; PAM type: NRG; PAM sequence: GAG
  source 1..20: mol_type = other DNA
agtgctgggatgacaggtgt

SEQ ID NO: 6678 - DNA, 20 bp, synthetic construct
  misc_feature 1..20: note = Description of Artificial Sequence: Synthetic oligonucleotide
  misc_feature 1..20: note = Target: ANGPTL4; (-) strand; PAM type: NRG; PAM sequence: AGG
  source 1..20: mol_type = other DNA
tcccaaagtgctgggatgac

SEQ ID NO: 6679 - DNA, 20 bp, synthetic construct
  misc_feature 1..20: note = Description of Artificial Sequence: Synthetic oligonucleotide
  misc_feature 1..20: note = Target: ANGPTL4; (-) strand; PAM type: NRG; PAM sequence: CAG
  source 1..20: mol_type = other DNA
ctcccaaagtgctgggatga

SEQ ID NO: 6680 - DNA, 20 bp, synthetic construct
  misc_feature 1..20: note = Description of Artificial Sequence: Synthetic oligonucleotide
  misc_feature 1..20: note = Target: ANGPTL4; (-) strand; PAM type: NRG; PAM sequence: GGG
  source 1..20: mol_type = other DNA
cctcggcctcccaaagtgct

SEQ ID NO: 6681 - DNA, 20 bp, synthetic construct
  misc_feature 1..20: note = Description of Artificial Sequence: Synthetic oligonucleotide
  misc_feature 1..20: note = Target: ANGPTL4; (-) strand; PAM type: NRG; PAM sequence: TGG
  source 1..20: mol_type = other DNA
gcctcggcctcccaaagtgc

SEQ ID NO: 6682 - DNA, 20 bp, synthetic construct
  misc_feature 1..20: note = Description of Artificial Sequence: Synthetic oligonucleotide
  misc_feature 1..20: note = Target: ANGPTL4; (-) strand; PAM type: NRG; PAM sequence: AAG
  source 1..20: mol_type = other DNA
tcactcgcctcggcctccca

SEQ ID NO: 6683 - DNA, 20 bp, synthetic construct
  misc_feature 1..20: note = Description of Artificial Sequence: Synthetic oligonucleotide
  misc_feature 1..20: note = Target: ANGPTL4; (-) strand; PAM type: NRG; PAM sequence: CGG
  source 1..20: mol_type = other DNA
ctcaagggattcactcgcct

SEQ ID NO: 6684 - DNA, 20 bp, synthetic construct
  misc_feature 1..20: note = Description of Artificial Sequence: Synthetic oligonucleotide
  misc_feature 1..20: note = Target: ANGPTL4; (-) strand; PAM type: NRG; PAM sequence: GGG
  source 1..20: mol_type = other DNA
tcttgaactcctgagctcaa

SEQ ID NO: 6685 - DNA, 20 bp, synthetic construct
  misc_feature 1..20: note = Description of Artificial Sequence: Synthetic oligonucleotide
  misc_feature 1..20: note = Target: ANGPTL4; (-) strand; PAM type: NRG; PAM sequence: AGG
  source 1..20: mol_type = other DNA
gtcttgaactcctgagctca

SEQ ID NO: 6686 - DNA, 20 bp, synthetic construct
  misc_feature 1..20: note = Description of Artificial Sequence: Synthetic oligonucleotide
  misc_feature 1..20: note = Target: ANGPTL4; (-) strand; PAM type: NRG; PAM sequence: AAG
  source 1..20: mol_type = other DNA
ggtcttgaactcctgagctc

SEQ ID NO: 6687 - DNA, 20 bp, synthetic construct
  misc_feature 1..20: note = Description of Artificial Sequence: Synthetic oligonucleotide
  misc_feature 1..20: note = Target: ANGPTL4; (-) strand; PAM type: NRG; PAM sequence: GAG
  source 1..20: mol_type = other DNA
caggctggtcttgaactcct

SEQ ID NO: 6688 - DNA, 20 bp, synthetic construct
  misc_feature 1..20: note = Description of Artificial Sequence: Synthetic oligonucleotide
  misc_feature 1..20: note = Target: ANGPTL4; (-) strand; PAM type: NRG; PAM sequence: TGG
  source 1..20: mol_type = other DNA
ttttgccgtgttgcccaggc

SEQ ID NO: 6689 - DNA, 20 bp, synthetic construct
  misc_feature 1..20: note = Description of Artificial Sequence: Synthetic oligonucleotide
  misc_feature 1..20: note = Target: ANGPTL4; (-) strand; PAM type: NRG; PAM sequence: AGG
  source 1..20: mol_type = other DNA
ggatttttgccgtgttgccc

SEQ ID NO: 6690 - DNA, 20 bp, synthetic construct
  misc_feature 1..20: note = Description of Artificial Sequence: Synthetic oligonucleotide
  misc_feature 1..20: note = Target: ANGPTL4; (-) strand; PAM type: NRG; PAM sequence: CAG
  source 1..20: mol_type = other DNA
aggatttttgccgtgttgcc

SEQ ID NO: 6691 - DNA, 20 bp, synthetic construct
  misc_feature 1..20: note = Description of Artificial Sequence: Synthetic oligonucleotide
  misc_feature 1..20: note = Target: ANGPTL4; (-) strand; PAM type: NRG; PAM sequence: AGG
  source 1..20: mol_type = other DNA
tctgtagattttgtagagac

SEQ ID NO: 6692 - DNA, 20 bp, synthetic construct
  misc_feature 1..20: note = Description of Artificial Sequence: Synthetic oligonucleotide
  misc_feature 1..20: note = Target: ANGPTL4; (-) strand; PAM type: NRG; PAM sequence: CAG
  source 1..20: mol_type = other DNA
ttctgtagattttgtagaga

SEQ ID NO: 6693 - DNA, 20 bp, synthetic construct
  misc_feature 1..20: note = Description of Artificial Sequence: Synthetic oligonucleotide
  misc_feature 1..20: note = Target: ANGPTL4; (-) strand; PAM type: NRG; PAM sequence: GAG
  source 1..20: mol_type = other DNA
taatttctgtagattttgta

SEQ ID NO: 6694 - DNA, 20 bp, synthetic construct
  misc_feature 1..20: note = Description of Artificial Sequence: Synthetic oligonucleotide
  misc_feature 1..20: note = Target: ANGPTL4; (-) strand; PAM type: NRG; PAM sequence: TAG
  source 1..20: mol_type = other DNA
cctaatttctgtagattttg

SEQ ID NO: 6695 - DNA, 20 bp, synthetic construct
  misc_feature 1..20: note = Description of Artificial Sequence: Synthetic oligonucleotide
  misc_feature 1..20: note = Target: ANGPTL4; (-) strand; PAM type: NRG; PAM sequence: TAG
  source 1..20: mol_type = other DNA
ccagacctgcctaatttctg

SEQ ID NO: 6696 - DNA, 20 bp, synthetic construct
  misc_feature 1..20: note = Description of Artificial Sequence: Synthetic oligonucleotide
  misc_feature 1..20: note = Target: ANGPTL4; (-) strand; PAM type: NRG; PAM sequence: CAG
  source 1..20: mol_type = other DNA
ggactataggcatgtgccac

SEQ ID NO: 6697 - DNA, 20 bp, synthetic construct
  misc_feature 1..20: note = Description of Artificial Sequence: Synthetic oligonucleotide
  misc_feature 1..20: note = Target: ANGPTL4; (-) strand; PAM type: NRG; PAM sequence: AGG
  source 1..20: mol_type = other DNA
tcccaagcagctgggactat

SEQ ID NO: 6698 - DNA, 20 bp, synthetic construct
  misc_feature 1..20: note = Description of Artificial Sequence: Synthetic oligonucleotide
  misc_feature 1..20: note = Target: ANGPTL4; (-) strand; PAM type: NRG; PAM sequence: TAG
  source 1..20: mol_type = other DNA
ctcccaagcagctgggacta

SEQ ID NO: 6699 - DNA, 20 bp, synthetic construct
  misc_feature 1..20: note = Description of Artificial Sequence: Synthetic oligonucleotide
  misc_feature 1..20: note = Target: ANGPTL4; (-) strand; PAM type: NRG; PAM sequence: GGG
  source 1..20: mol_type = other DNA
cctcagcctcccaagcagct

SEQ ID NO: 6700 - DNA, 20 bp, synthetic construct
  misc_feature 1..20: note = Description of Artificial Sequence: Synthetic oligonucleotide
  misc_feature 1..20: note = Target: ANGPTL4; (-) strand; PAM type: NRG; PAM sequence: TGG
  source 1..20: mol_type = other DNA
acctcagcctcccaagcagc

SEQ ID NO: 6701 - DNA, 20 bp, synthetic construct
  misc_feature 1..20: note = Description of Artificial Sequence: Synthetic oligonucleotide
  misc_feature 1..20: note = Target: ANGPTL4; (-) strand; PAM type: NRG; PAM sequence: CAG
  source 1..20: mol_type = other DNA
tcccacctcagcctcccaag

SEQ ID NO: 6702 - DNA, 20 bp, synthetic construct
  misc_feature 1..20: note = Description of Artificial Sequence: Synthetic oligonucleotide
  misc_feature 1..20: note = Target: ANGPTL4; (-) strand; PAM type: NRG; PAM sequence: AAG
  source 1..20: mol_type = other DNA
tcctcccacctcagcctccc

SEQ ID NO: 6703 - DNA, 20 bp, synthetic construct
  misc_feature 1..20: note = Description of Artificial Sequence: Synthetic oligonucleotide
  misc_feature 1..20: note = Target: ANGPTL4; (-) strand; PAM type: NRG; PAM sequence: CAG
  source 1..20: mol_type = other DNA
ctcaagtgatcctcccacct

SEQ ID NO: 6704 - DNA, 20 bp, synthetic construct
  misc_feature 1..20: note = Description of Artificial Sequence: Synthetic oligonucleotide
  misc_feature 1..20: note = Target: ANGPTL4; (-) strand; PAM type: NRG; PAM sequence: AAG
  source 1..20: mol_type = other DNA
aacctcaaactcccaggctc

SEQ ID NO: 6705 - DNA, 20 bp, synthetic construct
  misc_feature 1..20: note = Description of Artificial Sequence: Synthetic oligonucleotide
  misc_feature 1..20: note = Target: ANGPTL4; (-) strand; PAM type: NRG; PAM sequence: AGG
  source 1..20: mol_type = other DNA
caccgcaacctcaaactccc

SEQ ID NO: 6706 - DNA, 20 bp, synthetic construct
  misc_feature 1..20: note = Description of Artificial Sequence: Synthetic oligonucleotide
  misc_feature 1..20: note = Target: ANGPTL4; (-) strand; PAM type: NRG; PAM sequence: CAG
  source 1..20: mol_type = other DNA
tcaccgcaacctcaaactcc

SEQ ID NO: 6707 - DNA, 20 bp, synthetic construct
  misc_feature 1..20: note = Description of Artificial Sequence: Synthetic oligonucleotide
  misc_feature 1..20: note = Target: ANGPTL4; (-) strand; PAM type: NRG; PAM sequence: CAG
  source 1..20: mol_type = other DNA
ggagtgcagtgtcacaatca

SEQ ID NO: 6708 - DNA, 20 bp, synthetic construct
  misc_feature 1..20: note = Description of Artificial Sequence: Synthetic oligonucleotide
  misc_feature 1..20: note = Target: ANGPTL4; (-) strand; PAM type: NRG; PAM sequence: CAG
  source 1..20: mol_type = other DNA
cactcacccaggctggagtg

SEQ ID NO: 6709 - DNA, 20 bp, synthetic construct
  misc_feature 1..20: note = Description of Artificial Sequence: Synthetic oligonucleotide
  misc_feature 1..20: note = Target: ANGPTL4; (-) strand; PAM type: NRG; PAM sequence: GAG
  source 1..20: mol_type = other DNA
ggtctcactcacccaggctg

SEQ ID NO: 6710 - DNA, 20 bp, synthetic construct
  misc_feature 1..20: note = Description of Artificial Sequence: Synthetic oligonucleotide
  misc_feature 1..20: note = Target: ANGPTL4; (-) strand; PAM type: NRG; PAM sequence: TGG
  source 1..20: mol_type = other DNA
tgggtctcactcacccaggc

SEQ ID NO: 6711 - DNA, 20 bp, synthetic construct
  misc_feature 1..20: note = Description of Artificial Sequence: Synthetic oligonucleotide
  misc_feature 1..20: note = Target: ANGPTL4; (-) strand; PAM type: NRG; PAM sequence: AGG
  source 1..20: mol_type = other DNA
gagatgggtctcactcaccc

SEQ ID NO: 6712 - DNA, 20 bp, synthetic construct
  misc_feature 1..20: note = Description of Artificial Sequence: Synthetic oligonucleotide
  misc_feature 1..20: note = Target: ANGPTL4; (-) strand; PAM type: NRG; PAM sequence: CAG
  source 1..20: mol_type = other DNA
tgagatgggtctcactcacc

SEQ ID NO: 6713 - DNA, 20 bp, synthetic construct
  misc_feature 1..20: note = Description of Artificial Sequence: Synthetic oligonucleotide
  misc_feature 1..20: note = Target: ANGPTL4; (-) strand; PAM type: NRG; PAM sequence: GGG
  source 1..20: mol_type = other DNA
tttttttttttttctgagat

SEQ ID NO: 6714 - DNA, 20 bp, synthetic construct
  misc_feature 1..20: note = Description of Artificial Sequence: Synthetic oligonucleotide
  misc_feature 1..20: note = Target: ANGPTL4; (-) strand; PAM type: NRG; PAM sequence: TGG
  source 1..20: mol_type = other DNA
ttttttttttttttctgaga

SEQ ID NO: 6715 - DNA, 20 bp, synthetic construct
  misc_feature 1..20: note = Description of Artificial Sequence: Synthetic oligonucleotide
  misc_feature 1..20: note = Target: ANGPTL4; (-) strand; PAM type: NRG; PAM sequence: GAG
  source 1..20: mol_type = other DNA
gtatttttttttttttttct

SEQ ID NO: 6716 - DNA, 20 bp, synthetic construct
  misc_feature 1..20: note = Description of Artificial Sequence: Synthetic oligonucleotide
  misc_feature 1..20: note = Target: ANGPTL4; (-) strand; PAM type: NRG; PAM sequence: CAG
  source 1..20: mol_type = other DNA
caggcatgagccaccacgcc

SEQ ID NO: 6717 - DNA, 20 bp, synthetic construct
  misc_feature 1..20: note = Description of Artificial Sequence: Synthetic oligonucleotide
  misc_feature 1..20: note = Target: ANGPTL4; (-) strand; PAM type: NRG; PAM sequence: GAG
  source 1..20: mol_type = other DNA
agtgctaggattacaggcat

SEQ ID NO: 6718 - DNA, 20 bp, synthetic construct
  misc_feature 1..20: note = Description of Artificial Sequence: Synthetic oligonucleotide
  misc_feature 1..20: note = Target: ANGPTL4; (-) strand; PAM type: NRG; PAM sequence: AGG
  source 1..20: mol_type = other DNA
tcccaaagtgctaggattac

SEQ ID NO: 6719 - DNA, 20 bp, synthetic construct
  misc_feature 1..20: note = Description of Artificial Sequence: Synthetic oligonucleotide
  misc_feature 1..20: note = Target: ANGPTL4; (-) strand; PAM type: NRG; PAM sequence: CAG
  source 1..20: mol_type = other DNA
ctcccaaagtgctaggatta

SEQ ID NO: 6720 - DNA, 20 bp, synthetic construct
  misc_feature 1..20: note = Description of Artificial Sequence: Synthetic oligonucleotide
  misc_feature 1..20: note = Target: ANGPTL4; (-) strand; PAM type: NRG; PAM sequence: AGG
  source 1..20: mol_type = other DNA
cctcagcctcccaaagtgct

SEQ ID NO: 6721 - DNA, 20 bp, synthetic construct
  misc_feature 1..20: note = Description of Artificial Sequence: Synthetic oligonucleotide
  misc_feature 1..20: note = Target: ANGPTL4; (-) strand; PAM type: NRG; PAM sequence: TAG
  source 1..20: mol_type = other DNA
acctcagcctcccaaagtgc

SEQ ID NO: 6722 - DNA, 20 bp, synthetic construct
  misc_feature 1..20: note = Description of Artificial Sequence: Synthetic oligonucleotide
  misc_feature 1..20: note = Target: ANGPTL4; (-) strand; PAM type: NRG; PAM sequence: AAG
  source 1..20: mol_type = other DNA
tccaccacctcagcctccca

SEQ ID NO: 6723 - DNA, 20 bp, synthetic construct
  misc_feature 1..20: note = Description of Artificial Sequence: Synthetic oligonucleotide
  misc_feature 1..20: note = Target: ANGPTL4; (-) strand; PAM type: NRG; PAM sequence: CAG
  source 1..20: mol_type = other DNA
gcttaggctatccaccacct

SEQ ID NO: 6724 - DNA, 20 bp, synthetic construct
  misc_feature 1..20: note = Description of Artificial Sequence: Synthetic oligonucleotide
  misc_feature 1..20: note = Target: ANGPTL4; (-) strand; PAM type: NRG; PAM sequence: AGG
  source 1..20: mol_type = other DNA
ggtctcaaactcctaagctt

SEQ ID NO: 6725 - DNA, 20 bp, synthetic construct
  misc_feature 1..20: note = Description of Artificial Sequence: Synthetic oligonucleotide
  misc_feature 1..20: note = Target: ANGPTL4; (-) strand; PAM type: NRG; PAM sequence: TAG
  source 1..20: mol_type = other DNA
tggtctcaaactcctaagct

SEQ ID NO: 6726 - DNA, 20 bp, synthetic construct
  misc_feature 1..20: note = Description of Artificial Sequence: Synthetic oligonucleotide
  misc_feature 1..20: note = Target: ANGPTL4; (-) strand; PAM type: NRG; PAM sequence: AAG
  source 1..20: mol_type = other DNA
caggctggtctcaaactcct

SEQ ID NO: 6727 - DNA, 20 bp, synthetic construct
  misc_feature 1..20: note = Description of Artificial Sequence: Synthetic oligonucleotide
  misc_feature 1..20: note = Target: ANGPTL4; (-) strand; PAM type: NRG; PAM sequence: TGG
  source 1..20: mol_type = other DNA
tttcgccatgttgcccaggc

SEQ ID NO: 6728 - DNA, 20 bp, synthetic construct
  misc_feature 1..20: note = Description of Artificial Sequence: Synthetic oligonucleotide
  misc_feature 1..20: note = Target: ANGPTL4; (-) strand; PAM type: NRG; PAM sequence: AGG
  source 1..20: mol_type = other DNA
ggggtttcgccatgttgccc

SEQ ID NO: 6729 - DNA, 20 bp, synthetic construct
  misc_feature 1..20: note = Description of Artificial Sequence: Synthetic oligonucleotide
  misc_feature 1..20: note = Target: ANGPTL4; (-) strand; PAM type: NRG; PAM sequence: CAG
  source 1..20: mol_type = other DNA
tggggtttcgccatgttgcc

SEQ ID NO: 6730 - DNA, 20 bp, synthetic construct
  misc_feature 1..20: note = Description of Artificial Sequence: Synthetic oligonucleotide
  misc_feature 1..20: note = Target: ANGPTL4; (-) strand; PAM type: NRG; PAM sequence: GGG
  source 1..20: mol_type = other DNA
gtattctagtagagggggtg

SEQ ID NO: 6731 - DNA, 20 bp, synthetic construct
  misc_feature 1..20: note = Description of Artificial Sequence: Synthetic oligonucleotide
  misc_feature 1..20: note = Target: ANGPTL4; (-) strand; PAM type: NRG; PAM sequence: GGG
  source 1..20: mol_type = other DNA
tgtattctagtagagggggt

SEQ ID NO: 6732 - DNA, 20 bp, synthetic construct
  misc_feature 1..20: note = Description of Artificial Sequence: Synthetic oligonucleotide
  misc_feature 1..20: note = Target: ANGPTL4; (-) strand; PAM type: NRG; PAM sequence: TGG
  source 1..20: mol_type = other DNA
ttgtattctagtagaggggg

SEQ ID NO: 6733 - DNA, 20 bp, synthetic construct
  misc_feature 1..20: note = Description of Artificial Sequence: Synthetic oligonucleotide
  misc_feature 1..20: note = Target: ANGPTL4; (-) strand; PAM type: NRG; PAM sequence: GGG
  source 1..20: mol_type = other DNA
tttttgtattctagtagagg

SEQ ID NO: 6734 - DNA, 20 bp, synthetic construct
  misc_feature 1..20: note = Description of Artificial Sequence: Synthetic oligonucleotide
  misc_feature 1..20: note = Target: ANGPTL4; (-) strand; PAM type: NRG; PAM sequence: GGG
  source 1..20: mol_type = other DNA
ttttttgtattctagtagag

SEQ ID NO: 6735 - DNA, 20 bp, synthetic construct
  misc_feature 1..20: note = Description of Artificial Sequence: Synthetic oligonucleotide
  misc_feature 1..20: note = Target: ANGPTL4; (-) strand; PAM type: NRG; PAM sequence: GGG
  source 1..20: mol_type = other DNA
attttttgtattctagtaga

SEQ ID NO: 6736 - DNA, 20 bp, synthetic construct
  misc_feature 1..20: note = Description of Artificial Sequence: Synthetic oligonucleotide
  misc_feature 1..20: note = Target: ANGPTL4; (-) strand; PAM type: NRG; PAM sequence: AGG
  source 1..20: mol_type = other DNA
aattttttgtattctagtag

SEQ ID NO: 6737 - DNA, 20 bp, synthetic construct
  misc_feature 1..20: note = Description of Artificial Sequence: Synthetic oligonucleotide
  misc_feature 1..20: note = Target: ANGPTL4; (-) strand; PAM type: NRG; PAM sequence: GAG
  source 1..20: mol_type = other DNA
taattttttgtattctagta

SEQ ID NO: 6738 - DNA, 20 bp, synthetic construct
  misc_feature 1..20: note = Description of Artificial Sequence: Synthetic oligonucleotide
  misc_feature 1..20: note = Target: ANGPTL4; (-) strand; PAM type: NRG; PAM sequence: TAG
  source 1..20: mol_type = other DNA
gctaattttttgtattctag

SEQ ID NO: 6739 - DNA, 20 bp, synthetic construct
  misc_feature 1..20: note = Description of Artificial Sequence: Synthetic oligonucleotide
  misc_feature 1..20: note = Target: ANGPTL4; (-) strand; PAM type: NRG; PAM sequence: TAG
  source 1..20: mol_type = other DNA
cccgctaattttttgtattc

SEQ ID NO: 6740 - DNA, 20 bp, synthetic construct
  misc_feature 1..20: note = Description of Artificial Sequence: Synthetic oligonucleotide
  misc_feature 1..20: note = Target: ANGPTL4; (-) strand; PAM type: NRG; PAM sequence: AGG
  source 1..20: mol_type = other DNA
tcctgagtagctgggactac

SEQ ID NO: 6741 - DNA, 20 bp, synthetic construct
  misc_feature 1..20: note = Description of Artificial Sequence: Synthetic oligonucleotide
  misc_feature 1..20: note = Target: ANGPTL4; (-) strand; PAM type: NRG; PAM sequence: CAG
  source 1..20: mol_type = other DNA
ctcctgagtagctgggacta

SEQ ID NO: 6742 - DNA, 20 bp, synthetic construct
  misc_feature 1..20: note = Description of Artificial Sequence: Synthetic oligonucleotide
  misc_feature 1..20: note = Target: ANGPTL4; (-) strand; PAM type: NRG; PAM sequence: GGG
  source 1..20: mol_type = other DNA
cctcagcctcctgagtagct

SEQ ID NO: 6743 - DNA, 20 bp, synthetic construct
  misc_feature 1..20: note = Description of Artificial Sequence: Synthetic oligonucleotide
  misc_feature 1..20: note = Target: ANGPTL4; (-) strand; PAM type: NRG; PAM sequence: TGG
  source 1..20: mol_type = other DNA
gcctcagcctcctgagtagc

SEQ ID NO: 6744 - DNA, 20 bp, synthetic construct
  misc_feature 1..20: note = Description of Artificial Sequence: Synthetic oligonucleotide
  misc_feature 1..20: note = Target: ANGPTL4; (-) strand; PAM type: NRG; PAM sequence: TAG
  source 1..20: mol_type = other DNA
tcctgcctcagcctcctgag

SEQ ID NO: 6745 - DNA, 20 bp, synthetic construct
  misc_feature 1..20: note = Description of Artificial Sequence: Synthetic oligonucleotide
  misc_feature 1..20: note = Target: ANGPTL4; (-) strand; PAM type: NRG; PAM sequence: GAG
  source 1..20: mol_type = other DNA
ttctcctgcctcagcctcct

SEQ ID NO: 6746 - DNA, 20 bp, synthetic construct
  misc_feature 1..20: note = Description of Artificial Sequence: Synthetic oligonucleotide
  misc_feature 1..20: note = Target: ANGPTL4; (-) strand; PAM type: NRG; PAM sequence: CAG
  source 1..20: mol_type = other DNA
ttcccgccattctcctgcct

SEQ ID NO: 6747 - DNA, 20 bp, synthetic construct
  misc_feature 1..20: note = Description of Artificial Sequence: Synthetic oligonucleotide
  misc_feature 1..20: note = Target: ANGPTL4; (-) strand; PAM type: NRG; PAM sequence: AGG
  source 1..20: mol_type = other DNA
cactgcaagctccacctccc

SEQ ID NO: 6748 - DNA, 20 bp, synthetic construct
  misc_feature 1..20: note = Description of Artificial Sequence: Synthetic oligonucleotide
  misc_feature 1..20: note = Target: ANGPTL4; (-) strand; PAM type: NRG; PAM sequence: CAG
  source 1..20: mol_type = other DNA
tcactgcaagctccacctcc

SEQ ID NO: 6749 - DNA, 20 bp, synthetic construct
  misc_feature 1..20: note = Description of Artificial Sequence: Synthetic oligonucleotide
  misc_feature 1..20: note = Target: ANGPTL4; (-) strand; PAM type: NRG; PAM sequence: AAG
  source 1..20: mol_type = other DNA
gcctcatctcggctcactgc

SEQ ID NO: 6750 - DNA, 20 bp, synthetic construct
  misc_feature 1..20: note = Description of Artificial Sequence: Synthetic oligonucleotide
  misc_feature 1..20: note = Target: ANGPTL4; (-) strand; PAM type: NRG; PAM sequence: CGG
  source 1..20: mol_type = other DNA
ggagtgcagtggcctcatct

SEQ ID NO: 6751 - DNA, 20 bp, synthetic construct
  misc_feature 1..20: note = Description of Artificial Sequence: Synthetic oligonucleotide
  misc_feature 1..20: note = Target: ANGPTL4; (-) strand; PAM type: NRG; PAM sequence: TGG
  source 1..20: mol_type = other DNA
ttgcccaggctggagtgcag

SEQ ID NO: 6752 - DNA, 20 bp, synthetic construct
  misc_feature 1..20: note = Description of Artificial Sequence: Synthetic oligonucleotide
  misc_feature 1..20: note = Target: ANGPTL4; (-) strand; PAM type: NRG; PAM sequence: CAG
  source 1..20: mol_type = other DNA
ctgttgcccaggctggagtg

SEQ ID NO: 6753 - DNA, 20 bp, synthetic construct
  misc_feature 1..20: note = Description of Artificial Sequence: Synthetic oligonucleotide
  misc_feature 1..20: note = Target: ANGPTL4; (-) strand; PAM type: NRG; PAM sequence: GAG
  source 1..20: mol_type = other DNA
ttgctctgttgcccaggctg

SEQ ID NO: 6754 - DNA, 20 bp, synthetic construct
  misc_feature 1..20: note = Description of Artificial Sequence: Synthetic oligonucleotide
  misc_feature 1..20: note = Target: ANGPTL4; (-) strand; PAM type: NRG; PAM sequence: TGG
  source 1..20: mol_type = other DNA
tcttgctctgttgcccaggc

SEQ ID NO: 6755 - DNA, 20 bp, synthetic construct
  misc_feature 1..20: note = Description of Artificial Sequence: Synthetic oligonucleotide
  misc_feature 1..20: note = Target: ANGPTL4; (-) strand; PAM type: NRG; PAM sequence: AGG
  source 1..20: mol_type = other DNA
agagtcttgctctgttgccc

SEQ ID NO: 6756 - DNA, 20 bp, synthetic construct
  misc_feature 1..20: note = Description of Artificial Sequence: Synthetic oligonucleotide
  misc_feature 1..20: note = Target: ANGPTL4; (-) strand; PAM type: NRG; PAM sequence: CAG
  source 1..20: mol_type = other DNA
cagagtcttgctctgttgcc

SEQ ID NO: 6757 - DNA, 20 bp, synthetic construct
  misc_feature 1..20: note = Description of Artificial Sequence: Synthetic oligonucleotide
  misc_feature 1..20: note = Target: ANGPTL4; (-) strand; PAM type: NRG; PAM sequence: GAG
  source 1..20: mol_type = other DNA
ttttttttttttttgagaca

SEQ ID NO: 6758 - DNA, 20 bp, synthetic construct
  misc_feature 1..20: note = Description of Artificial Sequence: Synthetic oligonucleotide
  misc_feature 1..20: note = Target: ANGPTL4; (-) strand; PAM type: NRG; PAM sequence: CAG
  source 1..20: mol_type = other DNA
ttttttttttttttttgaga

SEQ ID NO: 6759 - DNA, 20 bp, synthetic construct
  misc_feature 1..20: note = Description of Artificial Sequence: Synthetic oligonucleotide
  misc_feature 1..20: note = Target: ANGPTL4; (-) strand; PAM type: NRG; PAM sequence: GAG
  source 1..20: mol_type = other DNA
tttttttttttttttttttt

SEQ ID NO: 6760 - DNA, 20 bp, synthetic construct
  misc_feature 1..20: note = Description of Artificial Sequence: Synthetic oligonucleotide
  misc_feature 1..20: note = Target: ANGPTL4; (-) strand; PAM type: NRG; PAM sequence: TAG
  source 1..20: mol_type = other DNA
gtgagccactgtgcctggcc

SEQ ID NO: 6761 - DNA, 20 bp, synthetic construct
  misc_feature 1..20: note = Description of Artificial Sequence: Synthetic oligonucleotide
  misc_feature 1..20: note = Target: ANGPTL4; (-) strand; PAM type: NRG; PAM sequence: TGG
  source 1..20: mol_type = other DNA
caggtgtgagccactgtgcc

SEQ ID NO: 6762 - DNA, 20 bp, synthetic construct
  misc_feature 1..20: note = Description of Artificial Sequence: Synthetic oligonucleotide
  misc_feature 1..20: note = Target: ANGPTL4; (-) strand; PAM type: NRG; PAM sequence: GAG
  source 1..20: mol_type = other DNA
cgtgctgggattacaggtgt

SEQ ID NO: 6763 - DNA, 20 bp, synthetic construct
  misc_feature 1..20: note = Description of Artificial Sequence: Synthetic oligonucleotide
  misc_feature 1..20: note = Target: ANGPTL4; (-) strand; PAM type: NRG; PAM sequence: AGG
  source 1..20: mol_type = other DNA
tcccaacgtgctgggattac

SEQ ID NO: 6764 - DNA, 20 bp, synthetic construct
  misc_feature 1..20: note = Description of Artificial Sequence: Synthetic oligonucleotide
  misc_feature 1..20: note = Target: ANGPTL4; (-) strand; PAM type: NRG; PAM sequence: CAG
  source 1..20: mol_type = other DNA
ctcccaacgtgctgggatta

SEQ ID NO: 6765 - DNA, 20 bp, synthetic construct
  misc_feature 1..20: note = Description of Artificial Sequence: Synthetic oligonucleotide
  misc_feature 1..20: note = Target: ANGPTL4; (-) strand; PAM type: NRG; PAM sequence: GGG
  source 1..20: mol_type = other DNA
tctcggcctcccaacgtgct

SEQ ID NO: 6766 - DNA, 20 bp, synthetic construct
  misc_feature 1..20: note = Description of Artificial Sequence: Synthetic oligonucleotide
  misc_feature 1..20: note = Target: ANGPTL4; (-) strand; PAM type: NRG; PAM sequence: TGG
  source 1..20: mol_type = other DNA
gtctcggcctcccaacgtgc

SEQ ID NO: 6767 - DNA, 20 bp, synthetic construct
  misc_feature 1..20: note = Description of Artificial Sequence: Synthetic oligonucleotide
  misc_feature 1..20: note = Target: ANGPTL4; (-) strand; PAM type: NRG; PAM sequence: CGG
  source 1..20: mol_type = other DNA
ctcaggtgatccacctgtct

SEQ ID NO: 6768 - DNA, 20 bp, synthetic construct
  misc_feature 1..20: note = Description of Artificial Sequence: Synthetic oligonucleotide
  misc_feature 1..20: note = Target: ANGPTL4; (-) strand; PAM type: NRG; PAM sequence: AGG
  source 1..20: mol_type = other DNA
ggtctcaaattcctgacctc

SEQ ID NO: 6769 - DNA, 20 bp, synthetic construct
  misc_feature 1..20: note = Description of Artificial Sequence: Synthetic oligonucleotide
  misc_feature 1..20: note = Target: ANGPTL4; (-) strand; PAM type: NRG; PAM sequence: CAG
  source 1..20: mol_type = other DNA
tggtctcaaattcctgacct

SEQ ID NO: 6770 - DNA, 20 bp, synthetic construct
  misc_feature 1..20: note = Description of Artificial Sequence: Synthetic oligonucleotide
  misc_feature 1..20: note = Target: ANGPTL4; (-) strand; PAM type: NRG; PAM sequence: TGG
  source 1..20: mol_type = other DNA
tttcactatgttggctctgc

SEQ ID NO: 6771 - DNA, 20 bp, synthetic construct
  misc_feature 1..20: note = Description of Artificial Sequence: Synthetic oligonucleotide
  misc_feature 1..20: note = Target: ANGPTL4; (-) strand; PAM type: NRG; PAM sequence: TGG
  source 1..20: mol_type = other DNA
caaacggggtttcactatgt

SEQ ID NO: 6772 - DNA, 20 bp, synthetic construct
  misc_feature 1..20: note = Description of Artificial Sequence: Synthetic oligonucleotide
  misc_feature 1..20: note = Target: ANGPTL4; (-) strand; PAM type: NRG; PAM sequence: GGG
  source 1..20: mol_type = other DNA
ttgtatttttagtgcaaacg

SEQ ID NO: 6773 - DNA, 20 bp, synthetic construct
  misc_feature 1..20: note = Description of Artificial Sequence: Synthetic oligonucleotide
  misc_feature 1..20: note = Target: ANGPTL4; (-) strand; PAM type: NRG; PAM sequence: GGG
  source 1..20: mol_type = other DNA
tttgtatttttagtgcaaac

SEQ ID NO: 6774 - DNA, 20 bp, synthetic construct
  misc_feature 1..20: note = Description of Artificial Sequence: Synthetic oligonucleotide
  misc_feature 1..20: note = Target: ANGPTL4; (-) strand; PAM type: NRG; PAM sequence: CGG
  source 1..20: mol_type = other DNA
ttttgtatttttagtgcaaa

SEQ ID NO: 6775 - DNA, 20 bp, synthetic construct
  misc_feature 1..20: note = Description of Artificial Sequence: Synthetic oligonucleotide
  misc_feature 1..20: note = Target: ANGPTL4; (-) strand; PAM type: NRG; PAM sequence: TAG
  source 1..20: mol_type = other DNA
tgactaattttttgtatttt

SEQ ID NO: 6776 - DNA, 20 bp, synthetic construct
  misc_feature 1..20: note = Description of Artificial Sequence: Synthetic oligonucleotide
  misc_feature 1..20: note = Target: ANGPTL4; (-) strand; PAM type: NRG; PAM sequence: AGG
  source 1..20: mol_type = other DNA
tcccgagtagcggggattac

SEQ ID NO: 6777 - DNA, 20 bp, synthetic construct
  misc_feature 1..20: note = Description of Artificial Sequence: Synthetic oligonucleotide
  misc_feature 1..20: note = Target: ANGPTL4; (-) strand; PAM type: NRG; PAM sequence: CAG
  source 1..20: mol_type = other DNA
ctcccgagtagcggggatta

SEQ ID NO: 6778 - DNA, 20 bp, synthetic construct
  misc_feature 1..20: note = Description of Artificial Sequence: Synthetic oligonucleotide
  misc_feature 1..20: note = Target: ANGPTL4; (-) strand; PAM type: NRG; PAM sequence: GGG
  source 1..20: mol_type = other DNA
cctcagcctcccgagtagcg

SEQ ID NO: 6779 - DNA, 20 bp, synthetic construct
  misc_feature 1..20: note = Description of Artificial Sequence: Synthetic oligonucleotide
  misc_feature 1..20: note = Target: ANGPTL4; (-) strand; PAM type: NRG; PAM sequence: GGG
  source 1..20: mol_type = other DNA
gcctcagcctcccgagtagc

SEQ ID NO: 6780 - DNA, 20 bp, synthetic construct
  misc_feature 1..20: note = Description of Artificial Sequence: Synthetic oligonucleotide
  misc_feature 1..20: note = Target: ANGPTL4; (-) strand; PAM type: NRG; PAM sequence: CGG
  source 1..20: mol_type = other DNA
agcctcagcctcccgagtag

SEQ ID NO: 6781 - DNA, 20 bp, synthetic construct
  misc_feature 1..20: note = Description of Artificial Sequence: Synthetic oligonucleotide
  misc_feature 1..20: note = Target: ANGPTL4; (-) strand; PAM type: NRG; PAM sequence: TAG
  source 1..20: mol_type = other DNA
tccagcctcagcctcccgag

SEQ ID NO: 6782 - DNA, 20 bp, synthetic construct
  misc_feature 1..20: note = Description of Artificial Sequence: Synthetic oligonucleotide
  misc_feature 1..20: note = Target: ANGPTL4; (-) strand; PAM type: NRG; PAM sequence: GAG
  source 1..20: mol_type = other DNA
ttctccagcctcagcctccc

SEQ ID NO: 6783 - DNA, 20 bp, synthetic construct
  misc_feature 1..20: note = Description of Artificial Sequence: Synthetic oligonucleotide
  misc_feature 1..20: note = Target: ANGPTL4; (-) strand; PAM type: NRG; PAM sequence: CAG
  source 1..20: mol_type = other DNA
ttcaagcgattctccagcct

SEQ ID NO: 6784 - DNA, 20 bp, synthetic construct
  misc_feature 1..20: note = Description of Artificial Sequence: Synthetic oligonucleotide
  misc_feature 1..20: note = Target: ANGPTL4; (-) strand; PAM type: NRG; PAM sequence: CAG
  source 1..20: mol_type = other DNA
cccaggttcaagcgattctc

SEQ ID NO: 6785 - DNA, 20 bp, synthetic construct
  misc_feature 1..20: note = Description of Artificial Sequence: Synthetic oligonucleotide
  misc_feature 1..20: note = Target: ANGPTL4; (-) strand; PAM type: NRG; PAM sequence: AAG
  source 1..20: mol_type = other DNA
aacctctgcctcccaggttc

SEQ ID NO: 6786 - DNA, 20 bp, synthetic construct
  misc_feature 1..20: note = Description of Artificial Sequence: Synthetic oligonucleotide
  misc_feature 1..20: note = Target: ANGPTL4; (-) strand; PAM type: NRG; PAM sequence: AGG
  source 1..20: mol_type = other DNA
cactgcaacctctgcctccc

SEQ ID NO: 6787 - DNA, 20 bp, synthetic construct
  misc_feature 1..20: note = Description of Artificial Sequence: Synthetic oligonucleotide
  misc_feature 1..20: note = Target: ANGPTL4; (-) strand; PAM type: NRG; PAM sequence: CAG
  source 1..20: mol_type = other DNA
tcactgcaacctctgcctcc

SEQ ID NO: 6788 - DNA, 20 bp, synthetic construct
  misc_feature 1..20: note = Description of Artificial Sequence: Synthetic oligonucleotide
  misc_feature 1..20: note = Target: ANGPTL4; (-) strand; PAM type: NRG; PAM sequence: CGG
  source 1..20: mol_type = other DNA
tcgcccaggctggagtgcaa

SEQ ID NO: 6789 - DNA, 20 bp, synthetic construct
  misc_feature 1..20: note = Description of Artificial Sequence: Synthetic oligonucleotide
  misc_feature 1..20: note = Target: ANGPTL4; (-) strand; PAM type: NRG; PAM sequence: GAG
  source 1..20: mol_type = other DNA
ccctcttgtcgcccaggctg

SEQ ID NO: 6790 - DNA, 20 bp, synthetic construct
  misc_feature 1..20: note = Description of Artificial Sequence: Synthetic oligonucleotide
  misc_feature 1..20: note = Target: ANGPTL4; (-) strand; PAM type: NRG; PAM sequence: TGG
  source 1..20: mol_type = other DNA
ttccctcttgtcgcccaggc

SEQ ID NO: 6791 - DNA, 20 bp, synthetic construct
  misc_feature 1..20: note = Description of Artificial Sequence: Synthetic oligonucleotide
  misc_feature 1..20: note = Target: ANGPTL4; (-) strand; PAM type: NRG; PAM sequence: AGG
  source 1..20: mol_type = other DNA
gagtttccctcttgtcgccc

SEQ ID NO: 6792 - DNA, 20 bp, synthetic construct
  misc_feature 1..20: note = Description of Artificial Sequence: Synthetic oligonucleotide
  misc_feature 1..20: note = Target: ANGPTL4; (-) strand; PAM type: NRG; PAM sequence: CAG
  source 1..20: mol_type = other DNA
ggagtttccctcttgtcgcc

SEQ ID NO: 6793 - DNA, 20 bp, synthetic construct
  misc_feature 1..20: note = Description of Artificial Sequence: Synthetic oligonucleotide
  misc_feature 1..20: note = Target: ANGPTL4; (-) strand; PAM type: NRG; PAM sequence: GAG
  source 1..20: mol_type = other DNA
ttatttatttttttgagatg

SEQ ID NO: 6794 - DNA, 20 bp, synthetic construct
  misc_feature 1..20: note = Description of Artificial Sequence: Synthetic oligonucleotide
  misc_feature 1..20: note = Target: ANGPTL4; (-) strand; PAM type: NRG; PAM sequence: TGG
  source 1..20: mol_type = other DNA
atttatttatttttttgaga

SEQ ID NO: 6795 - DNA, 20 bp, synthetic construct
  misc_feature 1..20: note = Description of Artificial Sequence: Synthetic oligonucleotide
  misc_feature 1..20: note = Target: ANGPTL4; (-) strand; PAM type: NRG; PAM sequence: GAG
  source 1..20: mol_type = other DNA
ttttatttatttattttttt

SEQ ID NO: 6796 - DNA, 20 bp, synthetic construct
  misc_feature 1..20: note = Description of Artificial Sequence: Synthetic oligonucleotide
  misc_feature 1..20: note = Target: ANGPTL4; (-) strand; PAM type: NRG; PAM sequence: CAG
  source 1..20: mol_type = other DNA
caggcatgagccaccgcgcc

SEQ ID NO: 6797 - DNA, 20 bp, synthetic construct
  misc_feature 1..20: note = Description of Artificial Sequence: Synthetic oligonucleotide
  misc_feature 1..20: note = Target: ANGPTL4; (-) strand; PAM type: NRG; PAM sequence: GAG
  source 1..20: mol_type = other DNA
agtgctgggattacaggcat

SEQ ID NO: 6798 - DNA, 20 bp, synthetic construct
  misc_feature 1..20: note = Description of Artificial Sequence: Synthetic oligonucleotide
  misc_feature 1..20: note = Target: ANGPTL4; (-) strand; PAM type: NRG; PAM sequence: AGG
  source 1..20: mol_type = other DNA
tcccaaagtgctgggattac

SEQ ID NO: 6799 - DNA, 20 bp, synthetic construct
  misc_feature 1..20: note = Description of Artificial Sequence: Synthetic oligonucleotide
  misc_feature 1..20: note = Target: ANGPTL4; (-) strand; PAM type: NRG; PAM sequence: CAG
  source 1..20: mol_type = other DNA
ctcccaaagtgctgggatta

SEQ ID NO: 6800 - DNA, 20 bp, synthetic construct
  misc_feature 1..20: note = Description of Artificial Sequence: Synthetic oligonucleotide
  misc_feature 1..20: note = Target: ANGPTL4; (-) strand; PAM type: NRG; PAM sequence: GGG
  source 1..20: mol_type = other DNA
cttcggcctcccaaagtgct

SEQ ID NO: 6801 - DNA, 20 bp, synthetic construct
  misc_feature 1..20: note = Description of Artificial Sequence: Synthetic oligonucleotide
  misc_feature 1..20: note = Target: ANGPTL4; (-) strand; PAM type: NRG; PAM sequence: TGG
  source 1..20: mol_type = other DNA
gcttcggcctcccaaagtgc

SEQ ID NO: 6802 - DNA, 20 bp, synthetic construct
  misc_feature 1..20: note = Description of Artificial Sequence: Synthetic oligonucleotide
  misc_feature 1..20: note = Target: ANGPTL4; (-) strand; PAM type: NRG; PAM sequence: AAG
  source 1..20: mol_type = other DNA
ccgcccgcttcggcctccca

SEQ ID NO: 6803 - DNA, 20 bp, synthetic construct
  misc_feature 1..20: note = Description of Artificial Sequence: Synthetic oligonucleotide
  misc_feature 1..20: note = Target: ANGPTL4; (-) strand; PAM type: NRG; PAM sequence: CGG
  source 1..20: mol_type = other DNA
acctcgtgatccgcccgctt

SEQ ID NO: 6804 - DNA, 20 bp, synthetic construct
  misc_feature 1..20: note = Description of Artificial Sequence: Synthetic oligonucleotide
  misc_feature 1..20: note = Target: ANGPTL4; (-) strand; PAM type: NRG; PAM sequence: TGG
  source 1..20: mol_type = other DNA
tttcaccatgttagccagga

SEQ ID NO: 6805 - DNA, 20 bp, synthetic construct
  misc_feature 1..20: note = Description of Artificial Sequence: Synthetic oligonucleotide
  misc_feature 1..20: note = Target: ANGPTL4; (-) strand; PAM type: NRG; PAM sequence: AGG
  source 1..20: mol_type = other DNA
agggtttcaccatgttagcc

SEQ ID NO: 6806 - DNA, 20 bp, synthetic construct
  misc_feature 1..20: note = Description of Artificial Sequence: Synthetic oligonucleotide
  misc_feature 1..20: note = Target: ANGPTL4; (-) strand; PAM type: NRG; PAM sequence: CAG
  source 1..20: mol_type = other DNA
cagggtttcaccatgttagc

SEQ ID NO: 6807 - DNA, 20 bp, synthetic construct
  misc_feature 1..20: note = Description of Artificial Sequence: Synthetic oligonucleotide
  misc_feature 1..20: note = Target: ANGPTL4; (-) strand; PAM type: NRG; PAM sequence: TAG
  source 1..20: mol_type = other DNA
gagacagggtttcaccatgt

SEQ ID NO: 6808 - DNA, 20 bp, synthetic construct
  misc_feature 1..20: note = Description of Artificial Sequence: Synthetic oligonucleotide
  misc_feature 1..20: note = Target: ANGPTL4; (-) strand; PAM type: NRG; PAM sequence: GGG
  source 1..20: mol_type = other DNA
ttgtatttttaatagagaca

SEQ ID NO: 6809 - DNA, 20 bp, synthetic construct
  misc_feature 1..20: note = Description of Artificial Sequence: Synthetic oligonucleotide
  misc_feature 1..20: note = Target: ANGPTL4; (-) strand; PAM type: NRG; PAM sequence: AGG
  source 1..20: mol_type = other DNA
tttgtatttttaatagagac

SEQ ID NO: 6810 - DNA, 20 bp, synthetic construct
  misc_feature 1..20: note = Description of Artificial Sequence: Synthetic oligonucleotide
  misc_feature 1..20: note = Target: ANGPTL4; (-) strand; PAM type: NRG; PAM sequence: CAG
  source 1..20: mol_type = other DNA
ttttgtatttttaatagaga

SEQ ID NO: 6811 - DNA, 20 bp, synthetic construct
  misc_feature 1..20: note = Description of Artificial Sequence: Synthetic oligonucleotide
  misc_feature 1..20: note = Target: ANGPTL4; (-) strand; PAM type: NRG; PAM sequence: GAG
  source 1..20: mol_type = other DNA
aattttttgtatttttaata

SEQ ID NO: 6812 - DNA, 20 bp, synthetic construct
  misc_feature 1..20: note = Description of Artificial Sequence: Synthetic oligonucleotide
  misc_feature 1..20: note = Target: ANGPTL4; (-) strand; PAM type: NRG; PAM sequence: TAG
  source 1..20: mol_type = other DNA
ctaattttttgtatttttaa

SEQ ID NO: 6813 - DNA, 20 bp, synthetic construct
  misc_feature 1..20: note = Description of Artificial Sequence: Synthetic oligonucleotide
  misc_feature 1..20: note = Target: ANGPTL4; (-) strand; PAM type: NRG; PAM sequence: CAG
  source 1..20: mol_type = other DNA
caggcacctgccaccatgcc

SEQ ID NO: 6814 - DNA, 20 bp, synthetic construct
  misc_feature 1..20: note = Description of Artificial Sequence: Synthetic oligonucleotide
  misc_feature 1..20: note = Target: ANGPTL4; (-) strand; PAM type: NRG; PAM sequence: AGG
  source 1..20: mol_type = other DNA
tcccgagtagctgggactac

SEQ ID NO: 6815 - DNA, 20 bp, synthetic construct
  misc_feature 1..20: note = Description of Artificial Sequence: Synthetic oligonucleotide
  misc_feature 1..20: note = Target: ANGPTL4; (-) strand; PAM type: NRG; PAM sequence: CAG
  source 1..20: mol_type = other DNA
ctcccgagtagctgggacta

SEQ ID NO: 6816 - DNA, 20 bp, synthetic construct
  misc_feature 1..20: note = Description of Artificial Sequence: Synthetic oligonucleotide
  misc_feature 1..20: note = Target: ANGPTL4; (-) strand; PAM type: NRG; PAM sequence: GGG
  source 1..20: mol_type = other DNA
cctcagcctcccgagtagct

SEQ ID NO: 6817 - DNA, 20 bp, synthetic construct
  misc_feature 1..20: note = Description of Artificial Sequence: Synthetic oligonucleotide
  misc_feature 1..20: note = Target: ANGPTL4; (-) strand; PAM type: NRG; PAM sequence: TGG
  source 1..20: mol_type = other DNA
gcctcagcctcccgagtagc

SEQ ID NO: 6818 - DNA, 20 bp, synthetic construct
  misc_feature 1..20: note = Description of Artificial Sequence: Synthetic oligonucleotide
  misc_feature 1..20: note = Target: ANGPTL4; (-) strand; PAM type: NRG; PAM sequence: TAG
  source 1..20: mol_type = other DNA
tcctgcctcagcctcccgag

SEQ ID NO: 6819 - DNA, 20 bp, synthetic construct
  misc_feature 1..20: note = Description of Artificial Sequence: Synthetic oligonucleotide
  misc_feature 1..20: note = Target: ANGPTL4; (-) strand; PAM type: NRG; PAM sequence: GAG
  source 1..20: mol_type = other DNA
ttctcctgcctcagcctccc

SEQ ID NO: 6820 - DNA, 20 bp, synthetic construct
  misc_feature 1..20: note = Description of Artificial Sequence: Synthetic oligonucleotide
  misc_feature 1..20: note = Target: ANGPTL4; (-) strand; PAM type: NRG; PAM sequence: CAG
  source 1..20: mol_type = other DNA
ttagtgccattctcctgcct

SEQ ID NO: 6821 - DNA, 20 bp, synthetic construct
  misc_feature 1..20: note = Description of Artificial Sequence: Synthetic oligonucleotide
  misc_feature 1..20: note = Target: ANGPTL4; (-) strand; PAM type: NRG; PAM sequence: TAG
  source 1..20: mol_type = other DNA
gcaagctccacctcccgggt

SEQ ID NO: 6822 - DNA, 20 bp, synthetic construct
  misc_feature 1..20: note = Description of Artificial Sequence: Synthetic oligonucleotide
  misc_feature 1..20: note = Target: ANGPTL4; (-) strand; PAM type: NRG; PAM sequence: GGG
  source 1..20: mol_type = other DNA
cactgcaagctccacctccc

SEQ ID NO: 6823 - DNA, 20 bp, synthetic construct
  misc_feature 1..20: note = Description of Artificial Sequence: Synthetic oligonucleotide
  misc_feature 1..20: note = Target: ANGPTL4; (-) strand; PAM type: NRG; PAM sequence: CGG
  source 1..20: mol_type = other DNA
tcactgcaagctccacctcc

SEQ ID NO: 6824 - DNA, 20 bp, synthetic construct
  misc_feature 1..20: note = Description of Artificial Sequence: Synthetic oligonucleotide
  misc_feature 1..20: note = Target: ANGPTL4; (-) strand; PAM type: NRG; PAM sequence: AAG
  source 1..20: mol_type = other DNA
gcgcaatctcggctcactgc

SEQ ID NO: 6825 - DNA, 20 bp, synthetic construct
  misc_feature 1..20: note = Description of Artificial Sequence: Synthetic oligonucleotide
  misc_feature 1..20: note = Target: ANGPTL4; (-) strand; PAM type: NRG; PAM sequence: CGG
  source 1..20: mol_type = other DNA
ggagtgcagtggcgcaatct

SEQ ID NO: 6826 - DNA, 20 bp, synthetic construct
  misc_feature 1..20: note = Description of Artificial Sequence: Synthetic oligonucleotide
  misc_feature 1..20: note = Target: ANGPTL4; (-) strand; PAM type: NRG; PAM sequence: TGG
  source 1..20: mol_type = other DNA
tcgcccacgctggagtgcag

SEQ ID NO: 6827 - DNA, 20 bp, synthetic construct
  misc_feature 1..20: note = Description of Artificial Sequence: Synthetic oligonucleotide
  misc_feature 1..20: note = Target: ANGPTL4; (-) strand; PAM type: NRG; PAM sequence: CAG
  source 1..20: mol_type = other DNA
ctgtcgcccacgctggagtg

SEQ ID NO: 6828 - DNA, 20 bp, synthetic construct
  misc_feature 1..20: note = Description of Artificial Sequence: Synthetic oligonucleotide
  misc_feature 1..20: note = Target: ANGPTL4; (-) strand; PAM type: NRG; PAM sequence: GAG
  source 1..20: mol_type = other DNA
tcgctctgtcgcccacgctg

SEQ ID NO: 6829 - DNA, 20 bp, synthetic construct
  misc_feature 1..20: note = Description of Artificial Sequence: Synthetic oligonucleotide
  misc_feature 1..20: note = Target: ANGPTL4; (-) strand; PAM type: NRG; PAM sequence: TGG
  source 1..20: mol_type = other DNA
tctcgctctgtcgcccacgc

SEQ ID NO: 6830 - DNA, 20 bp, synthetic construct
  misc_feature 1..20: note = Description of Artificial Sequence: Synthetic oligonucleotide
  misc_feature 1..20: note = Target: ANGPTL4; (-) strand; PAM type: NRG; PAM sequence: GAG
  source 1..20: mol_type = other DNA
tttatttattttttgagaag

SEQ ID NO: 6831 - DNA, 20 bp, synthetic construct
  misc_feature 1..20: note = Description of Artificial Sequence: Synthetic oligonucleotide
  misc_feature 1..20: note = Target: ANGPTL4; (-) strand; PAM type: NRG; PAM sequence: AGG
  source 1..20: mol_type = other DNA
tatttatttattttttgaga

SEQ ID NO: 6832 - DNA, 20 bp, synthetic construct
  misc_feature 1..20: note = Description of Artificial Sequence: Synthetic oligonucleotide
  misc_feature 1..20: note = Target: ANGPTL4; (-) strand; PAM type: NRG; PAM sequence: AAG
  source 1..20: mol_type = other DNA
ttatttatttattttttgag

SEQ ID NO: 6833 - DNA, 20 bp, synthetic construct
  misc_feature 1..20: note = Description of Artificial Sequence: Synthetic oligonucleotide
  misc_feature 1..20: note = Target: ANGPTL4; (-) strand; PAM type: NRG; PAM sequence: GAG
  source 1..20: mol_type = other DNA
tatttatttatttatttttt

SEQ ID NO: 6834 - DNA, 20 bp, synthetic construct
  misc_feature 1..20: note = Description of Artificial Sequence: Synthetic oligonucleotide
  misc_feature 1..20: note = Target: ANGPTL4; (-) strand; PAM type: NRG; PAM sequence: TAG
  source 1..20: mol_type = other DNA
ctgtcgcctcaagttggctc

SEQ ID NO: 6835 - DNA, 20 bp, synthetic construct
  misc_feature 1..20: note = Description of Artificial Sequence: Synthetic oligonucleotide
  misc_feature 1..20: note = Target: ANGPTL4; (-) strand; PAM type: NRG; PAM sequence: TGG
  source 1..20: mol_type = other DNA
tctatactgtcgcctcaagt

SEQ ID NO: 6836 - DNA, 20 bp, synthetic construct
  misc_feature 1..20: note = Description of Artificial Sequence: Synthetic oligonucleotide
  misc_feature 1..20: note = Target: ANGPTL4; (-) strand; PAM type: NRG; PAM sequence: AAG
  source 1..20: mol_type = other DNA
agagtctatactgtcgcctc

SEQ ID NO: 6837 - DNA, 20 bp, synthetic construct
  misc_feature 1..20: note = Description of Artificial Sequence: Synthetic oligonucleotide
  misc_feature 1..20: note = Target: ANGPTL4; (-) strand; PAM type: NRG; PAM sequence: GAG
  source 1..20: mol_type = other DNA
gctgtgagcaatctacaaaa

SEQ ID NO: 6838 - DNA, 20 bp, synthetic construct
  misc_feature 1..20: note = Description of Artificial Sequence: Synthetic oligonucleotide
  misc_feature 1..20: note = Target: ANGPTL4; (-) strand; PAM type: NRG; PAM sequence: AAG
  source 1..20: mol_type = other DNA
ctgctgtgagcaatctacaa

SEQ ID NO: 6839 - DNA, 20 bp, synthetic construct
  misc_feature 1..20: note = Description of Artificial Sequence: Synthetic oligonucleotide
  misc_feature 1..20: note = Target: ANGPTL4; (-) strand; PAM type: NRG; PAM sequence: GAG
  source 1..20: mol_type = other DNA
gtcttaagggcacctgctgt

SEQ ID NO: 6840 - DNA, 20 bp, synthetic construct
  misc_feature 1..20: note = Description of Artificial Sequence: Synthetic oligonucleotide
  misc_feature 1..20: note = Target: ANGPTL4; (-) strand; PAM type: NRG; PAM sequence: GGG
  source 1..20: mol_type = other DNA
tcacagacccagggtcttaa

SEQ ID NO: 6841 - DNA, 20 bp, synthetic construct
  misc_feature 1..20: note = Description of Artificial Sequence: Synthetic oligonucleotide
  misc_feature 1..20: note = Target: ANGPTL4; (-) strand; PAM type: NRG; PAM sequence: AGG
  source 1..20: mol_type = other DNA
atcacagacccagggtctta

SEQ ID NO: 6842 - DNA, 20 bp, synthetic construct
  misc_feature 1..20: note = Description of Artificial Sequence: Synthetic oligonucleotide
  misc_feature 1..20: note = Target: ANGPTL4; (-) strand; PAM type: NRG; PAM sequence: AAG
  source 1..20: mol_type = other DNA
catcacagacccagggtctt

SEQ ID NO: 6843 - DNA, 20 bp, synthetic construct
  misc_feature 1..20: note = Description of Artificial Sequence: Synthetic oligonucleotide
  misc_feature 1..20: note = Target: ANGPTL4; (-) strand; PAM type: NRG; PAM sequence: GGG
  source 1..20: mol_type = other DNA
caaaacacatcacagaccca

SEQ ID NO: 6844 - DNA, 20 bp, synthetic construct
  misc_feature 1..20: note = Description of Artificial Sequence: Synthetic oligonucleotide
  misc_feature 1..20: note = Target: ANGPTL4; (-) strand; PAM type: NRG; PAM sequence: AGG
  source 1..20: mol_type = other DNA
acaaaacacatcacagaccc

SEQ ID NO: 6845 - DNA, 20 bp, synthetic construct
  misc_feature 1..20: note = Description of Artificial Sequence: Synthetic oligonucleotide
  misc_feature 1..20: note = Target: ANGPTL4; (-) strand; PAM type: NRG; PAM sequence: CAG
  source 1..20: mol_type = other DNA
cacaaaacacatcacagacc

SEQ ID NO: 6846 - DNA, 20 bp, synthetic construct
  misc_feature 1..20: note = Description of Artificial Sequence: Synthetic oligonucleotide
  misc_feature 1..20: note = Target: ANGPTL4; (-) strand; PAM type: NRG; PAM sequence: CAG
  source 1..20: mol_type = other DNA
ccacagcacaaaacacatca

SEQ ID NO: 6847 - DNA, 20 bp, synthetic construct
  misc_feature 1..20: note = Description of Artificial Sequence: Synthetic oligonucleotide
  misc_feature 1..20: note = Target: ANGPTL4; (-) strand; PAM type: NRG; PAM sequence: CAG
  source 1..20: mol_type = other DNA
ctttggagccatgtgtccca

SEQ ID NO: 6848 - DNA, 20 bp, synthetic construct
  misc_feature 1..20: note = Description of Artificial Sequence: Synthetic oligonucleotide
  misc_feature 1..20: note = Target: ANGPTL4; (-) strand; PAM type: NRG; PAM sequence: GAG
  source 1..20: mol_type = other DNA
gattttcagggacttctttg

SEQ ID NO: 6849 - DNA, 20 bp, synthetic construct
  misc_feature 1..20: note = Description of Artificial Sequence: Synthetic oligonucleotide
  misc_feature 1..20: note = Target: ANGPTL4; (-) strand; PAM type: NRG; PAM sequence: TGG
  source 1..20: mol_type = other DNA
ctgattttcagggacttctt

SEQ ID NO: 6850 - DNA, 20 bp, synthetic construct
  misc_feature 1..20: note = Description of Artificial Sequence: Synthetic oligonucleotide
  misc_feature 1..20: note = Target: ANGPTL4; (-) strand; PAM type: NRG; PAM sequence: GGG
  source 1..20: mol_type = other DNA
ttttcatgatctgattttca

SEQ ID NO: 6851 - DNA, 20 bp, synthetic construct
  misc_feature 1..20: note = Description of Artificial Sequence: Synthetic oligonucleotide
  misc_feature 1..20: note = Target: ANGPTL4; (-) strand; PAM type: NRG; PAM sequence: AGG
  source 1..20: mol_type = other DNA
cttttcatgatctgattttc

SEQ ID NO: 6852 - DNA, 20 bp, synthetic construct
  misc_feature 1..20: note = Description of Artificial Sequence: Synthetic oligonucleotide
  misc_feature 1..20: note = Target: ANGPTL4; (-) strand; PAM type: NRG; PAM sequence: CAG
  source 1..20: mol_type = other DNA
ccttttcatgatctgatttt

SEQ ID NO: 6853 - DNA, 20 bp, synthetic construct
  misc_feature 1..20: note = Description of Artificial Sequence: Synthetic oligonucleotide
  misc_feature 1..20: note = Target: ANGPTL4; (-) strand; PAM type: NRG; PAM sequence: GAG
  source 1..20: mol_type = other DNA
tccccaccttcttaaactga

SEQ ID NO: 6854 - DNA, 20 bp, synthetic construct
  misc_feature 1..20: note = Description of Artificial Sequence: Synthetic oligonucleotide
  misc_feature 1..20: note = Target: ANGPTL4; (-) strand; PAM type: NRG; PAM sequence: GAG
  source 1..20: mol_type = other DNA
cttccccaccttcttaaact

SEQ ID NO: 6855 - DNA, 20 bp, synthetic construct
  misc_feature 1..20: note = Description of Artificial Sequence: Synthetic oligonucleotide
  misc_feature 1..20: note = Target: ANGPTL4; (-) strand; PAM type: NRG; PAM sequence: AAG
  source 1..20: mol_type = other DNA
cccaggctatcccagaatgc

SEQ ID NO: 6856 - DNA, 20 bp, synthetic construct
  misc_feature 1..20: note = Description of Artificial Sequence: Synthetic oligonucleotide
  misc_feature 1..20: note = Target: ANGPTL4; (-) strand; PAM type: NRG; PAM sequence: CAG
  source 1..20: mol_type = other DNA
acagctatcccaggctatcc

SEQ ID NO: 6857 - DNA, 20 bp, synthetic construct
  misc_feature 1..20: note = Description of Artificial Sequence: Synthetic oligonucleotide
  misc_feature 1..20: note = Target: ANGPTL4; (-) strand; PAM type: NRG; PAM sequence: AGG
  source 1..20: mol_type = other DNA
agtagggacacagctatccc

SEQ ID NO: 6858 - DNA, 20 bp, synthetic construct
  misc_feature 1..20: note = Description of Artificial Sequence: Synthetic oligonucleotide
  misc_feature 1..20: note = Target: ANGPTL4; (-) strand; PAM type: NRG; PAM sequence: CAG
  source 1..20: mol_type = other DNA
gagtagggacacagctatcc

SEQ ID NO: 6859 - DNA, 20 bp, synthetic construct
  misc_feature 1..20: note = Description of Artificial Sequence: Synthetic oligonucleotide
  misc_feature 1..20: note = Target: ANGPTL4; (-) strand; PAM type: NRG; PAM sequence: CAG
  source 1..20: mol_type = other DNA
cctctctctgagtagggaca

SEQ ID NO: 6860 - DNA, 20 bp, synthetic construct
  misc_feature 1..20: note = Description of Artificial Sequence: Synthetic oligonucleotide
  misc_feature 1..20: note = Target: ANGPTL4; (-) strand; PAM type: NRG; PAM sequence: GGG
  source 1..20: mol_type = other DNA
ccccagcctctctctgagta

SEQ ID NO: 6861 - DNA, 20 bp, synthetic construct
  misc_feature 1..20: note = Description of Artificial Sequence: Synthetic oligonucleotide
  misc_feature 1..20: note = Target: ANGPTL4; (-) strand; PAM type: NRG; PAM sequence: AGG
  source 1..20: mol_type = other DNA
cccccagcctctctctgagt

SEQ ID NO: 6862 - DNA, 20 bp, synthetic construct
  misc_feature 1..20: note = Description of Artificial Sequence: Synthetic oligonucleotide
  misc_feature 1..20: note = Target: ANGPTL4; (-) strand; PAM type: NRG; PAM sequence: TAG
  source 1..20: mol_type = other DNA
gcccccagcctctctctgag

SEQ ID NO: 6863 - DNA, 20 bp, synthetic construct
  misc_feature 1..20: note = Description of Artificial Sequence: Synthetic oligonucleotide
  misc_feature 1..20: note = Target: ANGPTL4; (-) strand; PAM type: NRG; PAM sequence: GAG
  source 1..20: mol_type = other DNA
caagcccccagcctctctct

SEQ ID NO: 6864 - DNA, 20 bp, synthetic construct
  misc_feature 1..20: note = Description of Artificial Sequence: Synthetic oligonucleotide
  misc_feature 1..20: note = Target: ANGPTL4; (-) strand; PAM type: NRG; PAM sequence: CAG
  source 1..20: mol_type = other DNA
cctgtccacccccaagcccc

SEQ ID NO: 6865 - DNA, 20 bp, synthetic construct
  misc_feature 1..20: note = Description of Artificial Sequence: Synthetic oligonucleotide
  misc_feature 1..20: note = Target: ANGPTL4; (-) strand; PAM type: NRG; PAM sequence: AAG
  source 1..20: mol_type = other DNA
cgtctggcctgtccaccccc

SEQ ID NO: 6866 - DNA, 20 bp, synthetic construct
  misc_feature 1..20: note = Description of Artificial Sequence: Synthetic oligonucleotide
  misc_feature 1..20: note = Target: ANGPTL4; (-) strand; PAM type: NRG; PAM sequence: TGG
  source 1..20: mol_type = other DNA
aggttcagatggtcaccgtc

SEQ ID NO: 6867 - DNA, 20 bp, synthetic construct
  misc_feature 1..20: note = Description of Artificial Sequence: Synthetic oligonucleotide
  misc_feature 1..20: note = Target: ANGPTL4; (-) strand; PAM type: NRG; PAM sequence: TGG
  source 1..20: mol_type = other DNA
cagtgaggagtaggttcaga

SEQ ID NO: 6868 - DNA, 20 bp, synthetic construct
  misc_feature 1..20: note = Description of Artificial Sequence: Synthetic oligonucleotide
  misc_feature 1..20: note = Target: ANGPTL4; (-) strand; PAM type: NRG; PAM sequence: CAG
  source 1..20: mol_type = other DNA
accccagtgaggagtaggtt

SEQ ID NO: 6869 - DNA, 20 bp, synthetic construct
  misc_feature 1..20: note = Description of Artificial Sequence: Synthetic oligonucleotide
  misc_feature 1..20: note = Target: ANGPTL4; (-) strand; PAM type: NRG; PAM sequence: AGG
  source 1..20: mol_type = other DNA
ggaaaaccccagtgaggagt

SEQ ID NO: 6870 - DNA, 20 bp, synthetic construct
  misc_feature 1..20: note = Description of Artificial Sequence: Synthetic oligonucleotide
  misc_feature 1..20: note = Target: ANGPTL4; (-) strand; PAM type: NRG; PAM sequence: TAG
  source 1..20: mol_type = other DNA
aggaaaaccccagtgaggag

SEQ ID NO: 6871 - DNA, 20 bp, synthetic construct
  misc_feature 1..20: note = Description of Artificial Sequence: Synthetic oligonucleotide
  misc_feature 1..20: note = Target: ANGPTL4; (-) strand; PAM type: NRG; PAM sequence: GAG
  source 1..20: mol_type = other DNA
gggaggaaaaccccagtgag

SEQ ID NO: 6872 - DNA, 20 bp, synthetic construct
  misc_feature 1..20: note = Description of Artificial Sequence: Synthetic oligonucleotide
  misc_feature 1..20: note = Target: ANGPTL4; (-) strand; PAM type: NRG; PAM sequence: AGG
  source 1..20: mol_type = other DNA
gagggaggaaaaccccagtg

SEQ ID NO: 6873 - DNA, 20 bp, synthetic construct
  misc_feature 1..20: note = Description of Artificial Sequence: Synthetic oligonucleotide
  misc_feature 1..20: note = Target: ANGPTL4; (-) strand; PAM type: NRG; PAM sequence: GAG
  source 1..20: mol_type = other DNA
ggagggaggaaaaccccagt

SEQ ID NO: 6874 - DNA, 20 bp, synthetic construct
  misc_feature 1..20: note = Description of Artificial Sequence: Synthetic oligonucleotide
  misc_feature 1..20: note = Target: ANGPTL4; (-) strand; PAM type: NRG; PAM sequence: CAG
  source 1..20: mol_type = other DNA
aaagggagggaggaaaaccc

SEQ ID NO: 6875 - DNA, 20 bp, synthetic construct
  misc_feature 1..20: note = Description of Artificial Sequence: Synthetic oligonucleotide
  misc_feature 1..20: note = Target: ANGPTL4; (-) strand; PAM type: NRG; PAM sequence: AGG
  source 1..20: mol_type = other DNA
agtggacaggaaagggaggg

SEQ ID NO: 6876 - DNA, 20 bp, synthetic construct
  misc_feature 1..20: note = Description of Artificial Sequence: Synthetic oligonucleotide
  misc_feature 1..20: note = Target: ANGPTL4; (-) strand; PAM type: NRG; PAM sequence: GAG
  source 1..20: mol_type = other DNA
cagtggacaggaaagggagg

SEQ ID NO: 6877 - DNA, 20 bp, synthetic construct
  misc_feature 1..20: note = Description of Artificial Sequence: Synthetic oligonucleotide
  misc_feature 1..20: note = Target: ANGPTL4; (-) strand; PAM type: NRG; PAM sequence: GGG
  source 1..20: mol_type = other DNA
agcagtggacaggaaaggga

SEQ ID NO: 6878 - DNA, 20 bp, synthetic construct
  misc_feature 1..20: note = Description of Artificial Sequence: Synthetic oligonucleotide
  misc_feature 1..20: note = Target: ANGPTL4; (-) strand; PAM type: NRG; PAM sequence: AGG
  source 1..20: mol_type = other DNA
cagcagtggacaggaaaggg

SEQ ID NO: 6879 - DNA, 20 bp, synthetic construct
  misc_feature 1..20: note = Description of Artificial Sequence: Synthetic oligonucleotide
  misc_feature 1..20: note = Target: ANGPTL4; (-) strand; PAM type: NRG; PAM sequence: GAG
  source 1..20: mol_type = other DNA
gcagcagtggacaggaaagg

SEQ ID NO: 6880 - DNA, 20 bp, synthetic construct
  misc_feature 1..20: note = Description of Artificial Sequence: Synthetic oligonucleotide
  misc_feature 1..20: note = Target: ANGPTL4; (-) strand; PAM type: NRG; PAM sequence: GGG
  source 1..20: mol_type = other DNA
cagcagcagtggacaggaaa

SEQ ID NO: 6881 - DNA, 20 bp, synthetic construct
  misc_feature 1..20: note = Description of Artificial Sequence: Synthetic oligonucleotide
  misc_feature 1..20: note = Target: ANGPTL4; (-) strand; PAM type: NRG; PAM sequence: AGG
  source 1..20: mol_type = other DNA
ccagcagcagtggacaggaa

SEQ ID NO: 6882 - DNA, 20 bp, synthetic construct
  misc_feature 1..20: note = Description of Artificial Sequence: Synthetic oligonucleotide
  misc_feature 1..20: note = Target: ANGPTL4; (-) strand; PAM type: NRG; PAM sequence: AAG
  source 1..20: mol_type = other DNA
cccagcagcagtggacagga

SEQ ID NO: 6883 - DNA, 20 bp, synthetic construct
  misc_feature 1..20: note = Description of Artificial Sequence: Synthetic oligonucleotide
  misc_feature 1..20: note = Target: ANGPTL4; (-) strand; PAM type: NRG; PAM sequence: AGG
  source 1..20: mol_type = other DNA
ccctcccagcagcagtggac

SEQ ID NO: 6884 - DNA, 20 bp, synthetic construct
  misc_feature 1..20: note = Description of Artificial Sequence: Synthetic oligonucleotide
  misc_feature 1..20: note = Target: ANGPTL4; (-) strand; PAM type: NRG; PAM sequence: CAG
  source 1..20: mol_type = other DNA
tccctcccagcagcagtgga

SEQ ID NO: 6885 - DNA, 20 bp, synthetic construct
  misc_feature 1..20: note = Description of Artificial Sequence: Synthetic oligonucleotide
  misc_feature 1..20: note = Target: ANGPTL4; (-) strand; PAM type: NRG; PAM sequence: TGG
  source 1..20: mol_type = other DNA
caaatccctcccagcagcag

SEQ ID NO: 6886 - DNA, 20 bp, synthetic construct
  misc_feature 1..20: note = Description of Artificial Sequence: Synthetic oligonucleotide
  misc_feature 1..20: note = Target: ANGPTL4; (-) strand; PAM type: NRG; PAM sequence: CAG
  source 1..20: mol_type = other DNA
cagcaaatccctcccagcag

SEQ ID NO: 6887 - DNA, 20 bp, synthetic construct
  misc_feature 1..20: note = Description of Artificial Sequence: Synthetic oligonucleotide
  misc_feature 1..20: note = Target: ANGPTL4; (-) strand; PAM type: NRG; PAM sequence: CAG
  source 1..20: mol_type = other DNA
ggacagcaaatccctcccag

SEQ ID NO: 6888 - DNA, 20 bp, synthetic construct
  misc_feature 1..20: note = Description of Artificial Sequence: Synthetic oligonucleotide
  misc_feature 1..20: note = Target: ANGPTL4; (-) strand; PAM type: NRG; PAM sequence: CAG
  source 1..20: mol_type = other DNA
ccaggacagcaaatccctcc

SEQ ID NO: 6889 - DNA, 20 bp, synthetic construct
  misc_feature 1..20: note = Description of Artificial Sequence: Synthetic oligonucleotide
  misc_feature 1..20: note = Target: ANGPTL4; (-) strand; PAM type: NRG; PAM sequence: CAG
  source 1..20: mol_type = other DNA
agctgggccagatgccagga

SEQ ID NO: 6890 - DNA, 20 bp, synthetic construct
  misc_feature 1..20: note = Description of Artificial Sequence: Synthetic oligonucleotide
  misc_feature 1..20: note = Target: ANGPTL4; (-) strand; PAM type: NRG; PAM sequence: AGG
  source 1..20: mol_type = other DNA
cgtcagctgggccagatgcc

SEQ ID NO: 6891 - DNA, 20 bp, synthetic construct
  misc_feature 1..20: note = Description of Artificial Sequence: Synthetic oligonucleotide
  misc_feature 1..20: note = Target: ANGPTL4; (-) strand; PAM type: NRG; PAM sequence: CAG
  source 1..20: mol_type = other DNA
ccgtcagctgggccagatgc

SEQ ID NO: 6892 - DNA, 20 bp, synthetic construct
  misc_feature 1..20: note = Description of Artificial Sequence: Synthetic oligonucleotide
  misc_feature 1..20: note = Target: ANGPTL4; (-) strand; PAM type: NRG; PAM sequence: CAG
  source 1..20: mol_type = other DNA
cttggccccgtcagctgggc

SEQ ID NO: 6893 - DNA, 20 bp, synthetic construct
  misc_feature 1..20: note = Description of Artificial Sequence: Synthetic oligonucleotide
  misc_feature 1..20: note = Target: ANGPTL4; (-) strand; PAM type: NRG; PAM sequence: GGG
  source 1..20: mol_type = other DNA
tacacttggccccgtcagct

SEQ ID NO: 6894 - DNA, 20 bp, synthetic construct
  misc_feature 1..20: note = Description of Artificial Sequence: Synthetic oligonucleotide
  misc_feature 1..20: note = Target: ANGPTL4; (-) strand; PAM type: NRG; PAM sequence: TGG
  source 1..20: mol_type = other DNA
atacacttggccccgtcagc

SEQ ID NO: 6895 - DNA, 20 bp, synthetic construct
  misc_feature 1..20: note = Description of Artificial Sequence: Synthetic oligonucleotide
  misc_feature 1..20: note = Target: ANGPTL4; (-) strand; PAM type: NRG; PAM sequence: CAG
  source 1..20: mol_type = other DNA
actcatacacttggccccgt

SEQ ID NO: 6896 - DNA, 20 bp, synthetic construct
  misc_feature 1..20: note = Description of Artificial Sequence: Synthetic oligonucleotide
  misc_feature 1..20: note = Target: ANGPTL4; (-) strand; PAM type: NRG; PAM sequence: TGG
  source 1..20: mol_type = other DNA
caggctgccactcatacact

SEQ ID NO: 6897 - DNA, 20 bp, synthetic construct
  misc_feature 1..20: note = Description of Artificial Sequence: Synthetic oligonucleotide
  misc_feature 1..20: note = Target: ANGPTL4; (-) strand; PAM type: NRG; PAM sequence: AGG
  source 1..20: mol_type = other DNA
acacccaagggctgacgtgc

SEQ ID NO: 6898 - DNA, 20 bp, synthetic construct
  misc_feature 1..20: note = Description of Artificial Sequence: Synthetic oligonucleotide
  misc_feature 1..20: note = Target: ANGPTL4; (-) strand; PAM type: NRG; PAM sequence: CAG
  source 1..20: mol_type = other DNA
cacacccaagggctgacgtg

SEQ ID NO: 6899 - DNA, 20 bp, synthetic construct
  misc_feature 1..20: note = Description of Artificial Sequence: Synthetic oligonucleotide
  misc_feature 1..20: note = Target: ANGPTL4; (-) strand; PAM type: NRG; PAM sequence: GGG
  source 1..20: mol_type = other DNA
atctgaaactgcacacccaa

SEQ ID NO: 6900 - DNA, 20 bp, synthetic construct
  misc_feature 1..20: note = Description of Artificial Sequence: Synthetic oligonucleotide
  misc_feature 1..20: note = Target: ANGPTL4; (-) strand; PAM type: NRG; PAM sequence: AGG
  source 1..20: mol_type = other DNA
aatctgaaactgcacaccca

SEQ ID NO: 6901 - DNA, 20 bp, synthetic construct
  misc_feature 1..20: note = Description of Artificial Sequence: Synthetic oligonucleotide
  misc_feature 1..20: note = Target: ANGPTL4; (-) strand; PAM type: NRG; PAM sequence: AAG
  source 1..20: mol_type = other DNA
gaatctgaaactgcacaccc

SEQ ID NO: 6902 - DNA, 20 bp, synthetic construct
  misc_feature 1..20: note = Description of Artificial Sequence: Synthetic oligonucleotide
  misc_feature 1..20: note = Target: ANGPTL4; (-) strand; PAM type: NRG; PAM sequence: TGG
  source 1..20: mol_type = other DNA
ctccaagccagctcattctc

SEQ ID NO: 6903 - DNA, 20 bp, synthetic construct
  misc_feature 1..20: note = Description of Artificial Sequence: Synthetic oligonucleotide
  misc_feature 1..20: note = Target: ANGPTL4; (-) strand; PAM type: NRG; PAM sequence: CAG
  source 1..20: mol_type = other DNA
gactcagcagggctccaagc

SEQ ID NO: 6904 - DNA, 20 bp, synthetic construct
  misc_feature 1..20: note = Description of Artificial Sequence: Synthetic oligonucleotide
  misc_feature 1..20: note = Target: ANGPTL4; (-) strand; PAM type: NRG; PAM sequence: AAG
  source 1..20: mol_type = other DNA
cattgactcagcagggctcc

SEQ ID NO: 6905 - DNA, 20 bp, synthetic construct
  misc_feature 1..20: note = Description of Artificial Sequence: Synthetic oligonucleotide
  misc_feature 1..20: note = Target: ANGPTL4; (-) strand; PAM type: NRG; PAM sequence: GGG
  source 1..20: mol_type = other DNA
agaagggcattgactcagca

SEQ ID NO: 6906 - DNA, 20 bp, synthetic construct
  misc_feature 1..20: note = Description of Artificial Sequence: Synthetic oligonucleotide
  misc_feature 1..20: note = Target: ANGPTL4; (-) strand; PAM type: NRG; PAM sequence: AGG
  source 1..20: mol_type = other DNA
gagaagggcattgactcagc

SEQ ID NO: 6907 - DNA, 20 bp, synthetic construct
  misc_feature 1..20: note = Description of Artificial Sequence: Synthetic oligonucleotide
  misc_feature 1..20: note = Target: ANGPTL4; (-) strand; PAM type: NRG; PAM sequence: CAG
  source 1..20: mol_type = other DNA
ggagaagggcattgactcag

SEQ ID NO: 6908 - DNA, 20 bp, synthetic construct
  misc_feature 1..20: note = Description of Artificial Sequence: Synthetic oligonucleotide
  misc_feature 1..20: note = Target: ANGPTL4; (-) strand; PAM type: NRG; PAM sequence: CAG
  source 1..20: mol_type = other DNA
caaggagaagggcattgact

SEQ ID NO: 6909 - DNA, 20 bp, synthetic construct
  misc_feature 1..20: note = Description of Artificial Sequence: Synthetic oligonucleotide
  misc_feature 1..20: note = Target: ANGPTL4; (-) strand; PAM type: NRG; PAM sequence: GGG
  source 1..20: mol_type = other DNA
cagagcactggcaaggagaa

SEQ ID NO: 6910 - DNA, 20 bp, synthetic construct
  misc_feature 1..20: note = Description of Artificial Sequence: Synthetic oligonucleotide
  misc_feature 1..20: note = Target: ANGPTL4; (-) strand; PAM type: NRG; PAM sequence: AGG
  source 1..20: mol_type = other DNA
tcagagcactggcaaggaga

SEQ ID NO: 6911 - DNA, 20 bp, synthetic construct
  misc_feature 1..20: note = Description of Artificial Sequence: Synthetic oligonucleotide
  misc_feature 1..20: note = Target: ANGPTL4; (-) strand; PAM type: NRG; PAM sequence: AAG
  source 1..20: mol_type = other DNA
ctcagagcactggcaaggag

SEQ ID NO: 6912 - DNA, 20 bp, synthetic construct
  misc_feature 1..20: note = Description of Artificial Sequence: Synthetic oligonucleotide
  misc_feature 1..20: note = Target: ANGPTL4; (-) strand; PAM type: NRG; PAM sequence: GAG
  source 1..20: mol_type = other DNA
tggctcagagcactggcaag

SEQ ID NO: 6913 - DNA, 20 bp, synthetic construct
  misc_feature 1..20: note = Description of Artificial Sequence: Synthetic oligonucleotide
  misc_feature 1..20: note = Target: ANGPTL4; (-) strand; PAM type: NRG; PAM sequence: AGG
  source 1..20: mol_type = other DNA
gttggctcagagcactggca

SEQ ID NO: 6914 - DNA, 20 bp, synthetic construct
  misc_feature 1..20: note = Description of Artificial Sequence: Synthetic oligonucleotide
  misc_feature 1..20: note = Target: ANGPTL4; (-) strand; PAM type: NRG; PAM sequence: AAG
  source 1..20: mol_type = other DNA
ggttggctcagagcactggc

SEQ ID NO: 6915 - DNA, 20 bp, synthetic construct
  misc_feature 1..20: note = Description of Artificial Sequence: Synthetic oligonucleotide
  misc_feature 1..20: note = Target: ANGPTL4; (-) strand; PAM type: NRG; PAM sequence: TGG
  source 1..20: mol_type = other DNA
ggcaggttggctcagagcac

SEQ ID NO: 6916 - DNA, 20 bp, synthetic construct
  misc_feature 1..20: note = Description of Artificial Sequence: Synthetic oligonucleotide
  misc_feature 1..20: note = Target: ANGPTL4; (-) strand; PAM type: NRG; PAM sequence: GAG
  source 1..20: mol_type = other DNA
actcggggcaggttggctca

SEQ ID NO: 6917 - DNA, 20 bp, synthetic construct
  misc_feature 1..20: note = Description of Artificial Sequence: Synthetic oligonucleotide
  misc_feature 1..20: note = Target: ANGPTL4; (-) strand; PAM type: NRG; PAM sequence: CAG
  source 1..20: mol_type = other DNA
gaactcggggcaggttggct

SEQ ID NO: 6918 - DNA, 20 bp, synthetic construct
  misc_feature 1..20: note = Description of Artificial Sequence: Synthetic oligonucleotide
  misc_feature 1..20: note = Target: ANGPTL4; (-) strand; PAM type: NRG; PAM sequence: TGG
  source 1..20: mol_type = other DNA
aggaagaactcggggcaggt

SEQ ID NO: 6919 - DNA, 20 bp, synthetic construct
  misc_feature 1..20: note = Description of Artificial Sequence: Synthetic oligonucleotide
  misc_feature 1..20: note = Target: ANGPTL4; (-) strand; PAM type: NRG; PAM sequence: AGG
  source 1..20: mol_type = other DNA
tgccaggaagaactcggggc

SEQ ID NO: 6920 - DNA, 20 bp, synthetic construct
  misc_feature 1..20: note = Description of Artificial Sequence: Synthetic oligonucleotide
  misc_feature 1..20: note = Target: ANGPTL4; (-) strand; PAM type: NRG; PAM sequence: CAG
  source 1..20: mol_type = other DNA
ctgccaggaagaactcgggg

SEQ ID NO: 6921 - DNA, 20 bp, synthetic construct
  misc_feature 1..20: note = Description of Artificial Sequence: Synthetic oligonucleotide
  misc_feature 1..20: note = Target: ANGPTL4; (-) strand; PAM type: NRG; PAM sequence: GGG
  source 1..20: mol_type = other DNA
agcctgccaggaagaactcg

SEQ ID NO: 6922 - DNA, 20 bp, synthetic construct
  misc_feature 1..20: note = Description of Artificial Sequence: Synthetic oligonucleotide
  misc_feature 1..20: note = Target: ANGPTL4; (-) strand; PAM type: NRG; PAM sequence: GGG
  source 1..20: mol_type = other DNA
cagcctgccaggaagaactc

SEQ ID NO: 6923 - DNA, 20 bp, synthetic construct
  misc_feature 1..20: note = Description of Artificial Sequence: Synthetic oligonucleotide
  misc_feature 1..20: note = Target: ANGPTL4; (-) strand; PAM type: NRG; PAM sequence: CGG
  source 1..20: mol_type = other DNA
ccagcctgccaggaagaact

SEQ ID NO: 6924 - DNA, 20 bp, synthetic construct
  misc_feature 1..20: note = Description of Artificial Sequence: Synthetic oligonucleotide
  misc_feature 1..20: note = Target: ANGPTL4; (-) strand; PAM type: NRG; PAM sequence: AAG
  source 1..20: mol_type = other DNA
cagaaaaccagcctgccagg

SEQ ID NO: 6925 - DNA, 20 bp, synthetic construct
  misc_feature 1..20: note = Description of Artificial Sequence: Synthetic oligonucleotide
  misc_feature 1..20: note = Target: ANGPTL4; (-) strand; PAM type: NRG; PAM sequence: AGG
  source 1..20: mol_type = other DNA
gcacagaaaaccagcctgcc

SEQ ID NO: 6926 - DNA, 20 bp, synthetic construct
  misc_feature 1..20: note = Description of Artificial Sequence: Synthetic oligonucleotide
  misc_feature 1..20: note = Target: ANGPTL4; (-) strand; PAM type: NRG; PAM sequence: CAG
  source 1..20: mol_type = other DNA
ggcacagaaaaccagcctgc

SEQ ID NO: 6927 - DNA, 20 bp, synthetic construct
  misc_feature 1..20: note = Description of Artificial Sequence: Synthetic oligonucleotide
  misc_feature 1..20: note = Target: ANGPTL4; (-) strand; PAM type: NRG; PAM sequence: CAG
  source 1..20: mol_type = other DNA
gggaggctggcacagaaaac

SEQ ID NO: 6928 - DNA, 20 bp, synthetic construct
  misc_feature 1..20: note = Description of Artificial Sequence: Synthetic oligonucleotide
  misc_feature 1..20: note = Target: ANGPTL4; (-) strand; PAM type: NRG; PAM sequence: CAG
  source 1..20: mol_type = other DNA
tcaggaaggggaggctggca

SEQ ID NO: 6929 - DNA, 20 bp, synthetic construct
  misc_feature 1..20: note = Description of Artificial Sequence: Synthetic oligonucleotide
  misc_feature 1..20: note = Target: ANGPTL4; (-) strand; PAM type: NRG; PAM sequence: TGG
  source 1..20: mol_type = other DNA
ccctgtcaggaaggggaggc

SEQ ID NO: 6930 - DNA, 20 bp, synthetic construct
  misc_feature 1..20: note = Description of Artificial Sequence: Synthetic oligonucleotide
  misc_feature 1..20: note = Target: ANGPTL4; (-) strand; PAM type: NRG; PAM sequence: AGG
  source 1..20: mol_type = other DNA
tataccctgtcaggaagggg

SEQ ID NO: 6931 - DNA, 20 bp, synthetic construct
  misc_feature 1..20: note = Description of Artificial Sequence: Synthetic oligonucleotide
  misc_feature 1..20: note = Target: ANGPTL4; (-) strand; PAM type: NRG; PAM sequence: GAG
  source 1..20: mol_type = other DNA
ctataccctgtcaggaaggg

SEQ ID NO: 6932 - DNA, 20 bp, synthetic construct
  misc_feature 1..20: note = Description of Artificial Sequence: Synthetic oligonucleotide
  misc_feature 1..20: note = Target: ANGPTL4; (-) strand; PAM type: NRG; PAM sequence: GGG
  source 1..20: mol_type = other DNA
ccctataccctgtcaggaag

SEQ ID NO: 6933 - DNA, 20 bp, synthetic construct
  misc_feature 1..20: note = Description of Artificial Sequence: Synthetic oligonucleotide
  misc_feature 1..20: note = Target: ANGPTL4; (-) strand; PAM type: NRG; PAM sequence: GGG
  source 1..20: mol_type = other DNA
cccctataccctgtcaggaa

SEQ ID NO: 6934 - DNA, 20 bp, synthetic construct
  misc_feature 1..20: note = Description of Artificial Sequence: Synthetic oligonucleotide
  misc_feature 1..20: note = Target: ANGPTL4; (-) strand; PAM type: NRG; PAM sequence: AGG
  source 1..20: mol_type = other DNA
tcccctataccctgtcagga

SEQ ID NO: 6935 - DNA, 20 bp, synthetic construct
  misc_feature 1..20: note = Description of Artificial Sequence: Synthetic oligonucleotide
  misc_feature 1..20: note = Target: ANGPTL4; (-) strand; PAM type: NRG; PAM sequence: AAG
  source 1..20: mol_type = other DNA
ttcccctataccctgtcagg

SEQ ID NO: 6936 - DNA, 20 bp, synthetic construct
  misc_feature 1..20: note = Description of Artificial Sequence: Synthetic oligonucleotide
  misc_feature 1..20: note = Target: ANGPTL4; (-) strand; PAM type: NRG; PAM sequence: AGG
  source 1..20: mol_type = other DNA
ccattcccctataccctgtc

SEQ ID NO: 6937 - DNA, 20 bp, synthetic construct
  misc_feature 1..20: note = Description of Artificial Sequence: Synthetic oligonucleotide
  misc_feature 1..20: note = Target: ANGPTL4; (-) strand; PAM type: NRG; PAM sequence: CAG
  source 1..20: mol_type = other DNA
cccattcccctataccctgt

SEQ ID NO: 6938 - DNA, 20 bp, synthetic construct
  misc_feature 1..20: note = Description of Artificial Sequence: Synthetic oligonucleotide
  misc_feature 1..20: note = Target: ANGPTL4; (-) strand; PAM type: NRG; PAM sequence: AAG
  source 1..20: mol_type = other DNA
cacattcattccacagggct

SEQ ID NO: 6939 - DNA, 20 bp, synthetic construct
  misc_feature 1..20: note = Description of Artificial Sequence: Synthetic oligonucleotide
  misc_feature 1..20: note = Target: ANGPTL4; (-) strand; PAM type: NRG; PAM sequence: GGG
  source 1..20: mol_type = other DNA
tggaccacattcattccaca

SEQ ID NO: 6940 - DNA, 20 bp, synthetic construct
  misc_feature 1..20: note = Description of Artificial Sequence: Synthetic oligonucleotide
  misc_feature 1..20: note = Target: ANGPTL4; (-) strand; PAM type: NRG; PAM sequence: AGG
  source 1..20: mol_type = other DNA
ctggaccacattcattccac

SEQ ID NO: 6941 - DNA, 20 bp, synthetic construct
  misc_feature 1..20: note = Description of Artificial Sequence: Synthetic oligonucleotide
  misc_feature 1..20: note = Target: ANGPTL4; (-) strand; PAM type: NRG; PAM sequence: CAG
  source 1..20: mol_type = other DNA
gctggaccacattcattcca

SEQ ID NO: 6942 - DNA, 20 bp, synthetic construct
  misc_feature 1..20: note = Description of Artificial Sequence: Synthetic oligonucleotide
  misc_feature 1..20: note = Target: ANGPTL4; (-) strand; PAM type: NRG; PAM sequence: TGG
  source 1..20: mol_type = other DNA
actgagtgaggctaaagggc

SEQ ID NO: 6943 - DNA, 20 bp, synthetic construct
  misc_feature 1..20: note = Description of Artificial Sequence: Synthetic oligonucleotide
  misc_feature 1..20: note = Target: ANGPTL4; (-) strand; PAM type: NRG; PAM sequence: GGG
  source 1..20: mol_type = other DNA
aagtactgagtgaggctaaa

SEQ ID NO: 6944 - DNA, 20 bp, synthetic construct
  misc_feature 1..20: note = Description of Artificial Sequence: Synthetic oligonucleotide
  misc_feature 1..20: note = Target: ANGPTL4; (-) strand; PAM type: NRG; PAM sequence: AGG
  source 1..20: mol_type = other DNA
gaagtactgagtgaggctaa

SEQ ID NO: 6945 - DNA, 20 bp, synthetic construct
  misc_feature 1..20: note = Description of Artificial Sequence: Synthetic oligonucleotide
  misc_feature 1..20: note = Target: ANGPTL4; (-) strand; PAM type: NRG; PAM sequence: AAG
  source 1..20: mol_type = other DNA
ggaagtactgagtgaggcta

SEQ ID NO: 6946 - DNA, 20 bp, synthetic construct
  misc_feature 1..20: note = Description of Artificial Sequence: Synthetic oligonucleotide
  misc_feature 1..20: note = Target: ANGPTL4; (-) strand; PAM type: NRG; PAM sequence: AGG
  source 1..20: mol_type = other DNA
gacaaaggaagtactgagtg

SEQ ID NO: 6947 - DNA, 20 bp, synthetic construct
  misc_feature 1..20: note = Description of Artificial Sequence: Synthetic oligonucleotide
  misc_feature 1..20: note = Target: ANGPTL4; (-) strand; PAM type: NRG; PAM sequence: GAG
  source 1..20: mol_type = other DNA
ggacaaaggaagtactgagt

SEQ ID NO: 6948 - DNA, 20 bp, synthetic construct
  misc_feature 1..20: note = Description of Artificial Sequence: Synthetic oligonucleotide
  misc_feature 1..20: note = Target: ANGPTL4; (-) strand; PAM type: NRG; PAM sequence: GAG
  source 1..20: mol_type = other DNA
gttgggacaaaggaagtact

SEQ ID NO: 6949 - DNA, 20 bp, synthetic construct
  misc_feature 1..20: note = Description of Artificial Sequence: Synthetic oligonucleotide
  misc_feature 1..20: note = Target: ANGPTL4; (-) strand; PAM type: NRG; PAM sequence: AAG
  source 1..20: mol_type = other DNA
ggatagagttgggacaaagg

SEQ ID NO: 6950 - DNA, 20 bp, synthetic construct
  misc_feature 1..20: note = Description of Artificial Sequence: Synthetic oligonucleotide
  misc_feature 1..20: note = Target: ANGPTL4; (-) strand; PAM type: NRG; PAM sequence: AGG
  source 1..20: mol_type = other DNA
tagggatagagttgggacaa

SEQ ID NO: 6951 - DNA, 20 bp, synthetic construct
  misc_feature 1..20: note = Description of Artificial Sequence: Synthetic oligonucleotide
  misc_feature 1..20: note = Target: ANGPTL4; (-) strand; PAM type: NRG; PAM sequence: AAG
  source 1..20: mol_type = other DNA
gtagggatagagttgggaca

SEQ ID NO: 6952 - DNA, 20 bp, synthetic construct
  misc_feature 1..20: note = Description of Artificial Sequence: Synthetic oligonucleotide
  misc_feature 1..20: note = Target: ANGPTL4; (-) strand; PAM type: NRG; PAM sequence: GGG
  source 1..20: mol_type = other DNA
cctggggtagggatagagtt

SEQ ID NO: 6953 - DNA, 20 bp, synthetic construct
  misc_feature 1..20: note = Description of Artificial Sequence: Synthetic oligonucleotide
  misc_feature 1..20: note = Target: ANGPTL4; (-) strand; PAM type: NRG; PAM sequence: TGG
  source 1..20: mol_type = other DNA
gcctggggtagggatagagt

SEQ ID NO: 6954 - DNA, 20 bp, synthetic construct
  misc_feature 1..20: note = Description of Artificial Sequence: Synthetic oligonucleotide
  misc_feature 1..20: note = Target: ANGPTL4; (-) strand; PAM type: NRG; PAM sequence: GAG
  source 1..20: mol_type = other DNA
ctgagcctggggtagggata

SEQ ID NO: 6955 - DNA, 20 bp, synthetic construct
  misc_feature 1..20: note = Description of Artificial Sequence: Synthetic oligonucleotide
  misc_feature 1..20: note = Target: ANGPTL4; (-) strand; PAM type: NRG; PAM sequence: TAG
  source 1..20: mol_type = other DNA
ttctgagcctggggtaggga

SEQ ID NO: 6956 - DNA, 20 bp, synthetic construct
  misc_feature 1..20: note = Description of Artificial Sequence: Synthetic oligonucleotide
  misc_feature 1..20: note = Target: ANGPTL4; (-) strand; PAM type: NRG; PAM sequence: GGG
  source 1..20: mol_type = other DNA
aacattctgagcctggggta

SEQ ID NO: 6957 - DNA, 20 bp, synthetic construct
  misc_feature 1..20: note = Description of Artificial Sequence: Synthetic oligonucleotide
  misc_feature 1..20: note = Target: ANGPTL4; (-) strand; PAM type: NRG; PAM sequence: AGG
  source 1..20: mol_type = other DNA
caacattctgagcctggggt

SEQ ID NO: 6958 - DNA, 20 bp, synthetic construct
  misc_feature 1..20: note = Description of Artificial Sequence: Synthetic oligonucleotide
  misc_feature 1..20: note = Target: ANGPTL4; (-) strand; PAM type: NRG; PAM sequence: TAG
  source 1..20: mol_type = other DNA
ccaacattctgagcctgggg

SEQ ID NO: 6959 - DNA, 20 bp, synthetic construct
  misc_feature 1..20: note = Description of Artificial Sequence: Synthetic oligonucleotide
  misc_feature 1..20: note = Target: ANGPTL4; (-) strand; PAM type: NRG; PAM sequence: GGG
  source 1..20: mol_type = other DNA
accccaacattctgagcctg

SEQ ID NO: 6960 - DNA, 20 bp, synthetic construct
  misc_feature 1..20: note = Description of Artificial Sequence: Synthetic oligonucleotide
  misc_feature 1..20: note = Target: ANGPTL4; (-) strand; PAM type: NRG; PAM sequence: GGG
  source 1..20: mol_type = other DNA
taccccaacattctgagcct

SEQ ID NO: 6961 - DNA, 20 bp, synthetic construct
  misc_feature 1..20: note = Description of Artificial Sequence: Synthetic oligonucleotide
  misc_feature 1..20: note = Target: ANGPTL4; (-) strand; PAM type: NRG; PAM sequence: TGG
  source 1..20: mol_type = other DNA
ataccccaacattctgagcc

SEQ ID NO: 6962 - DNA, 20 bp, synthetic construct
  misc_feature 1..20: note = Description of Artificial Sequence: Synthetic oligonucleotide
  misc_feature 1..20: note = Target: ANGPTL4; (-) strand; PAM type: NRG; PAM sequence: GAG
  source 1..20: mol_type = other DNA
tggagataccccaacattct

SEQ ID NO: 6963 - DNA, 20 bp, synthetic construct
  misc_feature 1..20: note = Description of Artificial Sequence: Synthetic oligonucleotide
  misc_feature 1..20: note = Target: ANGPTL4; (-) strand; PAM type: NRG; PAM sequence: GAG
  source 1..20: mol_type = other DNA
ttgaagttctcaggcaggtg

SEQ ID NO: 6964 - DNA, 20 bp, synthetic construct
  misc_feature 1..20: note = Description of Artificial Sequence: Synthetic oligonucleotide
  misc_feature 1..20: note = Target: ANGPTL4; (-) strand; PAM type: NRG; PAM sequence: TGG
  source 1..20: mol_type = other DNA
gtttgaagttctcaggcagg

SEQ ID NO: 6965 - DNA, 20 bp, synthetic construct
  misc_feature 1..20: note = Description of Artificial Sequence: Synthetic oligonucleotide
  misc_feature 1..20: note = Target: ANGPTL4; (-) strand; PAM type: NRG; PAM sequence: AGG
  source 1..20: mol_type = other DNA
tatgtttgaagttctcaggc

SEQ ID NO: 6966 - DNA, 20 bp, synthetic construct
  misc_feature 1..20: note = Description of Artificial Sequence: Synthetic oligonucleotide
  misc_feature 1..20: note = Target: ANGPTL4; (-) strand; PAM type: NRG; PAM sequence: CAG
  source 1..20: mol_type = other DNA
gtatgtttgaagttctcagg

SEQ ID NO: 6967 - DNA, 20 bp, synthetic construct
  misc_feature 1..20: note = Description of Artificial Sequence: Synthetic oligonucleotide
  misc_feature 1..20: note = Target: ANGPTL4; (-) strand; PAM type: NRG; PAM sequence: AGG
  source 1..20: mol_type = other DNA
cctgtatgtttgaagttctc

SEQ ID NO: 6968 - DNA, 20 bp, synthetic construct
  misc_feature 1..20: note = Description of Artificial Sequence: Synthetic oligonucleotide
  misc_feature 1..20: note = Target: ANGPTL4; (-) strand; PAM type: NRG; PAM sequence: CAG
  source 1..20: mol_type = other DNA
ccctgtatgtttgaagttct

SEQ ID NO: 6969 - DNA, 20 bp, synthetic construct
  misc_feature 1..20: note = Description of Artificial Sequence: Synthetic oligonucleotide
  misc_feature 1..20: note = Target: ANGPTL4; (-) strand; PAM type: NRG; PAM sequence: AAG
  source 1..20: mol_type = other DNA
gcccagcccctgtatgtttg

SEQ ID NO: 6970 - DNA, 20 bp, synthetic construct
  misc_feature 1..20: note = Description of Artificial Sequence: Synthetic oligonucleotide
  misc_feature 1..20: note = Target: ANGPTL4; (-) strand; PAM type: NRG; PAM sequence: CAG
  source 1..20: mol_type = other DNA
gtgctgctgccctctaagcc

SEQ ID NO: 6971 - DNA, 20 bp, synthetic construct
  misc_feature 1..20: note = Description of Artificial Sequence: Synthetic oligonucleotide
  misc_feature 1..20: note = Target: ANGPTL4; (-) strand; PAM type: NRG; PAM sequence: AAG
  source 1..20: mol_type = other DNA
cgaaggtgctgctgccctct

SEQ ID NO: 6972 - DNA, 20 bp, synthetic construct
  misc_feature 1..20: note = Description of Artificial Sequence: Synthetic oligonucleotide
  misc_feature 1..20: note = Target: ANGPTL4; (-) strand; PAM type: NRG; PAM sequence: AGG
  source 1..20: mol_type = other DNA
ttcactcatgcactgaacga

SEQ ID NO: 6973 - DNA, 20 bp, synthetic construct
  misc_feature 1..20: note = Description of Artificial Sequence: Synthetic oligonucleotide
  misc_feature 1..20: note = Target: ANGPTL4; (-) strand; PAM type: NRG; PAM sequence: AAG
  source 1..20: mol_type = other DNA
attcactcatgcactgaacg

SEQ ID NO: 6974 - DNA, 20 bp, synthetic construct
  misc_feature 1..20: note = Description of Artificial Sequence: Synthetic oligonucleotide
  misc_feature 1..20: note = Target: ANGPTL4; (-) strand; PAM type: NRG; PAM sequence: AAG
  source 1..20: mol_type = other DNA
aaaaaaagtttcagacatgg

SEQ ID NO: 6975 - DNA, 20 bp, synthetic construct
  misc_feature 1..20: note = Description of Artificial Sequence: Synthetic oligonucleotide
  misc_feature 1..20: note = Target: ANGPTL4; (-) strand; PAM type: NRG; PAM sequence: TGG
  source 1..20: mol_type = other DNA
aaaaaaaaaagtttcagaca

SEQ ID NO: 6976 - DNA, 20 bp, synthetic construct
  misc_feature 1..20: note = Description of Artificial Sequence: Synthetic oligonucleotide
  misc_feature 1..20: note = Target: ANGPTL4; (-) strand; PAM type: NRG; PAM sequence: CAG
  source 1..20: mol_type = other DNA
aaaaaaaaaaaaaaaagttt

SEQ ID NO: 6977 - DNA, 20 bp, synthetic construct
  misc_feature 1..20: note = Description of Artificial Sequence: Synthetic oligonucleotide
  misc_feature 1..20: note = Target: ANGPTL4; (-) strand; PAM type: NRG; PAM sequence: AAG
  source 1..20: mol_type = other DNA
tgtgtcaaaaaaaaaaaaaa

SEQ ID NO: 6978 - DNA, 20 bp, synthetic construct
  misc_feature 1..20: note = Description of Artificial Sequence: Synthetic oligonucleotide
  misc_feature 1..20: note = Target: ANGPTL4; (-) strand; PAM type: NRG; PAM sequence: GAG
  source 1..20: mol_type = other DNA
tccagcctgggtgacagagt

SEQ ID NO: 6979 - DNA, 20 bp, synthetic construct
  misc_feature 1..20: note = Description of Artificial Sequence: Synthetic oligonucleotide
  misc_feature 1..20: note = Target: ANGPTL4; (-) strand; PAM type: NRG; PAM sequence: GAG
  source 1..20: mol_type = other DNA
gcactccagcctgggtgaca

SEQ ID NO: 6980 - DNA, 20 bp, synthetic construct
  misc_feature 1..20: note = Description of Artificial Sequence: Synthetic oligonucleotide
  misc_feature 1..20: note = Target: ANGPTL4; (-) strand; PAM type: NRG; PAM sequence: CAG
  source 1..20: mol_type = other DNA
cagcactccagcctgggtga

SEQ ID NO: 6981 - DNA, 20 bp, synthetic construct
  misc_feature 1..20: note = Description of Artificial Sequence: Synthetic oligonucleotide
  misc_feature 1..20: note = Target: ANGPTL4; (-) strand; PAM type: NRG; PAM sequence: GGG
  source 1..20: mol_type = other DNA
gcaccacagcactccagcct

SEQ ID NO: 6982 - DNA, 20 bp, synthetic construct
  misc_feature 1..20: note = Description of Artificial Sequence: Synthetic oligonucleotide
  misc_feature 1..20: note = Target: ANGPTL4; (-) strand; PAM type: NRG; PAM sequence: TGG
  source 1..20: mol_type = other DNA
tgcaccacagcactccagcc

SEQ ID NO: 6983 - DNA, 20 bp, synthetic construct
  misc_feature 1..20: note = Description of Artificial Sequence: Synthetic oligonucleotide
  misc_feature 1..20: note = Target: ANGPTL4; (-) strand; PAM type: NRG; PAM sequence: CAG
  source 1..20: mol_type = other DNA
gagattgcaccacagcactc

SEQ ID NO: 6984 - DNA, 20 bp, synthetic construct
  misc_feature 1..20: note = Description of Artificial Sequence: Synthetic oligonucleotide
  misc_feature 1..20: note = Target: ANGPTL4; (-) strand; PAM type: NRG; PAM sequence: CAG
  source 1..20: mol_type = other DNA
agtgagctgagattgcacca

SEQ ID NO: 6985 - DNA, 20 bp, synthetic construct
  misc_feature 1..20: note = Description of Artificial Sequence: Synthetic oligonucleotide
  misc_feature 1..20: note = Target: ANGPTL4; (-) strand; PAM type: NRG; PAM sequence: GAG
  source 1..20: mol_type = other DNA
gacggaggttgcagtgagct

SEQ ID NO: 6986 - DNA, 20 bp, synthetic construct
  misc_feature 1..20: note = Description of Artificial Sequence: Synthetic oligonucleotide
  misc_feature 1..20: note = Target: ANGPTL4; (-) strand; PAM type: NRG; PAM sequence: GAG
  source 1..20: mol_type = other DNA
caggagacggaggttgcagt

SEQ ID NO: 6987 - DNA, 20 bp, synthetic construct
  misc_feature 1..20: note = Description of Artificial Sequence: Synthetic oligonucleotide
  misc_feature 1..20: note = Target: ANGPTL4; (-) strand; PAM type: NRG; PAM sequence: CAG
  source 1..20: mol_type = other DNA
aactcaggagacggaggttg

SEQ ID NO: 6988 - DNA, 20 bp, synthetic construct
  misc_feature 1..20: note = Description of Artificial Sequence: Synthetic oligonucleotide
  misc_feature 1..20: note = Target: ANGPTL4; (-) strand; PAM type: NRG; PAM sequence: AGG
  source 1..20: mol_type = other DNA
cgcttgaactcaggagacgg

SEQ ID NO: 6989 - DNA, 20 bp, synthetic construct
  misc_feature 1..20: note = Description of Artificial Sequence: Synthetic oligonucleotide
  misc_feature 1..20: note = Target: ANGPTL4; (-) strand; PAM type: NRG; PAM sequence: GAG
  source 1..20: mol_type = other DNA
tcgcttgaactcaggagacg

SEQ ID NO: 6990 - DNA, 20 bp, synthetic construct
  misc_feature 1..20: note = Description of Artificial Sequence: Synthetic oligonucleotide
  misc_feature 1..20: note = Target: ANGPTL4; (-) strand; PAM type: NRG; PAM sequence: CGG
  source 1..20: mol_type = other DNA
aatcgcttgaactcaggaga

SEQ ID NO: 6991 - DNA, 20 bp, synthetic construct
  misc_feature 1..20: note = Description of Artificial Sequence: Synthetic oligonucleotide
  misc_feature 1..20: note = Target: ANGPTL4; (-) strand; PAM type: NRG; PAM sequence: GAG
  source 1..20: mol_type = other DNA
ggagaatcgcttgaactcag

SEQ ID NO: 6992 - DNA, 20 bp, synthetic construct
  misc_feature 1..20: note = Description of Artificial Sequence: Synthetic oligonucleotide
  misc_feature 1..20: note = Target: ANGPTL4; (-) strand; PAM type: NRG; PAM sequence: AGG
  source 1..20: mol_type = other DNA
caggagaatcgcttgaactc

SEQ ID NO: 6993 - DNA, 20 bp, synthetic construct
  misc_feature 1..20: note = Description of Artificial Sequence: Synthetic oligonucleotide
  misc_feature 1..20: note = Target: ANGPTL4; (-) strand; PAM type: NRG; PAM sequence: CAG
  source 1..20: mol_type = other DNA
tcaggagaatcgcttgaact

SEQ ID NO: 6994 - DNA, 20 bp, synthetic construct
  misc_feature 1..20: note = Description of Artificial Sequence: Synthetic oligonucleotide
  misc_feature 1..20: note = Target: ANGPTL4; (-) strand; PAM type: NRG; PAM sequence: GAG
  source 1..20: mol_type = other DNA
tactcgggagactgtgtcag

SEQ ID NO: 6995 - DNA, 20 bp, synthetic construct
  misc_feature 1..20: note = Description of Artificial Sequence: Synthetic oligonucleotide
  misc_feature 1..20: note = Target: ANGPTL4; (-) strand; PAM type: NRG; PAM sequence: AGG
  source 1..20: mol_type = other DNA
gctactcgggagactgtgtc

SEQ ID NO: 6996 - DNA, 20 bp, synthetic construct
  misc_feature 1..20: note = Description of Artificial Sequence: Synthetic oligonucleotide
  misc_feature 1..20: note = Target: ANGPTL4; (-) strand; PAM type: NRG; PAM sequence: CAG
  source 1..20: mol_type = other DNA
agctactcgggagactgtgt

SEQ ID NO: 6997 - DNA, 20 bp, synthetic construct
  misc_feature 1..20: note = Description of Artificial Sequence: Synthetic oligonucleotide
  misc_feature 1..20: note = Target: ANGPTL4; (-) strand; PAM type: NRG; PAM sequence: GAG
  source 1..20: mol_type = other DNA
acgtgcttacagctactcgg

SEQ ID NO: 6998 - DNA, 20 bp, synthetic construct
  misc_feature 1..20: note = Description of Artificial Sequence: Synthetic oligonucleotide
  misc_feature 1..20: note = Target: ANGPTL4; (-) strand; PAM type: NRG; PAM sequence: GGG
  source 1..20: mol_type = other DNA
gcacgtgcttacagctactc

SEQ ID NO: 6999 - DNA, 20 bp, synthetic construct
  misc_feature 1..20: note = Description of Artificial Sequence: Synthetic oligonucleotide
  misc_feature 1..20: note = Target: ANGPTL4; (-) strand; PAM type: NRG; PAM sequence: CGG
  source 1..20: mol_type = other DNA
ggcacgtgcttacagctact

SEQ ID NO: 7000 - DNA, 20 bp, synthetic construct
  misc_feature 1..20: note = Description of Artificial Sequence: Synthetic oligonucleotide
  misc_feature 1..20: note = Target: ANGPTL4; (-) strand; PAM type: NRG; PAM sequence: CAG
  source 1..20: mol_type = other DNA
ggtgtggtggcacgtgctta

SEQ ID NO: 7001 - DNA, 20 bp, synthetic construct
  misc_feature 1..20: note = Description of Artificial Sequence: Synthetic oligonucleotide
  misc_feature 1..20: note = Target: ANGPTL4; (-) strand; PAM type: NRG; PAM sequence: TGG
  source 1..20: mol_type = other DNA
aaaaaattagccgggtgtgg

SEQ ID NO: 7002 - DNA, 20 bp, synthetic construct
  misc_feature 1..20: note = Description of Artificial Sequence: Synthetic oligonucleotide
  misc_feature 1..20: note = Target: ANGPTL4; (-) strand; PAM type: NRG; PAM sequence: TGG
  source 1..20: mol_type = other DNA
aataaaaaattagccgggtg

SEQ ID NO: 7003 - DNA, 20 bp, synthetic construct
  misc_feature 1..20: note = Description of Artificial Sequence: Synthetic oligonucleotide
  misc_feature 1..20: note = Target: ANGPTL4; (-) strand; PAM type: NRG; PAM sequence: GGG
  source 1..20: mol_type = other DNA
ctaaaaataaaaaattagcc

SEQ ID NO: 7004 - DNA, 20 bp, synthetic construct
  misc_feature 1..20: note = Description of Artificial Sequence: Synthetic oligonucleotide
  misc_feature 1..20: note = Target: ANGPTL4; (-) strand; PAM type: NRG; PAM sequence: CGG
  source 1..20: mol_type = other DNA
actaaaaataaaaaattagc

SEQ ID NO: 7005 - DNA, 20 bp, synthetic construct
  misc_feature 1..20: note = Description of Artificial Sequence: Synthetic oligonucleotide
  misc_feature 1..20: note = Target: ANGPTL4; (-) strand; PAM type: NRG; PAM sequence: TAG
  source 1..20: mol_type = other DNA
ctctactaaaaataaaaaat

SEQ ID NO: 7006 - DNA, 20 bp, synthetic construct
  misc_feature 1..20: note = Description of Artificial Sequence: Synthetic oligonucleotide
  misc_feature 1..20: note = Target: ANGPTL4; (-) strand; PAM type: NRG; PAM sequence: TGG
  source 1..20: mol_type = other DNA
cgagatcagcctggccaaca

SEQ ID NO: 7007 - DNA, 20 bp, synthetic construct
  misc_feature 1..20: note = Description of Artificial Sequence: Synthetic oligonucleotide
  misc_feature 1..20: note = Target: ANGPTL4; (-) strand; PAM type: NRG; PAM sequence: TGG
  source 1..20: mol_type = other DNA
tcaggggttcgagatcagcc

SEQ ID NO: 7008 - DNA, 20 bp, synthetic construct
  misc_feature 1..20: note = Description of Artificial Sequence: Synthetic oligonucleotide
  misc_feature 1..20: note = Target: ANGPTL4; (-) strand; PAM type: NRG; PAM sequence: CAG
  source 1..20: mol_type = other DNA
tgaggtcaggggttcgagat

SEQ ID NO: 7009 - DNA, 20 bp, synthetic construct
  misc_feature 1..20: note = Description of Artificial Sequence: Synthetic oligonucleotide
  misc_feature 1..20: note = Target: ANGPTL4; (-) strand; PAM type: NRG; PAM sequence: GAG
  source 1..20: mol_type = other DNA
tcacctgaggtcaggggttc

SEQ ID NO: 7010 - DNA, 20 bp, synthetic construct
  misc_feature 1..20: note = Description of Artificial Sequence: Synthetic oligonucleotide
  misc_feature 1..20: note = Target: ANGPTL4; (-) strand; PAM type: NRG; PAM sequence: GGG
  source 1..20: mol_type = other DNA
ggcggatcacctgaggtcag

SEQ ID NO: 7011 - DNA, 20 bp, synthetic construct
  misc_feature 1..20: note = Description of Artificial Sequence: Synthetic oligonucleotide
  misc_feature 1..20: note = Target: ANGPTL4; (-) strand; PAM type: NRG; PAM sequence: GGG
  source 1..20: mol_type = other DNA
gggcggatcacctgaggtca

SEQ ID NO: 7012 - DNA, 20 bp, synthetic construct
  misc_feature 1..20: note = Description of Artificial Sequence: Synthetic oligonucleotide
  misc_feature 1..20: note = Target: ANGPTL4; (-) strand; PAM type: NRG; PAM sequence: AGG
  source 1..20: mol_type = other DNA
ggggcggatcacctgaggtc

SEQ ID NO: 7013 - DNA, 20 bp, synthetic construct
  misc_feature 1..20: note = Description of Artificial Sequence: Synthetic oligonucleotide
  misc_feature 1..20: note = Target: ANGPTL4; (-) strand; PAM type: NRG; PAM sequence: CAG
  source 1..20: mol_type = other DNA
gggggcggatcacctgaggt

SEQ ID NO: 7014 - DNA, 20 bp, synthetic construct
  misc_feature 1..20: note = Description of Artificial Sequence: Synthetic oligonucleotide
  misc_feature 1..20: note = Target: ANGPTL4; (-) strand; PAM type: NRG; PAM sequence: AGG
  source 1..20: mol_type = other DNA
gggggggggcggatcacctg

SEQ ID NO: 7015 - DNA, 20 bp, synthetic construct
  misc_feature 1..20: note = Description of Artificial Sequence: Synthetic oligonucleotide
  misc_feature 1..20: note = Target: ANGPTL4; (-) strand; PAM type: NRG; PAM sequence: GAG
  source 1..20: mol_type = other DNA
ggggggggggcggatcacct

SEQ ID NO: 7016 - DNA, 20 bp, synthetic construct
  misc_feature 1..20: note = Description of Artificial Sequence: Synthetic oligonucleotide
  misc_feature 1..20: note = Target: ANGPTL4; (-) strand; PAM type: NRG; PAM sequence: CGG
  source 1..20: mol_type = other DNA
tggtgggagggggggggggg

SEQ ID NO: 7017 - DNA, 20 bp, synthetic construct
  misc_feature 1..20: note = Description of Artificial Sequence: Synthetic oligonucleotide
  misc_feature 1..20: note = Target: ANGPTL4; (-) strand; PAM type: NRG; PAM sequence: GGG
  source 1..20: mol_type = other DNA
gggtggtgggaggggggggg

SEQ ID NO: 7018 - DNA, 20 bp, synthetic construct
  misc_feature 1..20: note = Description of Artificial Sequence: Synthetic oligonucleotide
  misc_feature 1..20: note = Target: ANGPTL4; (-) strand; PAM type: NRG; PAM sequence: GGG
  source 1..20: mol_type = other DNA
cgggtggtgggagggggggg

SEQ ID NO: 7019 - DNA, 20 bp, synthetic construct
  misc_feature 1..20: note = Description of Artificial Sequence: Synthetic oligonucleotide
  misc_feature 1..20: note = Target: ANGPTL4; (-) strand; PAM type: NRG; PAM sequence: GGG
  source 1..20: mol_type = other DNA
ccgggtggtgggaggggggg

SEQ ID NO: 7020 - DNA, 20 bp, synthetic construct
  misc_feature 1..20: note = Description of Artificial Sequence: Synthetic oligonucleotide
  misc_feature 1..20: note = Target: ANGPTL4; (-) strand; PAM type: NRG; PAM sequence: GGG
  source 1..20: mol_type = other DNA
gccgggtggtgggagggggg

SEQ ID NO: 7021 - DNA, 20 bp, synthetic construct
  misc_feature 1..20: note = Description of Artificial Sequence: Synthetic oligonucleotide
  misc_feature 1..20: note = Target: ANGPTL4; (-) strand; PAM type: NRG; PAM sequence: GGG
  source 1..20: mol_type = other DNA
ggccgggtggtgggaggggg

SEQ ID NO: 7022 - DNA, 20 bp, synthetic construct
  misc_feature 1..20: note = Description of Artificial Sequence: Synthetic oligonucleotide
  misc_feature 1..20: note = Target: ANGPTL4; (-) strand; PAM type: NRG; PAM sequence: GGG
  source 1..20: mol_type = other DNA
aggccgggtggtgggagggg

SEQ ID NO: 7023 - DNA, 20 bp, synthetic construct
  misc_feature 1..20: note = Description of Artificial Sequence: Synthetic oligonucleotide
  misc_feature 1..20: note = Target: ANGPTL4; (-) strand; PAM type: NRG; PAM sequence: GGG
  source 1..20: mol_type = other DNA
gaggccgggtggtgggaggg

SEQ ID NO: 7024 - DNA, 20 bp, synthetic construct
  misc_feature 1..20: note = Description of Artificial Sequence: Synthetic oligonucleotide
  misc_feature 1..20: note = Target: ANGPTL4; (-) strand; PAM type: NRG; PAM sequence: GGG
  source 1..20: mol_type = other DNA
ggaggccgggtggtgggagg

SEQ ID NO: 7025 - DNA, 20 bp, synthetic construct
  misc_feature 1..20: note = Description of Artificial Sequence: Synthetic oligonucleotide
  misc_feature 1..20: note = Target: ANGPTL4; (-) strand; PAM type: NRG; PAM sequence: GGG
  source 1..20: mol_type = other DNA
gggaggccgggtggtgggag

SEQ ID NO: 7026 - DNA, 20 bp, synthetic construct
  misc_feature 1..20: note = Description of Artificial Sequence: Synthetic oligonucleotide
  misc_feature 1..20: note = Target: ANGPTL4; (-) strand; PAM type: NRG; PAM sequence: GGG
  source 1..20: mol_type = other DNA
tgggaggccgggtggtggga

SEQ ID NO: 7027 - DNA, 20 bp, synthetic construct
  misc_feature 1..20: note = Description of Artificial Sequence: Synthetic oligonucleotide
  misc_feature 1..20: note = Target: ANGPTL4; (-) strand; PAM type: NRG; PAM sequence: AGG
  source 1..20: mol_type = other DNA
ttgggaggccgggtggtggg

SEQ ID NO: 7028 - DNA, 20 bp, synthetic construct
  misc_feature 1..20: note = Description of Artificial Sequence: Synthetic oligonucleotide
  misc_feature 1..20: note = Target: ANGPTL4; (-) strand; PAM type: NRG; PAM sequence: GAG
  source 1..20: mol_type = other DNA
tttgggaggccgggtggtgg

SEQ ID NO: 7029 - DNA, 20 bp, synthetic construct
  misc_feature 1..20: note = Description of Artificial Sequence: Synthetic oligonucleotide
  misc_feature 1..20: note = Target: ANGPTL4; (-) strand; PAM type: NRG; PAM sequence: GGG
  source 1..20: mol_type = other DNA
actttgggaggccgggtggt

SEQ ID NO: 7030 - DNA, 20 bp, synthetic construct
  misc_feature 1..20: note = Description of Artificial Sequence: Synthetic oligonucleotide
  misc_feature 1..20: note = Target: ANGPTL4; (-) strand; PAM type: NRG; PAM sequence: TGG
  source 1..20: mol_type = other DNA
cactttgggaggccgggtgg

SEQ ID NO: 7031 - DNA, 20 bp, synthetic construct
  misc_feature 1..20: note = Description of Artificial Sequence: Synthetic oligonucleotide
  misc_feature 1..20: note = Target: ANGPTL4; (-) strand; PAM type: NRG; PAM sequence: TGG
  source 1..20: mol_type = other DNA
cagcactttgggaggccggg

SEQ ID NO: 7032 - DNA, 20 bp, synthetic construct
  misc_feature 1..20: note = Description of Artificial Sequence: Synthetic oligonucleotide
  misc_feature 1..20: note = Target: ANGPTL4; (-) strand; PAM type: NRG; PAM sequence: GGG
  source 1..20: mol_type = other DNA
tcccagcactttgggaggcc

SEQ ID NO: 7033 - DNA, 20 bp, synthetic construct
  misc_feature 1..20: note = Description of Artificial Sequence: Synthetic oligonucleotide
  misc_feature 1..20: note = Target: ANGPTL4; (-) strand; PAM type: NRG; PAM sequence: CGG
  source 1..20: mol_type = other DNA
atcccagcactttgggaggc

SEQ ID NO: 7034 - DNA, 20 bp, synthetic construct
  misc_feature 1..20: note = Description of Artificial Sequence: Synthetic oligonucleotide
  misc_feature 1..20: note = Target: ANGPTL4; (-) strand; PAM type: NRG; PAM sequence: AGG
  source 1..20: mol_type = other DNA
tgtaatcccagcactttggg

SEQ ID NO: 7035 - DNA, 20 bp, synthetic construct
  misc_feature 1..20: note = Description of Artificial Sequence: Synthetic oligonucleotide
  misc_feature 1..20: note = Target: ANGPTL4; (-) strand; PAM type: NRG; PAM sequence: GAG
  source 1..20: mol_type = other DNA
ctgtaatcccagcactttgg

SEQ ID NO: 7036 - DNA, 20 bp, synthetic construct
  misc_feature 1..20: note = Description of Artificial Sequence: Synthetic oligonucleotide
  misc_feature 1..20: note = Target: ANGPTL4; (-) strand; PAM type: NRG; PAM sequence: GGG
  source 1..20: mol_type = other DNA
gcctgtaatcccagcacttt

SEQ ID NO: 7037 - DNA, 20 bp, synthetic construct
  misc_feature 1..20: note = Description of Artificial Sequence: Synthetic oligonucleotide
  misc_feature 1..20: note = Target: ANGPTL4; (-) strand; PAM type: NRG; PAM sequence: TGG
  source 1..20: mol_type = other DNA
cgcctgtaatcccagcactt

SEQ ID NO: 7038 - DNA, 20 bp, synthetic construct
  misc_feature 1..20: note = Description of Artificial Sequence: Synthetic oligonucleotide
  misc_feature 1..20: note = Target: ANGPTL4; (-) strand; PAM type: NRG; PAM sequence: CAG
  source 1..20: mol_type = other DNA
gtggctcacgcctgtaatcc

SEQ ID NO: 7039 - DNA, 20 bp, synthetic construct
  misc_feature 1..20: note = Description of Artificial Sequence: Synthetic oligonucleotide
  misc_feature 1..20: note = Target: ANGPTL4; (-) strand; PAM type: NRG; PAM sequence: TGG
  source 1..20: mol_type = other DNA
aagtctgtggccaggcgcgg

SEQ ID NO: 7040 - DNA, 20 bp, synthetic construct
  misc_feature 1..20: note = Description of Artificial Sequence: Synthetic oligonucleotide
  misc_feature 1..20: note = Target: ANGPTL4; (-) strand; PAM type: NRG; PAM sequence: CGG
  source 1..20: mol_type = other DNA
taaaagtctgtggccaggcg

SEQ ID NO: 7041 - DNA, 20 bp, synthetic construct
  misc_feature 1..20: note = Description of Artificial Sequence: Synthetic oligonucleotide
  misc_feature 1..20: note = Target: ANGPTL4; (-) strand; PAM type: NRG; PAM sequence: AGG
  source 1..20: mol_type = other DNA
taaaataaaagtctgtggcc

SEQ ID NO: 7042 - DNA, 20 bp, synthetic construct
  misc_feature 1..20: note = Description of Artificial Sequence: Synthetic oligonucleotide
  misc_feature 1..20: note = Target: ANGPTL4; (-) strand; PAM type: NRG; PAM sequence: CAG
  source 1..20: mol_type = other DNA
ataaaataaaagtctgtggc

SEQ ID NO: 7043 - DNA, 20 bp, synthetic construct
  misc_feature 1..20: note = Description of Artificial Sequence: Synthetic oligonucleotide
  misc_feature 1..20: note = Target: ANGPTL4; (-) strand; PAM type: NRG; PAM sequence: TGG
  source 1..20: mol_type = other DNA
agaaataaaataaaagtctg

SEQ ID NO: 7044 - DNA, 20 bp, synthetic construct
  misc_feature 1..20: note = Description of Artificial Sequence: Synthetic oligonucleotide
  misc_feature 1..20: note = Target: ANGPTL4; (-) strand; PAM type: NRG; PAM sequence: AAG
  source 1..20: mol_type = other DNA
ctaaaaaagaaataaaataa

SEQ ID NO: 7045 - DNA, 20 bp, synthetic construct
  misc_feature 1..20: note = Description of Artificial Sequence: Synthetic oligonucleotide
  misc_feature 1..20: note = Target: ANGPTL4; (-) strand; PAM type: NRG; PAM sequence: AAG
  source 1..20: mol_type = other DNA
gtgagatcctgtctctaaaa

SEQ ID NO: 7046 - DNA, 20 bp, synthetic construct
  misc_feature 1..20: note = Description of Artificial Sequence: Synthetic oligonucleotide
  misc_feature 1..20: note = Target: ANGPTL4; (-) strand; PAM type: NRG; PAM sequence: GAG
  source 1..20: mol_type = other DNA
tccagcctgggcaacagagt

SEQ ID NO: 7047 - DNA, 20 bp, synthetic construct
  misc_feature 1..20: note = Description of Artificial Sequence: Synthetic oligonucleotide
  misc_feature 1..20: note = Target: ANGPTL4; (-) strand; PAM type: NRG; PAM sequence: GAG
  source 1..20: mol_type = other DNA
gcactccagcctgggcaaca

SEQ ID NO: 7048 - DNA, 20 bp, synthetic construct
  misc_feature 1..20: note = Description of Artificial Sequence: Synthetic oligonucleotide
  misc_feature 1..20: note = Target: ANGPTL4; (-) strand; PAM type: NRG; PAM sequence: CAG
  source 1..20: mol_type = other DNA
ctgcactccagcctgggcaa

SEQ ID NO: 7049 - DNA, 20 bp, synthetic construct
  misc_feature 1..20: note = Description of Artificial Sequence: Synthetic oligonucleotide
  misc_feature 1..20: note = Target: ANGPTL4; (-) strand; PAM type: NRG; PAM sequence: GGG
  source 1..20: mol_type = other DNA
gtgccactgcactccagcct

SEQ ID NO: 7050 - DNA, 20 bp, synthetic construct
  misc_feature 1..20: note = Description of Artificial Sequence: Synthetic oligonucleotide
  misc_feature 1..20: note = Target: ANGPTL4; (-) strand; PAM type: NRG; PAM sequence: TGG
  source 1..20: mol_type = other DNA
ggtgccactgcactccagcc

SEQ ID NO: 7051 - DNA, 20 bp, synthetic construct
  misc_feature 1..20: note = Description of Artificial Sequence: Synthetic oligonucleotide
  misc_feature 1..20: note = Target: ANGPTL4; (-) strand; PAM type: NRG; PAM sequence: CAG
  source 1..20: mol_type = other DNA
acaatggtgccactgcactc

SEQ ID NO: 7052 - DNA, 20 bp, synthetic construct
  misc_feature 1..20: note = Description of Artificial Sequence: Synthetic oligonucleotide
  misc_feature 1..20: note = Target: ANGPTL4; (-) strand; PAM type: NRG; PAM sequence: TGG
  source 1..20: mol_type = other DNA
gaggctgcagtgagccacaa

SEQ ID NO: 7053 - DNA, 20 bp, synthetic construct
  misc_feature 1..20: note = Description of Artificial Sequence: Synthetic oligonucleotide
  misc_feature 1..20: note = Target: ANGPTL4; (-) strand; PAM type: NRG; PAM sequence: GAG
  source 1..20: mol_type = other DNA
caggaggtagaggctgcagt

SEQ ID NO: 7054 - DNA, 20 bp, synthetic construct
  misc_feature 1..20: note = Description of Artificial Sequence: Synthetic oligonucleotide
  misc_feature 1..20: note = Target: ANGPTL4; (-) strand; PAM type: NRG; PAM sequence: CAG
  source 1..20: mol_type = other DNA
agcccaggaggtagaggctg

SEQ ID NO: 7055 - DNA, 20 bp, synthetic construct
  misc_feature 1..20: note = Description of Artificial Sequence: Synthetic oligonucleotide
  misc_feature 1..20: note = Target: ANGPTL4; (-) strand; PAM type: NRG; PAM sequence: AGG
  source 1..20: mol_type = other DNA
cacttgagcccaggaggtag

SEQ ID NO: 7056 - DNA, 20 bp, synthetic construct
  misc_feature 1..20: note = Description of Artificial Sequence: Synthetic oligonucleotide
  misc_feature 1..20: note = Target: ANGPTL4; (-) strand; PAM type: NRG; PAM sequence: GAG
  source 1..20: mol_type = other DNA
tcacttgagcccaggaggta

SEQ ID NO: 7057 - DNA, 20 bp, synthetic construct
  misc_feature 1..20: note = Description of Artificial Sequence: Synthetic oligonucleotide
  misc_feature 1..20: note = Target: ANGPTL4; (-) strand; PAM type: NRG; PAM sequence: TAG
  source 1..20: mol_type = other DNA
gctcacttgagcccaggagg

SEQ ID NO: 7058 - DNA, 20 bp, synthetic construct
  misc_feature 1..20: note = Description of Artificial Sequence: Synthetic oligonucleotide
  misc_feature 1..20: note = Target: ANGPTL4; (-) strand; PAM type: NRG; PAM sequence: AGG
  source 1..20: mol_type = other DNA
gaggctcacttgagcccagg

SEQ ID NO: 7059 - DNA, 20 bp, synthetic construct
  misc_feature 1..20: note = Description of Artificial Sequence: Synthetic oligonucleotide
  misc_feature 1..20: note = Target: ANGPTL4; (-) strand; PAM type: NRG; PAM sequence: GAG
  source 1..20: mol_type = other DNA
ggaggctcacttgagcccag

SEQ ID NO: 7060 - DNA, 20 bp, synthetic construct
  misc_feature 1..20: note = Description of Artificial Sequence: Synthetic oligonucleotide
  misc_feature 1..20: note = Target: ANGPTL4; (-) strand; PAM type: NRG; PAM sequence: AGG
  source 1..20: mol_type = other DNA
tgggaggctcacttgagccc

SEQ ID NO: 7061 - DNA, 20 bp, synthetic construct
  misc_feature 1..20: note = Description of Artificial Sequence: Synthetic oligonucleotide
  misc_feature 1..20: note = Target: ANGPTL4; (-) strand; PAM type: NRG; PAM sequence: CAG
  source 1..20: mol_type = other DNA
gtgggaggctcacttgagcc

SEQ ID NO: 7062 - DNA, 20 bp, synthetic construct
  misc_feature 1..20: note = Description of Artificial Sequence: Synthetic oligonucleotide
  misc_feature 1..20: note = Target: ANGPTL4; (-) strand; PAM type: NRG; PAM sequence: GAG
  source 1..20: mol_type = other DNA
ctgaggtgggaggctcactt

SEQ ID NO: 7063 - DNA, 20 bp, synthetic construct
  misc_feature 1..20: note = Description of Artificial Sequence: Synthetic oligonucleotide
  misc_feature 1..20: note = Target: ANGPTL4; (-) strand; PAM type: NRG; PAM sequence: AGG
  source 1..20: mol_type = other DNA
acttgggagcctgaggtggg

SEQ ID NO: 7064 - DNA, 20 bp, synthetic construct
  misc_feature 1..20: note = Description of Artificial Sequence: Synthetic oligonucleotide
  misc_feature 1..20: note = Target: ANGPTL4; (-) strand; PAM type: NRG; PAM sequence: GAG
  source 1..20: mol_type = other DNA
tacttgggagcctgaggtgg

SEQ ID NO: 7065 - DNA, 20 bp, synthetic construct
  misc_feature 1..20: note = Description of Artificial Sequence: Synthetic oligonucleotide
  misc_feature 1..20: note = Target: ANGPTL4; (-) strand; PAM type: NRG; PAM sequence: GGG
  source 1..20: mol_type = other DNA
gctacttgggagcctgaggt

SEQ ID NO: 7066 - DNA, 20 bp, synthetic construct
  misc_feature 1..20: note = Description of Artificial Sequence: Synthetic oligonucleotide
  misc_feature 1..20: note = Target: ANGPTL4; (-) strand; PAM type: NRG; PAM sequence: TGG
  source 1..20: mol_type = other DNA
agctacttgggagcctgagg

SEQ ID NO: 7067 - DNA, 20 bp, synthetic construct
  misc_feature 1..20: note = Description of Artificial Sequence: Synthetic oligonucleotide
  misc_feature 1..20: note = Target: ANGPTL4; (-) strand; PAM type: NRG; PAM sequence: AGG
  source 1..20: mol_type = other DNA
cgcagctacttgggagcctg

SEQ ID NO: 7068 - DNA, 20 bp, synthetic construct
  misc_feature 1..20: note = Description of Artificial Sequence: Synthetic oligonucleotide
  misc_feature 1..20: note = Target: ANGPTL4; (-) strand; PAM type: NRG; PAM sequence: GAG
  source 1..20: mol_type = other DNA
tcgcagctacttgggagcct

SEQ ID NO: 7069 - DNA, 20 bp, synthetic construct
  misc_feature 1..20: note = Description of Artificial Sequence: Synthetic oligonucleotide
  misc_feature 1..20: note = Target: ANGPTL4; (-) strand; PAM type: NRG; PAM sequence: GAG
  source 1..20: mol_type = other DNA
ctgtggtcgcagctacttgg

SEQ ID NO: 7070 - DNA, 20 bp, synthetic construct
  misc_feature 1..20: note = Description of Artificial Sequence: Synthetic oligonucleotide
  misc_feature 1..20: note = Target: ANGPTL4; (-) strand; PAM type: NRG; PAM sequence: GGG
  source 1..20: mol_type = other DNA
gactgtggtcgcagctactt

SEQ ID NO: 7071 - DNA, 20 bp, synthetic construct
  misc_feature 1..20: note = Description of Artificial Sequence: Synthetic oligonucleotide
  misc_feature 1..20: note = Target: ANGPTL4; (-) strand; PAM type: NRG; PAM sequence: TGG
  source 1..20: mol_type = other DNA
tgactgtggtcgcagctact

SEQ ID NO: 7072 - DNA, 20 bp, synthetic construct
  misc_feature 1..20: note = Description of Artificial Sequence: Synthetic oligonucleotide
  misc_feature 1..20: note = Target: ANGPTL4; (-) strand; PAM type: NRG; PAM sequence: CAG
  source 1..20: mol_type = other DNA
gtcgcccatgactgtggtcg

SEQ ID NO: 7073 - DNA, 20 bp, synthetic construct
  misc_feature 1..20: note = Description of Artificial Sequence: Synthetic oligonucleotide
  misc_feature 1..20: note = Target: ANGPTL4; (-) strand; PAM type: NRG; PAM sequence: TGG
  source 1..20: mol_type = other DNA
agggcggtcgcccatgactg

SEQ ID NO: 7074 - DNA, 20 bp, synthetic construct
  misc_feature 1..20: note = Description of Artificial Sequence: Synthetic oligonucleotide
  misc_feature 1..20: note = Target: ANGPTL4; (-) strand; PAM type: NRG; PAM sequence: CGG
  source 1..20: mol_type = other DNA
aaggaagggaggaaccaggg

SEQ ID NO: 7075 - DNA, 20 bp, synthetic construct
  misc_feature 1..20: note = Description of Artificial Sequence: Synthetic oligonucleotide
  misc_feature 1..20: note = Target: ANGPTL4; (-) strand; PAM type: NRG; PAM sequence: GGG
  source 1..20: mol_type = other DNA
cacaaggaagggaggaacca

SEQ ID NO: 7076 - DNA, 20 bp, synthetic construct
  misc_feature 1..20: note = Description of Artificial Sequence: Synthetic oligonucleotide
  misc_feature 1..20: note = Target: ANGPTL4; (-) strand; PAM type: NRG; PAM sequence: AGG
  source 1..20: mol_type = other DNA
acacaaggaagggaggaacc

SEQ ID NO: 7077 - DNA, 20 bp, synthetic construct
  misc_feature 1..20: note = Description of Artificial Sequence: Synthetic oligonucleotide
  misc_feature 1..20: note = Target: ANGPTL4; (-) strand; PAM type: NRG; PAM sequence: CAG
  source 1..20: mol_type = other DNA
gacacaaggaagggaggaac

SEQ ID NO: 7078 - DNA, 20 bp, synthetic construct
  misc_feature 1..20: note = Description of Artificial Sequence: Synthetic oligonucleotide
  misc_feature 1..20: note = Target: ANGPTL4; (-) strand; PAM type: NRG; PAM sequence: AGG
  source 1..20: mol_type = other DNA
agaggagacacaaggaaggg

SEQ ID NO: 7079 - DNA, 20 bp, synthetic construct
  misc_feature 1..20: note = Description of Artificial Sequence: Synthetic oligonucleotide
  misc_feature 1..20: note = Target: ANGPTL4; (-) strand; PAM type: NRG; PAM sequence: GAG
  source 1..20: mol_type = other DNA
aagaggagacacaaggaagg

SEQ ID NO: 7080 - DNA, 20 bp, synthetic construct
  misc_feature 1..20: note = Description of Artificial Sequence: Synthetic oligonucleotide
  misc_feature 1..20: note = Target: ANGPTL4; (-) strand; PAM type: NRG; PAM sequence: GGG
  source 1..20: mol_type = other DNA
gaaagaggagacacaaggaa

SEQ ID NO: 7081 - DNA, 20 bp, synthetic construct
  misc_feature 1..20: note = Description of Artificial Sequence: Synthetic oligonucleotide
  misc_feature 1..20: note = Target: ANGPTL4; (-) strand; PAM type: NRG; PAM sequence: AGG
  source 1..20: mol_type = other DNA
agaaagaggagacacaagga

SEQ ID NO: 7082 - DNA, 20 bp, synthetic construct
  misc_feature 1..20: note = Description of Artificial Sequence: Synthetic oligonucleotide
  misc_feature 1..20: note = Target: ANGPTL4; (-) strand; PAM type: NRG; PAM sequence: AAG
  source 1..20: mol_type = other DNA
cagaaagaggagacacaagg

SEQ ID NO: 7083 - DNA, 20 bp, synthetic construct
  misc_feature 1..20: note = Description of Artificial Sequence: Synthetic oligonucleotide
  misc_feature 1..20: note = Target: ANGPTL4; (-) strand; PAM type: NRG; PAM sequence: AGG
  source 1..20: mol_type = other DNA
gaacagaaagaggagacaca

SEQ ID NO: 7084 - DNA, 20 bp, synthetic construct
  misc_feature 1..20: note = Description of Artificial Sequence: Synthetic oligonucleotide
  misc_feature 1..20: note = Target: ANGPTL4; (-) strand; PAM type: NRG; PAM sequence: AAG
  source 1..20: mol_type = other DNA
agaacagaaagaggagacac

SEQ ID NO: 7085 - DNA, 20 bp, synthetic construct
  misc_feature 1..20: note = Description of Artificial Sequence: Synthetic oligonucleotide
  misc_feature 1..20: note = Target: ANGPTL4; (-) strand; PAM type: NRG; PAM sequence: GAG
  source 1..20: mol_type = other DNA
aacttagagaacagaaagag

SEQ ID NO: 7086 - DNA, 20 bp, synthetic construct
  misc_feature 1..20: note = Description of Artificial Sequence: Synthetic oligonucleotide
  misc_feature 1..20: note = Target: ANGPTL4; (-) strand; PAM type: NRG; PAM sequence: AGG
  source 1..20: mol_type = other DNA
ggaacttagagaacagaaag

SEQ ID NO: 7087 - DNA, 20 bp, synthetic construct
  misc_feature 1..20: note = Description of Artificial Sequence: Synthetic oligonucleotide
  misc_feature 1..20: note = Target: ANGPTL4; (-) strand; PAM type: NRG; PAM sequence: GAG
  source 1..20: mol_type = other DNA
aggaacttagagaacagaaa

SEQ ID NO: 7088 - DNA, 20 bp, synthetic construct
  misc_feature 1..20: note = Description of Artificial Sequence: Synthetic oligonucleotide
  misc_feature 1..20: note = Target: ANGPTL4; (-) strand; PAM type: NRG; PAM sequence: AAG
  source 1..20: mol_type = other DNA
gcaggaacttagagaacaga

SEQ ID NO: 7089 - DNA, 20 bp, synthetic construct
  misc_feature 1..20: note = Description of Artificial Sequence: Synthetic oligonucleotide
  misc_feature 1..20: note = Target: ANGPTL4; (-) strand; PAM type: NRG; PAM sequence: CAG
  source 1..20: mol_type = other DNA
taaagcaggaacttagagaa

SEQ ID NO: 7090 - DNA, 20 bp, synthetic construct
  misc_feature 1..20: note = Description of Artificial Sequence: Synthetic oligonucleotide
  misc_feature 1..20: note = Target: ANGPTL4; (-) strand; PAM type: NRG; PAM sequence: GAG
  source 1..20: mol_type = other DNA
tataataaagcaggaactta

SEQ ID NO: 7091 - DNA, 20 bp, synthetic construct
  misc_feature 1..20: note = Description of Artificial Sequence: Synthetic oligonucleotide
  misc_feature 1..20: note = Target: ANGPTL4; (-) strand; PAM type: NRG; PAM sequence: TAG
  source 1..20: mol_type = other DNA
cctataataaagcaggaact

SEQ ID NO: 7092 - DNA, 20 bp, synthetic construct
  misc_feature 1..20: note = Description of Artificial Sequence: Synthetic oligonucleotide
  misc_feature 1..20: note = Target: ANGPTL4; (-) strand; PAM type: NRG; PAM sequence: AGG
  source 1..20: mol_type = other DNA
agctttgcctataataaagc

SEQ ID NO: 7093 - DNA, 20 bp, synthetic construct
  misc_feature 1..20: note = Description of Artificial Sequence: Synthetic oligonucleotide
  misc_feature 1..20: note = Target: ANGPTL4; (-) strand; PAM type: NRG; PAM sequence: CAG
  source 1..20: mol_type = other DNA
gagctttgcctataataaag

SEQ ID NO: 7094 - DNA, 20 bp, synthetic construct
  misc_feature 1..20: note = Description of Artificial Sequence: Synthetic oligonucleotide
  misc_feature 1..20: note = Target: ANGPTL4; (-) strand; PAM type: NRG; PAM sequence: AAG
  source 1..20: mol_type = other DNA
cctgagctttgcctataata

SEQ ID NO: 7095 - DNA, 20 bp, synthetic construct
  misc_feature 1..20: note = Description of Artificial Sequence: Synthetic oligonucleotide
  misc_feature 1..20: note = Target: ANGPTL4; (-) strand; PAM type: NRG; PAM sequence: GAG
  source 1..20: mol_type = other DNA
gccagggtctttaatgtcct

SEQ ID NO: 7096 - DNA, 20 bp, synthetic construct
  misc_feature 1..20: note = Description of Artificial Sequence: Synthetic oligonucleotide
  misc_feature 1..20: note = Target: ANGPTL4; (-) strand; PAM type: NRG; PAM sequence: GGG
  source 1..20: mol_type = other DNA
tagcctaccctctaccgcca

SEQ ID NO: 7097 - DNA, 20 bp, synthetic construct
  misc_feature 1..20: note = Description of Artificial Sequence: Synthetic oligonucleotide
  misc_feature 1..20: note = Target: ANGPTL4; (-) strand; PAM type: NRG; PAM sequence: AGG
  source 1..20: mol_type = other DNA
atagcctaccctctaccgcc

SEQ ID NO: 7098 - DNA, 20 bp, synthetic construct
  misc_feature 1..20: note = Description of Artificial Sequence: Synthetic oligonucleotide
  misc_feature 1..20: note = Target: ANGPTL4; (-) strand; PAM type: NRG; PAM sequence: CAG
  source 1..20: mol_type = other DNA
catagcctaccctctaccgc

SEQ ID NO: 7099 - DNA, 20 bp, synthetic construct
  misc_feature 1..20: note = Description of Artificial Sequence: Synthetic oligonucleotide
  misc_feature 1..20: note = Target: ANGPTL4; (-) strand; PAM type: NRG; PAM sequence: TAG
  source 1..20: mol_type = other DNA
ggatcagggcctcaccccca

SEQ ID NO: 7100 - DNA, 20 bp, synthetic construct
  misc_feature 1..20: note = Description of Artificial Sequence: Synthetic oligonucleotide
  misc_feature 1..20: note = Target: ANGPTL4; (-) strand; PAM type: NRG; PAM sequence: GGG
  source 1..20: mol_type = other DNA
tagcggcaggacttggatca

SEQ ID NO: 7101 - DNA, 20 bp, synthetic construct
  misc_feature 1..20: note = Description of Artificial Sequence: Synthetic oligonucleotide
  misc_feature 1..20: note = Target: ANGPTL4; (-) strand; PAM type: NRG; PAM sequence: AGG
  source 1..20: mol_type = other DNA
ttagcggcaggacttggatc

SEQ ID NO: 7102 - DNA, 20 bp, synthetic construct
  misc_feature 1..20: note = Description of Artificial Sequence: Synthetic oligonucleotide
  misc_feature 1..20: note = Target: ANGPTL4; (-) strand; PAM type: NRG; PAM sequence: CAG
  source 1..20: mol_type = other DNA
cttagcggcaggacttggat

SEQ ID NO: 7103 - DNA, 20 bp, synthetic construct
  misc_feature 1..20: note = Description of Artificial Sequence: Synthetic oligonucleotide
  misc_feature 1..20: note = Target: ANGPTL4; (-) strand; PAM type: NRG; PAM sequence: TGG
  source 1..20: mol_type = other DNA
agtgccttagcggcaggact

SEQ ID NO: 7104 - DNA, 20 bp, synthetic construct
  misc_feature 1..20: note = Description of Artificial Sequence: Synthetic oligonucleotide
  misc_feature 1..20: note = Target: ANGPTL4; (-) strand; PAM type: NRG; PAM sequence: AGG
  source 1..20: mol_type = other DNA
attatgagtgccttagcggc

SEQ ID NO: 7105 - DNA, 20 bp, synthetic construct
  misc_feature 1..20: note = Description of Artificial Sequence: Synthetic oligonucleotide
  misc_feature 1..20: note = Target: ANGPTL4; (-) strand; PAM type: NRG; PAM sequence: CAG
  source 1..20: mol_type = other DNA
aattatgagtgccttagcgg

SEQ ID NO: 7106 - DNA, 20 bp, synthetic construct
  misc_feature 1..20: note = Description of Artificial Sequence: Synthetic oligonucleotide
  misc_feature 1..20: note = Target: ANGPTL4; (-) strand; PAM type: NRG; PAM sequence: CGG
  source 1..20: mol_type = other DNA
cgaaattatgagtgccttag

SEQ ID NO: 7107 - DNA, 20 bp, synthetic construct
  misc_feature 1..20: note = Description of Artificial Sequence: Synthetic oligonucleotide
  misc_feature 1..20: note = Target: ANGPTL4; (-) strand; PAM type: NRG; PAM sequence: TAG
  source 1..20: mol_type = other DNA
gcccgaaattatgagtgcct

SEQ ID NO: 7108 - DNA, 20 bp, synthetic construct
  misc_feature 1..20: note = Description of Artificial Sequence: Synthetic oligonucleotide
  misc_feature 1..20: note = Target: ANGPTL4; (-) strand; PAM type: NRG; PAM sequence: GAG
  source 1..20: mol_type = other DNA
tcccctgagcccgaaattat

SEQ ID NO: 7109 - DNA, 20 bp, synthetic construct
  misc_feature 1..20: note = Description of Artificial Sequence: Synthetic oligonucleotide
  misc_feature 1..20: note = Target: ANGPTL4; (-) strand; PAM type: NRG; PAM sequence: GAG
  source 1..20: mol_type = other DNA
ttgacttccatttctcccct

SEQ ID NO: 7110 - DNA, 20 bp, synthetic construct
  misc_feature 1..20: note = Description of Artificial Sequence: Synthetic oligonucleotide
  misc_feature 1..20: note = Target: ANGPTL4; (-) strand; PAM type: NRG; PAM sequence: GAG
  source 1..20: mol_type = other DNA
gtcatcgcagctgtgtttat

SEQ ID NO: 7111 - DNA, 20 bp, synthetic construct
  misc_feature 1..20: note = Description of Artificial Sequence: Synthetic oligonucleotide
  misc_feature 1..20: note = Target: ANGPTL4; (-) strand; PAM type: NRG; PAM sequence: CAG
  source 1..20: mol_type = other DNA
cgtgaaagggttcgtcatcg

SEQ ID NO: 7112 - DNA, 20 bp, synthetic construct
  misc_feature 1..20: note = Description of Artificial Sequence: Synthetic oligonucleotide
  misc_feature 1..20: note = Target: ANGPTL4; (-) strand; PAM type: NRG; PAM sequence: GGG
  source 1..20: mol_type = other DNA
gcatgttccttcccgtgaaa

SEQ ID NO: 7113 - DNA, 20 bp, synthetic construct
  misc_feature 1..20: note = Description of Artificial Sequence: Synthetic oligonucleotide
  misc_feature 1..20: note = Target: ANGPTL4; (-) strand; PAM type: NRG; PAM sequence: AGG
  source 1..20: mol_type = other DNA
cgcatgttccttcccgtgaa

SEQ ID NO: 7114 - DNA, 20 bp, synthetic construct
  misc_feature 1..20: note = Description of Artificial Sequence: Synthetic oligonucleotide
  misc_feature 1..20: note = Target: ANGPTL4; (-) strand; PAM type: NRG; PAM sequence: AAG
  source 1..20: mol_type = other DNA
tcgcatgttccttcccgtga

SEQ ID NO: 7115 - DNA, 20 bp, synthetic construct
  misc_feature 1..20: note = Description of Artificial Sequence: Synthetic oligonucleotide
  misc_feature 1..20: note = Target: ANGPTL4; (-) strand; PAM type: NRG; PAM sequence: GGG
  source 1..20: mol_type = other DNA
agaccaggagagacttttct

SEQ ID NO: 7116 - DNA, 20 bp, synthetic construct
  misc_feature 1..20: note = Description of Artificial Sequence: Synthetic oligonucleotide
  misc_feature 1..20: note = Target: ANGPTL4; (-) strand; PAM type: NRG; PAM sequence: TGG
  source 1..20: mol_type = other DNA
aagaccaggagagacttttc

SEQ ID NO: 7117 - DNA, 20 bp, synthetic construct
  misc_feature 1..20: note = Description of Artificial Sequence: Synthetic oligonucleotide
  misc_feature 1..20: note = Target: ANGPTL4; (-) strand; PAM type: NRG; PAM sequence: GAG
  source 1..20: mol_type = other DNA
cctccatcccaagaccagga

SEQ ID NO: 7118 - DNA, 20 bp, synthetic construct
  misc_feature 1..20: note = Description of Artificial Sequence: Synthetic oligonucleotide
  misc_feature 1..20: note = Target: ANGPTL4; (-) strand; PAM type: NRG; PAM sequence: GAG
  source 1..20: mol_type = other DNA
gacctccatcccaagaccag

SEQ ID NO: 7119 - DNA, 20 bp, synthetic construct
  misc_feature 1..20: note = Description of Artificial Sequence: Synthetic oligonucleotide
  misc_feature 1..20: note = Target: ANGPTL4; (-) strand; PAM type: NRG; PAM sequence: AGG
  source 1..20: mol_type = other DNA
gtgacctccatcccaagacc

SEQ ID NO: 7120 - DNA, 20 bp, synthetic construct
  misc_feature 1..20: note = Description of Artificial Sequence: Synthetic oligonucleotide
  misc_feature 1..20: note = Target: ANGPTL4; (-) strand; PAM type: NRG; PAM sequence: CAG
  source 1..20: mol_type = other DNA
tgtgacctccatcccaagac

SEQ ID NO: 7121 - DNA, 20 bp, synthetic construct
  misc_feature 1..20: note = Description of Artificial Sequence: Synthetic oligonucleotide
  misc_feature 1..20: note = Target: ANGPTL4; (-) strand; PAM type: NRG; PAM sequence: AAG
  source 1..20: mol_type = other DNA
cttcgtgtgacctccatccc

SEQ ID NO: 7122 - DNA, 20 bp, synthetic construct
  misc_feature 1..20: note = Description of Artificial Sequence: Synthetic oligonucleotide
  misc_feature 1..20: note = Target: ANGPTL4; (-) strand; PAM type: NRG; PAM sequence: AGG
  source 1..20: mol_type = other DNA
caaaagtccttgccttgcgg

SEQ ID NO: 7123 - DNA, 20 bp, synthetic construct
  misc_feature 1..20: note = Description of Artificial Sequence: Synthetic oligonucleotide
  misc_feature 1..20: note = Target: ANGPTL4; (-) strand; PAM type: NRG; PAM sequence: GAG
  source 1..20: mol_type = other DNA
ccaaaagtccttgccttgcg

SEQ ID NO: 7124 - DNA, 20 bp, synthetic construct
  misc_feature 1..20: note = Description of Artificial Sequence: Synthetic oligonucleotide
  misc_feature 1..20: note = Target: ANGPTL4; (-) strand; PAM type: NRG; PAM sequence: CGG
  source 1..20: mol_type = other DNA
caccaaaagtccttgccttg

SEQ ID NO: 7125 - DNA, 20 bp, synthetic construct
  misc_feature 1..20: note = Description of Artificial Sequence: Synthetic oligonucleotide
  misc_feature 1..20: note = Target: ANGPTL4; (-) strand; PAM type: NRG; PAM sequence: AAG
  source 1..20: mol_type = other DNA
cggagcccggaactcaccaa

SEQ ID NO: 7126 - DNA, 20 bp, synthetic construct
  misc_feature 1..20: note = Description of Artificial Sequence: Synthetic oligonucleotide
  misc_feature 1..20: note = Target: ANGPTL4; (-) strand; PAM type: NRG; PAM sequence: CGG
  source 1..20: mol_type = other DNA
gagctgagttcagcggagcc

SEQ ID NO: 7127 - DNA, 20 bp, synthetic construct
  misc_feature 1..20: note = Description of Artificial Sequence: Synthetic oligonucleotide
  misc_feature 1..20: note = Target: ANGPTL4; (-) strand; PAM type: NRG; PAM sequence: GAG
  source 1..20: mol_type = other DNA
aaaaagagctgagttcagcg

SEQ ID NO: 7128 - DNA, 20 bp, synthetic construct
  misc_feature 1..20: note = Description of Artificial Sequence: Synthetic oligonucleotide
  misc_feature 1..20: note = Target: ANGPTL4; (-) strand; PAM type: NRG; PAM sequence: CGG
  source 1..20: mol_type = other DNA
agaaaaagagctgagttcag

SEQ ID NO: 7129 - DNA, 20 bp, synthetic construct
  misc_feature 1..20: note = Description of Artificial Sequence: Synthetic oligonucleotide
  misc_feature 1..20: note = Target: ANGPTL4; (-) strand; PAM type: NRG; PAM sequence: CAG
  source 1..20: mol_type = other DNA
aaaagaaaaagagctgagtt

SEQ ID NO: 7130 - DNA, 20 bp, synthetic construct
  misc_feature 1..20: note = Description of Artificial Sequence: Synthetic oligonucleotide
  misc_feature 1..20: note = Target: ANGPTL4; (-) strand; PAM type: NRG; PAM sequence: GAG
  source 1..20: mol_type = other DNA
gaaggaaaagaaaaagagct

SEQ ID NO: 7131 - DNA, 20 bp, synthetic construct
  misc_feature 1..20: note = Description of Artificial Sequence: Synthetic oligonucleotide
  misc_feature 1..20: note = Target: ANGPTL4; (-) strand; PAM type: NRG; PAM sequence: GAG
  source 1..20: mol_type = other DNA
gaaaggaaggaaaagaaaaa

SEQ ID NO: 7132 - DNA, 20 bp, synthetic construct
  misc_feature 1..20: note = Description of Artificial Sequence: Synthetic oligonucleotide
  misc_feature 1..20: note = Target: ANGPTL4; (-) strand; PAM type: NRG; PAM sequence: AAG
  source 1..20: mol_type = other DNA
aagaaaggaaggaaaagaaa

SEQ ID NO: 7133 - DNA, 20 bp, synthetic construct
  misc_feature 1..20: note = Description of Artificial Sequence: Synthetic oligonucleotide
  misc_feature 1..20: note = Target: ANGPTL4; (-) strand; PAM type: NRG; PAM sequence: AAG
  source 1..20: mol_type = other DNA
gaaggaaagaaaggaaggaa

SEQ ID NO: 7134 - DNA, 20 bp, synthetic construct
  misc_feature 1..20: note = Description of Artificial Sequence: Synthetic oligonucleotide
  misc_feature 1..20: note = Target: ANGPTL4; (-) strand; PAM type: NRG; PAM sequence: AGG
  source 1..20: mol_type = other DNA
aggaagaaggaaagaaagga

SEQ ID NO: 7135 - DNA, 20 bp, synthetic construct
  misc_feature 1..20: note = Description of Artificial Sequence: Synthetic oligonucleotide
  misc_feature 1..20: note = Target: ANGPTL4; (-) strand; PAM type: NRG; PAM sequence: AAG
  source 1..20: mol_type = other DNA
aaggaagaaggaaagaaagg

SEQ ID NO: 7136 - DNA, 20 bp, synthetic construct
  misc_feature 1..20: note = Description of Artificial Sequence: Synthetic oligonucleotide
  misc_feature 1..20: note = Target: ANGPTL4; (-) strand; PAM type: NRG; PAM sequence: AGG
  source 1..20: mol_type = other DNA
agaaaggaagaaggaaagaa

SEQ ID NO: 7137 - DNA, 20 bp, synthetic construct
  misc_feature 1..20: note = Description of Artificial Sequence: Synthetic oligonucleotide
  misc_feature 1..20: note = Target: ANGPTL4; (-) strand; PAM type: NRG; PAM sequence: AAG
  source 1..20: mol_type = other DNA
aagaaaggaagaaggaaaga

SEQ ID NO: 7138 - DNA, 20 bp, synthetic construct
  misc_feature 1..20: note = Description of Artificial Sequence: Synthetic oligonucleotide
  misc_feature 1..20: note = Target: ANGPTL4; (-) strand; PAM type: NRG; PAM sequence: AAG
  source 1..20: mol_type = other DNA
gggaaagaaaggaagaagga

SEQ ID NO: 7139 - DNA, 20 bp, synthetic construct
  misc_feature 1..20: note = Description of Artificial Sequence: Synthetic oligonucleotide
  misc_feature 1..20: note = Target: ANGPTL4; (-) strand; PAM type: NRG; PAM sequence: AGG
  source 1..20: mol_type = other DNA
aggagggaaagaaaggaaga

SEQ ID NO: 7140 - DNA, 20 bp, synthetic construct
  misc_feature 1..20: note = Description of Artificial Sequence: Synthetic oligonucleotide
  misc_feature 1..20: note = Target: ANGPTL4; (-) strand; PAM type: NRG; PAM sequence: AAG
  source 1..20: mol_type = other DNA
aaggagggaaagaaaggaag

SEQ ID NO: 7141 - DNA, 20 bp, synthetic construct
  misc_feature 1..20: note = Description of Artificial Sequence: Synthetic oligonucleotide
  misc_feature 1..20: note = Target: ANGPTL4; (-) strand; PAM type: NRG; PAM sequence: AAG
  source 1..20: mol_type = other DNA
aggaaggagggaaagaaagg

SEQ ID NO: 7142 - DNA, 20 bp, synthetic construct
  misc_feature 1..20: note = Description of Artificial Sequence: Synthetic oligonucleotide
  misc_feature 1..20: note = Target: ANGPTL4; (-) strand; PAM type: NRG; PAM sequence: AGG
  source 1..20: mol_type = other DNA
ggaaggaaggagggaaagaa

SEQ ID NO: 7143 - DNA, 20 bp, synthetic construct
  misc_feature 1..20: note = Description of Artificial Sequence: Synthetic oligonucleotide
  misc_feature 1..20: note = Target: ANGPTL4; (-) strand; PAM type: NRG; PAM sequence: AAG
  source 1..20: mol_type = other DNA
aggaaggaaggagggaaaga

SEQ ID NO: 7144 - DNA, 20 bp, synthetic construct
  misc_feature 1..20: note = Description of Artificial Sequence: Synthetic oligonucleotide
  misc_feature 1..20: note = Target: ANGPTL4; (-) strand; PAM type: NRG; PAM sequence: AAG
  source 1..20: mol_type = other DNA
aggaaggaaggaaggaggga

SEQ ID NO: 7145 - DNA, 20 bp, synthetic construct
  misc_feature 1..20: note = Description of Artificial Sequence: Synthetic oligonucleotide
  misc_feature 1..20: note = Target: ANGPTL4; (-) strand; PAM type: NRG; PAM sequence: GGG
  source 1..20: mol_type = other DNA
aaagaggaaggaaggaagga

SEQ ID NO: 7146 - DNA, 20 bp, synthetic construct
  misc_feature 1..20: note = Description of Artificial Sequence: Synthetic oligonucleotide
  misc_feature 1..20: note = Target: ANGPTL4; (-) strand; PAM type: NRG; PAM sequence: AGG
  source 1..20: mol_type = other DNA
gaaagaggaaggaaggaagg

SEQ ID NO: 7147 - DNA, 20 bp, synthetic construct
  misc_feature 1..20: note = Description of Artificial Sequence: Synthetic oligonucleotide
  misc_feature 1..20: note = Target: ANGPTL4; (-) strand; PAM type: NRG; PAM sequence: GAG
  source 1..20: mol_type = other DNA
agaaagaggaaggaaggaag

SEQ ID NO: 7148 - DNA, 20 bp, synthetic construct
  misc_feature 1..20: note = Description of Artificial Sequence: Synthetic oligonucleotide
  misc_feature 1..20: note = Target: ANGPTL4; (-) strand; PAM type: NRG; PAM sequence: AGG
  source 1..20: mol_type = other DNA
agagaaagaggaaggaagga

SEQ ID NO: 7149 - DNA, 20 bp, synthetic construct
  misc_feature 1..20: note = Description of Artificial Sequence: Synthetic oligonucleotide
  misc_feature 1..20: note = Target: ANGPTL4; (-) strand; PAM type: NRG; PAM sequence: AAG
  source 1..20: mol_type = other DNA
gagagaaagaggaaggaagg

SEQ ID NO: 7150 - DNA, 20 bp, synthetic construct
  misc_feature 1..20: note = Description of Artificial Sequence: Synthetic oligonucleotide
  misc_feature 1..20: note = Target: ANGPTL4; (-) strand; PAM type: NRG; PAM sequence: AGG
  source 1..20: mol_type = other DNA
aaagagagaaagaggaagga

SEQ ID NO: 7151 - DNA, 20 bp, synthetic construct
  misc_feature 1..20: note = Description of Artificial Sequence: Synthetic oligonucleotide
  misc_feature 1..20: note = Target: ANGPTL4; (-) strand; PAM type: NRG; PAM sequence: AAG
  source 1..20: mol_type = other DNA
gaaagagagaaagaggaagg

SEQ ID NO: 7152 - DNA, 20 bp, synthetic construct
  misc_feature 1..20: note = Description of Artificial Sequence: Synthetic oligonucleotide
  misc_feature 1..20: note = Target: ANGPTL4; (-) strand; PAM type: NRG; PAM sequence: AGG
  source 1..20: mol_type = other DNA
aaggaaagagagaaagagga

SEQ ID NO: 7153 - DNA, 20 bp, synthetic construct
  misc_feature 1..20: note = Description of Artificial Sequence: Synthetic oligonucleotide
  misc_feature 1..20: note = Target: ANGPTL4; (-) strand; PAM type: NRG; PAM sequence: AAG
  source 1..20: mol_type = other DNA
aaaggaaagagagaaagagg

SEQ ID NO: 7154 - DNA, 20 bp, synthetic construct
  misc_feature 1..20: note = Description of Artificial Sequence: Synthetic oligonucleotide
  misc_feature 1..20: note = Target: ANGPTL4; (-) strand; PAM type: NRG; PAM sequence: AGG
  source 1..20: mol_type = other DNA
gagaaaggaaagagagaaag

SEQ ID NO: 7155 - DNA, 20 bp, synthetic construct
  misc_feature 1..20: note = Description of Artificial Sequence: Synthetic oligonucleotide
  misc_feature 1..20: note = Target: ANGPTL4; (-) strand; PAM type: NRG; PAM sequence: GAG
  source 1..20: mol_type = other DNA
agagaaaggaaagagagaaa

SEQ ID NO: 7156 - DNA, 20 bp, synthetic construct
  misc_feature 1..20: note = Description of Artificial Sequence: Synthetic oligonucleotide
  misc_feature 1..20: note = Target: ANGPTL4; (-) strand; PAM type: NRG; PAM sequence: AAG
  source 1..20: mol_type = other DNA
agagagaaaggaaagagaga

SEQ ID NO: 7157 - DNA, 20 bp, synthetic construct
  misc_feature 1..20: note = Description of Artificial Sequence: Synthetic oligonucleotide
  misc_feature 1..20: note = Target: ANGPTL4; (-) strand; PAM type: NRG; PAM sequence: GAG
  source 1..20: mol_type = other DNA
agagagagagaaaggaaaga

SEQ ID NO: 7158 - DNA, 20 bp, synthetic construct
  misc_feature 1..20: note = Description of Artificial Sequence: Synthetic oligonucleotide
  misc_feature 1..20: note = Target: ANGPTL4; (-) strand; PAM type: NRG; PAM sequence: GAG
  source 1..20: mol_type = other DNA
aaagagagagagaaaggaaa

SEQ ID NO: 7159 - DNA, 20 bp, synthetic construct
  misc_feature 1..20: note = Description of Artificial Sequence: Synthetic oligonucleotide
  misc_feature 1..20: note = Target: ANGPTL4; (-) strand; PAM type: NRG; PAM sequence: AAG
  source 1..20: mol_type = other DNA
gaaaagagagagagaaagga

SEQ ID NO: 7160 - DNA, 20 bp, synthetic construct
  misc_feature 1..20: note = Description of Artificial Sequence: Synthetic oligonucleotide
  misc_feature 1..20: note = Target: ANGPTL4; (-) strand; PAM type: NRG; PAM sequence: AGG
  source 1..20: mol_type = other DNA
gagagaaaagagagagagaa

SEQ ID NO: 7161 - DNA, 20 bp, synthetic construct
  misc_feature 1..20: note = Description of Artificial Sequence: Synthetic oligonucleotide
  misc_feature 1..20: note = Target: ANGPTL4; (-) strand; PAM type: NRG; PAM sequence: AAG
  source 1..20: mol_type = other DNA
agagagaaaagagagagaga

SEQ ID NO: 7162 - DNA, 20 bp, synthetic construct
  misc_feature 1..20: note = Description of Artificial Sequence: Synthetic oligonucleotide
  misc_feature 1..20: note = Target: ANGPTL4; (-) strand; PAM type: NRG; PAM sequence: GAG
  source 1..20: mol_type = other DNA
agagagagagaaaagagaga

SEQ ID NO: 7163 - DNA, 20 bp, synthetic construct
  misc_feature 1..20: note = Description of Artificial Sequence: Synthetic oligonucleotide
  misc_feature 1..20: note = Target: ANGPTL4; (-) strand; PAM type: NRG; PAM sequence: GAG
  source 1..20: mol_type = other DNA
agagagagagagaaaagaga

SEQ ID NO: 7164 - DNA, 20 bp, synthetic construct
  misc_feature 1..20: note = Description of Artificial Sequence: Synthetic oligonucleotide
  misc_feature 1..20: note = Target: ANGPTL4; (-) strand; PAM type: NRG; PAM sequence: GAG
  source 1..20: mol_type = other DNA
ggagagagagagagaaaaga

SEQ ID NO: 7165 - DNA, 20 bp, synthetic construct
  misc_feature 1..20: note = Description of Artificial Sequence: Synthetic oligonucleotide
  misc_feature 1..20: note = Target: ANGPTL4; (-) strand; PAM type: NRG; PAM sequence: GAG
  source 1..20: mol_type = other DNA
aaggagagagagagagaaaa

SEQ ID NO: 7166 - DNA, 20 bp, synthetic construct
  misc_feature 1..20: note = Description of Artificial Sequence: Synthetic oligonucleotide
  misc_feature 1..20: note = Target: ANGPTL4; (-) strand; PAM type: NRG; PAM sequence: AAG
  source 1..20: mol_type = other DNA
agaaggagagagagagagaa

SEQ ID NO: 7167 - DNA, 20 bp, synthetic construct
  misc_feature 1..20: note = Description of Artificial Sequence: Synthetic oligonucleotide
  misc_feature 1..20: note = Target: ANGPTL4; (-) strand; PAM type: NRG; PAM sequence: GAG
  source 1..20: mol_type = other DNA
agggaagaaggagagagaga

SEQ ID NO: 7168 - DNA, 20 bp, synthetic construct
  misc_feature 1..20: note = Description of Artificial Sequence: Synthetic oligonucleotide
  misc_feature 1..20: note = Target: ANGPTL4; (-) strand; PAM type: NRG; PAM sequence: GAG
  source 1..20: mol_type = other DNA
ggagggaagaaggagagaga

SEQ ID NO: 7169 - DNA, 20 bp, synthetic construct
  misc_feature 1..20: note = Description of Artificial Sequence: Synthetic oligonucleotide
  misc_feature 1..20: note = Target: ANGPTL4; (-) strand; PAM type: NRG; PAM sequence: GAG
  source 1..20: mol_type = other DNA
agggagggaagaaggagaga

SEQ ID NO: 7170 - DNA, 20 bp, synthetic construct
  misc_feature 1..20: note = Description of Artificial Sequence: Synthetic oligonucleotide
  misc_feature 1..20: note = Target: ANGPTL4; (-) strand; PAM type: NRG; PAM sequence: GAG
  source 1..20: mol_type = other DNA
ggagggagggaagaaggaga

SEQ ID NO: 7171 - DNA, 20 bp, synthetic construct
  misc_feature 1..20: note = Description of Artificial Sequence: Synthetic oligonucleotide
  misc_feature 1..20: note = Target: ANGPTL4; (-) strand; PAM type: NRG; PAM sequence: GAG
  source 1..20: mol_type = other DNA
agggagggagggaagaagga

SEQ ID NO: 7172 - DNA, 20 bp, synthetic construct
  misc_feature 1..20: note = Description of Artificial Sequence: Synthetic oligonucleotide
  misc_feature 1..20: note = Target: ANGPTL4; (-) strand; PAM type: NRG; PAM sequence: GAG
  source 1..20: mol_type = other DNA
gtagggagggagggaagaag

SEQ ID NO: 7173 - DNA, 20 bp, synthetic construct
  misc_feature 1..20: note = Description of Artificial Sequence: Synthetic oligonucleotide
  misc_feature 1..20: note = Target: ANGPTL4; (-) strand; PAM type: NRG; PAM sequence: AGG
  source 1..20: mol_type = other DNA
aggtagggagggagggaaga

SEQ ID NO: 7174 - DNA, 20 bp, synthetic construct
  misc_feature 1..20: note = Description of Artificial Sequence: Synthetic oligonucleotide
  misc_feature 1..20: note = Target: ANGPTL4; (-) strand; PAM type: NRG; PAM sequence: AAG
  source 1..20: mol_type = other DNA
gaggtagggagggagggaag

SEQ ID NO: 7175 - DNA, 20 bp, synthetic construct
  misc_feature 1..20: note = Description of Artificial Sequence: Synthetic oligonucleotide
  misc_feature 1..20: note = Target: ANGPTL4; (-) strand; PAM type: NRG; PAM sequence: AAG
  source 1..20: mol_type = other DNA
agagaggtagggagggaggg

SEQ ID NO: 7176 - DNA, 20 bp, synthetic construct
  misc_feature 1..20: note = Description of Artificial Sequence: Synthetic oligonucleotide
  misc_feature 1..20: note = Target: ANGPTL4; (-) strand; PAM type: NRG; PAM sequence: GGG
  source 1..20: mol_type = other DNA
gagagagaggtagggaggga

SEQ ID NO: 7177 - DNA, 20 bp, synthetic construct
  misc_feature 1..20: note = Description of Artificial Sequence: Synthetic oligonucleotide
  misc_feature 1..20: note = Target: ANGPTL4; (-) strand; PAM type: NRG; PAM sequence: AGG
  source 1..20: mol_type = other DNA
agagagagaggtagggaggg

SEQ ID NO: 7178 - DNA, 20 bp, synthetic construct
  misc_feature 1..20: note = Description of Artificial Sequence: Synthetic oligonucleotide
  misc_feature 1..20: note = Target: ANGPTL4; (-) strand; PAM type: NRG; PAM sequence: GAG
  source 1..20: mol_type = other DNA
aagagagagaggtagggagg

SEQ ID NO: 7179 - DNA, 20 bp, synthetic construct
  misc_feature 1..20: note = Description of Artificial Sequence: Synthetic oligonucleotide
  misc_feature 1..20: note = Target: ANGPTL4; (-) strand; PAM type: NRG; PAM sequence: GGG
  source 1..20: mol_type = other DNA
aaaagagagagaggtaggga

SEQ ID NO: 7180 - DNA, 20 bp, synthetic construct
  misc_feature 1..20: note = Description of Artificial Sequence: Synthetic oligonucleotide
  misc_feature 1..20: note = Target: ANGPTL4; (-) strand; PAM type: NRG; PAM sequence: AGG
  source 1..20: mol_type = other DNA
gaaaagagagagaggtaggg

SEQ ID NO: 7181 - DNA, 20 bp, synthetic construct
  misc_feature 1..20: note = Description of Artificial Sequence: Synthetic oligonucleotide
  misc_feature 1..20: note = Target: ANGPTL4; (-) strand; PAM type: NRG; PAM sequence: GAG
  source 1..20: mol_type = other DNA
agaaaagagagagaggtagg

SEQ ID NO: 7182 - DNA, 20 bp, synthetic construct
  misc_feature 1..20: note = Description of Artificial Sequence: Synthetic oligonucleotide
  misc_feature 1..20: note = Target: ANGPTL4; (-) strand; PAM type: NRG; PAM sequence: GGG
  source 1..20: mol_type = other DNA
aaagaaaagagagagaggta

SEQ ID NO: 7183 - DNA, 20 bp, synthetic construct
  misc_feature 1..20: note = Description of Artificial Sequence: Synthetic oligonucleotide
  misc_feature 1..20: note = Target: ANGPTL4; (-) strand; PAM type: NRG; PAM sequence: AGG
  source 1..20: mol_type = other DNA
aaaagaaaagagagagaggt

SEQ ID NO: 7184 - DNA, 20 bp, synthetic construct
  misc_feature 1..20: note = Description of Artificial Sequence: Synthetic oligonucleotide
  misc_feature 1..20: note = Target: ANGPTL4; (-) strand; PAM type: NRG; PAM sequence: TAG
  source 1..20: mol_type = other DNA
aaaaagaaaagagagagagg

SEQ ID NO: 7185 - DNA, 20 bp, synthetic construct
  misc_feature 1..20: note = Description of Artificial Sequence: Synthetic oligonucleotide
  misc_feature 1..20: note = Target: ANGPTL4; (-) strand; PAM type: NRG; PAM sequence: AGG
  source 1..20: mol_type = other DNA
cggaaaaagaaaagagagag

SEQ ID NO: 7186 - DNA, 20 bp, synthetic construct
  misc_feature 1..20: note = Description of Artificial Sequence: Synthetic oligonucleotide
  misc_feature 1..20: note = Target: ANGPTL4; (-) strand; PAM type: NRG; PAM sequence: GAG
  source 1..20: mol_type = other DNA
acggaaaaagaaaagagaga

SEQ ID NO: 7187 - DNA, 20 bp, synthetic construct
  misc_feature 1..20: note = Description of Artificial Sequence: Synthetic oligonucleotide
  misc_feature 1..20: note = Target: ANGPTL4; (-) strand; PAM type: NRG; PAM sequence: GAG
  source 1..20: mol_type = other DNA
ggacggaaaaagaaaagaga

SEQ ID NO: 7188 - DNA, 20 bp, synthetic construct
  misc_feature 1..20: note = Description of Artificial Sequence: Synthetic oligonucleotide
  misc_feature 1..20: note = Target: ANGPTL4; (-) strand; PAM type: NRG; PAM sequence: GAG
  source 1..20: mol_type = other DNA
aaggacggaaaaagaaaaga

SEQ ID NO: 7189 - DNA, 20 bp, synthetic construct
  misc_feature 1..20: note = Description of Artificial Sequence: Synthetic oligonucleotide
  misc_feature 1..20: note = Target: ANGPTL4; (-) strand; PAM type: NRG; PAM sequence: GAG
  source 1..20: mol_type = other DNA
ggaaggacggaaaaagaaaa

SEQ ID NO: 7190 - DNA, 20 bp, synthetic construct
  misc_feature 1..20: note = Description of Artificial Sequence: Synthetic oligonucleotide
  misc_feature 1..20: note = Target: ANGPTL4; (-) strand; PAM type: NRG; PAM sequence: AAG
  source 1..20: mol_type = other DNA
aaggaaggacggaaaaagaa

SEQ ID NO: 7191 - DNA, 20 bp, synthetic construct
  misc_feature 1..20: note = Description of Artificial Sequence: Synthetic oligonucleotide
  misc_feature 1..20: note = Target: ANGPTL4; (-) strand; PAM type: NRG; PAM sequence: AAG
  source 1..20: mol_type = other DNA
gaaggaaggaaggacggaaa

SEQ ID NO: 7192 - DNA, 20 bp, synthetic construct
  misc_feature 1..20: note = Description of Artificial Sequence: Synthetic oligonucleotide
  misc_feature 1..20: note = Target: ANGPTL4; (-) strand; PAM type: NRG; PAM sequence: CGG
  source 1..20: mol_type = other DNA
aggaaagaaggaaggaagga

SEQ ID NO: 7193 - DNA, 20 bp, synthetic construct
  misc_feature 1..20: note = Description of Artificial Sequence: Synthetic oligonucleotide
  misc_feature 1..20: note = Target: ANGPTL4; (-) strand; PAM type: NRG; PAM sequence: AGG
  source 1..20: mol_type = other DNA
aagaaggaaagaaggaagga

SEQ ID NO: 7194 - DNA, 20 bp, synthetic construct
  misc_feature 1..20: note = Description of Artificial Sequence: Synthetic oligonucleotide
  misc_feature 1..20: note = Target: ANGPTL4; (-) strand; PAM type: NRG; PAM sequence: AAG
  source 1..20: mol_type = other DNA
aaagaaggaaagaaggaagg

SEQ ID NO: 7195 - DNA, 20 bp, synthetic construct
  misc_feature 1..20: note = Description of Artificial Sequence: Synthetic oligonucleotide
  misc_feature 1..20: note = Target: ANGPTL4; (-) strand; PAM type: NRG; PAM sequence: AGG
  source 1..20: mol_type = other DNA
gagaaagaaggaaagaagga

SEQ ID NO: 7196 - DNA, 20 bp, synthetic construct
  misc_feature 1..20: note = Description of Artificial Sequence: Synthetic oligonucleotide
  misc_feature 1..20: note = Target: ANGPTL4; (-) strand; PAM type: NRG; PAM sequence: AAG
  source 1..20: mol_type = other DNA
agagaaagaaggaaagaagg

SEQ ID NO: 7197 - DNA, 20 bp, synthetic construct
  misc_feature 1..20: note = Description of Artificial Sequence: Synthetic oligonucleotide
  misc_feature 1..20: note = Target: ANGPTL4; (-) strand; PAM type: NRG; PAM sequence: AGG
  source 1..20: mol_type = other DNA
gagagagaaagaaggaaaga

SEQ ID NO: 7198 - DNA, 20 bp, synthetic construct
  misc_feature 1..20: note = Description of Artificial Sequence: Synthetic oligonucleotide
  misc_feature 1..20: note = Target: ANGPTL4; (-) strand; PAM type: NRG; PAM sequence: AAG
  source 1..20: mol_type = other DNA
agagagagaaagaaggaaag

SEQ ID NO: 7199 - DNA, 20 bp, synthetic construct
  misc_feature 1..20: note = Description of Artificial Sequence: Synthetic oligonucleotide
  misc_feature 1..20: note = Target: ANGPTL4; (-) strand; PAM type: NRG; PAM sequence: AAG
  source 1..20: mol_type = other DNA
aaaagagagagaaagaagga

SEQ ID NO: 7200 - DNA, 20 bp, synthetic construct
  misc_feature 1..20: note = Description of Artificial Sequence: Synthetic oligonucleotide
  misc_feature 1..20: note = Target: ANGPTL4; (-) strand; PAM type: NRG; PAM sequence: AGG
  source 1..20: mol_type = other DNA
aaagaaaagagagagaaaga

SEQ ID NO: 7201 - DNA, 20 bp, synthetic construct
  misc_feature 1..20: note = Description of Artificial Sequence: Synthetic oligonucleotide
  misc_feature 1..20: note = Target: ANGPTL4; (-) strand; PAM type: NRG; PAM sequence: AAG
  source 1..20: mol_type = other DNA
gaaagaaaagagagagaaag

SEQ ID NO: 7202 - DNA, 20 bp, synthetic construct
  misc_feature 1..20: note = Description of Artificial Sequence: Synthetic oligonucleotide
  misc_feature 1..20: note = Target: ANGPTL4; (-) strand; PAM type: NRG; PAM sequence: AAG
  source 1..20: mol_type = other DNA
aaagaaagaaaagagagaga

SEQ ID NO: 7203 - DNA, 20 bp, synthetic construct
  misc_feature 1..20: note = Description of Artificial Sequence: Synthetic oligonucleotide
  misc_feature 1..20: note = Target: ANGPTL4; (-) strand; PAM type: NRG; PAM sequence: GAG
  source 1..20: mol_type = other DNA
aagaaaagaaagaaaagaga

SEQ ID NO: 7204 - DNA, 20 bp, synthetic construct
  misc_feature 1..20: note = Description of Artificial Sequence: Synthetic oligonucleotide
  misc_feature 1..20: note = Target: ANGPTL4; (-) strand; PAM type: NRG; PAM sequence: GAG
  source 1..20: mol_type = other DNA
aaaagaaaagaaagaaaaga

SEQ ID NO: 7205 - DNA, 20 bp, synthetic construct
  misc_feature 1..20: note = Description of Artificial Sequence: Synthetic oligonucleotide
  misc_feature 1..20: note = Target: ANGPTL4; (-) strand; PAM type: NRG; PAM sequence: GAG
  source 1..20: mol_type = other DNA
agaaaagaaaagaaagaaaa

SEQ ID NO: 7206 - DNA, 20 bp, synthetic construct
  misc_feature 1..20: note = Description of Artificial Sequence: Synthetic oligonucleotide
  misc_feature 1..20: note = Target: ANGPTL4; (-) strand; PAM type: NRG; PAM sequence: AAG
  source 1..20: mol_type = other DNA
aaagaaaagaaaagaaagaa

SEQ ID NO: 7207 - DNA, 20 bp, synthetic construct
  misc_feature 1..20: note = Description of Artificial Sequence: Synthetic oligonucleotide
  misc_feature 1..20: note = Target: ANGPTL4; (-) strand; PAM type: NRG; PAM sequence: AAG
  source 1..20: mol_type = other DNA
agagaaaagaaaagaaaaga

SEQ ID NO: 7208 - DNA, 20 bp, synthetic construct
  misc_feature 1..20: note = Description of Artificial Sequence: Synthetic oligonucleotide
  misc_feature 1..20: note = Target: ANGPTL4; (-) strand; PAM type: NRG; PAM sequence: AAG
  source 1..20: mol_type = other DNA
aagaagagaaaagaaaagaa

SEQ ID NO: 7209 - DNA, 20 bp, synthetic construct
  misc_feature 1..20: note = Description of Artificial Sequence: Synthetic oligonucleotide
  misc_feature 1..20: note = Target: ANGPTL4; (-) strand; PAM type: NRG; PAM sequence: AAG
  source 1..20: mol_type = other DNA
aatgaaagaagagaaaagaa

SEQ ID NO: 7210 - DNA, 20 bp, synthetic construct
  misc_feature 1..20: note = Description of Artificial Sequence: Synthetic oligonucleotide
  misc_feature 1..20: note = Target: ANGPTL4; (-) strand; PAM type: NRG; PAM sequence: AAG
  source 1..20: mol_type = other DNA
ctcaaaatgaaagaagagaa

SEQ ID NO: 7211 - DNA, 20 bp, synthetic construct
  misc_feature 1..20: note = Description of Artificial Sequence: Synthetic oligonucleotide
  misc_feature 1..20: note = Target: ANGPTL4; (-) strand; PAM type: NRG; PAM sequence: GAG
  source 1..20: mol_type = other DNA
tacgtctcaaaatgaaagaa

SEQ ID NO: 7212 - DNA, 20 bp, synthetic construct
  misc_feature 1..20: note = Description of Artificial Sequence: Synthetic oligonucleotide
  misc_feature 1..20: note = Target: ANGPTL4; (-) strand; PAM type: NRG; PAM sequence: AAG
  source 1..20: mol_type = other DNA
agtacgtctcaaaatgaaag

SEQ ID NO: 7213 - DNA, 20 bp, synthetic construct
  misc_feature 1..20: note = Description of Artificial Sequence: Synthetic oligonucleotide
  misc_feature 1..20: note = Target: ANGPTL4; (-) strand; PAM type: NRG; PAM sequence: AAG
  source 1..20: mol_type = other DNA
cagagtacgtctcaaaatga

SEQ ID NO: 7214 - DNA, 20 bp, synthetic construct
  misc_feature 1..20: note = Description of Artificial Sequence: Synthetic oligonucleotide
  misc_feature 1..20: note = Target: ANGPTL4; (-) strand; PAM type: NRG; PAM sequence: GAG
  source 1..20: mol_type = other DNA
cagcctgggcgacagagcca

SEQ ID NO: 7215 - DNA, 20 bp, synthetic construct
  misc_feature 1..20: note = Description of Artificial Sequence: Synthetic oligonucleotide
  misc_feature 1..20: note = Target: ANGPTL4; (-) strand; PAM type: NRG; PAM sequence: CAG
  source 1..20: mol_type = other DNA
tccagcctgggcgacagagc

SEQ ID NO: 7216 - DNA, 20 bp, synthetic construct
  misc_feature 1..20: note = Description of Artificial Sequence: Synthetic oligonucleotide
  misc_feature 1..20: note = Target: ANGPTL4; (-) strand; PAM type: NRG; PAM sequence: GAG
  source 1..20: mol_type = other DNA
gcgctccagcctgggcgaca

SEQ ID NO: 7217 - DNA, 20 bp, synthetic construct
  misc_feature 1..20: note = Description of Artificial Sequence: Synthetic oligonucleotide
  misc_feature 1..20: note = Target: ANGPTL4; (-) strand; PAM type: NRG; PAM sequence: CAG
  source 1..20: mol_type = other DNA
ttgcgctccagcctgggcga

SEQ ID NO: 7218 - DNA, 20 bp, synthetic construct
  misc_feature 1..20: note = Description of Artificial Sequence: Synthetic oligonucleotide
  misc_feature 1..20: note = Target: ANGPTL4; (-) strand; PAM type: NRG; PAM sequence: GGG
  source 1..20: mol_type = other DNA
gcgccattgcgctccagcct

SEQ ID NO: 7219 - DNA, 20 bp, synthetic construct
  misc_feature 1..20: note = Description of Artificial Sequence: Synthetic oligonucleotide
  misc_feature 1..20: note = Target: ANGPTL4; (-) strand; PAM type: NRG; PAM sequence: TGG
  source 1..20: mol_type = other DNA
ggcgccattgcgctccagcc

SEQ ID NO: 7220 - DNA, 20 bp, synthetic construct
  misc_feature 1..20: note = Description of Artificial Sequence: Synthetic oligonucleotide
  misc_feature 1..20: note = Target: ANGPTL4; (-) strand; PAM type: NRG; PAM sequence: CAG
  source 1..20: mol_type = other DNA
gagatggcgccattgcgctc

SEQ ID NO: 7221 - DNA, 20 bp, synthetic construct
  misc_feature 1..20: note = Description of Artificial Sequence: Synthetic oligonucleotide
  misc_feature 1..20: note = Target: ANGPTL4; (-) strand; PAM type: NRG; PAM sequence: TGG
  source 1..20: mol_type = other DNA
gaggttgcagtgcgccgaga

SEQ ID NO: 7222 - DNA, 20 bp, synthetic construct
  misc_feature 1..20: note = Description of Artificial Sequence: Synthetic oligonucleotide
  misc_feature 1..20: note = Target: ANGPTL4; (-) strand; PAM type: NRG; PAM sequence: GAG
  source 1..20: mol_type = other DNA
ggtggaggttgcagtgcgcc

SEQ ID NO: 7223 - DNA, 20 bp, synthetic construct
  misc_feature 1..20: note = Description of Artificial Sequence: Synthetic oligonucleotide
  misc_feature 1..20: note = Target: ANGPTL4; (-) strand; PAM type: NRG; PAM sequence: CAG
  source 1..20: mol_type = other DNA
aacccgggaggtggaggttg

SEQ ID NO: 7224 - DNA, 20 bp, synthetic construct
  misc_feature 1..20: note = Description of Artificial Sequence: Synthetic oligonucleotide
  misc_feature 1..20: note = Target: ANGPTL4; (-) strand; PAM type: NRG; PAM sequence: AGG
  source 1..20: mol_type = other DNA
cgcttgaacccgggaggtgg

SEQ ID NO: 7225 - DNA, 20 bp, synthetic construct
  misc_feature 1..20: note = Description of Artificial Sequence: Synthetic oligonucleotide
  misc_feature 1..20: note = Target: ANGPTL4; (-) strand; PAM type: NRG; PAM sequence: GAG
  source 1..20: mol_type = other DNA
tcgcttgaacccgggaggtg

SEQ ID NO: 7226 - DNA, 20 bp, synthetic construct
  misc_feature 1..20: note = Description of Artificial Sequence: Synthetic oligonucleotide
  misc_feature 1..20: note = Target: ANGPTL4; (-) strand; PAM type: NRG; PAM sequence: TGG
  source 1..20: mol_type = other DNA
aatcgcttgaacccgggagg

SEQ ID NO: 7227 - DNA, 20 bp, synthetic construct
  misc_feature 1..20: note = Description of Artificial Sequence: Synthetic oligonucleotide
  misc_feature 1..20: note = Target: ANGPTL4; (-) strand; PAM type: NRG; PAM sequence: AGG
  source 1..20: mol_type = other DNA
tagaatcgcttgaacccggg

SEQ ID NO: 7228 - DNA, 20 bp, synthetic construct
  misc_feature 1..20: note = Description of Artificial Sequence: Synthetic oligonucleotide
  misc_feature 1..20: note = Target: ANGPTL4; (-) strand; PAM type: NRG; PAM sequence: GAG
  source 1..20: mol_type = other DNA
gtagaatcgcttgaacccgg

SEQ ID NO: 7229 - DNA, 20 bp, synthetic construct
  misc_feature 1..20: note = Description of Artificial Sequence: Synthetic oligonucleotide
  misc_feature 1..20: note = Target: ANGPTL4; (-) strand; PAM type: NRG; PAM sequence: GGG
  source 1..20: mol_type = other DNA
cagtagaatcgcttgaaccc

SEQ ID NO: 7230 - DNA, 20 bp, synthetic construct
  misc_feature 1..20: note = Description of Artificial Sequence: Synthetic oligonucleotide
  misc_feature 1..20: note = Target: ANGPTL4; (-) strand; PAM type: NRG; PAM sequence: CGG
  source 1..20: mol_type = other DNA
gcagtagaatcgcttgaacc

SEQ ID NO: 7231 - DNA, 20 bp, synthetic construct
  misc_feature 1..20: note = Description of Artificial Sequence: Synthetic oligonucleotide
  misc_feature 1..20: note = Target: ANGPTL4; (-) strand; PAM type: NRG; PAM sequence: TAG
  source 1..20: mol_type = other DNA
tactcgggaggctgaggcag

SEQ ID NO: 7232 - DNA, 20 bp, synthetic construct
  misc_feature 1..20: note = Description of Artificial Sequence: Synthetic oligonucleotide
  misc_feature 1..20: note = Target: ANGPTL4; (-) strand; PAM type: NRG; PAM sequence: CAG
  source 1..20: mol_type = other DNA
agctactcgggaggctgagg

SEQ ID NO: 7233 - DNA, 20 bp, synthetic construct
  misc_feature 1..20: note = Description of Artificial Sequence: Synthetic oligonucleotide
  misc_feature 1..20: note = Target: ANGPTL4; (-) strand; PAM type: NRG; PAM sequence: AGG
  source 1..20: mol_type = other DNA
cccagctactcgggaggctg

SEQ ID NO: 7234 - DNA, 20 bp, synthetic construct
  misc_feature 1..20: note = Description of Artificial Sequence: Synthetic oligonucleotide
  misc_feature 1..20: note = Target: ANGPTL4; (-) strand; PAM type: NRG; PAM sequence: GAG
  source 1..20: mol_type = other DNA
tcccagctactcgggaggct

SEQ ID NO: 7235 - DNA, 20 bp, synthetic construct
  misc_feature 1..20: note = Description of Artificial Sequence: Synthetic oligonucleotide
  misc_feature 1..20: note = Target: ANGPTL4; (-) strand; PAM type: NRG; PAM sequence: AGG
  source 1..20: mol_type = other DNA
tgtagtcccagctactcggg

SEQ ID NO: 7236 - DNA, 20 bp, synthetic construct
  misc_feature 1..20: note = Description of Artificial Sequence: Synthetic oligonucleotide
  misc_feature 1..20: note = Target: ANGPTL4; (-) strand; PAM type: NRG; PAM sequence: GAG
  source 1..20: mol_type = other DNA
ctgtagtcccagctactcgg

SEQ ID NO: 7237 - DNA, 20 bp, synthetic construct
  misc_feature 1..20: note = Description of Artificial Sequence: Synthetic oligonucleotide
  misc_feature 1..20: note = Target: ANGPTL4; (-) strand; PAM type: NRG; PAM sequence: GGG
  source 1..20: mol_type = other DNA
gcctgtagtcccagctactc

SEQ ID NO: 7238 - DNA, 20 bp, synthetic construct
  misc_feature 1..20: note = Description of Artificial Sequence: Synthetic oligonucleotide
  misc_feature 1..20: note = Target: ANGPTL4; (-) strand; PAM type: NRG; PAM sequence: CGG
  source 1..20: mol_type = other DNA
cgcctgtagtcccagctact

SEQ ID NO: 7239 - DNA, 20 bp, synthetic construct
  misc_feature 1..20: note = Description of Artificial Sequence: Synthetic oligonucleotide
  misc_feature 1..20: note = Target: ANGPTL4; (-) strand; PAM type: NRG; PAM sequence: CAG
  source 1..20: mol_type = other DNA
gtagtgcgcgcctgtagtcc

SEQ ID NO: 7240 - DNA, 20 bp, synthetic construct
  misc_feature 1..20: note = Description of Artificial Sequence: Synthetic oligonucleotide
  misc_feature 1..20: note = Target: ANGPTL4; (-) strand; PAM type: NRG; PAM sequence: TAG
  source 1..20: mol_type = other DNA
ggcttggtagtgcgcgcctg

SEQ ID NO: 7241 - DNA, 20 bp, synthetic construct
  misc_feature 1..20: note = Description of Artificial Sequence: Synthetic oligonucleotide
  misc_feature 1..20: note = Target: ANGPTL4; (-) strand; PAM type: NRG; PAM sequence: TAG
  source 1..20: mol_type = other DNA
aaaaaattagccgggcttgg

SEQ ID NO: 7242 - DNA, 20 bp, synthetic construct
  misc_feature 1..20: note = Description of Artificial Sequence: Synthetic oligonucleotide
  misc_feature 1..20: note = Target: ANGPTL4; (-) strand; PAM type: NRG; PAM sequence: TGG
  source 1..20: mol_type = other DNA
aaaaaaaaattagccgggct

SEQ ID NO: 7243 - DNA, 20 bp, synthetic construct
  misc_feature 1..20: note = Description of Artificial Sequence: Synthetic oligonucleotide
  misc_feature 1..20: note = Target: ANGPTL4; (-) strand; PAM type: NRG; PAM sequence: GGG
  source 1..20: mol_type = other DNA
aatacaaaaaaaaattagcc

SEQ ID NO: 7244 - DNA, 20 bp, synthetic construct
  misc_feature 1..20: note = Description of Artificial Sequence: Synthetic oligonucleotide
  misc_feature 1..20: note = Target: ANGPTL4; (-) strand; PAM type: NRG; PAM sequence: CGG
  source 1..20: mol_type = other DNA
aaatacaaaaaaaaattagc

SEQ ID NO: 7245 - DNA, 20 bp, synthetic construct
  misc_feature 1..20: note = Description of Artificial Sequence: Synthetic oligonucleotide
  misc_feature 1..20: note = Target: ANGPTL4; (-) strand; PAM type: NRG; PAM sequence: TAG
  source 1..20: mol_type = other DNA
ctaaaaatacaaaaaaaaat

SEQ ID NO: 7246 - DNA, 20 bp, synthetic construct
  misc_feature 1..20: note = Description of Artificial Sequence: Synthetic oligonucleotide
  misc_feature 1..20: note = Target: ANGPTL4; (-) strand; PAM type: NRG; PAM sequence: CAG
  source 1..20: mol_type = other DNA
ccggccaacatcgtgaaacc

SEQ ID NO: 7247 - DNA, 20 bp, synthetic construct
  misc_feature 1..20: note = Description of Artificial Sequence: Synthetic oligonucleotide
  misc_feature 1..20: note = Target: ANGPTL4; (-) strand; PAM type: NRG; PAM sequence: CGG
  source 1..20: mol_type = other DNA
tcaagacttccagaccagcc

SEQ ID NO: 7248 - DNA, 20 bp, synthetic construct
  misc_feature 1..20: note = Description of Artificial Sequence: Synthetic oligonucleotide
  misc_feature 1..20: note = Target: ANGPTL4; (-) strand; PAM type: NRG; PAM sequence: CAG
  source 1..20: mol_type = other DNA
tgaggtcaagacttccagac

SEQ ID NO: 7249 - DNA, 20 bp, synthetic construct
  misc_feature 1..20: note = Description of Artificial Sequence: Synthetic oligonucleotide
  misc_feature 1..20: note = Target: ANGPTL4; (-) strand; PAM type: NRG; PAM sequence: CAG
  source 1..20: mol_type = other DNA
acgcttgaggtcaagacttc

SEQ ID NO: 7250 - DNA, 20 bp, synthetic construct
  misc_feature 1..20: note = Description of Artificial Sequence: Synthetic oligonucleotide
  misc_feature 1..20: note = Target: ANGPTL4; (-) strand; PAM type: NRG; PAM sequence: AAG
  source 1..20: mol_type = other DNA
gagggcgcacgcttgaggtc

SEQ ID NO: 7251 - DNA, 20 bp, synthetic construct
  misc_feature 1..20: note = Description of Artificial Sequence: Synthetic oligonucleotide
  misc_feature 1..20: note = Target: ANGPTL4; (-) strand; PAM type: NRG; PAM sequence: AGG
  source 1..20: mol_type = other DNA
gcggagagggcgcacgcttg

SEQ ID NO: 7252 - DNA, 20 bp, synthetic construct
  misc_feature 1..20: note = Description of Artificial Sequence: Synthetic oligonucleotide
  misc_feature 1..20: note = Target: ANGPTL4; (-) strand; PAM type: NRG; PAM sequence: GAG
  source 1..20: mol_type = other DNA
ggcggagagggcgcacgctt

SEQ ID NO: 7253 - DNA, 20 bp, synthetic construct
  misc_feature 1..20: note = Description of Artificial Sequence: Synthetic oligonucleotide
  misc_feature 1..20: note = Target: ANGPTL4; (-) strand; PAM type: NRG; PAM sequence: GGG
  source 1..20: mol_type = other DNA
gccttacccagtggcggaga

SEQ ID NO: 7254 - DNA, 20 bp, synthetic construct
  misc_feature 1..20: note = Description of Artificial Sequence: Synthetic oligonucleotide
  misc_feature 1..20: note = Target: ANGPTL4; (-) strand; PAM type: NRG; PAM sequence: AGG
  source 1..20: mol_type = other DNA
cgccttacccagtggcggag

SEQ ID NO: 7255 - DNA, 20 bp, synthetic construct
  misc_feature 1..20: note = Description of Artificial Sequence: Synthetic oligonucleotide
  misc_feature 1..20: note = Target: ANGPTL4; (-) strand; PAM type: NRG; PAM sequence: GAG
  source 1..20: mol_type = other DNA
ccgccttacccagtggcgga

SEQ ID NO: 7256 - DNA, 20 bp, synthetic construct
  misc_feature 1..20: note = Description of Artificial Sequence: Synthetic oligonucleotide
  misc_feature 1..20: note = Target: ANGPTL4; (-) strand; PAM type: NRG; PAM sequence: GAG
  source 1..20: mol_type = other DNA
ccccgccttacccagtggcg

SEQ ID NO: 7257 - DNA, 20 bp, synthetic construct
  misc_feature 1..20: note = Description of Artificial Sequence: Synthetic oligonucleotide
  misc_feature 1..20: note = Target: ANGPTL4; (-) strand; PAM type: NRG; PAM sequence: CGG
  source 1..20: mol_type = other DNA
gcccccgccttacccagtgg

SEQ ID NO: 7258 - DNA, 20 bp, synthetic construct
  misc_feature 1..20: note = Description of Artificial Sequence: Synthetic oligonucleotide
  misc_feature 1..20: note = Target: ANGPTL4; (-) strand; PAM type: NRG; PAM sequence: TGG
  source 1..20: mol_type = other DNA
tccgcccccgccttacccag

SEQ ID NO: 7259 - DNA, 20 bp, synthetic construct
  misc_feature 1..20: note = Description of Artificial Sequence: Synthetic oligonucleotide
  misc_feature 1..20: note = Target: ANGPTL4; (-) strand; PAM type: NRG; PAM sequence: CAG
  source 1..20: mol_type = other DNA
tattccgcccccgccttacc

SEQ ID NO: 7260 - DNA, 20 bp, synthetic construct
  misc_feature 1..20: note = Description of Artificial Sequence: Synthetic oligonucleotide
  misc_feature 1..20: note = Target: ANGPTL4; (-) strand; PAM type: NRG; PAM sequence: AAG
  source 1..20: mol_type = other DNA
cgcctctagtgtgaaattgc

SEQ ID NO: 7261 - DNA, 20 bp, synthetic construct
  misc_feature 1..20: note = Description of Artificial Sequence: Synthetic oligonucleotide
  misc_feature 1..20: note = Target: ANGPTL4; (-) strand; PAM type: NRG; PAM sequence: TAG
  source 1..20: mol_type = other DNA
tcccccacggtgcccgcctc

SEQ ID NO: 7262 - DNA, 20 bp, synthetic construct
  misc_feature 1..20: note = Description of Artificial Sequence: Synthetic oligonucleotide
  misc_feature 1..20: note = Target: ANGPTL4; (-) strand; PAM type: NRG; PAM sequence: CGG
  source 1..20: mol_type = other DNA
cgtgactcttctttccccca

SEQ ID NO: 7263 - DNA, 20 bp, synthetic construct
  misc_feature 1..20: note = Description of Artificial Sequence: Synthetic oligonucleotide
  misc_feature 1..20: note = Target: ANGPTL4; (-) strand; PAM type: NRG; PAM sequence: GAG
  source 1..20: mol_type = other DNA
ccttcctctacgaaccgtgg

SEQ ID NO: 7264 - DNA, 20 bp, synthetic construct
  misc_feature 1..20: note = Description of Artificial Sequence: Synthetic oligonucleotide
  misc_feature 1..20: note = Target: ANGPTL4; (-) strand; PAM type: NRG; PAM sequence: GGG
  source 1..20: mol_type = other DNA
ggccttcctctacgaaccgt

SEQ ID NO: 7265 - DNA, 20 bp, synthetic construct
  misc_feature 1..20: note = Description of Artificial Sequence: Synthetic oligonucleotide
  misc_feature 1..20: note = Target: ANGPTL4; (-) strand; PAM type: NRG; PAM sequence: TGG
  source 1..20: mol_type = other DNA
aggccttcctctacgaaccg

SEQ ID NO: 7266 - DNA, 20 bp, synthetic construct
  misc_feature 1..20: note = Description of Artificial Sequence: Synthetic oligonucleotide
  misc_feature 1..20: note = Target: ANGPTL4; (-) strand; PAM type: NRG; PAM sequence: AGG
  source 1..20: mol_type = other DNA
cccccgctccaggctcaggc

SEQ ID NO: 7267 - DNA, 20 bp, synthetic construct
  misc_feature 1..20: note = Description of Artificial Sequence: Synthetic oligonucleotide
  misc_feature 1..20: note = Target: ANGPTL4; (-) strand; PAM type: NRG; PAM sequence: CAG
  source 1..20: mol_type = other DNA
gcccccgctccaggctcagg

SEQ ID NO: 7268 - DNA, 20 bp, synthetic construct
  misc_feature 1..20: note = Description of Artificial Sequence: Synthetic oligonucleotide
  misc_feature 1..20: note = Target: ANGPTL4; (-) strand; PAM type: NRG; PAM sequence: AGG
  source 1..20: mol_type = other DNA
cccgcccccgctccaggctc

SEQ ID NO: 7269 - DNA, 20 bp, synthetic construct
  misc_feature 1..20: note = Description of Artificial Sequence: Synthetic oligonucleotide
  misc_feature 1..20: note = Target: ANGPTL4; (-) strand; PAM type: NRG; PAM sequence: CAG
  source 1..20: mol_type = other DNA
tcccgcccccgctccaggct

SEQ ID NO: 7270 - DNA, 20 bp, synthetic construct
  misc_feature 1..20: note = Description of Artificial Sequence: Synthetic oligonucleotide
  misc_feature 1..20: note = Target: ANGPTL4; (-) strand; PAM type: NRG; PAM sequence: AGG
  source 1..20: mol_type = other DNA
ggctctcccgcccccgctcc

SEQ ID NO: 7271 - DNA, 20 bp, synthetic construct
  misc_feature 1..20: note = Description of Artificial Sequence: Synthetic oligonucleotide
  misc_feature 1..20: note = Target: ANGPTL4; (-) strand; PAM type: NRG; PAM sequence: CAG
  source 1..20: mol_type = other DNA
tggctctcccgcccccgctc

SEQ ID NO: 7272 - DNA, 20 bp, synthetic construct
  misc_feature 1..20: note = Description of Artificial Sequence: Synthetic oligonucleotide
  misc_feature 1..20: note = Target: ANGPTL4; (-) strand; PAM type: NRG; PAM sequence: TGG
  source 1..20: mol_type = other DNA
gccctggggatgccaaactg

SEQ ID NO: 7273 - DNA, 20 bp, synthetic construct
  misc_feature 1..20: note = Description of Artificial Sequence: Synthetic oligonucleotide
  misc_feature 1..20: note = Target: ANGPTL4; (-) strand; PAM type: NRG; PAM sequence: GGG
  source 1..20: mol_type = other DNA
gcgggctgggggatgccctg

SEQ ID NO: 7274 - DNA, 20 bp, synthetic construct
  misc_feature 1..20: note = Description of Artificial Sequence: Synthetic oligonucleotide
  misc_feature 1..20: note = Target: ANGPTL4; (-) strand; PAM type: NRG; PAM sequence: GGG
  source 1..20: mol_type = other DNA
tgcgggctgggggatgccct

SEQ ID NO: 7275 - DNA, 20 bp, synthetic construct
  misc_feature 1..20: note = Description of Artificial Sequence: Synthetic oligonucleotide
  misc_feature 1..20: note = Target: ANGPTL4; (-) strand; PAM type: NRG; PAM sequence: TGG
  source 1..20: mol_type = other DNA
ctgcgggctgggggatgccc

SEQ ID NO: 7276 - DNA, 20 bp, synthetic construct
  misc_feature 1..20: note = Description of Artificial Sequence: Synthetic oligonucleotide
  misc_feature 1..20: note = Target: ANGPTL4; (-) strand; PAM type: NRG; PAM sequence: GGG
  source 1..20: mol_type = other DNA
cctggtagtctgcgggctgg

SEQ ID NO: 7277 - DNA, 20 bp, synthetic construct
  misc_feature 1..20: note = Description of Artificial Sequence: Synthetic oligonucleotide
  misc_feature 1..20: note = Target: ANGPTL4; (-) strand; PAM type: NRG; PAM sequence: GGG
  source 1..20: mol_type = other DNA
gcctggtagtctgcgggctg

SEQ ID NO: 7278 - DNA, 20 bp, synthetic construct
  misc_feature 1..20: note = Description of Artificial Sequence: Synthetic oligonucleotide
  misc_feature 1..20: note = Target: ANGPTL4; (-) strand; PAM type: NRG; PAM sequence: GGG
  source 1..20: mol_type = other DNA
ggcctggtagtctgcgggct

SEQ ID NO: 7279 - DNA, 20 bp, synthetic construct
  misc_feature 1..20: note = Description of Artificial Sequence: Synthetic oligonucleotide
  misc_feature 1..20: note = Target: ANGPTL4; (-) strand; PAM type: NRG; PAM sequence: TGG
  source 1..20: mol_type = other DNA
aggcctggtagtctgcgggc

SEQ ID NO: 7280 - DNA, 20 bp, synthetic construct
  misc_feature 1..20: note = Description of Artificial Sequence: Synthetic oligonucleotide
  misc_feature 1..20: note = Target: ANGPTL4; (-) strand; PAM type: NRG; PAM sequence: GGG
  source 1..20: mol_type = other DNA
ctggaggcctggtagtctgc

SEQ ID NO: 7281 - DNA, 20 bp, synthetic construct
  misc_feature 1..20: note = Description of Artificial Sequence: Synthetic oligonucleotide
  misc_feature 1..20: note = Target: ANGPTL4; (-) strand; PAM type: NRG; PAM sequence: CGG
  source 1..20: mol_type = other DNA
tctggaggcctggtagtctg

SEQ ID NO: 7282 - DNA, 20 bp, synthetic construct
  misc_feature 1..20: note = Description of Artificial Sequence: Synthetic oligonucleotide
  misc_feature 1..20: note = Target: ANGPTL4; (-) strand; PAM type: NRG; PAM sequence: TAG
  source 1..20: mol_type = other DNA
cctgtcctctggaggcctgg

SEQ ID NO: 7283 - DNA, 20 bp, synthetic construct
  misc_feature 1..20: note = Description of Artificial Sequence: Synthetic oligonucleotide
  misc_feature 1..20: note = Target: ANGPTL4; (-) strand; PAM type: NRG; PAM sequence: TGG
  source 1..20: mol_type = other DNA
ggtcctgtcctctggaggcc

SEQ ID NO: 7284 - DNA, 20 bp, synthetic construct
  misc_feature 1..20: note = Description of Artificial Sequence: Synthetic oligonucleotide
  misc_feature 1..20: note = Target: ANGPTL4; (-) strand; PAM type: NRG; PAM sequence: AGG
  source 1..20: mol_type = other DNA
ggtggggtcctgtcctctgg

SEQ ID NO: 7285 - DNA, 20 bp, synthetic construct
  misc_feature 1..20: note = Description of Artificial Sequence: Synthetic oligonucleotide
  misc_feature 1..20: note = Target: ANGPTL4; (-) strand; PAM type: NRG; PAM sequence: GAG
  source 1..20: mol_type = other DNA
gggtggggtcctgtcctctg

SEQ ID NO: 7286 - DNA, 20 bp, synthetic construct
  misc_feature 1..20: note = Description of Artificial Sequence: Synthetic oligonucleotide
  misc_feature 1..20: note = Target: ANGPTL4; (-) strand; PAM type: NRG; PAM sequence: TGG
  source 1..20: mol_type = other DNA
gggggtggggtcctgtcctc

SEQ ID NO: 7287 - DNA, 20 bp, synthetic construct
  misc_feature 1..20: note = Description of Artificial Sequence: Synthetic oligonucleotide
  misc_feature 1..20: note = Target: ANGPTL4; (-) strand; PAM type: NRG; PAM sequence: GGG
  source 1..20: mol_type = other DNA
agggcctgtggccgggggtg

SEQ ID NO: 7288 - DNA, 20 bp, synthetic construct
  misc_feature 1..20: note = Description of Artificial Sequence: Synthetic oligonucleotide
  misc_feature 1..20: note = Target: ANGPTL4; (-) strand; PAM type: NRG; PAM sequence: GGG
  source 1..20: mol_type = other DNA
cagggcctgtggccgggggt

SEQ ID NO: 7289 - DNA, 20 bp, synthetic construct
  misc_feature 1..20: note = Description of Artificial Sequence: Synthetic oligonucleotide
  misc_feature 1..20: note = Target: ANGPTL4; (-) strand; PAM type: NRG; PAM sequence: TGG
  source 1..20: mol_type = other DNA
gcagggcctgtggccggggg

SEQ ID NO: 7290 - DNA, 20 bp, synthetic construct
  misc_feature 1..20: note = Description of Artificial Sequence: Synthetic oligonucleotide
  misc_feature 1..20: note = Target: ANGPTL4; (-) strand; PAM type: NRG; PAM sequence: GGG
  source 1..20: mol_type = other DNA
ggggcagggcctgtggccgg

SEQ ID NO: 7291 - DNA, 20 bp, synthetic construct
  misc_feature 1..20: note = Description of Artificial Sequence: Synthetic oligonucleotide
  misc_feature 1..20: note = Target: ANGPTL4; (-) strand; PAM type: NRG; PAM sequence: GGG
  source 1..20: mol_type = other DNA
gggggcagggcctgtggccg

SEQ ID NO: 7292 - DNA, 20 bp, synthetic construct
  misc_feature 1..20: note = Description of Artificial Sequence: Synthetic oligonucleotide
  misc_feature 1..20: note = Target: ANGPTL4; (-) strand; PAM type: NRG; PAM sequence: GGG
  source 1..20: mol_type = other DNA
tgggggcagggcctgtggcc

SEQ ID NO: 7293 - DNA, 20 bp, synthetic construct
  misc_feature 1..20: note = Description of Artificial Sequence: Synthetic oligonucleotide
  misc_feature 1..20: note = Target: ANGPTL4; (-) strand; PAM type: NRG; PAM sequence: CGG
  source 1..20: mol_type = other DNA
ctgggggcagggcctgtggc

(The sequence listing continues in the following parts.)